(19) United States
(12) Patent Application Publication
(10) Pub. No.: US 2008/0234213 A1
(43) Pub. Date: Sep. 25, 2008

(54) Oncogenic regulatory RNAs for diagnostics and therapeutics

(76) Inventors: Matthias Wabl, San Francisco, CA (US); Bruce Wang, Mountain View, CA (US)

Correspondence Address: PERKINS COIE LLP, P.O. BOX 1208, SEATTLE, WA, 98111-1208, US

(21) Appl. No.: 11/515,263

(22) Filed: Sep. 1, 2006

Related U.S. Application Data
(60) Provisional application No. 60/713,674, filed on Sep. 2, 2005.

(51) Int. Cl. A61K 31/70; C12Q 1/68; C07H 21/00; A61P 43/00

(52) U.S. Cl. 514/44; 435/6; 536/23.1

(57) ABSTRACT

A method of identifying regulatory RNAs, including miRNAs, using insertional mutagenesis to generate tumors in mice and determining the human orthologs is disclosed. Further, specific miRNA sequences are identified. The causal nature and expression patterns of these regulatory RNAs and miRNAs in human tumors demonstrate their utility in diagnosis and therapy of cancer. Furthermore, a set of co-mutations that act in conjunction with miRNAs in tumor formation is disclosed.

[0001] This application claims the benefit of U.S. Provisional Application Ser. No. 60/713,674, filed Sep. 2, 2005, which is incorporated herein by reference.

### TABLES 1A, 1B, 1C, 2A AND 1B

[0002] The present application incorporates by reference Tables 1A, 1 B, 2A, and 2B contained on one compact disc filed concurrently herewith, which compact disc is labeled “Copy 1-Tables 1A-2B”. The details of Tables 1A-2B are further described later in this disclosure. This compact disc was created on 2 Sep. 2005 and is 680 MB in size. The CD contains three files labeled Table 1A.doc (88 KB), Table 1B.doc (5721 KB), and Table 2A-2B.doc (223 KB). These files are expressly incorporated herein by reference.

### I. REFERENCES

[0003] The following references are cited below in support of the background of the invention or methods employed in practicing the invention.
[0004] 1. McManus, Immunity, 21:747-756 (2004).
[0005] 2. Bartel, Cell, 116:281-297 (2004).
[0006] 3. Cai et al., Rna, 10:1957-1966 (2004).
[0007] 4. Lee et al., Embo J, 23:4051-4060 (2004).
[0008] 5. Lee et al., Nature, 425:415-419 (2003).
[0009] 6. Bernstein et al., Nature, 409:363-366 (2001).
[0010] 7. Calin et al., Proc Natl Acad Sci USA, 99:15524-15529 (2002).
[0011] 8. Calin et al., Proc Natl Acad Sci USA, 101:2999-3004 (2004).
[0012] 9. Calin et al., Proc Natl Acad Sci USA, 101:11755-11760 (2004).
[0013] 10. Griffiths-Jones, Nucleic Acids Res, 32:D109-D111 (2004).
[0014] 11. Bentwich et al., Nat Genet, 37:766-770 (2005).
[0015] 12. Ota et al., Cancer Res, 64:3087-3095 (2004).
[0016] 13. He et al., Nature, 435:828-833 (2005).
[0017] 14. Akagi et al., Nucleic Acids Res, 32:D523-D527 (2004).
[0018] 15. Collier et al., Nature, 436:272-276 (2005).
[0019] 16. Dupuy et al., Nature, 436:221-226 (2005).
[0020] 17. Suzuki et al., Nat Genet, 32:166-174 (2002).
[0021] 18. Lund et al., Nat Genet, 32:160-165 (2002).
[0022] 19. Hwang et al., Proc Natl Acad Sci USA, 99:11293-11298 (2002).
[0023] 20. Mikkers et al., Nat Genet, 32:153-159 (2002).
[0024] 21. Li et al., Nat Genet, 23:348-353 (1999).
[0025] 22. Lovmand et al., J Virol, 72:5745-5756 (1998).
[0026] 23. van Lohuizen et al., Cell, 65:737-752 (1991).
[0027] 24. Nusse et al., Cell, 31:99-109 (1982).
[0028] 25. Nusse et al., Nature, 307:131-136 (1984).
[0029] 26. Berezikov et al., Cell, 120:21-24 (2005).
[0030] 27. Tanzer et al., J Mol Biol, 339:327-335 (2004).
[0031] 28. Lim et al., Science, 299:1540 (2003).
[0032] 29. Xie et al., Nature, 434:338-345 (2005).
[0033] 30. Weng et al., Science, 306:269-271 (2004).
[0034] 31. Justice et al., Mamm Genome, 11:484-488 (2000).
[0035] 32. Hallberg et al., J Virol, 65:4177-4181 (1991).
[0036] 33. Nielsen et al., J Virol, 70:5893-5901 (1996).
[0037] 34. Sørensen et al. J Virol, 70:4063-4070 (1996).
[0038] 35. Kim et al., J Virol, 77:2056-2062 (2003).
[0039] 36. Walther et al. Genome Res, 11:875-888 (2001).
[0040] 37. Hofacker et al., Chemie, 125:167-148 (1994).
[0041] 38. Zuker et al., Nucleic Acids Res, 9:133-148 (1981).
[0042] 39. McCaskill, Biopolymers, 29:1105-1119 (1990).
[0043] 40. Shtivelman et al., Proc Natl Acad Sci USA, 86: 3257-3260, (1989).
[0044] 41. Arya et al., Expert Rev Mol Diagn: 5: 209-219 (2005).

### II. BACKGROUND

[0045] MicroRNAs (miRNAs) are small, non peptide-coding RNAs that regulate gene expression in a variety of physiological and developmental processes^{1,2}. In the biogenesis of miRNAs, primary miRNA transcripts (pri-miRNAs) are first generated by RNA polymerase II^{3,4} and are then further processed like messenger RNA transcripts with the addition of a 5′ cap structure and poly A tail. Because of this, the pri-miRNA transcripts can be found in standard cDNA libraries.

[0046] The primary transcript can be over 3 kb long and adopt one or several stem-loop structures which are subsequently processed by the enzymes Drosha⁵ and/or Dicer⁶ to generate mature miRNA. The mature miRNAs are generally 18 to 24 nucleotides long and are incorporated into the RNA-induced silencing complex (RISC), which inhibits translation by binding to similar, but not identical sequences, of the 3′ untranslated region of mRNA. If the interaction is perfectly complementary, the miRNA may act as small inhibitory RNA (siRNA) leading to the degradation of the target mRNA. Often, a pri-miRNA transcript is polycistronic, i.e., one pri-miRNA transcript yields several different miRNAs. Further, miRNAs can be found within primary gene transcripts.

[0047] Dysregulated miRNA expression has been postulated to contribute to lymphoma formation in humans⁷⁻⁹. The miRNA registry¹⁰ currently contains over 200 examples that are shared between humans and mice; another 89 miRNAs are found only in primates¹¹. Of these, one miRNA cluster has been demonstrated to be overexpressed in human B cell lymphomas¹², and enforced overexpression of this cluster in hematopoetic stem cells from lymphoma-prone mice accelerated tumor development¹³.

### III. SUMMARY

[0048] The invention includes, in one aspect, a method for positively identifying a human miRNA sequence associated with a detectable disease state in humans, such as a cancer. The method includes the steps of (i) identifying, from each of at least two animals having a detectable disease state, such as a cancer, produced by insertional mutation, the sequence of a genomic segment that is common to both animals, and that contains an insertional mutation, (ii) identifying transcription units contained within the animal genome that are within about 200 Kbases, in either an upstream or downstream direction, of the sequenced genomic segment, (iii) identifying human genomic transcription units that are orthologous to the transcription units identified in step (ii), and (iv) for each human transcription unit identified in step (iii), employing a bioinformatics program capable of identifying putative miRNA sequences, to determine whether that transcription unit identified in step (iii) contains a putative miRNA sequence, in which case the putative miRNA sequence is positively identified as a human miRNA.

[0049] The detectable disease state may be a cancer, such as lymphoma, wherein step (i) of the method is carried out by isolating the genomic segment from each of at least two animals having a detectable cancer, such as lymphoma. The insertional mutation in step (i) may be a viral insertional mutation.

[0050] The sequence identified in step (iii) may be contained in a portion of a pri-miRNA that is outside the corresponding mature miRNA (fully processed miRNA), or it may contained completely within the mature miRNA, or it may be contained in both portions of pri-miRNA transcript.

[0051] In another aspect, the invention includes an assay kit for diagnosing the presence or risk of cancer in a human subject. The kit includes a first reagent designed to react specifically with a human pri-miRNA and/or mature miRNA sequence identified in accordance with the method of claim 2, to form a first detectable reaction product, and an indicator guide that indicates how the presence or amount of the reaction product correlates with the presence or risk of the disease state in a human subject.

[0052] The first reagent may be one of: (a) PCR reagents for detecting the presence or absence of the genomic sequence, or (b) oligonucleotide binding reagents for detecting the presence of absence of the genomic sequence. For use in diagnosing the presence of risk of a cancer in a human subject, step (i) in the method is carried out by isolating the genomic from each of at least two animals having a detectable cancer, such as a lymphoma. The kit's first reagent may be designed to react specifically with a mature human miRNA sequence identified in accordance with the method of claim 1.

[0053] Also disclosed is a method for treating a cancer in a human subject, by administering to the subject, a therapeutically effective amount of a compound capable of binding specifically to a mature human prim-miRNA and/or a mature miRNA sequence identified in accordance with the above method.

[0054] Further disclosed is an isolated mature human miRNA sequence selected from the group consisting of SEQ ID NOS: 1-55.

[0055] In a more general aspect of the above method, the invention provides a method for identifying a human regulatory RNA (regRNA) sequence associated with a detectable disease state in humans. The method includes the steps of: (i) identifying, from each of at least two animals having a detectable disease state produced by insertional mutation, the sequence of a genomic segment that is common to both animals, and that contains an insertional mutation, (ii) identifying transcription units contained within the animal genome that are within about 200 Kbases, in either an upstream or downstream direction, of the sequenced genomic segment, (iii) identifying human genomic transcription units that are orthologous to the transcription units identified in step (ii), (iv) for each human transcription unit identified in step (iii), using a bioinformatics program to determine whether that transcription unit is a non-coding RNA sequence, and (v) if the homologous human genomic sequence from step (iv) is a non-coding RNA sequence, classifying the sequence as a human regRNA sequence associated with the detectable disease state.

[0056] The insertional mutation in step (i) may be a viral insertional mutation. The detectable disease state may be a cancer, wherein step (i) is carried out by isolating the genomic segment from each of at least two animals having a detectable cancer.

[0057] The human regRNA sequence may be an miRNA, wherein step (iv) includes employing a bioinformatics program capable of identifying putative miRNA sequences to determine whether that transcription unit identified in step (iii) contains a putative miRNA sequence, in which case the putative miRNA sequence is positively identified as a human miRNA.

[0058] The method may further include utilizing the identified human regRNA sequence for diagnostic or therapeutic purposes.

[0059] Also disclosed is an assay kit for diagnosing the presence or risk of cancer in a human subject. The kit includes a first reagent designed to react specifically with a human regulatory RNA (regRNA) sequence identified in accordance with the method of claim 15, to form a first detectable reaction product, and an indicator guide that indicates how the presence or amount of the reaction product correlates with the presence or risk of the disease state in a human subject.

[0060] As above, the first reagent may be one of: (a) PCR reagents for detecting the presence or absence of the genomic sequence, or (ii) oligonucleotide binding reagents for detecting the presence of absence of the genomic sequence.

[0061] In still another aspect, the invention includes a novel regulatory RNA (regRNA), in addition to the novel miRNA identified above, which when overexpressed or disrupted contribute to the formation of tumors. The human and mouse sequences for each regRNA in FASTA format are listed in Table 1B along with the identifying cluster ID. SEQ ID NO:1-55 are mature human miRNAs. SEQ ID NO: 56-110 are mature mouse miRNAs. SEQ ID NO: 111-165 are human pre-miRNAs. SEQ ID NO:166-220 are mouse pre-miRNAs. SEQ ID NO: 221-500 are human pri-miRNAs. SEQ ID NO: 501-822 are mouse pri-miRNAs.

[0062] The regRNA disclosed can regulate oncogenes and/or suppressors or actually be an oncogene and/or suppressor itself. The novel regRNA sequences may be used in diagnostic applications, for detecting the presence and/or risk of a given cancer type, or in therapeutics, e.g., for treating that cancer

[0063] These and other aspects, objects, advantages, and features of the invention will become apparent to those persons skilled in the art upon reading the details of the invention as more fully described below.

### IV. BRIEF DESCRIPTION OF THE DRAWINGS

[0064] The invention is best understood from the following detailed description when read in conjunction with the accompanying drawings. It is emphasized that, according to common practice, the various features of the drawings are not to-scale. On the contrary, the dimensions of the various features are arbitrarily expanded or reduced for clarity. Included in the drawings are the following figures:

[0065] FIGS. 1A and 1B are customized screen prints of the UCSC genome web site browser (March 2005 version of the mm6 gene assembly), looking at the mir-17-20 locus (FIG. 1A); and at the mir-106a-92 locus (FIG. 1B). Mir-17-20 is the mouse cluster orthologous to the human mir-17-92 cluster. Mir-19b-1 only weakly maps to the mouse genome at the indicated location. Top, base position at chromosomes 14 and X, respectively. The handle bars below “Picobella_SL3” represent the retroviral insertions into the mir-17-20 locus (FIG. 1A) or the mir-106a-92 locus (FIG. 1B) in 29 or in 33 independent tumors, respectively. The bars below “miRNA”, are miRNAs found in the miRNA registry 10 (//www.sanger.ac.ukl/Software/Rfam/mirna/); the bars below “miRNA predicted” represent miRNAs predicted by use of the method herein. The exon/intron structure of mRNAs and ESTs of the mouse is shown below the predicted miRNA. Sequence conservation between mouse and various other species (rat, human, dog, cow, opossum, chicken, tropicalis, zebrafish, and tetraodon) is also shown.

[0066] FIGS. 2A and 2B are each a customized screen print of the UCSC genome web site browser, looking at two loci with predicted miRNA located on chromosomes 8 and 12, (FIGS. 2A and 2B, respectively). For FIG. 2A, the two handle bars below “Picobella_SL3” (1490S-206-1 and 1163S-137-14), represent retroviral insertions into the locus recovered in 2 independent tumors. Known miRNAs listed in the miRNAs registry 10 are not found in this locus; the 2 bars below “miRNA predicted” represent miRNAs predicted by use of the method herein. Two retroviral integrations (S3_{—}306D and S5_{—}030A1) represent independent tumors as listed in the RTCGD database 14 (Retrovirus Tagged Cancer Gene Database; //RTCGD.ncifcrf.gov). In FIG. 2B, the handle bars under “Picobella_SL3” represent retroviral insertions into the locus recovered in 8 independent tumors. The bars for “miRNA predicted” are miRNAs predicted by the method herein. Known miRNAs listed in the miRNAs registry 10 are not found in this locus. The AK019999, AI1060616, BE848409, and BB634791 transcripts are thymus-specific. Sequence conservation between mouse and various other species is also shown.

[0067] FIGS. 3A and 3B are each a customized screen print of the UCSC genome web site browser, looking at two loci with regulatory RNA. The top of the figures shows the base position at chromosomes 15 and 1 (FIGS. 3A and 3B, respectively). The handle bars below “Picobella_SL3” represent the retroviral insertions recovered by the present method in 7 independent tumors (chr. 15, FIG. 3A); and 5 independent tumors (chr 1, FIG. 3B). Arrows within handle bars denote transcriptional direction. The exon/intron structure of mRNAs and ESTs of the mouse are shown below the predicted miRNAs. Transcripts AK040104 and AK041852 (FIG. 3A) and BY097680 (FIG. 3B) are thymus-specific. Sequence conservation between mouse and various other species is shown at the bottom.

[0068] FIG. 4A is a table showing tumors assayed for the region containing mmu-mir-106a (FIG. 1B). Retroviral insertion site locations (August 2005 version of the mm7 genome assembly) are notated by the basepair located directly after the insertion. Orientation of the retrovirus is indicated by “+++” for directionality of left to right and by “−−−” for directionality of right to left on the chromosome.

[0069] FIG. 4B is a graph of the relative expression of AY940616 as measured by quantitative PCR. Tumors with integrations located upstream of AY940616 (the predicted primary transcript for the mmu-mir-106a-92 locus) were assayed by qPCR using a dual labeled probe designed to AY940616. Integration sites assayed were located within (i) ˜3 kb, (ii) ˜14 kb, and (iii) ˜18 kb upstream of AY940616. Tumors with no integrations in this region (iv) along with cDNA from a normal mouse spleen were run as controls. Beta-actin (ACTB) was used as the endogenous reference gene and 1735S, one of the tumor controls, was used as the calibrator sample in the calculation of 2^{-ΔΔCt} values. All 2^{-ΔΔCt} values were normalized such that the average of the tumor controls was set to 1.

[0070] FIG. 4C is a graph of the relative expression levels of mmu-mir-106a by quantitative PCR. Tumors with integrations located upstream of the mmu-mir-106a-92 locus were assayed by qPCR using a reverse transcriptase primer/dual labeled probe system designed to mmu-mir-106a. Integration sites assayed were located within (i) ˜3 kb, (ii) ˜14 kb, and (iii) ˜18 kb upstream of the miRNA cluster. Tumors with no integrations (iv) in this region were run as controls. Concentrations of mmu-mir-106a were determined using a standards curve generated with a synthetic mmu-mir-106a RNA oligo. Concentrations were then normalized by the average of the tumor controls to calculate relative expression levels.

[0071] FIG. 5A is a map of the region containing AK030859. The genomic organization of retroviral insertion sites in the region containing AK030859 is shown by a screen capture of the UCSC genome website browser (August 2005 version of the mm7 genome assembly). Insertion sites are drawn as vertical handlebars below “PicoSL3”.

[0072] FIG. 5B is a table showing tumors assayed for the region containing AK030859. Tumor locations and orientations are notated as in FIG. 4A.

[0073] FIG. 5C is a graph showing the relative expression of AK030859 as measured by quantitative PCR. Tumors with integrations located in the region encompassing AK030859 were assayed by SYBR qPCR for the 5′ end of AK030859. Integration sites assayed were located (i) up to 1.2 kb upstream, (ii) within, and (iii) up to 52 kb downstream of AK030859. Tumors with no integrations in this region (iv) were run as controls. Beta-actin (ACTB) was used as the endogenous reference gene and 1484S, one of the tumor controls, was used as the calibrator sample in the calculation of 2^{-ΔΔCt} values. All 2^{-ΔΔCt} values were normalized such that the average of the tumor controls was set to 1.

[0074] FIG. 6A is a map of region containing AK040062. The genomic organization of retroviral insertion sites in the region containing AK040062 is shown by a screen capture of the UCSC genome website browser (August 2005 version of the mm7 genome assembly). Insertion sites are drawn as vertical handlebars below “PicoSL3”.

[0075] FIG. 6B is a table showing the tumors assayed for the region containing AK040062. Tumor locations and orientations are notated as in FIG. 4A.

[0076] FIG. 6C is a graph showing the relative expression of AK040062 exon 2 as measured by quantitative PCR. Tumors with integrations located in the region encompassing AK040062 were assayed by SYBR qPCR for AK040062 exon 2. Integration sites assayed were located (i) up to 6 kb upstream, (ii) within intron 1, (iii) within intron 2, and (iv) up to 16 kb downstream of AK040062. Tumors with no integrations in this region (v) along with normal mouse spleen samples (vi) were run as controls. Data was treated as previously mentioned for AK030859 except 3412S was used at the calibrator sample.

[0077] FIG. 7A is a map of the region containing AK037419. The genomic organization of retroviral insertion sites in the region containing AK037419 is shown by a screen capture of the UCSC genome website browser (August 2005 version of the mm7 genome assembly). Insertion sites are drawn as vertical handlebars below “PicoSL3”.

[0078] FIG. 7B is a table showing the tumors assayed for the region containing AK037419. Tumor locations and orientations are notated as in FIG. 4A.

[0079] FIG. 7C is a graph showing the relative expression of AK037419 exon3 as measured by quantitative PCR. Tumors with integrations located in the region encompassing AK037419 were assayed by SYBR qPCR for AK037419 exon 3. Integration sites assayed were located (i) up to 13 kb upstream, (ii) within intron 1, (iii) within intron 2, and (iv) within exon 3 of AK037419. Tumors with no integrations in this region (v) along with normal mouse spleen and thymus samples (vi) were run as controls. Data was treated as previously mentioned for AK030859 except 1438S was used as the calibrator sample.

[0080] FIG. 8 is a graph showing relative expression of PVT1 exon 1 in matched human normal and tumor prostate RNA samples. Matched human normal and tumor prostate RNA samples were assayed by SYBR qPCR for PVT1 exon 1. Beta-actin (ACTB) was used as the endogenous reference gene and each normal RNA was used as a calibrator for its matched tumor RNA in calculating 2^{-ΔΔCt} values.

[0081] Table 1A includes a seven page list of regulatory RNA clusters. Tumors with proviral integrations, representative ESTs, and known and predicted miRNAs found at each loci are indicated. Chromosomal locations are from version mm6 of the mouse genome and the hg17 version of the human genome at the UCSC Genome Bioinformatics website (genome.ucsc.edu). “Known miRNAs” refers to miRNAs found in the miRNA registry (August 2005); “Predicted miRNAs” refers to miRNAs predicted as described in the text. Since the miRNA cluster mir-17-92 has been previously described as a possible oncogene 13, the mir-17-20 and mir-17-92 sequences are not included in Tables 1B. The human and mouse sequences for each regRNA in FASTA format are listed in Table 1B along with the identifying cluster ID. SEQ ID NO:1-55 are mature human miRNAs. SEQ ID NO: 56-110 are mature mouse miRNAs. SEQ ID NO: 111-165 are human pre-miRNAs. SEQ ID NO:166-220 are mouse pre-miRNAs. SEQ ID NO: 221-500 are human regRNAs. SEQ ID NO: 501-822 are mouse regRNAs. SEQ ID NO: 14, 26, 37-39, 41-43 are known human miRNAs that were not previously known to be associated with cancer.

[0082] Tables 2A and 2B are two and three page lists, respectively, of miRNAs, regRNA, ESTs, or genes, co-mutated with the mir-17-20 locus (Table 2A) or the mir-106a-92 locus (2B). The predicted miRNAs are in bold. Co-mutated regions in common between the mir-17-20 and the mir-106a-92 loci are indicated by asterisks (**). Chromosomal locations are from version mm6 of the mouse genome at the UCSC Genome Bioinformatics website (genome.ucsc.edu). “Indeterminate” refers to regions where the miRNA, EST, or gene could not be determined. “Desert” regions are those which appear to be void of miRNAs, ESTs, or genes.

### V. DETAILED DESCRIPTION

### A. Definitions

[0083] The following terms have the definitions given below, unless otherwise indicated in the specification.

[0084] “Regulatory RNA” or “regRNA” generally refers to non-protein encoding RNA molecules (including miRNA) that regulate the expression of genes.

[0085] “microRNA” or “miRNA” generally refer to ˜18-24-mer RNAs that regulate the expression of genes by binding to the 3′-untranslated regions (3′-UTR) of specific mRNAs. According to standard nomenclature, a pre-processed miRNA transcript prior is referred to an pri-miRNA. Enzymatic cleavage of pri-miRNA in the nuclear compartment by Drosha yields a pre-miRNA, which is further processed by Dicer in the cytoplasmic compartment in form mature miRNA. “miRNA” may be used herein to refer to pri-miRNA, pre-miRNA or mature miRNA, and the distinction, if any, will be understood from the context in which it is used.

[0086] “Stringent conditions” refers to a procedure including a stringent wash such as with 0.1% saline sodium citrate, and 0.1% sodium dodecyl sulfate (0.1% SSC, 0.1% SDS) at 65° C. Appropriate stringent conditions are further described in Sambrook et al., Molecular Cloning, Cold Spring Harbor Laboratory Press, New York, 1989.

[0087] As used herein, a nucleotide or RNA sequence “specifically hybridizes” to a sequence under physiological conditions, with a Tm substantially greater than 37° C., preferably at least 50° C., and typically 60° C., 80° C. or higher. Such hybridization preferably corresponds to stringent hybridization conditions, selected to be about 10° C., and preferably about 50° C. lower than the thermal melting point (T[m]) for the specific sequence at a defined ionic strength and pH. At a given ionic strength and pH, the T[m] is the temperature at which 50% of a target sequence hybridizes to a complementary polynucleotide.

[0088] Polynucleotides are described as “complementary” to one another when hybridization occurs in an antiparallel configuration between two single-stranded sequences. Complementarity (the degree that one polynucleotide is complementary with another) is quantifiable in terms of the proportion of bases in opposing strands that are expected to form hydrogen bonds with each other, according to generally accepted base-pairing rules.

[0089] The term “overexpressed” refers to a range of expression of a protein which is greater than that generally observed for a given type of cells.

[0090] The term “insertional mutation” refers to a mutation that is introduced into a genome by insertion of an exogenous sequence or an endogenous sequence. Such exogenous and endogenous sequences may be, for example, either viral or transposon-based. An insertional mutation may enhance the transcription of one or more coding or non-coding genes located within about 200 Kbases of the mutation.

[0091] The term “orthologous sequence” refers to a sequence having a direct evolutionary counterpart derived from a common ancestor by vertical descent; and, as a consequence, having conserved function to a high degree of likelihood.

[0092] A “bioinformatics program” refers to computer program designed to carry out one or more sequence analysis functions on database sequences. These functions may include sequence alignment, recognition of regions capable of forming secondary structure, recognition of various gene transcription and/or translation control sequences, and identification of one or many possible different classes of genomic sequences, including coding sequences in general, and coding sequences for particular types of proteins, non-coding gene sequences, transcription splice sites, secondary structure sites, identification of genes for various cellular RNAs, and recognition of orthologous genes from different organisms.

[0093] A “transcriptional unit” refers to a coding or non-coding gene, or the transcript produced thereby, and may be identified, for example, by the presence of a polyadenylation site on the corresponding processed transcript.

### B. Methods of Identifying regRNA

[0094] Regulatory RNA and miRNA sequences that contribute to tumor formation are described and disclosed. These regRNA and miRNA sequences were identified in mice, and were subsequently confirmed in humans. These sequences were identified by the following methods.

[0095] A retrovirus that induces tumors was used to identify 322 loci encoding regRNAs, many of which are expressed only in thymocytes. Of these loci, 29 are predicted by current algorithms to encode miRNA, and four are confirmed miRNA polycistrons listed in the miRNA registry. miRNA overexpression was confirmed for several tumors containing nearby integration sites predicted to activate transcription. These results (a) substantially increase the number of known miRNAs and (b) identify them as being oncogenic when dysregulated in T cells.

[0096] Because the expression of a large number of miRNAs is dysregulated in lymphomas^{8,9}, it seemed likely that many more miRNAs than were previously known act as oncogenes or tumor suppressor genes. The present method defines oncogenic miRNAs and other regRNAs in a high throughput manner using proviral tagging. Although viruses have not yet been implicated as a major cause of cancers in humans, research using tumor viruses has led to the discovery of many oncogenes and protooncogenes. In proviral tagging methods, mice are infected with a retrovirus that does not contain an oncogene (e.g., murine leukemia virus, MLV, or murine mammary tumor virus, MMTV). Recently, the host range of this approach has been broadened by the use of a transposon^{15,16}.

[0097] During retroviral infection, the virus integrates into the cellular genome and inserts its DNA near or within genes, which leads to various outcomes:

[0098] (i) The insertion site is too far away from a protooncogene and thus does not activate it. In this case, there will be no selection for that cell.

[0099] (ii) The provirus inserts within 200 kb of a protooncogene, but not within the gene (type 1). Here, either the viral promoter or the viral enhancer increases the expression level of the protooncogene.

[0100] (iii) The provirus inserts within a gene, destroying or altering its function (type 2).

[0101] There will be no selection for a cell that contains either type 1 or type 2 insertion events in a gene that is not a protooncogene or tumor suppressor gene. If integration results in the formation of a tumor, genes adjacent to the integration site can be identified, and classified as either protooncogenes or tumor suppressor genes. This method has been used to identify many new protooncogenes as well as to confirm already known protooncogenes discovered by virtue of their homology to viral oncogenes¹⁷⁻²⁵. A tumor suppressor may be scored if a retrovirus lands within a gene and truncates or destroys it. In these cases, the suppressor may be haplo-insufficient, or alternatively, the mutation on the other allele is provided spontaneously by the mouse. The integration event may also lead to more complex consequences, such as a dominant negative effect of the truncated gene product or the transcription of anti-sense or miRNA.

[0102] Because the mechanics of transcription of pri-miRNA and regular nuclear gene transcripts are the same, it was reasoned that retroviral insertions near or into these transcribed regions ought to have similar effects. Whereas to date, all mammalian miRNAs have been discovered by computational methods, the present methods provide an extensive forward genetic approach to functionally identify novel oncogenic miRNAs in retrovirally generated tumors.

[0103] The present invention, in one non-limiting embodiment, provides a method of identifying novel human regulatory RNA (regRNA) sequences, including novel miRNA sequences, associated with a detectable disease state in humans. In practicing the method, an animal model, such as mouse or rat, having known disease states, and typically disease states that are similar to those found in humans, is subject to standard insertional mutagens, such as viral insertional mutagens, and then observed for development of one or more disease states, e.g., one or more cancer types, or hyperlipidemia, both diseases known to be associated with dysfunctions in regRNA. When a disease state is observed in a mutagenized animal, the genome, e.g., in a cancerous tissue or cell, is then analyzed for the presence and chromosomal locations of the one or more insertion mutations. This is done, for example, using PCR probes that overlap with the insertional mutagen sequence, to produce an amplified segment of the animal genome adjacent the mutation.

[0104] The sequence of this segment is then determined and used in a database search of the animal's genome, to find transcriptional units that are within a defined distance, typically less than 100 Kbases, but up to 200 Kbases, upstream and/or downstream of the insertional mutation site or sequenced segment containing that site. Transcriptional units are identified according to known procedures, e.g., by employing a bioinformatics program that stores information about transcription units that have been previously identified as such by the presence of polyadenylation in their transcripts.

[0105] For each transcriptional unit that is identified in this manner, the method now involves searching a human genomic database to identify human transcriptional units that are orthologous with the identified animal transcription units. This step is used in finding the human transcription unit corresponding to the one identified in the animal as possibly related to an identified disease state. Of course, since some animal transcription units are unique to that animal and/or do not overlap with human transcription units, not every animal transcription unit identified in the method will have a human ortholog.

[0106] Once the human transcription units corresponding to the disease-related animal transcription units have been identified, these are further analyzed using bioinformatics tools to (i) identify those non-coding units that will be classed as regRNAs, and (ii) among the regRNAs, those units that contain secondary structure and other sequence-related features associated with miRNAs. In the first case, a human transcription unit identified as above is compared against known coding sequences, or sequences with coding-gene sequence features, to determine whether the transcription unit is a coding or non-coding gene. If it is a non-coding gene, and not previously identified as a regRNA sequence, or not previously identified as having the newly identified disease association, the method identifies the transcription unit either as a novel regRNA, or a known regRNA having a newly-identified disease associated function.

[0107] If the regRNA is further determined to contain sequences characteristic of miRNAs, e.g., stem-loop regions characteristic of pre-miRNAs, then the method can further identify the regRNA as either a newly identified miRNA sequence (including the pri-miRNA, the pre-miRNA, and/or mature miRNA), or a previously known miRNA with a newly identified disease association (SEQ ID NOS: 13, 14, 26, 27, 37-39, and 41-43.)

[0108] It will be appreciated that the method just described, which combines a functional assay (disease association) with a bioinformatics analysis, allows confirmation or positive identification bioinformatics information, e.g., gene identification, and also allows for less stringent bioinformatics constraints, e.g., in the identification of novel miRNAs, as discussed below.

[0109] Also forming part of the invention are a comprehensive set of regRNAs including miRNAs that when overexpressed or deleted contribute to tumor formation. The miRNAs can regulate both oncogenes and suppressors, as well as represent both oncogenes and suppressors themselves. Although classic tumor suppressors require both alleles to be inactive, the present recovery of regRNA sequences used a modified retroviral tagging strategy. In this modified strategy, chemical mutagenesis was initially carried out on the paternal allele, followed by retroviral insertional mutagenesis (which can affect both the maternal and paternal alleles). Chemical mutagenesis was carried out using ENU (N-ethyl-N-nitrosourea; a potent germ line mutagen). If by chance the virus-disrupted (maternal) allele and the ENU-inactivated (paternal) allele belong to the same locus, then the cell has no functional allele. Should this locus represent a tumor suppressor, the cell lacking it will have a growth advantage over other cells, which may result in tumor formation.

[0110] 1. Viral Tag Recovery and Locus Identification

[0111] The viral integrations sites (tags) were determined in tumors generally by isolating and digesting genomic tumor DNA, followed by an anchored PCR technique 20. This was performed by amplifying and sequencing a chimeric DNA fragment consisting of a short genomic sequence upstream of the viral 5′ LTR and part of the viral 5′ LTR itself. The tags were sequenced and mapped to the mouse genome sequence, and the affected transcription unit was determined. From 2373 tumors, 7300 tags were obtained, which mapped to 2,038 regions. Of these regions, 645 had two or more associated integration sites, with the largest region having 500 integrations.

[0112] 2. Calling Regulatory RNA Transcripts

[0113] At least one of the following, non-limiting, considerations should be taken into account to correctly identify the affected regRNA based on the retroviral screen. First, although vertebrates share extensive highly conserved non-coding sequences which might represent regRNA, not all non-translated (translatable) expressed sequence tags (ESTs) fragments represent true regulatory RNA. For example, a fraction represent small nuclear RNA of the spliceosome, another fraction results from DNA contamination, and yet another fraction may just be transcriptional noise not yet edited by evolution for energy efficiency. Second, viral integration into a potentially transcribed region does not necessarily mean this transcription unit is activated and contributes to tumorigenesis. There is the question whether or not the proviral enhancer/promoter can “leapfrog” the nearest gene and instead regulate the next one. In the past, it has been assumed that this is not (or only rarely) the case, and that proviruses can exert their function up to a distance of 200 kb from a gene. Such assumptions were reevaluated in light of more extensive genomic coverage and better annotation of non-coding transcripts. With the above potential complications in mind, the transcription unit nearest to a cluster of integration sites was identified. In the analysis, it was reasoned that if a gene is located, for example, 200 kb from an insertion site, then the other integration sites ought to be more or less evenly distributed over that distance. If, however, a cluster of integration sites spans a few kilobases and is located within or next to a noncoding transcription unit, this unit was called rather than a far away gene.

[0114] 3. miRNA Identification

[0115] Early computational algorithms designed to predict miRNAs relied on sequence conservation between species, hairpin structure determination, and thermodynamic stability. A more recent prediction attempt has relaxed the species conservation requirement in an attempt to identify new primate-specific miRNAs¹¹. Nonetheless, all computational approaches involve a trade off between maximizing sensitivity and minimizing false positives, and as such, may miss important classes of miRNAs. Since the retroviral screen provided complementary functional data, it was possible to modify the computational approach of Berezikov et al.²⁶ with relaxed input parameters and maintaining the sequence conservation between mouse and human as a necessary condition. This computational approach yielded 13,648 predicted miRNAs. Apart from non-translatability, ESTs terminating at the 3′ or 5′ end of the miRNA cluster were identified, which should be an indication for a site of Drosha processing activity. Based on these criteria, retroviral integrations at 322 loci with regRNAs were found, many of which are expressed only in thymocytes. These include integrations at: (1) mir-17-20, the mouse ortholog to the human miRNA cluster (mir-17-92) that has been demonstrated to be an oncogene in mouse and likely in humans¹³; (2) three other confirmed miRNAs in the registry; (3) 29 non-coding transcription units with predicted miRNA; and (4) 289 non-coding transcription units without miRNA predicted.

[0116] Table 1A is a list of the 322 mouse and 280 human regRNA and miRNA loci. For each cluster, the cluster ID, the chromosomal location, the tumors that contain the proviral integrations sites in that cluster, the ESTs within and adjacent to that cluster, the known and predicted miRNAs, and the genomic location of the corresponding human regRNA are listed. The chromosomal positions of the mouse regRNA and miRNAs are defined by the March 2005 UCSC genome assembly of the mouse genome (mm6) while the chromosomal positions of the human regRNA and miRNAs are defined by the hg17 UCSC human genome assembly. The sequences of the regRNA and miRNAs are listed in Table 1B in FASTA format, with the exception of the mir-17-20 and mir-17-92 loci. Examples of the groups are disclosed and described below.

[0117] 4. mir-17-20 and mir-106a-92

[0118] The mir-17-20 polycistron contains four confirmed miRNAs, three of which are predicted by the bioinformatics approach of the present method (FIG. 1A; mir-19b-1 only weakly maps to this cluster). To date, this polycistron is the only one that has been shown to be an oncogene in the mouse¹³. Several of the ESTs terminate 3′ of the cluster and all 5 miRNAs are contained in the intron of transcript AK053349. The 29 retroviral insertion sites fall into three groups, all contained in the kb transcription unit. It is unclear why there are these three groups, but perhaps site specificity of Drosha or undetected novel miRNAs are the cause. Interestingly, all 11 integrations closest to the mir-17-20 polycistron have the same direction (left to right) of transcription as the miRNAs themselves (left to right; not shown). Conversely, 9 out of 10 of the integrations farthest from the polycistron have the opposite orientation (right to left) of the miRNAs. The orientation of the provirus is thought to be important in activation of protooncogenes. Either the viral promoter, in the same transcriptional orientation as the protooncogene, overrides the promoter of the protooncogene, or the enhancer, in either orientation, cooperates with the promoter to increase transcription of the cellular gene. In the classical insertions of type 2, i.e., within a gene, the result is either truncation or destruction. Because mir-17-92 polycistron acts as an oncogene 13, it ought to be the case that 3′ to the integration sites there are transcripts generated at an increased level, and that these transcripts can be processed by Drosha and Dicer.

[0119] The mir-106a-92 polycistron is a cluster related by homology to mir-17-92²⁷ and contains three previously identified miRNAs and one more predicted by us (FIG. 1B). The transcript AK084356 ends precisely where the miRNA cluster begins, and part of the intron is an exon of other transcripts. There are also several more near the miRNA cluster. The two leftmost proviral integrations (1505S, 1759S) have the same transcriptional orientation as the AK084356 transcript and thus may constitute “promoter insertions”. Because of their distance to the transcription unit, the 3 rightmost retroviral insertions (558T, 569S, 2221S) ought to represent enhancer insertions. In these cases, the provirus has integrated 5′ to a transcription unit, and the orientation of transcription of provirus and cellular transcription unit are opposite. This is because in the LTR of the provirus, the enhancer precedes the promoter and it is thought that the enhancer cooperates with promoters without leapfrogging. The remaining integrations may be either promoter or enhancer insertions and thus may have either orientation. Transcript AY940616 and mature the mmu-mir-106a miRNA were both found to be overexpressed in mouse thymic tumors by quantitative PCR (FIG. 4A-C).

[0120] 5. Oncogenic miRNAs Not Found in the miRNA Registry

[0121] The number of existing miRNAs is growing monthly. In early 2005, the number in humans was roughly 200, and early estimates calculated 255 as the upper limit²⁸. There are 321 human miRNAs in the most recent version of the miRNA registry (August 2005). Recent studies have suggested that the number of human miRNAs may be much greater, and as much as 800²⁹.

[0122] As seen in FIG. 2A the predicted miRNAs are contained in transcript BC048951, and are close to other ESTs that may be processing products of Drosha and Dicer. Thus, part of transcripts AK045307 and AK087491 overlap with BC048951, and another part is contained in the intron of the much longer transcript AK050834. An additional transcript that covers part of the same intron is thymus specific AK079473. The retroviral insertion site 1490S is within the large intron of the AK050834 transcript, which presumably represents the largest piece of the pri-miRNA. The other insertion, 1163S, is 3′ to the pri-miRNA, in the same transcriptional orientation, which allows the viral enhancer to cooperate with the promoter of the pri-miRNA.

[0123] FIG. 2B shows 8 insertions near two predicted mi-RNAs. Each miRNA is contained in a transcript that is found only in thymocytes (A1060616, BB634791). Interestingly, two other nearby transcripts are also found only in thymocytes.

[0124] The prediction program described herein was shown to find 81% of all registered miRNA in the mouse. There are other programs that compare regulatory motifs in promoters and 3′ UTRs in several mammals²⁹. The method also found many regions where no miRNA was predicted, but where the retroviral insertions were (1) within or nearby a transcript that was not translatable and (2) were often far away (>30 kb) from any other gene.

[0125] 6. Retroviral Insertions into regRNA without miRNAs

[0126] The transcript AK040104 in FIG. 3A, for example, with eight proviral insertions sites, looks like a gene, except that it is not classifiable and is >300 kb away from the nearest known gene. There is a smaller transcript AK041852, which covers two introns of the larger transcript, and both transcripts are expressed only in thymocytes.

[0127] FIG. 3B shows 5 integration sites upstream of transcript AK021325 which also lack predicted miRNAs and is ˜40 kb away from the nearest authentic gene. All 5 integration sites have the same direction of transcription as the ESTs, suggesting that transcription of these ESTs in increased by the viral promoter. Thus, insertions into these types of regions were also surveyed, where there was a hint of Drosha processing activity and where thymocyte-specific expression is observed. These regions contain regulatory RNAs, resulting in identification of 289 new regions.

[0128] FIGS. 5-7 show three additional loci containing retroviral integrations near or within non-coding regRNAs. The expression levels of each regRNA were measured using quantitative methods; each of these regRNAs was found to be overexpressed in the majority mouse thymic tumors containing nearby integrations as compared control tumors that lacked such integrations.

[0129] 7. Expression Levels of regRNAs and miRNA in Human Tumors

[0130] The RNA expression level of a newly identified regRNA (PVT1) was measured in human tumors using quantitative methods (FIG. 8). In 3 out of 9 tumors, expression levels of the specific regRNA were elevated as compared to the level in matched normal tissue from the same patient. The change in expression levels may indicate how regRNAs and miRNAs can be used for diagnosis and therapy of the respective tumors for those skilled in the art.

[0131] 8. Multistep Tumorigenesis and Co-Mutation Analysis

[0132] Co-mutation analysis may be a powerful way to find cooperating signaling pathways in tumorigenesis. Viral insertional mutagenesis, while perhaps not providing all the mutations necessary for a full-blown tumor, follows the multistep scenario of spontaneous tumorigenesis. Lymphocytic tumors that arise as a consequence of infection with MLV can contain up to 7 insertion sites. This fact can be used to differentiate between signaling pathways within a tumor: because multiple oncogenic hits along a signaling pathway may not be selected over a single hit, the genes actually recovered are likely not to be involved in the same pathway, but in complementary pathways that work together in tumorigenesis.

[0133] There are generally, however, two main caveats when considering co-mutation analysis. First, although in general, almost all viral insertions in a tumor are thought to be causative in its formation, the question arises whether there are any “passenger” insertions, i.e., insertional events that are not selected by tumorigenesis, but merely accompany other causative mutations. Passenger insertions do not seem to occur frequently due to the superinfection barrier and because secondary integration events are rare. These rare events, however, are responsible for the tumor formation by retroviruses. It is not clear whether the additional insertions are generated by re-infections or by retrotransposition. At any rate, even though passenger mutations have not yet been identified in previous studies, one needs to guard against interpreting such insertions as tumorigenic events—especially when the screen is large. The second confounding issue may be the potential oligoclonality of tumors. If the tumors are not clonal, then what is scored as a co-mutation may simply be a mutation in a different tumor.

[0134] With these caveats, co-mutation analysis provides valuable insight into the pathways that work together during tumorigenesis. The simplified reasoning can be summarized as follows: (i) genes that are co-mutated in a single cancer cell represent different pathways that cooperate during carcinogenesis; and, as a corollary, (ii) genes within the same pathway are never co-mutated.

[0135] 9. Specific Co-Mutations

[0136] Table 2 lists the co-mutations of the polycistrons mir-17-20 and mir-106a-92. From this table, at least three observations can be made:

(1) both polycistrons mir-17-20 and mir-106a-92 have recurrent co-mutations;
(2) they share 10 co-mutations between them; and
(3) both polycistrons cooperate with co-mutations in at least three other (predicted) miRNAs.

[0137] If a genomic region is hit with retroviral insertions only few times in the entire screen, the chance of scoring an accidental co-mutation is lower. While a low frequency may also indicate low importance in tumorigenesis, it may simply reflect the mechanistic restrictions of retroviral insertion at that locus. If a region is hit frequently, the chance of false co-mutations increases. However, careful analysis of the region can minimize false co-mutation assignments. For example, if one only considers known or predicted genes, then in the present screen, there are 500 insertions near or into the Evi5 locus. Not only is this locus an area of preferred integration, the nearby Gfi locus also has similar high integration frequencies. On the one hand, polycistron mir-17-20 seemingly has 11 co-mutations in the Evi5 locus, and polycistron mir-106a-92 has 5. But a closer inspection of these integration sites reveal that the two polycistrons share (five and two, respectively) co-mutations in the 429 nt transcript AK037419, which represents an EST from the neonate thymus. Thus, transcript AK037419 cooperates with polycistrons mir-17-20 and mir-106a-92, respectively. This otherwise nondescript transcript itself is an oncogene as well. On the other hand, there clearly are integrations into the Evi5 gene as well: polycistron mir-17-20 has four co-mutations in intron 17 of Evi5, and polycistron mir-106a-92 has one in intron 16 of Evi5.

[0138] Another frequently hit region in the present screen is Notch1, with 248 integrations. In human T acute lymphatic leukemia, the mutations in the Notch1 locus are not evenly distributed but they fall into two broad groups which affect heterodimerization of the receptor and stability of the cytoplasmic signaling portion of the molecule³⁰. The mutations shown here fall into three broad groups, with 128 of the insertions into Notch1 in exon 34; these mutations presumably increase the stability of the cytoplasmic signaling portion³⁰. Two of these mutations are each co-mutated with mir-17-20 and mir-106a-92, respectively. As mentioned above more confidence can be placed into a co-mutation, if only a few integration sites are scored in the entire screen, and most or all of these integrations are in the tumors with the first mutation. Thus, another group has 12 mutations in intron 2 of Notch1. Two of these co-mutate with mir-17-20 upon closer inspection, the insertions into intron 2 are only 531 nt apart, and they coincide with transcript BF720900. This is an indication that mir-17-20 is co-mutated with transcript BF720900.

[0139] The set of regulatory RNAs and miRNAs that cause tumors when overexpressed, deleted or otherwise mutated are of particular interest in the present methods. The invention dramatically increases the number of known oncogenic regRNAs and miRNAs and is useful for the diagnosis and therapeutic treatment of human cancers.

### C. Diagnostic Methods and Reagents

[0140] In one aspect, the detection, identification, and quantitation of regRNA, including miRNA, and of mutations that affect the expression levels and/or function of these RNAs in tissue, body fluids, secretions and excretions are useful in cancer diagnostics are contemplate. Non-limiting examples include, but are not limited to (i) genotyping tumors for diagnosis, prognosis, and patient stratification in both therapy and clinical trials, and (ii) blood testing for early cancer detection of breast, ovary, colorectal and prostate cancer.

[0141] In one embodiment, an array (chip) containing complementary sequences of the regRNAs is used to score over- or under-expression of regRNAs in cancer tissue, which is linked to the cancer type and the precise diagnosis of it. This in turn allows better prognosis and therapy. In another embodiment of the invention, an oncogenic regRNA survey is carried out by the generally known methods of gel electrophoresis and detection by hybridization to complementary sequences. In yet another embodiment, DNA encoding regRNA is sequenced and mutations are recovered that may indicate non-physiological expression levels and/or function. When performed on bodily fluids, such as blood, these tests may be indicative of the presence of a tumor that escapes early detection by other means, or for which there are no early detection methods, or only detection methods that are more complicated and/or more expensive. Such tests may be carried out on material with or without prior amplification of nucleic acids.

### D. Therapeutic Methods

[0142] Those skilled in the art will, upon reading this disclosure, further understand how the disclosure of oncogenic regRNA including miRNA sequences and their co-mutations are useful in therapy. When over-expressed in cancer, the expression of such sequences may be repressed and the physiological state of the tumor cell may be restored, which, in turn prevents further proliferation. When under-expressed in cancer, the expression of such sequences may be supplemented and the physiological state of the tumor cell may be restored, which, in turn prevents further proliferation. When mutated in a way that changes the function, the mutated sequence may be corrected or eliminated. The delivery of drugs with these corrective effects may be accomplished by the known gene-therapy methods of transfection, infection and transduction.

[0143] In one general therapeutic method, molecules designed to bind specifically and with high affinity, e.g., by sequence-specific hybridization, may be may be employed to block overexpressed miRNA. For example, an oligonucleotide that targets a mature miRNA or its Drosha or Dicer cutting sites, may be employed for blocking levels or activity of a disease specific miRNA, as disclosed for example, in the Genetools website accessed at http://www.gene-tools.com/node/33.

### VI. Materials and Methods

### A. Generation of Tumors by Retroviral Mutagenesis in Mice with Chemically Mutagenized Paternal Haplotype

[0144] Cohorts of male BALB/c mice were injected three times with 0, 20, 50, 80 and 100 mg N-ethyl-N-nitrosourea (ENU)/kg body weight, with each injection one week apart³¹. The mice then became sterile, and the length of the sterility period was taken as a measure of the effectiveness of mutagenesis; only mice that had regained fertility after 11 weeks were used. After the sterility period the mice were mated with untreated BALB/cJ female mice to produce F1 pups. For each cohort infected with the SL3-3 virus³²⁻³⁵, the experiment involved four groups of mice, experimental group (E1) as well as three control groups (C1-C3). For E1, 2500 newborn (less than 36 hours old) pups were injected i.p. with retrovirus (both male and female pups were used). Control group C1: 200 newborn (less than 36 hours old) pups, male or female, from BALB/cJ (ENU-treated)×BALB/cJ crosses were mock-injected i. p., with medium alone. C2: 200 newborn (less than 36 hours old) pups, male or female, from non-treated BALB/cJ×BALB/cJ crosses were injected i. p. with retrovirus. C3: 100 newborn (less than 36 hours old) pups, male or female, from non-treated BALB/cJ×BALB/cJ crosses were mock-injected i. p., with medium alone. In all groups, mice were individually labeled 34 weeks after birth. Then the mice were weaned and tumors were allowed to develop. The average latency period was 85±31 days for SL3-3 virus, for tumors in mice with or without ENU mutagenesis of one parent. Once they became moribund due to cancer development, the mice were euthanized, gross necropsy was performed and tumor tissues were prepared.

### B. Viral Tap Recovery

[0145] To identify the integration sites of retroviral proviruses, the unknown flanking DNA was isolated using minor modifications of an anchored PCR method²⁰ Genomic tumor DNA from spleen or thymus was digested with enzyme 1, and a splinkerette adapter was ligated. This was followed by digestion of enzyme 2, to remove the internal viral fragment. The ligated DNA was amplified by PCR with adapter and virus-specific primers, followed by two additional PCR amplification steps with nested primers. The PCR product was purified by gel electrophoresis and sequenced. The sequence chromatograms were then fed into the bioinformatics pipeline for gene identification.

### C. Bioinformatics

[0146] The proviral inserts served as DNA tags for gene sequencing and identification. To extract and analyze genomic tags, a computational process was implemented. The input to this process was DNA sequencing chromatogram files, from which high-quality sequences were derived and matched to the mouse genome.

[0147] First, the sequence extraction step converted a chromatogram into a searchable tag sequence. The criteria for a searchable tag sequence include, but are not limited to, high-quality base-calls, non-vector sequence, non-repeat sequence and a length minimum. The base caller LifeTrace™ 36 was used to generate base calls from chromatograms and quality scores representing the accuracy of each base-call.

[0148] Second, using the base calls and quality scores from LifeTrace™, and a database of vector sequences, an algorithm was developed to automatically produce searchable sequences (i.e. sequences that can be matched to the mouse genome). In this algorithm, the region of high quality base calls was first determined by locating the longest stretch of base calls with a window-averaged quality score of 10. A window size of 11 was used to average the quality scores from five bases before to five bases after a central base-call. A quality score of ten indicated 90% accuracy of base calls.

[0149] Third, a database of vector sequences (entire retroviral genome sequences) was matched against the base calls to determine regions of viral sequence using the BLAST algorithm. Based on the sequencing construct, a stretch of less than 50 bases of viral sequence is expected on the 5′ end of the raw sequence; and read-through of short inserts can produce regions of 3′ viral sequence starting with a specific restriction site. If a region of high-quality, non-vector sequence longer than 32 bases remains, it becomes a searchable tag sequence.

[0150] Finally, a searchable tag sequence is a stretch of high-quality base calls that should be derived from the mouse genome. The MegaBLAST algorithm was used to search the mouse genome with each searchable sequence. A version of the mouse genome that has been “masked” for repeat sequences (both low-information local repeats and dispersed repetitive elements are not allowed for matches) was used at this step so that non-informative matches are not pursued. For each significant match to a tag sequence (there is usually only one, but occasionally there are more), 2 kb of unmasked genomic sequence is retrieved and realigned to the tag sequence. This realignment produces a more complete match in cases where the global search was interrupted by masked repetitive regions. Lastly, the latest annotation files from the (March 2005) UC Santa Cruz build of the mouse genome (mm6 or mm7) were used to locate nearby known and predicted genes. The genomic region into which the provirus inserted is displayed in the UC Santa Cruz Genome Browser (//genome.ucsc.edu).

### D. Algorithm to Identify miRNAs

[0151] To identify miRNAs, a method that takes advantage of the characteristic form of conservation profiles observed for most known miRNAs²⁶ was used. This form consists of a drop in conservation immediately flanking pre-miRNA regions. Mouse-human (mm6-hgl7) whole genome alignments from the UCSC Genome Bioinformatics website (genome.ucsc.edu) were used. For every position in the alignments, the percentage conservation in a 15 nucleotide window was calculated and assigned a value of 0 to 9 for 0% to 90% identity and “o” for 100% identity. The resulting conservation strings were then searched for a match to the following Perl™ regular expression:

/([0-8]{50,60})([o98]{53,260})([0-8]{50,60})/

[0152] Sequences that matched this were further analyzed with RNAfold³⁷⁻³⁹ to compute optimal secondary structures. The secondary structure output is in bracket notation where parentheses represent base pairings and periods are unpaired bases. A structure as an miRNA candidate was accepted if it matched the following Perl™ regular expression:

/((\((?:\.*\( ){24,})(\.{2,17}|\.*\({1,8}\.*\){1,8}\.*\({1,8}\.*){8}\.*)(\)(?:\.*\)){150,}))/x

[0153] This method detected 81% of all known mouse miRNAs.

### VII. EXAMPLES

[0154] The following examples are put forth so as to provide those of ordinary skill in the art with a complete disclosure and description of how to make and use the present invention, and are not intended to limit the scope of what the inventors regard as their invention nor are they intended to represent that the experiments below are all or the only experiments performed. Efforts have been made to ensure accuracy with respect to numbers used (e.g. amounts, temperature, etc.) but some experimental errors and deviations should be accounted for. Unless indicated otherwise, parts are parts by weight, molecular weight is weight average molecular weight, temperature is in degrees Centigrade, and pressure is at or near atmospheric.

### Example 1

### Viral Tag Recovery and Locus Identification

[0155] Viral integrations sites (tags) were determined from tumors that were isolated and digested genomic tumor DNA, by using an anchored PCR technique as described above. This was performed by amplifying and sequencing a chimeric DNA fragment consisting of a short genomic sequence upstream of the viral 5′ LTR and part of the viral 5′ LTR itself. The tags were sequenced and mapped to the mouse genome sequence, and the affected transcription unit was determined. From 2373 tumors, 7300 tags were obtained, which mapped to 2,038 regions. Of these regions, 645 had two or more associated integration sites, with the largest region having 500 integrations.

### Example 2

### Expression Levels of regRNAs in Mouse Thymic Tumors

[0156] The RNA expression levels of three regRNAs were measured in mouse thymic tumors using quantitative methods with the results shown in FIGS. 5-7. Mouse tumors with integrations located in regions containing the regRNAs and control tumors (which lack such integrations) were examined by quantitative PCR using SYBR green. In all three regions, the majority of tumors have integrations which caused elevated expression of their respective noncoding RNAs.

[0157] The first region (R857:2) examined contains a group of noncoding transcripts located on chromosome 15, ˜50 kb downstream of the Myc gene (FIG. 5A). A primer set was designed to the 5′ end of AK030859 which is common to exon 1 of the other transcripts in the group. The sequence probed also falls within exon 1 of PVT1 (AK090048, plasmacytoma variant translocation 1), a region known for frequent chromosomal translocations⁴⁰. Twenty seven tumors with integrations in this area were assayed for AK030859 expression levels (see FIG. 5B for tumor locations). In 11 of 19 tumors containing integrations located within and downstream of AK030859, expression of AK030859 was elevated 5 to 40 fold over tumors with no integrations in this region (FIG. 5C).

[0158] A second region (R894:1) with a high density of integration sites contains noncoding transcript AK040062 which is located on chromosome 2 (FIG. 6A). Primer sets were designed to AK040062 exon 2 and expression levels were measured for 24 tumors with integrations in this region (FIG. 6B). Elevated expression of AK040062 exon 2 was seen in tumors with integrations located upstream and within intron 1 of AK040062 (FIG. 6C). Of these 14 tumors, 10 had over 20 fold elevated expression of the noncoding RNA.

[0159] A third region (R217:3) examined for expression levels contains AK037419, a noncoding transcript located on chromosome 5, ˜15 kb downstream of the Gfi1 gene (FIG. 7A). Expression levels of AK037419 exon 3 were measured by qPCR in 16 tumors containing integration sites in this region (FIG. 7B). Expression of AK037419 exon 3 was increased between 7 to 1000 fold in 11 of the 16 tumors tested as compared to control tumors with no integrations in this region (FIG. 7C).

### Example 3

### Expression Levels of regRNAs in Human Tumors

[0160] The RNA expression levels of a newly identified regRNA (PVT1) was measured in human tumors using quantitative methods with the results shown in FIG. 8. The expression levels of PVT1 exon 1 were measured in matched human normal and cancer prostate RNA samples. Of nine matched tissue pairs, three tumor samples displayed 2 to 4 fold elevated expression of PVT1 exon1 as compared to their matched normal sample. Expression levels of PVT1 were measured by SYBR Green qPCR⁴¹ using primer sets designed to PVT1 exon 1.

[0161] The preceding merely illustrates the principles of the invention. It will be appreciated that those skilled in the art will be able to devise various arrangements which, although not explicitly described or shown herein, embody the principles of the invention and are included within its spirit and scope. Furthermore, all examples and conditional language recited herein are principally intended to aid the reader in understanding the principles of the invention and the concepts contributed by the inventors to furthering the art, and are to be construed as being without limitation to such specifically recited examples and conditions.

[0162] Moreover, all statements herein reciting principles, aspects, and embodiments of the invention as well as specific examples thereof, are intended to encompass both structural and functional equivalents thereof. Additionally, it is intended that such equivalents include both currently known equivalents and equivalents developed in the future, i.e., any elements developed that perform the same function, regardless of structure. The scope of the present invention, therefore, is not intended to be limited to the exemplary embodiments shown and described herein. Rather, the scope and spirit of present invention is embodied by the appended claims.

It is claimed:

1. A method for positively identifying a human miRNA sequence associated with a detectable disease state in humans, comprising
(i) identifying, from each of at least two animals having a detectable disease state produced by insertional mutation, the sequence of a genomic segment that is common to both animals, and that contains an insertional mutation,
(ii) identifying transcription units contained within the animal genome that are within about 200 Kbases, in either an upstream or downstream direction, of the sequenced genomic segment,
(iii) identifying human genomic transcription units that are orthologous to the transcription units identified in step (ii), and
(iv) for each human transcription unit identified in step (iii), employing a bioinformatics program capable of identifying putative miRNA sequences, to determine whether that transcription unit identified in step (iii) contains a putative miRNA sequence, in which case the putative miRNA sequence is positively identified as a human miRNA.

2. The method of claim 1, wherein the detectable disease state is a cancer, and step (i) is carried out by isolating the genomic segment from each of at least two animals having a detectable cancer.

3. The method of claim 1, wherein the detectable cancer is a lymphoma, and step (i) is carried out by isolating the genomic segment from each of at least two animals having a lymphoma.

4. The method of claim 1, wherein the insertional mutation in step (i) is a viral insertional mutation.

5. The method of claim 1, wherein the sequence identified in step (iii) is contained in a pri-miRNA.

6. The method of claim 1, wherein the sequence identified in step (iii) is contained completely within the mature miRNA.

7. An assay kit for diagnosing the presence or risk of cancer in a human subject comprising
a first reagent designed to react specifically with a human pri-miRNA or mature miRNA sequence identified in accordance with the method of claim 2, to form a first detectable reaction product, and
an indicator guide that indicates how the presence or amount of the reaction product correlates with the presence or risk of the disease state in a human subject.

8. The kit of claim 7, wherein the first reagent includes one of: (a) PCR reagents for detecting the presence or absence of the genomic sequence, and (b) oligonucleotide binding reagents for detecting the presence or absence of the genomic sequence.

9. The kit of claim 7, for use in diagnosing the presence of risk of a cancer in a human subject, wherein step (i) in the method of claim 1 is carried out by isolating the genomic fragment from each of at least two animals having a detectable cancer.

10. The kit of claim 9, for use in diagnosing the presence of risk of a lymphoma in a human subject, wherein step (i) in the method of claim 1 is carried out by isolating the genomic segment from each of at least two animals having a detectable cancer.

11. The kit of claim 1, wherein the first reagent is designed to react specifically with a mature human miRNA sequence identified in accordance with the method of claim 1.

12. A method of treating a cancer in a human subject comprising administering to the subject, a therapeutically effective amount of a compound capable of binding specifically to a mature human miRNA sequence identified in accordance with the method of claim 2.

13. An isolated mature human miRNA sequence selected from the group consisting of SEQ ID NOS: 1-55.

14. A method for identifying a human regulatory RNA (regRNA) sequence associated with a detectable disease state in humans, comprising
(i) identifying, from each of at least two animals having a detectable disease state produced by insertional mutation, the sequence of a genomic segment that is common to both animals, and that contains an insertional mutation,
(ii) identifying transcription units contained within the animal genome that are within about 200 Kbases, in either an upstream or downstream direction, of the sequenced genomic segment,
(iii) identifying human genomic transcription units that are orthologous to the transcription units identified in step (ii),
(iv) for each human transcription unit identified in step (iii), using a bioinformatics program to determine whether that transcription unit is a non-coding RNA sequence, and
(v) if the orthologous homologous human genomic sequence from step (iv) is a non-coding RNA sequence, classifying the sequence as a human regRNA sequence associated with the detectable disease state.

15. The method of claim 14, wherein the detectable disease state is a cancer, and step (i) is carried out by isolating the genomic segment from each of at least two animals having a detectable cancer.

16. The method of claim 14, wherein the human regRNA sequence is an miRNA, and step (iv) includes employing a bioinformatics program capable of identifying putative miRNA sequences to determine whether that transcription unit identified in step (iii) contains a putative miRNA sequence, in which case the putative miRNA sequence is positively identified as a human miRNA.

17. The method of claim 14, wherein the insertional mutation in step (i) is a viral insertional mutation.

18. The method of claim 14, which further includes utilizing the identified human regRNA sequence for diagnostic or therapeutic purposes.

19. An assay kit for diagnosing the presence or risk of cancer in a human subject comprising
a first reagent designed to react specifically with a human regulatory RNA (regRNA) sequence identified in accordance with the method of claim 15, to form a first detectable reaction product, and
an indicator guide that indicates how the presence or amount of the reaction product correlates with the presence or risk of the disease state in a human subject.

20. The kit of claim 19, wherein the first reagent includes one of: (a) PCR reagents for detecting the presence or absence of the genomic sequence, and (b) oligonucleotide binding reagents for detecting the presence of absence of the genomic sequence.

The application's sequence listing, which the Patent Office published only in electronic form, follows.

SEQUENCE LISTING (822 sequences)

SEQ ID NO: 1 - RNA, 17 nt, Homo sapiens
cagcaccaccagccacc

SEQ ID NO: 2 - RNA, 19 nt, Homo sapiens
cggggcccggcagcggacg

SEQ ID NO: 3 - RNA, 17 nt, Homo sapiens
ccagggcggcgcagcgg

SEQ ID NO: 4 - RNA, 12 nt, Homo sapiens
ccagggaggagc

SEQ ID NO: 5 - RNA, 18 nt, Homo sapiens
agggaaaaggaggggggg

SEQ ID NO: 6 - RNA, 17 nt, Homo sapiens
ggaagaggagaggcagg

SEQ ID NO: 7 - RNA, 19 nt, Homo sapiens
ccacagagcaaagaggagg

SEQ ID NO: 8 - RNA, 10 nt, Homo sapiens
agaaagggga

SEQ ID NO: 9 - RNA, 20 nt, Homo sapiens
gggaggggcgggagcgcgca

SEQ ID NO: 10 - RNA, 19 nt, Homo sapiens
ggccaggaccccggcagcc

SEQ ID NO: 11 - RNA, 20 nt, Homo sapiens
gcccagccgggggcagggag

SEQ ID NO: 12 - RNA, 18 nt, Homo sapiens
gagagcaggaagcagcgg

SEQ ID NO: 13 - RNA, 14 nt, Homo sapiens
ggaacagccaaagc

SEQ ID NO: 14 - RNA, 37 nt, Homo sapiens
gagaacgaaccagggugagaacugaauuccauggguu

SEQ ID NO: 15 - RNA, 14 nt, Homo sapiens
gaggccgagggggg

SEQ ID NO: 16 - RNA, 16 nt, Homo sapiens
ccccggagaagcccgg

SEQ ID NO: 17 - RNA, 13 nt, Homo sapiens
gcggggaacggcc

SEQ ID NO: 18 - RNA, 17 nt, Homo sapiens
cggcggacggggacgcg

SEQ ID NO: 19 - RNA, 19 nt, Homo sapiens
cgccacgccccccgccgcg

SEQ ID NO: 20 - RNA, 20 nt, Homo sapiens
gggcgcgcggcccgcacgcg

SEQ ID NO: 21 - RNA, 19 nt, Homo sapiens
accgggaggcccggccgcc

SEQ ID NO: 22 - RNA, 19 nt, Homo sapiens
gagacagcccaggccggca

SEQ ID NO: 23 - RNA, 16 nt, Homo sapiens
gccgagccgggcgcca

SEQ ID NO: 24 - RNA, 16 nt, Homo sapiens
agggagagcggagagc

SEQ ID NO: 25 - RNA, 15 nt, Homo sapiens
gacacggccgcgaca

SEQ ID NO: 26 - RNA, 38 nt, Homo sapiens
cacccaaaagagaaagcacauaaaguagaaagcacuac

SEQ ID NO: 27 - RNA, 11 nt, Homo sapiens
gccacagggga

SEQ ID NO: 28 - RNA, 15 nt, Homo sapiens
caggcagccccagcc

SEQ ID NO: 29 - RNA, 19 nt, Homo sapiens
gggccccgggcggcgccag

SEQ ID NO: 30 - RNA, 16 nt, Homo sapiens
gccacgaggcccgggc

SEQ ID NO: 31 - RNA, 19 nt, Homo sapiens
agaagccggggcaccagga

SEQ ID NO: 32 - RNA, 19 nt, Homo sapiens
ggcccagggcagcggggca

SEQ ID NO: 33 - RNA, 17 nt, Homo sapiens
agccaagcaggcccaag

SEQ ID NO: 34 - RNA, 13 nt, Homo sapiens
gggcacccagcag

SEQ ID NO: 35 - RNA, 11 nt, Homo sapiens
gcggcggaccc

SEQ ID NO: 36 - RNA, 18 nt, Homo sapiens
agaagccagggaaaccaa

SEQ ID NO: 37 - RNA, 40 nt, Homo sapiens
aaaaggcacaggcaggaaaagugcuuacagugcagguagc

SEQ ID NO: 38 - RNA, 35 nt, Homo sapiens
gcacgcccggccgguauugcacuugucccggccug

SEQ ID NO: 39 - RNA, 39 nt, Homo sapiens
ggcggcaaaccagcaaugugcaaauccaugcaaaacuga

SEQ ID NO: 40 - RNA, 14 nt, Homo sapiens
gcacggaccacgaa

SEQ ID NO: 41 - RNA, 15 nt, Homo sapiens
aagcacggaccacga

SEQ ID NO: 42 - RNA, 15 nt, Homo sapiens
aagggcacaggcaga

SEQ ID NO: 43 - RNA, 17 nt, Homo sapiens
caaaggccaaggcagga

SEQ ID NO: 44 - RNA, 19 nt, Homo sapiens
ccagggccaggcggagcag

SEQ ID NO: 45 - RNA, 14 nt, Homo sapiens
gggaagaggagcgc

SEQ ID NO: 46 - RNA, 18 nt, Homo sapiens
gcgcggcgcgccggggcc

SEQ ID NO: 47 - RNA, 15 nt, Homo sapiens
aaggggggccgccac

SEQ ID NO: 48 - RNA, 18 nt, Homo sapiens
ccagccccggcgcgcggc

SEQ ID NO: 49 - RNA, 14 nt, Homo sapiens
gacaacggacggga

SEQ ID NO: 50 - RNA, 13 nt, Homo sapiens
gacacccgccaag

SEQ ID NO: 51 - RNA, 16 nt, Homo sapiens
gggcgagcggggaaca

SEQ ID NO: 52 - RNA, 18 nt, Homo sapiens
gcgcgggaggccgccggg

SEQ ID NO: 53 - RNA, 16 nt, Homo sapiens
ggccgcgcgccacccg

SEQ ID NO: 54 - RNA, 19 nt, Homo sapiens
cagcaaacaggaagcaggg

SEQ ID NO: 55 - RNA, 14 nt, Homo sapiens
gccgcacgcccgga

SEQ ID NO: 56 - RNA, 17 nt, Mus musculus
cagcaccaccagccacc

SEQ ID NO: 57 - RNA, 19 nt, Mus musculus
cggggcccggcagcggacg

SEQ ID NO: 58 - RNA, 16 nt, Mus musculus
cagggcggcgcagcgg

SEQ ID NO: 59 - RNA, 12 nt, Mus musculus
ccagggaggagc

SEQ ID NO: 60 - RNA, 14 nt, Mus musculus
cccccccgggacca

SEQ ID NO: 61 - RNA, 17 nt, Mus musculus
ggaagaggagaggcagg

SEQ ID NO: 62 - RNA, 14 nt, Mus musculus
gcccccaccacagg

SEQ ID NO: 63 - RNA, 10 nt, Mus musculus
agaaagggga

SEQ ID NO: 64 - RNA, 20 nt, Mus musculus
aggaggggcgggagcgcgca

SEQ ID NO: 65 - RNA, 18 nt, Mus musculus
gccaggacccgggcagcc

SEQ ID NO: 66 - RNA, 20 nt, Mus musculus
gcccagccgggggcagggag

SEQ ID NO: 67 - RNA, 18 nt, Mus musculus
gagagcaggaagcagcgg

SEQ ID NO: 68 - RNA, 14 nt, Mus musculus
ggaacagccagagc

SEQ ID NO: 69 - RNA, 15 nt, Mus musculus
gagaacgaaccaggg

SEQ ID NO: 70 - RNA, 14 nt, Mus musculus
gaaaccgagggggg

SEQ ID NO: 71 - RNA, 16 nt, Mus musculus
ccccggagaagcccga

SEQ ID NO: 72 - RNA, 14 nt, Mus musculus
gcggggaacggccc

SEQ ID NO: 73 - RNA, 17 nt, Mus musculus
cggcggacggggacgcg

SEQ ID NO: 74 - RNA, 19 nt, Mus musculus
cgccacgccccccgccgcc

SEQ ID NO: 75 - RNA, 20 nt, Mus musculus
gggcgcgcggcccgcacgcg

SEQ ID NO: 76 - RNA, 19 nt, Mus musculus
accgggaggcccggccgcc

SEQ ID NO: 77 - RNA, 19 nt, Mus musculus
gagacagcccaggccggca

SEQ ID NO: 78 - RNA, 16 nt, Mus musculus
gccgagccgggcgcca

SEQ ID NO: 79 - RNA, 16 nt, Mus musculus
agggagagcgggcagc

SEQ ID NO: 80 - RNA, 15 nt, Mus musculus
gacacgcccgcgaca

SEQ ID NO: 81 - RNA, 18 nt, Mus musculus
cacccaaaagagaaagca

SEQ ID NO: 82 - RNA, 11 nt, Mus musculus
gccacagggga

SEQ ID NO: 83 - RNA, 15 nt, Mus musculus
ccaagcagccccaac

SEQ ID NO: 84 - RNA, 19 nt, Mus musculus
gggccccgggcggcgccag

SEQ ID NO: 85 - RNA, 15 nt, Mus musculus
gccacgaggccgggc

SEQ ID NO: 86 - RNA, 18 nt, Mus musculus
gaacccggggcaccagga

SEQ ID NO: 87 - RNA, 19 nt, Mus musculus
ggcccagggcagcggggca

SEQ ID NO: 88 - RNA, 17 nt, Mus musculus
agccaagcaggcccaag

SEQ ID NO: 89 - RNA, 13 nt, Mus musculus
gggcacccagcag

SEQ ID NO: 90 - RNA, 19 nt, Mus musculus
aaggagaaacgaaccagac

SEQ ID NO: 91 - RNA, 19 nt, Mus musculus
agccagggaaaccaaaggg

SEQ ID NO: 92 - RNA, 16 nt, Mus musculus
gcaaaggcaacaggca

SEQ ID NO: 93 - RNA, 15 nt, Mus musculus
gcacgcccggccgag

SEQ ID NO: 94 - RNA, 16 nt, Mus musculus
ggcggcaaaccagcaa

SEQ ID NO: 95 - RNA, 14 nt, Mus musculus
gcacggaccacgaa

SEQ ID NO: 96 - RNA, 15 nt, Mus musculus
aagcacggaccacga

SEQ ID NO: 97 - RNA, 14 nt, Mus musculus
aagggcacaggcga

SEQ ID NO: 98 - RNA, 17 nt, Mus musculus
caaaggccaaggcagga

SEQ ID NO: 99 - RNA, 18 nt, Mus musculus
cagcggcaccgacagccc

SEQ ID NO: 100 - RNA, 14 nt, Mus musculus
gggaagaggacgcc

SEQ ID NO: 101 - RNA, 18 nt, Mus musculus
gcgcggcgcgccggggcc

SEQ ID NO: 102 - RNA, 16 nt, Mus musculus
aaggggggccgcccgc

SEQ ID NO: 103 - RNA, 20 nt, Mus musculus
ccccagcgcgcggcagcggg

SEQ ID NO: 104 - RNA, 15 nt, Mus musculus
gacaacggcacggga

SEQ ID NO: 105 - RNA, 13 nt, Mus musculus
gacacccgccaag

SEQ ID NO: 106 - RNA, 17 nt, Mus musculus
ggggcgagcggggaaca

SEQ ID NO: 107 - RNA, 18 nt, Mus musculus
gcgcgggaggccgccggg

SEQ ID NO: 108 - RNA, 16 nt, Mus musculus
ggccgcgcgccacccg

SEQ ID NO: 109 - RNA, 19 nt, Mus musculus
cagcaaacaggaagcaggg

SEQ ID NO: 110 - RNA, 14 nt, Mus musculus
cgccgcaccccgga

SEQ ID NO: 111 - RNA, 62 nt, Homo sapiens
gcgacaggggggggaaggcgcgcggcccccagcccagcaccaccagccaccccaggcgccgc

SEQ ID NO: 112 - RNA, 89 nt, Homo sapiens
gcgggcgggcgacgggccggccgcgccgagagccgcggccccgcccccggcgcgcgcggggcccggcagcggacgcggcgcccggcagc

SEQ ID NO: 113 - RNA, 72 nt, Homo sapiens
cacgcccaggccagggcggcgcagcggagggcgaagccccagaccgcaggggagcgcaccaaagagacgggg

SEQ ID NO: 114 - RNA, 61 nt, Homo sapiens
gaggaccagggaggagcccagcggcccgcagcccggcgcgccgaacccggcccggagggac

SEQ ID NO: 115 - RNA, 61 nt, Homo sapiens
gcaagggaaaaggaggggggggggccggcgagcacccgggcccccccgggaccagacgagc

SEQ ID NO: 116 - RNA, 70 nt, Homo sapiens
gagcacaagggacgcccacccccgaccgggaaccaccacgccacggaagaggagaggcaggcccaaggcg

SEQ ID NO: 117 - RNA, 72 nt, Homo sapiens
agccagggcacgcccccaccacaggagcagaggaggaaaccacagagcaaagaggagggggcaagacccggc

SEQ ID NO: 118 - RNA, 46 nt, Homo sapiens
aacaaaagaaaggggagaggacaaggagaagcacagacagaaagaa

SEQ ID NO: 119 - RNA, 80 nt, Homo sapiens
gggggaggggcgggagcgcgcaggcgcagcgcggcgcgcagccgcgccgcccggacccagcgccccgcgccccgcgcccc

SEQ ID NO: 120 - RNA, 76 nt, Homo sapiens
gcgagagcgagggggagaaaggagcaggcgcacagcccgggccaggaccccggcagcccgcggagcccgagccggc

SEQ ID NO: 121 - RNA, 83 nt, Homo sapiens
cagcgcccccacccccacaccgcccaccccgcagcgccaccacaccgcccagccgggggcagggagccgggggggagcacgac

SEQ ID NO: 122 - RNA, 67 nt, Homo sapiens
gcagaaaggccgagagcaggaagcagcgggagggggggaggcggccgaggccgggccagggcccagg

SEQ ID NO: 123 - RNA, 57 nt, Homo sapiens
cccagcgaagaacgaacagaggcgacacgacacaacccaggaacagccaaagcgagg

SEQ ID NO: 124 - RNA, 227 nt, Homo sapiens
aaagccgaggacccagcgagaacgaaccagggggcaggcagacccgaaacagccagcgggaaccccgauguguauccucagcuuugagaacugaauuccauggguugugucagugucagaccucugaaauucaguucuucagcugggauaucucugucaucguaaagccgaggacccagcgagaacgaaccagggggcaggcagacccgaaacagccagcgggaacc

SEQ ID NO: 125 - RNA, 69 nt, Homo sapiens
cagcgaggccgaggggggcaaaaagccagccacaccaggagggggacaggccagccacccggagagcca

SEQ ID NO: 126 - RNA, 76 nt, Homo sapiens
cagcgcgaacagcccccggagaagcccggggcagcagccccccaagggcgaagccaggagacagccagggcaggcg

SEQ ID NO: 127 - RNA, 71 nt, Homo sapiens
ggcggggaggggggcggggaacggccccgacacggcggcagcgacagcacgcccggcagcgcagacccgcc

SEQ ID NO: 128 - RNA, 77 nt, Homo sapiens
ggccggccgccagcacaaagaggagaggcgccggggccgcaggggagggggccggcggacggggacgcggcggaggc

SEQ ID NO: 129 - RNA, 92 nt, Homo sapiens
gccccgccggccgcgcgccacgccccccgccgcgggccgcggcggagccgcgcgcccgggaggcccgggaccgggcggcgggcggcggcggc

SEQ ID NO: 130 - RNA, 89 nt, Homo sapiens
cggagcccccgggcgcgcggcccgcacgcggcccgcgagcaggggggcgggcgcgcggacacggcggggcgcgcgcgcccgggaagccc

SEQ ID NO: 131 - RNA, 85 nt, Homo sapiens
cgcgagcgggcccgggcggccggcaggccggggagcacgcaccaggggcgcaccgggaggcccggccgccgccgcgaggcgcgcg

SEQ ID NO: 132 - RNA, 63 nt, Homo sapiens
gagcgagacagcccaggccggcacgcagaaaaaacagacgcgaagccgggccgccagacaaca

SEQ ID NO: 133 - RNA, 60 nt, Homo sapiens
gagcgagcgaagcccaggcacagcgaacagaaacgcaggccgagccgggcgccagacaca

SEQ ID NO: 134 - RNA, 74 nt, Homo sapiens
ggccagagaggcagggagagcggagagccccgggccacacgccacagcccggaggggccaccacagccgggggc

SEQ ID NO: 135 - RNA, 71 nt, Homo sapiens
agaggcaggcggcgaggcagggcggaagggaggccaggacccgcgcagacacggccgcgacagaggccacc

SEQ ID NO: 136 - RNA, 149 nt, Homo sapiens
acaggcagcacccaaaagagaaagcacacaacagcacggaggggaggccacaggagaggacggacagugcagucacccauaaaguagaaagcacuacuaacagcacuggaggguguaguguuuccuacuuuauggaugaguguacugug

SEQ ID NO: 137 - RNA, 60 nt, Homo sapiens
acagacaccaccaaaagaggaaacacacacccccaggcgagaggccacaggggacgcacg

SEQ ID NO: 138 - RNA, 73 nt, Homo sapiens
ggggcccaggcagccccagccgccagcgcgaaggacacccaggacagagaggcagagcagggcgcgcggaagc

SEQ ID NO: 139 - RNA, 91 nt, Homo sapiens
ggccagccaggcgggcgcgacgggggcgccccgccacggcggcggcgggaggaggcggcgcgggcgggccccgggcggcgccaggacaacc

SEQ ID NO: 140 - RNA, 80 nt, Homo sapiens
ccggccagcaggcacggcgccacgaggcccgggccgcggcgggcagggccccgacacaacccaagcggccccggccgggg

SEQ ID NO: 141 - RNA, 81 nt, Homo sapiens
ggccgcgccgcgggcgggccggcgacagccgggcggccccagcggagaagccggggcaccaggagccgcacgggcggcggc

SEQ ID NO: 142 - RNA, 82 nt, Homo sapiens
gacaggcccagggcagcggggcaggcacacaggagcacgacgccgccgggacgcggccgccaccgccaccgccgcggccagc

SEQ ID NO: 143 - RNA, 66 nt, Homo sapiens
gaaacacagcagcaaaacccacaaggcaagcgggcaaagccaagcaggcccaaggccacgcccaaa

SEQ ID NO: 144 - RNA, 57 nt, Homo sapiens
cgggcacacgcgggcgggcccagaggaacggggaggggcacccagcagagaaggccc

SEQ ID NO: 145 - RNA, 53 nt, Homo sapiens
agaaggagaaacgaaccagaccgaccgcgggggcagagacccgcggcggaccc

SEQ ID NO: 146 - RNA, 58 nt, Homo sapiens
ccaggagaagccagggaaaccaaagggccaaacggggcgagccggcgcgaacgacacc

SEQ ID NO: 147 - RNA, 144 nt, Homo sapiens
gaaaggccggccagaaaaggcacaggcaggagcgagacacgcaagaagcaccacaaccagggaccuuggccauguaaaagugcuuacagugcagguagcuuuuugagaucuacugcaauguaagcacuucuuacauuaccaugg

SEQ ID NO: 148 - RNA, 136 nt, Homo sapiens
gcccacacccgggggggaggcaacggcaaaaagagcacgcccggccgggaagaaaggaggaucaucccuggguggggauuuguugcauuacuuguguucuauauaaaguauugcacuugucccggccuguggaaga

SEQ ID NO: 149 - RNA, 156 nt, Homo sapiens
acagcacacaaaggcagggcacagcgaaagaagggcggcaaaccagcaaaacgaggaaagacauugcuacuuacaauuaguuuugcagguuugcauuucagcguauauauguauauguggcugugcaaauccaugcaaaacugauugugauaaugu

SEQ ID NO: 150 - RNA, 63 nt, Homo sapiens
ggcggcgggggacacgagcaagagagacaaggagaaaaagcacggaccacgaaaccgcaggac

SEQ ID NO: 151 - RNA, 79 nt, Homo sapiens
aaaagacggcggcgggggacacgagcaagagagacaaggagaaaaagcacggaccacgaaaccgcaggaccgggcgaca

SEQ ID NO: 152 - RNA, 76 nt, Homo sapiens
ccaaaggccggaagggcacaggcagaggaagcagcagaacacgcccaaagcccccggcacaggcgccaaaacagca

SEQ ID NO: 153 - RNA, 75 nt, Homo sapiens
gaaagagggccagagaccaaaggccaaggcaggagggcagaccacgagagggcacccagaccggaaacaaaccgg

SEQ ID NO: 154 - RNA, 72 nt, Homo sapiens
ccgcccagggccaggcggagcagcagcggggaagagggaacgcaacggcagccgcaccaacggccccggggg

SEQ ID NO: 155 - RNA, 59 nt, Homo sapiens
aagagggggcaggggaagaggagcgcgccgcccacagagcggggggccccgagcggccg

SEQ ID NO: 156 - RNA, 77 nt, Homo sapiens
cgccgcgcggcgcgccggggccgcggggcgaaagggaagggacgggggggggaccggccgggcggcgagagagggcg

SEQ ID NO: 157 - RNA, 80 nt, Homo sapiens
gagcgggcgggcgggcgggcgagcgcgagcgagaacagccgaccagcagcgggaaggggggccgccaccagacaaccgcc

SEQ ID NO: 158 - RNA, 75 nt, Homo sapiens
ggccagccccggcgcgcggcagcgggcccaggcgccacaccagcccccgcccgggccgcggcgcgccggcgcgca

SEQ ID NO: 159 - RNA, 78 nt, Homo sapiens
ccaaggcaccagacaacggacgggaaggaccagaccaagccacgccacacgccacccagaagacgggaggccccccgg

SEQ ID NO: 160 - RNA, 74 nt, Homo sapiens
ccccagccagcccacacaagacacccgccaagaaccaagggagaggaaggggaaaggggggcacggggcaggga

SEQ ID NO: 161 - RNA, 69 nt, Homo sapiens
ggcaacacaccccccccacccccggacaggaaacaaggggcagaggggcgagcggggaacagcgggcac

SEQ ID NO: 162 - RNA, 82 nt, Homo sapiens
ccggcccccaggcgcagcgcgggaggccgccgggaccgcggcggcggcagcggcgcccgcaggaccggccggggccgaccgg

SEQ ID NO: 163 - RNA, 69 nt, Homo sapiens
gacgggagggaaaaggagagggaacagaccgcccccccaggccagccgaggccgcgcgccacccgccac

SEQ ID NO: 164 - RNA, 81 nt, Homo sapiens
ggggaccgggccaagaggcagcaaacaggaagcaggggggggacggcaccaggcgcacggcagagggccaggcagcccaca

SEQ ID NO: 165 - RNA, 76 nt, Homo sapiens
gagcaggcccgcgccgaggggagcagaccaggcacggggcgggggggccgcgccgccgcacgcccggaggccgcgc

SEQ ID NO: 166 - RNA, 64 nt, Mus musculus
gcaggggggggcgggaaggcgcgccggcccccagcccagcaccaccagccaccccaggcgccgc

SEQ ID NO: 167 - RNA, 87 nt, Mus musculus
gcgggcggggaccggcggccgcgccggggcgcgaggccccgcccccggcgcgcgcggggcccggcagcggacgcggcgcccggcggc

SEQ ID NO: 168 - RNA, 70 nt, Mus musculus
cacgcccaggcagggcggcgcagcggagggcgaagcccggagcgcagagaagcgcaccaaggagacggag

SEQ ID NO: 169 - RNA, 61 nt, Mus musculus
gaagaccagggaggagcccggcggccccggcccggcgcgccaaacccggcccggaacggac

SEQ ID NO: 170 - RNA, 65 nt, Mus musculus
gcaagggaaaaggagggggggcgggccaagcgagcacccccgcccccccgggaccagacacgagc

SEQ ID NO: 171 - RNA, 75 nt, Mus musculus
cagcacaagggccgcgcccgcccccgaccgggacgccaccacgccacggaagaggagaggcaggcgcccgaggcg

SEQ ID NO: 172 - RNA, 81 nt, Mus musculus
agcccagggcgcacgcccccaccacaggagcagaggaggacgaccacagagcaaagaggaggcgggcagcaagagcccggc

SEQ ID NO: 173 - RNA, 45 nt, Mus musculus
aacaaaagaaaggggagaggacaagagaagcacagacagaaagaa

SEQ ID NO: 174 - RNA, 83 nt, Mus musculus
ggaggaggggcgggagcgcgcaggcgcagcacggcgcggagggcgccgcccggaccccgcgccccgcgccccgcgccccggcc

SEQ ID NO: 175 - RNA, 74 nt, Mus musculus
gcgagagcgagggggagaaaggagcaggcgcacagcccggccaggacccgggcagcccgcggagccaagacagc

SEQ ID NO: 176 - RNA, 84 nt, Mus musculus
gcgcccccacccccacaccgcccacccaacgcagcgccaccacaccgcccagccgggggcagggagcccgggggggacacggac

SEQ ID NO: 177 - RNA, 68 nt, Mus musculus
gcaggaaggccgagagcaggaagcagcggggagaggggggaggcggccgaggcgggccaggccacccg

SEQ ID NO: 178 - RNA, 54 nt, Mus musculus
cccagcgaagaacgaacacaggcgacagaaaacccaggaacagccagagcgggg

SEQ ID NO: 179 - RNA, 65 nt, Mus musculus
agagcgggaccccagccgagaacgaaccagggaacaagcagaccggaaacagccagcgggaagcc

SEQ ID NO: 180 - RNA, 69 nt, Mus musculus
ggcgaaaccgaggggggcaaaaagccagccaggccaggagggggaacaggccagccacccggagagcca

SEQ ID NO: 181 - RNA, 74 nt, Mus musculus
cagcgcgaacagcccccggagaagcccgaggcagcagacccccgagggcgaagccaggagacgccagggcaggg

SEQ ID NO: 182 - RNA, 74 nt, Mus musculus
ggacggggaaggggggcggggaacggcccggaccacggcggcagcggcggcacgcccggcagcgcagacccgcc

SEQ ID NO: 183 - RNA, 78 nt, Mus musculus
ggccggccgccagcacaaagaggagaggcgccggggcccgcaggggagggggccggcggacggggacgcggcggaggc

SEQ ID NO: 184 - RNA, 91 nt, Mus musculus
gccccgccagccgcgcgccacgccccccgccgccggccgcggcggagccgcgcgccccggaggcccggaccgggcggcgggcggcggcggc

SEQ ID NO: 185 - RNA, 89 nt, Mus musculus
gggaaccccggggcgcgcggcccgcacgcggccggcgagcaggggggcgggcgcgcggacaggcggggcggcgcgcgcccggggagccc

SEQ ID NO: 186 - RNA, 85 nt, Mus musculus
cgcgagcgcgcgcgggcggccggccgcccggggaacgcgcacgaagggcgcaccgggaggcccggccgccgccgcgacgcccgcg

SEQ ID NO: 187 - RNA, 63 nt, Mus musculus
gagcgagacagcccaggccggcacgcagaaaaaacagacgccgaagcgggcccgccagacaca

SEQ ID NO: 188 - RNA, 61 nt, Mus musculus
gaagcgagcgaggcccaagcacggcgaacagaaacgcaggccgagccgggcgccagacaca

SEQ ID NO: 189 - RNA, 76 nt, Mus musculus
gcaccagggagcagggagagcgggcagccccacggccagcaagccacagcccagagggaccaccacagccgggggc

SEQ ID NO: 190 - RNA, 72 nt, Mus musculus
aggggcaggcggcgaggcagggcggaaagggggccagcacccgcgcggacacgcccgcgacagcgcgccacc

SEQ ID NO: 191 - RNA, 63 nt, Mus musculus
acaggcagcacccaaaagagaaagcacacaacagcacggaggggaggccacaggagaggcacg

SEQ ID NO: 192 - RNA, 60 nt, Mus musculus
acaggcaccaccaaaagaggaaacacacacccccaggcgagaggccacaggggacgcacg

SEQ ID NO: 193 - RNA, 70 nt, Mus musculus
ggaaccaagcagccccaaccgcagcacgaaggacgccaggacagagaggcagagcagaaggcgcggaagc

SEQ ID NO: 194 - RNA, 89 nt, Mus musculus
ggacaccgggcggacgcgaagggggcgccccgcgcaccgcagcgcgggaggaggcgggcgggcgggccccgggcggcgccagggcaacc

SEQ ID NO: 195 - RNA, 78 nt, Mus musculus
ccggccaacaggcacggcgccacgaggccgggccgcggcgagcagagccacggcacaacccaaacggaccgggcgggg

SEQ ID NO: 196 - RNA, 80 nt, Mus musculus
ggcacgccgagggcgggccggcgacagcccggcggcccccagggagaacccggggcaccaggagccgcgccggcgcggac

SEQ ID NO: 197 - RNA, 82 nt, Mus musculus
gacaggcccagggcagcggggcaggcacacagaagcacgacggcgccgagaggcggccgccaccgccaccgccgcggccagc

SEQ ID NO: 198 - RNA, 68 nt, Mus musculus
gaaacacagcgccaaagacccacaaggcaagcaccacaaagccaagcaggcccaaggccacgcccaaa

SEQ ID NO: 199 - RNA, 58 nt, Mus musculus
agggcgcacgcgggccggcgccagaggaacgggggcgggcacccagcagagaaggccc

SEQ ID NO: 200 - RNA, 59 nt, Mus musculus
agaaggagaaacgaaccagacccgaccgcacggggcagagggaccccgcggcggacccc

SEQ ID NO: 201 - RNA, 66 nt, Mus musculus
gagcccaggaagaagccagggaaaccaaagggccaaagaaggccgcgagccggcggaaccgacacc

SEQ ID NO: 202 - RNA, 63 nt, Mus musculus
gagagccggccagcaaaggcaacaggcaggagcgagcacgcaggccagcaccacaaccaggga

SEQ ID NO: 203 - RNA, 65 nt, Mus musculus
gcccacaccacaggggggaggggcaacggagaaaaagagcacgcccggccgaggaagaaagaggg

SEQ ID NO: 204 - RNA, 63 nt, Mus musculus
acagcacacgaaggcagagcagcagcgaaggaaaaggcggcaaaccagcaaaacgaggggaag

SEQ ID NO: 205 - RNA, 63 nt, Mus musculus
ggcgacaggggaacacgagcaagggggaaaggaggaaaagcacggaccacgaaaccgcaggac

SEQ ID NO: 206 - RNA, 83 nt, Mus musculus
gaaagaacggcgacaggggaacacgagcaagggggaaaggaggaaaagcacggaccacgaaaccgcaggaccagggacagccg

SEQ ID NO: 207 - RNA, 73 nt, Mus musculus
cccgaaggccggaagggcacaggcgaggaagcagcacaacacgcccaaagccccccgcacaggcaccaccgca

SEQ ID NO: 208 - RNA, 79 nt, Mus musculus
aacaagccggaccagaggccaaaggccaaggcaggagaaccaccacgcagggagcaccagacccggacaaccaaggcgg

SEQ ID NO: 209 - RNA, 75 nt, Mus musculus
cgccccagggccaggcggagcagcagcgggcagggagggaccgcaacagcagcggcaccgacagccccgggacgg

SEQ ID NO: 210 - RNA, 64 nt, Mus musculus
cagagggcggcacagggaagaggacgccgccccccacagagcggggggccccgacgaccgagcg

SEQ ID NO: 211 - RNA, 91 nt, Mus musculus
  misc_feature (2)..(2): n is a, c, g, or u
  misc_feature (8)..(8): n is a, c, g, or u
rnahmsansdcmmchrcgccgcgcggcgcgccggggccgcggggcgaaagggaagagcgggggggggggccggccggcggcgacgagggcg

SEQ ID NO: 212 - RNA, 83 nt, Mus musculus
gggcgggcgggcgggcgggcgagcggagggagaacagccgaccagcagcgggaaggggggccgcccgcccccagacaaccgcc

SEQ ID NO: 213 - RNA, 73 nt, Mus musculus
ggccagccccagcgcgcggcagcgggcccaggcgccacaccagcccccgcccgggccgcggcgcgcgggcgca

SEQ ID NO: 214 - RNA, 76 nt, Mus musculus
ccaaggcaccagacaacggcacgggaagggccagaccaggccagccacacgccaccagaagacgggaggcccccgg

SEQ ID NO: 215 - RNA, 77 nt, Mus musculus
ccccagccagccccacacaagacacccgccaagaaccaagggagagcgaaggggaaaggggagcacgggcgaaggga

SEQ ID NO: 216 - RNA, 69 nt, Mus musculus
ggcaaacaccccccccgcccccggacaggaaacaaggggcagagggggcgagcggggaacagcgggcac

SEQ ID NO: 217 - RNA, 84 nt, Mus musculus
ccggccccaggcgcagcgcgggaggccgccgggaccgcggcggcggcggcggcggcgcccgcaagaccggccggggccgaccgg

SEQ ID NO: 218 - RNA, 69 nt, Mus musculus
ggagggaaggaagggagacggagccagaccgcccccccaggccggcgacggccgcgcgccacccgccac

SEQ ID NO: 219 - RNA, 81 nt, Mus musculus
ggggaccgggccaggaggcagcaaacaggaagcaggggagagacggcaccaggcacacggcggagggccaggcagcccaca

SEQ ID NO: 220 - RNA, 76 nt, Mus musculus
gagcaggcccgcgccgaggggagcagaccaggcaccggggcgggggggccagcacccgccgcaccccggaggcggc

SEQ ID NO: 221 - RNA, 3228 nt, Homo sapiens
aaacgcacacagaaaggagcaaagagcggaagaagaggaagagcaaccagaaacaaaaaaagccacaaaaacgcaagaggaaagaagagaaaaaaaaagaaagagaaaaaaaccaaaaaaaacaaaaaaaaaaagcaccagacaaaaaaaaaaagagcaacaaaacagaaaacacaccaagcaccaaaaaaagaggacccggagaacccaaccagaccacagaccaaccgcaagacgaaaaaaacgaagcaaagagaggccaccccccccacccaacaagaccagaacccacaaacccaacccacacaacaaaaagcaaaaaccaaagaaacaaaaaaggaagacacagcaggcagaaacacagaaaaggccacaagacaacaagcaaagaaaaaaaacccaagaagcaaaaagcacgaaggcggagaaaaaggacaaagacaggggcccagacaaaaaacccacgcacacgcacagaaaaaaaagaccaagcacagcaacacgcagcacccaaaacagagcacagacaaagcagaaaacaaaaaaaaggaggaaaagcaagccaccaacacgaaaacgcccaaaaaaggaagaggaaaaaaacaaggagcaaaaaaaacacaacaaaggacacccacagacaaagggaccaacccaggaaaggcgggcacaccccacccaccccacaacacagacaaaagaaacaccaagggggaaggcagcaagcacaaaaccccaccaccgcacaggaaacggacgaaaaccagacagggcaccgcagagcagcacgagaacaggaacaggcgagagggaacggacagacaggaagaaacagcagaggggagaggaccccaagaagagcacagacacaagggcaaaaaacaccaccaacaagaaagaagcaccaaaaccggagacaaaggcacggaaacacagagagagaaaaacaaacaacaagcaaaaagagggaaggcgaagggcgaagaaaaaaggcgcgggagaaaaagagaagaaacagaaaaaggaaagcagaaacacacagagcagaaaacacggaaggggagaacagcaaaggaaacgcgggaaacaacccaaaggagcagggaaaaacaaaaaagcaacaaaaaccggcaaagaagacgcgcaggaaaacgggacagaggcacgaggaaccagacgggcaacacaaaagagaagagaagaagagagacgccgggcagacgacaccacaggagcgaccagaggagcgaccccgacccagccgaaaagaggagaacagcaccacccaggaaggagagaaaaaaaaagagaacaggccggcaaaggaagcaagacaaaacgcggcagaagcggaaaacaggggagacacgggagacacaaggaaccagagaagaaagcacaggcagggaccagagaaagcaagaaaagacgaaaaaaaagcacggagacacgagagaaaccacaggaagccagacaaaaaaacacgcaacaaaaaaacaaaaaagcagacacagagagcaggagacccaaaccaggcaaaccaaacagccagaaaaagacaaaaaacaaaaaccccacagacaaccgagacgagaaaaaacaaaagaagggaaggaaagacgaaaagaagagcccggaacagaggacgccagaacaagggaagaagagacagcagcgccggaacagcgcagcacaccgagaacgaggcagcaagaacagaggagcacacagcccacgcccgcccagaaagccagacggaaaagccagaaaaaccaaaaaaccagaaaccgaaacacccagaaaaacagaaccgcagaaaaacacaggcccaaaggcaacgcaaccaaaaaaaacgagcaaaccaagcgaggcagcaaaaaggcgcagcaagacacaagcaacagcccaccgcccacggaggcaggcacccgagggcgagagcacaggccgcgccccacccccggaaagagcggcagcagagaccagacaggcccaaggcagaaggacgagcaaagcccccggaccagaaggcaccggagagagaaaccaagaaggagggagcgccaaccagcagcccccagaggcagccaacccagcacccaaagacaagaccaccacaggaagaagcgaaccaccaacagaacagaacaaagacacacagaccagacaaggcaccgcacccaggcggagggagggcgcgaccgccacgcagcccgcccccagggccaagcaacccccacccagcccccaagagcggaacaaggcggcgccacaacacggaacaaggagagaggggcaccaggcccaggaggcgaacccggccaaggacccccaaccagcccccaaagggggaacaggcagagccacgcaccggccacacagacaaaaggaaacacagagcccggaaaggaaaaaagggaaaaagaaaaaagagaaaaacaaaaaggaaaacaagaaggacaagagagacaaaagcaagaaaagagcaaaaaaccaagcagagagaagggcgaaaagggagaggaaccagagaagaaagcacaagcaagggccaggcacggggccagccgaaccggcacgggaggcgaggaggggacacgaggcaggagcaagaccagcgaccaacagggaaacccccgccacaaaaaacaaaaacggagggggcgcagccgaacccagcaccgggaggcgaggcagaaaagcgaaccgggaggcggagagcaggagccggacagccgcacccagccgggcaacagaaagagacgccaaaaaaaaaaaaaaggaaaacaaaaaacgaaaagaaaaagccaagcacaaaagacgacaagcaagaacgcaaaaacaaacgaaagaaagggaagaaaacaaaaacagaaaaaacccaaaaacgaaacacaagaaaggccacacgagaggccacagggagaggcaggccgacccaaccgaaaaaaccaaaagacaacgaaaaggacagggacaaccaacccaagcccacaaaagaaaacaccgcgcagcaacaaaacccaaaacaagaaggaccccaagccaaaaacaaacacaggacccaagaagagagaaacaccgagcaaaaaaaagaaggaagcacacagcacggaaaaaccccggagaacaagaaggaaaaacgaaaaaggagccacaacccaagcacggagccacaagcccaaaaaacagacagagaaaaaagccacagcccaccaacgagagcca

SEQ ID NO: 222 - RNA, 73122 nt, Homo sapiens
aaaaaaaaagggaggaggggcgggaaagagcaagcgaagacggaagaagagccaggcaagaggaaacagcaagagaggcccagaggcaagacacgggaggggggcccggccagaaacagggaggccagggcgcacggaggagcgagggagaaagaagaggaggaagacagagagaacgaaggcgaggagggacacaaagcaagcagggaccaacaaggacagagccaaaagaagggagccaggaggcgacgaggaggccagacgaccagaccaggacaccaagcgcagggagaccggagggacaggggggagccagagggagagaaagccaggaaaagaggagggggggcgcaaggagccagagaggagaaaggaggaagggagaaacgagccaacaggggcgagagaaggaggggagagaaggaagggacacgagcggcgagaacgccacaagaagagagaagaagaagcagccgcaagaggagaaagaacgaacaagaagaacccagcaacaggccagcacagagaggccaaacaggagaaacaaaaagacgccaccggaaaacgcagaccgcccacaccaagcaccgagaaagcacaggcaggcgccaccagcaaaggaccacagaacggaccaagggaaagcccaggcacccaaaaccccgacccacaagcggccggaccaaaccgcacaggcgacccccccacccacccccccccagccccaacaggaaaggacaaaggcacaaacggaagcaggcagacaagcgggcagagagaccaagccacagaaaacagcccagccccaacaaaacggaagcgaggacagaaagagaagggcgcagcccccacagagacaaggaaacgaaaaaacccaaggaccagcccacagccaggcaaaaacacaagaacaaaaaaagcaacaaaaaagaccagcgagccccaaccccacaagccaccagcaaaccgcaaccccccaaaaagacccaccgcacccgagacggagcgccgcaccaggcggagggagggcgcgaccggccacgcaagcccgcccccgggcacgccacccgcccggcccccgagagcaggacacaggcacccaccaccacgcccagcgaagagagaggggcaccgaagccacgagggacccgaccccgaccacccgccggcccccaaaggcgggaacaggcgagccacgcgcccggccacgcacccaggcaccaccagagacaaaccaccaccaccgaaagaacagccagagcagcccaacggccccccccacccggcccccacgcaagcaggacagcgaacgacggagaagaaccaaagaacccccaaaaccaccagaaccacagcaccggccaacaggccacagacggcccccaccgaccagacgcaccacaccccacacaagccccgacccgccggccgaaccaggcccccccggcacaggcccaagagggccaccccacccacaggacccacccccaacacaccggaggcggaccaggcgccaaagaacagaaaggcaaagggagggagcacaccacgaagggcaaaagacgaacccacaggccccccccccccccccacccaccagagaagcaagccagggagcgcccggagaaggacgcaggaacaagagggccccagccaacagccagcaaggaaggaagccccagcaacagcgggagaaacgaaggccacaacaggaggagcggaagcccaccccagccaaccaaacaggacacacccggccaacacaagacagcggagagacccgagacagaagaccagcaagccaggcccagaccgacccaagaaacggagaaaaaaaagcaaaccagcaaggagaacaaaacaacaaagacaacaaaacacccccggaacaccccccagccagaaacacaccaggcccaaggggccacagcagccccagcccagagccccccaggccacccagcaaccacaccagcccaaccgcaagaccacaacgcggaaagaaaacgaaccgcccacgaaaaaagccccaagaagaggaaccccagaagcaggcggaaccagcccaaaaagagccggaacaaagccccccaaaaacaggaaaaaaaagaagaaaagaagaaaaggagggggggggggaggaaggagagccccacagaaaagccaggacaggaccagcagccccgaacccagcgcgagacaaaagaaggaccccaggggccaaagaacccccaaccaaccgcgaggcagaccagcgaacagggggcaaaaacccacacccccgcggcccacccccccccgcaacccaccgacagcaacacaccccaaggaagagcaaaaagagaaagcagaaccacaacaccaacagaagaccaagaccaaaaaagagagccccgaaacagggacaaaacggaggaagcaggccaggggagccaaggggaaaagagacgcaaggcccgccccacgcagcgagcgaaggaaagaggacaaccccaagcacagagaaagagaaaaaagacacccaaagggccccccaccgaaaaaaccagaggagggccacaaagcggcccaaaagagaacacaccaaagccaaaaaagaaaaggggcagagaacaagaaggggagaaaaaaaaaacacaacacaccaaaaagacagacggaaagaagaaaccaagagggccagaagggaacaagaaaacgcaaccggcaaaggaaacggcacaagaagaaaacaggaacacgaaaaaaaaacagacccagcagcaggaaacccagaaagggcacagggaccaaaagacagacagaaaagaagcagaagagaagccccaaccagaacaacaaagcagcaacaaagagaggaaaacaagggaagacaaggaagcacaaaaagaaaacaaacacacaaaaacagaggagaaccaaagaaaagagaacaaaagaaacagacacgaaaagccaagagagaaaggaaccaaaaaaaaaaaaaaagacaagcaaacggcaccggggagaggggaggggcggaagggggaaaggcgccccagagggagcaagcgcgaccggggggcaggcaaaaggacgcacaagagcaccgcgagcaagcaagaaacagaaaaacaaaaaaaaaaaaaaaaaaaacaaaaaagaagacaacacagcaaaccaaaacacagaacagcggccaaaggcaaggccacaaaagggaacaaagcaaaacccccgccgcaagaacagccaaacaaaagcacaaaaaagcaaagaacacaacaaacaaagcacaaaacaagacaaagccaaaaaagaggaaggaaagacacaggacacaacagagagaaagccagaaaaccggccaaagacaagaaaagcccggaccggaaagagacacaaaggaaacaaaacccagcccggaggcacacccaaagaagccaggccgcccccccggagccgcccccacccagccccaaaagaaaccaccagcagccagacacgagacaagaaggagaagggagagaaagacggaagcaaaggagaaaacagaaaaaccaggggggcaggccccaaggaaacagaaagagcaaagaagaaagcaaaaaaaggagaccagaacaggacaaaagaggcagcaaagaaacggggacacagagggggaggagggagcagaggggaaagaggaaaaacagagacagccagaccggaggggaaagcgcaccccaaaccagcacagcaaaacccaagacaaacccacagaccccgaacaaaaaaaagaggaaaaaaagaaggccagagaaaccccacaaaaaagaagcaaaaagggaagaaagggagggagacaaaagagggaggaaaggggaggggagaaccagaagcacaaagagggaggaaaggaggagagaaagaaacaaaggaggaagaccagggagaaacaccacaacaagaagaccaaaggaaagccgagccaaaaacaggcaagagagcgacgagaccagaacacagaagccagaaaaagagcaaaagaagacagaggcacagaaaagcgcagaaaaaaccagcacgaccacagggaacagaaaaaagcaaccaaccaagccaaaagaaaggcagacaaagccagaaaaagcaaaaaaaaacagaaaaaagccaaaaaacacagcgccccaagcgcggaagaaggaagcgaagcagaaaaagaaagcaggagaaagggccccagaaggggggggagggagaggaacagccgggaacccccccaccaggccggccgcacaggagagcaggcccaagaggagaaggcaaaaaaaagcacaggcgggcacagggccacgccgaaccagcacgggaggccgaggcaggggacacgaaggaggaggagaccagccggccaagagggaaaccgccacaaaaaacaaaagagccaggcacgggggggcgccgaacccagcacaggaggcgagggggagaacgcgaacgagaggcagagggcaggagcgagacagccacgcaccagcgggcaacagagcaagaccagccaaaaaaaaaaaaaaaaaaaagcacaaaaaacagcaacgccaagaaaagagacagcgaaaaacaaaagacgacacagaagaggaagagaccacagagagccagaaaaggcacccagagagacgccgcccgaaacccgcagagcgccaggggaggagcaggggcggaaaaagcaggacgggccgaagagacaagccagaggaaacaggccacacggcgggaccagcaagaaagggccccgccccacgaacaggaaaaagccaacaccggggcagaacaaaaagagaaagggaaaaaaacaaagcaccagggaaccgagaagaagagggcccaaagcaccacgccacccacaagccccaccccccaccacacccgcccgccccaaagccaaagcaaggggggcgggggggaaggaggggggaggcagggaaggagcagggagggaaacgacggaaagaaacaaaaaaaccgccaagccccacacccggaaccggcaagaaagggaggagcgaccgcgaaagaggcacaaaaagcaccagcacaaacaagcaaacccacaacaaggaagcaccagagaccaagcgggagaccacaaacaacaagaaaaaaaagcaaccgaaaacagaaggccaggaacgcaaaaccaacaaagaggcgccagacaaccaagcagaggaaagaggcacagagaggcgaaaaccgaccaagaaccaggccaagcaagcggaaagccagagcagaagcaagaaaggcagcgggggccaaaacagccacagaagaagagaagaccgagccagccccccccaaggccacccacacaccccccgacaaccaggcgaagcccagaacccgaccaagcacgacggacacggaacaacaacagaagagaccaagaaaaaaacacccccccacacacacgagaagacaaaaaaaaaaaaacagcccgaccacaagggacacaacgacacaaggacaaaaggagagaggaagaaacagaccaagaccaacagcacgcaccaaacagccgaaaaaagagaacaaagaaaaaaaggcagaaagacccagcaaagcaaagaagacgaaaccaaggaggcaggcaagcggagcaaaggagggacaggaggacaaaagaagaaccaaaaaacaagacaagccccacaaagaaagaagcaagaacaaaaaaccaagccggccgccaaaccaaaaagacaacccaccacaaaagaaggcgccccacaggacaacacaaaaacccccaacagcagcaagcacaacgcaacccacagcaaaaaaacagacaagcaggaaggcacacacacacccccacgacagcggagggaacacaagcagcagagcaggcaggccgccaacaggacacaaagccgggcccaggggcacagaacaggaagggcgaggcaaaacagggagagacacacccaccgaagaaccacaaaaacccaaaaaggcaaagagcaccaagcagggaacaaacccagccaaaaaccagagaacaagccaccaggagagagagaaacagacaaacaaaacggggggggaaagcaccaccggcccaacccccacacaagggggggagacacacccaggagcagaggagacgggacaaagagcaagagagcacaagaggagacaaaacccaaaaagcagaaccggagccccagaacagggagaacaaagaaagccccgagaaaggccagcagggaagcacccgaaagcacaaaaaaaagagcacggggagagcgaacgaccagaccgagaaacggaaccagaaaaaaggccacaaccaaaagaagaacaggggagaacagaaggcgggagaaagaggcgcaccccagacagcccccgagcaccacagaaaccgcagggacgacaccccccccccccccacacacacacacacacacacacacacacacacacacacacacacaccaccaccccagcacagggaagaaaacagaggcaaagggagcgcaccgcagcaacgccgggaccgagccagcccccccaggccccccacacacccaccgcaacgaccaggcaagccagaaagagcaagcagacgagacagccacacagaaaaggcccagaagaaggaacggccgcgccagacgaacccgaggccaaagacagacaacaagaaaagagaccccaaaaaccccagaaaacagcagcgcacagaacaagaaaggcagcgagaacgaccacggaagccaaaagccgcaaccaagggccaaacagcaagggagcacaggaggacaccagaggggggaaacagaggaggggccacaaagcaacggagaacgaggaaacaccaggaggacagggccacacgacgcgccacccgggccagacaaacaggggagggagcacgcaagaccgaaacagaaaaaaagacaaaaacgaaaagacagcaaaaaaaacgggcaacaacacaacaaaacaggagccgagcacaggcacgggaacgagcggaacaaaacagaaaaccaacgggaaaaccaagggaggacaagagaaaccccccccccagccaccagagccccaaacgagacaaacaccaaaaaacgcacaaggcagcacacccacagcccccgaaagacaggcacaaaggagggacagaggccaaccaagggccaggcccccagaagacaccaagcggagacaagacacaagaagggggaggcaaggcaccagggggaagcgccaaccacacaagcacaggacagccccacaacaaagaaacggcccagaaccaaggcgagggagagcccggcacagcgacacaaagccagaccaagcagcagaaccccgaccaaaaaaaaccagcaaaagagccagagacagggagcccacgccagaagaaacacccccccacaagaaacccacaccccaaggggaaacaagaaaccaccccacccgaagcccacccagccaaccaaccacaagaggagagacacgaaaaggagcaagagagagagccgagcgggagaaacaggcagagaggcaggaggcggaagggaacgacaccgagcccagaaggagcggggccgcccaagcacgaggagcgacggcacccagaggaggagaacccccaagagcccccagggaccccagccacggagacggaagcacaaaccaaaaaacccccaaacccacaagggcggcacaaagaacaagcaaaaaaacgcacagcgaaggaaacaagaaggaggaccacaacaccagaaccaccacggcacacaacacaggggaaaaaccaccggcacaacacagaaaacacccagggcgcgcagaaaaaggacaaagaaagccacaacagcaaaagaagaaaccgcccgcacaaaagccaagcccaccagccagccccagcgaaaacaaccaggaggccagcaagcacaggaaaaggaacaaagccaccggccccacacaaaaaaagggagaaaaaagagaaaggaagcggggaaaacaaaaccccaaaaaaaaagcagacgcccgagccagcgaacgggaagggaagagccagccgaggacagccaccagggaaggagagacgggcaggaagagcaccacccacgagccacggggagaagacgaccgagcccgccaccagcacgcgggagagagaacgaggcagaaccacaaccagcagaacaggaaaagccaaaagagggcgacagagaggcacagaagaaccagcccaagcaaagggcaaaacacgacacaaagaacagcgaccacacccagcccaaggccagaaccacaaaacccaagcaaacaaggagaaaacagagagaggaaacggggccaggagagcaagagccaaggccacagcaaacagagagcgcagaacaaagccaagcgcccacaggcaccaccaccaacccaccaaaaaccaccccccaccacaaaaagaagaagcaccaccccagaaaaggacagacacaccacccaccaccagcagcaacgcaagcggaaaaagcgaggaagaagagcgcaaagagacacagggcggcccgacagaaacaggaacaagaaacgaaaaaagcaccacccagcacaaccacaaagacaagggagggccaaaagcagcaaaggcccaagcaagaaaggcgaacaacaaacaaaccaaaacacaccaaagaaacaaacaggaaaacagacaagccacaagggaacgcacagaaaaagacaccccagagaaaggcacagccagacaacgccacagccgacaacaaagccaacagaagaagaagaggccaagaaaaggaacggaaggcagaccaagaacccccaccaacaaagaggaaccaccccacccacggcaggcgacaggccccagaggggcgacgccacaagaaacacaccgcggccaaagaaggaggggcaacgagggcagcgaacagaagcagaaacaagccggcgaacccgccggcgaaaggaggcgagaagagggaccaacgaccggagagaaggcaccgaggcaaaaccagagcgacagaggacaacacagggacaaaaaagaaaaaagaaaaacagagaagccacgaaggaagaggacgcagcaaaccacaaaggcgacaaaaaaaacagaaccgagccacgcacagagagagaagccaggaacgaagagcgaacaggaacaagccaggaaaaagaagaaggcccggagccgggcaaaacacacaccaagcaaacaaacgcagggcagaaagacaccacaaaaggacaaaaaaaaccaggccagcagcaaagccagccaaagaggcacaacagaaacaaagacacacagccgaccaagaacacacacagcaccagcacagcgaaaggggccaaaacagaaaaacaccaccaacaaaaaagcgggaggggggcacaccgagcaagcacgggagacgaggcagaagaacggaaccaggaggcagaggcgcaggagacaagagcaccacgaccagccgggcaacagaggagcccaccaagaaagaaaacaaaacaaaaacaaaacaaaagaaacaaacaaaaaaacaccacaaaaagcaaaaaaggggaaaagggagcaagagagaaagggacacaacaaggagagcgaaagagaagcagaggccaccgaccccagcaggacagggcaacgacagaggccacccaccaagcagccaagaacacgaaaagcaccagagagaggggaaagagagcaagagggagcacaaaaagaaccagaaaaaaagacaccaacaggccacacaaaccccaaacaacccaaaagggagaacaccagagagaaaagaagacgacaggaaaaaggccaaaggaaacaacggaaaagcaagaaaaaggaaagccagggcaggcccaaaacacagaggccccgccccaagccccagagaaggaaaggacagggcaccaagaccaacacgccggacagggcccgcaacgagccaggaccacccacaaccagccaccaacacccccccaggaagagaccccccaggccagccccaagcacgacacggaaagcccgcacgcacggccacaccaaggcggggagaagccggagaaggccaacgagcccagccagacccagagagggcaggacccaagaggagagcgagaaggacgaacacagagcgaccggggcaaacccgggagcaccccccaccccaaaagcaaaccaaccagagcaaacaaagggcagaggaggggcgggagggcaaaagcaaacaaccaccagaggaacaaagacaaagggaggaaggagacagcgagacgcagcaaacagccccgcaaaagaagccaacaaaccagaagaaaaagcagagacccggcgaacaacagcaccacccgaagccaaggcccccggagaccacccccagacacagagagagaggcaagagacccagcgaagaaacaaagcccaaacgcagaagagagacagaacagaaaaacaacaaccacgcagaaccagggaaagcgagaacagaacaaaacagccccaaacaccaagccaagaaggaagcagaaagagacgaaacaagggggaaaagaggacggcaggaagaggggcaaagccaaaaagaacacaggccggaccaccggaagagaaagacccacaagacagagaaaagagaccacagaacaaacacaaagccagcacagaaaaacgcagaaaggccggagcagaagacagcaggcccaagagcgacaggaagcacaagagaagagagcaagaacaagcaccaggcacagagacggaagaaacaagacagcccccaggagcaacaccagaacagagaagaggagcagggagcaacagagaaaaccagaacccacccggagaccacggccaggcacggcccaggagagacaacagggaacaaaaacacagcgcccggagccacagcgagcaagaccaagggagcgcaacccaaagacggggcaggcacaggagaaaagggaggacgacgggcacaaaaccagcaaaaacaccaccaaaaaaggaggcaaacaacaaaccaaaacaagaaaagcccacaaccccaaaacaggagaccagggaccacacagaccggagcaaaagaacccaacaaacagagcaaccacaggagcacaagccgaaaaaggcggcaaaaggcacagccacgcgacaccacgacaaacgaggcacaggcaagcaggcaggcgggggaaacaaaacaaaacaaaacaaaacaaaaacaaccaaaaccaaaaacgggaaaggagaagaaaaccaaaacacaagaagggagcaggccaaaaagcagaggggccaagaggggccacccaaaccagaaaaagccaggccccaagcacaaaaagcacacaaaaagggcgaagagcacacaggcaacacaaaaaggccaaaagcacaaacacacccagccgcagcccacgggggggcacaaagagggagggcgccggacccaggagcaaaaccccacaagccagccaggggccccagccccaccccacccccaccggaggcccggcagcaacaggagggccccccaccccaagcaaagaaagccacagggacagaaggcgccagacccggaagaacaaccggggggagacaacgccaaaggacccacgcccgggacaggaccccggcaggacccacacgcgcaaccgacaaaaaaaagaacaggccagacgagggccagccgaacccagcacgggaggccgagggggcaaacacgaggcaagagacaagaaaccggcaacagggaaaccccaccacaaaaaaaaaaaaagccggggggggcaggcaccgagcccagcacagggaagcgaggcaggagaaggcggaacccgggaggggggcgcaggagccaagacagccacgcacgcagccgggcaacagagcaagacccgcccaaaaaaaaaagcacaacacacacacaaaaccacccccgagaacagcccagaagcccagacacgcaccagcagaacagaaaacaacaacgagaacccagggcccagaaaaaaaacaagccgaagcccgggaaaaagaggaccacaagagggccgaagcaaaaaaaaagacaagccaagcccaaaccagcacaccccccaacagggccaaaccggaggaagaggaggaggaagagaaagagacaaagcaggaaagagaaaagagaaaggcaaaaaccacgggggcccacccgaaacacgaacacagccagaggccaggcaacagcccagcggccaacggaaagagccaccgcaagagaccacagcagccagaaaacaaaaaagcacgcagacgagcaggaagaggaggcacaggaggccacgccacccggcccagagcccgcaaagcaagaacaagacagaacacaagccgccacgaaaaggcagcaaacacaggaggcacgccagacacaacagagagggacaacaaagggaagaacagcgccagaaaaaaaaagagagagagagagggaccaagaggaaggccaggggaggagaaaaaggcaggaaaaaaagcaacaggaaccccgaagaaaaaaaaagcgggggggagggacgccggccagaaggggagggaaaacgggaggaaaagaaaaagaagagcagagacgcaaaaggggaccccagcgcccccggcagggaagcaagcggaaagagagaccacaagaacgcaagaacaagaggcggggacacaggaacagggagagcccagccccacaaaggcaaccagccgaggaccgagaccacccagaacaagcccacacaaaagcaggaacgagccaaaaacccacccacccagagggcaggggagccgcagaggggaagcagggaggcaccggcagaaaagaccacgcccccacaaaggcccgccaggaaggaaacaacccccccaccccaggcccccccgcacagggccagccccccccacccccgacaagagcgggccccgacccgaccacgggggagaaccgcccaagaaacaccaccccccagcccaacgcccgccccaggggagcccgccccccggaccgagggccaccagaccacccacccaccgccaccagggccaacgaacaaaacggccacccccccgggacccacccccccagcggagagagaggcccaacccccagggaccggaccacgaccaccagcccccagagcacgggaaagcccagcgccaaggcccaggggggggcgcagcacgcgccgggacaggaccccacaacacgagagacccgcgacccggccaagaggcgccgcccagcaccagacaacaccagcaaaaaacaaggccaagaagagaaagaggaaaagcagagcaagagaggaaagagaagaagaaccggagagcgcaggcccacggaggcccagaacccaaggaagacaaccccccgggcaacagcaggaaaaccccgcgaacccacacacgagggaaccaggcccccgggcacaagcgacacagacagcagcacaaaagccagcaaaaaacaacaaagacgaaccagaccaccacaccccacaccccaccccacagcacgaccccaccacacccacccagaaaaccagaccgcccacccagaacgccgaaagccccccgcaccccgggaaaaaccaaaccccacagcaacaaaagaccacccccaagcccccaggccaagaacaccccgggccccaagcacacacagccgacaaaaaaaaaacaacacagaccagaagaaccaaggcagaacaaaacagaaaccagacccacggcgcagagaagcaacaaacgaagagggcaacccgcacaggaaacacaggccaaccaacaggaggcacacacggcccagaaccaaagcaagagaacacgagggacggacaggacgaaacagaaggggggccacacacgcacccaacagagagaaacggaaaggggcgacgcccacccaaccagccagcccccaccccccaccccggcccaccgagcagaaaaaaaagaaaacggaaaaaacacaagaaccaagacacagaaaggaagggcacaagccagaaaaaaaacagaaagacaggagccgagacgcaccacgcacccagccggagacagagaagaccgcaaaaaaaaaaaaaaaaaaaaaaaaaaaaacagaaagaaagcagaagaggcagcaaaagccagcccggccaaacagccaagggaagcaaaggcaaagcaaaggaaacaaaaggcacccggaacgaaagaaagaagcaaaacaacggaaggaaaagagagcggaagacaaacagccacaacacccaagcaaaggcaacagagcaagccccaaccccaacggaaggagaaagagaggaagcgcagaaaagaggaagcagcagaggcggcagaagaaggaaagaagccacaccaaacaaaaaggaaagggaagagcaaggcgaggagaggcgcagaagaaccagaagacagaagaaagaccagaaaacagaagaaagaaaaagagcacacaagcaacagaacaagacaagcagccaacgcaagaagagccacaggaccgagcacagaggagaagcaagccggcaaagccaccaggcagggaacccgaggggccaagcagaggagacaggaaagcaagccaaccaccaaaacaagagggacaaggcacaacggcaggagacaagaccaggccagagggcgcacccaaaccacaaacaaggaacccaagcacccccccccccccaccccacaacaggccccaggggagccccccggccaggccagcgacccaccagaggagaacaggggggggccgcaaaggcgagaagagaccagccaccagcccacaaaggaaagaaccacaaggcgcaggaccagggaaggccaacaaccagcacagaggacagggggccaagcgcaggaaaggccgcaaaaacaacgggcaggcaagcagcagaaaaccgggaaacccagaagggagcgggcaaaggacagcagacaacacaaacagggcccagaacagcaaacaccgaggcgaaaagaacaacaaagccagggacagcacacgaacagaagggcgaaaaagcccggcgagaccgcgcgaaaacaaagacccaaaaaagcacccaagagcgaaagcagaccaagaggagaagaggcaaggagaaagaggccggaacacagcaccgccaagcccaggagagaaaaagaccaaacccaaaaagaaaacagaaaggcacaggccaagaaggagccgagaacgagcaaaaaagaaaaccggaaagaacagcaagaggcaaagacaggagcagggaagaagcaaaaacagcaaaaggagaaaagaagggacaaccccaggagacgaaagcagggaggcaagaacgggagggagaaacagaagaagccagaaagaagggagccgaagaggacagaagacaaccggaaaaaccagggagagaaggccagagcaaaaaaaaaaaaaaaaaaaaaaacaaaaaaaagcgagagggaccaccccaggaagagcggagcaggaaagacaacaaaagacacacaacaacaggaaaagcagcagagggcgagaagagaccaaagaaagacaaaacagggaaaggcgaaacagcagcaagcacagagaaaccaaaaaagaagagcaacaagcacaaacacgcaaggaaagcaagcaccaacccagcaaccaccacccgacagcagcagccacaacagagacaagacccccaccagcaaaaacagaagagcgaaggcccaggaaagcaaaaaggggggagaggagccgccggcccaggcggaagcagggcagaccggccacgaacccgcccggcaaggacccgccagcccccagagcggaacacaggcgcccaccaccacaccggcaagaagagagacaaagcaccaaggccaggcagaacccgaccgggaccccgcccagcccaaaagcgggaacagggagagccaccacgcccagcagcaaaaaaaaaaggaggacaaagaagggcaggggccacaccgaacccggcacgggaggccgagacgggaggacacgaggcaggaggagacagccgaccaacaggaaaacccgcccacaaaaaaaaaaaaaaaagaaaaaagcgaggggggcagcacccgaaccagcacgggaggccaaggcaggagaacacgaacggaaggggagggcaggagccgagacgcacacgcacccagccgcggacagacgagaccagccaaaaaaaaaaaaagaaaaaagaggacagcagacaaagcacacacacagagacacagcaggaaacaaacaagcacggaaaacaaaaaccacggacgcaggcaaagcagcagggcgaaccaaacccacaaaccaagagcgaaacaaaacccacacaaaaggaaggaaagaaagaggcacaaacaggaaaacgcaaagcgggcaacggaaagaagagccagaaaacggccaacacaacaccgacaaacaaaacaaaagaggaggcccagaggcaaccagaccaacacgggaacacggcaaacaaacacggcagacaaaggaaggcagacaaaggaggaaaaccagaagggaacaggccgaacaaagaaaggcagaaaaaggaagaggagagacaagcagcagggagaaccgaaaggggaaaaaccagggaaagcccccccagggcccagggaagaacccgaaccaggaacaagcgcaagacgaggaacaaaaaaggaaaggacaggagcagaccagggaggcacacacacacacccacccacgcaagagaggggagaaggaaagacacggcgaaagccagaagaaaggggggggacagcgacccagcagcaacgacggacggggaccccccaccccaggcaggcagaacccgggcggcaacagggaggcgaaaaagacccgcaagaaaccaacccaaacccccaagaggcgcaaacccaaagacagaagcgcgacggacaccgccaggccagagaggaacaagggagagaaggggagagaaaaaggaggaaggaagaaacaggagcaagggaacacggacacaaggaggaagaaaacacaaacaagagcgggcaagccagccgacgggccaacaccgggcacaccagacccagagcccaacaccgagaaaggaaaaaaagccaccaccagacaaggagaaaaaaaggaagagggaacagaagggcacggaagaaaagagaaggaaaaaaggaagcaagaccaaggaccgcagaaggaaacagaggaaccaggagcggccaaggggcagcccccaagagcccaggaccagaaacacaccaaggcaaaaaaaagacaaacgacaacggacagaagagaaaaacccaaccaccagcaaccgcaacacggggaagggaggaacgcacccaccaacacgagcacgcgcagcggggcacgggaacgaaagaaacaacaaccaaagaaaaagagacccacccccgagagacagacgccccaagccagccccgccaaaacagaagccggaagagagcccaagacaccaccagaccgaacaaacccaaccagaacaaagaggacgacccccacgaagacccgagaaaaaagcccgcagcaagcagccaagacaccaaccgaagaaaaccaaaccgggcccaggaacccaaagagcacaccaaaacaagcaaacaacaaagcaccaaaacagcaggacaaaaaccgcagggagcaaacaccacaaaagagaaacgagcgaaaaggaaaaagcccaggcacacggaaagaaaaacgggccacggcaaaaaccagacgaaacaacgcgaccccacccgaagagcaaccaagcgagagaagcacaggccagggacacgaagaccaaagaagccaaagaacaccaaaaaccaggcccccaaagcaagaaagaccagaacgggaaggccccggccacccaacagacacacacaccggcgccgaaaaaacaggccccgcgcgcggcggaaaaagcaaagcaagggccacgacaggccccggaaggaacacaaaaaaacccaaacgaaagagacacccaccaggagcggggggacgggcaccacccagcaaggaggaggacaggcgcacggcccggacagggccccagcccggccacgcagcaagacaaggagcacccaggccccacacaagcaaggacgccggaaccagaggccagaagaaaagagcagagaacggagccagaagcgaagaaacaggcccggccagccacacaaggaagaagccaagcgccgcgaggacagaaggcaggcccccgcaggaagccacgcgcccaaggcagaggaagaacaagggaaaaaaagaaaggcggccgaggcacaacacaaagcagcaagcagagcagagcagcacagcccccggcgccaccagccacgagagggaaaagccagcagaccccgagcagagaaacaaggaggcacagcagggcgaaaagcaaagagagaggaggcggggaccgcagccccgccacagggaaacaccagcgcggaccagaccaagaaaggaaacacggaagagaacccacaaaacggcacagagaaccccacccaaagacagcggaggagaaaacaaagcaccaggaccagcagagaggagcaaaaagacaagcccaacagagccaagaaaaggaaagggaagcccaggaaggaagaaaaacggcagaaagagggaagaggaacggaagggaaaacacagcaccacccccgcccccccaacaggcccaggcaacaacaccacccagaaggccccgcaagcagaagccaccacacagaaaagaaagcaacagggcggcacgcccaagagccagggcacagcaacaacaaaacagacaaaacccgccccggaaagacacggggaggcagggaggcaggcagaaacgaacaagaaaaaagaaaagaacagggcaagagggcaggaggcggaagaaaagacaagggaggagaaggaaaacggcaaagaggaaacaaaaaaaggcagggagaccccacgagaaagcacgaggaaaccgaaggaagaagaagagcagcaagcggggcagagcagcgaggagagggaaagcagggcaaagggccggggggcaaggagcagcagagaggccagaggaaggaggaagcaaggagggggaagagagggaagcaagaccgggggcacagacacaaagcgcaggcaaggaggacggcaccgaggagacagaagacccaaaaggccaccacaagagaacacgggccaccaaccagagcagccagcaacgcacacagcaagccccagcccaaaagaggagaccaagcaacgaaccagagcagcggccgagagcaccgagcaaggcgacacaaaacagcaacacgcagccaccggaaaaggggaaagggaggaaggaagagaccagagagaaaaggccaggcccgcacacagggccacagaaaacggcaaagcagaagagacaggaccaggaaaagagaccagaaaaccaacccagaaagacacaaagacccacacaaagacaaaaagaagggcccaccacccaccagagagccagagggcagaaggacccacaagaggcagaggcagggagggggccagcagagaaaagaacagagaagagacacggaaaaaagaagaaaaaaaacccaaaagcaagccaccccaccccccacagcccgacagagaaagaaagggggcacgggcggaaacagagcccacaggaccagcagccacacaaaaccccccggacccggggaaaaagagagagccacgacagaaaaacgcccccccagagccgccacaaaaacagacagcagaaccccccagccaagaacacgaaccaggaaggccaaacaagaccaaggacaagcagaagcacggccacaaacagacacaagaaagaccacgagcagccaagcaccacagaaagaggaaagacaaaaaaacaagcccagaaagcagaaagcacaaaagacaaacgaagacgggccaccgaaaaaacaacgaaagaacaaacgaggagaacagcaaaacccaagccgcggaaacaagagaagccagcaagcacacaggaggccaggagaaccacacaacggaaagagacagaaagcaagaaaagcgcgggaaacacgcgaccacaacaagagggacagcaccagacaaccaaccagaccgcagagccccagacaggccccccgagcccgcacccgcgcacgcccccagcaagccacaacaacccagccaccagcccgcaccagcgcccaggccagaagcccacaagacacaagccgccaagcacccaagaggcacaacccgcagaaagcaacccacacccccagaacccgaaccccacaccccaacgcaagcaaccacccccaccacaaacaagcgagcgcggccaccacagaacaaaacacaaaagcaggagccaccagaaaaacccaaaccagaaggaagcggcaaaaggccaaagacaagaggaagaaaagaaggaaggaaggaaagaagggagggagggagggagggagggaggaaggaaggaaggaagaaggaaggaaggaaggaagaaaggaaggaaagaaagaaagcaagagaccgggccaaaccagcagggaaaagagggaggaaagaagggaagcaagagaccgggacaaaccagcgggcagaggcaagaccagagcagaggagagccgagccagggacgcccacggccaaccccacaaagcgggcacacgagaggacagcggcagagagaggcggggggagggcgcaaagggcggggggggaccccagcagcaaagacaagccccgcacaaggccagaaagaaggccgcagacaagaaggggagaaaagggaagagcaaaaggaaaaagggggcagaacagggacgcagcagagccagagcccagaggcccgccacaagaacccagcaccacccaggaaaggaagggccaggccccccacgcaaagggagaaccgggcccaccccagggcaccccccagagcaggcggggagccgggaccccccacggcgccacagcaaaagggagagaaccccgagagaacgaaagaaagaggaaagcaaggaaaacagccagaaggcagggaggaagcaaaaaggaagagaaggacccgagaggggaaacagggagagcaccccagaaaaaacaaggaaaagccaggagcgacaaaaacacagccacagcagaccaaagacaaagcacccaaaaagcacacagaggcaagcagaaaaaaaagagaaaacacacccggagaaaggccacaggaccaaaacagaaaaaggaaaagacacagcaaacaaggaaaaagagagaagagcaagaccaaaaggagggcagggacagacaagcacacgacagaggagaaaacccaaagcaaaacaagaacaaaagaaaaggaagaagacacaagaaaggacaaggagaaaggaaaaaacagagaggcaaaggacaaagaaaaaaaaaaagaaggggaccacccagaaccgaaacaagaaccccacaacccgcgcagacacaccaaacggaaaaaaaaagaaaaccagaagacacaagacaagaagagggagcgcaacgggggaagcaaggggagagaaacggaaaagggggcagcgccgcaaccaagccaaaacaaggccaaaaaggcaaaccccaaacaggaagagaacgagccaagggaaccaacgacagagcaacaaaacacgcccacaagggggggggaaagaagaccaaaacagggcaaaaacggcaaaaaaaaaccgggaggaagcaacgcaagcaaaaccgaaaaaggccaaaaacccacccccaccacccgaaacaaccgggaggcagcacagaagaaacaaagaccgggaaaacaagagccaagggagaccacaaagaggaaaaaaaaaaaacaacaacaaaaggggaagaggacaagagccaaaaacggggagacaaaaacacagagaacaaaaaacgaaaagaaagaacagcagaaccagcacaaggagaacacgccggagcccagcacgggaagaggaggcaggaggagcacggagcccgggagccaggcgcaggcacgaacagccggaaagccacgcacccagccggacaacaaagagacacaaaaaaaagaaaagaaaaaaacgcacaccgaaacccaaaagcaaaccacccgccccagggaaccgcggaagacccagggcacaggcacaaaaagaaacaacagacacaaacggagcccaccagcagagcaagagaaccaggagggaaacacgaggagcaacaaaagacaaacgacaagaaaaagagcaggcaaaaagacaaaaagagaaagaagacgagaggcgaaccccaccaaggcccaggccaccaacaacacaacgaacaaaacaggaagacagaggacaggggggggggggggacaggcagggcagcacaaagcagggggcgggagcagcaacacggagacgaaggccgcaagaacagaagaacccccacaaagaaaacacccaagacacacccccagcaccggcccccaacaaaagaaaagacaccgcgaaacaaccccaagacaggaaccaacacaaacagacagaaaacaagagaagaaagccagagcggaacccggcccccccgagacccaagaccgcaaccagaggaaccgagcaccacccccgcagcaacaacccagaccacggagaaacaacacccaccagaaggaagccggaaagacaaggaaagacaagcgccagcacaaaaaaagccacggccccaggcgagagaaggggcagaagccgaaaaaaaggcaacacgacgagacggagccgcgcgcccaggcggaggcagggcgcaaccggccacgcaggcccgcccccggggcacgccacccgcccagccccggagagcgggacacagacgcccgccacccgcccggcaagaagagagacggggcaccggagccaggaggccgacccgacccggaccgcccgccggcccccaaaggcgggaacaggcggagccaccgcgcccggcccaacacgacagaagcagaaaggcaggggcggcaccaacgacagacggacgggcacggcagacgggacaggaggcaccagacgaacgaggagggcaaacaagaaagcagcaaacaaagacacagcagcccccccgggaacaacaagaaacagcgaagcccaaagcccgaggccgcaacccaacgacagagaaaacccaagccgcacgaaacggccccacgagagacacaagaggacagagacagccaaaaacagcaaccgccaaaacacccccaaacagcaaaccacgaggcagaaggcgcaaaacagccagacaacagaaccgcacaaggaagggcaaaacacaaaacgacaaaaaaggaaaggaaccagacaggaagaaaccagaccaaagccgagagggccccgaaccaagccagagggaaaagaaggcacaggacacacaggcgaaggggagccagaacccaccagccccgcgagaccagaaagggggaggacccagacgcgggcagaaggggaacaggccccgccaggcccgcggaccaccggcggagggggggaggggagggagggaggggggggggagggaccccgcgaccacgaggagaaaccaaggccacacccgagccacccaggcaaggggggggcaccccacacgggaggggaaagcaaagcccgcacagcccggcgaaagaggaagggcacgacaagggggaggagcgaaaacgcaggcgcccccggcccggcgaagcaacgcgggacccacgcacagacacccagggccaaccccaagaggccagccgggaagagagaccaaaagaaaacccaggaacccacgcagcaaccgagccgaggccccaacaaggccccccacccaagccccgcaaaacaaaaccaaagagcacaccaaaagaagggaaaaaaaccaccaacacaaaagagaaagacgagggagcacagaaaaagaaagaaaaaagggaagaaaaagaaaaaagcgcaacacagcaaaacgcaccacaaaaaacaaaaaagcgggcagggggcacgcgaaccagcaccgggaggcaagagagagaagcgaaccgggaggagagggcaggagccaagaaagccacgcacccagccgggcgacagacacgggcaaaaaaaaaaaaaaaaaaaaaaaaaacgcaaacgggacacagcagaaaacacagaagcaagaaaaaacacgaaagaaaaagacagagaaagcacgagaggaagcagaaagagggaaaagcaacccacaggcaagaagcaagaacaaaacaaaaaagaaacaaaaagacagccaccagacaagaaaagccaaaaagagaccgcaaagagaccacaggaggcagcgccacaaaaacacacgaaaccacagagaagaaaaaggacaggcagggggcggaacaaacagcagaagaagagaagagaaaagcagagaaaaaaaggcaagaaaaagagagaaagaagggaacgcgaagcagaccggcacaagcccacaaaaagaaagacaccaacagggccaaaaaaacaacacaaaagccaacacaaagcaccggacagaaccacaaagcaggcgcagccaacaaccagaagcaccagagcagaagcacaaaacaaggaggacaagaaacaagaccagaaagcacagaccagaaaagagaaaaaaacagccacccagggaaaggggcaaaaagagcacacacacaccacaagcacgaaacggcagaaccaaggcagggcaaaaggaacggcccgaggcagcacagcgagcaggaaaaccaagcaagggaacaagagaaccagcgggaggggggccaacccgccccaaacaccccagaaaaggccgcaacaagaacaaaccaagcagcgaaaaagccaaaaccgaaagcacacagaaggaacaaaagaggacacgagaaaccaaaaggaacaaaaaacgaaacaggggggcagaaaagagcggcgaacagaagccaacgaaaccaggcaccaaaaaaaggaaacaaagaaacgcagagaacagaccaaaaacaaggagaaagaggaagggccaaaaagaaaagcagaaaaacacgaaaccaaacaagacaacacacaggaaacaagaaggggcacaaaacagagcaaacaggccaccaaagaaaacgacaaggaccccacgaagaagaaagaggggaagagagcagcacaaaacaaagggcaagggaaggccaagaggaaccaaagaggacgcaggaaaaaccgcaaaggacacaaaggccaaacagaaccaaacaggcaggaagcaaaaaaaaacgcggggaggaagacgaccccagacaaaaagagccaaaaaaccacaagaccaaggcagaaaacgcaccccagaaaaggaagaggaaggaaaacaacgggaaaagccccaagccaaaacggcaccccaaagccgcgacacagaaaaaccggcaggaaggcgcaggaaaaacacacacagagaacagcacaagcagaaaagaagcaacaacagacaaacaacacaaagaaaaaacccacaaagaaggacaaaggggaaggaaaaggcaagggaacacaagcgaaaaagaaagagcacacaaaccaaggccagacccgagaaggggcagacacaaacagaccgaagccaaacccggcacggaggggaggaaacaaaacacggaaagaaacgacaagacccagagaccagaggcccgaacacaggccccacaccaacaacaaagagaaggcacaagacggcggagcaacaaccacgccccgcaccaacacaggaaaaaaaggcaaacacaagaaagacagcgagacaaacaaagagacaaaaaaaccaaaaacagaaaagccgggcccaccccgacaaacacagacacagaaaaagaagagagcacaaaccaaggaaacgaagcgaaaaagcccaccacaccccgcaaaaaggcaagcagcaccacaaagagaagcacccccccccgaaaaaacagaaagaccgaaagcgggaagacaagaaagaagcaaaaagaaggacaggagcggcgaagaaaccaaaaacagccaagcagaaaaaccaacaacagacagaaaccaaaccccccacaggcccaagaacaggcggcgcgaacgaaagcaaacggaacaaaaaaccccaaagaagcacaaaagacaccgaaagaagccacgcccacgcaaccaaaacacagcaccaaaggcagacacagggaccacccaggaaccccccaaaggcacacaagcaccaaccagggggaacaacccaccccaaccacagggcacagggggggaccaggggagacaggggccaggccggccaacagagcacccccacccagccacagaacaacgagggcgggggagaggccaccggggagcagccggaaccagacaccagccgagaggacaaaggacccacccaaaagccaaaaagaacagcccccaggaaagccgagcacagcagacagcgccccaaaaagaaccaaaaaaccaagaagaaaggggagaaaggcaaagcagacaagcaaagaggcacgcccgcccacacaagcagggcaacaccaaaccaggccacaaagcaacacgcaaacgcacggcaaacggaacaccagaagaagcacagcaaagaccggaagcaagagaggggagaaagccaaaagaaagggagacaagaaggagagagacaaggcagagggagggagggggagggaagaacaggcagggagggaagcagggggccaggcgcaggcgcgagaagcgggacaaggacaaaaggaaccaggaaaggacaagacagaaggagggcaagaccaagccaggaacagcccgaagcagagagaggaaaggcagacgaagacaggaagcgcccaggaagcaagacgagggggcagaagggcaagggaagaaagagaaaagaaagccaggcaacccgggcaaaggagccaaacggaaaccgcaacccggccccccgcagaccaaaccaagggcccagaaacagcccgcacaaaaaaacgcaaaagagccaaaagcaaaagagccaaaggaaggaaacaaagagagcaagccaccccaaaccagcaaagaaagcggccaggacgcacagggggaagaacagcaacacccaaaggcagcccaagcgagcaaaagcgaagcaaacccaagacaaaacgaaggaacacaacgcccaaacagagagaacagaaagacggccggaaagaagaacagaccccccaggcaccaaaaacaggacgaaaaaaggacgcaacgagaacaaggcaaggcccgcgacccacagaacccaggacaaggggcacgggaggaggacagaaccaaaacaccccagaggaaccggacaaaagcagggggcacgcacacagcggagaaaagagagaaaggacacaaaaagagaaaggccgcaaaaaaaacccaagcaggcgcacagagacgcacgcaacgccagagcaacacgcccagaaaccacacgcaccacagaggcaagaagcccaaggagagagaaacccgccaccccggccgcaaaggcagagagagagaagaagcccaaaaagagagccaaaggaacagccaaggcgacaccccagacaaaaggccacaagagcaggcagagacagaaagaggaagggacccggcagcaggcagagaggaacaagaaaaagagaggccagaaaggcgagcgcgggggcaccccggcggaggccgggaaagagccgccagagcccaccacacgaaagggggcagcaaaacgaggggacacaccacgcagaggagggcacagagaagggcaagaaaagcaccggaacgaaaaacaaaggaagcaaggcacaggccccccaaaaggaaacagagggcaggacacccagagcagcagccgggaccacagagcccagccccaacagagcacccacccgcacagaccccagagacacccccagcagggcagaccaaggcaaaccaaccgaggacagccaccgaccagagacagcagaacaagagggaaacagggggacacaacagaaaccaaaaacaaccaaagcaaagagacccgagccaccaccagaacacaaagagcacccaaaggaacaccagccaaacgaggcccccgaacacggaaagcccagccaggaaccccagcccaagaaaacgaggcagcaccacccaaagccaaccgaagcacaaagccaggcacgcgagccaacaagcacacaggaaaaagagaggagggaccagagagggaggaaaccagccgaggaccaaaacgcccaagcacacagccaaggcaggagccaggacccaggcaggaaccagaacggcagaacacgacccccgaagcccgaacaccaggaaggggggggggaaacgccacaccagcaaagcaccgccaggaaggcgcagaggaaagggcagacaaacgggagggaaggaaaagaccacaagaaaagcaaaaagccccaacaagccaccacagcgacacacgaagcccacaagaaagaaaaaaaaaaccacacaaagaaaccgagaccaaaggagaaaacagaagcgagaaacccaaaaagcaaagggggcaaaacaaggaaagagaggaaagggcacgacaagcaaggccgagcccaaggacccaaaaaccacaaccagacccagacaccgaagcagacacggggccgcacagcaggaacccaccaagagaccgaccacggggaacacaccgccccaccaccaaacagagcagccaacagcacagaaacaacaggcaggagacaggagaaccgcgaaacacaagccgcacccagggcaaaacccccacggaggaacaaaaagaaagccacaaagcacaacagagacaaaaagaggaggagggagagaagacgaacccaccagaaagcagaaaaaaccagaaagagaaaggaaacaaagccaaacaagcacaacaaaccagccgcaccaagacgaggagcggggggccaaacccgagcgcccacgaaaaagggacaacacacccaaggccggggagggaacggaaacaagcaaggccaccacaaggccggcaaaaaggccaggaggagggcccccgcgcccgccccagggggaagacgggcaggacaaaaaaaagagaaaaaagacgggagaaaagacccaagaacgccagacggggaacaaaaagggaaaggaggcaaaacagccacaacgacaaacaagcaaagcacaaacacccaagagaacccggaccaaaccgagcagagggggccggagggaaaaggaggcgggaagaggacaaccagacccgaaaacaacggcagaagacacaaccccagccagccaccaacccccacccagccgaccaaacaaagcggccaccagcaggagcccaaaacaaaacgaaagagagaacaacaaagaggagagaggcccggcgcagcgacggaaacccaaagagcagcggccacccaacaacagcagcagaaaggaagaacagcgcccacgaacaccaccaaaaggaaacccccaagccacaggaaacccaagacacaccggcaagagaacacagggaaaagaagcggcaggaaaggcaggagcaagaaacaagaacagccacccgccaacagacccaccgggaaccagggcccaccgaaaagggcagcagaaaaagaagagaagaaacaaccaacacaggcagcacaccagcacaaccggagggagcacaccagggaggagcacaacccagaccaaggaaaggaggaggaacccgcaggagacaaaagacgccaggccccaaaaacccccacacaggacccccagcaaaaccacaccgaggcccagccaaagcgcccggaggcaacaccagcccaagaacccagaaaagccaaccccacaagcccgccacagaccgaaagagcgagcagggcccagcgccccagcaggggagccaggaacagcggcagagcacaaaccacagaagaacaaaggaacaacaggagacacaccggagcagcccacagcagggaggacacagaacaagagagacaacagacaaaagcacagagagggggccggggaagaaaagaggccagaaaagccccaaaggaggcacccaagggcaggacccaccaaacccagacccagcacacacagcacgcacaacgggccgagaagggcaaaaaagaagaagaacaaacacagggccccacgaaacggacaggggaaccagaacagacagcaccaggggccaaaaacgaaaccacaaaaagcggacagcgaacgaaaaaccacagccccacaacgcacagccagaaaacaaccagaagcaaacagcggcaagcacaagagaaaacagaggcagccagggcaagacagcaacaggcaccgaaacaaagaaaaacccgcccagggaggaaacaagacagaccaaagaccagggcagggcccaacaaacacaagcaacaaaaaagaccacacaaggcgaggcagaaccagacaccacaagaaggcagaaacacagggacacgggaaaacagaaaccaacccacagagggggaaggcgccgccacccaagcagagacacggacaaccaaagaaacgaaagcaccagccgcacaggaagcagagcaaaagccggccacaaagcacccccccacccacacagccggaacccggacccaagaaaagaagcccagaaggcaggacacgcgaccaggcccgagcccgaacgaggcgagcggcaaagcaagggccaaaaagagaagaaaagacagagaagaagagaaaacgcccccaggaagcccgcaaaaaggagaagggcccgcgagggcccccaagcccccgggccagcagagcacaccccccacccgcccacgccaaggagagcccaaggcacaggccagaggcaccaaccgaccagcagagggagcacaaaggaggccagaaaaaaagaaaaccaacagaccaaacgaagggaaccaaacccgggaaccacgcagaggcccgacggcagggaccaccaccccgaaaacccggggacgaagagcccaaagaaaaagcacaggggaggagggggaaggacacagaggccaaaagccagcacagcggggaagaggaaaagaggaaacacgacaccaaaaacaaaaacaacgaacgacacggaagaacaaggcacccagcaggcaagacacggccgcaggaaggaaagaaaagcaaccacaaaggcaagaaacacaagacgcgcacccagagagggacagggccccgccacggccggcaggaaggagaggcaaacgagggggaccacgcgcaggaagcaagggaagaagcacaccaaccgccacacaccaacagacaacggggcccccccgaagcgcgccccaggcgccgccgacggaaggcaggggaaaaggcgccaaacccacccccccaaaggaccgaggccccaaagaaaagcacacaacaagcagcaaacgcgacacaccgagacccaaaaaacccaagggagcagaagccggggaccgaggacagaccaccaagcaagacacaccagccagcgcacgaaaccggcggggaggcaggcgcagcaacccccggcacggcccagcccacggagccaaggacgggggaacacggaaaccaaggaccgcccacaacccagacagcagcaaggggagaaaacaaaacaaacccaacgcccacccccaaaaacggaaagccaaaacaggcggcacggggaaggggccacccgaccacccccaaaaaagaagaaacaacccaaaagaaaaagaagaaggacagccgagagaaagccagggcacaaccaaaagggagacgaaaccccagggggaaaagcggacaaccggagacagggcagcacagcgcagagagggcaagcacacaagcagccaacaaacaaaccaggagacacaaaaccacccaagagggaggacacaggccagagaaaaggaaggcccaaacccaggcagaaaaggggccggggaaccaagggccaagcaaagccaggccaaccaaaccgggagggaagaagaaaaggaaagagaacagagaaccagaaaaggaagcgaggagcccccccaaggaggcaggggggaaggaaaggaagcgcaaggcaaagagagccaacacggcaagaacgaggcccaagcgcaacgaggcaggcccaaaccagcagaacagacagaggccaagaaaagaagaaagaagacaggaccaaaagagaagacgaccaaccaccacaaaacgacccgggccacacgaaaaagggcaaggccgcaacaagacaccaagaaaaaggacaaaacccacgaggcaaccacaagcacaaacaccagggcacgaggcgaaaaagaagacacgaaaaaaaaacaagaaagaaagaaaaacaaaaaaacaagccagacgaaaaccccagaaaaggagggggaggcgccacgacgaagccaagagacacggaacaggagaaaaaggaagcacaccaagaagaaacaagcaaaaggaagagaaaaaggagggggaaaagaggaacaaagcacaaggaaaacccagcccaaaaaaagcaagaaaacgaggagagaaaaagaaaagcccagaaggaaaacacaaaacacagaggggcccggaaaagagaagaggaaacacgccccacagccgaacaaaccaaagacaggaaggaaacaggaaaaaagaaaaaaaaacacacagagccagcagaaacccaagccagcaaaggaggcacgagcgagcagcggggggggaccggcggagcaccccacggacaccaagagcagacgagcccgagcaaccaaagccaaaacacgaacgccccccaacccacagcgcacagcagacagccaaagcccaagccaggcagaacaagaaacacaggcgggggaaaggcagcaggaaagcaagacaggcaagacgcagggcacagcagcagaaacccacagccaggacaaggaagcggaacaaagggagaacagaccagaagcccggcggcacgcggcccaagccagccccaaaggcgacaaaaaagcagcgaaacccaacacaccagggaccaaagaagaaaagagaggggccgaggggagagggagaaacagaagccaggccgggcacaaggcgcagagaacgaggaggaagggcaggccccacagccacaggggagcagaaggaagacggaccccgcccacgggcccgccggaggccgccgggcaaacggagaggccagacaagcaaaccgcaacagaaaacagccacgagccagcgagcccagcaagagcaacaagaggaacgaggagcgcaccggacacaccgccccgcccaagacaacacagccaagcacaaaccagcaaggcaaaaacagcgcccccacaccacacccgcaagggccagcccccaccccccgcacgcggccacccgcccccccccacccacggagccagaggagcacagaaacagaagagacacacacacccccgcaaaaaacagaaccccacaggagcaaagggcgggacgagcccccgacacccccgagcacgccccagcagccagcggcaaaccaccagcgccaccgggacccggcacgacaaccgcaccaaaaaggcccccaccgaggaaaagcaaccagggaagacaggggcaaccccaaggacagaaccagaaaaccagacccagcaacccaacggggaaacccaaacgaaaaacacacaaaagacacagcacacgagaaacgcagcacgcacaaacaaagacggaaccagcccaaggcccaccagaagacggaaaagaaaaggacacaaacacaggaaacagcagccaaaaaaaggagagcagcccagggacaggagaagcggaaaccacaccagcaaaccaacacaggaacagaaaacaaacaccgcagccacaaaggggagcgagcaagagaacacggacacagggaggggaaacacacaccagggccggggggggggggagggaagggaagcaaggagaaaaccaagagagacggggaggggcagcaaaccaccagcacacgaaccagaacaaaccacacaccgcacagaaccagaaaaagaaaaaaaaaaaaggcccccaccacacaaccaggcgaaagccagccgaccacaaaaggccccagggccacagcaaccgaagaaccaagaaggaggaagggagggggaaagggcgaaaaacacacggacaggagaacgggacagggcaacaacccaaaacccagcacacacaaaaccaaaaacaaacgcacaaacgcccaaaccaaaaaaaaaaaaaaaaaaaaaacaagaaaccaacgaagaagcacagcgccccaaagaaagcaaaacccaaagagacaaggacgacaaaaagcgaccccagaccaggacgggcaaacaacgagaagcaccgaagaacgaaaaaacaaacaagccaaaggaacccaaaacacagaaagcgccagacaacaaggcaggccccgacccgcacccaaacacaaaggaaaaagaaaacccaagaaggaccgaaccagcaccaacccagacagacaagcaaaccgcacccagcccaaaaagaagagaagagaaaaaaaacagcgaccagagggagccacaagaggagaaggggcacgaacgacggcacagcaaccagaggaacccccaggacagcaggaaaaaaaagccagccgccgcggaaaaggcaggagggggcccagcagggagcaagcgaaagcagggagacccgaaggagagaccccccacagcgacggaagaggcgggccaggggagaggcaggcaagcagagagagcgaaaaaacagagcaagcagaagagaaaaaggagcagggagccaggagggaggagcaagagcaggaagcgaggagcagaccggccacccgcgaagagagagcagcgcaccacaccaccaaagccaacccaggagagccagggcacaaacacaacaaccggaaccgccgaggacgggggcaaagaggggaaccagcagagacaaaaaaaaaaggagagggcacccgggggacgaacagaggacaagggcacagaagggaacgaccaagaaggagaggaaggcacacagaaaaaggacagcccgcaacagcacccacagcaacccgaaagcagggaggacacaaaaacacagaaagaacagacaaaaagacaaccccaccgcccccccgcaaccccaaccccacccaaaacccgcccacccccacagccgacaggcaacgccagacgccacccccgaccagccacaagaagacgagcccacacaccccgccccggacccaggaacccaccaagggcaaaagaaaagcccacagccggagaaaaacaaaaagagccccgcaaaagaaaaagaggaacccagggaacagccccagaccccacaggcccacaagaacaggcagagggaaaaagaaacacagagaaccaggaacacaaaggaagaccaccagggcccagggagcagcgaaggcagagcaaaaagaaggcccaggaccaaaaacccaccccccaggaccccaagagagcgacagcgccccagcagagcaaaacaggcaagaaccgcggccgcacaaagacacaggagcgccagacaaaaccaaaggacacagagaaggacgagcagaaagaacacgagaaagaagggacccgagcaagacggcaacagcggggaaaggccccaaggggcaaccacaaacacacacgaaggaaagagaaagccgccgagaaagcgcgagggaaaggaaaaccacaggggaacaaaaacaaaaaagcccgggccagcagaaccacaaaccacagaccaaggagggggggcggaaaaaccagagagccagggccaccgaaacaccccaacagaaacaacacagacagcagaaaaaccccggggaggaacaaaaccacacaggcccagagcagagccacccagcaaagacaggagcagaaaaggggggggggggcacgaagcagaggagagcaagaccggaccgcacacagaaccagagcacccccaaggggacaaaacggccccagacagccaaagaccggggagcaaaacacccaccaccccgagaaagaaggcaggaacacaaagcagagggcaaggaagagacagcccagcagaagcgcaccaacacagcagcgcacccacaacaggcggggaggaaggacagaccccaagaaagaacaaagcaagcaaagccaaggccagaagggcagagaaaaaaaaaaacccccccagagagagagggccacgggcccaggcggccaaagcggccaagcaaccccaccagaccccaaaggcacccgcccgccagagacagaaccagacacgaccgaggcgcgaaccagccgacacacgcccaagcaggggacaaaggacaggagaggagcgaggccaagagacagcagccgacccgggggagcacccccagcgaacccgccagggagaagagggcggcgagaggccacagagccggaggcgcgcaggagagaaaagacaagggcgcacaagcaggggagagggacagaagaacaaaacaaggcgggggcaagaacacgccgaacccagcccgagaggccaaggcaggcagaaagaggccaggagcgaaaccagccggcccaagggaaaccccaccacaaaaaacaaaaaagccgggcgggggcaggaccgaacccagaaccaaaagacgaggcgggagaaccggaaccgggaggcggagggcaggagccaagaccaagacagccaccagcccagcaggcaacagaggagacacgcaaaagaaaaaaaacaaaaaaaagacaaaagacaggacagagagaacagggagaaaaacagaaaccacaaagcaaaacaaacaacggcacaaaccaacaacacacagcagcaacaaaagaccacccagggccaagcggggccagcagccaaagaaggaccagggacaaaacccgcacgggcacggccaccaggcaggggcacaaacacgccgggaccaaaccagcacgcggggccaaaccagccacgccgcgaaacacaaagggacacagcagccagacgaacagggggcacaacaacagcagaggaaaagcaacagagcagagacgacaccaaaggcacaacaacacggccggcggaacaggcgacccgccccagccccggagcccacggacagcaggccaagagaaaaaagagaaagaagagggccacacgagaggacaccagcggaccgacgcagcccccgggccacacacgcacggcaagacgagaccacggccccaccacgcaggaaagcgggaagcagcaggcaaagggaaaggcgagaacccacagcacgccacacaccaccaggccggaggaacccgcgaacaccggccagaaggaaaaccacaacgcaaaggcaaaacaaccaaccacgagagcaaagaccaacaaaacacgacccgagaaacaaagaagaggaaacagaaaaacagacccaaaaaaaccagagcaaaccccagcaagaagcgacaaaggaaacagaacggaaaacagaggcacggccagcacggccaagcagaaagaaaaaaaagaccaccggaaccgccaggacccaccagcggaaaacaaaaaagaaaaacaaaagaagaagcaagcaaaaaagaagaccacagccagagaaagaaaacaaaggacgggaaggagagcacccggaggggggaaaaagccaaaaacaacaggcaaaaaaaaaaaagaggaaaggacaaagaaaaaacacaaaacagaagcaccacaggaccaaacacaaaacgaaccaggcacaggacagccagcaggaaccagcaagggagcaagcaccgagaccggaacacacagccgcgaggagagcagcaggccgaaacgagggcgggaccaccccacccccccgaacccagggcccacaccacagcaaaaaaaaaaaagcagacagacaaacgagaaaccacagaaaacccagacgccaaagcaaacagcagccaggaaaccccagcacagacagaacacccagccaaggagggcagccaagggaaaggaaagaggacacagggaagcgccccgaagaggcccccaggagccaggcaaaggcagcgagaaaaacacagcaccgaaggggaaggaagagcacggaggggcaaacaagcagaaagaacagacaaagaacaagacaagaaagcagcccgggcagcgaagaacggccccgggcagccccaggccccgggcccagcggcacacaccacaggccgcgggacggaagcccgaagacaaaggaacgggggccgcacagagacacaggcgccacaagcaggaggcccaggggagagagacaccgcgaggcccacgagccaagcagccaaggggaacgagcagcaccagacaagcggcaagaggaccccgagaggaagcaccaggaaagggagacaaaagaagcagccggcccagaaaaaagcacaccagggacaacggcccgccccacaggggcaaccggcaacccgccaggcccaccaaagagacgccagacaaccaccaaaccgggcgcaaaccacccgcccggggccaccccaccccaccggaaaaccccaccaggccaacagcaaagcagcaaggacaacccaagggaggcaggaagccaccgcgcaagaaccgagcaaaaaagcacagacacggacaaccagcccgcccaaccagcggaaggaaggacaggcagagcaacccgcccagcaccacagaggcgacagagagacacaacaagggcggagaggaaaccaggggaaaacggggaaggaaacggaggaagggaaggaggcaagaagaagcgaagcaccggccccaccaccggcccgaaacaggacaccagcaagacaccaagaaaggggagagcaccacaaaaaacaaagcaagaaggcaaaaaaagcaggaggaaaaggaaaggcaacaggaaaaaaggacagaaaggaagcaacagacagcaacacgacagcacagaggaaagcaagaaggaaaaaacagaagaggacaacggaggcaagaggagggcaaccggccaagcgagcaacaacgaaacaccaaaggcaggccagaaaagaagaacagagaaaaagaaggagaaaccacaaagaaacagacaccaaccccaccccagagcgaacacacagggggcagaagagacacgagaggcccacacagccacccagagcggcagcccaaggagacacccacgaggagagccaccagcacagccagaaggggagaggccacgccagcaacagagaaagagagcaagggggacagaaaaggagcaaggggaggaaacacaagaaaccacaggaccagacggccaacaaacacaccagaagcaaaaccaccgcaaggacacaacacaacaaaaacacacccaggcacggggaaagcacgaacacaccagagagaccagcccagcaaagcgcgggagagaagaaagacaacagacaaaaaaaaaaaaaaaaaagaaccgcacagaaacgcaccaaaaaacaagcagggacaggcaaaaggcaaggaacaagcagggaacaggcaaaaggcagggcaagaacaggccacgggggcgcaccaaacgcaacaaggcaacccaagcaccccccccccccccacccagacaggccccgggggaaccccccggccaaggccagcaacccaccagaggagaacagaaacgcacaacaggacagaaaggacgaaagggaaccggaggaggagaaaacaagccaaccaagaggcaagaggccagagaaaaagaaccccaagacacaagcacccacggacagagcaagcgcaaaaggaagcaaaaaaagcaacacagcagaaaagcaagaaagagaagcaagccgcgagccaagaaaggaagaaaagcaggggcacaggcagaaaccacgaaggaagaaaaagaagcgcggagcgggaggaagacaggagaaagaaagaaaagagggagcaggaagaaagggaacgaggacaaagggcaagaacaagacaaaaagagaagggagaaaaaaaggggggagacggagccaccgcgcccaggcggaggcagggcgcagccggccacgcaagccgcccccgggcacaccacccgcccagcccccgagagccgggacaccaggcggccgccaccacgccggcaagaagagagacggggcacggagccaggaggccgacccgaccgcaccgccgcccggcccccaaaggcgggaacaggcggagccacggcccagccaaaaaaagaaacaggcggacagacccgagggacaaagagcgggggggcagaggagcaacggcacgcgagcagggaacacaaaaggccaggaccgaggaagaaaacaggggacagagaagaaacaagggcagcaaaccaagagaggcaacgaagacagaaggagaggggggaagcggaagggcaaggagacaacaggaacgagcaacaacaaggaagaaaaccagagggaacgaaaccacaccaacccacggagcacacccaaaaggcccccagagagccccccgagaaagaaaggacacagcagacgggcacagaaaagaacacagacagcaacccccacccagaacggcagggacaggcacacaggacaacggcaaggccaggcaacaggcagacaggagcagaaaagggaaaaaaggcaccaaaagggcacacagcaccagaaaaacaagcagagacaccgaggggcccgaggcagcagagccggaggggccgaccgaccacaaaggggaaccagaacacacggaagggagaagagccacaacaaaggagaaggaggaaaacgaagaagaaaaagagccaggacacagaaagaaaaaaaaacaaagggaaacagggaagagaggggcaaaagagaaacaagaccagaacaagagacgaaggagcccgagagccagacccagcaacagggcaggcaggaaaggagaccacagggaggaaccggaacacaccaaaaagggaaagaaaggaggaaggaaacgagaagaggagaaacaagaaaggacagggaacgaggaaagggaaaaaggaaaaaccagaacagaaagaaaacagggaggaaacagacccgagacaaacagaacgcaaaaaaagcgaaacacagccacaccacaaagaaacagccgccaaaccaaggcagggggcaagaaagaacagccacaaaacccaaaaaaacacagcccaacagaaaagggccacccagcaagaaaggagagcaaaggagcaagggcaaagaaaagcgacacaacagggccagaagaagccgcaagggagaacccgcaggcaaaaggaccagcaaaagccaaaaccacaaagcaaacaaaaccaacaaagaaccgacagggcaacaagggcacagaacaaaagaacacacggcagaacaaccaagccccggccaacgccaagacaagaacgagcggcaccagcgccaaaagagagcacaagccacgggcaaacaagccaaaagggggaaaaacccaccggggcaagaacaaaaaagaaaagagaaaaaaaaaaaaaaaaaaaaacaaaggcgacacaccacacaccaagaaaaaaaagaaggccgggcgcagaggaaccagagagagggagaaaggcccaagacagaaggaaagagggagcaaacggcaggccaagcacacaaaagcaaagagggaggaaaccaccagcgagaagaagaggcgcaggaaaagggccaaggaagggccagcaaggaagaaaagacagagcgaggaaggagagaagcgccagacaacaaggcaaaggccaagagcaaaggagggcaccagaagccaacgggagcaaacagaaagaagcaaaagaggagggaggaagaaaggcagcagccaaggaacggacaccaggaagagaagccgaaggaggcccaggaaagacaggcagaacgggcacaaagcccagacagacgaggagaccagcccccccgcagaagaggggggcagagcaagacggcagacagaccccaagaccccacaggcaagcaaggaccaccaagcacgccagcagccaggggaaaagcagcggacaagagaaaagaagacggcacagaaacacccgaaaacccccaaagacccccggcccgggacacgccacaaaagaaaccggccgcacggcagcacacccaggcccgaccccaaacgcaacggacagccaaaacaagcaagagaggaaacaacaacaacaggagaggaggaaagagcaagaaacgagggacacagggacaggggggcccaccccaaaaacccagaaccccaccagaggaaaagaggacaggaagagaaaaaaagaagccagggaaggagcccacggggacaggccaaagccccccgagggaccccgcaaggaaccacgaccaagaaggacaaagccaaaaccagaggcaggaagagaaaacaggacccgggcaggacagcacagaagcccaaaaaggaccagcgcgagaggaggcacaaaaaggaaagagggcgaggcagaaaaggggcaaaacgggcccaagccaaccccgggaccagggcacagcaaacccaagcccaccacaaaaagggaaaacaagaaaggaaaaccaaagcaagcacagaaaggaccaaaaccccaaaaaaagcaagcaagccaagagagcccaggccaaagaaagagaggcaaaaacaaaaaaaaaccacaacagaaagcaaaacacaaaagaaaggaagaaaggcaccaaaaaaaaaaaacaaagacacagacaaagcaagagagaacaggaaaggaagagaaaaagagcaaaaaaacagaaaggcagaaagcaaaaccgcaaagacaaagcagaagaaaagaaagcacaagaccgacaaaacgaaaaagacaagccaaaggagaaagaacaacgcagagaagaggaagaaaaccaaaagccgagcaaaccaagcaaacaaacaaggaaaacacaaagcagacaaagcaacacacgaggaaaagaaaacaacagcaccagagggggcagagagaagcaacaggcacagagcagaaggacaacagcccggaaagccaccagcacacacaagccgaagacgcgaggaccaaaacaccccaaaagccccaaaagaaaaggagagccaagacaaggaacaagaaaggcacacaaaaagacaaaagaagaaaaaaggagaaggaggaggaaagaggagaggaagaaggaaaacgaagaagaagaggaaagaagacaaagagcaagagaagaaaaaaacaaaggcgcgaaacaaaaaaagaggaaaaaaaaaaaacagagacaaaaggaaaaaaagaagagagaagaacgaggacaaaccaaaaaagaaaagacagaacaaaacaacaaaaaagagagcaagaggaaaaaaaaaaggcgcaagagagaaaaaaagcacacaaccaaaagcaaaaaagggaacccaggacacagagccagcaaagagagagccaaaaccacaagaaaaaacaaaacacccacccgaagaccacagcagccagccacaaacagccagagcgcaagcacaggaggaaaacaccacaaagcagaaaaaagggaagcagaaagaagcgaaagacaccacgaagaaacacaacaccacagaagccaaacacaagcaaaccaggaaaggaaggaagaaacacaaccagcaagagaaaaccagccaacgcaggagcacaaagaggggaacggggaacagagggacacaaagaaaaaaaagggcagcaaagcaagggagggagaaaaaaacagaaaaaagaaagcaaggaagaaaagaaaacaaaacgaacaggagggaaaaaggaggaacacaaaagaagcacacagcaaaagccaaaaagagagggagaaaaaaggaaaaaaacaaacaacacaagaaggcaagaaagaaaaaaaagaaaagaaaagaaacaaaaagacagacgaagggaaagcacaaaccaaacaaaaaaccaaaaacaggccagcgcccagcgccaagcagaaacaagacagggacaaacaacagaagacccgcaacggaggcggaaagacacagggccagagaccgagcgggaagggaccccgggcagagagccaccccacgggccacaggccccccggggcagggggagagagagagagagaaacagcaaaaaaaggacgaacaacaaaaaggaggcaaacaaacaggccggaggacagggagcagaaaacacccgccagcaccagggggaaacgccccacccacgaaggacgaaccaacagaagaagaggaggcccgccaagccagggaaaggacccaggaggaggagagccgggggaggggggcacagagaacccaggaaggcgagcccaaccaccgggcacgcaagaccaggaaaaaaggggcaccccccccccgcccacgccagaacccgccccccgcccgccaggcgaagcccgagccccaccagaagcaagcggcccgcagacagccagcagaacggagccaaaaaaaaccccaacaaccccgccaggaccacagcaaacaaaaacagacaacacagaaaggaagaaaaggagcaaaggcaaaggaaaaaaaaggggggccaaccgcaaagagagaaaaacagcagcaggcaaaaaggggagagacacaggaacagaccgagcaaccgaaggaaaaaaaacaaacagcagaacccaccagacagccaaacccagccaacacacaggaacagggaacagaagagacacgaggagagccacacagcaagggcaacagcaacgaacagagcaaaaaaccgacagccagccccagagagacaaaaaagacgacagaagcaccaaggagggaacagcaaggaaaaagaaaaaaaccaacaggaaagaaaacaaccaacagaacggaagaaaaagacaaagaagacacagaaaagagaacaagacaaaacagaaagcaaacacaaacaacaccaaccgcaaaggacgaaacgcaagaccaaaaagccagcaaaccacaagcggacaaacccaaagaaacaggcaaggcaaagacaaaccgaaaaaaggacaaaaaaaaaagaaaacaggggaaaaaaagacaagagaaaaaaaagaagacgaccacagaaaccagaaagccagaaagaaggacgaacacaaaaggcgaaaaaaaagcaaccaaaacgaaccaaaaaaaaaacccgcaagagggggaacaagacaccagagaaaaaaacaagaaagcaacagaacacccaaaaaaagacaaaggaacccaaacagcaaggacacggaagaaagaacaacagaaagaggaaaaacaggaaaaagccccgagcaaacagaagcgaagcaacaaaagcacgggcgaagagacagaaaaacgagacaaacaaaaagaagaaaaaaggaaggaagacaccacgaacagaaaacaaaccagagacagaaagcagaaacaaaacaaaagagcaacaaaaagcaacaaaaagaaccacaaaaaaaaggaagcaacagaaaaaaaccagaacaacccacaagaaaaacagaaaaagaaaacagaacagaaaacgagaggaaaaaaaaaaaacagagaacacaagggaagccacaagaagggacagaagcagccaggcaaaagaggaaaaaaaaaaaaaaaggcaagggaaaggaagaaaaaacgcagcaaagacagaacagcacagaaacaagaaaaaaaaaaagacgaaacaaaagagcagaaggcgaagcaaagacaaacaaaggaaaacaagagaagacgacagaaacaaggacaaaaaaacaaacaaaaaaaaaaaaaaaaaagcaggcaaaacaacaaaacccccacagacgagggaaaacaaaaaacgaaaaaagacaaaaaaggaaaacaagcagccaggagaaaaccaacaagcagccccagagaacacagcaagcaacaaaaaaccgcaagagaaaaagcaaaacaaaggaaaaaaaaaggaagggaccaaggcacaaggccagagagccagacgggaggcagaggcagaagccgcacacgcgaaagaacaccgagaccggaaaaaaaaaaagaagaaagaccacagcgcaggcgggaagcccaggaaacacaacaggagaaagcagggagaagcaaacaccccacaaggcagcaggagagagagaggggcagggaaaggaaacaccaaaaaaggacaaaaaaagaagcccgaaagacccgaaggggaaaaagaaagcacaggaggaaaagcaaccaccaccaagcaacaaccaaacagaaaaaaagaacccaaaaccaaaaaagcaaaaaacaaagaaaaggacaaagacagaaaagagcaccaaagaggggggggggggggggagacgaaggcaaaaaacacaaaaaaacaaaaaagcgcaaagaaaccaaaaaaaccacaggcaacacacacaccacagaaagcaaaaaaaaaaacaacacaaagcaacacaaagaaaacaaaagcacaggaagacaaaagcaagcagcacacaaaaccaaaggaaaggaaacaacgggacaccacaccaggaaacaccagcaaagaaaggaaaaaaacgacaacacaacaacggagaacccagagaaagcgagcaaaaacaggacccaaaaggcacacacggcaaaccacaaacacgaaagaaaaaaagaaaggagaaaaaaacaggggcaggggaggaaaggggggggcaggagaagggaggggcaaaaaagcaacaaagggaaacccggggaaaagcacgagacagacaaaccggcgaaaagacacagagagagaggaagcagaaagagagagaaacagggacccgaaccaaccccaagaaacacaaacaaaagaaaagaaaaaaaagcaaacgacaaaaaagaggaccaaacacaagaacccgcagccgagaaagaaaagaacaagaacagaccaagacagacaaaaggaaacggcacaaaaaaacaacacccaaaaaagaagggacaggaaacaaaaaaaagaggaaaaaaggggcagaaaaaacaaaaagagagaaagacagaaaaaaaacaacccagaaaaacagaagaaaaaaacaaagagaaaaagggaaaaaaaagcacacaaaagaaaaaggaagccaaggaaaagaaaacaaggaaagacaaaaggaaacaaaaaaggaagcaaaaagaagaagacagacaaagaggaaccccaaaagacaaaaaagaaaccaaaaaccaacagcagcaaaccaacgacaaaagaaaaaaagcaagaaggccaagagcccgaggagaaacaaagagggacaccccagaggaacaaaacgacagagaagggaaagccagcggggcgggcagaaaaacaaaagacaaaggaaaaaaaagaggccagaacaaacaaacccaaaaggaaacgaacaaaaggcagcagacacaggaaaaaaacaaaaagcaccggaaaagaaaaagaacacgaagacccagccaaagacacaagggaagagaaggaaggagcaaacaaaagcaaaaagaacaaagagaaaaggggggggagaagagaaaaaaacacaaaccaaaagaaaaaaagacaaacacacagaagaagaaccacaaaagacacaaaaagaagcaaaaagcccaagcgaggaagacaaacaaacaaaaaggcgacagcacaaaaaccacaaaccagagaaaagacagccaaaagagggaaaaagaaaacaagcagcacagagaaaaggacacacaaaggccaaaaacagaagcagcccggaaccagggaaaaaagaacccacaaacagacaaaccacagcagacagacggcaaaaaaaagggcacaacaccaaggcagaaagggacaaagaaaacaaacacaggcgggcgaaagacaggcacagccagggaagggcacgagcaaaaacggaacagacagggaaaccacaaaaaaaacgagcgaggcaaacaggcaaggcggagcgccacagaccaccccaacaccccacaaacaagccccagccgcaggaaacccacagacaagcacaagaacagaaacaaccgggaccacgccaccgcaaaaggaagaaacagcagcacaaaaggacaacaaaacacaaggcaggagaaagaagcaagcacagaaaaacaagggagacgcacaaaagcccaaacagacagaacaagccaacaaagaaagacaagggacaaacaaaagaaaaaaaaaaaacaagagagacagcacaaggcaaagaaaaagggggccacgcgggcacggggccacaccgaacccagcacgggaggcgaggcgggcggacacgaggcaggagacgagaccaccggcaacacgggaaaccccgacccacaaaaaaaaaaaagaaaaaaaaagccaggcgggggcgggcgccgagcccagcaccgggaggcgaggcaggagaaggcggaacccgggaggcggagcgcaggagccagacgcaccacgcacccagccgggcgacagagaccccccaaaaaagaaaaaaaaaaaaaaagggggccaggcacggggccacgccgaaccagcacgggaggccgaggcgggggacccgaggcaggagcaagaccagccggccaacaaggaaaccccaccacaaaaaacaaaaaaagccgggcgggggcaggcaccgaacccagcaccgggaggcgaggcaggagaacggaacccgggaggcggagggcaggagcgagagcgccacacacagccgggcaacaagagcaaaaccgccaggaaaaaaaaaaaaaaggggggggcaaagggagaggaaagcggggaggggggcgagaggaacaaggagagggagagagagaaagaaaagcacacggagcaaagagaaaaaccaagccaacgagcacaaagccaacaccgcccaggccgggaacaagaaggaaagacccaaagcacaggcaaaaggaaaagcaggagaaaaagccgaccaaaaccacgcaccaagccaccaaacaccgccccaaaaggggcaaaagaaaaacgcgaagagggaacagagaggaaagaacacaagcagaagggaaagggcaacaagcaacaccccaaaaaccaggaaccgccccccacgcgcaccagagcacacagccaccagggccgagagcaagagaaaggaagaaagcgaaaaaaggggcagagagccaagaaagacccaacacaacacgcccagagggaagaagccagacaggagaaggcacccgaagaggcagccagaaagacgggaaaccaaaccaaaaagcaaggcaaaacgacagacagaggccaagcacaggcagggaaaagaagaaaggggcacacaagacaaacagcaacgggcacgggcaaaccagaccagccccaagaaacagaaaagccaccacagacccagggcgagaagcacaaaggcaaagaaaaaaagaacaggagcaaaaagccaggccaaaaagggcaacacaaacaaacggagccaccaaacaaaaccagggcggccccaggaaaaccaaccaacaccaaggagcaaaaacaagagaacacccccaaaccaaggcagagacaggcgaccaaaagaacgagaggcgaccacacaaaagggagaggaaaggagggagggacaagagcagagccagcaacaggagccaacacaacgcaagaaaaaacccaaacacaaacaaaaaacacaaacaagagggaaaccagcacagaaacacacgaagcagggcgaagcaaaaagcggggggggggaagaagccaaagcaaagaaaaagaacggaacaccaaggccagccaccaccggacaccacgaccaagggaccacaccaccagagaaacaccccagcagaggaggaaacaggcgagaagaacacaagaagcaaggaacagcaagcaaacgcaacacccacagaacgcacaccagaggagacaggggagggcaagggggaccacaggaaaaggaagacgggaccacgggccaccaccccacgcccccccaccgccagcgaagagacgacaagggggcacacagggccccacacccccacgccaggggccacagaggaagcaggaagacagaaaagcagggggagagcggcggccccaacccaaggcgagcccaccgaggaggcccccaggccgaaacacggcagaccaccacaggcaagggggaaacggccccacgccaggcagaaaacgcaaccccgggcccacacccaaacccccaaacagaacacaggccacgacaaaacccaagggaccaaaggcaaaagaagaggccccaagaccagcagaggaaccgcgggggagaagggccacgaaggggcgagggcgagcgggcaacacccaagacccacccagaagccagcaaaacacgagacgccaaccagcccagaaaagagggcccgcagacccagaaaaacagagcagggcggaaacccaagacccagggaaggaaagcaagaacaggcaggagggacaagagcagaaagggcaagagcacacgagcagggagccaacagagcagagcagcccgaccaccagcgaccgggcaagccacccagcccagccaaaaaagggaaacaagcccaccagagaacccacaggaccgagcagccacagacaaagggcggaaaacccagggcagaagagaaaggcagaaagccagacgaaggacccaggagagccggccgccagagcaaggacaagggcccagcgccaacagggacgccagggagaagagggagggcgggggagccaaacgagggagggggccagggaaaaagacaaacaggaccagaaccgacaggggaacaccccggcacacagacggaaaaggcaagccgagccgagccaacgcgccgggggaggggaggggggccaccgcacccccaggggaggcagggggaaaccggccacgcaaccaccacacccagaccaaggaccccacgcagccccaggagggaaccacaggggcgcaccacgccccacaacgagagagaaagggggccaagcccaggcgaccaaacccgagccaagaaccacgccgaagcccaaaggcgggaacaggcaagccaccacgcccagcccacagcgaaggaagaggacgaacaaaagcaccagaagccggcacagagggcaaaaagccacccaaaaaaaaccaagggaaaaaccacaggaaaagagcagaaagacaaagagcccgaaccccacccccacacacacagccccccaaccaacacccacagaggggcagacaagggcaggacacgcacaagccacagggcacggcagcacaaaggggaacaaagaaaggcacaaccaccaaagacaaaagagcaaacccaaaaacccggcccacaaccaccccacccaaccggaaaccacgacacgccaagccacccagaagaaaaggaaaaacacagagcccagacggccaccagaaagcaaagaccgcgggcaggcagaagccacgcagagggaaaaagccacgcggaaaccacaggacacgcaccaggaaaaacacggacaagaggcacaaaaagccgcaacacaacaggcaaggcgagacaaaacaaccagggaaaacaaggagggcaaggcagagaggaagaacagaggaagaaacgccaaagcaaagggcgaccggcaccccaccagcaagcagagaggagcccacacccacagcagcgggggcggagccacaagagaagggagaccccaggaacccaaggagaagaaaaccggaaaaccagcagacgggaagcagcacgagagagcagcagaacccgaaagaaaagacccaaccacacagcacagacccagaaaaggggaaaagggaacaaaaggaagaggcaaaagaaaggaaagaaaacgcaaaagggggggggggggggggaaaaaaaagagaggagccaccgggcccaggcagaggcaagggcgaccagccacgcaacccgcccccggcaagcgaccgcccagcccccgagagcgggaccacagggcggccaccaagcccggcaagaagagagaggggcaccaaggccaggaggcgaacccgacccagaccacccgcccagcccccaaaggcgggaacaggcggagccaccagcccggcccagaaaacacagcggaacacaccaccaggcaaggcaaaaaaccaacacagaaccgcccaaaaaaagacacaggccaacagagccaagaaaggaacagagcagaaaacacagacaccacccagcacagaaaaaaccagacccggaccaaaagggacaaaaagggcaaaaggcagagagagacaggacccagaacaagaggaagagggacaggagaggcggaagcacaggagaaaaccacacaagccaagcccgagaaaagcgggggacaggaagaaaagaagaggaagcaaagacccagcacagagaccagaaggacaaaacggcaaaaacaagggaaagggccaagcgagcaaagaaggaagagagaaacacgacagacaacaaagcaaaggacaccgccgacacaaggaacagccaaccacgaaggagcaagccggacagagcaaaagcgcaaaagggaaaacggagagcagcagaaccaaaaaaggcaaggggcaaaagccagaggcaccaggcccaggcgcagcaccaaaagagaaggagaaacaaacgaggccgacggcaaagagccaagacaagagaaaaacaaccaacaccagagggggcacaacagcagaggaagcagaccaagccacaaagacaagcgggagacaacagcgcagagagccacagaggacccggcaaaaaaaaaacaaagaaaggaacagacaaaaaacgagacaaaaccacccagaccagagagcaaaccaagcaaagggcaccaaccagcaagcaagcaaaaaaaagagaggaaaacaaggagacacaaaagaagaagcaaaaacgcagggcaagagcacaccagcccaccaaccagcccaaacgaagaaagaccccaagagccaccgaaaaagagaaacagacaacgaaaggaccgggcaaacaggagggccagccacaggcaacaaaaaaaagcaagagagagaaaaaaaacagccaaggaaacagccggaagaggacaaaagccgcaaaacagaaaccagccaaacaacacgggaaacaggaaagaaacaacgagccaccacaaaaaggaagacagcagcgcaagaaaagaagcccaaaagaacagaggacaagcaagacaggagacaacgcaaaagaccaaaggagacagcaagaaccacagcagccgcccacggaaacagagccaggcccaggccccagcaagcaaaaagacccaaaccagccccagcccaagcaaaccagcaggaacaaagaaaagaaacaggggcaaagcacacaccagaccgaaggaaagacggaagccacacaacaccacacacccacggagaagcagcaaggccacacagcgcaagggagggggaaaagaggacggacgccaggccagcagaagggaacacaaaagaaggggagggagccggcacggggccagccgaaccagcagggaggccgaggagggggacacgaggcaggagaagagaccaccgggcaacacaggaaaccccgccacaaaaaaaacaaaaaaaagccaggccggggcagggccgagcccagcaccgggaggcgaggcaggagaaggcagaacccgggaggcagagcgcaagagcagagagcgccacgcacccagcccgggacagagcgagaccgccaaagaaaaagaaaaaaaaaagaaggggaagggaaacagaaaacgccagcgccaaccaagaaagccaaagcgaggagagacacggagagcaggaagaaaagcagcagaggcggcgaaaaaaaaaaaagccagaaagaaaaccgcgaacagaagacaaaaaaaagaaaaggccgagaaccgacccaagagaagaacgggagaggcccagaccgcacacagcaggaaaaccccagggcagagagagacagggaaggcccgaaccaagccgcaggaaggagccaagacaagcaccaccccagcgaaacaccccccaaacccgcccacaccgccaagaccagcaaaaaccaaaaagaaccccgaccccccaggcgggagagcccgcgaaacgaagaggggcaacgcccacagaaacgcgggaaaagcggcacgccaccacgaagggaacccgaggaaaaaaaaagccagaacacacccccaaacaaaaaagaccaacccacagcagggaacagaaggagaacaacaagacaagggcaaaagaaaaaacaggcagacgggaaagaaagaaaggccggacaccaaacagggcagcaaggcacaaaagggccggcaagcgcaacacaaaaacaacgcaacacaaaaacaacgcaacacaaaagaaggaaaagagaagccaaaaccagagggaggacaagagaaaagaaaagcacccgaaggccgggaaagagagaaggagaggcagggcagggccagccaagaaccaacagggaggccaaggcagaaagagcgagccagaaacgagaccagccgggcaacacagcgagaccgcccacgaaaaaaaacaagccaggcaggggaggcaccgggcccaacaccaggaggcaaaggggaggagcgagccgggaggagccgcaggagcagacacaccacgcacccagacgggagacagaggagacaaaacaaacaaacaaaacaaacaaaaaacaacaacaacaacaaaaaacagaaagaaggagaaaaaacaaaacaaaagaaggcaacccccgaaacagaacgagaaaacccagaacaacaaagaaaaacaacaacaaagaaacgaaagacgagagccgccaccacgacaagcggcaaagagacccggcaaggggggaaggggggagccaaacggacagccggcagcagacagggaccagaaaggggcaggcgcggcacgaggaaagcagcacccggccgcccacaaagccagagcacccaccgaaacaagacggacaaccaaaacagcccagacaccaaagccccagggggaacaggccgccccccccaaacacacagaggaaaaccacaggagacaaaaaaaacaaagaccggcaggaaaaaaaacccaaaaaacaaaccccagccagccccaaaaaaaaaaaaaaaaaaaaaggcggcaccagaaacaccaaaacaacacagacaaagcaaaaaaaagcgaaagacagacagaggggggaaggaacccaggaacaagaaaccagaagggacgcaaagaacgacaaaacacaagacgcaggccaaaagcaaagaaaccagaaaggggaagaaccaaccagcgcagcacacaacacaccaagaacagaccagcgggaacccacaagagcaagggcaaaggagagcagccagaagaggagaggccaacagaccaggccaccaccacaggacaagaaacgacgaacaggacccagccaggagcgagagacggagggagccacagacgcccccagaaacacacagagagggagccagggcaaagaaacaggcaaaaacacagggcaacgaaaggggacggcaagcaagagagcaagcaccaagaaaagaagcagccgaggaaggcgggcccagaggagagaaaaaaaaccaaggcagaaaaaaaggaaaaagacaggaaacaaaagaaaagaaagccacgggaacccgcagaacccggaaaaagaaacccacaaacaaagaggggagaaaacgagaagaaaagagcgagagcagagaaggagaacagagaaccgggacggaaagagaggggaagagaggaaaagacaccaagagaccagccaaaaagagaaaggagaggaacaagggaagggcaaaacaaacaaacaaaaaaaagacacagggaggcaaggcggcccagacaaggacaaccggaaaaaaagacaggggcaaggcccaaagcaaacggagcaaagagagaagcagaaggagccgaaggcagaaaaacgagaccagaccaaaaaaacaccgcaggaggagaagccacaagacagcgccagggagaaaggacagcaccagaaggacacagagacacgccccccagcgcccagaagccgagaccccaccgagccagggaaccaaagcccccgcaaacgacagaggaacaaggccccccgcaccaagggggccgggccagccgcacaggaaaaagccagagaaggccccaagagagcaggacaaaaggaaagaggccccacagaagcagaaacaaaaggaaggcgcccccgggggagcaagagggagaaagaagaggagagagagagaaagaccaaggacagacaagagagccagaaagcgccccagagagacacccaagacaacaccggacgacaaagccagcaggagaaggcagacgcccccaacccccaaagaacccgggcacgacaggaagaaaacaggcaagaagagaagcgaccccagacaaaggcacacagcaaagcagacaaagagaaaacaacgaaaacagacagaagaaacaaaaaagaaccacacgaagggaaaaaaacaacaaggaaaaaaagagccaaaagacagagaaaccaaagcccaagacaaaagcggcacaacggcgccgaaaaagacccagaaaaacaacaaagaaaaaaagacaagaaaccaaacggaacaacggaggagaaaaaaacaaaaaaaccccacgaggaacaagacagaccacaagcaccaaaacacggggcccccacagaagcagaagccgagcacacccaagaccggagcaacaagagaacgaaagaacacacggacacaaaggggaacaaccaacaagccagagcaccagaaaaacaagcaggaggaaaagcgaaaaaaacacggaaaggcaaaaaagaagagcaagaagcgaagcaaggcccacccagacacgcagaccccccaaggggacagcagacccacgagaaacaacgaaaaagaccacaagggaaacagaagggcacccccgccccaaaaacccaccccaaaggccagaacaaggaggagaacaacggaaacagaaacggccaggcaaaggaaccacccacacggacgagaaacagaaggacgagaccagcccaccagacaggaacgcaaaacacaagggacgaaaaaaagaaaacaaaacgaagcaaagaagaagcacgaggcgcgggggagcacgaggcaagcagaccgggcacaaaagaacccagaaggagggacaaggaccccaaggaccaggcacaccccgagcaaaaaccaccccagcccaaagcaggcaagcgccaggggaggagaacagagccggagaaaggccaagaggaagccaaccagaaccggacagaaggaagcaggacagagagggcagaagggaaacacccaggaacaacaggaagaaagaagaggagaagaacagacaaaagacacaaagagaggaccaggagcggaaagagcagaacaggaaaaagaaaagacaaaggaagaaccaaaagacagaaaaaagcaaagaagcggaaaagcacagggcaagacggaaaagaaccgagcagaaaaagagaaggagaggaaaaacacacaacagcggccaggaaacggccgcgagggacagccaaccccacgccgcccgccaccacaagccccgaagaaggaacaggcacagagcaaagagcccaaccccagacagacgaagagcaacagaaaaaaaaaaacaaaaaaaagaaaaaaacaaaaccggacagagaaaaaaaaaagaaggggagaacaaaagaagaaaaagaaaaagagggagagaaagagacgcaaacaacaacaaaagaccaagcgcaggagagagaggcgagccccggggccagaaaaaagaaaaacagacagaaggaacaaccaagggcaaaaggagaagggccgaacaacccaaaaaaaacagagaaacccaaaaaaggaggaggaagaacaagcacagcacccagaacaaaggagaagcagaacccaaggaaaagagccagaggaccacaggaaaacagagcaaggaagaaaagagggggcaacagcccaacccacaggacccacccagggggagccccccccacccccaaagccccaggcgaccccgcccacaacccaacagaccaggcagccacacaccagcccacccgccacacccacaaagacaaccccacacaacgaaggaaaacaaggacagcacaggcccaaaaaacgagaaacggaaagccaaagggcaacccaccaaaaccacaacgccaagcagccacacggccgagacaaacaccaacagaccaacaaaaaaagacaaacaaaaaaccaaaagacagagcagcagggacagaaccccacaacccaaaagggaacaaccacagcacagaaggaaagggcaaagaaacaagaacgccaaacacacagaagggagaaggaaacagagcccaaggaagaaaagcaaaaaaacaacagaggaagacacaaggaaaggcagcacaaggaagaagggagacagaggccagaaaagccgccaaacacagcaaagcccaaccggagagagcaccaacacagcaagagcccacagacaggcccaaaaaacccagagacgaacgaggccccagaacggacagagagaaagccaagcgaaagcgcaagagaaacggaggagggccccagggagaagaacaaacacagagcaaccaccgaggacccacccaagagggaccagagaacaacaggagcggaaccagaacaaacaagaggaagcaaaacacggcccccgacagaagacccaagcaagaggcaaggagagcaggagaccacaacacccacaaagaaaggacaaaaaaaagaagaggagaccaagcaggcacgagcggcaaggaaacacagagcgagaagacgggcagggccaagccccagggagcaagggaccagaagacaaacacaacaagcaaccaaagcacgcggaaaagcagaggagaaagggggagggggcaaagggagaaaagcgaaagaagcaggccacaggcagcagcaggagaggcaccggggagaccacacccgagaaacagggaaagcaacaagccaaccagccaaaccaagaaggacaccccaaacagagagaaaagaagaccaggaagagcacaaaagcaaaaacagaggaaggagcagagcacaaaccagggagcagcccagaagccagagaaccagccgggaagaggaaaggcaacccaaggaccagaagccagcagaaaggagcaacagaagacccccccccaagggggccagaccggggcaggccggaccccacagccagcccccagaaaaggcaacaaggagcaacaaacccaccagcgaaaccaggacgcaaacagggccccagaccagaaagaacagaacacacaccacggaacccagaggaacagcggggggggagagcagcgagaaaacgacagcagcccaggcagcgacacaaaggacacaaacggaggaaggaacagcaggcagcgcccagaaacaaagggacaaaaacacagccgaaaccacaccaaagcagccaaccccacagcacaaagcacagagaccccacaaaccaccaaccccggaggcccaaggcaaacagggcccgagaggcccgagaagggggaaaaggggaaaaaaaaaaaacccccaccacaggcggagaacacaagacgcacacgcacggaagaacacaccccgcagagaagaccgcccgaggcaggagcaaaggggagcaggagagggagaaaccaaagggcagaaggcagagcccaagcaaaaaaagagcacacggacaagcaggcggagacgaggacaagggaacaaaccacagcccgcccacaagcagccgaggcagagcagggacccacggcgcacaccagaaccagaacaccaaaaagacccacccaggccccaacccagacaaaacaaaacggaggaagggcaccaagaagcccagaggcggacagagaggggaaaccacggcaggaaaaaaggaaccccccccaaccggacagcccaacgagaaacacaaacacagacccagaccgcaggaagacccgcagcgagagagcagagcagcagccgaggcagaaggaaccgaaggaagacggggagaggaaagcacagaaggagaagccgggcaccggcacagacccagccgaaagaaggaacacagcgggccccggaagccaagaacgaacaaaagaacaagaaaagagagggagaggaccggaaccggacccccaaagagccccaccagggaaccacccccacccccaaaccaggcgggggagcgcccaaaccggaagcaaaaagggcaccgcccaagacaggcaaaggaaacgacccgccaggacacaggccaggacaacaagccacaggccgcggaacaacagccgcacgcccaggcaaagcagcaaggcaaaagagggcggggccagccaccagcggggagagacggcaaaaacaagacaaccagaaccgcgaagggaaaccggaccaggagacgaagacaccccgaccaaggggcaacaccccaggggagacggagcgccgcgcccaggcggaggcaggagcgacaggccacgcaagccgcccccgggcacaccacccgcccagcccccgagaccgggacacaggcacccgccaccacgcccggcaaagagagagggccaccggagccaggaggccaaccgacccggaccgccgcccagcccccaagggcgggaacaggcggagccaccggcccggcccaccccagacagccaaaacagacccgcagaaaagaagcacaccacacggaaaaaaagaaccgcccccccaagaagaaaacagaaaacaagcaagcccccacccccaagaccgagaaagacaaaaaggaccgcaaaacgaaggcgacagcaagcaacccagaggcccacagaacaaaagccagccaagaagagggaacgaaaagcacaggcaaaaccaagcgaagaacaggagaacgaacccaaagagggcagaaccacacccaacccaaaacacaaaaaagaaggggaaacaaacaaacacgagggacaggcacaacggcagggacaagaacaggccagggggcgcacccaaaccgcaacaacgaaccccaagcacccccccacccccccaccccacaacaggccccgggggagccccccggccaaggccagcaacccaccggaggagaacaggggggccgcccgcgaaggcgagaagagccagacaccagcccacaaaggacagaaccacaaggcgcaagaccacggggaggccacacaaccagcacagggacagggggccaagcgcaaggaaaggcgcaaaaacaagggcagcgcaagagcagaaaaccgggaaacccagaagggaggcgggcaaaggacagcagacccgaggaagccacacgacccacaagggaacaaacaacccaccaacaggagaaggccacccacacccccagcaccggccgacaagacgccacaacggcgagaggaccaggggagcaccgaggccagaagagagcacaggcggcgcaaaagccgagaaggcgcaaccgcccacaaggggggcgaaaggagcagagacggaaagcccgcagagagcaagcaaaagccccacgggggccgcaccgaggagcgcggcagaagccagaaagacgagcaaggcggccagcgggagacaagaaaaccaggcaaaccacagcacaaggcagggcaccaacacaagcacagggccgccgcacccgggaagagggaagaaagcacagcgcaacccaaagaagcccgcggaaacccccacaccaccacaccaaacgccaacaccaacacagccagcagaaacaccccaaaaagcaagacaccacacaagacacacacgccaccccccaaccagaaaggaaacccagagcccacacgaacccgccaggaaccacacaaaaaaaccaacacccacagaaagggggccagcacaaagccccaagacccaccacggacagacggagacaccccaggaagaggccaggcaggacaaaaaaaggcaaaaagaagaaggaccccaaggaggcaaaaaggaggcccaccggggcaaaagcccaccagggaaaccagacaccagcccgaggaacaggccgagagaggagcaaggaccccaacaaacagcggcaccagccagccggaagagccaacggaagggccccagcccgaaagccagaagaagaagccaaccaacacgaccacaaccaggagaggccacaaacaagacagcccagcaacccaaagcaccacagaaaccagagacaaaaccgagagccagacggaagcacagggcaacccccaccacacacagaagcaggcagaagcacacaacaccagggcaaaaagacgaaacaagaagcaccaagacaaagagagaaaaaaaaagaaaaagaaaaaaaaaaaaaaaaaaaaaagaaaaaaaaagaaaacccacaacacacccagaggagaaaaaaagcacaagacacaacgcccaaaaagaaaaaagacaaacaggaagggggccgggaagggaaaaaaagaaaggagaagcacccaaacacaggaagaccaaacaaaaccacggacaagcccgaacgaaaaaccaggagacggcaaacacacgggaagaaggacaaacccccgccccgccccaccccaggcagaaaagagggagagacagagcacaaaggccacagccaccccagacccaagggaggagccggaggcgaccaacaggcagggagggaaggaacagcggcaacacagggccccgaggcagagcgaagaaaagaagcccacgcaccgcgaagccgccgcgccccacgagcagagggcagaacaaggccccagagaggaagggcagaagcaccccacccaggacgggggcggagggcggcaggaaagggggcggacacagcccggagcacaagacccaggccagcccaaagaacaacccgccaaggacacaagcaaccaacagaacaacagccaccaagaaacaggagcaggcaacgccagaaacccacgaaccggaagaggcgcgacccacacccagaccagaggagcaagcagaaagccgagaaagccacacacggcaccgagaaaaggcgcaggacccaggccacgagggggaaagagcgcacaaggaaggagggagacaaaacacaacgggaaacgggggggaaggggggggaggggaagagcggaaaaaaccacgagagaccgagcaggacaacagacaaacagagcaaaaggcacaaaaaacaagacacaggacacagggagacacagaaaggcacgcagccaagcccccaaagacaggcaacgcccaaacaaagcaagagaaggagaggggcagggcaagaggaaaggaaaaaagaacacacaggcaaggggcaaacaagccgaggccaaacacgcggaagaaaaaagcaggaacacgccagccagaagagcaggcgcagcaccaacaaaggagaaggacagagaccacaggcgcaagccaaaaaaccacgcccagagaaaaaggcgacccgccaagaccacggaaaaaggcgacaaggaaaacccaaacaggaaacacaacccagacaagaaaaaaaccaaagccaaacaaaacaaaaagaggaaaaaaccaaaaaacacaacaaacaccagcaggaaaaacaagcaaagccgacggaagcaaaaaagcaaaaccacagaaaaaaaagcagacagcaaagagccaccgagaaaggcgccaaggagagcccaaccacccgaaggagcaggcaaggccaagagcgcacaaccacaggggacggaaccagcaccagaaagaacgagagaggcgaacaggagcaaccccccgccccagcccaccacccccagagaagaagccccaagaagagagaaagggcaaaaggaggggaaccccaagaagggagagaaaagacccacgaacaaaaaagcagaaagaaaagcccagaggcaaggacgcccaagggaaggcggggagggcaggagacacccacgcgccaaaacccagagcagacgcccaaggaacaagggcgccagggcaaacaagaaacccccgggcaccaaccgacaaaaagacaagggccggagggggcccaaacccagccacggagcacacaagaccaggacgaccaacaacaacaacaaccaaagagcaccacaaaacgcgacaagaaaacggcagcaaaaaggaaaagagaaaccaaaagaaaacagaaacacagcaaaaccagacagaaaggcccacccaaagcgccgagccccagccgagaaagacgaaacaaagggagagggaaagaggaaccaaacgagaaccccaggcaaaagaaagagaacaaaaaagagcaaccccacaacaaccaaaagaccccagacaggaaacacgacacaacagagaaccaaagccagccaaagagggaggaggggggaaggaagaagaaaaaagaaaacccaaaagaacaaccagcgggcaccacgcacagcagacacgagacagcaagcaagaaaccaagggaaaaccagagagaagagacaccaaagccaagccaggaagaaagaaaccagggcacagacgggaagagagccagacagaggcagagccacagcccccccacaggaagcccgcaaccaaggccgccaggaccaaccccgcacggaaagagaaggcccgccccggcacacccaggccgccagagcgagcacccaccggccacccccgcagaccgcagcccccacccacaaaacccacccggcaaccacacccgccccccaacggccaacccagcccaccaaggggaccaggacgaagacagccgccacaagaccgaagaacagcagggaaacgaaccaacgggcagaacaagccacgacccagcaaggaccaggcagaggggcaggggaagaagggggcaaaggcaacgagaaagaagacaggcaccaagaagcagggcgagaaaagagcaggaagaggcaaggcagaagggaaaaggaaccaaacccaacaacaaaagagaacaccaaggcaaaggcagaccaggacaaagagcaagagggagacacaaaggagaaaaaaacccccccaagggagcgcgcagcccccgcccaacagggagccacagccacacaggacgagcacggaaaggccaggccaaagagaggagaaggcaaaacaccaagaagacggccaaagacaaaaaagcaggaacacacagaacaacggaacaagaacaaaaagaacaagggaaaaagaaaaaaacacggcaacaaaaaggcacagaaaacaaacgaagggccacggacacgggagaacacagccagcagcaagagggaggacccaacacaggaaacagaaaacgaacacagagaaagacacaaggcagacaggagggggggggaccaaggggggaagcacagcaaacaacacaaacacgcacaaaccaggcacgagcaaaaacccaaaccgggcccagacgagaaaaaccgggcaaggacaacccaccccaaaccccagaccacccccagaagacccagcaggcacacaaggaagccgagaaaccaagaaccacagcaacagaccaccgagagccaagccaaaggcaagacaaagagagaaaagcaggccagagcaggaaaagaaaaagacacagacacacaaaggacaacaggagcaaggcgcacaaaccaggcccaacacaaaaaaccgacaaaaccaaacaccgcagaaaagcaacaccaacagaggggaaacgaggcccaaaaggaaaacgccaaacaagaaaagaaggcaaaagaaaggagagacagccacaacgaaagccagggaaccaggagcacacgcagaggacagccgcgaaacagaacagacaagcaagcgaacaggagaaagagggaagacgaccccgaggaggaaaacagcaggaacagggacagacgcccgcaccagcgccgaaaagaccccggaacccagaggcagccgcaggcacacaggaccccaaaccaaacgaagacggaaaccagccaggaaagagggagggaaggaaagcaagcgcaagaacccaagagcacggagcaggaggggcaccaggcccaaaaagagaacagggaaggacaagggaaaacaaacgggcgacaaaaacagacccaccaccccccccacccccgaaaaaaaaagccacaggacagaggccggagagaacgaaacggcggccaggggacgcaggcaaaacccaaaccaaaggggggaggagccagaacagacccagcgcgggaacagccacagacgaaaaagaggcccgacccagccccacaacacaaaagcacaaaaaaacgccagagaggacaaagaacaagcaaaaaaggcaacaagaaggagagcgaaacaaagggcacacaacaggagccagcagaccaacaaagaagggaaaacaagagaagcacaaaaagacacgcccccaacaagcaggaaaaggagacggcacaagggggaaagaagagaacaagggagaaagagaaaggcaaacaaggcaaaagagaagaaaaaacaaaaggagaaagaagaaacgaaagagagcccccaacaggaaggaaacacaacccccccaccaaaccccaaccccacaccaacgaaagaagcagaagcacaagaaaaaaaagcaagggaggagaggaagaacgcccaaaagaggccgaaagaaaaagccaagagagcgaaaaacaccgcaggagggggcagacaaagacaaaagccagggccaagaacgagcaaaaaccacacaaaacagacggaaggaggcaggaaccagaaccggagcacgccgagcagaaagagccagacacaaagccagagaagcaaagcggacaacaacagacgagacagacccaacgcaacacaacagcaaccagcaaacaagcacaaaagaaaaaacacaagcgcacgaaaaaagaaaacagaaaaaaaacaaaaagaaacaggcagaacaccccaaaaggcagcccacaggaaagcaaggcaaaagaacaaagaaacaccaccaccaccaccacacagcagcaaaaagcagcaccagaaaagaagcaaaaggcaccggagagggaggaaggccacaccccagagcaccccccacgggaaccaccaaaaacagaagaagcaaggggagagcaaggcgcagccaaacgaggcggacccagcccaacacaaccggacccgaggaaagacgcgagcccagcccacagaaagcaaaccagagcgaccacccgaaaggggggggacccacagagagaggcgagagaggacaggccagcaaaaggaacaagaccagcagcacccacaccacaaaaagaagccgaaaggaccaacaaacaaggagcagagaacaggaagaaagcacgaggcagaccgggcccagggcagaagccaaggaggaaggagaaacccgacaaaaccccgaaagccaagggcaccaggcaaagaaagaaaaaagccaacacaaaaaaaaaaaaaaaaaaaaaaaaagccaacacagccccgacaccccaccaggggagagagaagaggaaacccccaacccacccaagccccaagagcgcaagaagagaagggagccacccgcagccaagcccggaacccacgggaaaccgaacaggacgaggccaaagccagaggagaaaggagcaaaggagcccacgcggagaggagaaaggaaccaagcaacacgaaccaaacaaaaacccaggccgacacgcagaccaggccggggcacaggggggcagaggcgcccaggcacgaagagaccacccgcaagggcacccagaagaccagaggaggcagcgggaaacccacggccccagccggcaccgagacgcacacccgcagagagggagggcacccagaaaccccaacccaccacgcacagaccgcccccagaaggaaaacaaaaagagaacacaacggagcaggaggagggcccagaaaaacaaaagagccccccaccagaaaagacaaggaccaggacagaacagaaaacaaacccccaaaaaacgacaaaacaagaccacagccaggcagaacgcggcgaggacaaaacggcaacagccagaaacaggaccaaagggccgcacacagaggcagaaaacaaggaagaaagaaagaaaacaagagaggaaaccccggggccaaagagcaagaggcaacaagaccaacagagcaccaagaaaggagcccggaaccggcaaagaacccggcaaaagagggcaaaaaaaagaagaagccccagaaccaacacccacacccccaccacgacaagccacgacggccgagggaagcccccaacggagcgggcagccaaccccagacaccagccagaggaaccaaaaaaagagcaaacagcacccggagaacccggcccccaaccagcaaaaccgaagccacaggcccacaggccccacgcccgccccggcccgcccgccccccaccccccccccacacggcccacgcggagcccaccaacgccccccagcaaagaccaaagccgaaggccccaccccaacccaaagcagccagcggggcccgaaaaccaggaacagcaacccacgcacccaagcccacacccacagagaaaaaccaagaggccgcccccccaaacaaaaaagcccccagggcaggaaaaggacgcaaacccagcaccagaacaggcggaacagagaggcccagaagaacggagaaaccaaacggccagagaaggacaccagcaacacgaaccagccaagacccacaacaccaaggagacaagagaagggaaacagcaacaacagacaaagcaagagcaaaaagccaaaaagggaaacaaccaaagccacaacgagaagaaaaaacagggcaaaccaaaaaggaaaacaccagaaaaggaagaggaacacagcgcagagaagcaaaaacagaggaaggaaagaggcggaacaagaagagaagggagaggacgcaaaggaagagcggagggaacacggacaaaggggaggcaaacgaaaacaaacacccgacggacagaaagggacaggaggaaaccaacaaggcagagacaaaacaaaaaacaaaaaacgaaccaacaacccagcacccagaggagaccaagcggggcacccagcaccagagagaaacaagagcacgacaaagaaagccgaggccggcaagcacgcggggagcaaacaaaacaaaacaaaaaagagcaaagccagcaggaggacagacagcagaaacaaaaaaaaaagaaggccaccaaaacgaaaagaaggggaagccaagagcacgagaacacagaagggaaagaagggaggccggagccaggcggaaagaaggagggacgcaaggacaggaaaggaaaggaggagcacggcacacggagcgagaaagagcaggaaccccaaaggacaagaggagggcagaggaaaagaagcaggagagacaggcgaagagagcacccgaggggccagccccgcagcaggcgcacccgaggcaacggcaggcagaaggcagagcaagaacgagaagaaagacggcaaggcaagcccagccaggaaccaagagggagaagagacagaaagggacggcccgcaacacagcgaagaacccaagggaggaaggaaagaacccaaggggaggaaggacacggggcggaccagaaagagcaccacgggcgccagaaggaggagaagagaccagaaaaaggggcacccccgccccccgcacgccggccaggaggcccccccgcacccccagaggaaccgaggcccccagaagcaagaagagccagaagccgcacaaccgagaaccagagcaaaaacccgaaaaacccagcgcaggacaagcaacgcaagaacaaacaaaagcagcagacaaggagggacgcacaaacacagaggaacgcaagagcgggcagccgggcaggggagggccaggaaaaacagcccagaggcaccagaaggaggaggggccaacggaaccaggagggaaaaagcacagagcgcaaagaccacccagaggcaagagaggcaacaaccagagggagcacaggaggggggagcaggaagaggggaaaaaaagcgaacagagagaggcgaggccacagggaagccagcagaaggaacaaggaagaacaaaagaagcacagaagaaaagagcaacacacaccacagaagccagcacaaacaacaacacacaaaagcccgaaacagagaaagacagcccccgcgccccccaccaagccccccaccccgcccaaccgcaccccccaccaagcccacccacccacccccccgccagcccccccgccccccccacccccaccggcccccccacacgcaagagaaaaaacggaagaaaaaaacgaggcaaggaacgagaacgagaggaacgaaagacaagaaagccccagccacaagacaaccaacaaggccacccacccacaggggcggccaagacccagggacacgaaagagcagaagcaccaaacccaaaacggagcaacaacacaccagaaaaggagaaaaaggcacagaagaaacacaacaaaacaaaaaaagagaacaagaacaaagcagcacacgcccgcggggcaaagaaaaaagggagaagagaagcacgcagacacaacagcgacgaacagacagcgcaaggacgacaggcagggagcacacagcaggagagccagacaagaggagaacagccgacaggacaaaggggacaggcgagacacacgcgccagaaaagcacccaaaaaacagaagacggaaccacaagcaaacccgaagaaggaaaccggaaaggaagcacgaaaaagcacagaacggacaccgggagagggcgcagggcgaaggcagagcggaggaaacagaaacccgccagcagcacacaaagagagaacaggaggaaacacacagaaaagggagaagaggcaaaaaccagcagaggaaggagggagaaggggggagagggagagacaaggaggaaggggagcgcggcaagcaggaggcgaaccacaagggagaacagaaagcaagcccgaccacgccccccaaacacccgacacccgccggagaaccagacagccagcacaccacacggaaaaaaccaaaggccaccaaaaagaccaccacgccaccccaaacggccaagcacaaaaaccaggaaacagcagccaaaaaaaggagagcggccgagggacaggagaagcggaaaccacaccagcaaacacgcaaggacaaaaaaccaaacaccaagccaccacagggggaacaacaagagaacacggacacaggaacgggaacacacacacggggccgcaggggggggagggggagaaacaaagagaagccaagaaagacgagaaggggcagcacaccaacaggcgcagcaacaaagaacaaaccgcgcggacacagacccagaacagaaaaacaaaaaaaaaaaaaaaaaagaaaagaacaacacaagcacaagaaagaaaaaaaaaaaaggccaagcaagacaagaccgggccacagagggaacccaccccccaggccagggaagagcagacccggaccgaagagcgggaagccagggcccaacgcccgcaccccccaaagagccagacggaccgacaccagagaggcaggaaagaggaaagaggagaagggacaccggcaaggacgcacaccagcgggccccagaacggaggagaaaggcgacgcccaagagggcgaaacccagagaccccaccaggaacaacaccaagcacgcccgggagcccaacacaaccccaaccggcaggggccaccaagagacaccgggcccaaacccgggaagaccacagagccaccacgccagagagagaccccagcaaaagaccacaagaggaaaacaccgcaaagcagccccccagcagccccaagaagaagccacagaggcacagaccaggaaaagcaaaaacgccacgggcccaaacccaggggggaaacaaaccaagggccgaagccacccaccagcaggggggggaaggaaacacagaacccacaacccggccccacacacgcgagacagcaaaaccaaagcagagcagcaaagccgaaaaggccgaagaaaaaagcgcaggcaaaacagccagagcaaccaaccgcagaaaaaagaaaagagcaagggcagcaagcaaaggggggcggccaaaaacaagaaaacagaagcaggcaggacagccggggccaggacccaaaggagggagacccaaacgacagcccccagcaaggcccgcaagaggggagcaccccggaagacagaggccagacgcgaagcagagagacagaaaggccaaacaccaaaacacaaacacacacacacacagagagagagagagagagagagacagagagagagacagagagagagacagagagagagaggggagaaagaaagaaaaagacagaaacaaagaaagaaaagaaagacagaaaaaaggcgcggaagaagaaacccaagacgagagacggcagcaggggcgggccaacgaacaggggggaggaaaccagagagcccaaacgagagaaaggcccccaaagggaaaaaacagacaagagacaaaaaccgcggcccacagagaagagacagaaccaggaaacgccagaccaccaaagcacgagacaggagaagacgcaacgcgaacaaacacaaaaaggcacagcgacaaaaaaaccacagagaagcagaagccaaagggcacgggcaaagcaagagagagcagcagggcacccagagaccaagaaaaacaaccgccccagccagaggccaccgcaccagagagcaccccgccaaaaccaacaggagcacccggagg

SEQ ID NO: 223 - RNA, 4554 nt, Homo sapiens
aaaacacaaaaaaagccggggggggcacagcgaacccagcaccaggaggcgaggcaggagaacgcgaaccgggaggggagggcaggagcaagacagccagcacccagccgggcaacaagaggaaaccgccaaaaaaaaaaaaaaaaagaaagaaagaagaaagaaaggaaggaaggagaaaagaaaaagcaaaagccaaagaaaaaaagaaagccaaagccaaaaacagaaacacaaaggaagaccaccccaaaccaccacagaaaaacacaacgaacaccgccgaggacaaaggacaaaaaacccggcccagacccagagcaaagaacccagggggaaaaaaaagggcgggaaaaaccagaagaagcagcaaggaaggcacgcccaaaaccacggaggacacaacagaaaaacaccgcaaccgaggcgagccacaaggggggaaaaaggagggggggggcggacaggggccagccaaacccagcacggaaggcgaggagggggccgagcccaagaggagaccagccgggaacagcaaaacccacacaaaaaacaaaaaagcggggggggcacagccggccccagcacagggaggcgagggggaggacaccgagccgggaggaagccggaggaaccagacacgccacgcaccggccgagacaaagggaccaccaaaaaaaaaaaaaaagaggagcaggaaaggcagcaagagagacgaccagagagacgagcagcaggagaaaccacgcaaaaccaaagaaaagcccgaagccccccccggaagaagcagacccacaaaggccacacagggccccagcacagggccagccgagcccagcacgcaaggcgaagcaaaaggagggaggccaggaggcaaccagccggacaacaaggagacccacaaaaaaagaaaaaggagcggagagccacacgaaccagcacaggagggaaagggggagcgagcccaggaggagaccagccgggcaacagggaaacccaaccacaaaaaaaaaaaaaaaaaaaaaaaaaaaaccaaaacaacaacaaacaaaaaaaaccgggcagggggcacaccgagcagacagagaggcgaaggggaggacggagcggagaggcaaggcgaggagcgacagcaccacgcagccagccgggcaaacaggagaccaaccaaaaaacaaaaaaaagagcacagcacgaaacagaggaaagagagaaagaaagcaaagggaaggaaccgacaaacccccggagaaacaaacaagaccacacgaagagaggaacggggccagggcaagcacagaaccaggggaagcaaaccagaacacgcgccacacaggccagcacaaagcaggccccaaaagggagaaaaaaaagggacagaaaaaagcaaacagaaaacgaaaaaaaaagaagccgaagagacgaaaagagcaaacccgggaggagcggaaagcccaaaccaaggagaggaaaaggaaggaaaaaacaaaaaggccaaaaaaaaaccagagagaaaaaaaaaaggagccacacggaacggacaacgagaaagagaaaaggcgggcacagggccagccgagcccagcacgggaggccaaagcaggcagacaccgaggcggaggagaccagccgaccaacacagagaaaaggcacaaaaacacaaaaagccgggcagggggcagacgaacccagcacgggaggcgaggcaggagaacacgaaccggaggcagagggcagaagccaagaggccagcacccaggcggacaacaagagagaaacccccacaaaaaaaaaggaaaaaaaaagaagcaaaagggagaacagagacgaagaaagacagaaggcccccggggaaaaaaggacggcccccaagaaacaccacccccgacacaaagcagaacagagaaaccccccggaagccgccacagcggccgggaccgccaagacgcacaaccagcccccaaagagggggggacaaggacaaaccagaacccaggaagccagggcccccccaacgaaaggaagaaaacgagggaaggacgaaaggaaacaggaggaaccaaggacacccggcgaaaaagaaagcccgaaaaaaccaaccagagcaaagagaaagggaaaagaggaaaacaagaaggggacgaaaaaggccccaaacacaaccaaacaaagaaaagaaaaaaaagacaggaggagggcaagacccgcgcagccggcagcaccagacccagcacccacagaagcgaccaagaagagaagccagcacgaaaggcaagcgagaagacaccacgcacaaagcaagcaggggaggagcccagcgcacgaaccgaaaagacgggacgcaagggggggggggggggggacaccacaaaaaacagagagcacagaaaagggggcaagcagccaacaaacaagcagcacaagaagccaaaaaacaggagaaaacaacacaaaccacaccaagagaccgcgccagaagacacggaaaaagaaggaaaaccaagagacccaccaccaacaacaagaagcaggccaaggacaaaggccgcacgcagcggcaccaccacgaggcaacccaaaagaccaaaccaacagaaccaacgccccaaaaccaggaccagagccaggcagagcacgaaccaggcagaggacagagacgaggcaccagcggaggccaggggacggacgcaaagggcgcgcccaggagaacagcaacaaggcaaccacccggaagcaaggcccccacggacccaccaacagagcaggcgggcacggggcacgccgaaccagcaccgggaggcgagggaggcagacacgaggcaggagcgagaccagccggacaacagggaaaccccaccacaaaaacaaaaaagcgggagggggcagccgaacccagcacggggaggcgaggcaggagaagcgaaaccggaggcagaaggcaggaccagacagccacgcacccagccgggcaacagaggagaccgccaaaaaaaaacaaaagaaaaacaaaaaaacagagcagggacgagccagcccgccagacgaccacaagaagggaggaaaacaagggagagacaggccaccagaaaacaaaggggaggagcaagaagcggagcacgccagaacaacaaaacacaggacagaaaaagaaacagcaacaaaaaaaaaaaaaagaaaaacaaaaccacaagaaagaaaaagcaaagaaaccaaccccaagcaaaaaggcgcaaaagggcaagcgagagagaaccaaaaaaaagaaaaaaaccccagagcgagaaacagaccgaccacgggcagaacaaacaaaagacagccacaaaaccaagaccagagaaaaaaaaaacgagcaccaaacaaaaaacaggaaaagaaaagaaaaaaacaaaagccaaaaaaaggggcgggggccgccgagcccagcaccgggaggcgaggcaggagaaggcgaaccgggaggggaggacaagagcgagacggccacgcacccagccggggacagagcaagacgccccaaaaaaaaaaaaaaaaaggcggaaaaaccgacaggagaacaacccccacaaagaagaaaagaagacgaacccgaagcgggagaaaaaaaaaaaacaaagggcaaaggcaaaaagaaaagggggagaccgacccagaaagaggaacaccacaaaagcaaaagaccgcccccaaccggcacaaggaaacaacaaaaaggcagccagaaaaaaacaacaccacaaagaaccaacaaacaagaaaaagagcccccagaaaggaccgcaagggggacaaaaacaaaaaacacgaggaaacaaaaacgacaccgaaggcaaacggcaacccaacaaacagcaaggaccagcaagaaaaaacagaagagggagccaaaaaaaaagaggcaggaccaaccaagaaaaaaaaaagagaagaagcgagaaaagcaagcaacccaccaaaccaggaggcaaaggcacggacaccccagaaaagcgagaacaaaaacaggccccaggcaccagaagggcgcaaaaaagggaacaggggcggcaaagccagacagggagaaacaggcacaccagaagcagggaagcgaaagcaggccgagggggacaagagccaggagaccaacagcgacagcaagcgaagagccccaagcacacacggaggagaaaagggccaagcgaaagcagggggaggggaaaaaccggcggacccgcccgccgggcagccggcacaggcagaggagccgccagccaagggaggaggcggcagagccgccagcaaagaaagaaaaaccagaaggacaaaggccagggcaccccccaacacccccaagcaaccaaaaacacggccgaacaaaaccggggagggagggagcaacggcgggaggccgggcccgccagacaaaacccggaggacaccggggccagccagccccaaaagcccccccccgagcccagggaggccagccgccccacgagccaccgaccaacgcgaccccccgcacagggggaggaagacagccaggacgcggcccacagccacaccaacagc

SEQ ID NO: 224 - RNA, 5597 nt, Homo sapiens
cgcaaaagccaagagaaaaaccccaagccagaaaaaaacaggagcagaaagaacaagacccacccgacccagaaagggggaggaaaaacaacaagcgggcaagaaggaacagacaaggaagcaaaccagaaaaaaaagacagcaaaaagccaaaaagggcccaggagaaaggcgaaggaaaccagacccaaccgagaacgagggaaaacaaacccaagaaaggcaaaccaaagacggacagacggaaaacaaagaagagggagcggagcgagggaagaagcgcacaccaccccagaccacgacgccaacgggacaacgcgcacaaagagaagacccggaaaaaggaacaaaaaagaaagccacagaagaaacagaacaaacaacgccaaacaaaagaacggcaaaccaaagaaaaagagcaaagaacacaaaaggaacacaagagaagagaccagaggcgaaaaaaaaaacagccacaacccacaaaccaaagaaacacaaaaaaccaagaaaaaaccacgaaaccaccaaagaagcaaaaagaaaaacaggggcaaaggcagaaaggggccgccacgacaggacaacaaagaagaaacccagaaggcagggcaggacaggacaaaagcaagcaaaagaaaaaaaaaaaaaccaaggagaaaaaccagaagaaagaaacgagaaacacaacaaaaaaaaaccaaaaagaaagccgaagggaagccgcagccaaaaaacaggcaaaaacaaaccaaaggaaaacacaaggaccaaaaaaaaaaaaaaaaaaaagggcagggccgaaacgccaaaggacaggaaaccgcacacaaacacaaaggaaaacacacgaacaaagcaagggacccggggaacaaccacaaaaaagccaaaaaagaacaaaacaagacggaaaaaacagaaaaaggaaacaacggacaggaaaaaaacgcgaaagccacagcgccaaacaaagaccacagaagggacaaaaaaacagaaaagccacagcggagaccagaagcgaaacaagggcagagggccagcccccaaaggccggagaagaacccgccccagcccgggcccagccacccggcgggcgaacccaaacccgcccgccacaggcccacccccaagcccccgggcacaggacacgacgaaagggcccacccacaaccaggaaaccaaaggcaccaaaaacaaacgcaaaaccgcccaaaaaagcacacacaggcaaggaggcagagacacggaggacacacaaccggggaggaaggggacggaccggaggcgggccgacaccagaccaaagagggacagcaaaacagggcgggcagaagcacccccgcaaggcacgcccaacagggcggcagacaggccaggcaacaccaaaggacgccccccaggcaagacccgacaaccggaagaccacccaccagaaacgcaaaaccacgccaaaaggggcaaaaagaagcgcacaccgagcgagccgggcacacgccaggcgagaacccgcgcgcgacaccgcgccaaaaaaggcagaacaccacggccacccgaacccagggacgccaagaaggccccaggcaagccccaagagggcgccgccgcacaaaccgcaaacgaagaggagacacaaagcaaacaaaaaaaaaggcaaggaccaacgcaagaacagcccaaccaggcggaaaaaaaaggaaagggaaccaaaggcgcacgagcaggcgcagagaggaaccaaacacaggcaggaccacaccgggagcgagcaaaccaaaggggccagcggccggccagggcgcggacagccaacaacacagagaaaagaaacagaaagggaacagaacacagccaagaaaaaaaaaaaaaagaaaacaaaaaaaaaaagaaaaaccaaaacagcccaacaaacagccgagggagcacagacacgcacaaggaaaacagaggcagcaacaagagagcgaaacagcagacggaaggccaccacacgaaggcaaagcacaaacagaggcgagagccaggaaaacaccaccaccaccagcgccccggaccacagcccccaggcaagacagcaggaaaagaggcaccccaaaagaagagacacccgaggaagcgcccaccgagccaaacaccaaagccagagggaaagaaacccaccccaccagagcaggagacacacccaagccaaaaaggggacacccagacacaggagagcacggaagaagggaaaaaggcgcggggaaacgcaaagaaccaccaaggcaagcagagcacacaggccaagggcccccacccagaaagaggcagggcggaccaagaagccggaaagggggagagggcaggcgggcagaccccccaaacccccaaccccgggggagagccccgcgccccccaggccgaagccacagcggcccaacagagaaggagcagcaaaggggaggccgagaaaaaaagaaacccgaggggccagcaaaggaggagacaaacaaaaaaaaaaccaaagagaaagggccacagacaaggaaaagcgcacggggaagcagaaaaagggacagaccccagagaagaggacaacggagcggaccacaccaaaaggccggggcagaggagcacagagaagagccaccaaaggaacacagagagcaaggaccacaaggcaccgggccacccacccccaacacccagacacccagaaagaccccccccacccaccacgagccaaaaagaacccaaacagggagcgacacaaaagcacgcgaagcagacgggggaggagaagaacagcccaggcaaacgaacacgcaaagagccgggccaggaaggacccacaggcaccggaaaccccagcgccccaccacaacacagggaaaccacccccagaaagcacaaggccaaccaccgcgagccggccaaacgacagcacagaacacacacccagggcagacgcccaacagcgagccggggaccaaaacaccaaagcgccagggaaaaaggcaagaccaaacaacgacacaaaaaagaaaaccaacgcccaagcaagagcccgaaggcacagcaggccaaaggcaagggggagagggggaacacaaaagggcgccaggggcacagacgaccgaggaacccaaagcaacagagcgaggaacagacgaaaagaaaagggaaagaaaggcaggggccacaaaagaaaagcaacacgaaacagggagaaagaaagcaccaaaagaaaagaggaacaaaaacaaacagaaaggcaagccgcaaccaagggaaagcaaagacaaaaccccgcacagcggacgagccagcgacccaaagagacccacgagaggcagcccaaagcaagcccagagaacaaaaaaaaagcagcggaagaagacaaaacggccccgaaaacagacaggggaccccacagaaggaggaccagcaaagcgcacaaaagaagacgacagggcaggcgacacaaccccacccgaccccgccaacccgacgaccgccagccgccccaccccaacagcaggaagaaaggagaaaaaccccaaacaaaaaaaaaacaagacccaaaacaaaaccacacgcgccaagacagagggaacggcagagaagcacccgagcaggaagacaacccgaaggaggaaaaaacgaaacacaaaaaaacgcgggccaggcaggggccacgccgaacccagcacgggaggccgagggggggacaccgagggggagcgagaccagccggccaacagagaaaccacacacaaaaaacaaaaaaaagccgggccggggcaggcgccgaacccagcaccgggaggcgaggcaggagaacacgaacccaggaggcagagggcaggagccgagacaggccacgcacccacagcgaaaccaccaaaaaaaaaaaaaaaaaaaacaaaaaacgcgggaacaaagccaaacaggagagcaggacggcagagggagaccaggcaaaagaagaggagccccccaaaggagacaagggagagccgaagagggccccggacgcacaggccaggccaggagcgggccgggggggacagagagcacacacacacggacacacgacaaccagacagaagaaaaccaaaacaccagaaaaaaacacggacccccacaaaaaggccaaagaccggcggccagaaccgagaacacaccacagacagagagaaaaaggaacgacagcaccaggaccaacgagaggggaggggaacgccaaaaaaacaaaagcaacgcaaaaggccgacagaaaaggaaagagccaccccccagggcgggagcagaaacgcggggagggcccagcgcagggaaccagagacagcagccaccaggaggaggagaccagagagagaaaggccaggcgcagaagagaaccgaagagcaggcggccaacaaaaaacacagcacaccaaaggacccaacgcacccccaacccgcggcccaggagccccccccccaagcccccaccagccccaccccgcaccggacaccccccggaaaggagcacacccagcccgcaaacgacagggaagaggcaccccccaggccggccgaaggaggagagcagcagggaggggaagaggaggccagaccaggcaccccgagcagacaacacgcaccccaagggcaaacacaagcaccacagaaacacgccaagcccacccaaccccacagagcacaaagcagagaaagaaggccacaacaaacccgggcacagagagaaaaaggcggagaggaaaaacaaaaagaagagggaggacgacacgcaaacgacccaccaccgacgccacaaaacgcaaaaaaaaacaaaagaacagaaacaaaaacaagacaaaaagcaacacccccaggccacaccccccagacacccagggcggcccagcccccccccgaaacccagggagacaaccccggcacccccccaccaaccccccacgccaccagaagcgcagaaaacacaaagcaaacaaaaaagcaaacccagaaacccccagcaaggagaaagaagcaacaccaaagaagcgaaaggacaagaagggaaacacacaaaaagaagggaaagaacggcaagcgaccaccgaaaaacagaaacagccaggccgagccgacagaaaagcaccaagcacaacgcacagcaaaggcaagagccaaaggccaacagaggcgaaagcgaggcacacagcaggcagacccccacaaagcaaagagaaggaagcaggcaacaagagccgggccacccccacacagcaggaaaaacagacaagcacaccccaaaaacaacagaacaacagaaagagcaagagcccacaacacgcagcagaccccccgcgccaaaagaagcaggacccggaccaaaagaacaggaaaaagggagaaaaaggaaaaaaaagaacaggacaagaggaagcacgggggaagagaaacggaccaaacccacgacacaaaaaaaaccagggaaaagaaaaggaaaaaaacccaaaaaaccagaagagaacacacccaccccaccacccacccaccccacccacccgcgcgcagggagaaccgaggggaaagggcaagagacacaaacagagaagccaaaa

SEQ ID NO: 225 - RNA, 7893 nt, Homo sapiens
cgcgacacagcccgccccgccccccgcaccggggagagaaaaaacggacaaggccccagcgggcaaccaggcaggggcacccggggaaaacaggagaaaagcggggccaagccccaagcagagggaagaagggacagggagggaacaagaaagaagcaaccacggcgcgccaggaacagaacacgagcccaaaacaggagggcagggcggagaggccccggggaagaaaaacaacccagggaacaacacggccccggccccccgggccggaaggcccgcccagacccacgaaaacaccaagagacgcacccggcccagggggggaaaggagaggagggaggcaagggggaggcccgggggccggcgcaccgcgccacccccgccccccggccacgcacccccccccccgaacagagacccaaaacagccgacaccaacccaccccaaggcaccccaagacacacggggagaagacggcgccaccccaccgaaaaccccccagaacacccccgcgggaccagccccccccaggcgccaggccgcaccagcccggcggcggggacaacaccacacagccacacagcccgccccccaggcgcggcccacaaggggcgggcccgacacagcacccagcccgggacacaccccccgccacgcgaacaggagccaacaagggaggcaaccggagcccagggcccagagcggggacagagcggcacaacacacggcaagagcccgcggcagagcgcgggagggaaaaaaagagggagacaaaaaagaaagaaaaaagagggagggagggcgaggagccagggaagaggaggagaaacgggagaggggagagagggagcaccgccggagacagcccaggccagcaggacaccggacccgagggagccacaagcacgggggagccccgccaggcaccaccgcaggggccccacgggacgaaggggaggaagggaggacggccaccaaccgagacagcggggccaagcgggccgacccagccccacggccaggggcacagcaaacaaaaaggaacggcgcacgcccgcccccccccaagcccggagaagcccgcagccgccgcggagaggcgcacagaggaagcagcgccgcagcaagagaacagggacagggacgccaaggcgaacccagagggcacaagcaagccacccaccaggaaaaagggagcacagggaccagaacaagccagggcccaagcagggaggaacccaccaaaccaacaggcagcagagcccacgcagaacaaacacgaggcccagagaggcgcaacacacgggcacagcagcgggggagccgggagaaccaagacccaaagccccccgccgcccaagagccccagagacggcaggcagccgacacagcagcaaagcgggccagaggaaggggaaagggaggacacacgcccccacagccagcgagcccgcccgacccgcccgcccaggggagggaaacacaaaaaggcagaccccgggcggacacaccccggacggcccaggggacaggagcccgcagaggagcccgaggccgggcgagcaccaagcgcgcaggcgagacacaccggggccaggccccccagggaggaagaaagagggcaagagagaagaggccgggcagggaggaaccggcggcagaacgcaggggggaagcacccagcagccagcaggacaccacaggcgaggagggcacccccacggcgccacggagcgccaagcaaagcgcagacccgcaacaggccccagaagggcagggaccgaggccaaagccgcagaggaccaccacccccagaagcggaaacaagaaaggccacagagacagggcaagagggccacagaagagccgaggcgagccaagcgagggggaacagccacagacccagaaggaaagcgacccgcccaagacagggaggggaaggaggcaggaggagaaaagggggaggcaggcgccggcgggagggcaaggggcaggaggagggagggacaggccaaggcagcacgacacagcccggcggacagagggcgcgccggcaagaacccaccccacccacccacggcccacaaaaacccaggccacagaaacaaaacgagcccacgcaggggggcaacccgcccccgcccaccccgccacgccgccccccccccccgcaccgcccccgaacccccacaccgccacccacccaccccccccccccccaccgccagcccagaaagggagcacacacgggcacaccgcaggccccccaggcgccccaacccggcagcggccaaagcgccaacgccaaacaaccacggcaacagcagcagagacccagaaagccgcaccagggggcaaggacaagcgggccaggaaaagcagcaggagcgggcaaccaagagagcgaaccaaacccgaccaagcaaccccacccagccccccagaagcagagacaacaggccgggccaccagcccagcaaggccaacagaaggaccacagaaaaggcaaggcccagcccccaccaccgagcaggaagggacagaggccggagccagcagccacggcaagaagcagccagccaggacaccccaggacgccaaggggcccgccagaccacaaaaccgagaggacaccgacacaccacccgaaaccagaaagagaaaagaggcagagcagccacggggcagagaacggccagacacaccgccggccaggcgggcccaggggggagccgaccccaggcgaggcacaacccaacagcacagccagcccgcgcacagcccccaccaccgcccagggccccgacggaagagcaagaaacccggggacaccacaggagacacacggccccagacaaggcggggcgagagggcaggggagagcccccgaccacacccgccacacggccccaggccggcacaagcagagcccgcgcgcaggagcgccccagcaggagagccagcgggccaccggaaggggagccgcgccccggaagccaacgacaagggggacaggccaggcaaacccccccaagaaccaagccccaggggcccagagacaccggaaacaaacaaagcgcaggaaagcggggccggcccgaaagcaccccgacacccccccggcccacccccccccccgcccggaggcacccaagaaagagacaagcggcccagccggagagaacccaaacaagacagggagacacaggaggaggcaaagaagagagcggaaggagccggggccaagaagggcggccaaaccccccggacgggggccggccaaccgggagagaaacaaagccccaaaagcacagcacaggacccaccgaaccccaaaaagcagcgcacgagccgggcggggcacacgccaacccagcacgggaggcgaggcgggcagacaccgaggcagagcaagaacagccggccaacaggagaaaccccaccaccaaaaacacaaaaaagccaggcaggcagcacccgaaccagcacggagaggcgaggcagaacccaggaggggagggcgggagccgagagcaccacgcacccagccgggcaacagagcgagaccgccgaaaaaaaaaaaaaagcaggcacagcaaacacccggggcaacccggacaacaccagcccacaaaaagcaccccacccacaccacggcagccagaccagcaacaccacaaggcaggggacagagaaaccccacaccaccccccaccaaccccacaaagagaaagaaagaaaccgaggaagacccaagggcaagggcaagagagaaaacccggcccaggcaagaccagacgcaccaccacacccgaccccacaggccaagcagggaagcaccagccagccccccaggcacacagggaagcccgcgcgaagagaagggccaaggcaagcacacgggagggcgccaggcggaagcccagaaagcggcgagaccacccagcaaccccaccggggaccacgaacaaggagggccgccggccacggccgaaagaggcgaggaagaagggcagccccaggcaaaggacaagagagaaagagaagaaacaggggcgggggaggcagcaccaaacccagccccccgccagacaacagcacacaaggcccgcgggagagccacagaaaggggacaaacaagccagaaaaaacaaagacccaaaccgacagcccgagacccaggaagggcggccgggggaaacacgcagcaaggaggaaaagcccaagaaaagccaagggaggcgcagagccacaggccgaccaaaagagggcccaagcgacaaaggaacccacagcccgacacagacagacacgcaagaaaaagggaaaggaaagcccaacagaagcaacgcaacgaggaagagacaaggcccaacaaagggagccacgccccccagccaggaagaaaccccccacgaaccacagcccaggcgcgccccggggcagagagcggaaacacacagagcaaaggggagaaaaaaccaccccaaaacccgagccccggaagccacagcgagggaagggggccgacccacaggacggagaccagaaggaaagagagaagccccaacacaaggccccccagggaaacaggcaagacacggcagccgcccaaacccaggagaaaaacaccagaaaggacaggaaccacggaagcagagcccgcaggcaaaggagaccacggacgaggaacggaacccaggcacgcagcaaaagcaaaagcccgccagaccgcagggggccccccgccagccccggggcaacccccaccagggcccccgccacccacgcagccccaaagacccaagccaacccaccccagcaaccaagccacagccccggacacgaaacacaagcagaaggaacccaaaacaaagaaaacgccaaggcgcgccccagccacgaaacgcacagagcaggcacacaccacacgacgccaccgccccacggggaggcgaggggcaaagcaccaacaaacaccgccaccagagggccgaacccaggcgcccaagaaaaagaggaaagcaaaggcgacaacgccaccacggggcacaaaaagccccggcccaccggccagggaccagcagacaaagccaccaaaagccaggcaccgaacaacggaaggcccggggagggaccgaaaccccggggggggcaagagacagggcaccgacacccagacggaggcagggcggacaggccacgcagccggaccccgggccaaaccaccccgcccagccccaagagcgagacacagggagcccaccaagcgcaagaacaacacagagccaggcccaggcagggcaccacagacccgaaaccccagccccggaccgcacaacaaagggcgccgcgaagagggaagggggcagaaagccaggaaggacaccgggcggccgcaaaccccggaaccagacgcagacgaaaaggaacaaacaggagccgaggaaccaaagccccagcggagcacaaaaaaagcacaaagcgagcaggaggaccccccacccgcgaaggcccggcgaaaaggcacaacagcacacacaaggggaggagggggaaagagggccggagccccaggcacaggaagggggaagaaagaggagcagccaagaacagcgaccacacccacaagcacaaagggcgccgccccaccgggcagccggggaaagaagcggaagcagagcacaagaaagacaaacacgcaagagaagaagcaaaccccccacgcggaaaaaaacacacaccagagagagacaaagagaaggggcaggcggggggggaggggcgaggcagaggagaggggagcaaaagggccgaacacagcgacggggagggcgcaacggaagcaagaaacaggcaagacaaaaaaaagagacgagccaccggcccaggcggaggcaggggccacgggccacgcaacccgcccaagcaaggacccgcccagccccgagagcagaaacagggacaccaccagccggcaagaaagagacagggcaccagggggcaggcggcgaaccccgacccaaggaccacccacacagcccccaaaggcgggaacaggcagagccaccgcacccagccggacaaagaccaaggcgggcaaaaacacccacacaaacacacacaacacagggcaaggaagcaccaaagaggacccgagcccccggcgaggagggacagaaaaagaccaccacacgggccagggaggcaggagaggaaggggcagagagcagggagagcccgggcagaagaagggcaggacaaggacggaggagggaggggcccaagggaaggaagggcagggccgcgggcagggcaccccgggaccagggcaacggagacaccaaccaggcaccccaggcgaggggcagagaccgaaaggaggggaccggggccaggcgccgcccagcacagggcgccaccaccccccccaccagcaccagaaggccagggggggggcaggcggggggggggcagcggaccaaggccgggaaggaaaagaacccccaaaaaagaacaaaaagagcacgaccaagagaagaaggagaagcaacgaaaaaaaaaacagaggacaaggcaaaccccagcgggacagggcaggaagagcagaccacccacaaaaaggggacagagaagccccacgagaggggaggcaagagaaagaaggaaacacagagaacaccggccccagaaaaccaacgaagcagggggggccacagggagaaggagagaaccacgaacaagaggaaacgagaggccagagggaagccaggacgcagcaggccgacgcgcgcagcgcgcaggcggagcgagaccgggaaagccaaaggcacaagacaagcagaaaagcccccaaccgacgaccggggcagaaaagcggaagccgacacaacacagcccaaagggagcaaagaaaagaaacccgaagaaaggggccaccgggcagcacccaccccgcaaaagggagagccacagcgcgaccggaccagaggcagcaccccccacgagggacaccgggcagaaaccaagcacccgccaccaccagacaccgagacaacagggacaaaaaacacgcaggaccgggcccgcaaagaaaagagagagaaaggaaagacgggggaaaacagaaagcaaaagaccccacaaaagacggagcaaggaaaacaaggaagaggcccgggaggaagccgggccaaggcaggagcaagagcaaaggccgcaggagagggacagggaggcaagcgacgcgcacagggccccccggaaagaccgccccgaccaccccaaggcgccagcaagggcgaaaaggagaacccaggggcacaggagggaggggccaggggagcaggcgcaagcgaaagaggaggaggaggaggaggaggggaaagaggcaaacccagccccagggaaaaccggcgcgccacacaggacgggaagcccagggaccagaacgaaggaaggaggagggggggccaggacaaagcagggccaaggcacgccccacacccgcaccgaggcagaaaccaccccagagcacacacaaagcgcaaacagaagccacggcaccccggaaagcaaaagggcaccggccaaaggaaacggcccccacaaaccacacaaagggcggcaggcaaagccacaagccaacgagccacagcagcagccaggaccacagcgaacgggagggagaaaaacaagcaagcgcaggccaacacgccagaacgccagaagcaaagaaaaaaacacaacaacaaaaggcagaggggccagcaaagggaggaccagcaagacaaaaccgacagcagaccagagacaagcaagaaaccacccaaagaggcccggcacggcaacaagaaaccagaaaacaaggccaaaaacgagaaaggaaggcac

SEQ ID NO: 226 - RNA, 1716 nt, Homo sapiens
ccagggcccgaagcagaggggcccgacccaagagagaaaaacaccgagacccagagaaccaaagaacaagaccacaagacgaggcagcaagccgaacacccaggcggagaaacaaggaacgacggacgagaaccaaggaacacccagggaagggacaacagacaaaaacaaagagacaagaggccaaaaaaccaaccccgccccacgaacgaaccccacccaaccccgggaccacaaaggaaaaacacaagaaagcaaaggaagaaaaacagaaacagaagcacaaccaagagccacagaacggcccagcgccacccagcgcccaccgaagagcaaaaacccacaagaccaagaaaagccgcaaaccccgagaaggagacgcagccaaacccacaagagcaagacacgccaaggaggcaccacccacgagaacccaccggacaggccagccgggcccaaccacccaagaccccaccgaccaggcaaaggagaagagggacaacaacccagaagaccgccaaacccgaaaccgccaccaaaggaccaaaacacaaaacaaaaaacacccagagaaggaacccccagaagaaaaaccccgacaaccagggaagcgaaacaagccaccagagggaaccccacccagaaacaagacccgaaaccaggaaagaaacaaacagccccgcaaggggcgacagccaacccaaaaagagaaaggcaacacagccagcgaaggagaccacgggaaacacccccagagccccccaccccaaaacaaaagaacagcccccagaccccagcaaagccgagcagaggcggggcacagacacgagaagagaaggaaagccaaagcaggacacagagcagagaaacagaaaacaaaaggagccaacacgaaagagcaaaagcacaaaccaagcggaaaacaagccgacaacaaggaaacagcacccggagccagcccgggagggcacaccagcacagaaggccccccccaccccaggggagaacaagcgcaggaggaggcggaaacgcggcacaggcaaaggcacaggccaaggcacagaggggaaccaaaagggaacaagcagggaacagacacgacggaacggggggcccgaaggccagcgaggcaacccgccccaccacaaggcccaaaggagcagcgacgggaccccaccagggcaccaaggcgaacaacacccgccgccaggcgccggcaaagacacacaggaccagaagcaaagcagacacaaaaagagaaaggaaaacagaagcaacagaaacaaagaagaggaaggaaaaaagaaaacccaaaaggccaccaaaccaccaggggaagggagagggcccggcacccgggacgcaggccggggacgccaggcccgccagaccccagcgcgcagagccagcggaagggagacacacaacagccccccaaagccacagcaagcaagaacaaggcagcaaagcaccaccagcacaaggccccaaagacggcaggaggggaaggcacaaagcacccggcccaccagcccgcccaaccccggcgccgcaaaccccacccccaaggcaggaaaaaccagagccacccccaacagggccaggccaaaaaccagggcaagcggagcaggccgcacaaaaccagccaagagagccaaggcaaaaaaaaaacagaaaccaagaccagaggaagccccaaagaaaaaaccacggcaa

SEQ ID NO: 227 - RNA, 3865 nt, Homo sapiens
ccacaaggccggcgcaggcagcaaaacacccgccagagagaccgccgacccacaaacaggagggccagaacaaagaaggagaacaaagagcccaaaaaaggaaacaggggccgcggcagaaaaaggaaaagcggcccacacaagaggacaccgagaaccagagacggaccggagccgagcaaagacgcaccagacagagcgcagagggacccgcaaacacggcaccacaagacaagaaagggagcacaggccgggaagcaccaaacaccagccacgaggaacaaaagagaaaggcaagaaacgggaagaaacagcaacaagcacaaagagaaaaccaaaagaaagagccaaaaaaaagaagaaaaaagccaacacacagaaaaagggggaaaagagcagagagcacagaaaaagaaaggaaaaggaccgcaaagaaaagacccaaccaaccaggaaacaccaaaccagagaacaaaccccgcaggcgacaaaaacaaaagagacagcaaggggaggcggggaaaagagcccaacagcaggggaagaaaaggcaaagcccagaagggaagaaacagaaaaacaagcacccgaccagaaccaaccaggaacaccaaaaaaggaaaacacacaaaacaaggacaacagcagcagaaaagcaaaagcggaaagggaaaaggcaaggaaggccaccagggaaacagcagcaaaacaacaagaagacgacccgaagcgccagcgcgaaaagacagagagacgggcaaaaaaagaggaaaaggacacagccacaggcggggaagcccacaacaggggaagggaaaggcacaccacaggcacagacaagagaagagagcgcagggaaacccccaaaaccacagacggagaccacgcgcacgagaaagcagggaaacacccgccccgaacaacacccccacgacagggaaaaggaagcaaccagagagagggggggacacagccaaaccaacaacccaacagccagaagcgagaccccaaaacagcaggaggagaacggcccggacaagaacgcagaacaagcaaaacagagaaaaacaaagaagagaaacccagaagccagaaccgaccaaaacccccagaaaggcaggagaaccggaagccaacaaagaagaggcagggaggacagccgggaaagacccagccggcagaccggagcagaaagggcaggcagaaagcagaggccacaggcgccacacccgaagaaacgcagggaccgcgccacaggcgaggcgccaggggagggcggcggaaaccagagccaggcagggggagagcacccccagaaaggcgcacccaaagcgaccaccaaaaaccaaaacaaaaggcaacacaacaaaaagcaaagagacaaaaagaaggccagaaagccgaccggccccaggcagaagccccccaaaggcaacaacgaaggagaagaggaaaggaagaggaagaaagcaaaaggccaaagggaaggacacgaggagaccggggccaaacccagggcacgggagccaggaaaaaccgcgggaagaaacgggaaggggagaaaacagcagcagcaggcaccacaggccaacccgcgggacaaaccggaagccagcaggcccaaaaagccccacgcaacgcagacaaggacacaaaaaacccacacgggcgccccaggccagagcaccagaaaaaccaccaaggacacacaaaggaaccaggaagagcccaggccccgacgccaacgaaacccccaccccacaggaaaagcacaccaccacccacaacaacaaaagcaacacgaaaagagcgggggggcggggacacaccccgaagggggaggggaggggcgggcgggggggggagcaggagaagaaccaaggccaggaagcagaccccagcggggccagagccaagccaacaggagcagagccacgaaccagagaacaggacaaaagcccagcgggacgagcagaggaagcgccacaaggggcgcggaaagggggcaaacgcaaaaagcggcaaaagcagaaaagggcccagggaaaacccacaaaaggagcaagcccaaaaacacgggcggcaagggcccacccaccccccaaagagagccccgcgaaaacaagggcagggagcaacaccggccaacaaacagggcaagaacacggagagcaacacccaagcagcaaaggaagccggaaaaaaaaccacacccccccccccagggacaaagaaaccaaacccagcggcgcagcccagcaacagcaggcgaaggaagggcaacgggcaggaaagagaaggcggaaccgaggcaccaacgcccaacccgcccccccccgcccccaaccaccacccagagcggcgagcagaaaaggaggggaaccacgacccacccaaaaaccccaggcaccaaaccgccccccaaaacagccaggaagaacaaggacacacagaggaaaaaagcaagaacgcccagaaaacacccaagccaaagagaaaggcacagggcacaggcacagcacagaagggaagagggggagaacccagcagccggaccaaaacaaccagaggacccacaagcaaaaccaccgcagcacacccaaacacacaaaacacccacggaaaaaccgcaccaaccgcagaacagcgaggaaaccggaagcaaggcgaggccagcgggagaacaacacgccacgcacgggacagccggcccaagcccggaggaagcagggggccaggccagagcgagagcaaagcgggaaccacaacaaaaaaacaccaaccacaaacacaagaggcgaagcgggcgcaggggaaccaccagacagagccgacggcagcccacggaagcccccaggggaaagagaccagcaaggacaccaggccgcccgcgaagcagcaagagaagcccccgaccaacccgggacaacaccaagagggaagagaaggcaccaaaccaaaaaagcaaagcagcagcaagcagaagaagaaccagcagaaaaagaagaagccgcagaaccccggcagcccccgcccgcggaagccacccgcagccggcccgagcgcaaaaccccaaacaaagcaggccaggaagaccgggggggcaggaagagcggggaggggggggagcgcggcgcggagcaaccgagaagaaggacgcaggagaaaaacgcgaccacagggccggaggccaggccacgggggggagacgccaagaaagacacgggcagcacaacacagaggggcagcaccaaaggccagaaaaacgagcaaagaagggaagaaaggagcaggcccacacgcagcccccccgggccggaagaccgagagcccaggcaggcgaacacgaagacaaaccgaggaagagcccaggggaaacaagaacagacccacggcgagcacgaacccagagccggagaaaaacgaccagccacaacaggggagacgggccaggagaaacaccccagagacacccaagaaaagcaaagaaagccaaggcaccccaaaacccaggggagcgaaggcgcccccaagcacacccaggccccacaaaaaacagagacagaaccgaaagaaaacaaaggagagccagagaagggcagcagaaagcaaagagccaaccaggacacggggaaaaagacagagacacagggaagcaagaaacaggaacaacaacaagaaggaagggagaaggccgcagcaggaccgagaaagcggccagagagaacagggcacagaggacccaggggagagccgcaggacagggaaacaggggaaacacccaaccaagaaagggacagggcagaaagggaaaaccagccgggcgcagggcacaccgaacccagcacgggaggccgaggcaggg

SEQ ID NO: 228 - RNA, 49976 nt, Homo sapiens
accccgaaagaaccaaaacaccccagaaagagcgaccgaccaggcaacaaggcaccccacgcaaggaagacaccaagaaaacagcagcacgacaggcgccacagaaaccaagaccagagcaggaacgcgcacgccacccagaaagcgaaaaggagcaaaaaagaaaaaaaagaacaaccacccagagaaagcaccaagacacacaaggggagagacccacgaaccaggaaaagaaaagagaccacacagccacacaacaaacaaagaggcacggggaagacccaaggaaaaaaaaagcacgaaaaaaaagaagccaaacccaagaacaagcccaaacaacacacggcaaaagacccaaagaaaagccaagcgccagagaaaaaccaccaagcagggccaagaaagacacgaaaaaaaaacacgaaaagaaaaaccaacagaaggaagaaacacccaggcacggacgcacaagccacggaaaaaacacaaggaaaaaccacagcacaagaaagagcaaggaaaaaaaggacgaagggaaaagagagacccccccaagccagagaaccgccccacagccggagagaggcagccccacccgagccaggcacagaaagcacacacacacccacacaggaaaaccccaagaccaaaggaaagaaaaaagaacaagaagaaaaaaccaacccacaggacaaagagcaaagagggacaggcacagaaagaagaagcacaaacgcggaaggccaaaccagaacaggaaaccaaaaaggaagagaaaagaggaacccaaaccaaacaaaagcaaaagcggccacaaaaaagagaaccaggcacgagacaaggaacaaggggacaacacacagcacgaaaaaacagcacacaccaggaaaagcaccagccaacaacgggacggcaagaccggaggacccacaaaaaagaagaacaaaaacagccaccaacagagcccagaagacaaaagaaggagaggcgacaaacaggcaacaacaagacccggcccaaaacacccccaaaagaaggcaaagagaaacaaacgaaaaaaggccggaagaaagaaagagaaagaaacggcaccacccaccccaacccccgaaccagaaccgaccccgaccaccaaaaagaagaaaaaacagaaccaaggaaaggaagccacaaagagcccagaaaggacaaaaggacggcaagcaaaacaaaaaaaacgcagaaacaaaacaaaaagcgaacaagccgcccaaaaagaacagaggcaggggaggaagaagggggaaacaagaacgcaggccaaaacaaagagcacagaacacggcacaaaggcaaggcaagccgggcaggcgagagccggccccaaacaccaaaaaaaccagcccagacacgggagaaggaaaagaggacaaaggcccgcccaagaaaacacaacaggaaaaaaacaaaaaacaaacaaaagccccacaacacggggaaaaaaagaccccacgagaaggaaaaggcccacaaccaggaaaagacgacgcagccaagaacaggaacaccagaaggcaaaccccaggacaacaacccaggaaccgacaagccaacaagcaggaccaccagggaaaaacacacaggaagacccaccaagaaacacacccgaagcagcccaacagcagccacaaaccccccagaccagaaacacagccagaaaccccagccacgaccacacacccccaccaccccgaagacgcgcccccgcggggacacgacagcagcaagcccccgacgaagcaaaaacagcgccaacaagaagcagagcagaccgacacagacacagacagaaacagaaaaaagaaaaacgggacgagaaacaaagaaaagaacaaaaacaaaaagacaagcgcaagaaggccacagacaccaaaggcagaaacgaacaggaaaacggagaaaaaccgcaaggaaagacacagcacgccacacacaaaaacaacagcccggacgacgccaccaaaaccaacaagccacaagcagaacacaacaccacaacaacaaagcaaaaccaaaaacagagcaaacaccaaccagggaacaacacaaaaggcaaggaggaaagaagggaaaagcagaaacaaaaaaagcgaagaagagagcaaaaacagaagaaaagaaagagaggacaaaaaaggaacggagccaaagaaacaaaaggaagaaagcaaaaacaaagagaaaagaaaaaagaaaccagaaaaaaagaaagcacagcagcaggaaaacaagaaaagggcaacgccgcacaaagggaggaaacagcaagggcggggaaaagaaaggccaacaggggggccaggcaaagagaaaacaaaaaaagaaaacgaaacaccaggaaaaccaagaaaaaacagaaagcagcaaaagacagaaaacagcaaaaaaaaaaaaaaaaggaaagaacaaagaaaaacaaggagaaaaagagaacgccaaaggcaaaaagcagcaccaagaccaaaaaaagcaaaaaagaaggaaaacacacaaaaaaggaaaaaaaggacaaccagaaaaaccagaaaacaaaagcaacaacagcaaaacaaaaaacgaaaacacggcaaagcacacaaccagaagagaaagcaagaacaagccaacggcccaaccagggccaggcgggaaacacgaagagacaaagaagacgggcaacaaacccagggcagcagagcagagggaaagccgagacagagccaccgcaccaggcggaggcacaggacagggcacgcagccgaaccccaggccaagaccaccgcccagccccaagagcgggaccacaggccaccagcggaaaacagagaaacagggccccaggcccaggcggccaaccccgagccaacaacaccgcccagcccccgagagcaggacacaggggcgccaccacacccagcaagcacagagacaaaccgccaggccaggcggcgaacccaggccaagcgacccccgcccagccacccaaaggggaaaaggggagacacacacccagcgaccccacaaacaacaaaccgaacaaacaacgccaacgcaagcaaaaaaaaagaaagccaaccagagagaaaaaagaaaccaagcaaggccgaagaaacagaaaccccaaggcaacaacaagggagcacacacacaaaggacccccccccccgaagcggagaacagggaaaaccgccagccaaagggcccagcaaagagggggaccagccagggcgggcccagaccaagcaggagccagccgcgccaacccaagaaacacaaaccacgggccacagaccaagcccagaaccaaggaaggagacacagaggaaggaggcacaaaaagcaccacccgaggcccaaagccagaggaagcgggcagacacggaggagccaaaagggaggaggaggcacaaaaacacaggaccagaggaagaccaaaacccaggagaaaaccccgcaagccacccgagaaggaaaacagcgagggcaaagccaccccaaccacgagacagagccacccgcacccaggcagaggcaggaagaccagccacgcaaccccgcccccaggcaaccaacccgcccagcccccgagagcgggaacagacaccgccaccaaacccagcaagaagagagaggggcaccagggccaggcggccaacccgacccagagaccacccacccccaaacgcgggagcaggcaaagacaccagcccagccaaccgcaaacaaacacaaaaggccacagccaaagccccagaggaacacaagaaaaagacccaagaacaaaagcagcgggaaaacggcccccaaggcagaaaaaaaaggaaaaaaagaacaaaggagaaaggcaacaggcaaaacacgaaagaaaaaacaaaaaagccgaaagggcaaaaaaaaaaaaaaaaacgccccgacccgcccgccaagcacaccgcacaagggaaccggacgcaagcgaaccacccaacgcggaacgcagcacggaaccggcaggccccacaaggcagagaccagcaaacacgggccacagaccaacccaaaaccaaggagaaggagagaaagaggaagggggccacaaacaagagaggagaagaccccgggagggagaaggggaagaaccacccaccaaacagggccccagagacaaagccaaggaccaaaccccacagcaacacgagacaaaaccacgcgcccaggcggaggcagggcacaaccggccacgcaaccccgccccagggcaagcaacggcccagcccccagagcaggaacaggcacccaccaccacacccagcaagaagaagagaggcacgagggcaggcggccaaacccgacccagggacgcccaccggcccccaaaggcgggaaaggcgaagccaccgcgcccagccacagcacacaagaagaaccaacagaggaaagaggcgcagagaggcagaacaggaccacccccgcccacagaccaacgggaggccaagggcggaggcaagaacacaccaggccaaggaagaaaagcggaccgaccccagcaacagggacaacgacggagcgcgcgaaccaccagaggagaagagccgaagccaaaaccaacggccagagagaaaccccagcgaaccagagaagacggaagcaacgcaagggagacgaccagcggcagaagccccagaaacaagcgagacgccgagggcaagagaacacaggaggaagcccaaaaaacacagagggaaagggaaagaggggaaccgagcaggagagagagggcgaacggcccaccacaaggaccagcgaccggggaagcggaagcgccaggccccagaggcaaagggaacaagaacgggccaacccgcaaacaagagcaggagaaggcgccccaggaaggagggacaaggaagggcgccagccaaggggaaccggaaagacgacagcgagacacccagaagcgaaaaaagaagccagccgaaaagaccgccacacgaagcaacaaacaagcacgaccacagagaggaaaaaagccccacccaaagcaacacacgggggcaggggcaacacagaaggaggggaggaggacccccaccgaccccccagaccacagaccaaaccaacagaaccagagcgaagaaacgagaaacccaacacggcagcaccgggcacacagcgggagaaggggaagaaggacgaagaagccagaaaggcaccacagagggaaagaaaaaaaggaaaaagaaaaaaaaaaccgaagggaaaggaagagaggagaggacaggcagcaaaagcaaagccacaggggaagaggaaggagagccacggaagggcggacacgaaaagcacaagaaaacacaggaaaagaaaacagaaaagggggaaagaagcaggacaaaaaaagaggaccgggcaagcaagggaaaccagcggaaccaagagccagacaaagagaggagaagggaagaacacaggaaagcaggggccagaaagacccaaagaagacaggaaaaagacaaaaccaaaaccaaagaaggaagaaggaaacagagaggaaaaaagcagaaaggagaaagcaaaaacgacggaaaagaaaaaaagaaagagaagggagagaccgagaaacgaaaccggacaaccccaacacaacaaaaaaagcaagggagggcacaaaggaggaaggcaaccagagcaagacaacaaagcagaaacaaaaaaaaggaaccaagagacaagagggaggaaacagcaaaaaggcagaaaacaacacgagcaaaacaggcgggaacagagacacccgacaaacagcccgagagaagggaagcgaagcaaaggacaaaaaacgaacgaacaagggaagagaacgaagcaaaaaggcaacgcccaggacgaccgaaacaaaacaaagaagggcacacgaaacgggaggagaaacgcaacggacagaggagaaagaaagccgaccaagcggcccacagcacaagaacagagaagcaaaccaaaagggagacacaacccgcagccagaggagacgaaaccagaccacccccgaccaaggagagaaaacaaggaaaaacagaaaaaaaaacgcagcaaaagaagcacaggacggaccagaggaaggaaacaaagaagaggcacaagcccaaacaccggagagccagaccaaaagaaaggacccaaaaagacaaggcacacaagcaaagagacaaacagagcaaagaggagggacgaacaggaagagacaacagagaggaggaaaaaacaaagaccacacagccaaaagcccgagcaaacagaacaaggcaagagcaaagacacaagaaaccaggcaaagaagaaaggaaacaaagcgaaaaaacacagggcaggaagccaaccaaacagggagagcccaagaaaaaccaggggcaggaaaacgcagaaggaacaacagaaagcacaaaaaaccaaaaaaagcacccagaagaaaaaacacaaaaggaagaggaccagaacaaccacagcagaacaaagcaaacacccgaaagaagagagcaaaaaacagcaccaaaccgcaaagaacaagaaacccaaaaagccaggcaacaaaaagcagaaagggacaaacaagagaaaaaaaacagagaagcagacccagaaaaacagagagacagaaacaggacacagagacaaaggcaaaaaacacaaagccaaggaaaaagaaacaagaaacaaacaaaaaaaaggaagaaaaaaaaacaagggaaccgaaaaagaaaacacaaccgaaagaacaaccacgagaaacagcagaagggcgaagaagaaagcagaaggaaggaagcacaaaacacacaagaagacagaagaagagagaagaaaaggacagggcagaacgggggcaaaaaaggcaacaagacaaaaacagggacccaaaaggagagaaggggcagaaaagcgagaaaaaaaggcgaaaaaacaaacaaaaaagaaaaaccacagaaagaacaaaagaaaagaaaagaaaacccacacagacaaacaaaacaaaggcaaagagcaaaaccaaaaaccgagaagaaaacacagagacagagaaagaaagaaaaaagaggaagacccgccgaagcgcaagcagagaaaaggcaaagccaaggccaaaaggaaaacacaggaaaccaaaacaacagaaaaaaagacgaaaacggacaaaaaaagaacagacaaacacagggagagaaagccagcagagggcaaaaaaaacacgaggaaacagaaaaaaggcagaaagagaaagagaccagcagaaaagaagaagaggcagaaaggcacaaaggaaaaaaaagacaaaacggaaaaaaaaagaaagaaaaaaaggacacaacggggaacaaaagaaaaaacagaaaaaaagaaaacgaagacaaagggggaaaggaagacgaagaagacaaaaacaagaggaagacacaaagaaaacggaaaagaaagaacacacgaagccaacacagcaaaaacaaagaaagccaaaggaaaaaacaaaaaaaacaaaaaaaaagaagcacaaaaggaaaagggcaaagaaaacagagacaaaaaaaagcaagggagagaaaacccaaacaagaaacacacaaagaaagagaaaacgaaaaagacaaaaaacagacgaacaaaagcagcacagacaccaaaaacaaagacccagcaaaaaagaaaaggggaaaacaaaccccaaaaagaaagcagaaggaaaaaaaagacaaagagaacagaagaggaacagagaaaagagaagcaaaggcaaaaggagacgcaggacgacaaacagaaacgaggcgggaaaaaaaaaaaagggagagccacagcgcaacaggaggaaagaaacacggccgggcacaccaccggggggccagcgcagaacaggcggagaaggccaaaggggaagcacaaacgcagaggagagacaaacaggagggaaaccaaaaaaaccgcccacaggaacaaccacccaagagaacaaccaggaagaaaagaaccacggccaggaacagagccacaccgaacccagcaggggaggccgaggcaggcggacagaggcaggagacgagaccaccggcaacgcgggaaaccccgccacaaaaaacaaaaaaaaaagccgggcaggggcgggcgccgagcccagcacggggaggcgaggcaggagaagacggaacacgggaggcagagccacaggagccaagacacgccaggcacccagccgggcgaaagaggagacccgccaaaaaaaaaaaaaaaaaaaaaaaaaaaaaaaaaaaaaaaaaaaaaaaaaaaaaaaaaaaaaaaaaaaaagaaagaaagaaagaaaagagccagaccagccgaccaaagggaaaccccgccacaaaaacaaaaaagccgggcgggggcgcggccgagcccagcaccgaaggcgaggcaggagaacgcgaacccggagacgaagggcagaagccgagacgcccacgcacccagccgggcgacagagcaagacccaccaaaaaacaaaaaaaacaaaaaaaaccaccgccagaggaccagagaaggcaccaggacaccagagggaacgccccagacccaacaccccgaggcccacccaaaacagccacaggaaaaaacaacacgaggggggaacaaaccaacccaaacaacaggaacaaagaagacaaaaaacgacagcaccagacaaacaaacagcgaaagcgaccaacgaaggagaagagacaaaccacaaagggagacaacacacccagaagaagaacaaagaaagaaaagaacaacacgcaaaaaaaggagacaacagaacaaccaccaaacagcaaaaaaaaaccagaaccagccaaaagaaggccagaagccacaacgcagcagagagcccggccacaagaaaagaaagaaaagcagaaagaaggaaaacccaggagaaaacaaacaacgcacgcgaaaagccacaccaagaaggcaaagggaaaaggaagaacgaacgaagaaaaaaaagcaaaggagagcagcaaagcaagccaagggaaaacaagcaacggagaaaaagaagaaaggacaaagaaccaagcacacacacacagcggaaaagaagagcaaaaacaaagaaagaagaagggaagcaaacaagagagaaacaagaaacaaaaaacaaacaagaaaagcagaaaacaaaaaggccgaaggagagaaaaaggcaaccagcagacccaagaaaaagaaagggaaacaaagccgcacagaaaaaaagagggacacaacaaagagggagacgaaaaagaaaagaggaaagaacaacaaccaagaagacaaaaacaaaaaaaaaaaacccaaaaaacaccaaaaacacaaaaagaaagaaaaggcgaaacaaaaaaggaaaaacaaaaaaaacaagcaggggggcgcagggccacacgaacccagacgggaggccaaggcaggggacacgaggcaggagcaagaccagccggccaacagggaaacccgccacaaaaaaaacaaaaaagccagggggggcacacaccgaacccagcacgggaggcgaaagcgagagggagaacgcgaacccaggaggggagggcaggagccaagacagcaccacgcacccagccaggaacagagcgagacccaccaaaaaaaaaaaaaaaaaaaaaaaaaaaaaacagcaaaaaaacccaaagaagcacacaaaaccaaaggaaggaaaagaagcaaaaaacaacagaaaagaggggagaagaccaacaacacaagccacaaaaggcagaaaaaaaacaaaacaaaacagaaaaaaaacacaaaaccaaaagacagaaaaaaaaaggcaaagaacagaaaaaaaagcacaacacacaagccaaaggagaacagggaaggagacagaagagaaagaaaaacagaaaaaaaagagaagaaaaccaaagagaagacagacaaaaccaaacagaaaaaaaaagacgacgaaaggaaagggaaccccaacaaaaaacacaaaacacaacaggaagacggaacccggggaccaggaacaaggcaagaggcagcgcgcacgacaacacgacgggaaccagccaacaaaagccaagaaaaagaagaacgacaaaaaaagaaaggaaaaagaaaacaaacagaaagagaagcacaaacaacacaaaaaaacagaaacaagaaaccagagaaaaaagaagacaaggaaaacaaagagaacaacaacgaagaccgggaagggcgaagaggaaaaaaaaaagagaacgaaaggagcaaaccagaaaaaccacagccaaacaccaacggaagccaagcaaaaccaacaacaacaaagggggggaggaaacacccaccagacaaagaaacaaggcaggaagaagaacgacccaaggcaaacagaaaggggaaggagcagaagaacaggccaggaggaccccaggagcgaagaggggagaacacacagacccacgcggccacagggcgaacacaacaagacagcccaaagggccagaacagccccccccgaacaagcacaccaggaaccgcaggccgggaaagcagagcacgcaagcccccccccacaccacaaccgaacaaggaacaggccgccggcagaacacaaaacagagccgcgggagagcagccgaaaaaggagcccccccgccgccgaccccaggggcaggagaccgcggggcaacaggccaggcgcaggcacaacgcagggggggaaacagaagcagggcagagacacaccgacagcaacaacacggcagggaaaagcccgcggcgcacaccagagcggggcggggcaaagggagacaagcgccacgagggcaggcaccagggcaggcggagcagcgcaaaagcccccacgcaaaaaagccccaaggacaagagcaaagagacggcccgcgacgccccccagaaaaaaaaaaaaaaaggacacaccgcaagaccaccccaaagcaaggcaaaccgcacacccacaaaaacaaggcggaagggagagaccggccgcaccagagggaaagaaggggacacaccccgcgcagcccaaggcaaaggagaaaagaacaccagcacgcccgcgggaggaaacaacagaaaacacaaaaaccgcccaacgaaaggacggaacaaagaggaaagcccgcaaacaacacagcaaccccccagaaaacccgcaggagagaaaaaccggaagacaagcaacagagggaaaccaaaacccaaagaagagagaggccaaacgaaccgaccaccgccggacgacagggacaaagccaggaaaaaaaaacacaagacacgcaaacgccacgccagccagagaacccacgagacgcacccagacaaaacacacggcagagcaaaaacaaaccaggcagacgcaaacccagcaagaaacgaacgcagcaggagaaggacacaggaacaggcaacgaacgcggcgggaccagaagcggaaccggccaaccccgagacccaaaccacaggggccaaaggacagcggggggggaacggggcccccagcaaacccaggcagggacagcggaggaaacagaagagggcccaagggccaaaccccccagccaccaccccaggacacaaagccaagagcgagaacaaaccaaacgacccagagacaacaaagcaaagaagaagaagaaaaggagccaagaagcaaaaggacaacaaagggggccccagaccgccggcccgaaaacaggggcaggcagccaaaagcgcacgaaaacgggcgaaagaaagcaagcccaaaccaaacacggaaaacagcgagaaagcaagggcccagaaaaaaaagccgacgagaaggaaggaaggaccacacgcgcccaaagaggcaccgggcaaaaaccacgaagagagcgagagagcagagagagcagcagcaacaagcccagaagaagaaaaggagacacgcccccacaagaaaagcagagaggggggcccccacaacacgcgcaggccagaacagcaaaaaaagcaacaaaacgcagggaaaagacaagaaaaaggagaaacagaacaggcaaagaagaacaccacagaccagacgggcaaggggcacccaacgggccaagcacacagaggaaaggaccaaaaaaggagggaagccgcaaccaaaccccgggggaacgaccgaacagagcaaaacagagaaagagaggaaaaaccaaagcacacagccagaagagagggaggaaaacaaagagcaacccgagccgaaaaacccagacccagacaaagaagaaggcccacaaagaacaggcagaagagcccagagaacagaagaccagacccagggagaacggagaacaccagcagaacccggaaagccaagaagacaacccccacccacaccaaaccacccagccccaagccaaaagggaaggaaaacaaccccgacacagaaacacagcaaggcaacccggccaacagggggcggcacgagaaagaaacacagaagaaggggaaaaaagagaagaagaagaagaagaagaagaaaaagagaaggccaaagcgaggaaccaagccacaacagcagaagcagacagaaaaccaaccacgggcacaccaccaccaagcagaaaacaccaccggcagaacgaagaacaaagaaagaagagcacacaaacgagcaacagaacaggagcccaagcacacaaagaacgcacaaaaacaaagaaggaacaccccaggaaaagagagccaacaggaaggagcccaagaccagcaaagagaaaagcggagaacccaaagggcagaagaccgccgccccacaggggaacaaaacaaaggcacccaaaaaaagaacaaaccccaagaacagacagccccgcggacaaaacacgacccgcaaaccggacgccacagcacaaccagaaggagagaaaagaacagacccccacaagcccggagcgagcgggaggcggcaccccgccaccccagccgggcaagacaggcagaacaaaggaacagaggcgccgagcaaccggccgcaccgaacagcgacccacaacaccacgagccccaggagcagggagagcccagagaaaccagccagaggcaaagagagcgcccgcgcgccgcaaaggagcccccacaaggaaccgaggcaacagggaggggaaggagggaggaagggccccaaaaagaacaaacaaaaagagagaaagggccaccagcgcccgggggaacgagcaaccgaacgagaaagcaagaagaagaacccccagacaaaggggacagccagaaacagagacagaaccaaaggaaaagggaacggagcaacagagggcggccagagaaggggccaggagaagacggcgggagagacggagccaccgcgccaggcggaggcagggcgcgaccggccacgcaaccccgcccccaggccaagaacccgcccagcccccgagagcgggacacagagcagccaccacgcccagcaaggacagagagacagggcaccagggccaggaggcacgaccgacccagacccgccccccggccccaaaggcggaaaaggaagcagacacgcagggagaggcggagcacgaacagagcagcagccgcggccaaggcgacccgagaagccacaggccagcccaggcaacaaggaaagacacaaagggggagaagagaaccccccacacgggaacaaagccaaagaaggaagaagggggaggcagagaaaaaaacagagggaagacaagcagcagacaaaaacaggaacaaaaccggcgaaggcacccgacaacgagacaagcgacacccaacaccaggccccaaagcccaacaccaaacaaaacaccacggacccagacaaaccccaaagcaaagaagaacgaggcagcaaccacaaggccaagaccacaaaaaaaaaaaaaaaaaaaaaaaaccaaaaggaaaggggaccaaaagaaagaaacgggcaagaaagcaaaagaagcaaaaaacagaacaccacaaaacaaccaaacagaaaacacagggagagcaggggaaaaagggcagagcaacaaaaaggaaagacccaagcaccacaacagcagacccacagagcggggcaacaaacccagaagcagcagagcagacggggcagacgagccagaggcagggcccaagaacaggaacacaggggcagccgagaaggaaagccaggaggcaccaaggaggcgcgacgaaagagacaaccaaagccaggacgacgccacaccgccccccagacgcacacaaccgagccccagcagaaaacagagaccccaacacacagcacccacccccaaaccgcaggcacccgccgggagcccaaaagcaggccccaagccacagccagcgcaccggacccacgggggagacacccccacaagccagacagaaaagaaaaaaaaggacacacaacgccaaagccacagcaaaacaagccaacaaggcaggacaaccaccacgaggggaaaagaggcaagagggaaaacaccaagacaaagggcagccaagaaaacgaccccagaagacgaaggacccagagagccccgaggcgagggaccacaaggagggccacaaaaaggcaagcaaagacaggcccgagagcccacgccggcagaccgccgagcccccccccagcgccagacccagacccaccccagacaacaagcaaagcccaaagagaagcaacgccccaccaagcaaccagcaaaaagagaaaaccccaacacaaccacgcaagcccgagggacagcggaagcaggggagaaaaaacgggaagaccagcagaccgaccaccaacagaggcaacaacaaaccacccgacccaacaaagccagaaggaccaggacagagaggaagacgcaaagacagcggaggaaggcaagcaaaacaaacccaagcgggaccaaagacccccgaccaccagcccgggaaaacacacagcccaagcaccaaaaaccaaaagaggcaaaagaggagcaggaaacaccaaacagggcaagacaaggcagaaacagagaggcaaaacaacagccaaagcacagaaaagaagcagaaagagacagaacccaaggcaaacagaagcacagaaacagaagacccaaagcacgagcccaaacgacagcccacaaaaaaaagacaagcggacaggccagccaaagggaaaaggaaggcagaacacgggaggaaggcgcaggacacagaagccaagaaaaagaaacggagccaggagaaagcgggaaaaaaaaagcaaacaagccaccacaaaaaccagggggaaaaaaaggacaaacgaaaacaagaaagcacaacaaaaaggacacaaagggcaggagggaacacgcggaaggcaacaaagcaaagagcagaggaacagaagagacaaaaacagaaaagaaccaggaaggccgggagaaggagggaagagagagccgaaggaaggacacgacaaagaggaaaagagcaggaagagagaggggggaagggggagagaagaaggagagggagaggaagaccagcacggaagaaggggaacaaggaagacgcaagcaaagaagggaaaccacagcacccaggaaaaggaggcagagggagcaaaaaaaagaaaaaacaacacgcaaaaaggcaaaaaacaagcaaaaggccagggaagcaaaaccgcacaaccccaggacagaagcacaagccaaacgaggaaaacgaggcccagaaaggcaaaaacacccaaggcacacaggggaacaacaggcggaaaaagaaccgacccaaacggccccgcccaaagccccaaccccaaacaacaagcaaagcccaaagagaagcaaaaagggcagaaaggcccgaagccccgccccgccccccccccccccggggggggaggggagagaaggagccaaaaccagaaaacccaaaaacaccagaccgccgcgagaccccgcaaccagccagcccgcaaaccagcacggggaccacacccgcccagccgaccgaccaggggcccgggcagcccaaggggcaacccgacaaacaacaggaccccagaggaccagccggccccggagccaggcagccagcacagccccaacaggaccgccaacagagcagccgggccagcagcgggcgggcgaacgagagaacacagcaacgccaccagcgggcgagacacaacaggccggaaggaaagaaacagagcaggcaagacccgggaaaagcacaaaacccaaagagaccccaaacaaaggacagagaagaagggaccagacacccaacacagaccaaaaagcgagggagccacacgcagcccaggacacccagaaagaagggaaagcgagaccagaacagcgcccacaaccagcccccaggcacagggacaaagaacaaaacgcaaacaccgaaaagcaccagccaagacacacacgagcccaggccgaaagaacgagggcaaaagaacggccaagcccaaaaaaaaaggaacagaggaaagaacggaagagagacacaaagaaagacaaggccagaagcaaagccagcgagcagcaagaaaaaaacacccaggaccaaagcacccagaccagcacaaccgcaaaaaccgaacggagcagcgccgcggaggaggggcccagaaaacggggccgaccccacagcaagccagccggccggagcgagccccaaagaaaggcagaacagacagcaaagagaggaccacacgcgaaaacagcccaggcaacaccccccccccccccgcaccccccccggcacagagaagagaaaaagggaagcaaaacacccaagaacaaggaaggaaccaggacgagaggaagcaaaaaaggcaacaaccgcaaacgagaacagagaacacgaaccaccccccgacacgcaaggggcgacaccagaagaggagaaaacagcagcaaagcgagaggcaccggcccaggcggaggcaaggcacaaccagccacgcaacccaccccgggaagcaacccacccagcccgagagcgggaacaggccggccaccaaccggcaagaaagagagacagggccaccagggccaggcagaccgaacccgacccagggacccccccggccccccaaaggcgggagcaggcagagccacagcaaagcaaacccaagacacacagggaaggaggacaaaaagaagaaggagaaccaaaggccagagacgacgagagaaaaacccaaaaagcaaaaggggcaagaaaccacaagaaagaagccagaaggacagaccagagacccagacccaagggcacaaaagaaaagcaaaccccaaagaaacgaaaaaaggagaggcaccaaaacaacgaacacacacaagcaacacgccacccaaaccggcagcgagaagagcggcccagcaccggacaaccaagagcagaaagggggaagaagggcgagagccaggcagcccacacaccaaggaaacacaaaagaaagggagaacaggcaccaaagcacagcagggaacgccacaagaaaaaggaaaaaccgacaagaacagaaagcaagagaggacaaaaccaaaacaaaggaacgccaagcaaacgccggccaccaaagccacgaaaccaagcagacgagacaagaaaacaaaggcaagagcgagccggaccacagaacagaaagggggaagcgagccacaagccccacaagcaaggaggaacccccaggggaagacagacaagacaaagcgaaacccgagggaaagaagagaggggaagacgaagcgaacagggaagaacaaagccacacggagaaaacccaagggccaagcggaggcaagcaagggagaacagaagcgacggggccgcacagacggggcagcagagccacaaagaccagagagggcaggccacgggccagcccacagagaacaacgcaacaaagcaggcccccaaaggcgcacaaagagggaaacacaacccggagcagcacccaagagcccaggaacgaagcgccaaaaggcggcaaaagggaagcaaacagagcacacaggacaaaagagggaaagaagacacgggacacagaggggggagcgggaaaaccaccgcaggcaaccacaccagggagggagccaacccaaacccagcacacacagagccagaacaaacggacgcaacaaaaaaaggaaaacaaaagaaggcacgggacccgcagaccaaccgaaaaacgagaccagaaagagacacccgcacccgggagaacaagaaaaaagcaagcacccgggaggagaacgagcaacccccgagcaaaaaccaccaacaagcccccaaaaaaggacacgccaacgaggagcggagaaaagagccaaagacagagacggcccaaaagcaacagcacccccacaagagcgggaaggccccccagaggaaaagcggggggaagcaaaacgggcgaaaaaaaggcacaaaacgcgcaggcaccaaggaaaaacaaccccgaagcacaaggcgaccaggcaacagcggaggaaaacaggcaaggaaaaaacaggcagggccaaagaaaaaaggaaagacagcccccaaacccacaagccgcgccaaaggagagcgaaacacccagacaggaagaacagcaggcccgcgggcaaagacagggggaaaggagcgaagcaaaaagggagcgcaggagcaaagggccagaaaacgcccagaaaaacagaaaacaaaagcaccagacgaaccgagcaggagggcaacacgaacacaccacccaaaggcaggaaccggaacagcaacagagcagggaaccaaaccgaaggagaaacacgaaacccacgcaagcccgaccagggagacagccaacaaaaaagggcccaggaacccaagcagcggcagccgccacaaaacagaaacccaaaaagaggacaaaccagcaagacgcagcgacaagagccagagggggagggacggagggcaccccggcaggaaccggggacagaaccaagcccgcgcgccccaccagacagcggcaacccaaagagcccccacacccgaacccagcccacaaagcagaaaaacaaccccccccccacccagaaagggaagagaaaacacagaaagcacgggccaacaaagcccacagagcaaaaaaaaagagaccagaccacacaacaaaagggaaggaaaaggccaagggcggcaggaaggggaaaaacaaaacaaagaggcaggcccgcccacagaaaagacagagggaaaaaaaaaaacaaacagcaaagaaagaagaggacaaggggaaaggaagaaaggagccaggggagagaaacaaccggggaaaggggaagggggagaaaagggggaaaaaggacacacaaaggaagggcgacaaaaagggaaagaaccaagagaggaaggcaagcgagacagagcacaggaaagggggcaaaggagagcgcagcgggccagaggaggaggaaagagaggggggggggaaaaaccagccggaaaagaccggagccaagaggcggccccacccaaaccacaagagccccgaacccaggacgggagagagagggagaaagaacagggggcagccccaacgccaggagaaaagccaagagacgaggaaaggggaaacaccacacgaccaccccgccgcgccagaagacagcgaccccaccagaggaggcccccagccacggaaacggagccaaaaccccacaaaacccagccgggagcacagcagggaaaacagacaaacagcggaaggggagcccccagcagcccggccccagaagcaaggcaggccccaaaacgcggccacaccagaccccaagggagcggagacccaaccccccaagcggaagcagcagcgcccccaacccaggcaaagacccccaggaaggccccaaggcggaggagagaaggccacaaaacacgaaggaagaagaagaccccaccgggaaaaggagcgcacaaaccgggcaccagcaacccaggccaaacgggagcaccccacacgggcggaaacacgcaggggcgacaccaacagaaagaagaaagaaaaagaaaggaaggaaggaaggaagcaagcaagcaagcaagcaagcaagcaagcaagcaagcaagcaagcaagcaagcaagaaagaaagaaagaaaaaaaacaacgccggcagaagaggaacaaccagaagacacgaaaaagagaggacacagagcaaggaaaaaaacgcggagcgcaaaaaccacaccacaaaaaaaagacaccacaagcgaagcaggaggaggggccaacagcgggaaagcgaaagagcacaaaaaaaaaacacagcaagccaaaaaaaaaagagcacaagaaccaaaacacaaaaaaggacagacaaagaaaaaggcccaaagaaaaggccgagaccccgcgggacagaaggaacgcgaaagcacggacagacacacaggcccaaagcacccaacacgccaacaaaggaaccacgaaaaaaacccaagaagacggacaaaaccaagaaaaacgggcaaaaaggggcacacacacagcaggagacaggagaaggaaggacagaggaaagaacacccaggaaggagaacagaaacccggccggacacaccgccaaaaacaaaaagcaggacagggagaacaccaagccgccagcaagcagaaacacaacaaacaaaggggaacaggcaccaagccaggcagcaaaccaagcgaagaaagggggacccaacccaccccaagccaaaagaagggcacccccaccccagccccccgcccaaccaacccacacaccaaagacagggcagagccagccggagccccccagccggggaacacacagaccagggcacaccaaaagccaagcagaccgaagaaagaggaaaaacaggaaaccaggggcggcagccacaagcagaagacccgaacacagaggagggcacacaagggagacccggcgggacagccacagagaagccagaaaagaggcacaggaagggcaaaaaacaggaccacacggacacaaccagcagcgaaaaaccacaagacacgcccaacaggaaagagaaaaaaaaacgagccaagccagggaaaaacccggaggaaaccagccaaaaagcagacacacaaaaacaaacaagccgagacaaaagaaaggaacaaaagaaaggaaagaaaacaacaaaaggggaaacgagggaaccgacagagcaaaacacaacgcagagaggaagaaaggacacgaaggaggggagaaaaggcccagggcgacacagcgggccgaccacaggaggcggcgccgaaacagcgcaaccagcgcaaagcccgaccaccacaaaagggaaggggcggaaagcaaagggggggggggggggcgcgcgcggcggagcgggaggcccgaaggccaagaagaaagaaaagaccaaaaaccagaaaaaaaaaaagaaaaacagacaagcagccggccaagggagccccaggcaagaaagaaaagagacaaaggggcgaagcaggagaaggcagaaaagcagaagaaaggccggacaccaaccccacaagaggacgaagccaaacgcaagagaaaagccccgagcagccccaaggaagccagggggacaacggcccccagccaaggcgaggagcaggaaagaggaaagaggagaaaggcagcagggggagcaagaccccagacacgagcccaaagaacggcaccccaggagaaagggaaaagaggagacaacccaaaacaaaggacggaaaacgacaacgaaagccaagacgcagcaacagaagacaagaaaaacccagcacgcggaaccccaaagggcccaaggccacggacgacaagcccccaaaacaaggaagcccgacccccaaggacggaaggagggagaccgggaggaaggcagagggagagccccagaagggaaggcccaaaaagaacccggagagccgcccccgacggagagcagcaaaaagacgccaaggaaccagaaaacaccagacaccaaacgcggcacgacggaccccagccccacaacaagaaaaaacggaaaagccacccagggagacgcaagcagcccagaggaccaaagaaccaagacgcgccaacagcaagaaccaaaacacaagagaccagagaacccgaaacaccagaaagcccaaaccagccagccccaacgaacagcaaaagaaccccagaaaagggaggacgggcacaccagggacagagcgggagagacaacagagcacgagaggagccgcccgccggcccaggcggaggcaggggcgagccggccacgaaagcccgcccccggccaagccacccgcccagcccccaagagcgggagacaggcgcccgccaccacgcccggcaagaagagaggggggcacccgagccaggaggccgacccgaccaaacgcccgccggcccccaaaggcgggaacaggcggagccaccgcacccggccaacagagccacgcgggcccggaacgcacacagcgcggcaacccacccgacaggagaagacgcaaggaacaggacccaggcaaagccaacaccgaaaaacaggaaaacaccggggccaggacagggaaaaacaaacagcagagaagaaacagaggaggcccgaagaggaaacaaggccacaaaaacaaagaaaaagcaaacaggggacgaagagggaaacccggagaacaaaagcaaggaacgagacggcaggaggaggaaagccgacaacggcaaaacacggcccaaaaaaaaacagccccacacccaccaaagaaaaaaaagagaagccgaccaaaaagggagaaaccgaaaaggagaaaaaacaaagggggacacccaggaacagggacggagcagcagacaggccccccaggccccaaagccaaagaaaacaaaaaggcagaagcagcccagaaaagcaaacaccgcaccaccccaaaaagggcccaaaacaccagagcaagagcagggcaggacaaaaaacccaaacaaaaggcaaaaagggaaccaggcagggcaaacccagagagaccccagaccgggcgaagaagcgcacagaaggcccacggcgggagacagggcaagaagacacacagcaacacacacgagcacggcgccaagcgaaccaccggcgggcccaccagaaccgaagacagaggccccccaaaaaccgagaacacagagggaggccaacaaacccacaggccagccagcaaggccacacacaggagaccacgaagccacaaaggacaggcaagaaagcaaaagaaccaccgaccacggaagggcaaagacggaaaaacggaaaacacaagcaacgggccgcaagaaacacagagacaaccaaaagaacaaaaccagagaagagcgggccacaaagaacacagaaaaaggaaaagaagaaaagaaaggcgacaggacaaagaacacacaaaaccaagccacaaacaaaaggaccaaggaaaaaaagagcaacaaagaagaagcagcaccaaacggaagaggaaagagcgcccaaaaaccagccccaaccaccaccaaaaaaacacaagacccgggaaaaagaaccaacaacagccaagacacccaagaacggaccagacaaacgcaccaaaaaacaagaaaaaaaaaaaaccaacaaagccggccacaaaccacaacaccgaaaaaacaggcagaaaacgcaaaaggacgcgaggaagaaggaagaccaacagcgggcgagaagcaggaccaggacagacaaacggcgaagacacagacacccacaaaaaaaaacagagagcaacgcggccacccacgaggagggacgaaccaccacgcaaccccaccgccccgggcaagcaagcccacccagccccgagagcgggacacaggcaacaccaccacaccggcaggcagagaaacagggcaccagggccagcggccgaacccggcccaaggaccaccccccagcccccaaaggcgggaacaggaggagccaccacaccggccccacgaggagcagccaaagaggaggaacaagacacaaagcgggggaggagccagaacggcaccaggaggccccacacaaggaaagggaaagaggggaaaggaagcaggcagggccagggggcgccacgcggccagcaggagcccaggcccaagccagacgaagaacaaacggcaggaccgaaacgcccaggacagaaaccaccaaaaaggacagaaaacggcccaagacgaacgccaaaaaaaggcaaagcaccaccaagcaaaaccaagcagaacgcacaaagcacaaggcaaaagcagcaggaacagcacaacacacaaacaccagcggaaaacaagcaagggaaagcagaacaccagcaccagaaaaaaaccaggggaagagaagggaaaccaaaaacaaaagagacacgaaacaaaagcgaacaaaagaaggaaaaagacacaaacaaaaaaaaggaaaaaccaaaaaagccaaaagaccaccacaacaaccgacagaaaaggaaaaaaagaaccgcaaggccaaaagagacgagcgagggcaaagcgaaaaacaaaaagcagaagacacaaggaggaagaaggagaagaaccaaaaagcaaccaaaaaacacaaaacaaacaacaacaacaacaaaaaaaacaaagcagccaccacggaacaaaacaaggaagcggaaaaaagggacaccaaagcgagcaggcagaggaaaaagggaggggcccccaaaggaagggaagggaagaacggagagggaagaagaagaaaagacagaggagcacccagggggacagaagcgggagaaggacaaggaccgcccacgcaaaaaaggaagccccaacacagcccaacagccccccacaaagggaagacagaagccccaacacggcaagcccccccccacgcagccagcgcagggaagaagagcaaccaagcacccaccaccaccccaagaggcccaagaaaccccccacacgaccgagccccacaaaaagccacaacagccccacaccgaccacccaaaacaggcaggcccaacgagcccaccagccacacacaccaccacagccaggaccaaggacacagcaaaacccaacaacccgcccaacgaagacaggccccgagcccgagaaggggcaagccaccagcccccaagcacgagccggagggggaggagcgccgcccaagacacagacaagacccccccaaaaaccagccacgagacgagccaggaaaccccacacccccgaaagcaacacccccagcccccacgggaaggagcccggaccccccaccacaaccgaaaaaaaaccacccccaccaccacaacaccaggcccaggaccacccccaaggaacgggcaccagcccgcccagccgggcgcagcaaaacgcaaaccaaaaaaggccccaagcacaaccgacaccccgagcccagcccacccagaaccacgccccgaaacgcaaagacaaaaaagacaacaaccccgcccccccccaaaaggcagggcaggggacaaccacccagccggggcgaggagcccaggagcaagaccaggcaaaaaaaagccgggcaaccgggacaagggcaccagaggagcagaaacccacggaacaccaacaccgaaaagaacacagcagaacaacacacccaaacgccaaccgcaaaagaaagggcaaaaagacacaacaaacgccggcccagaaacagcacccacacccaagggcccaaacagagccaaacaccaggagggggagcggcacagaaagaagaagagcccaccacaacaaaccacaaaacccaccaaccccacggcgcggcaaaacccccaaccgacccgacccaccgaccacccgcaagggcagcgacggaaggaaacaaaccccacgacggcaaccaaacagggcaaggccacggaccccaaccccaaaacgccggcaaacaaaagcccgaacacccaacaccccagacaaacaagcccccacaaacaccaagccgaccgacggccaaacgccacaaggaacaaccagacagcacaccaggacaaaaggagaaaccagcacccgccacgaacaacaaaaaggcacaggacccgagccgacccacggcaagggaggaagagcccgccacccccccccgcagagaacaacgcgagcaggccccgaccccacccagaaccccgcaagccccccccccacgaacaccacagcacacaacacgaaaacgcgcacaaaaacaacccaaccgacccccaccgcagcaaaccgaccacaagaaaaagacccaaagcaacgggcaacccacgcaaaacaaacacccaaaaaaacaccaccaacaaaaagacccaacaaagcaccaacaaccccaaccaaacagaggacaaccagccaacacagagaggggacaacgcccaaaacacacccagggcccagaccgcagcaccggaccaaaccacgccaggacagccgaggaagggaaagccccagaccagcccgcccccaccccacacacggcagggaagaagcgacccaagcaacaccaaaaaaaaaaaaacagacggcagagggggggggggggacaaaagccaccccccaagcgaagaaaccaacgccaacaccaaaagcaaagaacgcaaaacagccacccgcccaccccaacggccaagaacagcacaccacagaggaaggccaaaaccccaaagacccgaccccacacccaaacaggaaagagcagaccaaaacacacccaaacaaccacccacaccccaaaccaaccaagcaagacaccaaaaagagcagcaaacagaaacccagccacccagaccaaagccgccgcagaaaaaacagcagaagaaccaccagaacaagggccacccagccccccagccccggcaccaagggggaaaaaggaagcaagaaacacgaaaggcacagcccagggaacaggaccacaaaagacaaacacaaagcaagaagcacccccacaccaccaccagaccaacagggaccagaagagagcaaaacagcgaaggagcccaagacacagacacgagaggagcgagggagcacaagaaacaggaacaaaacaaggacacaaaggacaagcccaacaccagccaagcaaccacccaaaaacaaaaaacaagcaaaggccacgcccaaagcagccagcccaacaaaaaaaacaaggcaacaaaagcaagaaaagaaaagcaaggcaaccgggccagacaagaccgaaccaaaacaaaaacaagaacacagcgcgcagaccacgaagcagcagggccacaacagccccgcagcaagaaacaaaaaaaagcacacccaagagagaaaaaacagcaccaccaacagaaaacaaacacacacaaaaaaagaaaagaaaaagcaaaaagagccaacagccccaacccgagggcacaggaacaaacacaacagcggaaaccacggaggaggcagaacgagacgccccagcacacacgaaaccccggaaggagggcagaaccagagccccacagagaaaagcaaagggggagaagcaaagaaaacacccaaccaacaccgagcacaaaaaggcacggggggcaggacagccaggagcgaagggggacaagccccgaaagaacagaccaaagcaggaaagaggccccgcggcgaaaaagggagagaaccaccagagaggagaggagcgaggaccaccacaaccacaaggagccaacgcaacaaccgcaagcagaggaggacccaagaccaaagagaacaaagccagccaacaccgaacagcccaggcaaacgccaaaccaaaggacacgccaaaagccagccggaccccgacccaaagaaacgcagaaaaaagggggaagccacgagggggaggacacaacaggaaacgaaacaacgagcagaaggagaccagggcacaaaagaaagagaggcagggggagagccagcccgcaccgggagaacaaagagacgaccgggaagccccccccagacccgagcacaccaggaggacaaaaagaacacagaccaaccccaaagccaacaagcacaaagccgacaaaggaccagacagcccgaaaaagggcaaagaagaacaggagggaggaggggggcaaggcacagacaagcagagccccacggagcaagaacgccacaaggggaaccaaacaccccggccaacccagcccaacccaacccagcccgcaaaacacacacacacacaacccagcacaccccaacacacacacagggcagaacacacacggacaccacccccccccacaacacacaccgcgcccgagagagagaacaaggagaaagacaaacagagacacaccaaagcgagacacaaagaagacaggaaggggagagaagcacacaacagaccggcagccgcacgagaccggacaggcaacgacagaacgcaggaagacagcccccagcagggaacagagaagagaccaacaaggcccccaaaagcagagcggggggacacgccacaaccacagaagaaagaaaaccaacacaacccaagccacaaaagagacacaacaccgccccaaaagcggaagaaaagaagaagggaaagccacgcaagcacagaggaacaaaggggcgccgcccagccaacggcacaccaggaccaggaaaagaccaaaagaaggcaaccacaaaaagacgccaagcccacagggacaacccccaagaggccagaaggcaccaaacaacacaaaaagccagcacaaaggaaagaagcccccgcaaggacagaacgagcaaaacaaacagcaaacgggcaaaaagagggaaagaccagggacacgacccaaacagaaagaaacccaaagacacacaggggaagaaaaaagaggacgaccgacacaaaagagaaaaaaacaaagagagcacaaacaaaaggaaaccacaaaaacgaagaaaaaaggacgaaggcacacacagaagcagcacaccacacgggcaccaacaccaaacccgaccacccgaaggagcacgacaggccaggagcaaaaaacacgggaaaaaaaacaggcaggaaacagaaaagaggccaaaacgaaaagacggacaaaccggccgcggaggaaaagcaaccgccacccgaggaggacaggggaagaggcgaggaaccacccaaacaaaccaaaaaaacacgacaggaggcaaggaagccaccacggacccaaaacaccagacagggacgaaagaaaaggaagcccagaacaaagaaaaaagagagaaaaaaaaacacagaaggagcccaccaaaggacaaaggcccggcgaagcaaaggaaaaagcagagcagaggagagaccccagccaagcaaaggccacgccggggaaaaccaaacacggcaaagaaacaacagaagacacaaacacagaaaccacccacagaaaagacagcggacagcccaaagcagccagcgccagaaaccccaacggggcggccacggcaagagaaaagaacaaccgcgggcccgggggaaaacggaagggaggccacacggacaggccacaagccaaccccacaagcaaaaggcacacacaccaaccgaccggccgaacagagcaaagaaacaggccgccaacaaggagcaagccaggaaggccgacagagacaccgcaacaacaaaaggaacaaaaagagaaagcaaagcagaggaaaggaacacacagaaaacaagggcgaaggagaaaaaacaagcaagggagagggaccaaacaggaaacgagagcaaaagccagagccgaaaagcagccaagaagagccaaaaggccaaaaaacccacaaggcgcaaggcaaggaaaggaagcacaagccacaaacaaaagcagaaagaaagcagaaaggaaggcagcgaaagccaagaaagcgaaaaccaggcccccaccaagcagaacaagggaagcaaagacaaaaaagaaaaaaagcacccaggaacaacagaaaaagaaaggaaagagccacacgaagaagaaagaacggcggaagaagacaaacagccacagcacccaagccagcagagcaaggcccagcccaacaaaaggcgagagagggaggaagccagaagaaaagagaagcggcagaggggcaaggaaggaaagaagacaccgaacacaaaaggcaaagggaacaacaaggcgagagaagcgcagcaagaccagaaggcagcaggacagaaaggggcacacaaacaacacagcaacacaaacaacacagacaggaagaagagccaccaggaacacaagccaaagaggagaagaggagaagccggacaaaaccaaagaacagacgaccgggggcaagcagcgggaaaagaagccaagcgaccacaaaacagagccaaagaaacaaagcgccgccaaaacggacaacaaagcggaggcaacacagaacagaggacgaaacaagcccacggagacaccacacaaagaagaccaaaaaacgccaggggggacccaggggacggggagggacgccaggcaagagggggggacaggggggggaaggggagaggggagaggaggggaggggggggaggagggagggggggggagggcccccagaggaccagccggagcaacagagaagggcaaaaagaaggcaacagaaggccagggggggccacgccgaacccagcacgggaggccagcgggcgcacacaggcaggagagagaccaccggcaacagggaaaccccaccacaaaaaacaaaaacagccggggggggcgggcgccgagcccagcaccaggaggcgaggcaggagaaggcggaacccaggaggggagcgcaggagcccagacagccacgcacccagccggggacagaggagacacaccagaaaaaaaaaaaaaaggaaagacaaacaaacgcgacagagccaagggaaaggcacgcaagccgaaccaccaaaagagaagaacaaaaagcccaccaggccgggcgcggggccacgccgaacccagcacgggaggccgaggcgggggacagaggcaggagacgagaccaccggcaacaagggaaaccccgccacaaaaaacaaaaaaagccgggcgcggggcgggcgccgagcccagcaccgggaggcgaggcaggagaaggcggaacccgggaagcggagcgcaggagccgagagcgccacgcagccgcagccggccgggcgacagagcgagacccgccaaaaaaaaaaaaaaaaaaaaaaaaaagcccaccaaacggagggaaggcaaaagggagaggaaggagggagaagggcagaaaaaaagaggccaaggaagccccaacccgacacgccaggggcagaagaaaaagaacgacacaggacacccagcaagccgaacaagaaaaaaaccagcgggcccgacacaacacgcaggcgcagcccagaggcggaccaaaagaagcccgaggcacaaaaaacaggcaaaagagaaaagaaaggaagaggaaccaagcacagaaaaaaaacaagagcaccaaccccaccagcccaccaagcagcggagagacacaggcaacccaggaaaaacccagaccaacagaaccagcaaaaagaaagagagaggagagaagagagagagagaaagagaagaagccagaccaacaagcaggccaggccaagcgcgcgaagaaaggaaacaaacgggaagacagccccaacccaaggcgcagaaggaagaacagaaaaaaaaaaccagcgaagagccagggcacaaagcgagggaccaaagaccaaggaaacccagcaccaggagagggagcgggaaagaagcgacagcaaaagcaaaggggacaagaaagagcagacgagagagaggaagaagcaccacgaagacagggaaaacagagaaagcacagagaggaaacaaggggagaggaggagacaaaaccagccagacgccggaacaaacaagcaaggcaggaacaaaggcaagggaggagacgaagacagccacacacgcccacaacgcaccaccaacgcacgccccagcaccagcccacaaaaccaaagcccgaccgcaggagaagaaagcaaacaaaaggcagggaacccaaaaccgagccgacccggcgccccaccacacaccacaacaccacacaagaagcaaagcgaccaaccaaggcaggagaggggcagcaacaaaagaggcagacccgccccaggaccaacaaaaaaggccaaagccacaaaaacgcagcagcccaagaggcgaagacccgaacagcgcaaaacacccagaagcccccgacaaacgagaaccccccacccaaaaccaccgcccacccggaaaccccgaggagcaccgcccagcgcacgccaccggcagaacagggagggacaggcggcacgcacagggaaggaaagacaaaaagggagcagggacaacagccaacgagggccaacacagcaacaaccacgggaaccaacgaacaaccgcccccaacaggcggacagggccgaccaccaaaggcgcccagagcccagcaaagaagcccccaacaacccaaaaaagaaaaacacaacacagacaaaacccaccgacgccagggggcgggggcaaaggaaaggccagaaaaacacaggccagacaagaacgcccgggaagagagcaaaaaacaggccgcccggcccacccgcagcccaggagcaaaacaaccagagaaagaggggcacaacgaacagcaggaacagcaaagagaaaaaaaaaagagcacccaggacccaacacacaaagcgaaacaagagccccccccaacaggcaaaagcaaaagcaagcaccggagagacacacacggagggcacgggggggaggcggaaggagaaacagcgcagcgagaagaacaaaagcagggcgagcagcggacccagacaggcacagcggggcaaacaccccacggcccaggggcgccagcaccccgccgcaccaacgggacgagggcaggagagggcacaccagcaaagcagaggaaagagaacagagcaaacccacaaaggcaaccacagagacaggggccacagcaacaggaacggaaggacaccagaagccaccgacaaggagggcccggaagaaccagggaacaggacccacaccagaaaagcaccccaaggacaagggagaggggaagaggacaggagcgcagacgagaccaacagccacccaacaaggcagacgagggaagccagagaaagagggacgggcagacacaggacagccacaggaaggagcagcaccacaccgacaggccagcccccagaacccacacaaaaggaagaaaccgcagcgggaagaaaccgacagaacaccaacaacggcagaggcaggaaaaaccaagaagccgcgcccccccaccccggaagcaagcacgacaaaaacacgcagaccccacacaaggcagagacccggagcccagaccccccgcagagcgccccccagcccacacaagccaccccccagcccccaagaagaccgggaagacgaccagacggaagcccaccaagagcgccaccaaaaaaagccaagcaaaagcacgacaagcccaaggagagccaaccaccaggaaaagagccacaccagcacagacaaaaaaaacaaggcaccagaggaccaacagccccaggccggcaaagaagagagagacagcccaacaacaagcccaacaggggagacagaagaagcaggaaagaagaaagcaggacccagaaaccacaaagagcccaggaacgaggagaagagagaggacagagagcaagagaagaacaaaccagccgcaaaggggaccaggggagacaagggacgaaagcagcaagcaagagacacccggcggcacgagaccagggagagacggagccagaagaccaaagcgccagcaaagccaagagagagaagacccaaagcagagggcagggaagaagaagcagacaaagaggaaaaggaagaggaaaaaaaaggaaaagaagcccaaccaccaggaacaaaaaaggccagagcaaccaacaaaaacccaaaggaccacagcggacccagccggagacacggagaacacgggacgaccagacaaggacaaggagaccccacagagcaaggaccaggccagccaggcaaagagaccacaacaacgaagcaaggaaacagaccccccgccggcccagacagggcagcagagacaccaaaagccaacagacgggcaacacaacggccacggggacgccgcagcgcccagagggaaccagagggaagggccccaaccacagcaacaccgacagcaccggggaaagggcaggggccaaagccacagagcagaacaccgcacagacggccgaagggaagcgcggcacccgacaaagcccagagagccgcccgacaccaggcagagagaacccgaacgcagaacccagaccgacaacaccaaccgcaacgcagcccaaagagaacggaggcgacaggaggaaaagagcacgaaggcaaggacaggacaggccccaagcgggcaagggagagcaaagccggcgagaaagaagaccaaagggaaggaggaaggccccaggccgggaaaacgaccccaggcaaaggggagaagggggacaaggggaagcagaaggccgcccaagaagaaaacgccaaggggagggacaagggggaaggcaaaaaagagaagaccacgcaccccaccccgccccaagagagaaaagcaagaaggcccacaagcggcccaacggacacccagccccagaacggagaaaaaagcgcagaaacacccagccggcgacaaagcacaaaacagacaagacaggaaacaacaacccgccaagaaagggcgccagcaacagagaagacaacccaaaacggaacccaccaagaagacaaaaaaccaagccacaaggaccagaacgcaacaaggaaaaagacagaaacaaaaacgcaaacagggggaagaaaaaaagaacaaaggggaaaagcagccaaaaagaacaaagcagaagaaaccaaaggacagaacaagaaagagggcgaaaagaaacaaaggaagaacaggaagaacaaagcaaaacaaagcaaaaaacagaggcaaaccaaaaggacaaagagaaaaaaggagaggccacaacagaccgagaaaggggacagccaaagggacaaccacagcggaaccacaaaagcaagcagaaggagccacaggccaaacgcgaccgcacgacgggaacacgagacaaaaagaaagaaaagaaaaaaaacagagaagacaaaacgaacccaaagagaaagacacccgaggagacaggaagacaacaggaagggagaggacaacagcacaacaaaaagacaaagcagaagaagaaaaaccaaccaacagagaaaggggcaagaacgaaccagacgcaaaaaaccaaaaaaagaagcaaagaaaaaagcagcacaagcgcaaacacagcccgcgccggagcacaagaccagaaaccacacgcagcagcaaaacacagaacaaacccgaacaggagccgccggcggagaagacagacagcagacagcagagggacccagccccaagaggcgaaagcagaagaccacacccccgagcaccacacacagcaagcaagacagccaagagaaagccaggccacgccggggcaccagcgcacagagaggcccaaacccgcaccgggagcaggccggcacaaagaaaggaaagaccgcaaggagagcaagaacaggagagcagggaggcgcgaaaaaagagaaggaaaagagaaaagagagacacaaagcagaaagacaagccagacagcagagcgagaagggggagacggcgccggggaggcagcggaggccgaacacccacccaaagcagccaacgaggcagcgagcaggggcccaaacgggagaaacccacaaagaaaaagaagccacgggaaggggaggacacagcaggcggaggggacgagggcggggggaggacagagcaagcaggagggccaggcagaccccggggcaaggccgcccaggcagcaccacaaagccaggcgagaaaaacaacacccgagaagaaacaggagcaggaaagcacaggaacggccagagccacgggcaagccagacacaaacccaggcagcccaggcaaagacgacccacggcggccaagaggaccgaagcgagcaacaggcagagccggccagcccagcccccgaaagcgcgagaagaagcgcccagcccgcagaggcacagggcccgcaggccgaaccagccaagcacaaaagcacagagaagaggaaaaccaaaaaaacacgaaagaggaacccacagagccccaggggcacagagagagagaagagcagaaaaaaaaaaaaaaggaaacccccaaaggacacaaagggcaaaaggaaaaaaagagcaccaaaccgagaaaaccaagaaaacaacagaggaagagacagaaccagaagccagcaacgaaccaccgggaaaagcagaaggaacaagacccggcaacaccacacgcccaacgcaagaaaaacaaaagaaaaaagcaaggcaagaaaacagagaggaagacgagaaaaaaaacgaaaaaaaaggagggagaggaagcgggagagagaagacaagaacaacccccaacaaggggaacaggggaccccacagggaccaaggaaaggggcggggcgaaacaaggcagaaaaaaaacaaaagacacagaacaagccagagagaaccaagggaagagcgagagaccaagacagcaggacaaagcaaacaaaaaaacaaaggagggaaaagcaacagccagaggcaggcagacgaaggggagagccagaagaaaggagccacgacccgccaacgaacagccaggaaaacaaggcacaaagcaccaaagcagaagagagccagccgcgaaacaaaggccgaagaaggaagaaaaaccccccaacaggacacccaaaagagagacaagagcgaaggacaacaaaggaacccagaagccgggcagcaagaaacagcaccagaggaccaaaaacagcgcaagacacccaaaaaaaaaggacacggggcagccaagacaagcagggagcagacaaaaagccgaaccaaagggaaaaccaaggaccagccgaaacaaggaaagacaacagggggcagcaccgaagcaggaccccaggcagaagcaggaaacaaacaaacaacaggaaagagccggccagcaaaccacgcgaccagcacgaagaccaggcagccacccagcacgaagcaagaaaacagccaaagcaacacaggcgaaagcacacacagaggccagaaagacgcaaaaagagaaaaaccagccgagaaaagagaaaccgaagagcccaaacgccaaagagcagcaagaccaaaaagccacgacgcggcaaccagcccagaggcagggccaaaaaaacaagcagaaagaccaaaaagcagccaaacacacagacaaaccaaaacaggggaaaaaagcaacgcaacaaaaggacaaagcaacgaaagaagccagaaagcggccaggagccgggaaaaggccgcaacagagaaaaaacagaacacggagacagagcaggaacagagaggagaaaaaccagcaaaagcgcaaagaacaaaaggcgggcaggggccagccgaaccccagcacgggagccaacgcggcagacaccgaggcacgagcaaggacagccggccaacagggaagcccgccacaaaaaacaaaaaaagcggggggaggcaccgaacccaacacggggggcgaggcaggagaagcgaacccaggagacagaggcgcaggagccaagagcagccagcacccagccggggacagaggagacccaccaaggaaaaaaagaacagagcccacacaacaggcacaacagagaaagcaaagggaaaaccggcagggccgacaagagcccaaaagggacgaaagaaaaagaagaaacgaagccaaaaagaggaaagaggaggaggaggagagggaaggaaaaccaagagaaaaggcaacacgaccgaggcacacccccgacgacgacgagagacacggaaaagccacgaagcacaaggaaccgggccaagaacggaagccaggagggagacaccacccaaacaagcaaaccaagaaagacaaaagccccccaacaccggaaagcaaccacaccaaaaaaggaacgaaaaacaaacaaaaaacagcaaaagaagggaaacccaccgcaccaaccagagagacggcgggagagggaacacgaaaaaggagaaaaggccgagaggaacccgaaacaaggacaaaacgagagacaccccacggcaaaaaccaaccccacccacgccagagcccagggcccagacgcccgcgcaaaacggccagggacaggcaccaccccaggcagcacacaaccccggaacgacacgccgccaaggaggacacgacgccaccgaagaaccagaccccccagagaaaagccacccgccaaacaaacccacagagcaagagccaagcggggacacacccgaaaccaaccaggccgaaggagccagaggacacaaaacaaaacagacagaaccagacaaggaagccaaggaagaaccagcaagcaagagcacgcaggcacagcacacaagaagaggaagaaaacaaagagcacgagaaaaaaggaaagccaaggcaaacccacgacagcagcagagaaaccagcgacaaacaaaaagcccccaaacaccaggggagagcaaaaaggacgacccagaagcccacacagggacgcccgacccacccccagaacaaaggcgaaggagcacccaccgggaagagcagggagaagaaaaaggcacaaaaggacagcaaggcaaagccgccagaacggcaagaccacaaaaaacgcccaaagaaggcagacccagccgagaaaagagaaagacaaacccaagagaaccggacaccaaggccaggcacgacgacaagaaaaggagaagaaggcgcaagagaaaaggacacgcacaaaagaaaacagaggggaaggaggagaaaccgaccacacagcccaaagaggcagaaagacaccaagggcagaggagaggaagaacaagaaagaggggggagagaaaaaagaggcagaaggaaaagaacccccagccaaaagacaaaccgaagaaccagccaaagggacacccaggagcgcaaagcagccccagagcggcaacaggaacaaaccagaaccaaacaacagaaaaagaagaggcgccaaaggagaaaacgaaagcaccaggaaagaaggagcaaacggcgcaaaacagcccgaagggaggcagccccaaccagaaccacaggcagggccgagcacacccaacgaccagccccccgagcccagcaagccacaacacccaagcccaaccacagaaagcagacaccgcaggaggaaaaaacaagaaggaaacaaggggaaagcaacacagaaaaaggcaaggagcaacgaggggaggcaccccaaaccgaaaggagacaaggcagaaagaacagggccccacacggggggaacccccaagacccccagggagccaaagccagacagaccaaacaaaacgccaaacacacaaaaaagcacaaaaacacagaagagaaacagcaaaaccaaaaaaaaagagcaaaacaaaccagaagaggcaaaaaaccaagaggaccgaaaaccacaaacagacacaggaaggaaacgcaaagaaggggaagacagaacaaacaaaagaagaaacaaaaagaagaaaggaccccaaggcacacacggcaccgcaaaaggaagaaagacccgcacacgccaagagaaagggaacacgagcaacgcaacaaaaacgaaaagaagagggaccaacaaacaaagagagcacagcaaagaaacacaacagaaaaacaggcaaccacagaacgagaaaaaaagcaaacagcacaacaaaggcaaacacaacaaaggaagaaacaacaagagaaaaaaacaaaaacccaaaaaaggggcaaaagacagaacagaccccaaaagaagacacacggggccaacaaacaagaaaaaagccaacacacgaaccacagagaaagcaaacaaaaccaccacaccagcagaaaaaaaaaaagcaaaaaaaaaaaaacaaccagcggcaaggcacggagaaaaggaaacacacgcgggggaagaaaagccagccacgggaaacaggaagagccaaagaaccagacagaacacaagaccagaaacccaacgggcaaagccaaaagaaaagaaacaaccgaaaagacacaggcaccacagagcaacagacacaaaggaaagcaggaacaaccaggcccaccaggggagaaaaagaaaaagggccggggcagggccaggccgaacccagacgggaggccgaggcgggcagacacgagacaggagagcacacacaaacaccccgaacaaccgcacagaccccgaacaaaaaaaaggaaaaaaaaaaaaaaaaaaacaaaaaaaaacaagaaaaggcgacaaagaacagggaacaaaagcaaagaacacaaacaaaaacacaagcaaaaaaacccacccaaaagcgcaagaggcagaacaaagcagaacgcaacccagcacaaaaaacacaagaaacagcacacccacaggagacagcagcaacaaaaagaaaaaaagaaaagcaacaggaaaaagcaccaacgagaaaagcagaaaaaggcaaaccaacagccagaggagcagaaaaaaacagaaaaaaggcacacaaagcgaagaaaaaacacagaagaacaagaaaagaaagaaaaacaagaggaagacagaaccacaggaggaggccagaaaggaaagaaacgcaagaagacaggagcacccaccaaaaagagcagaaaaacgccgaaaaaaaccgggaagcggacggagacaaaaacgacaccaaaacgcagaagcaaaccagaacaaaccgcacagaccccgaacaaaagggaaagaaaaaaaaaaaaaaaaaaaaaaaggaaaaaaaaaaagaaagagagcgagagggagggagggagggaaaaaagagccagcagacaggcacaggcaaggaaacagaagaaaacaagcggagagcccgggaccggaccacaaaaaaaacacaaaacgccagaagggcaacaagggggccgagcaaacaaaagagacacacgaaaaaagaagaagacagagacaacagaaggaaaccagccagaacaccgagagcaggcccgcaaaccacacaggcccacccaaacaggccgcccagagcgacaagaggcggacaaacaaggcccaaaggcgaagagggacaacagcaacaggaggacaaagaacaaagcaccggcccaaaaaccccggagaccgcaaaaaggaaacaaaaaagaaccgagggggaccaggaaaaagacaaagacacaaacaccccaccacaaaacccagacaaaagaaagcaaaggaacacaagacaaagacaagaaaggaacaacaaaacagcaacagcaagacggaaaaaggaagggagagaggagcagaacacgacccgcagaagagaaagacaacaacgcaaagacagaaaacaccaaaaggggccagggccgaaaaccggccaacagcaagcacaggaagaaaaagcccgggagcacaaaacaggaaaacggaggaaagaggaaaaggggagaacccaggacccccaccagcaaggaagaccagaggcgaaaccgaaccaaagaggacaccggacccagaccacaggcaaaacagggcgggaagaaaaaagagaaaacgaaagcaaaacgacccggaccaaagacacggaaaaagacaagaaaaggccgaaacaggaacagcgccacaaaaagaaaacaccagagaaaaaacagagcccaaaaaaacagcaaaaaaaacaggcggggaccgggaacgaccgccccacaccacgacaggcgcacagccccggggaccgaggaagaccaccccaaccacgccaccaccgccccaagcacacacagcaccggggccggggaccacccaccacgcagcacccacacagccccaggaacgcaggacaggccgcgcccaggcaccaccgcaggcgccacagccagagaaggccaccagccgcgccacggcacagcacagccaccaggggcacaagaacaaccaccgcccaacacggcacccacagcaccgggaggcccgaaacgacccagcccaccaccaccaccggaccagacccaaagggccgcagccaaccacgccaacacacacaggcgccgggggcccaagaccgcagcccagccgcgcggcaccccaccagcgccaggaggcccaagggcggcccaccagacccaccacggccccaagagagcccaaggaccaaggaccagaaggcggccccaccaacaccagggcccgaggaccaccacgggcccccccagaaaagaccaccaagccccaacaacgcagccaagccacgagaaacacagacaccacgaaacgaacaggaaaaacaacagagagaacacggcccacccagaacaaagccaaagcaccaccccaccaaaaaagaacacacaggaaaaagcccacaaaaaccaaccaaaaacggaagaagaacacacaaagcacagaagaagaggacacaagaacacaaaaaaaagaagagagagacccaaagggaaaaaaacccagaacagacccaaaggaaaaaaaaagaaagccaaaaaaaacaaaaaaagaaagaaaccaagagagcaggagacacaggaaacacaagcaagaaaagaaagaggggaccacaaaacaggagacccacaaaggaaaggagagaaacaggaagaaccgagcagccaagaagaaaaaccaaacacgcgaaacaaggggcagggagagcggcgaaaaaagaggagcaaagaggccgagacagagcggcccagaaaagaagggaaacacacacacacacacacaaaaaacacacacaaaacaaagcaaaaagaaaagaaacacacaaaacaaagaacaaaacaaggacaacgggaccaaaggaaaaccaaggcaaggggaagagaacaggaagagagagcaggaccagggaagaaaaaaggaacaaagaaaaaaggagcgacggagaaagagcgcaccgcagcagcaaaaccacgcaacacaaaggagaaaacacagagagaagggaaagaagagggaaggggagaaagacgagcccaacacagaaagaacgggcacaagagaaaaaaaagaaaagacccaacacagcaagaaaaaaaaagagacaaagaagaaaaaaacacaaaagcacaaacgcagcagcaaccaaacaaacaacccaaggcaacacaggaaagaccacaagcacagcccagagggcaggccgcaacccagaccaagaagcgccacgcgcaaaaagacaacccaagacagaaaaaaagaaaaagaggaaggaccacagccacaggccagggaggccacaacaggcagaagggaagaaggagcaaaggcagcacagggcaagcaagagaagggcagggaaagccccaaaagccacagaccagagacaaccacagaaaacagcagggaaaaacccaccccaaacaaaccccacagggcccccacaacagggggaagggagcacaacaagacgagagggggggacacagccacacccacaccaggaacccaggcgccaccggcccgaccaagacagaccaaggcgcaaaaagaaagggagaaaaaaggacaccagggaaaaagaccagagggaaggggacacgccaaaccaaggcagaacacaaagaccaacaccaagaggcggggcgccacgcggccagggggagcaccacgcacaaggcaaaaaaaaaaaaaacaacaaaaagcaccaccagacaagggccacccaggaaggaagggacaacaaacacaaacaaaaaggacacacaaaacagaacaaagacaaaaaccacagaacaaaaagcagaaaaggccccaaaaaacaaacccagaaaaccaaaaacaggaaaaggaacaacccaaaaaaaagagccaaacaacaaacacaagccaaacaaacgaaaggcaaaagggaagcagcccaaaaacggcacaagaaaggagccccccacacccacaacaagcggaagccggccagggcaacaagcaagaggaaaaaaaaagaacaaaaggaaaagaggaagcaaaacggcagagacagacaaacagaaacccacaccaaccaaaaggaaagcaaaagcaaccagcaaagccaggaaaaaaccaggcaaaaacacagcgccaacaccaacaaaggcaaccagagagccaaacagaagaaccccacaaaacgcacaaaaagaaaaaaaccccaggaaacagcaacaagggaaggagaaccccaaggagaacacgaaccacgccagagaaacagagagcaacaaacaacggagaaacaccaggcaggaaggaagaacaaaggaaaaggccaacgcccaaaaagaagacaagcaccaaaacaccagaaaccacagaaagaaaaaaacaaaaacaaggaaccaaaaaagagccaaaagccaagcaacaagcaagaagaacaaagcggaggcacaggcaccccaacaaaaaacacaagcaggaacaaaccagcaggacgcacaaaaacagacacaagaccaagcaacagaaagagaacagaaaaaggccacacaccacagccacgaccaaaaaccgacaaaaacaagcaaggggaaaggaccaaagaagggcgggagaacggcagccaagcagaaaaaaaacggaacaccacaccaaacaaaaaaacaagaaggaaaagacaaagaaaacccaaaacaaaaaacccaaaaaaaacaggcaagcacaggacaaggcagggcaaagaccaacaaaaacaccaaaagcaagcaacaaaagcaaaaaaacaaagggacaaaaacaaagaaccgcacagcaaaagaaagaacagaggaacagacaacaaccacagaaacaagaaaaagcaacaacgacaaaggcaaaccagaacacaaggaacaaacaaaacaagaaaaaaacaacccaaaaaaggggcaaaggacagaacagacacccaaaagcagacaacgcagccaacaaacaagaaagaaagccaacaaccacaagaaaagcaaacaaaaccacaaaaagaaccaccagccaacagaaggcaaaaaaagaaaaaaaaaaaaaacagagcggcaagggggagaaaaaggaaggcacaaggagggaagaaaagcaaccagggaagacagggggacccaaagaccagaggcagaaaaccagaccaggcaacccaacgggaaacccaaaggaaaaaacacaaaaagaacagcacggagcagcagcacaacaagcaaagcaggaacaaccaaagcccacaagaagaggaaaaggaaagggacaaacaccaggaaaacagcagcagaaaaggaacaagacagccgcagggacagggaggaaggaaaccaaacagcaaacaacgcagggacagaaaaccaaacacccacaggacaagagaacacaggacacaggggggaacaacacacacgggaaccggaggggcggggggaggaagagcacagcaaaaaagcaaggaggggcaaaccgggaagggagacggcagaaaccaccaggcacacaaccggaacaaaccgcacaccgcacaggccccgaaaaaaaggaaaaaaaaaaaaaaaaacaaaaagcaagcaagccaaggcagggagaaccagaggagcccccagggacaggccaacagcacaagagcacaacggaagaacacgacacaacaggacccccacaacaaaaaacacggcacaaaaacaaaaagccaaggcgagagacccgcccaaaccccaccgagacgacacaaagagaaagagaaacaagcaacaacagcagaagcggccacagcccggggcgccaggcacaagcaccgaaaccagccccaaaaaagggaagaaaagaccagccaagaccggaagggcagcgaaggcaaaaaggcaagagcaaagcaagagaagcacacccaaagaaaaaagccgagaaaggacaacaaaacagggacaaagaaagacggcgggcgcgggccacgcgaacccagcacgggaggcgaaggggggacaccgaggcgggagcgagaccagccgaccaaaggagaaaccccaccacaaaaaacaaaaaagccagggggggcacagccgaacccagcaccaggaggcgaggcaggagaacacgaaccgggaggcagagggcaggagccgagacgccagcacccagccgggcaacaagagcgaaaccgcaagagaaaaaaagacaaggaaaaaacagagagaaaaagccagcaagacaacagaacaacccagagggggcaggccagacaggcaaccaggcaccaagcaaaaacaaaacaaacaagcaaacccaaggccacagacagcccagaagcggcacacccgagccaacagcaaacaggaagacaagaacaagaaaaagccgccccaaacacccggccaacggagaacggcccagagaggaaaggggcggcaagcgaaagaaaagaaagaaacacacacacagcaccaaccagccaggcgggacgcgagagaacccagcccgacaaagaaagcacaaaaaacaaaaaaaaagcggaaacaaaaaacaaaaaaaagagaaaaagcaagcaagagaaaaaaggaaggaggagagaaagagaaacaggaaggcagacccccaggcaagaaacagagacaaaaaacaccaagcacaaagagacaagcaaggcaaaacaaaaacgccacaagcgcaaagggggaaaaccacgggcccaaaagggaaacagagcgcgggcaccagaaagccaggaagaggggaacgaccaggacacgagaggagaggccgagacaggagggggacagccaagcaaggcgaaagagacagagccaccggccaggcggaggcagggcggaccggccacgcaaccccaccccgggcaaacaaccgcccagcccccaagagccgggaacaagcacccgccaccacaccgacaagaagagagagggggcccaggggggcaggcggcgaaccccaaccgcagggaccacccgcccgcccccaaagccgggaacaggggagcaccgcgacagggcaagaagagaggggggacgcgggccaggaggccaaccgaccggacgcccaccggcccccaaaggcgggaacaggccgagccaccagccggcccacaaaaaaaccaaacacagagaaaaagcaaagaaaaaaaaaaccaacacagaagagaacacaacaccaacgccagaaggagagaagaacaaaacaacaaacagaaaccagcccccaacaccagccaaaacccaccccagaggcggaagaggccaccgaagcgggaacacaaaggagacaaaaaaaaaagaacggaggaaaaaaaaaagggaaaaagagcccacaagagcccaacgagcccagaccaagaaaacccaacaaccaagagcgggaagccacaaaacacaaaagcacacccaaaagagcaaaggcgcaaggagagccggccacaaaaagaaggaagacgagaaaaaccgaagggacaaaacggggcaaacggaaaaaagagaagaaaaagcaacgaaacagcagaagagaaagaccccaaaaggggaaccaaaagcaccccaccaggagagaaggaggccaggccaagcaaaaggagccagccgggaaggacaaaacaccaccaagaaaagagcagaggggccaccagcccccggaaccaaggaccacaccccacggccccgagccaaggacaaaacaagcaggaaaaaacagaagggccgccacaaagacccaacgagaagaacaacagaacacacaggcaaaagaacagacaaaagaaacaggcagagaagagggggaaggagaggggaacagcaacgagagcgccaggcagacacacaagcgccgcaagcccagaagcagaaccgagagggaaccaacgagggaaaggcacagaaaagcaaggggaaaagcaggcaaagaggggcaggggaggacacccagccgaccgagggaagcgaagaggaagacacacagagcgcccaccaaaagcaagagacggcagagagccaggcgcgaaaagacaacccaagacgggaaaaaagaaaagaaaaagaggaaggaccacagaccacgggcggcgaggcccacaacaggggaaggcaaaaggcacacacaggcagcaggcaagagagaagagagcaaagcaaaaagggaaaccaaaaacacggacagagccacacaccacgagaacagagggggaaacgcccccggagcaaaccccacaacaccgggaaagggagcacaacaggagagagggggggacacagccaaaccaacaggcagaacccccaaacagagaagacaagcccgaaaccccaaacccaggaagaggaaacacggaaaccagacaaggggcaccaacagaggcagaggggccggagcgcagcaaccagaagaaagaagcagagggcaccgccccccccaaaggggaggggcagggcaccaagcagcacaacaaggagaaaggaacgacacacccagagcaaggaaacaccaaagaagcaaaggaagacagacagcgaagacaccaaagaccacagcaaacagagaaacccaaaacaaaccagccgacccacaacggcaaaagcaggcagcccagaaagccgcggcacccaccagaaaacagaaagccagggaagcccacgcccagggggcggggcccagaccaagagaggacagaggaacagagccgagccagggggggaaaggcccccaggcacaccagagcacccaagcaccaagagaacaccggaaaaggcaaaaaaagcaaaaacacccccgcacacaggaggaccaaaggaaccaggacacaggaaacacagggaaaagaaaacagcggcgagagagaaaacccacaaggacccagacagaaaaagaggcgggagaaaggcacagcccccaaaaaaaggcaaagaccgaggaacccgcaccgcgcaaacgaaagcacggaacgagcacgacaacagggaaggcgacggcaggagaagcgcacggcaagagaagcaaagagccccccaccacccacacaaccacccgccgccaggccggcaggacccacaagaccaaaagagcaaggacaggagcccgggcagcgcccccaagacaagccacgagccagccccaagaaagcagagacaaaagccgccagaggcggggacgaaagaaaggagagacacaaagcggggacgagacagaggccagagcaaaggacgagagggagacgcaggggcaggagccagcccgcaaacaagccccaaacaggaggacgagagaccgaaaaccccccaaagacaccgcccgcaagcacagaaggagaggaggcggagagaaacagcgccagaagccacagcgcaggacagacagagcccaaaaagcacacaaagaagggagaaaacaaagcagagcagcggaaggaaaggaacacaaaccagacacaaaaccaaaccgaccaaaaagccgacggccccaaaaaagaaaacaaggcacaaccacgaaagaaggccccaaaaccaacacagagagggcaaggacaagagcagaaaagaagaacaaaaaacaacgagcagcaggaagaaacccaaaggaagcagaagcagacgaaaaaccaggcgaaaggaagaggaaaaaaaacacacagacaacaaccaacgacaccccaggaacacccaggaaaccacacgagccccgaaacggggaccaaaaacaaaccaaacggagcagcagcccaagccaccaccccaacagcgaccgggcacaaaggaaaacacgacaa

SEQ ID NO: 229 - RNA, 7899 nt, Homo sapiens
ccccgaacggccgcgggggaagccacggcagacccggagggaggaaggaggcaggggccgaacccggcacccgcgagccacaacccaggagaggagcaaagcgagcagcaaaaacaccgagcaggaaaagcacccccagacagcacaagaacaggagacagaggaggaggaaagaaaaacggacaagcccccccacaaaacccgccggcaacgggcgcccccggcacacacagcccgagaggccccggcgaggccgaggcagcccggacaggcggagcaaggggaacccagggaagaaaggccacggcccggcaggcaccccaacccgcacacccccagccaccccccacccagccccaaacagagcccccaggcccccgaccccaggccccccggaccgcgccccgccggccgccacccacaagaagaagcaaagacggaaagagaagcggcgggcccagcgggcgcgggaggagaggggaaggggccccaggcggagcagaaggcgggcgccgagcgccgcggaggcccagaggcacgcgagcgagcgcgcggggagcgcgaaaccggcgagccgcgaggcgacggagaacgaaggccgaaaaaagggacagcacaaagcccagaaacaaggccgaggcaccggccaagaagcggcagcaggacaaggagggcggcggaggggggagccagccgccccccggcaagggagcacacacagaggagccccccagccgagcagagacaagaacccacggaagaaccacggcgggcgggggagagggacaggaaagagagagccccgccacgcccccggggccacaggccgccaccgcaggacagcagcccagaccgcccagcaggcccccacccccccacaccaggaggacagaccccagccccagggagcaggccagggggacagcacaaggagagcccgggagggagagccgacaggggcccagggggggcaggcacaccagggaggccgggagccacagaaacccagggcaggggagacagccacccagcagcacccaagccgcccacccgggccagccgccccagcaccccccccacgcagccgagccacagggaccgcgccccgccaaagccccccccgccgccgcccaggacccgccaaagcccgaaagcccgaccccaagggcagaacacaaccccagcagccacacacacaccccccacaaaaccacgccgcgaccccccaaggcgagaaaaagggagcgacccgcccaaagcagccagagcggaagagcaggcaccaagaaagagaggagggagggagggaggcaggggggcagggagggaggaggaagagaaggaggagggagggaggaagagggagaaggagaagggggaggaggggggaggaggagagaggagggagggagagaggagggaggagggagggagagaggaggggggagggagggagagaggagggaggagggagggagagaggagagaggaggagggcgcgggaggaagaaggaaggagggagggaaggacgagaaggaggagggaggaggaggaggagggagaagagggaggagagagggagggagaagagggaggagagagggagggaggaggagggaggaaggagggagggggaggaagaggggggaaggagggagggaggagaaagaggaaggaaagggaggaggaggagagaggagggagggggaagagggacagagggagggggaggagggaaggagggaaggagggagggaggaaggagaaggaggagggagaagagagggaggaagagggagaagagagggagaggggaggaggagggagaagaaggagcaagggagaggaaggagggggagagggaggagggagggagggggagggggaggaggggagaggaaggagggggaacagggaggagggagggagggggaggagggaagagggagggggggagggaggagggaggagggaggaaggaggagggaggcaaaggcagagggaagagggagaaggagagagggaggagggagggggaagagggaggagggagggggaagggggaggagggagggggaggagggagagggaggaagagggaggagaaaaggagggaggaggagagagaaaggagggagaggaggagggaggagggggaggaggagggggaggaggaagggggagggggacagagggagagggagaggaaaggcgaagaaaggagagggaagaaggaggagggagagagggggaggcagaggggcggaacgagggagggaggagaaggaggagagaaaagggagggggaaaagggaggaagggaagggacagagggaggagggaggagagagggagggggaggagggggggagggaggaggaggagagagagggaggagaaagagggaggagggagggggaggagggagaagggaggagggagggaggacagaaggaaggagaaggaaagaacaagcaggaaacgccaaagcccaccaaaccccccaccccccccaggcaagcgaggaccgacacccaagcggaggccgagccccccacgccaaaaacccgcgccgacacagaggcccggccaaggcccccgccacccgaaccagccggacccgagacacccggaagggaggaccccaaccagagggggcagggagcccaacccccagaaaacaccagaaggacagacccccccggcaaacccgccgccacccagagaggaagggggacgaggccccaggcagcccagcaacaacccccacgcaggcccagcaggccccgggaaccccaggcccccacccccacaaaagcccccgcccaggacggggcacacaggcccaaacccaggaagacccacccagaaggcaggcacagccaaccagagcaagccagccagagccagagagaaggcaggggccaggagggcgcaaggcgacaggaaaggaaagcagaacagccagcggccgcggcgagcacggaggaaggaagggacacaccaggaagcggagggccaaggggcggaagccgggcacccgcggaccagcgaacaacagacagagccagcccccacccaggccccaagggacacagcccaaaggacacaagagacaccaaaaacaaaaccaagacccgccccagccccgcccaagggacccaaagcaccagggagccggggcgccccagaacgccacagcggccccggccccccagagaacaggcccggcggggcagcagacgcccagggccccccggaagcccacccccaccagcacacccccccagggagcacaaagccacgcgcaaagacacagccaggcccgcccgacggcccacccaagcgacagaaacaggccccgccccacagaaaaggaggaaagccccagagaagcaaagacaggggaggcccccacaaagacaggcagccagggacgcagacagagcggcgggccccacgaggagcggcaaagaaccccgagccccagcccgccgaaaagaggaaaccagaagccgcaaggcgccagggaagcagaaggaggagcaaccgagcaaaggggcacgcacagagggccaacaggccacagcccgggggggggacagggcccccaggacagccaggccggggcagacaccagggaaccagccccgccgcgaccagcggggcccagcaacaaccagccgccggcccccacccccgggagagacccaggacagcccacaccgagggccaaggaggggccagcaagcaaacacagcaaccggcaggagaagcgccagcggcgaaccacgccaacacaagcaccagggcccgcggagcgccaaggccggcccccaggccccgaaagagccaggggaggggccgcccgcgcggaaccccagaggcgcaccaaccacaccccgaccaaacaacacaccggggacacggcaccacggcacccaagggaaccagccaaggcaggcaggaaacggcgcgaggagcccagaacaggagaacacccgaagcccgcccccgggcgcagggccgcgagggaaaggggaggcaagcgcggggcacagcgccccgcgaggccccgggggacacaaacgcggagcaggcgcagccacagcgggaaaagcagagagggagaaaccggccaagagagggcaaggacgcccaggcacagcgcagccaggccggccacacacagacccggcacgcgcaccccgcaggccagaacgagggacccacagaggccacacacgaaaaggcaaaaggaggcaagggccacgcacccaggcggaggcaggggcaacaggccacgcagcccgacccccccaggccaagcaacccccaacccagcccccagcgggacagggggcaccaccagccggcaacgaacagagacggggcccccggcgcccaggcggacaaaacccgggccaaggacccgcccggccccaaaggcgagaacaggcagagccacggccggcaaaaagacacggggagagggcgccgcacccaggcggaggcagggcgcaaccagccacgcaacccgcccgggccaagcgaccccgcccagccccgagagcgggacacaggaacaaccaccacaccggcaagacggagagacagggcacaaggccaggcggccaaacccggcccaagaaccacccgcccggcccccaaaggaaaaggcacgaaccacacgaccagccaacaccagacaaagagagacacacaaacaacaaaaccaaaaggcgcaacagcggcaaggcaccaaagggcaaccacagccccagcaaaacacaccccaaaaaacacccaaccaaaggaagcaccccaccccccccccccaaaccccgaaacccaacgcccgcgcggagcccccccccccccccccccccccccccccccccccccccccccccccccccccccccccacggaagaaaaagaaacacaacaaagaggggagcggccccacagcggagcaagcacacgagcaggcacggacagccgaagcaccacgcagcagcacagacgcacccgaaggcaaacagccacaagggcacacagcaccacacacgcgaggacaggacaacaagcaacagaagagaaagaaaaaagaacaccaccacacccaaacagccacagggccaggacaggggagaccagaaaggccccagcaccgcacgaagaagacaccaccggggccgcaaggggcagggggacccgcaaggcaggcgaggcacccgcggcccaaacaagcccaggcccgcaacaaaaaggccaacgcaacaacacacaaacaggcgaaccagaagacaggacagaccaaaaaaggccacccagccgagcccaagaaaaccggcaaagcaacaccccgagaagaacagaagaagccccgcaagccaggacccaccacgcagaccacacaaccaaacaaagcgccccagccaacacacccgacccccaaaagccaacgcggggggacggaaaagagacggaggcccggcccaggaggaggcaagggcgaccagccacggcaaccccaccccccagcaagggacccccgccaacccccaagagcgggaaaggcgcagccaacacaccggcgagaccggagagacggggcaccagggccaggcgcgaccccgacccaaggacgcccgcccggcccccaaaggcaggaacaggccagagccacgcacggcgacgcaccagggccaggcccacagcacgggaaggggcccagcaaaaacccaaaacccagaccagacgaagaaccaaaccacagcaagaaggcccacacgagagcccaacaaaaaaaggaaaaaaagacagagagaaaaaaaagggggggcaggaagcacaaagccgcgaagcacacaaaagggaaagaggaagcagcgcaacccaaaaaaagccacaggcccaaggaggcaacccggcccaagccgcccagcccgacccccaaagacgggaacaggccagcccgaacggcaaaaccgccccaacccgaaaccggacgaaaggggacaagccaaaacaggcaaacacggcaaaaaacccacagggaacgcccacaccacacaggaggccgagagcagcgagaaacaacaaaggaacaagcgagcagggcaaacgcagaccacacccccaaaaggacccccccgacagaagaacggggggagcgcaacgcacaaaaccgcccaaaaccccacccagggaagcacagagaccgccgaacaagagacaggagggcaaaaggggccgccacccacacgacaggggcgcgcaaagaacccccgccacccccccccacccccccaacaacacggaaccagaacagaagcaaaaacaagcacgggggagaggagccaccgcaccaggcggaggcagggcgcaacagccacgcaaaccccccacaggcaaggacccgcccagccccccaagagcgggaccacagggcccaccaccagccggccaaggcaagagagacggggcaccagggccaggaggccgaccgacccggaccgcccacgacccccaaaggcggaaacaggcagagccaccaagccggcccccacagcacgagccagagcccaaaacaggaggcagaccccagcagcccggccccaggacccagagaagcaacccccgggaccaaagacacccaggcgacaggagccacaggacggagcagccacgcagaaaaagccccgggggaacagcaagaaacaagacgggacagcggcccgcccgggcgagcgcaaggccagggacagagaggaaaaaaaaagagccaaaaagaacgcaaaaacaccggggggacacaaaacgaaacgagccacaagagaacgccaaaacaacagaaaaacaaaaccccaaaaaccaacaacaacaaaaccacaggaaagcaagacacagagagccaaaaaacccaccacagagaagagggacaaaaagaaaggggcgggggggggggggggggggggggggccgggaagcccaaacaaaggagcccggcacaaggggagggcccaaaagaaagaacagaaacagacaaaagacaaagacaaaacacaaaacaaaaaaccaggagacacacccagcaaccccccaccccccaagccagacccgaccacggggacaggagacaacaaaaacaacggggcccccacagaacagaaagaaaccgagacgcaaagaggacagaaagaaacaaagaacacaggaagaaaagaacaagggcccgggagacggaaaggagccaagggaaccaggagcaaggagagagcgaggggcaagaacacaagaacgcagaaccaaacccacacgagaccgcaagcgggaaaagacaccaaaaaaagacaaaaaaaaagaacaaaaaagagcccaaaaacaaaagaggaaaaagaccggaaaaaggcaaagacagaacaaacaaccaaagagaaacagcagccaacaaacaaagaagaaagagcagccacaagaagcgggaaagcagccaaacaaagaaaccacagggggcaaaagagaaaagaaaaaacaaagcgacaagaacagagaaaaaaaccagacacaaggggaggagaaaggcaaggcaggccacaaaaaaaacgcagcccgaacgcaacgaccagaaaccaacaaaagaagaaaacaggacgaccaagaagaagggacaaacaccaaagaaaggaccaaaggaacaaaagcaaaagcagaaaaaaagcaagcacaacccaaaaaaaaaccaaggaacagcacaacaaccaaaagacagagaggcacaggaaaaagaccaagagaagggacggggacggggggaggaggggggaaagcagaagccaagagaaagagcaaagcgggcacagaagcaggccaaccaggcaaaaggagcacac

SEQ ID NO: 230 - RNA, 2861 nt, Homo sapiens
cggcccccaaaggcgggaacaggcggagccaccggccagggccacgacaaccaggaaaaacggaggcgccggagcggaaaagagacgaaacccacacagcaaaggagaaaggggaaaggcaagcaccccggcagaaaaagaaaaagagaagccccccacccaccccccaacaaaagaaacaaaaagacacgagggaaaaggagaggcgaacaaacacccgaaaaccgcccaagaagagacccccgaggcaaaaggcagcagaggagggcgcagcgaagcaaagcacaaacggcccaagcaccacccgcggaaaacaacaagacccccagggcacaaaggagcccaggaagccgaagcgagaacgacggaacgggaaagacgagcagaaaccagcaaggggagcccgaccagagcagcccccagcaggaccaaaaaggacaaacagaagcgcaacgaaaggcagcaaccaaaaaaccacaaaagggcacccaaacaacagggaggaagaggcccaacccggcacccagccccccccacaacccacccggcagcagagcggaggcgaaggagcccagagcccaccagaaccgggccaccccaaacccccaaggaaccccccaagggagagaaccacacaaggaaaaggagggaccccgagaggcagagaagcaggaccaggcagagaggggacaggaaacccaacaaaccggccgaacagcaggaaccggcaagcgacccggaacccggcccacaacaagaaagacgcagggcaggagaaaaaagaacagagaacaggcgggaaacaagccaaaaaagcaaaaacgacaagagacgcaaacaaaccgggagccagcaagaaagcaacaaaaacccaggggaggcaggaaaggacacacgccggaagcaaaaccgagcggccggccagagcacggaccaaggaaaggaagcaaccgacgggaagaagcaggcacaccaaaggccgacgcccaggggaaaaggagcagcaagggcacccaggaaacacacaagggaccaggcaagcccccaacccaccaaagaaaaacccagagaaaaggggacacaaaaggagaaaaacgggcaccgcaggagagcggggaagggaagagagcacggaacaagcagaggccgggccagagggcccaaaaaagcagacgccagcgacacacaagacgccgaagcacaccagagaaagggccaggaagaccaggccgccgccaggcagacagcaaagaacccgcaaaggggagcaaaccaggcccggacgcagcaagaaacaagggagccgccgaccccccaaaggcagcccaaagccgcacacagaaaggaacgaaagaggggcgaaaccagccgcgcgcacgaaaagccaacaggccagggcagccgaaaagcccgggaccccgcggggcgcggagagacagacaggaagccggggacccagcgccgaccagaaccccgggggaggcgcaggggagcaggcgcaccgcacagaacgccagagcgcgcaggccaaagcaccaggcgcccgacacggcgcaagagggccccgacccgggggccagacccgcacgcagaggggaaggggaggcccccccagcccgcggagagaagcgacacgccaggcggaaccccaccggcccagcccccccccgcggccgaggagggacagaagggacccagagagggagcggcaggggggaaaggaaaaaagcaagcaaaaggccagcgcccccaccccagcaaaaagagccccagaaagagcccccaagacgcgaccgccccccggaggcaccagcagggccgaggagggaaacccgggccggaaggcagccaaagggggacaggaggacaggagacagagcacaacgaggagggggagaacagcggcgaaggaaagaaaaaaaaagaaaaggagccgcggagagagcgggaaaaaaaacagcaagcgaaagacaccggagaggcagcaggcgacagggaagcagagaaaggcacaaaagaaaacaagagaaggcaagaaagacaagaacaagagggagacgcaggcagaaaaaaaaagcaggacggagaaccaggcagaaagagggcccacaaaagggacaaaaccgacagggggggggggaagagggggcaggaagggagaaccaggagaaaaaaaagcaaaccggaggagacgggccaagcaagcaaaaccgcaggacaaagcagaaaaaggacagaaaagggccaggaggcagggggaagacaggcaacgaggccaccaacaacgcggaagaagaaaaacaaaaaagaacacaacgaaccgacgaacaaggcaaacaggcacccgagcccaagggaaagaacggacgcagagacccacacaggccccccgagaggagcgccccggccgcgcccgggcggagggcagggaagaccggccacgcaaccccgccccgggccaagcaacggcccagcccgagagagcgggaacagagcgcgccacaagccggcaagaagagagacagggcgccacgggccaggcggcgaacccgacccagggaccgcccgccggcccccaaaggcaggccaagggcccggcgcgagccccaaaccccgaggagcgcacgacacaccccgaaacaagggggacagaacggcccaggaaaacaacgcgccagcaggacccggaacagaaagcagccaacaagaagccgagagagagaaggggaccgggggcggccgggggaggggacgagcgggagggggagcaccaggacggaggccaggccgggagcggggaggagcgacggaggcccgggagcaccgggccccccaccgaaccagagcccaccccaaaggcc

SEQ ID NO: 231 - RNA, 13305 nt, Homo sapiens
cccggaaggaccgcccaaacccagcccacaggccaggcccagccaacaccaaggccagcagaggcgcccacgcggacccgggcccagcaccccccagaacacccgcaccacacacacccaccacacaccgagacaaccgggaagccccacacaccccacccagacacaacagagcccgcgggccagcccgcagcagcaggaaccagagagaccagggccgcccacagggaaccagggaggggacaagagcagcaggccagccacccggggacacaggcccaagagccggaggagggagagagacgcccgcccgagccccgcccgcccccggaggccggcgaggaacccacgagcccacgggacggcaggggacgacgcgaaggggcgggagggccagggcccaagggagcgagccccacacagccaggcgggcaaacaggggcagggaggaggcccccaaccgccgccgccgcgagggccgagccaacccgagcgaggccccgcaggggagccccccaccccccaggcgccagcagccccccccacccagggggcaaggcacacccaaccaggaggaaaaggcacgaagaggcacccaccaccggcgccacaaggggcaggagcgagcgccccgccaggaaccccgaggggagggcccgccccaggggcccgagggcccaccccccaaggacgggccaagccacccagccgaaggggagccgacaccaggccaggggccagccaggaggcaagccgggaggagagggacagggcacgcaccaggagagggaggcccaccgcagaccaaggggccaaccagggccagccagcgccccagggaaagccaagaggcagcaaccccaaccccgagacggagccgcggcccaggcggaggcaggaggaccagccacgcaggcccaccccccgggcacgccacccgcccagccccgcacgcgggacacaggcgccgccacccaccggcaagaagagagacggggcaccggagccagggggccgaccgacccagacgcccgcccggcccccaaaggcgggaacaggcggagccaccagcccggccccgagagggagccgcccgcgcccgggcagaggcagagcggaccagccacgcgaccccacccccgggcaagcgacccgccagcccgagagcgggaaaggcagcacccagccggcaaggagagagacaggcacagggccaggccagccaaacccgacccaaggacccccacgcagcccccaaagacgggacacagggagccaccagcggccaaccaaaggcagggacaagacaggaaaaggaaagggcaggggagggacgaacacacccaggaaagccagacccaacaggagggggggaggagcacgggcccaggcggaagcaggggcaacggccacgcaacccaccccgggcaaggacccccgcccagccccaagagcgggagaaggcgcagccaccacacccggcaacgaagagagacgagggccagggcaaggcggcggaacccgacccagggaccgcccacccggcccccaaaggcgcgaacaggcggagccacggcccagccccagaggaggaccccccccccaaccccaggaggcccccaaggcggccccggcccgacaccgaggcccacggagaacagcagaggcgccgaagcgcgaggaaagggcccagcccaccagcgagcaaagaacagaccacaagccacaagacagagaacgaccacacccagagagacggagcgccgcgcccaggcggaggcagggcgggaccggccacgcaaccccacccccaggcaagcgacccgcccagcccccgagagaggaacaggcgccaccaccacagccggcaagaagagagacggggcaccagggcaggcggccaaacccgacccagggaccaccgcccggcccccaaagcgggaacaggcggagccaagcgccggccccacaccagcacagagggcaagggaccagcgcaggaacaggcgcgaacaacacgagaacaaaaccggggaaacccgaaagggagcgggcaaaggaacgaagagagaaaccaaacgcccacaagccgaacaaacacccacgcaacccaccgcaggagacgaaaagccacgacggggagaggaccaggggagcacccagaaggaagagcacaagcaggccacggagccgaaaaagcgcagccgcacaaggggggcgagaaagccaaggcggagagacgggagcaaggcaaaaccacacgacagaccggaagacagcagaaccaagacacagagaaaggacagagccagcaggcaccccaaacaacaacgaaaaacacacaaggccggggcagggccacaccgaacccagcacaggacgccaggcgggcagacagaggcagggggagaccaccggaacaggaaaaccccaccacaaaaaacaaaaaaagcagcaggggcagcgccgagcccagcaccaggagacgaggcaggagaagcgaaccgggaggcagagcgcaggagcgagcgcaccacgcaccccaccgggcaacagaggagaccgccccaaaaaaacaaaaacaaaaacaacaaccggcccaggccacggaaagaaaaaaacacgaagccaggaagcgaagagaaagagagacccaagaagagcccaggaaggcccacacacccaaaaaaagagacagagcgccggcccagacgaaggcagggggacggccacccaaccgccccgaggcaagcaaccagccagcccgagagcgggacagaagcgggccaccacacccggcaagaagagagagggggccaggaccagggggccgaacccggcccaaggaccacgcccggcccccaaaggcgggaacaggcggagccaccggccggccaagaagagagaggggcacgggaccggacgcccgccgggcccccaaaggcaggaaaagcagagccaccggcccggccaggcaaaaggacagaacgagaggagcgccgcacccaggcggaggcggagcaagcccaccacgcaaccccacccccggcaagcacccgcccagccccgagagcgggaaagaggcaccaccacccggcaagaggagaggaaggccaggccaggcggcgaagccgaccaagaacgccgccgggcccccaaagcgggaacaggcagagccaccacgcccggccagacaagaggcagagcgcggcccaaccggaggcaggggcagcaagcccacgcagccgacccccgggccaagcagcccccacccgcccccaaggggggaccacaggcccagcaccccccagcaaaaaaacagaaggccaggcacgggccaccgaagccagcacgggaggccaaggcgggaaaacggaggcaggagcgagaccagccggaaagggaaacccgccacaaaaaacaaaaaagcggcgggggagagccgggcacagcaccaggaggcgaggcaggagaacgcgaacccaggaggcggagggcaggagccaagacggccacgcacccagccgggaacagagggaacccacccaaaaaaaaaaaaaaaaaaaaacacacaaaaaacagaaaaagagagagaggcccccaggcccagagggcgagcccaggccaagcaccccaccagcccccaaaagcggaccaaggcacacaaaccacgccggcaaaaaaaaaagagagaagggcgcgggccaggcagggaacccggcccaagcgagccggagaccagcccccaacggcggaaagacggaacaccacgcccagacaagccaagcagagggccgccagggccagaggggcaccagggaggagaaggagaaacccacccaaaacagacacgcgaaacggagaaagccacaggccccccagaagagcaaccgcaaggggcgacaccggggacgggggccccagagcgcacgcaccccccccgaaaaggagagagaggagaggacaagcgaaggaaggaaccagcacaagggagggaaggaggaaaggccccagaggaacccgggaccacaggaaaaagccaggccgggcgaggccccacaggccgcgccacccggcccccacgggcaggagcaggagggagcggaggcccccgccgcagggaaccgggccaagcccacacgacaggcacgcaggcagaagagggagggaagcaccacacgaccacaccgcagcaggacggcgaacgacagaaacccaacccagcggcaagcaaaaaggagaacggcgggcacggggccagccgaacccagcacgggaggccgaggcgagggacacgaggcaggagacgagacgccggcaacacagaaaaccccgacaaaacacaaaaaaagccgggcggggcgggcgccgagccagcacgggaggcgaggcaggagaaggggaacccgggagacagagcgcaggagcgagacgggcacggcacgcagccggggacaaagcgagaccgccaaaaaaaaaaaaaaggaaccggccacgaggaaaacgaggggcgccaggcgggcggacagggccacaaaaggcacagccaccaccaacagcgggcaccagccgccggagaggcacaggcagccgggaaccgccaaaaagcccagaaagaagggaggcgccccaagaagagaacaggcccgacccccccgagccagcacgagacgagggccgggcaaggcccaccgccagaaccagggacaacccaccaagccacagagggaaagggaaaggggccagaggaaaacaggcgcacaccagaagagaggcgggcagacagacaaaaagggagacgaggcagccacgggggccagcagaccagcccccagccccgaggacgagagaggcaagaggaggaaaccaagaccagagaagcagcccgccagggcacacagcagcagaggaccacgagaacccaagaagggagagcaggagaacccaagccgacccaaagacagaaagagagggaggggcgagggagccagcgcagggccagggggcgggagaggccgggcagggagggaagcagccaccggaaagaaggcgggcgggcccaggagaacaggagccaggaggggggaggggcgggggcaaaagcaggggccaccccaggccgagcagcgcccccagggcggaccacagagcgcgggcggggcagcgccgggggcggggggacagcggccggccccgggggacgaggcgacaagggccccccggccaggcaccgccccgacggagcacgggggacagggaaagggggcggggggaggaggagcagggccacagggaggggaaaggcaggaggggacccgggagaaggagggggacccaggaccagagagaagggaaggaggcccggggcagaggaaagaggagcagaggcccgggccgggggaggaaggagggcagcgagcaccagggcccgggaagcaaagcaagcggggacgggaggccggcccaggcgagaggccccccccgccccgccccccccgccccgcccccgcagaccacggacacgcccagacacagaccacagcgcgccccgggacccggaagcaggggccaaggagccgccaagcgcacccccccgggacccccgggggcggaggacagcccagaccccgcccagcaagagaccgccccaggcccccgccaaccagaggacaagaacccccaacgggagacgcagccggagaccccccgaccgacgcggagcccgaaccgccacccacccagcccgacccgagcccggaccccaccccgcacccccgcccggaccccacaccaagcaacccccgccagcgcccccacgcaggacccgaccacagccccccccagaccgagcccaggacaggagcccccccccccccgcaggccagccgccagcgccgggccgggccgccccggggacgccaggccgccggcccagcagccccacagccccccacggggaccggcacccgggcgggcggcacaagagagcgcccccaggccgggaggccgcagcaggggccggcaggagggggccagagcacccacacgacccaccggcccccacccccgcccagagcaggcccgcgccgaggggagcagaccaggcacggggcgggggggccgcgccgccgcacgcccggaggccgcgcacccagagcccgccggccgcacgccacccagcagccgcccaaacccccagccgacaagggggaggaggcgggcccgggggggggagaccgaccaggggccaaagcacacaccagacccaaaaccacacaagggcaccaggacaagagagggagcgccgcacccaggcgaaggcagggcgcagccagccacgcaacccgccccgggcaaggacccgcccagccccgagagccgagaacagagcccgccacgcgcccagcaagaagagaagacgaagcaccagggcaggcggcgagccgacaaagaccgccgccggcccccaaaaccgggaacaggcagagccgcggccggccccaagaaaaaagaaacagggaaaaacacaaaaacacaggacaagcacaacaaaggcaacacaccacacgacagaacacacaccccagaggacaacccggaccacaagagcacccaccaccccccccggcccggcagcacaacgccaccggagccagcggacacagacaggaggccgacagggccggcggcccaccagcgaagcaaggccacaaaaccaggaaaggaaccaccagggagaaaccagaagaggaccacagaccacacagcgaggacggggcgccacgacaggaaaagcggagagcacggacacgggaacacgcaacgggcgaaccaggagcagaagcgggaagaaccaacacagaggaagccaaacgccacagacccagagggggagacagagcccccgcgcccaggcggaggcagggcacgacggccacgcaaccgcagccccgggcaaggacccgcccagccgcgagagcggaacacaggcacgccaccacaccggcaagaagagagaggggcacggagccagcaggccgacccgacccagacgccgcccagcccccaaaggcgggaacaggcagagccaccagcccggcccagaaaaaaagccaaacacaggcaaaaacacaggacacaaaagcaggggcgggcacggggccacgccgaaccggccgagggggcggaccgaggcaggaggagaccagccggccaacagggaaacccgccacaaaacacaaaaaagccgggcggagcggggccgaacccagcacgggaggcaagggggaggacacgaggcaggaggagacagccggccaacaacgaaacccaccacaaaaaacaaaaaagcgccagggagcggccgagcccagcaccgggaggcgagggaggagaccgagccgggaggcagaggacaggacccaagacacgccacgcagcagccgggcaacagaggagacccaaaaaaaaaaaaaaaaaaaaaggcgggcacggggccacgccggaacccagcacggaggccaaggcaggcggaacaaggcaggagagcgagaccgccggcaacacaggaagcccgccaaaaaaaacaaaaaaaagcgggggggggagcaccgagcccagcaccaggagcgaagcaggagaaggcggaacccgagaggggagcgcagcagcgagacagcacgcacccagccggggacagagagagaccgccaaaaaaaaaaaaaaaaaaaaagaaaaagaaaaagaaaaaaaagcacaaaggacagccccaaccccaccccaccccaagggccaaaaacagcccagcaggcgcaacaaggccaccaacccccggaagaccagggcgacaccagaaaccacagagcaagaagcagacacaacacccacaaacaaaacagaacaaacgacgccccccggcaagccccaaacagaacaagaaacacccacgagaggagccccacgcccaggcggaggcagggcaagcgacagccacgcaacccgcccccgggcaaggaccccaccagcccccaagagcgggaacaaacagcaccaccagccggcggagggagacggaggccggcacaggcggaggcaaggcgcaaccggccaggcaacccgcccccggggaacgacccgcccaggccccaagagcgggaacaaggcacgcaccaccccggcaagaagagagaggggcaccagggcaggcggcgaacccgacccaaggacgcccacccggcccccaaaggcccgccggcccagcccaccaaggaaaaccaacagagaaaaagcccccacgggaacacggacgccacccgcaacaaaacacacaccaggaaaaaaacgcacgcgccacgaaaagacgggcgaaggcagcggaaagggaggagggaaagaagacacgaaggccagccggagaaggagaggaaaggcagaggccaggggaaagggggccgggacccgcgcagcgaaaggcgccccccagaggaccgacaagccaccaaccccgccccgcccagcccaggaaaaggggaagaaggggggaccagccggccgagggccggagccagaaagggaccacacaacacccacccggggcacaggccaagccgcagcacgaccacacccaacacccagcgcagagacagaggcccggcaccgggccacacccaagcgccggagggccaggggaccaggggcgaggacgggccggggacgcgggcccagcgccacacgccggcccggaggcccgggcccgacacggagaacagggaggccgccgggacacaggggggaggaaaagggagagggggggaagagcacggggagaaggcggggaagggcggggagaaaagaggcaggagaggagggggaagacagagccaccggccaggcggaggcagggcgcgaccggccacgcacccacccccaggcaagcaaccgcccagcccccacgagcgggaacagaggcacagcacccggcaagcaaagaaagagggcaccagggccaggcggggaacccgacccagagaccgccaccggcccccaaaggcgggaacaggcgaagccacgcgccggcgggaaggaccgagaggagggaggggcgaggcaaggagcagaagagggaaacgaagcagggaggaaggcgagcagacgaaaggccccgaaggcgggcaggagggacaccgaacccagcccgggaggaggggcaggggagccgaacccagaaggggacagccgggaaacaggcgagacacaccccaaaaaaacaaaaaagcggccaggagcagcaccgagcccagcagggaggcgagggggaggacacgaaccgggaaggaggcgcaggagccagacgcacacgcaccagccgaggaggaagagacccgccaagaaaaaaaaaaaaaaaaaagccccgaggaggagggcccgggggccacccgaggccaggacaaggagccgaggcccccaggagggggggggacaggggggggaggacaggggcgaggaaggaagggaagggcgaggccccgccacaccacaccaccccaggaggaggggggcgcgggggccacaggagaaggagacgcggcggcgcagcgcccgggcgccgcccccccgccgggcgggaccacaagagcagagagaccagggccagccaaggccggcaggcccgggcacagcgagcaaccgcggggacggacggggccaggaggcagcggagacccaggaccaccccaacccagccgcaggccccagcccagacaccgggccgaaccccaggccacaaaccgaaacccagacggcccggacccaaccggcccgaaccggacccccgaacccgggccccgacccgccaagacccaaccgacccaagacccccaccgaccccacccgacccgcgacccgacccgcccccaacgaccaaaaacccagaccccagaccggacccacgaccaaaccgacccaggccgagccaaccgggcccaaacccaccagagcgccagaccgaccccgccccagaccgacgcgccccggaccccccccaggagacccccccggagcccaccgccgcgccgcaccccacccgccgggcgcggcagaccagggcgggcgggccgaccaggccaccgccaccgcgccagggcggagcccagcggggagacggggcgggggcccgcgggcgggccaccccgcccaccgcgaggagcacgggacgccacgccgcacccagggccgggggccaccaggggaggcacaaggggagggagccacagcaggcaagggcagcaagggaaccccggggggggggggggaaacagcaagggcggccgacgcagagccggggggaggggagaggagcgagagagaggcaccggggagcaggacccccggaggggccagagaagcaacccaccccacagcggggagccagcaaggcacggagcccaggagaggcccaggccgccaccccaaggagcaggcagccccgacacccgccccgcccgggaggggccggagggcaagggagccgaagggccaggccaagcccgccgccaaacagaggaggcccaccccccccaccccaccaccaccaggagccaacagaagcccagaagcaccgggccgggggccgacaggcccgggccaagacggaggggggagggaagggccccgcccacccggaccgaggagaaaagccccacccggaccacacagaagggggcagccaaaggagacagggggcgggcgggccgacccaggggcgggcgaagggaggggccagagacgcaggcagcggggagggagaggccacagggacagcgcagggggggcaggggggggagggcacgggagccaaaggaaagggcgagggggcgaccccgcccaacgacccccaggacccccggagggcacagagcaccagccgcaaaggggacgcggcagcagccggcggggccggggcgggggcccgaagagccagaggaggcccccgccgcagccaggagcaggcggggcagggagggggggggaggccggggagggcggcgggaggaccggcccccgcccccaccccaggcgacgaccggaggacgccggccaaccagccaggcgccgggccagccacccacaccgcccggcgccacggcccggacccacacgggggcgcgaggcgggacgacaggaggcccggggcagggcaacagaggaagaccccaccggcaaggggcggggccgacccccaccccgccaccgcaggacaccggagccacgggccggagcgcgaggcccgaccgccagaggcgcagagccacgaggggcgggggcaagaggacaaccccacacgggacgggagcccgggcaggggggggcaggggcccggcggccccccagaccggcacaaggcccgcccgccccgcccacccaggccacccccccgacgcggaaccccccgcccccaccccccggcccgcgacgccccgcgcgccccgccccccacgcaccgcagccccgcccaaaaggcgcgaccccggccgcccccaaagagcaccccccccaaggcccccccccgcagcagaggcccgcaggcccccgcccacccccacccgcagggccacagggggacccagggcccccgggggggaacgccccgggggggggagggccggggccccgggccccccgcccgcgggcaacgcccgcgccgacgggagaggcgccgggccggcccgggccacccgcgggcgaccgccgaacacgcccccagcacgaggcacgccagcggggcaccaggggaggcaccacacgcaaccgcacggaggaggcggggggcaggagaggccccaggcggggcacaggaggggagggaggaagccacaggcgcgggccccccgggaaccagcaccccagagccaggggaccgcacacaggccaagaggacagggccccaggaacccggaccaggaaaggggcacccaaggcggggccaagccagcggccaggaggcggaggaggaccaggaaagaggcacaggggcaggggcaagagacaggcgggagcaggagaccggagacagggcacccacaagcccaaaaccaggaaacagccagggcgagggcagggggggagagagggggcaggggccgggccgccggcgcccccacccccaacacggcccccagggcggaggacgggccagggggcagggccccccggacaccgcggggaccaggcggacacagaccgccccccccacacccgccccgggccgccagccccccgcgccccgggacgggcgcagcccacagccacgccgcaagcggggcccggccgcgacgaggccagggaagcagcccgccgggcccagccggacccagggagccccccccggggcccaggcccggagggggcccaggccccagcagccaggccccgccccaccgccgaccaaacaggcaggccacccgcaccgggggccagccccccgggacgcgccccgacgggccggccaccgaagcggcgggggggcagggagcgagccagaggccgggccgccacccgacgaccgcccaccgcggggccccacagacggacaggggggagcacgcgaacgagccggcccggcagccggcaacgccacaggccaggggcgccggcccgccaggcaacgggcacggggacccacgccgggccacgcgacaacccaggggccgccgccaggaccacaccgaggggcccacgccagccgcccccaggcaaggggaccccgggagccaacgggccagccagggcgggagggggcggggacacagggggagggcaggacggcgacacggcccccacccccagggccggggccgccgggagggggggcgcgccccccaccaacggcccagggcacgggccacgccgggcggggggcgcgccccaggggcggggcgcaagagccgggccggccgccacgggggggccggccacgaggagcacagcccggccccgggaccccgcccccaccaccccaccccccccgacagcagcacccccgcacgggagcacgaggaaacgagggcaggcgcagagccagaaccggccccgacccagccgcacccagacccgacccagagcggaacccaaaacccaaaccccccagaccccagcacgccaggcccacagacagacccccccacccagaagcccacccagccccacccaacccagaccaacccccaccagagcaggaaggaaagacaccgacaccaaccgagaggacgacgccaggagcgcaggagaaaggggccaagcaagaggccg

SEQ ID NO: 232 - RNA, 3123 nt, Homo sapiens
cacacacacacaacacacaccacccaacccaccgcgagggaggacagggccccaggacagccgggcgcagacccacccccgaggcgcagccagggccgggcgggagacacggggcgcccacagaggggcacaggggaggccagaaggaaaaccgcccagggcggaacagggcgacccgaaggccagggggggggcagggcgaggccccaggcagacaaggccaaggggcaaccacagggaccaccggcagcaaggggcggcccgggcaggaggaaaccaggggggggagacaggagggagggaacaggggaggaaggggagggccaaggacgcacaggagccggggacagccggagagcaggccagggcggacacccaccacccccaggagggaggccaggcggagcggagcgggacccggggcgggaagggggagcgagacccggggcagcggggaccaagccccagggaggacgccccagcggggccagggggcgggggcagagaaaagccccgagcccgcaccgcccacgacggagggagggggcggggagacgcagccccaccagcccggcacacccccaggacccccagggcgaagcgggacccggccagccagggacccccacgccggagccgccgccccccgagccccgccccggcccccgccaaagcaacccgcccaccaggccaccgcacaaaaacccggaagcaagcagagagcggcccggcgcgcgcgcacacccgccgggccggcccggccacccggaccccccccaaaaccagccgacgcaacaaaggaacaggccccagggccccagggggcgagcaggacagcaggaggggggccccacgccccacccaccccacacagcgggccccgccccacagccccacacgcgagccaaccccccagcgccacgccaccaggccgggcgagcgggggcaggaccagcaacccaggcagggcccgcacccccaacgccacccgcaccccccagcagaaaggccgaggccgaggccccagaggagcggaccggggacgaggggggaaacgcacgagagggcagagaaagggcaggggacaaaaagaaacaggaaacagccagaggcccaccccgcacaggacagacgacagaggggcggggacaggcaccccaaccccggccccggcgcccccgccccgaccgggccccagacacagccgccaccaccagagcccggcaccacggccacaccagcccggccaggcccgcccaacccgccccccagacccacccaggcagccaccaggacacaaggcaggaccacggaccgcccaccaggcccccccgaggcagacccgcagaggcaccaagcagaggccggagggaggggagccgggggcccccggagaagggggcagggcggccgagccaaggaggggggaccaacacccagaggggcgcagaaggccgaagaggcaggaggggagcgcaggcccccagcccagaggcccgcagaacaccccagcgccaggcaccggccccaccccggaggaaaggcaacggaggcgggggggggagggagccaggccagagcgcgcaggggcaacgacagaagccgcacagggggcagcccaggccagccgccccagggcacccaggggcgaaagccacagaggagccacccagccgcccgccccggccggaggagagccacgcgcagagccgggccgcgacagcccccgcccgccgggcaccccaggccaggcccaggccccaccaggccaacgagccagccaggggcccagcccgcccccacccaagagcccccggcgggcgcaccccgggcccgccacaccccgaccaggccagcagggcaggggcaggggaaacccccacccacccgcccgcgacggagaggggggcggggaagacgcagccccaccacccaggcacccccaacaaccccagggcccaaaaagggacaaggggccggcccacgcccccacccaccccacaaagaccggaccgccacagccccacccaccagccgacccccggggccagcgcagacaggccgggcgggcgggggggccaggccagacgaggccccccccccagcgcacggggcgagaggacagcagccccgccgggccaggaagcagcggcggggcagaaggggggccaggcccagggcacaggggcggcccccagcccccgcacgcccgcagccagggcaccggacaggcgggggggcagagaccaggacccggacccaaggacaccagaagaggcgggcaggacccccggggaagggaccggccccaagggaaccccacgaaggaccacacgagcccacagaccagcccagaggaggccagcagaggccacagaaggccagagggaccagggccccagcacagaggcagaccacgggcccgacggccggcggcagagccccagaggcagccacacggagccagagggacccaggcccggaggaagcacgccgaggccggggagaaaaggcgcagcggcggggacacgagggcggccggagggcacgcagggggcggggcgggagcagggcgagaggacccgagggagggacacgagcgcgggcgggcggacggcggcggggcaccggggcgggcggcaggggcgcagggcggcggcacccgggggcagggaggggccgggcggcggaagggggaccggaggcccgcacaggcgggccggaacaggacaaacccaccccacccccagcaggaggccccacccaaggcaccaaagcccagcccaaggaggaggggaacaggggacccgggccagagacagcaaggaggccaggccgggcgcgggcaggggggccaccaggggaggggcccccccaggccccaggcggggccagaaaaggacacgacccaccgaggggcgaccggggcagcagcaacccagggaggggggcagcaggcagggcgggcggggggcccggaggcgcaggacgcggaggcaccggggccggggcggagggggccacgccgggggggagggcccgggccggggcagcggcccgcccccagccaggcccgaggacaccgagggcccccgacaccagcacgccgcgacggagagcgga

SEQ ID NO: 233 - RNA, 1305 nt, Homo sapiens
caagggcccaaaaccaagcccaccaaaaacaaaaagcaaccacgggaagcaaggacagaaagacaaggagaaggagaggaacacgggaaacagggcaaaaagaggccgacagcaaagacagcgaaccaagagagcaaagcagcagcggagaaaaaaaaaaaagaggaagagggccaacgacggaaaaaaaaaaaaaggaaccaaacccaagagccggaagaaaggaagacaccacgaccgcagagggacaaacagcccacacaggcagcaaaaaagcaacaaaacagagcccccccccaggaaagccgagcaggcaagaagaaaaccaaaaaggcaaaacagaaaaaaggaaggagaaacgcaggaaaaacaaacagcgaacggcacgaacgaagaaaaccgcaaaaacagaaagagaaccccgagaaggcacaaaggagaagagagaaaacaaaacgaggcacccacccaccggagaaaaggggagaacacaggaaaaaagagacacgagggaggggaagaaagcccgagaaggaaaaaaaaaggaaaaagcaaaacagaaagaagcaggaaaaaagggggaacaggcacccgagagagaaaggagaaacgaagcagacacagaaagaacacccgacgaggccccaaaacaaagcaggcaacccgcaaggaagaccagagaaccacaagcacaggcccaggaaaccaaagcggccaagacgaggaacaagccagaaggaaaaaaagaacaaacagaacgagaaagacagccagaaagaaaggaaacaacaggacccgcggacagccaccaaaagcggagagaaccgaaccagcaaaacgacacaaagaacagaaaccacaagggaaaaaaaagacaaaagagcgggcgagagcagggacacacgagagcccaagacaccaaaaaaaaaaaaagggcagagcagagcgcagcgagggacgagcgaagacccacgaacacgggcaaaaggaaaggcaaggcaaaccacacccagaaagaagggcagcccccagggagcaaaagcaagaacgaacaacaaccgacaaaaagaggaccaagaagagggagccacgaaaaacaaacagcaagcgacagcaccaagagaaacagagcagaagacacaggaggggacgcacccacagcgcagcgccaggaagaaaaaccgaacgcaaccagcgggggcagacaagccaaggaggcaaacccaaccccgaagaccagcacccccgaccaccgcgcggaacaccacaccggaggagcaaacgggggagaaaacaacaacaaca

SEQ ID NO: 234 - RNA, 7381 nt, Homo sapiens
acagacaggaaaaaggagcagcaggaaagaaaaggcagacagcccccggccccaaagacgaaacccaggaggcaggaccgaaacgcacacgacccagcaccaacaggagccggagaagaaacagaaaaggaaacgaaacaaaaagaaccacccaacgaggccggccagcaccacccaaggggcacgcccaaaccggaagagccccacaggaagccgccccacacccccgccgagggaaggccgccaccagcgaccaccccccggagggccgagacaccccagccacacccgggcacaccaccacaccgcccaacagcaggaggagaagaaggcaagccgaagccaacgccgacgaaacggccagccaggcggggcaggaagcggggccacgaggacaccccgcgaaaaggggcaaaaaagagcaaacacaggaggggaaagagaagaagcaagcagaaggggcccggacagagagagagggagcggcaaacaacccgcgcggcaacacccagaacagcagggcaaagaagccaggacccaacaacgaggcccggagcaggaacggaggccaccccaaccccagcaccgccaccagacagagcacaaaaggaaaaccaaagaaacacaaagcaaagaggaaagaaaaacgagggggaaaagaaaaaaacaaaacaaaagcaccgggagggggaaaaggaaaaggcaaagcacggggaaagaaacacacaaaaaaaaacgaggcaagacagagggacaaaggcagagcaggcaaaagaacaaaagaaaagaagaaaaaggaagaaaccagcccacaaagagcacaaagaagcaacagacaagaagcagaaaaaaagaaccaccaaacgagaaagccaaggcagaagaaggacaaaaaagaaaggccaaggcagggccaccaaaaaaaagaaaaggaaacgaggagacaagaaaggcaagcagagcagaacaaacaaagcacacaccgggcgaaagcacggacgacgaagcggcagagaaaaagaaaagaacacaggccgaaaaagagagaaaccacgaggcccccaagcccgacccagcccagggcaacacaacgaccacgaaccccagcccccagccccggagcaagagcaccccacaggaaggcagcaaggcaaagagaagggcaagaaaaccgccgagggggcaggcagaaagcagagaggcggccaacccggggggacccagcgggccccaaccacagaggaagaggaggaccaaagaccaaacagccaggcgaaagcacgcgcaaaaaacacaaaaaagaaaaaccaaagcgccaggaaggcagcagccgccccagagagcccaggaccagaaccccacccgcccggcgacaccagggcccaaacaacccaggacacagcccgcgaacgcccccaggaaaagcccacaggaggcacggcaccccaccccccaccaagacccccagaagggcccaggaaccagacccggcaggggaccccagacagcagacagaaagccaaaagaaaggcacaccaacaaggccggggcgacagaggccccacgccaccggagaaaagggcgacccggcgccaggaaaaaacgacagaacccagggcgagaggggagcagggaggccccggggagggacccagcgagacggaggggagaggagcagccaggcgaagaacagaagaaagaggccaccggccaggcgaagcagggcacaacaagccacaaaccgaagcaaaccaaaagaacaaaaagagaacgcacgagcaacacgaagaagaaagaagaaagaaaaaaaagagaaaaaaaaaagaaagaaagagagaaaaggagacccgccaaaaacaaaaaaaggccgagcacagggccacacgaacccagacgggaggcagaggcgggcggacaccgaggcgggagaagaccagccgaccaacaggagaaacccgccacaaaaaacaaaaagccaggagggggcacagccgaacccagcaccgggaggcgaggcaggagaacgcgaacccgggaggcggagagcgccagcacccagcgggcaacaagagcgaaacccgccaaaaaaaaaaaaaaagcccgaggcaggaaagaggggagccaagaaaagaaagaaagacgcacgggaccaggggaggccacgccggcggccaccccagcacgggaggcgaggcgggcagaccgcgaggcaggagcaagaccagccggccaacagggaaaccccacacaaaaaacaagaccccaaaaaaccaaacacagcaaagcacgaagaaggaaaccaaaaaggacaaaacaaacaaaaaagaccacacaaaaaacaggccaggcacagggccaccaaacccagcacgggaggccgaaggggggacaccgaggcagaagcaagaccaccggccaacaggaggaaccccacccacaaaaaacaaaaaaagcgggcgggggcacagccgaacccagcccccggaggcgaggcacgagaagcgaaccaggaagcaaagggcaggagcgagagcaccacgcaccagccgggcaacagagcaagaccgcacacacacagcacacacacacacacacaaaagcaaaaaagaagaaaagaagaaagaccgagaacaaacaaaaggaacaagacaaaaacccaggcggcccggccacagcaacaccagcaagcaacaaagacagaaccacaaagcacaaggagagaaagggaccaagaaacagccaaacgggaaggagaaaggcaaaagacaaaagaacagggggaagggaggcgaggcagcgcacagcggagggaagaaaggaccagggacccagagacaggggcacacacaaccaacagacccccccgaaacagggcgcggcccaggcggaagcaagacggacacggccacagcagccggacccgggccaagcgacccccaccacacccccaacccgagagcgggaccacagggggccaccagccgggcaaaagagagaggggccccaggcccagcggccaacccccgccaaggacccgcccagcccccaaagggggaacaggcagagccaccagccggcaaacagacaaagacagagaaggggggcccggccggaacgcaaccaaagcaagaaggggaggggaaaggcgcagagagagggccgaagggagcagagaacgagaggaaggggacccaggcaaagaaaagggcagagcagcgggcgcggggccacgccgaaccagcacgggaggccaaggcgggggcacgaggcaggagacgagaccaccggccaacagagaaacccgccacaaaaacaaaaaaaagcgggggggggcacgcgccgaaccagcaccaggaggcgaggcaagggaagcgaaccggagaggcggagggcgggaaccgagacgcaccacgcacccagccgggcaacagagcagccccgccaaaaaaaaaaagcaaaaaaaaaagaaagaaaaaggaaagggcggagcaaaggcaggggcaggaggcacggagcagaacaaggcagaggccaagcgcacaggaaggaccgaaagccagggggaagggagaaagggaaacccggaaggccaggggggaaagagggagagagccggacacggccaagaggccaaacggcggacgcagagccacgccgaaccccagcaaggaaggccgaggcagacagacacgagaccaggaggagaccagcggccaacagggaaaccgccaccaaaagacaaaaaagcgggcaaggcgcacgccgaaccagcaccgggaggcgagcagaaaaagcgaaccgggaggggagggaggagcgagacgccacgaaccacccgccgggcgacagaggagaccaacaaaaaaaaaaaaaagcaccagcaccgcacagaacaagcaacaaccgcacaggcacagacccaaaacaaagaaaaaaaaaaaaaaaaaaaaaaaaaggccaaacacccacaggcaagggagccaagaagaggaagcaggaaaaccaaggagacaaggagaacgaaacccgcaagagaaaaggcggagaggagaacagccacccacaagcaaacagcaaccaacgggcacacagaacaccgcaaagcaggaacaaggcaaacgccacagcacgcagcggagaagcccccaccagcacagaaaaagaaagaccaaggaacggaccacacgacagcgagcaaagaagggcgaaccccccacagccggagaaagccgcacacacgccaacgagggcagaaaccccaacaaaggaaaggggaaccacccacagaagaggaggccagaggaaggcaaagccacaggaaaacacagggagcgggacgagacggagccgcgcgcccaggcgggaggcgggcgcgacccgccgcgcaagcccgccccgggcacgccacccgcccagcccccgagagcgggacacaggcgcccgccacgcgcccggcaagaagagagacggggcaccgggccgacccgacccggaccgcccgcccggcccccaaaggcgggaacaggcggagccaccgcgcccggccggagcgggacaacgcggggagaccacaacccgggcggccccggcaaagagcggagagcgggcagaacagagggcggaggagccagagcgaaccaaaagcacaaagaagaggacaggcaggaaacccaaaggccaccaaagaaagaaggccagaagcgagccggaggcccagccacacggccaacgccagccccaaagggccgagccacccggcagcagcagggcggacacccccgccagaagcccgccccgggggcacgggagcaccggggccaaggcgaccaagcagggcccacccccaggcagaagccaggaggcccccaggccggcaaagggggcacgacaggcacagacagccaccgcgcagccgggacagggacaccaccggcccgcagaaaacagaaagaagcacggaaaaccagaacagcaccggaagcagaggacccgagcaaaggagaagccccaagggccccagaaaaccggccccccccccccccccccccccaaccaccacacaacacaaccaaacagggagcacccccgggccagccggcaagcacgaacaccagggcaggcgccggcacaagggcacacagcccaggggcaagagggcgagaccagcccggggaccggccaagcggggcccagagagcagcacgccccaaaggacccaaccccaaaagcacgcagcgcggcgcagcccgcacaaagaaaaacccacaggcccgcccgggagcccagccaggcaagacagacacaaaaaacaaaaacaaaaagaacacccagcgggaggagacgggccagaaacaaggacaaacagaggacagggcagggcaaacccacccagcccaaagccacaacgcacagcggaagaggcagagcacacagacacgagcacagcccgacccagcacagaccccccgacccagaacaagccggcccccaccgaaggccccccgaccgccagccccagccacccagccccccccccggcgccaaacccaacggaccaccgcccagccaaagcgcaacaggaagaccgcagcggacccgcccaggcgcggagccagcagcacccagaggcgggcggggaagaacgagcaacagcccgggccaaccagaaccacccagggcaacacaagccacacaaacaggaaaagcgaaagaaaaaaagaaacacgaaggcaaaaaggcgacgaacaacggagagacgccagcccgggggaaaaacagacaaaagagcacccggagcacacaaaaaggaccaacaaaaagcaaagacaggccaggcaggggccacaccgaacccaagccggaggccaagagggaggaccgcgaggccaggaagagaccagcgggcagcaagcaagaccgccaaaaaaaaaaaaaaacaaaaagaaagcgggcaaggccaggcaggggccacgccgaacccagcacgggaggcgaggcaggcggacaccgaggcagaagcaagaccagccggaaacggggaaaccccacacaaaaaacaaaaaaagcggggggggcgcggccgaacccagcaccgggaggcgaggcagaacgccgaacccgggagacagagggcaggagccgagagcaccagcacccagcgggcaacaagaggaagcgaaacccgccaaaaaaaaaaaaaaaaaaaaaaaacgcgggcaggggcaggagccgagccagcccaggagcgaggcaagaggccccgagcccaggagcaaggcgcggagcccgacacgccacgaccagccgggagagacagagcaaaccgccaaaaaaaaaaaaaaagacaaaaggaagacaagcgaccaggaaccggaaagaaaaaaaacaaagagaaacacaacaacagaaaccaagaaaaaacagagagggaaaaaagaacaaaaacaaaaccaaaggacagcaaggcacagacccacacgagaaaccacacaccaccaccacccagaacccaccaccccaacgaaacggacccaaaacaccaacccccaccccccccacaagaaaaaaaaagaaaaaaacaagaaaacgcaagccagaaaaaagaaccaaaaacaagaaaaaacacaacaaaagagcacaaaccagaggaaaagaagacaaaaaaggcaaagacaaaggccccaaaaaaaagaaaagaaccacccacaccagacacacaaagcccgaaaaagaaccaagaaaaaaaaaaaaacccaaaaacaagaagaaaagaagaaaggggacagagacacaaaaaacaaaccgaagacagaagaccgagagcaaagaaagagaaaacaggcggggaaaacaaacccaccaagacagcagaaaggaacaaaaacaacgaaaaaaacaagcacccaccccacacaacagagaaaaaaccaggagaaggcaagcaggaaaaaagagagagaaacagcaggggagcagaaccggaagcacgaagcccacacagaaacacacgaaaggcaaagcgagcaagaggcgcgcgagagaagaaaagccgaaaacaaaagggaaggccggaggaagcgaaggaaaaagccaacgaggagagagggaagagaagacccaggcggcccccagggaagaaaggggcacgagcgggaaagagaaaggcagaggaggagaggacccgaagaggcagggggaccgggaggggaacggaccggggacccaaggagaggagggagcaggcccagagacagcaagccacccgcaccacacggggagcccggggacgggccacaccagcagacccggagcacagcggaaccacaggccaccggcgaagagccacaagcagaaaccaccagcaaaagaacacccgagacgg

SEQ ID NO: 235 - RNA, 5050 nt, Homo sapiens
agaaaacaagaacggaaaaacaaaacgaagcgaaaaaaaagaaaaagggcgaggcggggccaggccacacgaaccaggagggaggccgggaggaagagcgaggccaggaggaaaccagcggggcaaccagcaagaccacaaaaaaaaaaagaaaaaaaagccagggggggcaggccgaaccagcacgagaggcgaggcaggaggggcgagcccaggaaggaggcaaggaacagacacaccaagcacccagcaggcaacaaagcaagacccgccaaaaaaaaaaaaaaaaagacgagaaaaaggagcagcacacaaccgaggaccaaagaaacacaaagaagggaggaaagaaaagccccaacaccaaaccacaagcaaacagcaacaacaaaacaaaagagaaggaggagaaagagaaaacaacaggaaagaacacacagacacgaaccgcaccgagggcaacccaagagagagacagaagcgcccagagaacacaaagcccgcgggccaaaaaaacaccacgccaagagagccaaaggcaggggggaagacccccacacagaacaaaaaacccaaaaaggaagaacgggggaggggggggggggagagacagagccaccgcacccaggcggaggcaggggcaaccagccacacaacccgccccgggcaaagacggccagccccgagagcgcgacaggcgcgccaccaaccggcaagaagagagacgggacgccagggccaggcgggccggccccaaaggcgggaacaggggagccacgcaccagccaagaacaaacagaggacaacgaaaaaagccagccaaaggacagagcgagccgaacaaaccccgcgcaccaaagcacagaagaaggaccaagagcaccgggcgaagagggggaagccggaccccggaacaaagaacacaaagaaagcccagcgagggcgacggcacgaaccacagaaagaaagaaaaagaaggagggaaaaagacgcaaagaaaaagaagcaggaaccgggacaaaaaaccgagggaacaggggcccacgccgaaccagcgcgggaggccaagcggggagaggaagccaggcagggacaagccgggcaagaaggagacccgccacaaaaaaaaaaaaaagccaggggaggcacccgccgagcccagcacgggaggcgaaggggaggacgcgagcccaggagcaagggcaaaacagagcacacgcacccagccgggcaacagaggagacccgccaaaaaaagaaaaaaaccgggaaacaggacacagccgagagaaacagcgacgaaaacaggaacggagcagacgagagacacggaagagggcagccaaaacaaaagggaacaaaggaaaaggagacacccaccggacagaaaaaacagggagagagccagggagccagcagaggagagcgccagaacggaaaacccacagccgaccaggaaaaagagaagaaggacaggaaaaaaaaaaaaaaaacagaaaaaagcagcaaagaaaaacccaaaacgaccaaagaagaagaacaccacgacggagcccaagagaaaaaggcacgcagcagacagaaaaccaggaagcaaggacaggaagagaagcagaccaagagggcccagaaagaacagcaaaaaagccgccgcaaccgaaaccaaacgcaaggcaacacaagacagccgaaaacgacggaccaaggcagagagacaaaggggagaagccaacaaaaaaaagcaaggggcacaaacccaaaagcagaacacgagacgagagagacaaggcaccggccaggcggagaggggcagcaagccacgaagcgaacccggccaagcaaccccccacccagccccgagagcgagacacagcacaccaccagcccagcaacaaaaagagagaggcgcgggcccaggcggcgaccaggccaagggacccgcccccccaaaggcgggaaagacagagccacgcacggccaaaagcagaaaaacacccagcacacgaccaaaagcaggcaaaaaaccgagaaaagagaaccaacaaaaaaacaacaacaaacgaaccggaacagcacacgcgagagaaaggaacagcaacgagacccgacaaaacccccagcagaaaaaaacagaaagcaaacagggcaaaaagaaaagaggggcaaggcagcaaccaaggaagaaaaagaagagcacaaaaagccagggaggggaggagaagcgaaccgaacacagccgaaagagcccaaagaaacaggccgacagaccaaaggccaccagagaaacacaaggaacagacaagcaaaggggaagccagagacaaacaaagaaaggcaacaaaagaacggggcggccccacccaaaccacgaacgagccccaaacccgaggcagggagggacgggggaggaagaacaaggggcaggccccagcgccagaggaagccagagacggggaaaagggcagccccgcacacaccccgccacgccaaaagacgaacgcccacaccaccagaggaggccccccagccaaggaaaggagcagaaaccccaaaaacccgaccgggagcaagcagcagagaaccagacaaacacaccacaacaaaaaggcgaggaagggaagggagaggggcaggggccaggcgagggccaaggcagacaaggagggacaagacaaacgggaaggcaaaaaacaaaaaaacaggcgcaaaaaacaccggcgggccaggaaagcgcagaaggcaagagaaggggagcaaagcagggcaagaaagaaggggcgaacagggaaagggggcaagggagaaaagcagcaggcaggggagggagaaacagcagcgaggaacagagaaccgaacccacgaaccacaggcagagaaagacaagaaagacgcaaggagagaacacacaaaaccccaaaaacgacaaacggacaaagggggcaggaagacagcgagaggaagacaagcagggaggggcacgagaaaaacgagaacagcagggggaacacaagcccccagcagaaaagaaacaggaacacagcacgcaccgcacgaacacagaacaccccaccaacgcaaccaaaaagaccgaaaggaaaggcacaaacaggccacaccacaaggaaaacgaacagaggaaacaggaagcaagacagaaagagaagaagaccagaaaaagcaaaggacccgacaaacaaagccaaggagaacaagaagcacaaggaaaagccccgggaagacaaggggaagaaacagcccagcccggagcaacacgcacggagagcaccgagcaaggagggcacagggagaaacccaggaacaaagaagcgagacgccaagcagcagccaaccagagaaccacgaagaagacgaaaagaaacgaaaagcaagggaggagggaggaagccaagagagaaagaggggggcaagggagagaaccccaggaagcacaccaagagccaaagccagacaaagaagcaccccacccgacacagacccgaggagcaccggcccaggcggaggcagggcacgaccggccacgcaacccgccacgggcgagcgacccgcccagccccgagaccgggacacagggccgccaccgcaccggcagaaagagagacaagacaccacggccaggcggcgaaccgaccggaccagccgcccaaccacaaaggcgggaacaggcggagccacgcaccggcccacagaacagaggcaaaacacaaaaacaaaaacaagaacaaaagagcgaacagagaaaaaagaggaaagagcaagacgaagcagacaagccaaacgccccccccaaccaaagaggaccaggcaaaacaacccagagcgagaaaaaacaaaggagaacggaccccccccaggagaggacaagagaaaaaccgaacaaagagcaagaggaagcaaagagaagaaacagaacaaggaagaacccccaggaaggacaggagagccgaaagaaaagagccacccagcgaggcccgagggcgagaagaaacaaagcgggaggcaggggagaaagcagagagagaaaacaaaaaggcaaagaaagccagggaagcgaaaaggcaagaaagggaaagagagagggcagaaacggaaacaagccagaaggcgaaaaagggaaagcaagagaaggcggggggaaggaaacggaaaaccaaccccggaacgaaacccccccagccaggacagggcaggagagccagccaaaccagagaccgccccggcaacgcggaccgacccagccaaggaaccaaaaggccgccagagcaggcgcgccaaccgcccacaccaaaacaaggagaaacacgccaaggcaccagacaaaaagcagaaccaccgacccccccccccccccgcccccccccccccccccccccccccccgccccccccccccccccccgagacaggacagcgcccaggcgagacagggcaaacaggccccgcagcccaacccgggccaagcaaccccccaccaaccccgagagcgggacacaggcaagccaccagccggcaaaaaaggagacgaggccacaagcccaggcgccaaaccgagccaagcaaccccccccagcccccaaggcgggagacagacagagccaccacgcccagcccccgacagaagaaacaaagaggagcccacagagcaaagaaccggggacgaaaaggagagaacccaagcaggcaaccaaggcaagagaggccagaacagaaaaagggaccaggaagaaaaggagaggcccgagagcaaaggcaaaacaccaggaggaggaaagcagacggaaagaagcgagcagaagcgggggggaagagcaaagaacaaaacacagaaaagcacgagaacagcccgcacacaggggcagcaaaggagcaaaggccaagcaggcccaacgccaagaaaaaacaccgggagggcgaaagaaggccagacccccgaagacagggggccgaaaaaaggggggagagaaagagcagcaaggccggaaccagacagagaaaaaccaccgaaagcaagccagaacagacagagacacgggg

SEQ ID NO: 236 - RNA, 17565 nt, Homo sapiens
ccagacacaacagggacagaagcagcaagaggcaagaagaaaaaaacacagggaaggaaaccaggaaagacacccagcagaggccgagaccccccacccaagccagccggaaggccccacacggggaaagcgccacaccagccccaaccaaagcaggcgcgagccccaaacagaccgcacggaccccgaccaccagccaacaacccgagagaaaccccggcagagagcgaaggcacaacagccgaaacaaacccccagcaggagaaagccccaggcgaaaaaccccacaacagcacaggcgacgaaaacagaagacaggaaaagggaccaccaaggacaaacaagaaaagccaccaaagcaccgaagaagagagacagagagccaggccagggcacaaacaaagaacagggccaaaaggagcccagagcccaaagcaaaagaggggcagggccagaacccgcaaggagcgagaaacccaaaagaaaaaggagaccaggaagacaggaaacagagagggggaaacaagaaagggggcaaggaaaagggagaaccacagcaggcagacggagcagggaaaaggaaaaaaggaacaagagagcaaaaggaccgcagagggaaagaaagacaaacaccaagcaacccaaaggaccgacacaccaaccgcgagccaccgagagaagacaaaaccagagcggccgaggagagcccagggaaaaaaccagaagacaagaaacaagggaaagaagggagaacgccaaaacagaaacacagaaaagaagacacaaaggaaaccaagagaagagaaacccaacaaaccacaaacagggaacgacaaacccggaaaggaaacacaaaaaaaggcggaacaaaaaaaaaaacaacaaaaaccccaaaaaaacaaacacacagcaacacaaaccccacacaaaacagaaaccgaaaaacgaaaggcgaaacccgaaaagaagcaagagaaaaaccacagaccaaaagcacaaaaaaaaaaaaaagaaagaagcgcacagaacgaagccgaaaaacaaaacaagcacaggaaaaacggagaaaaaacgaggcaaaaaaggcaggaaggaacgcacgaagaaaaaacggcaggagggaagcaaaaagcacgaagaaaaggcgagcaaggccaaacaacggggaaacgacaacaaaagagaaagagaaaaaaaaaggaacaaaccccccaaaacagaccgccacccaaaccagaaggaggaggaggggggaaaggaaaccggcacagaggaacaagcaggccagcccaccgcaaagaggagggaaacacgcagcacagcccaggcccaggaaaaacccaaaaagcccccgcccccccccaaacccccaacccaggcgcgaaaagacaacggagaaaaggcccccaccaaacacgggaaaggaaacgcaaaacaggacacacagacacggaaacaccacgaagaagaagaaggaagagggggcagggagaggcacaaaacaacaggggcgggggggaaggcaaacaacagggggggggggggggggggacacagagcaagcaaaaaagggaccaaccccaacaagaacaaggaaagaaacacggcagggaaaaaggccgaacacacaacacgcggcgggaaaacaggaaagggcacccagcagcaccacagaaaccagagaacaacagcccagaacccggcacagaagaacagcagccacagccaacaggaacagaaagacagcagaagcaaacacacaaaagggccaaagaaaaaagggcacccacccaaaggaggccacgaagggccaaaaaaggggcagacaaacaaagagagacgacacaggagcgagcaggccaaagggaggcgacaccacgaaaagggccacgagaggcagggggggacgagaaaaagcaagccagaaacgaaacaaacaacagacaaaagaaaaacgagaaaggaaagaacaacgcacgcacggacaagaggcgcccacccacaacacgccccgacaaccacagaacaacagaaagaccaaagcacgcaagagcgaggacggcaagagccaaccgcccgcgcgggagcacgggaagagcacggagaagagcacgagaggcagggaaagcacaaacacaccaacagaaaaaacacaaaagggaacaaaggaagggaacaaacaaaaaggaacgcaacggagaaaacgaacgggcagacacagcacagcaacccccgcccccgaaaaacagcggagcaaaaaaggcacaagcagaaaaacgaaccacgaccggaaaacagagagaaaaacgacagccagccccaagcaagagaaaccgggggcagcgggggcgacgggcaggccaggccggccgaggaaaggacacggacccgggcaccagcagcagcagcagcaccagagaaggagagaagaaaaggaagaaggaaggaaagccagagaggaagaagaagaggacgacaaaagcaacgacaaaggacggcagccgggcccggcaagagagccacagccccccaccaacgacaccaaacccccaggccccgcagccaaacacacccaagccccacgccaaggcgaccggcagccggggaggaggccagcacaagaggaaaaggcaccagagaaacaaaagacaaaaagagcaaaccccacaaagagccccccagcccaaaaaagcaggaaccacggggaccaaagggcaaaacagccgaaaggaaccgaggccccagcaccagagaccaggaagcaccaaacacacccacaccacccccaaccccccagcccaccccacaccaaaagcaaaagcaccaaagggagaacaaggcgcgccagccacccagaaaaaacagagaagcagaaaacaagcaggaaagccgaaacaaacggaaggcgcagacaggaccaagcaaagccaaagaggcagaagggggaaagggcaagagggggaaggaaacaaaagacccaaacgagcccaaacccacaacacacaaccccccacacaaaaaaagaaagaggaagaggcacaacaaaaaggaaaagagaaggcacggaaacggcccacaaccaagaaaaacggagcaaggggggggccgcaacagaaacgcgagccaaggggccaggggcagagccaagggaagcggaaaaggggaacaagagagagagacagaagaaaggaaaaaggaagaaaagaggcccccagccgcagacagccaagacggcgcagagccagaaaggaaggcggcggaaaggccccagaaaacccagcacaggacagcgggcccccccccccagccaaagaaaaaaaacacagaaaaaacaaggaaaaaaaggaaaagcagaacagccagggcacgcccccaccacaggagcagaggaggaaaccacagagcaaagaggagggggcaagacccggccagggccgccccaccccgagggcggggggcccacaccacccacagccacccccgggcccgccccccgccccaccaggaaggggcgcgagaaaggcagagccaggcagggaacgagaaacagaacaggagggccagaagcagaggggaaggagacaggaggcggcccccaggcaggagcagggcccggcagcccaccaggagggaaagggggcccacgagaggggaagcccaccacaaccggagacccaacccaggccaccaccagccccgcacaggggcccccagcccaagaaggcaagagagaagagaggcagagcccggcggcaacaaaaaagggcaacgcacagcaggacagaaacaaaaacggccaaccaaaccaaaaaaaaagcagggccggggcgaaacgacagcgaaccaggcaaggcaaggcagggggagggggaagagaaaaggggcccaaagggaagacacagggggaaaagcccacacaaaccacagccagggacacaaaaagcccaaaaaaagaaaaaacaagaacaacccacaccacgaaacaaaaaaacagcaggggacaaacccgaacaaacaaaaaacaacaaaaacccaacaacacgcacgaacagaaaacccaaaacgcagcaaccaagggcaaaccgaagcaaaaagccaccaaaaaaacagcgaccaaaaaagcacaaaaaagaaaaaacacaacaaaaaagaccccccaaaaaagaccacaaaaaaagagaaaaaaccaacaacccccaaacaaacccagcagggcacaaaagaaaagcggcaaaaacaggaagagcaaaacaacgaaggaggaagacagccaccccaccccgccaaaacaaaacaaaaccagaaaaaaaccagcaaacaaaacaaagaagagcagggcaggaaaaaaccgcgccccacggcagagggaaacgggccagggaggggaaggacgaagggagacaggcaagaggacaagagccagcaagcgaaccaagagcacgacagccccagggacaacaccagcaaacccagagaagagaaacacagaggagcacagggaagcagaggacgaagcggccagggacgacacaacacgaaaaaccacccaagcaaacaaaaaaaaaagcaaacaaaaaacacacacacacacaaagacaagccaagaaaaccaaaagggagccaagcaaagaaaagggagggaaaccagggagaggaaggcggggaccccaaccccacaaaccggggcaaagcaaaagacaagaccgcccagaggaagccgcccaccccagaacaccaggccaacagcagagaaacagacacgagaaaaccaggggagaggaggacagacaaaaacaagcgccccggcagcgccccagggcggcgaaaacaggaaaagccaaaccaggcaaaacaaaaaaaaaagaagaaaaaacgccccccaccaaaggaaagacaacaaaagacaaacaaagaacaggcagccaagaaagcagaggcaacccaaaacaaagaaaacaaaagacaaacaagaaaagaacaaagagaaggagccaagaacaaaccaacaggagaggcaagcacggaaaaaacaggaaggcaccagacaaccaacaagaaccacgcccgccccaacaacaccccagcaacaaaagaacaaagaaggcacagagaaacaaaaaaaaaaaaaagaacaaacaggggacgcaccagggggacaaagaaaaaaagaccaaaagacaagcaaaggaccacaaaaaaaaccacaaaaaaagaaaaaacagggcaacagaaaaagaaaaggggaagaaagaaaagaaaaaaacccgacaagcagcccagaagcagccccaaaccgcccagaccaccccaagcccaccaagcaaaggaaagaaaacaaaaaaaggaacagggggagccagccaaagccccaagagaggggacagaagaccaggggacagcagagaaacggcggacacaggggagcgcacggaaaaaggaggaaccagcccacgaaaagagagaaaccaaggaaccaaagaccagaacaaaaaagagagaaaaaacgagagaggacagggggagagggaaagaaaagagaagagaaacaggcagaccgggcaccaccccgcacaagcaggcccggcggagcacaggaagcacagaccccaagcccgagaaaaagcagccagcccgacagaaccagcaggccccggagggcgggggcggagggcccccccgcacacgcccacggcccgcccaaaaagcagagaaggggcaaagcaaggcaggggccacgaacaaccaacgagacaacacacagaggccaaggaaacaaaaaaaaagagaaagaacggaagaggagccggagccaacagggaagcccaggaaaaaaagaaggagaaaaagaaaggacgcagaaaaacgcggcaacgagcgccggcccagcaggcccagaaaggagagagaacaggcaaaacacaaacacagcaccagagcaaaccgccccaccaagggaacgccccaaacccccagaagacggaggcaaggacagaaaagcgaacgaaaaaaaacagaccacacgacaagaaaggcacacacaacagacagccccaagcaccgccagggcagggcgcaaccacccagaaacacaacaaaaccagacgggccaacacgaacaggccaggcgacccccaccggcacgcgggccggccaacagaacccgacgcacggacagcgcccagcaccaggaccgggcaaagaagccacccccaggaagcccccacagcccaggcagaccaaaagacaacaggcaagagggacaaaacccgacaaaccaaagcaaaagaagcagacgcccgagacaaggcccgaaaaccaggaacagaaggaaaaccaaggaacccgaccaccaaagcaacccgagccggagaccgggagagaggaaagcgacgaagaaaaacgggacagaacggagggaagcaaacaaggaagaagccaaagcccaagagaagaccaggacagaaggaaaaaaaaagcaacaccaagcgggggcagcaagcccaggaacccaaacacaagaccgaaaagccggaagcacaaaacagagaaagcgaggcaaggaacagcagggaggccaaaggagcgacaacaaggcgacaaccgaacaaaaaacggaaagagacggacggaagaaagaagagagagaaaaagacaggacaaggaacagggaaggggcccaagagaaccaaagagccccaaggacaggcagagaaacaacaagccaaagggggaccccacggccagaacccaaaacgcacgagccagaagagcccagcacaccggaacccacacaacagcaccggagaaagacaaacagacaaagagcgcaaaccgaaccaagaaaaaaagaaaaaaaaaaaaacaaagaaaagaggaaaaaaccaacaaaacaaacaggcacaaaggccgcagaaggaagcagaggagcagcagagcaaccaccccaagccaagggccagcgcaaaaaaacccaccacggcaggagcacgcccacgcacaaaggacaccacagcaagcccccggagccgacaggcacccagggaggagaagcaaacaggcgaaaagaaccaaaggacaaggcagggaaaggagcacaccacgccccgccacacaaaaggcacaagcaaggggcgggaggaggccaaggcaaagaccacacaacaaggcccacgaaaaccacgagagccagcagaaacaagagggaaaccaaagcaagcgacaaccagccacagaagaaaacagaccacagcaggggccaggccgacaagaggacagagaccacagaccgccaacccgcaagacaagcagagaaaaaaccgcaaggagcccacccaaagccccccaacgaacacaccccccagcacaagaagacacagaggcaagcaggcagcaaaggcaaaaaaaagcccaaaacccaaagccaaccaaacagccacaaaggaccaggcacgaagggggaaacagcaccacacaggagcaccggcccggcagccaaagagagaaacagcagcaccagacgaaaacaaagccaaaggcagaaaaaaaaggaagagcagaaaacaagggaaagaagaggaaaacagcaaagaaaggcagagggacaaagcacagcagaggccaagcaaggggaagggcagaaaaagaaaagcccgcgaaacacggccaaaaacaggcgggcagaaaggcaacagcacccaagggcacaggcagcagccaccaacaaacaaaaaggacacaggagcaccaccacagacacccccacccaagcccaccgacacacaaaaacagaaacaacacaacacagaaaccaaggccccccagaagacaagaaaaggacaaaagccaggacacaccacacagaagacaaaaaaacaaaaggaaaacagcaaaaaagagcgcagaccccggaccaaagaagaaaaaacacaagaggacaaggagcacccaaagaagcagaaaggggagggcaaagaggacggaaaaagagagacacccaggaaccgccaggcgggccacccccaaaggaagcgcgcgccaacccacacagcagcgaagccaagagaacaaaggagaaaaagaggggaaaggaaaagcaagggggcagcacaccaaaaccaaaaacaagaccaagaccacaacagcccaccggccagagaagaacaagacacccgccacaccgaaaaccaaaccaacaaaggaggaacaaaaagaaagcaaaacccaaaaccaaaggccccaggaaaacgaggcaaacaacgggccaaagaagaagagcagcgaaaaaccgagaacccgaaacacagcggccaaaaaaggcccaaggagagcaagagcagagaacagccgcaaagaccccagggaacagcaaaagcacgaacacaggaaaacaccaaagaacaaacaggacccgacacccccgggcccggaagcacaaggaagaagcaggagcacaaccagaaggggcagcagaagagaaacaacacaaagaagaagaacacaacgaagaaaagagagaaggcaagaacaacaagggggagaggcaaccccggaaccgacaacggcaggaaccagaccgacaaaggcccacacagccgcccccgccgcacaagaaagcaaaaaagagagccaagaagcaaaagcacaaaagaaaggacaaaaacggcaggcacgaacgaggaggaaaacagagccaaagaagacacaaccaaaaaaaagcaagcccgggggaggggaagaggggaagacggcaagcaggccaacccccgacgccccaggccggggggggcagggcagggggggggaaggagagagaagcaaggggaaacagggccacaagaccagaacacaacagcgaaaggcagaaaagcaacaacacaagaaaaaacaacagacaagaggcacggcagcacccccccccgggacgcagagaaaaagaaaacccaaagaaaaaaacaaacccagccaccaaaaaggagaggaggcaaaaggagagacaaaagcaggccacgcaacaaaaaaaaacacggccccagaccgagaggaaaacggcccaaggaacagggaacgcacccaaagaaagagagaacccaaaagccagaggcagaaaggaagaaagaggaggaaaaacccaggaggaggaaggcccaaggggaaaaaaacagaaggggagcagagacgccaggacagaacaaaaagaaaaaaaaccacacgagaagaaagaaagggaaacaaaaaacaacaaaaaaaccacaaaaacacaccccagcagacaaaaagaaaaagcaaacaaggaagaagcaaacaacggaagggaaagaacccgccaccagcaccgaaggaagcacagcacacaccgaagccaggcagaaaaaaacggcaccagcccaaccagaacaccaagcaagaaacagagcacaacgaaaaaagagcagaccgaaagcagaggggggcagagggagaggggagcaaagcaagcccggagaaaagaagaaaaaaaaacccacccacgaaaaacaaggcgcaagagcaagacgagggcagagcccgacagggcagcggaaagacaggaggccaaagcaaaaaaacacacccggagccagaaacaaacaggaagacaaacgagacaacacagaggggggagaaacgggcggggggaaaccggggaacagaaagaacagcacaagaaggcacccagagaggaccaagaagacacagaaccagagcccccccccaaaacaaagacagcaaggaaaaagagccccggaagccaggccaaggagaggaacagaaaagagacaagaaaaaaaaaaaccaggagagaaggacaaagaaaaagaaggaaaggagagggagaacaccaaggaagacaagccaagcaagaaaagccaagagaggccacagagcagcccaaaaggccaaaacgcaacagccaggggaggagaaaacgggaaagaaaaagcgggcaaaccaagcaaaaaaaaacacgaaaaaggacgcaaagggaaagcaagaacgaaagcaaccgccagcaccaaaaccacaagaccaaagcacaggacgccaaaagcgagaggcgagggacaggcaagaaaggaccagaagcaggaaagacggacgaaggggaaggaaaaagcaccgaaaaggaacacccagaaggacagcagcgggcaagccgggaccagacaggaaccacgcagggagacagcagacaaccaaaaaggggcgaagggcggggaggcacgcaggccaggaccaagccgaaaaagaaaaagagaggcaaccgggcaaaaacagacaccaaaacaggaccaccaagaagacgccaaagcaaacaaacaagacaaaaaggcaaaaaaaaaaaaccccaaccacaaggcaagggagggccggagaagagccacaaggcgaacagacaaaaagaaagacccagaccaaacaaagcgaaaacaagaagacagggaaacagcaacaaagaccccgcaaaaggaaccaagaagaaccgaacacgggaaaaaaaaaaacagaaaaacccaggccaaacggaaggaaggggaaaagacccagcagacaggacaaaaacggaccaggcccccacccaaaagaaagaaacaaaccgaagcaaaagaagacagccaccgccacgagccaagagaaccaccacaggccaaaaaaaacaaagaaggagcagaaggggggagaaaggaagagaaagaacagaggggcacaaaagaggggggcagaagaagacaaaaggaagaagagccaagagaaacaagaaaaaagggaaagggaggaaaaggaaagagggaaaaagaaggaaaaggaaaggacaagagaagaaacagcccacaacagcaacacaaaggcagagaaaaacgcggaacacggagaacagaggaagccaacacagacaagccccaaagcagacaagagacgagccaggaaacaaggccacaacgaagagcagcagggagcggcaagggaaaagggacgcggagaggacagcagaagggagggaagaaaacaacaacaaggaaagagaaaggaaggaaccccaggcacgcgagaagccaaggaccagggagggggcaacgaggaaaaaccgaccagccgaagagaaggaagaaggacacagcaggcaccgggaggggaaaagacaacgaggcccagcaggggaaagcgagggaagcgaagaccacgaaaaagacgaaaaaagaaggaagacagaagccgacgaagcgaggcccaacaaagaagaaaggcaccaaacccacaacaggaaaggagaccgagggcggaacccaagagccaccaacggacccagaaaaaagccagaagaaccaaacacaagcccgggaaaagagccgaaaccggacggaaaaaaaaaaaaaaaaaaaaaaaaaaaacaaccccaggaaaagaacacaagccaagcgccccagggaaagggaagacagaaaaaacaagcgagaaaaaagaaaggaaagaccagaaaaagaaggagaaacagggggacaacaggaacacgcacgccagaagacggcccgaaacgcagccgagggcagacagggcacaagagccccggcaaaaaagcaaaaagacaggacagccacaggggaaaacacagaacacaagcacccgccagaagaggggcagcaaacaagacacgaaagaacccgaagcacaccaacaaaaaagcaaaaaaagcacccacagcaagcgagcaaaaaacaaaacccaaagacaaacgaagcgaaaaaaaaagcaaaagagcacaagaaacagagcaccagaaacgcagcagggggaggggaaaagcaaagacaaaacaacaaccagacaaggcagacaaaagaaaagaaaaagaaaaacaaaagaggaaaaaggagccaggcagaaaacgcaagaggagagaagaagcaaccaaaagaaccaaccacaaagcacagacgaaaaaggaaaaaaaaaaccgaaacaacaagccagaaaaagaaaaccaggacagacagaccggaaagaaagacaaaacaaaaaagaaaacgacaaaaaaggcaacgaagagccacaacaggggaaggggaaaagcaccagaaagaagaggaaagaaaagcccgaccgaaaacagaaaaagacaaacaaaaaaaaacaaaccacagaaaagaagggcagggaggagaaaacgaaccgaaccaggccaccaaaccccagagccacacagaaaacagagggcacaccaagcgagagggcaagagcaacaaccacagaaccaaaaaacaccccccaacagcagggcagacaggaaacaacccacccggaaagacggcaaaggccacaggcaggagacacagggaaacgagaacggagacaggcagaaaggaagcaggagaaaaaaaggggggggggggggggcacacgcagcaagaggaaaggaagaagaccgagcagggaggccaggccaaaggggggcgccgccggcaggccccaccccgccaccccaggagaccggggagacgcccggacgcgcccccgcgccaccaggaagaccgaaccaaggaggaaaacagccgcccgggggcgggacaacaagcgcagccccaacgaaacaacaaaaagcaacagaggggcagggacgcccgggaagggagccacaagcaaacacaagggggaagaggcaacgacagcacgaggacccgccggggcccggggggcacacacacccagagacaaaagaaacacaaacacacacaggcacacagcaaaaaccaaagaacgagaggaaagcaccacccacaaagcaacaagccagaaacggaacaagaaaacgagggggccccagaagcccaaagccacacagaacgagcacccaacaaggcaacaaagcaaagcagaacggagaagcagacccgaccaaccagaagcaaaaagacggcacgggcaaagaaggaaacagggcgagggaagccacacggggcacagaaaaaagaaccaaagacaggacagcagcgggacaacggagggaagacccaaagaacacaaaaagcaagaggcgggaaaaacaacggcaacacagagaaacagagcccccaaggcccggagacaaaaccagaggcacaaaccaaagaaacccgaagaaacagggagagggacaacccagcgggcacccagaagccggacccaggacgggcagagcccagacgagaagccgcaccggagacgaaagagaggcacaaacaaagaaccaccagaaaaacagagccaaaacgaggaaaaaaagagagaaacacgaagagaaagaaagcgcggagcccgaaggaaagaaaacagaccccgggcaccggagcaaaggacaagaaagagcaacacagccccaaccacgcacgaaaagaaaggaaaagcagccacacgagagacccagcaggaaaggggcccccaagaagcacaccaagcccaacagaaagggcgggaaagaacaaaacagcaagaaagccaaaccagagccccacaacaccccccagggccgaaaggcaaaagcacacaaagagccggaaaaaccaagaggcacaagaagacagcgaaagcacagacggagcaaaaggggagccaaagaaaccacggcagggagcaggggggaaagaaagcgcaacccagggcaacccacagcaggaggagaaaaacaagcgaaaaagaacccacacaggagcccaacacccaccaaaaaggaggaaacaagcccacgccaaaccacccagggacggcaaggacagcgacgcaagaccaggcaaggagaaaaaaaccagagacagaaaaccgcaaaggcaggcgacgcgaaccaggcagaaagagcggaagagccacacgaaaaggaacacgagcaccacagcccgaaaggaaggaacagaaaagcaaccacacggaaagcccgggaaagaaaaacccccaagagcaagggccccggcccccgcccgagagccgagcaccagggagagagcgaaaggccccagaacaccggcaccaagagaacagccgccagaaaacacaaagaggggaaagaggcgcgcgccaggggaagagcagccccagaaggccggggcgggcagccaagcaccccagcacgcaggccaggaggcaggggcgccaggaaagggagccagaaacaggcaccccccggcaccaagcacaggcgccagaccacaaccgaggaacaaaaggccaaaaaaagccaggagaaagaggccagagccagaaacacgaaaagagagcgcgacccgcccaggaaaagcccagagaccaaccaccgccaaacccagggaggagcggagcaggggcgaaacagcaacgccgcccagagcccaacccggaccaaccaaccaaaaaagaacagaagacaagagcaggcacaacagaaagggcgcccccgcccaaaccaagggcaccaggggcgccacggcaccccgcccaagcagcagcacacggcaagcagaggcagaccgagaacgaaccccacaaaacaaaccccgccccagccccaacaacaaaaacaccagaacaacagaggaaagcccagaaggggaaccggacccggccagaccaccgccccgcccaggggcacaggggggagcagggaggagccccaacaaggaagcaacaaggcaagccaggaacgaaggggaaaggggcaaccagaccggcgagagaaaaagaggggcgcaggcagagcacagacaggacagcgggccgggagggaagacacaagccaaggcaggacgaaggaaacaaacaaccggaggaaaaccaacagaacacaaacacgcaggggaaaaagagagggaccaagaaagagaacaaaaaaaacccagacaaacacagcaaacccaagccaaggccaagagcacagaccaagagacaggaagaacgaggcagaaagagcaggaaaaccagcacacaacaggcacaaaagacaaagcaaggaagggaagagaacggcaaaaacgaaggagcaaagaccccaaaaaagaacaggaaaccagaacagagacacagacgcagcgcccccggagaagaacagaccaggccaaacaggaaacacacagggggccgacaaaaggcagaaaaggaaaaagcccagagcgagaaaaccaggagggagaaaaaaaaaaccaacaaaacgagaaaaaaccccgacccccccgggcaaaccaaaaaaaaagcaaaaaagccccaacacccccgaccaccaagaagcaaacggaacagcacacacgccggcacagaaagaaaagcaccaacacccaccagaaggcaaagaagagacgaggacgaaacaaaaaaaaaaaaaagaccacaccacgagaagcaaagccccacaaagaaggagaacaaaaggagaagacaacaaaagcaccaccgaaacaggccagaggaccaaaaggggcagggaaagggccagagggccaggaacaagcaaaaacaacacccgcccccagaagaccccacccaaccagcccccccacaaaaaagcaacaagaaggacaagggaaggaaaagacagaggaaagcacgcagcaaaccggcggccagcaggacacaagaaacacccaaagaacagggaccccacccccccccaccccaagagacacccacagggaaaggagaagaccccagggcaagcaccgcagcccacagcaccaaaagaaaaggggacaacccaagcagcaacaggcaaacagcaaaggcaaagggccccagagagaaacagaaagcacacgggcccaaaggcaccaagacaaccaggcggaaggaaaacccacgcaaagaacaaagacaccaaacacggaaacagaaaaaaaagggcggccccagaacagagaggacagcagcccagcaagagcaaggcaaccccaagggggaacacgccaaaaacaaaacaaccagacaagaaaagcccccaggggaagggaaaaagcacaacacgcaaaaaagcaaaaagcaaagaaaaagaacacaccggaagcgcccacaacgaaaacagacagggacaacagcggcaggaccccagaaacacaaaggacacaaagcagaaccacccaagacaaaaaccagcaaaaaccacgaaaagcacggggaccaaacaaaccacaaacaccagacacaaccacaaagcacacaaagaacagaaaaagaccaagaaccaaagcaaaaaagaaaaaaccaaagcaacagaggggggaagaccccggcgcacaggaaaaaaagcgacaggaaaaagaaggaaaaaaaaaaagaagaagaaacaaaaacgccccccaaaacgagggggcgaaagagcccccaagagaaaaagcccagcaagaaacacgggagcagcaggaagaaccaagagcggaaccccaggacacgcaaagaaaagccaaaacaccgacaggaccgaggagagaaacccacaggaagagagagggcacggagagcaaagaggggcgaaggggcgggcacgggaagaacccaaaacccgaagaagcaagggaacgcacaaagaagacacacagccccaaccaggggaaacagcagaagggaaggaaggaaaaaagaaggcacaagcacgacaaacaggcccaaagagccgaggggaaggggaggagcaggcagagggaaccccccggcgacacaaaagaaaagaccccaacaagaccagacaaggcacaagaaaaaaagaaagcaaagaaacagaagaagaccaagaaaggagaagcaagcaacccgaaagaaaagccccagaaaaagaacagaacagagaacaggaaaaaaacagggggcaacaagcgcaaagcaaagaacacaacaaaaacaaagcagcaacaaaacagcagggagggcggccacagaggccccacaacccaggcaaacaaaaaaaaaaaaagaaaaaaaaaaaaaagaagaaaaacccccccaaaaaacaggccaccacggaagcagacgcaaccaacagcgacaccaaaaaaaaaaggggaaaaaaaaaaagagaaggaaggggcaggagcaaaaccaaaagaaaaaaaacaacaacacgacacaaaacggaaaaaaaaaaaacagcacacggaaacgcacgcccccaaaaagaaaaaaaagcccaagaacagccccccacccccaccccccacaagaaaaccgacacgcaaagagggaaaaaccccgaccagaaacaagggcaaacgaacgacgcaccgcccagaaagccccgaggcgaggcgggccagcgaagacacgaaaaaacgaagccacggcggcgccaagcccggccgcgcaagagggggaaggagaagggggccagggggggacccgggcagaacggggaagaagccgccacgcccccacaccaccgaacccacgccccccacccccacagcccagaaacagacaacgggaggggaaaacagcagggcccccgggcaaccagaaggaaccacagaacggacggaagccaagcggccagaaggaaaagccacgaaacacgcaagcgggacaaagacagaggccagagaaagaggcccacaagggaaaacaaaagag

SEQ ID NO: 237 - RNA, 17095 nt, Homo sapiens
ccgacacaaacggcccgccaacgggcaccacagaacacgcacgcggaaacagcccggccccaaacccacggcaacacacacacacaggagcggcacagaggggaccaggccggaagcagacgacacgggagaagcaaacacccgaaggaagcgacgcaaacacacagcaaagcccaaacaaggaccccaaccagaccagccagacccaaagccgggaccgccaacagacagaagagacagaggaaggacaaaacagagaagaagagagagggccaaccaacagaaaacacacaaaggcagaaccacaggccagggaaacagcaggacgcagcaaggaccaaagcgaaaaacccaggggcgccaggaggcgcccagggcagggcgccggggaggggaaagggcgggaccagaggagagccagcagggcgaaaacagccaaccccaggcagaggggcccaacgaagagaacagaacacgggggggggaaccggcagccaggaaaggggccagggacgggagccaaccacagcacagcaacccccccaaaaaaaaaacccaaaggcaaaaagaaaacgaaaaacaaaagaaagaaaaaagcccagaacccccccaccgcggccaaccaacaccaagcaaacgaagcacaaacaaggaacaaagggcagaacaacacgcaaagaaaacccaccaaaaggcaccaccgcccaaccggaccaggcaaaacaagccgcaacccagcccacgaaaacagaaaaaacaaagaagcaaggagagcacggcagagaaagagcgacacgggagcacagggcaccacgaccaacaagagcaggagaaacgcaccccccccaggcagaagagagcccacccgcaggcccagacacaagccaaccaaaaaacagggccaagcgaaacacaacaaaaacagcaggaagcgggggcccgccgagagcacgaggggagcgaggggcggagaaaagcacgagaagggacacagaaagagggaagccaagacaaacggagcaggaccgggcaaagaaaaaagcccaaccaaacaaaagaaaaaaaggcaagaggcagagcaggaggccacgacgcaacccgcacgggaggccaaggcaggcagacccgaggcaggagagagaccagccgcccaacaagcaaacccgcacaaaaacacaaaaaagcaggcaggggagggcgccgagcccagcaccgggaggcgaggcaggagaagcgaacccagaggcagagggcaggagcgagacgcacgacgcacccagccgggccacagaagagaccgcaaaaaaaaaaagacagagccccacgacagaagggaaaggggaaggacgcagcacggacaaggagccaaaaaagcaggcacccaccccagcggccccgacacccaccccagcacggagcagagggcaggggcagccccagacaaccccaggcgacacagcgagcacaaccaagggaagagccgcagcgcccagggccacagaggaggaagccggcaacccaccagaacccaagaagggaaggggagggaacccaagagaaaggggaagggagcaaaacagacagagagagccacgacaagggccaggccaaggcagccagcaccaacacaaccacaagaccacccacccacagggggggccggaggcccaaagggggagcgcacccacaggaccgcagcaagccgccaccgcccaaagaggcaaaccgccagaggccgggcgcggcggggcgcccagcaggcacgggcacgggccgggcaggcgagcaaagggccgagggccaaggcacgggcgcccaccgccccccagagggggacgaagcccaggcgagcagggcgcggcacaaggagacgggagggaaacccaggggaaacagggccaaagcccccagaggcgcaaaaaggcagaggaccaacccaaaagcaggcaccggggaacccagcaggggcccgcccacacccccccacccccagcacaggagaaagaaccgccaccagacacaccggccgccccgccccccaaccgcagacaagcaaccaccccaggcccaaccacaaaaaaggaaaacagcggaaaaaagaaaggccaagacagaagaacaagcagggcaaaaaccagaagcaccccaaaagagccaaggggaccaggcacagggccacaccgaacccaacacgggaggccgaaggggcagacacagaggcaggagcaagaccagccgaccaacacgaaaacccgccacaacaaacaaaaaagcgggcgggggcacagccgaacccagcaccaggaggcgaggcaggagaagcgaacccgggaggcagagggcaggagccaagacacgccacgcaccagccgggcaacagaggagacccaccagaaaaaaaaaaaaaaagagccaagggaaaaaacaccacggagaagcgcgcgaagagcgagaccccacagcgagagccagggggaacccccaacaggccaggaaaacgccagaccccagcaaacccggggagcaacgccacgacagggagccggaacaaccggaggcacacacgcaggcccacaaggcacccagcacgggcccacaggccagaccccaacgacccagccgaaccgcaacagccgcggcagaccaggcaccccccgaccccggggacacgcccccagggcccgccccggcacagggaaaaccaagggaagcaggagcaagacacaagggagaagccaggaagcccccccccgcccaggacaccggcagaaacgcagggccacacccacggggcaaaaaccaacaggcagccgccaaggccagacccagaacgaaacaaacccccccagccgcagcccaagggggcagggcagcccggccacaaaacgaagccccaggccagcagggacaaccccgaaaacggaaaaaccgagcaacccacggcggcaagagaaacaaacccaagggaacccaaaggaggcagagaaaagagagaagaaagaaaagagaccaaccaaaaaaaagaaagaaaaaagaaagccagaagaaaacaccagcacagagccgagccaggcaaccgaacagcggagaccgagcccgcccaagcagagggagggacacaccacgcaaggacgggaagagaagcagccacacgacaaacaagcaaaaagccggcacaggccacacagcaaacaggcgaacgggaccaaaccagggcaacccggccaagcagccgaacaaggcgagaagccagaagggacccgcaaccgggacggacccccagagaccccccaagaacccccccccccccccaccgcccgccacagaaagaccccccccccacgaaaacgcaagggcccaagcgagcccccaaccccaaaggaaccagacacaggcaagcgcagggaaaccagcccagcccccgaaagccagcaccaaggagggcacagagaccccaacacaggcccaaggccccggcccaagagcccccgaaccgccggagggaaaaggaacgaaagcagccccccacggggccacaaaccccaaggaacccggccaaacccggaaagcagccagccacaccaaggaggaagagacgcagccggagcgagagcggaaccacccggcagggacacgggcccaaagaccgagggcagagcacaccaccccccgggagaaaacgccgcacaggcgaagcccaccgcacacagcgaggagaacccgggaccaacagagacagaccaagaagggagggaagcgggcaaaccacccacaaagccagggcacaggagacaccggagagcgccccaaacacccccagggggcccagagggcccgaggcagccggcccccaaaagagaccaggcagcagggcacgacaggcacacacaacaaaacgccagaccagcacaggccccagacagaagaaacacgccccacccgcgggggcacacaacaaagaaacaaagcagccgaaccacccagagcgaggacaacgcaagaaaaaacaacccccaggagcccagagcagaaccaggcaggagaagaacaaaaaagggaaaaagaaagcaaaagcccaaccagaggacccagaaaacaggaagcagagccaaaaaaacaagaacggcgaggggagaagagggaggggagggacgaaaagagaagcaaaaacggcaaggcaccagcacagaccacagcacaccagacaaccacaagacacaagcgaccagcaacacaccaacagcaccccgaaggaaggggaaaacagccacagcgaagccagccgggcaggacagaacccaaccagggccaaaggggcccacagaagcagcacagcacacaggaaagagaaagcaaagggggcgcccagaacaccacacaaaccgggggggcacggaaacggcggcgcacagggacgaacacagaaaggagaaccacgcccaaccgaccagcacacccacgaggacagccaggcccccacaaacaagcagcaaacagcggagccagccgcagaaaaaccaagcggaaaaaacaagaagcagaaagcaaacagagaggacaagcagcacccaggcaaaaccaaacacccaggagagaaaagcacaggcaaagcaaacaagccccggaacaaggggaaaggacaagcagaccaaagacggagccgaggacccagggcaaagagggcaagggagcggcaaaagaccaaccaccggaaagcaagcgggaagccagagaggccaaaaaagggaagaggaggcagagagaaccagacgaaccggccccaccccacccacaccccgaacccaaggcacaaaaacggggaaaaaaaccaccaagggcggaccaaacgagagcccccagggaagccagcaaccaagcccaggcgcagggaagaaaaaagaggaaggaaaagaaacagagaagccacccgcccagaagaaaaagagcaggccacgcgcccagaaacccccgagaggcaagggggggggaagggaggaggccagggagaagcagaaagcccgagccgcagagccggcgccacaggagcagaaggaaggaacaagaggagcaggggcaagcgagcagcaagaccccggaagaaagcacagagacgagccccaccccagagcagaaagagacaggggggccgagacaccaacacacccagacaagcgagcgcggcggggacacacgagaaccacgggaggcaagacccaggcgagaagcccaccaaacaacacggcaagaacacgagggacacccacggcaggagagcaaacaaagaagaaacccaccccaagccccggccagaaaggagcacaccccaccacagcaaggccccaccgcaaaaggaccgggaaaagccggagggccccagaagccacccccaggcagcaaaggggcacagacacagggagccacgccacgccgacagacaagcacacccacccaaacgggccgccaccaagaggggagcccagccacaacccaacagaccgagagcaaaaagacggaacagaacagccggaagcagggagaaggggaagcaggaccaggaaagaggaaccgggcccacccagacgcccaagacacaagccagaagcccaccccacgagggcacagggacagggaaccaggacgcagcggaggaagagccacaccaccagcggaacaggccccgccccggaggagcgggacaagggcagcacccagagagcccccacccgccaggccccccccagcccccaacccggccagaagggcagcaaggacaaagccacaccccagcaggaccacacacaaagggggagcgaggagaaagagaccagcagacaagccccaaaaccagccacacgcgcccgcccacagccgcaaccccccccaccgcgcggacgaggcccagacaccgaagcaaggcccccgagagggaaccagcccacaacgcacaggacaaaccccaaagaaagccccagagccacaggggcccggcgaacagacgaacggggccccaacaccaaacgaacaacccacaagaacacgagcaagagagagcaaaggagaacagagaggcaagcaccgcgagaccacagcaggaggggggggcgagacgaacccgggccccaaacaccagacgaccacaggaggagccccagaagaaaacgggccccagagaggcaacgcaaacaggccccggccagccaggaccgccccggcccccaacaaaggccaccacggacacgggaagaggcccgacaagggccggcgcagagggccacaccccccgcccccagccggccagaggcccagggggaacccaaacaaacaaaggaaaaggagaaaagccgagaagacaagccaaaaaaacccaggagagggcggacagaggccagccaaacccagcacgggaggccgaggcaggcagacaccgagcaggagcaagaccaaccggccaagagggaaacccgcccacaaaaacacaaaaaagccaggcaggggcagggccaaacccagccagggaggcgaggcaggagaagcgaacccaggaagcagagggcaggagccaagacgcaccacgcacccagccgggcggagagcaagacccaccaaaaaaaaacacaaacccaggagagaacaccccaaaacacgccggaaagacacaagaaggagagacgggcagaagaaagaaacaggcccagcgagggggagaccgcccagagagaggcaaagaaaggcagaaaagaaaacagagaaaaggagaaaagacagaggaaagggggagggggaaccaccaaaaacagcaagcgggaagaaccagaaaaaggagggagagaaagggaacaagacaaaaagagaaagaacagagacaaagaaaaaagaaacagagaaaaagggagaaaaggaagaagaagagaaaaagaggagaaagagggagaaagaagggagagcagaagagagagacagagaaagggaaagacagacagagagagagagagggacgccaggccacaaaaacccccggcccaagggggggagaccagagggaacccaagacagcggggggaagggaggcacccggccacgcccccaggcggacagggccacacgacacagcagcaggagaagacacgcccgagcagcccccacagccccaccgccccaccgggcaaggcagagaaacagaaagccgccagacggggaaagagcccaggagagccggcgaaggcggagggaagaggggagggagaggacggcagggcaccacgagcgggcacgaaggcacaccggaaggcccaagcacccacaggcaaaagggcgaggcccaaggaaaaaggggaggcgcggggcaagccaagccacaaagccaacccaaggaagacagccccacaccaccacccaaacccccagaggggccagcgccacgccccaccacccccccccacgccaacccccacgacacccccgacaccgcccaacccaccccacccaccacaaaccacccaccggaagcccaaaacccaccccacccaccaacgccacccaccgccaaacaccccacgacagcaaggccaacccaccccccaaccccaaccccacagaacccagcaccaccaccacaccacagccaaccccaccagaacagccccgacccagccccccacgacccccaccagcaccacccacacccaaaccccaccaccaccaacccccacccacgccaacgccaacagcaacccccccccccccaacccaccaccaccccccaaaccccaccaaccaccaaaaccaaccccccacaacccaccccacaaccacacacagcaacccaccccagggagccagccccccaaacaacaaccagcaaccaccaaaccaaccccacaccaccacacgccacagcaacccccaccaccaaagcaacccccacacgcaaccccccccccacccaacccccaacacccaacaaccaagcacccacgaccacaaaggccccaacccagccccagggaagcgaaaaagaaaagggcagaacgcagagcgggaaaacggggaacacacggcagcaggccaacaggccccggccagcacagcgggaaggcccaaggccagaggaagcggacagagagaaagggaagaggggaaaggcccacccgaaggacgcggaaagaaacagccagccccacccccccacccaccccaacaacggacagacagagggaggccaccccccgacgcccgaccgcgccgcccaaggacacaaccaggccacagcccccccgccaaaccccgggggagccaacccaaagacccgaccagccaaagccaggaaccaaggccgagcagacaccaggcgagggcaggggcccccagcaccacagggccaccagcaaggcccaccaaaaccagaaaacccgacacagagcagagacccaggccaggagaccaggaacacagagaggagaaacgcacaaaccagagaggaggaacagcaagaccggggaccgacccggcggcacaaaccgagccacaggccggaaaagaaggcagaaagcccaccacgcagggaaaaaaaaaacaacagggaagagcgaaacacagagcccccacgagagagcccacccacggacggccggggcaagccggcccgacacagggaaaacaggacaaagacacagaccagggccggcgcaaaacaagcccccccgaaaaacccccaaagaaccacaaaaacaaaaacgaaagcccgaggacaaagccggaaaagcaaggggaaaacggccagaaagagaaacaaagcaaaccagcccaccggccaggggccccgccaaaaaggagagacagggaagggagcggacgggccaaaaggcacaacaaggacgccaagcgaacagaaaagcaaaaggaaaaacggcacgaaaaaaaaaaaagacccgagaaggagcaccaccaaggaacaaagccacaaacaaaaacccacaaccaccggaggggggaaagacccaaaggcggagaagaggcaggagggggagggagggggaagacacacgcgcacgcgccaagacgggaggcccgaagacagaagcgaccggaaccacacgcggagaaccccaagcgcccaaggaacacccccagagcaaagcccgaccagccacggagaaaagcagaacacaggacccacggcggggacccagcagccccccccgagccacccccccaagccaagagacgggccagacacccaccccccaggcagccccacaagcgcaccgcgcacacggcaggcagggccgaagccaccaacaaagacccaggcagccagcacccgggcagagggccagaagcaaagaaaaacaagccacgagagaacgaacgaaagaacagaaaaacaagaagaacagaaagcagccggcaaaggaacaggaacaaaacagggaacgaaacaacaacggggccgcggccaacaacccgcgagccaccggccaggcacaggcgaaccacaccgaccaggaaccccccaccgggaggcaggcaacaccccagccacgaaaacagcagagaagaaaagcggccgcccagagccgaacccaccaccgggccccggagcccacgacacccccaggagaccccaggcccagagaccaaagccacaccccgaggacagcccccaggcccgcaaacgccccaaagccccagccagcagcccaagggcccacacaggcaagcaaagacaggaaaggggcccagcacccacacccccgcaggccccaggccgcccgccggccaaccaccggaagcgccccaccccgcaaaagccgcaggcgcaggaacgccaggcacccccagagagcccccggccaaacaccgcgcggaacccggcgccacaccccagcagcgcagcaggggggggcacacgcggcaggggcgggggcagggacggggaggggggggggcgaccggcccaccccccacaccagacaccaggggcggccccagcccagcaacacacccccggaacaccccaaaaaagcacacacaagaacaaagcacgcagggagcaccccgcccagaaacaacagcaggcaggggcagcaaagcgaaagagacagacgaaaagaggcgcaggccaagggcggcacaacacccaccgcggaggggggcagcaagacggaagcgggaggcggcccaaaaacaacaaaaaaaggcagaggccacaggccagacagcaccaacccggcgcaaaacggacagagcaaaacacacaaagccggaaacaaaccaaccggaaggcgaagacaccaaaccccccaccggagacagcagggccccccggccagagcccgagagggggccaggggcacaaggcagggaccaccccaaccagagccaagacccacgcgagcgcaccacccgccgagggccccggggccagaggggcgggcggggggaccgaggacccccccagcagaagggaagcgccacccccaccaaagagaccccgccacccccaaaacgcccaaaaacccaggggagccaaacgggcacaaaagagaggacggccgaagagagaagcgcacacccggcaagaaggaaacaaaaaccccccagagaccccagggccaaaagaagggacagagccagcacaggcggcccccccggggccacgcaggcccaaaacgcaggaggcaccccgccccaacacacacaacaagaaaacaggcccccagcacaacacaggcagcacacaggcacaacacccaggagagagacaaaaagcacacaggacacacacaaaccgccacacaaaccaagagacacaacaaggcagacaaagggcacaaaaacagacacagagacacacaaaccccgaagccccacagcacaacagggcagcacacacacacagcacagaggcacagcccacacagcacaggagcacgcacacacagcacacagcagcagaaacaggaaaccaacccgcacgcgcagggggaacaggccggaaaacacacgcacggccaccagccgcgggccgcgccagccagcccggggagggacacaggaaacccacccgacgccaaaccagccacccgacccagaaagacagaaacccccagcccggagccaccgcgggcccaacacccagccaacggggccgaggagaaagcgaggcaggccagccccaggggcccgcagcaaggcagcccggccccccggggcagggccggcagcaggggccccagggaagggccggacgcacccaaggcaaagccccacgaaggacgcgaccacccgcccgcccccgcccaacacagcagccggggagccacgccccagcagccaacgccacacgccaaccacgagccgcgcaccaggccgcgccccagggggagccagggcacagaggaaggacagggcaggaaaagaagcgggaaccccagccccaggccgggaacggaccgcagaacgggaccccgggggccccggaacaacaccaccaccacaaaacacgggcgaggcccaccgggcggggacaggggacagacaagagcgcgaccgcggggcaaaaaaccggggccaagggaaccgcagcagggccgagcaggaaagcccagagaaagcggcacgacgggcagcaggccaaagagaaaggcaggaagaacaagcaagaaccaaaagcaaaggaaagggaggcggggcgcgcaagaggagccgcaaaggcgacgaagaagaaggggaaccggaggccagaaggaagaaagaaacaaggagccacacccaccaaagggccgcccaggaggaggacccccagaggaagcccaggacccgaccccagccccaccacacccacaaagacacaaacacacccacaaacaaggcggcgcagagcccacggcacacagacaccacacacaggagacaaccacacaggcaaccacagcagcccagccacagcaagaagaaacaagcaaacacaccgaccccacaggccagaggcagccgcaaaaccagaacagccccaaggaggaacagggacccacacagaaagaaaacaagccaggagagagcagaccaaagcaaagaggaagggagggggggagacgggccaccgacccagagaccagcgaaacacaaagcaaagcggcccagaccccagcccccccaccccagcccccacaccaccacccaccgggccagacacggaaacccggggacccccaaacacacaacgcgccagccacccgacagcccccaccccgaggccacacccagaggccgaagaccaaacagaagcacagaaggacgaggcggcagcaacggcacccacaaccccacacaaccagaagccagaagcccacacagagagaaacgaggcacaaaggaagcaccccgcaaggcacaaagagggagagcggaaggaccaaaccacgaccagagcccaacccaccacagcgcgccgccagcggccggacgagaacaaagccagagggaggaagaggagaagaggaagggaggaggaggaggaggaggaagaggagcagcaaaaacaaaaccaaggcagcggagaacgaaccgagggggggggggaaggaggagagagcgaccgaaacacccacaaggaaacgaaagcaggaagaggaaagcacggccagagcgccccaaacccacaccgaagcaagagccccacacgcacccgcagcacgcaagccacgaccacacaagcagaacgcagacccaaacgaagaaaggcaaggcaagccccgggaaaacacgggggacgcagggagaacggggcccaagagccggcacagacagacacacacagagacgcacggaggggcgcgcacacacacaagggagcaaggacacaaaggagaagacagccaggaggaagagagccaggacacccaggacagccaccagccccaccgccaggccccaagccccacgaggccgccaggggccccaggggccagggccaggcagggggggggacccaaggccgccgcccacccagcagaggaaacagccgcggccagccccaaagacaggaaacgccacggagggcaccggcagaaacacgagaaaggaggggaaaaaaacgagggggaacagccaaccaaaaaccaccacggggggggggggaagggaggggccaaggaaaagacagaaaagcccaacaacgacaagcaaacgcagcggcggacaaacccccgcgaggacggccccccccaggaagaccggagccccagacgacacagccccccaaagcccccagccaccccagagccggaagggaaacggagagaacccgccgggaaaccagccaggggcagcaggcagagggagggcacgaccccccacacacccaaccacacacacacacagcacacagcacgcacaccacccgcacgaccacagcccgcccacaggaggggaggcaaaacccccccccagcaaccaaagcaccccacaaacacaacaaacacgaagccaaggacacgggaaaggagagagacacccggccgcaacagcggggaagaaaagcagcaccgcggaccaccccagggggaagcagcaagagaaggagagagcaggcgggaaacaagagcgaacagaccaagggaccaggcaagccggcccccagggcccagaggccagggagggggcccccccaccaccgcccaggccaggccccccaccaacccccaggcccaggccgcccccccagcaaacccagaacgccagccagccaggggacagaaagagagcagacaggggcccaccagggaggggccccgcccggaccgaaagagcgagaagagcccccagcaggcagagggggcccgacaggcagagccgcccacggccgcacaccccacacaggcgggaggcaagggaccacacacagcccccacggcacaccgacacacagccgcaggcgcacacaggggcaagccacaaggagagccgcaccccccggccaccagggcacacaggggcacaccgcacacaccaccaagaaccggcccccccagccggcacagaccacacaacacacgcacaaacagccagaacagccaggaacaaccccacagcacaggcaccacacgaaccacccccacacacccagagccagaggagacagcacagggaaggagcaggcagggaaggagcgggcagggaagaagcaggcagcagaggaaagccccccagacagagcccaacagcaccaaagaaggaagccccaccaagagcaaggaggagagaaggcgaaaaggacccaggccagaggcacagcaagagggagcgaccgggacagggcaaggaaggcagaacccggccaggaagcagccgggcacagaggagagcagagaccagggaacagcagagggcaggcccgggaagagagccgcccaccaacaccaacgccgaacagaaacacacacagcaggcccgcaaccgcaaggcacgagggccgcacagcaaaacagccaggggaggaggcgcccagccggcaaaggagggagcgccagcaggcagcaggggagggaggggagcggggcaacgaccgagccggcaaaaacagagggggcggggacagggagccaggccgcccaggcacagaagcgccaaccgagggcaaaagaaagcgggagagcaaacagccgcccccccggccaggagagcagaacagccgcacacaagcaccgccccccgcgaggccgggagaaaggccagggcccgagacggggacagcgcgaaagaggggagcgcaaggccaggcggagaaggggccagcccagggcagaccgagggaagcaggacccaacccagggcgaagcagagagggccgccagggcagagccccacccagccgggcagagccgaagggcggcagcagacccagccaggaaggagagcggaaagccgccaagaaggaggggggccaccggcggacaggagcaggacgcacccaaggcccaggcaaaacacagggcacggcacgggcacggcccacagagcacacaacgagagaccgcgggaccaagagggcaagaagaaagagcagagcaacaaggcagcccggcaagcacacacggaacccaagcggaaccaaaggcaacagcaggaacagagagcaggacgggagacgaccgccagagcgggacccgggcaagcaccgcgaggcgcgacaccaacgccacaccacaccccacacagcaaggagccaccagcccagcccgaccggcacggaaggaaggacaaaaagacacgcaagaaccgaggccagaggggagacagggagggaacacaggaggggcagcgagcagagggaaacggcaacacacaaacggggcagacagacgccccccagaaacgcaaccccagcaaggacgccagcaagccagccccaaagggacgaggagagagggccaccccgggggggagagacagggacagcgaaaggcgagcccgggccgcgcagagacccaggaggccagcgggcagacaccgaaaagggaaacaaacccagcccccaccaaagaaggacaaaaagacaggggaagggcaaaaggggaggcaacaccacacagcaaccaccgacagccgcaaagggccaaggcacagcaggaagagaacaaacaggagcaagaggaagggaaacacagagggcacagagccggcacgggaagaagacaaagaccgagcaaaagaacagccacaaaagccacagaggagggcaaaggaggggcaagcaacgggacgcaaggaaagcccggaagaaaaagagagcagggcgcaaggagaagggcagaagccaccaagcgagcaagcacaccaaaagagaacagaagccaggacacaagaaggggggacacaggcagaaccaacccaccaggacagagaagggggagcgaggacagaaacgagaagcggagccagcggaccaggccggccggaaccaggaggagcaaaagggcagaagggccgagccagggccccaaccacagcgacacccacaaggcaagcagagccaagaggaaccgacggcgcagacaccgcagaccaacagagggccagcgggcgggagagcccaggaggggcaacccaccaccacagccccacccaaaacccacgccagaacaccgaaaccccggaagcccaaacagcccgcggcaagaaaccagacgcgcaccaccccaaaagcaccccccccagccccaaagcacgacccccaaaccacaccacgcacaggaccaagaagcagaggggaggccaggcgacaccacccaggaagcacaagcaaccacacagggcaggagagcccagcgcgaaccagacaacggcggcagccccggaacagacacgcgggagggagagaaaacgcccacacaaggaaggcacgcagagcaaaagaccaccgaccaaaccccccaaaacaaaaagaaaaagagaaaaaacagaacaacaaagaacacgaaccacaaacaacaaaagaagaaaaggaaaacgaccagcagcaaacaaaaaaaaacaaaaaccaagcggaaggccgaagggcaaacggacaaacgcggaggcaagaaagaggacaccaggaaagaaaggaaaaagacacaaaccacaaaaagccacccgagacccacgacgccgggaaaccaaggaaagagacaaagagaaacaccgggaaaaggagaagagcagaagcaaacaaaagggggaaagaaagaaaacaacaaaccaacacaagagaaaaaagggaaccaaacagaaacgaaaggggagcaagcaaaggcacacgaacgacacccaagaagaccagcagacaaacacaaaacaaaagcacgacgcaagggaggcggagccaggagaagggcccgcaaacccaggggcaaggaagcaacggagcgacaaagacagccacgaaagaacacaaacaggccaaagacacagcagccacaagaccccagccgcaggccaccagccaagaccgccccaaaagagggggaaaagacgggccggcaagcaagccaagccaggcggaggaagaaggagcaaaacaaggcgaggaggagcaccaacccaccaaaaggcc

SEQ ID NO: 238 - RNA, 1836 nt, Homo sapiens
cggggaaagcaaaaggaccaagcagaacaagagaagccgggggcaaaaggggccgcaggagaaaggcgcagggacagacgaaaaaagggagaaaaaaaggacaaaggaaaaaagaagggagaaaagcaaacagcgaaagaaaacagaacagggaaagaacaggacacgaaaaccaacaccacaggaaagaaaaaagggagagaagaacacacgcaaccagaggaaagaaagacagagcaaaaaaaaaggaaaacaagaaaacaaaaaagaaaaaggaaaaaagaaaaacaagaagggaggagcaagcacaaacaaccacagcagaacaaaaaaaagaccaaagagccggccggcgccacgcagaacgggccacgcgcaacccgcaccaaaggccaacacgcagcgagggaaacagagcggcagaggaaagcccccagggccagggaaaaaccagaaaagggaacaacacccacacacccccacaaaagcaaggggaagggagccaccccagcgcgcaagaagaaaggaagcagcacccacagaaggaagggggagccaaagcaaggcacgaaagcccagggaagagaggaggagggagaagaaaaagacaaaacacagagacacagagaggccaagcgcacgcacaaaaacccaacagccacgcccaaaaaagccgaaaaaagcgggcagcagaccaaaaaacaaaacaaagcaaaacaaaacaaaacagaaaaaaacaacaaaaaccgcacgggccacaacggaaacaagagacgaggaaaagagacagccaaagcgagcagcacaacggaaccgacaagaaaacaggagaaaaccggaaaaacagacaccaggcaaccaaccgcaaggaggccaccccaccgcacaagccagagcaaaagaccggcgcgcaaccaggaagacacagcagaaaacaacaaagcgaaaagaacgcacgacacgacaccccacaagcacccgccaggcacacaccaaaggggagcacaggggggggggggcaggaggaccggcaagacgaagccagcccaccaaaaagaggaaaagaaaccccagggagaagacaaagagaaacaaccggaaagccggcaacgagggcccaaaaagacagcacacaaggagacacgaagaacgccagaaacacgagacacacaaagcacaaacagacagagagaaagcccaaacagagccacagaaaaggaaaggcaccccggaaggcagaagacacaaaagcaaaaaaaaaaaacaaaaaaaaaaaaagaagagggggaaagaagagggagaaagaccaaaaccagggcaagagaacccagacccgaccccacccacagaaggcagaaagccagggaagacacggaacaaaagcccaaaccagccacccagagcaaacacaggagagcagcaaaagccacggagaagccgaaaaaccccaggaaaagaagacgacccagaaagagaaaaaggccaaagaggggaccagcacccaggccggcacacggaggcgaaagcccacccccgcccggcaaaccagagggaacccccaaagcaagcccagaaaacacgcccaagcgacacagacggagacaagggaaacgacaagaacagacagacgccaacaaacacaagcaaaggaggaaggcagaaaggggcaaacaaccagacacacgcagaacccagagaggaaccgaggcaagagcagaaacagggcaggaagaagcccaagagcacaacagagaacacgcgggccaaaagcgcaaggcaaagcagcgagaaaagagaccaggacccaacacagggaaggacaggggcgaccggacc

SEQ ID NO: 239 - RNA, 14665 nt, Homo sapiens
gcaaagcgacccaccaaaaggaaaccgaggcagagacagagcccaaggcagaaaggaaacccaggacaaaacagcgaaccagcaggacacagcaaaccacacacggaagaacaacaaaaaacaccaaaagaagcacccagcagagagaacaccgaaacgagacacgaaaccggaaacaccaaagcaaggaaaacaacagaccagggagcaaaaacaaagacaggggcccaggaaaaacaaagacacgacaaaaaaaaaaaggagagcaaaaaccccgcagcacccaccaacaacacaccgcaaaagagacaacccagcagaacacccgaacgacagaacaggcgaggacaccaaacagccccggcaggcacggaaaagacggcgacgagcacggaagcccgacaggccgaaggacccggaccaccacaaaaaacaaaaacaaaggaacgacacaccaccccaccaagaacaaacgaaagaaacaagccaaagccaaagcaaaagcacaacgaccaacacggacaagaaagagccagcacagggcccccgaccacaggccgcaccggggcaccaacggggaagaaaaacaaaaaaaagccgaacaaacgaccgcaacccagacaaacagaaacaacaacaagaacagaaggaaaagaaccagagagaaagaacaggaggaggcaaagaagcaaaacggccaaaaaacagggacgagcaccggagcacggagaggccggaaccaaccccacagaacaagggagacgacacacagcccagaaacaagggacagaaagaggaaaagagagcaaacacagcgacacccgaggaaacaaaagcaagcaacaaaaagaacaaaagccacgggaccaaaaggacaagcaaaaacaaaaagaaggaaagaaaggcaggaaaaaacacagaaacaaccaggaaaagacaagagggcagacgaaacaggaaaggaagccaaccgaaagaaaggaacgcaaaccagaaaccgccaccccgaccgcgggcaggcagagagacgagaccccacacgaagaaaacaaaaggcgagacaggaagaacccaggaagacccaggcccaagcaggaaaaaaacacaaaaacgaagagaaaaaaaagagagaaaaaaaaaaggaaggaaagaaaaaccaaaaagaaagagaaaggagcagacaaagagcaggaggggaacaaggaagcaacacgaagcaaaagcgcaaaaaggggcccaggggcaaacacccgcaaacaaagacaaaacgaaaggaaagcagggagagaagaccaggaaaaggcgaccaacacaaagacaaaaaagacaaaagacaaaaaaaccgaacaggagcccagcacaaaaagcaggcacccaagaaacgaagggccggggcacaggaacacacggaccaacacaaaacacaaaacccgacacaccaaaaccacgaaaacaaccgggggcagacgcgcccaaacggagaagcaccccaggcagccccaaaagcgaggaaaaagcgggagacagcggagaacaaacggggcacccaggaaagccaaaacccaacagaaacaggaagaaggggaagaacaggcagaagaaagaaagggacgaaggggcaaacaacgaaaggaagcacaaaaagcaaaggaggcggcagcgaccaaaacacaaaaacaaaaaaacacaaacaaggaaaaaaacaagagaaaaagcacgacggagggccaaaacccaaaaagcaaacaaaaaacgaaacacaacacccgaaaaaaaaaaaacacacaccacccagaacccagcaaccacgcaaggccaaagggagaaaaacaagccacaaaagacgacaagaaaccaagcagcagaacaggaaaaaaacggaaacaaccaaagaaaacacacaacgaaaaccacaaaccaagcaaaaggaaacaaaaaacaaaaaaaagacagagacaaaaaaagcagcaaaaaaaaaaaaaaaaaacaaacccagacacaaaacagaaagagaccaccaagaagcagaaaagaacacaccacaggacaaaaacgaacagaggcccaggagcaggggaggaggaacggaaaggagagaaggaccaggggaggaaaaccggagggagcgacacaggacaacacaaaaccacgacggaaaaccagcaaaagaaaaaccacaacagaaaaagaaggagaaaaacaaaaacaaagcaaggcacaccgaccaaaccagcaaacaaaagacagaaaagaaggagcggcagcagcaaaagcagaaacacagccaaaaaaaggcagcaccaagaagaaacacaacgaacaggaacagcagaaaacagacaaagaaacaccaaacaggggcagaagaaacaaacaaacccaagaggcaaccaagccagcggacaaggcggcgagacgagaacaaccaaagccagccagggacaaaaacacccgggagccaaagacgcccaaagagacgaacaaagacgaggggggcccaggaccaggaacagaccccacagacgacaaaaagccacaccaagaaacacgaaaaaacgggcaggagaggcaggaaagcacagacgggacccgaagaagcaagaccaaagaacgaagaacggaaaagcgcaagagcgaggcaacagcggcaacaaaagcagaaacgcggagaaaccaaaacggcaacccaagccccaaagcaccacagacagcccccccccccacccacaaaaaaaacaacacaccacaaaagaacaaagaggaaaggacaaggagagaaaaaacaaggcaaaacaagggacgagcaaacaggcaaccgcggagaagcaaaggagaccgaagaaaaggcaaaaggcaggcagaaggccgagcaggaacacggaagaagcaaaaggaccacagcggccagagaacaaacaagaaacaaccaaaaaaagcagaaaacggaagaaagcgacacaagaaccaaaaaacgacagaaccgaaaaccaccaaaacacagccaagagaaacacagcaccaacaagcaaaccgcgcccagcccaccagaacgaagggaaacgaaccgacgcagcgcagggcaaaaccacaagggcaagcacgaagaaagaggaaggcacaccaaaaaaccagcacgcagagacccccgaagagaccaaaaaagcagaaaaaaaccggaagaagcaaaaaacaacaagaaagaaaaacaaagcgccagcaggccgacgggccggggcagagccacgccgaacccagcacgggaggcgacaaaggggacacgagcaggagcgagaccagcggcaacagggaaacccgcccacacaaagcaaacaagccaggcacgggggcagcaccgaacccagcaacgggaggcaaggcagaaaacacgaaagggaggggagggcaggagcgagacacaccaagcacccagccggggacggagaagaccgccaaacaaacaaaaaaaggaaagcagagaaacgaaaagaggccaaagcaaaaggcaaccacacaccacccggagaagcacaacaggggaacgaggcccagacaagaccaccaaagccacaccaagcagagcgggcaggacagaaaaccagccccacaaaaggaaaacgaaaaaagaaagagggaaaaggaaaaacgaaaaaacgacaagaaccacaaaaaaagaaaaaaaaggaaaaaaagcagaagggcagaggaaacccaagaaggaagaaagcccagaaaaaggaagacaagacagacaccaaaacccagccacccccaaaggagcagcaaaccagacaaaaaagagccacaaacacgaaaacccaaaacagccggggggccaccaacaaagacaacggaagcaaagccgcaggaagaagaaacagacagaaaaaaacagaggagccaaagaacgcagccaaacagagcaccacaaggcgaagaaaacccgaacacaccgggcaaaccaaaagacccaaagaaagccagcacacgaccacgccccacgaaacaacgacaaccagcagccacagagacgacaccaaaaaacagagcagccacacacgcccaaagacacaggaaggagggaaaaggcacaaaagagaacaacaaagaacacaggacaagccgacaagaaaaaaggagaacgaaacgacgagaacacaccaagcaaaagccacagggcaaggcaacccgcccaccgaaaaacacgccaacacagaccaaaaacccaaaaagccaacaagaaccaccccaaaaaaccacaagaagccaggaccaccacaaaggcaaggacgcagacagaaaaaagcccgaccagaaggccaagaaagaaaagccaaaaaaaaaggagagaacccccaccaaaaagaaccagagagacagggcgacaccaaggcggaagcagggcaccagggcacaacccaacccagggcccaggacccccaccagccccgagaggggacacaggcacaaacaaccagccaggccagggagagaggggcaacaggcccaagcggccaaacccgggccaagcaaccgccaaccagcgcccaaagcaggaaggaaagagccagcaccagggaaccaacagagcacagaaaggagcaaccacacgaaaaccaacggaagaagcagcccaagaaaaacaaagcaaacaaaaacagaaacccaggccaacggaaggaaaaagaacgcaaaaccaggcgcaaaccggagaccagcaagaccgccgaaaacaacaagcacgggcgaaaaaaaaaaggaagaaaaaagaaacaaacacaaaaagacaaccagaaagaaagacaggaccagggaaaacaccaaacaaagcaaagccaaaggcagaaggcacaacccaacgggaacacagaaggacaaacagaagagacaagggaggaaacgccagaaacgaaaacaaaagaaaacacccaagaaaacaacaaagggagcaaaagaaaagacaacagagagagccaagaaacaaacccaccaaaccaaaaaaaagccaacggaacaacaaggaacccacgggacaagggacgaaaaggccaacagagcaacacagagcgacggaggaaagggaaaagagcagcaagagacgaaaaccgccaagcaaaaacagaggcccaacaaaaaaaaaaaaacccgagaaaaaacgcggacacacacaccacacgacaagaagccaaaaaccaggcacagaacagacacagcggcacgaaacgcaacaaacacaggacacagacaaaacgagccaagcaagacaaaaaaaagcaacaaagacaaacgaccaaaagcacgagacaaaagcaaaagacagaagagggcaaaagaccaagcccaaaaaaaaaaaaaacaaagcgccgggaccagagagagccacaaaacccacgagcaaaaaggaaggccccaggcgggccgagaacgggaacaagccagaaaacaacgaaaacaaaagaaaaaaaaaaaaaaagacgaaaaaaagacagcagaaaggcggccaaagcaagaaaaaaccgaacaaaagcaaagaaaaaagcaaagaaacaacaagaaaagagccagcacaaaccagacccgaggacaaaaagacaaccggaggagcaaacagcagaaaaacgcaaacagcacagcaaacgacgcaagacaacggagggagaaaacagagcagcgaggcaaaaagcaagaacaagagaaaagcacagcacaaaaacccaggcaaaaagacaggccagaaaggcagccacccacagcgggggcccaaagcaccgagacagacccgccagaccccagcgaggagcacacgcaacaagcagcccacggaaaacccacaacacaagccacccaagagacagcacgcagaacgcgaaaccccaccagcccacgccaacaccaacagcacggcagcaggaaagaaggaccagaagacccgcgaaaaaacaaacaaaaagaccaccgaccaaagcaaaaaaagacaacccccccccacacagaaaaacgggaagagaccccaaaggaggccaaaaagcagaagggggaagaagagaagagcacgcccaagagagaaaaaagagccagaaaaaccgcccaacccgagaagccagaaaagaaccgaagaagaaggaaaaaaaaaaaaaaaaaaaaaaaaccaaccccacagggagcaaacccaaacaaaaaaagaaggaccacacacgaccaaacaagcgccaaggcgcaaagagccccgaaaagcaacacaaggcgccccacgaaaccaagaaagacaacaaaaggcacagccgacgacaaacaaggaaagagcaacaagaacgagcccacggaccgaggacacacagacgagcacccacgcacacgccacagggaagagcgggccacccaacgcaggacgagcccagcaaggccggcaaagaccagaaacgacaaaacaaaaggcaaaagacaacagacaaaaccaaagacaacagggggaagagaaagacgggacaaccggaccacaaacacaaaccggcgacccaacaccagaagcagggacagaggcaggcagaaaccccgacacagccgacacccaaccagacacaaaccaacgccgccaaacaaaccagcaccaccaaaaaagcacagaccaagacaccacaaccccaaacagaacaacgaaagcaccccagaacccaaacccccccaaccaccagaaccgggaggcccccaaaccaaacagcaaagcgccacgaccccgcccagcaccaccaaccaccacacaaggaaaacaggaaagacaagccccagccggcccgcccaccccagccaaacaagaacccccaccaccaaagcccaaccaaccaacacccacacgccccagacaccacacagcccaccggcgagccccccaccaaccacacgaaagacaccagcaagacagccaccagccccccaagagcgcgggcccccacaaagaaaccacaagagcagacggccccacccaccacggacggggaaaacaagaaccgacaaccagcaaaccggggcaaaacaaaacaccacaggcgcaaagaacaaccagcacaacacaggacaggagccacaaagaaaacaggaagagaagcagcgcccagacaacagcagaaggggacgagacaaccaggaagccagcccagagcagcgaccccagcaaaagggaacagccaccccaaggcaccagagagaagaacgggcaagacagaacagggcggacagaaagcaggcgggcaagacggcccacgaaaacaaaaaagaaaacaaagaggaaccccccgaccgccacccagaccggcgaaaagccgaaagaaaaaacaaaaagaccaagccaacagcccacccaacccagaagaagcacagcaaggaaaaagaaaaaagaccgcccaccacgaggaacagccggcgccaaagcaacaggggaagagagagcacagagcaggcacgccaacaagagaccaggagaacaggcaaaggcagcacccaagaaagcaaacacaaaagcaaaaaagaccaacaagaaaaaaagaaaaagaggaaaaacacacccacacaaagaaaagccagggggaacaaaagaaaaaaagcacaaaaaggcgaagacaggacaggaagggcaacagccacaaaaagggccaagagcaagcagaggaggagcccaggcagaaaaggaaagaaagcagaaaaagggacaaaaagagagggaaaggaaaaccacaggaaaacagagagggcgcacacaaccagggacgaaaccccagaaaacggccacagcaaacaaagcaggaagggcaccagcacaagggccccacaacgcggcgcgggccaggcaggcagcaaaacaaacggcccccaacagcaggaaagacaaacagagaaaaaaacaaagcgaaacgccccagaaacagccacagaaaaggcaaaaaccacaaaacaaccaaaaaaccaccgcaaaagacccaacggcagaaaaaagaaacaaacgcacagaccgcgccagagcaacagagagaaagaagcgacaagagaaaagacaagaccaccgagcccaggcggaggcagggcaaacaggccaccgcagcccgaccccagccaaagaacccagcccagagcgggacccagggcagccccacaccggcaaaaagacagaacggaccacaggcccaggcggccaaaccgggccaagggcccccccggcccccaaagggcaaagcagagccaccagcgggccagaaagaaaagaaacaacaccaacacacgccaaccccaaaagacaaaccccacaagcggcccgcagaaaacaaaaaaaaaagcacgaaaacaaccccaccaaaggaccaaaacggacagagggcggaaaagccacaaccccacgaggccgagaaaacaagcacgaaacaaaggcaaccagaaacaagccagccaagcagaagagacggaccaggggagccaaagcgccaaggaaagcggacagaaagaagcaggagaggaggggaagaagacaaacacagacagaaagggcagaccccggagaaccgaaccccgaccaaaagcacccaaaacaccacaaaacgcggaggagaaaagaaagcagaaacagaacaccaaaccaagacaacagcccacaaaaaggaaacaccaaaaaccaaaacaaaggagaagaaagaaacccgaacaagaacagaagagacaccgcacccacaaaaggagccagaaagaaacacagggacaggagagcagacggacaacagacagcacaaagggggcaaggggagggaagcaaaagaccaccaaagggaaagaaaaaaccaaacagaagcccacgcaagagcccgaagcacaaccaaaaaaaacaaccaagagaaaaccggaaagaggcagaacacaacaaacaaaaaaccgagaccaaggccagaaaaccaacaaacagaaaaagacgaaaaacaaaaagaaaaaaaaacagaaacaagaaacagggaaacgcagagaagaaaaacagaaaaaacaaaacagaaagggacacgaacagacaaacaaaagccaacaggacagaacccgaggcacaagaaaaaaaaccaaagaccagaacaaagaaaaaaagagaaagccggaagagaagccaaaagcagaaaccccacagggacaagcgcaaacaaaagaaacaaaaaaacaaaccacaaggacagggacaacccaacagcaccaaaacaagccggaaagagcaccaaaaaaagcgaaagaagaaaagaaggcggcaaaaacaacgggaacaaagcacaagggcgccagaacggcacaccccaagaaagcacccaaaacgcaaccacacggaaagggaaaaacgcccccaccacagagggaggacaaacgaaaagaaagaaaaaaggaacaaacaccaacagacacaggacgcaagcccgcacaaaagaaggacaaaaaagagcaagagcccccacccaagggggaacgccaagaccccacggagccgcaaccagaagaccaagcccaaaacacaaccggaaaacaaaaaaagggagaagacaagcaacaaaacgagaaaaaagaacaaaaacaaagcggaaaaacgacagaaagggcccaaaaaacaacgaccaggggaacgaaaccacaaaaaggggaaacacgagaaacaaaccaaaccaggagacaaagaaaaaaaaccccacacaaagacagaaccaaagacgaccgaagcaaagcaagacaagagagaagcaaacgcagaacaggaaacaaaacgggagaagacccaccaaggaagaacagaacaggagaaaagcaaggagaccaccagcaaaacccccagccgaacacaccacaaaaaaagaaaaaacgggcaaccggcaggcacaaaagcacagcaggaccagaccacaacacccagaggagagacaccacagaaaggaaaccaaaacacagaaggaggcaacggcacaaggcggagagaggcgagggcgcgcaggaggaacccagggcagcccagcagcagagcaacacaagccacacgcagcaccaagagcccagccccgaggaaaaacagacccaagaaccggaagacaaagaaaaaaaaaagaaaaaacgggaacagcaaggaaaaaggagacgagcgccggcccaggcggaggaggcaggggggccagcaacgcaaccccacccgggcaagcaacgcccagcccggagagcgggaacacaggcagcaccaccacgccgggaagaccagagaacggggcaccagggccaggcggccgaacccggcccagcgaccgcccgcccggccccaaaggcgggaacagggagccaccagccggcaagcaacagaaaaaaaagacaaaaccacccaaaaaaaacaaaaacacccccccaccacaaccaaccgacaaacgaaaaacgcggccccgggggagagggaacacacgaaggagaaagcaggaaaaaaacaaaacacaaaaggcaggcagcaggcagggggacacagaggccaagcacagagacaggcaggaaaaacacaaaacccgaaacaaaaagacagaaagagaaacacgagagaaaccaaaagacaaggaaagacaaaaacaacaacagaaacagaacaaagggaaaccgaggcaaaggcaagccgcgcggcagagaaagggaggggggcaacgcagacagacagaaagaacgcaaaagaaaacgaagaaaaaggaagaccaacaacaaaagacaagacaaaaacacaaccgacagaaaaaacagcaaagccagcgccaaccaaagaagaaagccaaggagacaaacagcagacgacagaacagaacacccaaaaggagacacaaaacggcccaccaaccaagagccgagaccgagcacaaagaacaaaagaaaaaaacacccaaggccacagacacaagcaggaaaagacgaaagaacaaaaagaggaaaaaaaagcaagcaggaaagcagaagacgggcaccgcaaaagagaagaaggcaaggggcaaaacccaggcaacagcaacgaaaaaaagagagaacaccagagccccgaaacaaaacccgaccaagaaccagaaccgaacaaaaaaggcacagaagaagcagacccaaacaaaaggccacgcccaggaccaggaccggacggaaaccccaacaaggcagacacaaacagcagacgccaaaggcagcccaggaccaaaaaaacccggaagaacaaacaggcaaaggcaggagaacccagaccaacgaggagaagcggaagaacagcacgccccaccagaacagggacggggcaagccacgccggcacgccccgcaaaaacacaccaggcagacaggggcgacaacgagccagccccacacccagagaagcagagcaggacagaacgaccaaaacgcgagccacccaaaccgccaccccacgaaggcacgaaagaaacaaaaacccggggggccgaaccaaagaacaaacaacacaagacgacaagcaaagacaagcacgggacaaaagagacccgaaagagacccagacacagcaaaaaccgaaaccaaagcaggcacagagcgcggggaaccccacacagccaaggaagacacaagacgaaaacgcgaacacaaggacaacagggcacggggccgaaacgggggaaccgcggccagaggagcgagcagcaccccagccccccacagagcggaccagcaccacccccacaagaggggcaaccaaaaaccccagaagcaaaaagcccccgagagaggggagaaaaacccccggagagaacacgaaaagaacaaccccacgaagagaagcgaaacgccccccagcgccaaaaccaccaagaagaaaggcaaccaggaggaggccgaggcgccggagacaagaaagcaccaagaccaaaggccccccacagccgaccaagggaaaggccaggagaagcgggcagagaacaggacaggcagccccccacaccaaagcagggcacgcaaagacaaggaaaaagcaggacgaaacaggccagcgaaaccaagaggaaccagcaggcaccaggagcaagggaccacccgggcagcccgccccaagccccaagcccggcggccgcagggcccccggggccgggcgcccgcgcggagccccgccacgcccaccggacgcacccgacacaacgccccccgcccccagcagcaacgccccccgcggcccaagcccgggacgggggaggaagggagacgccgccgcccggccaggccccgcgggggaccccccgccccggcagcgccccgcggcgggcccggcccgagagccaacccggaaagcgcgcggcaggaagcgagcggccgccgggaagcccagcaccacccacccgcgccggggcggcccggccaggcacccacccgcgccgggagcgcgcgcccgacagccaggccgcggccgagggaaccccgcgccgagcgccccccccgcgccgcgcacagcggccccagggcgaccccaagaccgaagcaccccggggcgccgccccccccacaccccccagcaccccgagacccgacacgccagcggcccagcggccccggggaagcagaggagacccggggcgcagacaagcccgggccccggccccggggccaggaggggcggcggcccggccccgccgcaccccgcgcggcaccgccgcagcgcccgcaggcggcggccagggcccccggagcgccccgggcagagcccccgagccgccggccgcccgggcccgccgcgcggcccggaaaccacccggccagggggaggacgacgcggcgaagcgaagcggcgaggcggcggccagaggcggcggccgcggggcggccccagcacagggcacggcggggcgggcggcagccggcccggcagaggcggcagcgggcgcggagcccccgcaggcagcggcggcagagcgggccacagggcacggcaccggccgccaggaagccccggcagcccaggcacgaggagcccgccggcgccgccgcagcgccgcaaccggggccgcgcccagcccagcccgggcggagccggaggaacaccaggcagccaccagggcgcccaggcaccgggccggccggggccccgcggcgcagcgccgccgcgaacgccccagcgcgccccaggggccgcccagcgccagcagcccccgcggcggagcagcagccccagcgcccgacccgcggccgcgcgcccagccgaggccgcgccgccgcccaccccagaaccggcccggcccgcggcgcggggccaccccgaccccccggggaggcccgccaccgccggagaggacaggcccgcggagggcgcgccgccgccgcccgccgccacggcccggagcccccgggcgcgcggcccgcacgcggcccgcgagcaggggggcgggcgcgcggacacggcggggcgcgcgcgcccgggaagccccgagggcggggccggcgagggcggggccgggccggcgacggcgcccgggaccccccacgccgcccgcggccgcgccccgaggagccaagcgcgggccccgccccccgagcccccccggggggggacgcaggcggagaccccgcggagacaaggccccggaaaggagggccggccggacggaacaaagccggaaggaccccggagccagccccgcgccgcgccaacgccgccaccgcggggccccgccccgccggggggggggacgcccccgccgcgcgggacccgggcaccacccccccccgacgcccccgcccaggccggaccgccccaacccggcgggcgggggcccccgcgggcccgcgcggcgggcgcacaagccacgcccagccagggggcgcgcccaagcagggggccgggagcgcacccggcagagacgggacccggcagaggaccaacaaaagaacaaaaaacccacgccggggcgaccccccagagggcaaggagccgggccagggacgcgcccgcgcaaaaccacggggcccacccgagggagaaagcccacagccccagggcccacacccaagcacgccacagcggaaggcaaggcagaaaagaaaacaccaagaaacagcacaggcggcaccgaacacaacccaagcggccgcaggcgacagaagaaaagacggggaaaaaggggcacccaaaccacagcagcaagaaagcccagcgaaaaacagagagaagggaagacgcaagggaagcacaggacagcccaaagaggaaacacagggaaagagcaaaaacacacagcaaacagaaagacacgcaccacacacacgagacaaagaaaaaaaaaagaaacaagaaaaagagacaaagaaaagaaggcaaggaaagcaccgagcagcagagaaaggaaacgaaaccaaaggaacaggcaaaaggcaaaaaaggagcaggcacacacaacaacaagcggaacgcagaaaagacagagaaacccaaagggaagaaaaaaaagagggccgagaaaaagccaagccccgccaacaggagcagacagaaacaagcaacaccacagcaccgaagcaaagcagcagaccaaggagcaccccaagcaggcagggaagcagggaaagcagagcaaaccaaaccaaccaaccccaaaacaccaacaagcagaacaggaccagcgagccacaaccccgagacgaaa

SEQ ID NO: 240 - RNA, 8385 nt, Homo sapiens
acgcaggagcggacgagccacgcacacagccgggccacagagcaagaccgccaaaaaaaaaaaaaaaaaaaaacgcaacaagcacaaccgccagaaaccacaggggccgaagaaaggaggaaacagaacaccgaccgagcgagagaccagacgacccgcagcccgcccacagagcggcaggcgggggaaggcgcagaggaggaggagcgacgacaccgaacagggagacgcgccaggccgcaccacgcccgcaggaaaagcacagaaaaaggacccaccggagcgaacgagcgccaaaaaggagaaagggcgaccgggcagcacagacaacacagacacacggcacacgggcaccagacacaggggcaccaggcaccagaccagagcacccacccaaccacgccccagccccgccccgcagacagccagcagcacagagccagagccgcaccgacaccacaccagacccagcgagccagccgagaaaccaccgggaggaaggcagaagaaacgccaaggcaggacgaagacgaccccaccgagggggcaggcaccagaggcggcgacccccaggaccagcagagaacacaaaaccccccaaagaagcaaccacaaagacacaaagggcaggacgacccaggccgagagcggcgggaaagagggcaacgaggccccaccccccccggcgagcacccgcggaacgacagggacccggggccggaagggagggacagcagaggaccaccccgggccgggggagaacaccggcccccgaagcagggccgggccggaacgaggcgacacccgccagcccggggagagagggaaggccggcgcgcagagccgaggaggagcgagcacagccccagagcccaggacgcaggggacaaaggccacagaaaggaaaaccccagccccgcaggccagaagcagaaggaagccacacccaagaacgggaaagcacaacaaaaccccacaggaagccaagccagcaacagcaaaacacccagcagcccacgccgaaccccacaccggcagcaacagaaccggccgaagagggcacgggaaaaccacacaaaacacgggcagacacagcagagcacagcaaacaggacaaaggccgccgggcccacgcgcagacaccgacgacgccgagcccgcagccccagcgcccccgcacgccgcggccccccccagggcagggaacacagccagcacaccagggccgcccggcgcgccccagcagccgacagggccagaaggaaaggggccccagcacacaccccaagccccccgcccgccgggacccacaccagggcagcccagagagcacccccacaggcccaggaccagcacaaaccccaagaaaaaaggaagacaaaaaaacacacaagaggacccacacccaccccgccacgacccgacaagagccccacaacagccccagccccagccagcccgagccgaagcccccccccaaagcagaaccaagccaccccgccaacagcaccgcaagacccaaaaaaaacgggggaacagagggccacaaggccgcaccaggcagaacagcaaaacaacaaaaaagagacccaaaaaagagaagcaagaaggacaacacgggaaaaacccaagccgccaaccggaagccccaaagaaggagaccggacccggaagggcgacagaaacaggccagcagggcagcgaggaaagcccaacccaggaccaggaagagcacaggcaccaaaacaacaaaaagcaaccggccaggcacagggccacgccgaacccagcacgggaggccgagggggcgacacaaggcaagagacgagaccaccgaccaacagggaaaccccaccaccaaaagacaaaaagcgggcagggggcgcgccgagcccagcacccgggaggcgaggcaggagaacacgaacccgggaggaggagggcaggagccaagacagccacgcacccagccgggacagagcaagacccaccaaaaaagaaaaaaaaagcaacccaaaaagaaccacagaaccgcgcccgaccagaagacccacccccaagccaagggaaaggagccacaaagcacggaacaaaaaaggaaaaaacaaaaacaaaaaaggacgggccaggacacagaagagagaaagggccagacaggccaaccgcaagcccaaacacgccggaaggagcccaacagcgggagaagaaagcaaggacggccacacgacagcccagaagcaaccaaaacgccccgaccgacaccacccgaaacaccagagggaaggaggcgccggaaggccaccaaccccagccagaagagaaggcgccaggggcaggagcgaagggaagacgacagaccacgggcaggcacgaaggcgccgccccacccagggacgcaaagcacagcccagcccacgggaaacagggaaggggggagcaaccagggcgaggcggacaagaaggagagacacgcggggccacaaaacagagcacagggcccgaaagcaccaaaggcacccacagcacgaaaaaaccgcgagaagacagccaccaggagggagagacacaggacggaggaccacgaacaggcagacccaggaaagcggaagcagggaccggaaagagcagggaggagaaacagggcaagagcagggagagagggggccgaaagcaaggccccagagcaagcaaacaaaccacagccagacggggacaggaaacacaggcaggaggggcaggcgggcgccggcgggcaaaggcaggggccaggccagcgggaggacgggggaaaacaaaagaaggagacccccaaagacccagacaaaggccagagaggcaagggagaggcgagcccccggggggaagaggaaccagagaagcaccacaacagcagggcacaaggagagcgggcgggggaaaagagggaggggggggcagccaggcaggagggaagaagggcagaagacgaggacaagcccggggagcccccagaccagggcccgggcaaccacgccccgcaaacgggccggggggaaggacagcggggccaccaggaccggagcaggaagacacaggccgcaggggacccgacacgaaaagaacgagcggggaggggaaggagacaagggcagcagaggacacacaggacgacgcaggacaggcgggaaacgagccacgaggagacccaggcccggggagcagaggagacacaccacccagcacccccagccggcccgggcccacgaacgagaaggccccaagaccggagcaacaaaccccgagggcaggcagccaagaggcagccaggcccccagagaagaccgagcccccacagagggggcaaaaacaaaggaccaccacagaaggcgaaaggcaagaacgacggagcaccaggacaaccggcccagaaggggccggggcgcggagaggcccccaccaccccaccgcgccgccggacccacagccagcaccgggcaggaagcccgccagaaagcagaggaggcagccaaggaccacaaaccaaccaaacaaggcaaaagacaggaccacgggcaacaggcaggaaaagaagacagcacaaaaaaaaaaacccaaaacaaacgaaggaccagacagacccagaaaagcaggccgaagaaagagacagacccccccaggaaaaccaagaggagcccccccagaggacaacggcacaagaagaaaagcacagcaaagcaaacgaaaaggggggggacacccaaagcacaaggcaacaaaaggacagaaccaagggcgcagcaaagaaaaggccgagagggggaaagaaacaccaaaaagaaagccgaaagaaaagaaaagagaaaacgagaaaaaaaggacaccgacgcaccaaaacagggccgaaacaaaggacagagaacaggggagaggaacacgaaaaagccgcaacccacaggacgccagacaagcaagagggcaacagaggcaggacgccaggggcaaaagcaagcagcaccacaaacccccaagagaggagaaaaagcagggaggccagcagcgccagaagcaaggggaaagcagacgcacagaccggggccagcggcccagaggcgaggagcccaggacgcggcaaccaccgccggacgcagcccacccggagggggaaggggccaggcagcgcggaccaggaggcccgagggggcagggcaagagggagcagcgcacgaccagcagacacgggggaagcagaggggacaccaacccccagcccacggcagggaggggaagcaaacacacaaacacacagggcccgaggcagcgcagaccacacacccaggccccaagcacaaaaaacagcccacaaaacccacacccaccggcaccacagagccccaggaggccccaaaagaacgaacggcaggaacagaggagccacagcggacaaaaccgccagcagaaagacacaccacgagcccagaagaggccgaacacggaggacaggaacaaggggagcgcacaacagcaaccggagacagaaacaaacaaaggacagcaagaaacaaggaaccacaagggacaaaaacaacaagaaagaaacacaggcaaaggacgacgaaacggagacacaacgcaacccaaaagaagacaacagggcccacaacaagaaaaaagcacacagacaagagaaagcaaacaaaaccacaagagaaccaccacaccagcagaaggaaaaaaaagcaaagaagacaggcgggagggagagaaaaaggaacgcaacacggaggggagaaaagcaaccagggaagacaggggcaacccaaagaccaaaccagacccagcaacccaacgcaaaacccaaaggaaagagcacaccgaagacacagcacgcagggcagcacacacgaagcaaaaacaggaacaaccacagcccacaagaagacggaaaagaaaagggacaaaccccaggaaacagcagccaaagaaaaagaagagacagcccgcaggaacaggaggagcggaggccaaccagcaaacaacccaggaacagaaaaccaaggcagagccacaagggagcgaagaggagaaacagggcacaagaggggccacagagggggaggggggagaaggaagagacagaaaaaaaacaggagagaaaaccggagacaaaacaacgaaacaaacccccagacagagaccaaaacaaacccgcacagacccgaacaaaagaaaaaaaaaaaaaagcaaaaaaacagaccaacaaggcaagggaaggggaaggcgacagaacgggcaaggcacacgagcccaagacgcacaaggcacacacgggagacaaaccagacgcagcacagacaaccagcccaaccagggacggaaacagaagaccccccaggcgagcacagaagacagcaggggcgagccggagagacgcagggaaaaggaagaaccaaggcaagcaccaagcaccaacagcagacagcaaaaagagaccaggcggagcagaggaccacacccagaagccagcaaaaggaaacaacccaaaacacgcccccaacgagagcagcagccaaaagcagaaaacaagggcaaacagaaaaaagggggagccaagaagacaacaagaacagcaaaggagaaaacggcgcgcaggccaacaagcacaccaaggaggcaacagagcacccgcggagggacaaaagacaccaagaggacaccagggaaaaaaaagcagaggagagaaggagcaggaaaaacagccagcacgaaagcgcaagaaacagccaaaggcccaaacaggcccaacccaaaaacccaaaacagggaaaagaaggaagcgggcagaaaacggaaaacacggaagcaaagcagaggcgccccgcaggcacccagagcaccgcaaccaggaaccaccaacaagaaaacagcacacggacgcacaacagcacgagcggaccgggggaaagaggcgggggggggacacagggcacaggcagaacaccaaacaagagaaaggaacagcgggaaacgccggaaagagaaagaaaccgaagagaggcaggaagcaagaaagcagcagaaaggacaacaccaaaaggggagccgggggggaaaacaggaacccccacccaaggcgcacaacagaacacccaagaaaaagcgaagaagaacagcgagcaacagccaaagaaacacgcacgggagaacggcgcccaggagagccgcgaggagccgaggggacggagcgcgaaggccacagcagaagggggcgcaccccaagaggaacccacagaagcccaaaccacagggaaaagcggaggacaccgaggggagggccgcagagaaaccggccaagaagggccagcaaagcagagagagcgaacaggggagaaaaaacgcaaaaaaaagaagccgaaaccgacaacccccggacacaacccagccgcccagcagacaaggggcgagacagggaccagcaaaacccaaaccccgaagaagccgccggaaaacaaaagcagcccacccacagaaaacgacggcagcccacaacccccgagaacaaaaacacgcacgagacaccaccaacagggaaaccaaaaggcaaaacgaaggcaggcagggcgggccgggagcaggcagggagaacagaagggggagcacagagcacgagggagaccgcagagcgcggacagcgagaacccgaaccagagggaggaaaaaggccaacgcaccaacaaagaacgaacaggcaagaaaacaaggggacaggagaaggagaagcccacgggcggagaaacagaacgagaagagaaaagcaggccccaggccgacggggcacgcgcggagccaacgacgccgcgggcccgcaggaccccgacgagcgaaaccaaaaacagaggaacacagaagagcgaaaagaaaaaagggaacacccaaagagacaaagaacagagaggcgaaaagaagagagcgaaaaaagccaacaaggaaaccccaggaccgaagaaacccaaacaaaagcaacacagaaaacaggcgcagaacacggacaaaaaaaggccaagaacaggccagaacagaaagacagggcgacaccggacaaaaacacgggcaaggaaaacagacaaagacacgccacaaacagaggcacccagccaagaagacagaaaccacgaaccgaccacaaagcaaagcgaaccacgagagaagagacgaaagcaaaggagacacggagcaagaacaaaaaacaaggaggacagagaaagaagagaagaacaaggaagagagaagcaaagcacgagagaagcaagcaccaaaacagcggaagcgaggaagggcagccagagcaaggaagcagaccccaggaagcccagcgaagaacgcgcaggaagaggaagagaagacagaaaaagagagaaacacggaagccgcaaagcaaaggccaaaggagggccccccccaccccccaggggaaggacacccacacaagcggcacggcgagcccccccgcaaaacagcaaccaaacgcgggccaaacaccaccgggcagagaagaagcccccgccccaacacccccgaaaaaaaaacaacccccaccccccacgccaccagggccgaggcggaggaaagaaaagccagccaccacgacccgccccccccgaccaccaaaaggccaaagcaaaaacgaaaaaagacaaaaaacccaggggacgaaaacaacccacaaaagaaaagaaaaaaggccagaacaaaacgcaaaagaaaaccagaggcaacacaaaaaacaaaaaccccacccaaacaaaaccggacaagaaacaaaaccacagaacgcagcaccagggcaagaaacgaccacaagaaaaagagcacaagcacaggccaaaccacacagaggacaccggacaccaaggaaaaagcgcgagaccaaacaaccagaaaagaagacacacaaaaaggaaagggaaagaagaggaagcaacaggcaggggggacaacaggacaaaccagcaaaaaaagaaaccagagcacaacaggccggcacagacaggcccggccccggcacgagccggacccagaccaaccaaacgcacaccaaagccaccccaacagggggggggcccagacgggggccaaaacaagaagcccccaagaaggcaagagaaacccaacaaaagcacgggaaggaaagcagcgacaggaggaaaacaccacccaaagcacaagagaaaaaagggccgccaacccagcaagaaagagcccacgggggcagagccagaggccggagaaagagaggaccagcccacagcaaaacagcaacagcaccacgaggacacaagaaggggggggggacaaaaaaaacacccaccagggagagaccacacgaagcaaaccacagcaagcagccag

SEQ ID NO: 241 - RNA, 65 nt, Homo sapiens
gcaggaaacacacgaaacggggcggggaagccgccgaaagggagcccaagaagcagagcgggaag

SEQ ID NO: 242 - RNA, 1371 nt, Homo sapiens
gggagacagagggagaccgcaaaaaaaaaaaaaaaaaaaaaaggaagaaaaaggcaaacaaagaaaaagaaagcgcgcacagcagacaacagccaggcagaagcaaaaggaacgagggaagccagggaaaaacccggacagcccaaggagagaaggaaacggggacaaggggggcacagcagcggccagaggacaaacagaaaagcaccaacacaaagccacaaaaaagggacggcccaacaaaaggagccggccacaccaggccaaacccaagccgcaaggccaagaagggcggggcaagggacaccgccccccccccgagccgcggcccccgccggggccggccccgccaccgccggccccgggaaggcagacgccacagccgccaaggggggacagaagacaaagcccaacaaaaaaagcgccccccccaaacaagacccacgcccgaacccggaggccgggcgcgcgcaccagagagagagcaggaacaacccagagagacccacccagccgacccacgaggggggcaacaaagacacggaaaccccggggcgggggggggaagggaagggagagaaaggaagaagcaaaagaaggagggcggccaaccccgcgggccaacggccgcagaccagcacagaaagacagcacgagaggggggaaaaagacgacaccgcgagaaaaaaaaaaacgaacccccgaaaagacacaaaaacagagaaagcagcacgcacagaaaagcagacacgacgagaccaacaagaaaacgccgacccgcccccaccccaaaaaaagccaaaccaaaccagcgaagagcgcacgcacccgacagaggggggcaagacacaccacaagacccccaaacaaagagaaaaacagagccccagaaaggagagcagcccagccgcaaaaaggaacgcgcaggaaaaaaagcaaacccacaaacaaaagaaaaaaaggaaggccaaaggacacaaccaaacaaccaggaagaacagagaccaaagcccggcgcacaccgaaaaagccacccaagcccgaaccgccgaaggggcagcaagcagcaagaacaagaaaaaaaagcaaaacagaaagcaaagggcagagaaagcgaacaaggaaaaaaaaaaaaaacaaaccaaaaggaggcaaagaaaaacaagaacaaagaaaaagagaacacagggcccaccaaaacaaaagacaaagggggggaggagaagccggcaacagacagcggggcggcaaaagccgaagaggagaagcaacgagccaacagacggccggaagggcagaacgggcaaaaaacgaaaaaagccagagaggcacgcacgggaggggcgaaacacaaacagcggaacacaaagc

SEQ ID NO: 243 - RNA, 6696 nt, Homo sapiens
agagaacaggcggggaggggggaggcgcccgggagacaggccagcgcaaaccccaccgcgcagccaagccaagggcgggccccagaacccaggaggagaaagacagccaggggcagcggaccccagcacacccacccgcacaacccaggaggcagcaagacaccccaacggaggcaaagggaggccaggaaaaaggccggcccgggccaccaccaccaccagaggggcagagcccagacaaagcgacggggccgccccgacgacccgccacagcggccgcagggcgagagggaagaggagagaaggggcagaggagagagggggaggagcacagggaggaggcgccgggcccgagccacccagaaagaaaaggggggcaggaacgcaccccagggcccaagcgcagccacccaggacaccacccaagcagcccagcaagggggacccacccccgcaccaaggcagacccaagggcccaggggcagccagaacagggggccggggccgcggggacaagcgcggacaagaagcagcacgcagaacggacccaggccggccccacagggagcagggcacagcgggacagaggggagggcccccccacccggaggggcagaggcaccgcccacggagcggcgcagccccccgcggcgcccggccagcccggggagcagacgggagcagcgggcggaccaccccgccggaacgcgaaggcggggaggagcggggaggccaacgacacgggcggggccggagcagaggccaaaaaaaaaaaaaaaagacccaggggcaaaaagcgcagcaccaccacagcgaaggggaaagacgagccagccacggggaggggcacgcaggcggagggggacaaggggcccagacaccagccacagcggccaagcccaggaggggagaggagacgcccagcacccacgcggccggccagaccaggcaggggcagaacgggcccaagcaggcccgccacgagagaagagacaagaagccacagaaccccccgggccgcagggagccggcgggaaaccgagagccagaacaccagccgccaccacccgcagccccagcagccaggaaaagccccaccggaagcgggaaagggccccaacagggggcggaaacaacggcgagcaacccccccccgggcccacaggaacacaagaggagccggagcccggagccgcccccaccgagggcggggcaggcacccccggcccagccacgaaaaggacggaaagccccaccccagggcaaagccgagcacccggagggccggaaggaagcccacagcccgccggggcccgaggcccgagagagcccggccccccccaaacgccccacccaaaccagcgcacgacagagagggacaccgaaagcggggcggagcgcgcccgcgcgcgcggagggagggaaggggggacaggagggaagccggggcagggacagcaggggggagccacccgccagcccagcagccagggccccaggcaggcaggccacccccgcccccgccgcccgcccgccggggacagcaaacggaggccaggcacgggccgaggggggagacccccaacgcagggcaggggagggagccaagggagccacgggcccagggccgcccaaggcagaagggcagaggggaggggcacgagcccaccgggcgaggacaagcggggggcggaacgcaacaaccagcccacggggccggggaggggaaaaaaagccgacgagcggcgccaacggcggaaacaccccgcgaagccggcaccccgcgggaggggaagagaccacaaagggcgccagagcccaacacccagcacagggcggggaacgcggaacagaccaccccccaacaggcggcgccacaggggcacagacacggaaagacccaggccaacgaaaggcagcagagcaaaagagcaaagagaagacccggacccgagaggccaggaacggcgacacccggccagagcagcggggcgggcaaggcaaaccacgggcccgagaaagcgaagagaaaagcacgcccacaaggagcaggcagaagaccgcagcacaagcccaagggaggaaggagggacaacacacgcaggagaagcgaaacccccccccgaaaaaagacgaagccccccaccccgcagccccccagcaccccaccccccccacaggcgccaagggccaggcccccccaccccccccacccaccaccccacgcgccaagcagcccgccccaccccaaggcgaccgccaagcaccaacaaccccacaaaccaagagacacgcacccgaccacgcccaccagccaagcccgcgcccaagcaaccgaaacaaccggccccaggcggagggccacccgccccccgccgccgccgacgggccagagcccaccggcgaaaacaagggcccaagcaagggggagcggccccgcgaacccccccaggcggcccccgacccagcggcccacgcacgcaccagccccccagggaccccagcccgacccaccgaccccggacagcacggccagaggcaccacaccgccccccacaacagaggccagaggccccaggcaccggcccgaaacggccaccacccacccaggcccggggaaacaccacgccgccaccaccccacccccggcccccaggcgccccaccccaagcgcaccccccgcaaggccgcacagcccccgccgccaccgggcccccccaacacccaccaagcaagagccacccggggccagggccgggcccgggcgggcccccgcccccacacgccccccccgcccacaccccagggcgaccccaaaaacgagaaggcaggcacccgggccgaaaacccgggggcacaccaggaccccggcgcagcccagggccgggccggccgggcccccccggaccccccaccacccccggcgcgcagcccaagggccacaccccccccagggaggggagcagccgccggaacaaccacacccaccccaccccacccccaacccagggccgagcagcaccaggcccccgaggaagcccccccccccagccccccccgccagacgggcggcgccccccgaacacccgggcccgccacagcaacacagggcggaacgcacaggggcaaaacaagcgccccccaggagacccaccccgaagggaacgacggcacagggggaaccacgggggcacggaaggcaggagggccccagcccccacccaccgagccagggccccaggcaggacaagcccaaaggcaccaggcccccacagccccaggaggcggacgccccagggagcccgccccacagggcaaacagccgcagggacaggagcggcggggccaaccccaggcaaggcccggcacagagggacaccagaaaagcggaaagggaagggcagcccaccgcaagcccacacagcgccgccgccgggggcacaaggacgcccggggggcaggaagccacagccgaagcagggccccagcccccggaggagacaggcaggcacgcccagagccaacaggcaggaccgaaagccagcaccccccaccaccgaacagcagcaggcacagggacaaaagacccccgggccacaggacaggggcagggcgcggccccgaggcaggaccagcccccaccgcgccaacccacaaggcccacccagggagcggcgccaagaaaaacaaaccggaagcagcgccaggccacagcacagagcaggcacagcgcagggaggggggggcccgagggccagcaccgagccaggccgccaaaacccccggaccagcccccccacaggacagccccccacaccaaaccaaccaccaggggacccaccaaacggcaagaagaacaggcccacaacaaacacagcaccaaacaaccaagcaccacgcaaagggagccacccagaaccgccacgcccccaggcggcacccgaggcccgagagcacgcaccaccagaaacaagacggccgcacccggccggacagcaggccccacaagcagcaagcagacccaccggcccggccccggggccacagcaagagccccacacgcccacaacccacccccacgcgcaaacaccgccgagccccggagaccccagagcgggaaggggagggcccccaaaccaggaaaggaccccaggcggaggggggccggagggggggggcagggggccccagaaggcggacccccggggaagagaccgcaagacgcggaaagcagcagggccccccgcccgcccgccaccaggacgcaccgccccccacccgccagagggcagcccgagcgccaaagcagaagccagccccagcgacagccagcagaacggaagccaaaacaccccgaaaacccagcacaggccccacagcaagcaaaaggacaacacaggggaagagaagagggacacacgagaccccagagaacaaacaagagaaggagaaccagaggacaggccaaggagaggccagcagggcggggcagaagaagaagcaagggggagggcccggcggcccaagggagacaaagaacgggggagggagcgaacgacgaggcaacacgagccaagcgaggcaggggcaccaaacccacagcacccagacacaggcgacacccaacagggaagggacgaggcacaagaaccaacaaacaaggggcagcgaaaggcagagccaggagcacacaggcacggccggggccaggcccaacaccaccaggagagggaggcggcacaagcggcaagaaccccaagcagcagccaacgcaacacaagagaagcaagcccggggccggggaccgggagggccagcggcccccggcccgggcaccacaagcgcaacaagcgacaaccgggcaccggggccgcggggaggaggccaagccaccacaagcgggcggagacccgaccacagggggccgcccgaggccaggaccccaggggaggaccaagcaaaggcagaggacaggagcaagacagggcccacacggaagcggcaagcaccgcgagcgggcaccacgagaagcaagccgagaccagcccacgcccagggagggcacgagagaggcggacaacagcaggggggcaccaggcagccagaggcgccggccacacgggcccaggaggagcccaggcacagacaccacgccaggaccacccaggagccgacggccaggaaaaaaagccccaaggggagcaaaacgacccagcgagagacccccgcccccagaaccaaggccaaacagacgagcacgcaaagacacgcgcgccggcagaaagaaacacaagcgagacgcgggcaggccgaaaacggcaccaccccacccccgccccgccaacgaccagcagcccccaacccaaagcaggacaccccccgacgccccaagaagagaaacccaaggccggcgccacgccccagcaccccagggcagaaagggcccgcaacagccaagcgcaaagaccaccgggccccacagccaacaggcaaggaccagcgagcggccgcagggcccagccacagcccggcccacccccacaccacccccggcccagcccccggccacagccggcacccccaccaagcccacaccccccaaccccaaagccccaccacccaaaccggggccccaaggcaagcagccccccaaagaaccagagacccaacccaaggcggacggcaagaggcaggggcagcgggacaggaaacaaaacaccagaccacaagccaacgccagaaaacacggggccccccagccgcacccgccgccacaccgggacccgagggcaccggacagccccagccccggggagcagccaacccccccgaacaccgccagcagccccaggacaccccccccccaaaccccccccggaccgccacaccccaccacaccaccgcagggcacagcccccagacgcccacgcagcacgcggaagagaccacacacccccagaccccggagcgaccacagcccaacgagacgagcaccgacaagccaacaccgaaccagaacagggggggacagagggcaaacacaaacccaggaaagacaaagggaaaagccaggaaaccgcgggaaaaaaaaaagaaacacgaagggcaccaccaacacagaaaacaaagcgcccacccacaacccggacaaaaccagcagcacacgcacagaggggagagaacaagggggcgagcacagggaggggcagccgagcccccccacaccggggggagacagcggggcccagagcagaggagaagcggaggaagcagacgggagggcccagcagcccacacaagaccccgacacagcaacaccccgccccgacaagcccccggccccaagagaacacccacaaccagcacagaccggaaccacgacgcccacaccgcagaaaacacgcggaccacagcaaaagcacgccgaagaggagacagcccagggcccgagcagccccacaggaccaggcagccaaaaggcagaagcagaccgggaaagccacaggaacagccggggggccgcccgcaccggcaaggcccaccaaccagggccggcagaggccaacgaaacaaggaggcgaaaagcagcccccagaggcccaggaccacgccccaaaaaacagcacccaaaagcgcaggagagagaggcagcgacaaaaaaacgagaaaaaaaaagacaacgacaaaaaaacaaaa

SEQ ID NO: 244 - RNA, 10204 nt, Homo sapiens
acccgggagcccggaggaagcacagccgcagaacgacagaccggcccccagagcggagagaaaaacggaaaccaggaagggggaggcagcagcgaaggaaacacacagaaggccaggaaaaacacacaaggaaacacacagaaggccaggaaaaacacacagggcacagcaccagccggaaaccacaaaccacacaacaaaaaagaccccaagccaggcaaaacaagaaagggagcagaggaaggggagaacgaggaaaaaccaaaacacagcaggagaggagagcccaccccgagacagccacgggcagaaagcccagggaaacccaccccccccccccgagacacagcaacacacaacccacacaaagccccccacacccaccaacccccacccagggaaccccaacgaccccaaagaacaaaccaaagagggcaaaacgaagaggcacgcccacaaagcaagaggacccaacaaaaaagcaagcagcccgcaagcccagcgcacacggaacacaaaacggaaaggacgaccgcacaacagaaaagacagccaaaaagaccccccagggaaagagcagaggagaaacagggaacaccccccagcaacgagacgaccaagcaaccacccagaaaggaaggcacgcaagagcgaaaagaggcaggggagcaacaagaaaaagaacagaaaagaaaaaaagacgaaccggccaaaaagcacacacagcacgcgcaccagcaagcaagcacgcaaaaagcagaaaaaacaaaaaaaaaaacccaaacagaaagagaaaacaaaggaaacacagcaggaccgcacagggaacaaacacgccccaagaggaaaagagaacccaagcaccaacaaaccagcacgcaacagaagccgcggaaacaccgcaaaaaacacacagcagcccaccaagaaggagcccggaagagagccaggaaggacgagacagaaaaaacagccaaacgacagaaaaaaacgccgcaggacaagcccccaccagaagcgaaacaagagagcaaaccgagaaaaacagacagagacagaaacggcacgccaaagggaggacacagaaaaacacggcccgccaggccgaccaagcacacacacagacacaccacagagccaacagagcaaacgcaaagccaagaggggcaccaggccacccgggacaggacgaggacaccaaggaccggacaaaggacacagcaggaagaaaaggagcagaagaaagaaaaagacacaagcaagcaggggggagccgccaaacggaacagacggggcagacaaagcaacagaccagcccacccacgcaggccgggagcgaagaaaagcaccggcgccaagcagagcgcaaaggggagggaaagggagacacacggccaaaccccgccaagccgcagggcacagacagccaaaagagggagaggagggaaaaagaaggcagagagcagggaggacaaaagagaagcagacaaagcgcagggaaagagaaagaaaaagggaaagaggagggaagcaccagaaaaccaagggaaaaacaaagacaacgcaaaggacacacgcccgcagccgggcccaccaagcaacacagacaaacacaacaaccaaacaccacaacaggccacgcacgaagaggaacgcaccggcaacgcagaacccggcggcaacaaaaggaggagaaaaaaagaagcccacccagaagcaaggcaaacagcagggcgacccaaagccaacaccacaaccaaaggaaaaaagaagagaggcccacaaccgcaagggggaaaaaacaaacaaggaaaggccaggcggaacaagacacagggaaaaccccgagaggaggccagaaaaacagcgccgaaacacggaaaccaaaggggaaaggggggccaccaaaagcaggaagaacaccgaaaacaggaagcaggagcaacaaaaaaacgacgagaaaagcaaaaaaagaaccagcaaaaaggcagagcacacacagagcagcaagcacgcaaaaagaagcagaaaaaaaacaaaacgagaaaaaagcagagaccacccacaaggaaccaggcgcacaaaagggaaccgacaagagaaggcgccacaacggcgaaggaaagcaggggagcaggaggaaggaaaaaagaccaaaaccaacccagaagcaaaccagaaggaaaccacaaagaaggcaaacccaccgacgaacaggagaaacgaacacaaaaaagaaagagaaaagagcaggagagaagagcaggcaacagaaaaaaaaaacagaaagcaaagcaggggagccagaccagggcgaaccaaacagaacacagccgagacaaagacagaaccaagaaaaacccaacacaaacagacccacggaagggccccaccaaaacacaaaacggaagccaaaaccggaccccaccagaagacaagaaaggacagaaacgagaaaagaaaaaaggcacgggccaaacccagccacaaaccccgccaacccacagccgggcccaaacccacaggggcccgcccagcaggggcagccaagagaggcaccgggggaaacagagaggggaggagggaaggggcccagcgcccgccccccagagcaggggccgggccccggagcccacaccaagggagcgaggggccacaacaaaaccacaaaaaggaggccaaaacaaagaaaacccaagcgaaggcaggagcggaacaaggacaggaggcggccccaacaaaggccggagagagcccgcccagccggggccaggcacggccgggcacaaaccccaccgcccgccacaggaccccccaagcacggacccaaaggacagcgcaggaagggcccacgacccaccaggagacccaccgagaaccaaaccccaaagacccgggaaagcacacacaggcagggaacgacgcaaggaccccacaacccacaaaagacaagccgacgagccggcggccccccccgggccccgcagccaggccccaaccacacccgcgagagacccccaacccccagagcagaaaagaaagccgcacgaaccccacgcaaaacaaaagaacaggacccgacaagaagaaaaaaaaaacaggcgaagagcagaaaaacaaacacaacacaacgagaagacaacccagccagcccacccgcccaaggaaacacccagaccacagagaacaccacaaaagggaaagcaccaaaaaaagccaaacgggcagagccgcgaacaggagaaccagggcacaggaggaaaaaaggggaaacaaagaaaccccccacccccaaagcaaagaacccagaaaaacaagaaccaccccccacccaaacagaaaaacaggcaacaaaccagcaaaaggagggcaccagaagacaacacaacaaagggggcaaaagaagcaggcaaagaagaagacaaaaaaagcaaacgcaaaccgaacaccccacaaaaaaaccaacggagaacagaaacaaccagcgcacccgggcaaacacaacccagcgaacagccaagaaacacaacaagcaagccaaaaaaaaaaacggcaaacacccagaaaacagaaaaaaaacaaccacagaaaaagaggagagggacagagagacaaaggcgccggagacgggaacaaaaggcccaggaacgagccccacagcaaccagagcacaaggaaccaaggcccgagggccccagaaaaggcaaaggaacccaacaaacaaaaagggaggcggaaaacacaggaacgccccgcgaaaaggccaaaacggcaaaaccccgggccacgcagcaagccaacaaacacccaccacaccagacaaaaacaagcaaagcacagagaaggccagacaccccggaccccgcgggacaacccacaaaccagccacaccaggccagccccgccagggggaccgaagaaacggagcaaaagcagaaacagcgagcagaaggcagcacacacacacagccaaaccccaagcagcagaccagaaaaagcacaccagacaaacccaaaggacaccaaaaaacaaagaaccccaaggcacaaacaacaaagggagaggaaagaaaaagaaagcaaaggagaaaacgcaacacaaaggcaaccagcaaacaagcaaggaaaagggaaaaaaaagggaagggcggccaaaacagggcggaaaaaagccagcgcacagagccggaaacaaaaaaaaaaagaggcacccgcacggccagcacaaagaaacagaaacacacaggcgcaaacaagcgggcgcgcaaggagaacaaagaaaaagggcaaaagcgccggcggagcagcacagcgaaaaaccaaggcaaacgccaggggggccggcgcccaccacagacccaggccaaaggggcagcgggaccccggcagccggccacgccacggggccgcccagagcccccccgccccccccaccccccccccccgccgcacaacacaaaagacagcagacagagagccgcaaagacaaagaaacaagccggggcgcaccaaggagcaaagcagcacacccgagcaggcaccgcaccggcaaaaacccaccagaacaagcagaacgcaaggccccaaggcagggccacagaaaggaggcaaaagggcgggccagagaggggagaggacggcagagacaagaggggggggcgcggggggggacaggagaaaacaaacaacgccagcaagaagacagaagggccacaaaccaggaacccccccaaaaggaacgaccaagggcccccgccacgcccgagcaaaccacgagaaaacaacccaaggaacagcgaaggcccgccagcaacacacaagacaggacaaccccaaagaaagaccaacggaaaagcaggccaagggacagcacgaacaccacaacccgaaagcccccgcgccccggggaccaggcagaaagaaaagggggaagaaacagaagagagggggcaggaggaaaggaagccgggagaagcacagagggcagggggaggcccgcgaagccacaccaagaccaaaggccaaagaaaccaggagaagcaaccgacgaagagagcaaacacaaaagaaaacaaacacacaccaggaccaaagaaaaagaacaaaaaacaacaacccacaggcaccgaaaagaaagacaaacaccaggcaccccacacccagaaaaagaagcgaacgcagaagaaaagagcaacccccggacgagcgaagcaaagcgaacgaccacagacggaaaagaagaagcaaaaaaagcgaacaaggaagaaaaacaagggccaagcacaggaaacaagacaacgccaaaaacgaccaaagaggcaaacaagacagggcgccgccaccgaagaaagcgggaagccgacacaacaaacaaaaaaaaccccaaaaccaggcagaacccaacaggcaagagaaaaaaaaagacaaggacagaagaggaaggagggcaaagggcaaacaagggggaccgagcagacagcagcccaaaccaagggacccccaacgagacacgagaggaacaccacccagccggaccaaccaccagacccaccgaagccaccaacaaacgaggcagcacccacaaaacacggcaaagaggccaaaaaggcaaaaaagcaagaacgaacaagaagccaagcccccaaaaaacgccccgaacacaaagcgaaaacaaggggaaccagaaaaaaaacggggagcagggaaagggaagaagaaagcaaaaccaggacaggaaacgggacgaacagcaggggagggggagagcgggagagcacacaaaaggccacaaaaccaacccaaaagcggcgcccccaagcaccgcgagacgaggacacaaagccaaaagcaggaccccccaaggacccagagaaggagaaagacacccaaaaaacaggcacgcagccggaaggagcacagccagggaaggagcacaagagaggagcggggacagaaccaggaccaagaaaaccaaccgccggaggcagggaaggaagagagggaacccaagcaaaaaaaaagaaaaggcaacgggcaagccaggacaaggacacaagcaggagagcgggggcacagggcaaaagggggggaggggaggagagggcagcagagaggccaggaagagagagaaaccgaaaagccggcgcagaaacgggcgagggaaaagaccagcagcgaggagccaccaaaacgagcagaaaaacgagggaaaaggaaagcacaaaggccaagaaggaaaaaggaaaggccagccaaccgcaaaagacacaagaacaagaacaaagcagggcgaagagcacaggccaagacaagcccaaaacacaaccaaaggaaagaaccaacggccccagcgagaaacaggaaaacacaacgaccaggcaaaagagaaaggaaaagaaaaggggaaaaaaagaggggaagaagcacaacgaaccagaaggaaaacaaagcgaagaacccagcacaaaggagaacagaaagcacgaaaggaggaaaggaaagcaagggcagcgaagaaccagcaccgacgagaggaaaaccaaccaggaagacaccacaacaaacacacagggaagaaaaaacaaagcaagcccaacaaccaaggcagcaacaaaaaggcacaaaggccccacaccccacccaacaaaaagggcaaacgaacacacacaaaggggaaggaacaaggcccaagaacacacgagccaagaaagggagagcaggacaaagacaaaagaaacaaaaacaagagcaaaaaaacagaagagaaaaggaaacgaaagagaaaggaaggccaagccagaaaccccaaggacaaaacagccaaagaaagaaggagaaaaacaccaaccagagcaaaaaagagagcaacagaccacaagcagaaagaaccacgggaccgaccagaagaccggaagagggaaagaaaacaaagaaaacacagaaagaaagagacgaccacagcagaaaaaccgaaacaaaaaagaaggaagaaagaaggaggaaggaagaagagaaagaaagagaaacagaaggagagaaagaaagaaagagagagaaggaaagagaggaaaaaaaagaaagagagagaaaggaaagagaagagagaggaaggaagacagaagggagaaaaggagggaggaaaggggagaaaaggagggaaggaaggaaggaagaaagggaaggaaggaaggaaggaaggaaagaaggcaaggagggagggaggaagacaggcagcagacgggccgggacccagccaagacaagccagaaaaaacaaagaaccaaaaaagacaagaagagggaggggaaacaaaaaccaacccaagaagaaggaccaaacacaagaacaaagaagaaccacaaaaccgccacccagacccgaaaagcagaaccaggagaaaacacaagaggaagcacccccaaggaaaagcccggagccgcccccacgacgcgcggccaacagacggccggagccagaggcagaagggaggagcggggaagacagcccaagaaggaagcagagaaaacgccccccaaaacgcaaacaaaggagaacagaggaaaggaacacacgagaccaccaaaaacaaaccgccacccgaagaccaacaaacagcagccgccaaagcacacacagaagacgcaagcagacaaagcccccaacacaaaaaccagagggcggaacaaaaacgcacaggccaaaggaaaaagagcaaaagacaccaaaggaaaacagccaccaagcgaacagacaaaaaggggaaaagaacacaaaccccagaaaaaaacaaaaagcaacagcccaaccaagagagaacaaaaaagaaagaagaagaacaaaacaggagcacaaaacgagccaacaccaggcaaacaaaacaagccgaagcgccacccccggacagcggccagccggcacaggagcacgggggcgcaaaaaccagggggaaaaagcccacagggccgggccgcacgcagcccaggggaaccagccaccaaagcaggaagggacaacagaaccaacagcgaggaagaagaacgggccccccgagggcccagaacaaagcaggacagaaagccgcagccagccacagagaagcacagacagccgaacgccccgaaagcagaaaaaaacacccagacggcaaaaagcacaggggcggcaagcacagcccagaccaaccaaagccgggaggaaggggagcagcagccaaaaccaccccacaccagccggcaccaaaaggcaacaaccaggaccccaagcaggacgccccgccccacacgcgccccacccgccaaaagcgcgaagacgcacgggcccacaggcaaaaaccaggccaagacaaaaaaggaaggcaacagaagcaagaacaaacaacgcaaaaccaagaaaaaacaggaaaaaacagccccaaaaaggagacacagcacaaaacaccaaagagagacacgaacccaaaaaacgaaaccagggccaggagggggccacaccgaaccagcacgggaggccaaggcaggagaggcccaggaggagacagcgggcaaacgggagaccggaaagaaaaaaacgaaacaaccccaagcaacgcaagaaaaacagggaggaagcggcaagcaaacaccaaaaaaaaccacaacaaaaaccaaaaacccaaagcagcccacacaccagagcagcagcacgaagaaaacaaccagaacaagcaaagaccagagaagaaaaaaaccacaagaaaaaaaaaaacaaagaaaaagaacaaagacaggaagagcacaagaagcaaaaaacagcgcacaccaaggggccaagggacagcgaagggagcgaagaggggaggccggggacgaaaacacccagccagacgcaggcgcaccgaacagacacaccaaccgccagacccggagacaccccggcaaaacaaaggaaaggggacaacccgacagaagaaaagagaaggcaagccaaggggaaaaaaagggcccagcaggagaggggagaacaggagacacgcaaacgcaaaaggaaaccaggaccggccagggaaaccgaagagccagaaagaaaaaaccagcgggcaaagaaaaggcacagagaggcagcaaaacagggcacgaaccacaaagagccacccccaggacccagagaacacgcaaccccccccagagagacacagaaacccacagaagggacaagaacccaacgcaccaagaaacagacacaacagccacacaggaacaacaggaaacagaagaagacacgcccaaaaaagggaagaccgccacacgcaaccacacccgcaaaaaaagccaaaccacagaagccgaccaaacccaccaggaagcaaagaaggggcggccggccccgacaggcaaagcaaagacaaaagaaccacaaaagcggggagagaaaaaaacaagagaaagggaagaggaagggcacagggccacgccgaaaccagcaagggaggcgagggggggcaccgaggcaggcggagaccagccggccaacaggcgaaacccaccacaaaaaaacaaaaaaaggggcagggggcacaccaaacccagcaccaggaggcggggcaggagaagcgaaccggagggggagggcgggagcgagacagccacacaccaaccggggacagaagagacgccgaaaaaaaaccagaaaggaggaggaaaaaaaaaggcaaaggacagcgccaacaaaagaaagaaaggcaagaaaacacacaaaacaaaagagcacaaccacaacaggacaggaacaagggcacaagaagaaaagcccggccccaggagacggccaaagaggaaaaagacaaagaaagagaaaaaaaagaaacaaacaaaaagccaagacagaagagagaaaaaagaagccaaggggaaaaaaaacccgagggagcaagacccaaaggaaaaggagcaccacaaaaagaaacagacaggacaaggaagaagagcagaaagagaggcagagcaaggagaagggagacagggacggagggagggagggaggccacagggaacaaggaaacggagagaggaggagcaacccagaggacgaggcgagaagagagaaggcggggaacagaaacagcaaagaagaaaacaagagcaaagcaagaaggaagaaaacagaggccgcaaagagggagaggcgagaaagagagaaaaggaagcggggaggcggccagagagagaga

SEQ ID NO: 245 - RNA, 334 nt, Homo sapiens
aaaaacgacagccagagcccagccagaccaaagaaaagacaagagcccaagaccgcaaacaaaagccgagcgcgagggcaaaacccgagggaaaaaagaaaaaaccaaaaagccagcgacacgagagacaacaacacgacacaccaaaacaggagaccgaggcagcacaaaagcagaccggagacaaccgcgccagcagggaaaagaaggagcaccgacagaaggcgacaaagaaaaaggacaggggaagcaggggaaggaaccccgggggagggggagggggggcgacccacaacccaaaaaacgcaagacgggggagacacccaaaccccaa

SEQ ID NO: 246 - RNA, 3763 nt, Homo sapiens
caaaggagcccccaaaggagacacacgcaggcacacaaccgcacaagaagcaggcaaacagagggaggccgaaagcagagaacaaacagcaaaaaagcaggagcaaaaaaaacacagcaagaggacaggaggacgccaacgcgcgaagcaacacgcaggcgcaaggcagccaagaaagacaggggccagagaacacgcagaagaaggccacagaccccaaaggcagaaaaaaagaagcccccccaacaaaagacaaacaccaggagagaaaagaccccagaagcagcacagccaaaaagccaacccacgacaccagagacaagcgcccagacccaggacaagaaaaacaccaaacaggccagacaagcccaacacaggagcaacacacccacaaaccaccacaggccacacgaggaccggcagagagaaggagccacgccgagacgggagaaaaaagacgaaagccggaggggagggggaaagccaaggacacaaagaccaccgcagaacggaaaaaagaaaccacggaaaggcaaagagagccagcaaacacagcgcaggaacaagaccaagggaaaacgggaccccagggacgacacaacaaagaagggagagaggcagcgccaaccgcccggaggcaggcacagccacagcagcaaacgcagggccacagaacaggaagccagaagagcacgcagccagcaacagcacggggaacgcgaggccgaccgagcggccccacccaggcaacagcacccaggacaacgccaagacacgacccgaaaccacaacccaggacgccccccagcagccaaccaccgggaccccagagagagcagcaccgccgacagccggcgacccacccaaccggaagcaggcaacaccaggcaggcgacagcaccaaccaggaccccgaccggccaacacgcgggagaaagggaccccaacacaagcaggggagaagacaacaaaaagaaaaaaacacaaaaaacacaaacgacggagaccagaaaaagaagaaaggccaagaagaaggaaagcacagcacccaaaggagagcagcccccaacccaaaaaaaaacaacagaaaaccaaccagaaaacaaggaccaaacagcgccacagcaacagaacccaacagagaagacaaagaaaaagagcggaaaggagacgacagccaggcgcaagccacagagcaaagcaggagagccaaggcacaacccaagcagccagcaccacgaccggaaaaaagagaaaaaagaaaaaggagaaaaggaggaagaggaagagaagaagcagaaaggaagaagaggaagaagaaaaaggcaaaaaaaggaagaggagaaggagcaggaagaggaggaggagcaaggaggaagaaaacggcaacaaaacaacggaaggagcaaggaaggacaggaagcagaaggaggggaaacaacggaagagaaaaaaaggaagcaagaggggaccagcagaaaagggccccagcaccaaaggaacaaagaaaagcaaagaggaaagaagaaggagaaagagaaggagacagagaaaaagaaagaagaaaggaagggagggagggaagaaaagagaaacgagaaagaaaaggcagaaaagaagaaaggaagggagaaaacccagaaggaccaagagaaaggaccaagcgcagaaaacgaaacaacaacagaaagggaacacaacaagacaagcaaacgagccagaggaaaagaggcggccagaggcccgcaacaaagccagggcacgcaggacagaacacgaacagcacccccggagaaaacccaggggaccaaggccaccgcaggcccagagacgagcggccaggggaaaaaaaacaaccaccagagggaaagcacgaacgcaaccagcgggaacacaggcccaagacaaaagagacacggagaacacacccagaaaacaaacagaaacaacgacgagaacacaaaccacggccaaaggagcagaagggaaggaagcagcacaggcacaggaaaaggggggaggagcaggacaacagagagcccgagaccaacccccccgacaaacaacggaacaccccaggagaccagagagaagcagacaacagggcaggaggaccagaagaacggagcccgaggaaagaggccagaccaaacccacgcaccagcgccggaccaaaggagaagccaaaccgcagcacccagcagccaccccgggcggaggcacccagacaccacaggaaacgcacccacaacaacagaaaaccacaacaaaagaaagaaaaaagacaggaagaaccagggccaaacaaccaaaaacaagcagggacaggcacaacggcagggacaagaacaggccagggggcgcacccgaaccgcacacaaggaacccgaagcacccccccccccccgaccccagacaggccccgggcagacgacccccggccaaggccagcaacccaccagaggagaacagcagggggccgcgagggccagaagaggccagccaccagcacaaaggacagaaccacgggcgcaagaccagggaaggccaacaaccagcacacgaggacagggggccaagcgcaggaaaggccgcaaaaacaacaggcaggcaagcagcagaaaaccgggaaacccagaagggaggcgggcaaaggacaccagaccgaggaaagccacacgcccacaagggaacagacagcccaccaacaggaaaagcaccacccacacccccagcaccggccgacaagacaccacaacggggagaggaccaggggagcaccgaggccaggagagagcacaggcgggcgcaaaaaccgagaaggcgcaacccgcccacgagggggggaccaaaaccagaaaaccaagaagaaaaccaggcagaccacaggacaaggcagggcaagccgcaaaacaccaaaagcaaggcaacaaaagccaaaagacaaagggacaaaaacaaagagcgcacagcaaaagaaacaccacagaggaacaggcaaccaaagaagggagaaaagcaacaccacaacaaagggcaaaccagaacacaaagaaccaaacaaacaaacaaccaaaaacaagcagcaacaaaaacccggggcacgggcggaggaaaacaaaagaaaaaaaagcaacacagccggaaaggcaaagggaaaggagaaaaaaaagaaaaaaaaaaagaaaaagaacaaaccgcgcccacacaggcaggcccccaagggcgcacagacaacgggagccccccccccccccgcagcacagcagccgcaacaaagccaaggggccaacgccacagaagagcgcggaccccaccaggaaacgcaggcaccccaccccaacgccgcccgcaagaacgcagaacaaaggcccaccccacacaaaagaacaaccaggagaaagccagaggagcaaagcccagaaggccaggagcggaaaaaacgcggggcggagagaaaaaaacgccagcaacggagccccacgccaccccgggaggcaaacccgcaggagaacccgacggagcagggagggaagagggccccaaaggggcaggcagagcagggccagggaggaaacaaaagaacaaccggaggcccaagggggccaccagaaaaggcaaggcagacaaagcgaggccagaagcaggacccaaaacaagaaagaggaaaaaagcgcaagaagccggcacccaagcacaaaagaaccacaacagcccgaaaaggagacgggcggggagacaacgacaccgacaacccagccga

SEQ ID NO: 247 - RNA, 1859 nt, Homo sapiens
gggcccggcggccgcagcgcccaagcccgccccgccccgcgcgcggccccccggccaggcccgcgcgccgggaagcaggcgaggggcgcaccgggcggcgggcggggaccggggaaggccgggagcgccgggaccgaggacgcacgcggcgggccgggccgcgcgcgcccccccccccccgaggcccgagcgcgagccgccggacgcacgggcaacccgccagccccgcgcccccgggcagagcgcggggcggccgagcacagggcccgcgggccgggcgggccggggcggccgggacgaggaggggcgacgacgagcgcgagcaaagaggccccgggacccccggcaccccagggaccgcggaaaggagggcggcccggaccgggagacacggccagacgcccccagaagccaagccccgcgcggaaacccgagacggcccgagagggagcgcggagagcggacggaggaaaggggccggaaccaaaggggcaggcggcacgcccacaccagcccaagacggggcgaggggcgggggaggggaggggagggggagacaccgaaggccgggcaagaggcaacggaagaacgacaaaggcaaaacaacaaaaaagacccccgcagcagaacagaggagccagagggggaggcccccggcgaaacagaggcggaagggacccccccaccgaccacacccccgcccccacaccccccagggcgggcgaagggaccaaaaaccagaacccgggagacccaggcacgcaggaggggggggcccaaaccccacaggcaccggcgggcggaaaagggccccgcaacggccaagccagggggcggggagaccaggaagcacagccagaagcgcagcgcgggggagcccagccccgggggcaggcaggaagaccgcacaagcccgacaggccccagaacaagagaggagaagaaacacggcaaggaagggacaagaggagagggggcccggaaggccagagagaggcgagccgcccgcccacccaccacggaaccggcacggggcagccgcaggaaaaaaaaaccagagaaagggggggggggggcgggggcccgaggagcagggacggcgcgggcgaaagagcagaccagcaacggcagcgacaaggagacgcaacgacacagccgggcaagcgaaccaaagccgacagcaagaaggggggacaacccagaacccgagggaaccacaggaaaggagaaaaacccccggaagcgcagaaggacaaaacagaaccggcgggagaaacccgggccggcccaagagagagacacggagggaggacggcccgggcaaagccggcacaagggcccaacggaaccacacgggagacgggggaagcgacccagaacccagagggagaaggggggcggccggaagagggcacggcccacacgaggcagaagcaaaacggcccgaaaaaagaagccggggcgaaaccccccgcaaacacccccccgcccccgccaccccagcggcgggcggagccgcacggaaaggaggagccccccgcgacaacgaccccacagaagagcggcgaaaaccgggaaccacgcccacacaaacaacccgcaggccgccccgagcggaggcaggcaccggcggacggagccgggccagccgggcccgccgcccaagaggacacgccggcagcgcaagagacccggacaaagacacccgcccccggggagggcccgcagggcagagaggcagaaacgggggaagggaagacggaaggccggccaggcgcggagaggcagggcaggccgcgaggcgccccgcagaacaggggccccggaggggccagcacccaagggcgcagacaaagacc

SEQ ID NO: 248 - RNA, 12929 nt, Homo sapiens
ccggcacccaagcaagggggcaggccagaagaagccgacagcaccagcccacgaagcggaacggaaaaaacacaccaccccaaccagcccagaaaccaccggcagcaaggcagagggcgacaccaccaaaccggggaggcaccacacagaaacaaaaacaaaccccccaaaagaaaacgggaagacagcacaagcaaggacaggagcaaacagaagcagggacggaagaagggagacggaaaacaggagcaggggaggcgccaagaagcgagcgggcgaagcacgcagcggccggcgcccacgaaccccagcggaccaggggggcaggcgaggggccggccgacaagacaaaagacaacaaaaagggcggccgcgaaagagcccaacagcagaagcaacaaagaagaagcgcagagggagcggggggagacggagcgccgcgcccaggcggaggcagggcgaccggccacgcaagcccgcccccgagcacgccacccgcccagcccccgagagcgggacacagacgccgccaccacgcccggcaagaagagagacggggcaccggagccaggaggccgaccgaccgcaccacccccccggcccccaaaggggggaacaggcggagccaccggcccggccggagcggacgaaaaagaaaccacgacaacagcgagaacaggaggcacaacgagcggagcggcggaacggcgcacagcccaggaccgccggagacacaggcaaacaacacaaaggcccacgagccaaacccgcgcacccaaccgggagcgcggcaaacaagcggcagcaaacaaggaggcccggggcgacgaacaacccagagaagagaaacccaaccgggaaagaggagacgaaggccggaaaaggcgaaagaaagggcccccacaacggccaagcccaaaagcaaagcaagaaacaccaccaaaaacgaccagagcaaagcaggagaagcggaagaaacaacacagcacgaagaaaacagaacggggacggcagcagcaaggaaccaggagaacgcaaaaccagccgagcccagcaaaagggcaagggggccaagaaacaacccccaggggaaaaaggggagggccggcccaggaaccaggacaaaagaaggggggggaaggaaagaaaacacggagccaaaaccggcagaaaaagggagcaagcacaaaagggacaaagcccccaacagaaaggccaaaccacgcaaaaaagaacacacagagaggcacgcacagagggcgccacacacagcccccagcaacccaaggaggcaacgcccaacaacaggaaacgagacccagagaggcaaccccagaccagagcagccaggggggaaggaaaagacagaaaggcgggcaagggccagcagaacccaacacagggaggccgagagggaggagcaaacccaggagcggaccagccaagcaacaaggaaacccgccacaaaagaaaaaaaaaaaacccaggggggggcaccgcacccagcccgggaggcgaggcgggaaaggcgagcccagaggagaggcgcaggagcggggccacgcacccagccggagacacaggagacccgccaaaaaaaaaaaaaaaaagaaagccagcggcgggcgggggccacgccaaacccagcacagggaggccgagggggggacacgaggcaggaggagagcagccgccaaagggaaacccgccacaaaaaacaaaaaaagccaggcagggggcagccgaacccagcaccaggaggcgaggcaggagaacccgaacccaggaggggagggcaggagccgagaggccagcacccagccgggcaacaggagcgaaaccgccaaaaaaaaaaaaaaggaaaagaagaaagccagcggaccgacggaaaccaggccccagaggcaagcccccccagcaagcagcgaaaaggggcccgaacacaggggagaaaacacccagcaacccacaacgaacagaagaacgaacgagggcacaaaccaccaggagcagccacacccccaccagccaaacgcgacacaagggacaagggagaccccgaaaacggcaccacacgcagacgccaccaacgaaaggccaaaaacgcaaacgcacacagacgacgaaaaacagcaaaccaaaaggccacagagaaagcaaaaaagacgaggagagcggaggccaccacaccaaacggaacaggggcagggccggccggagcgccacaaacaggaggccgagcgccaaaagaggcggcggcagagccagaaaccacaggaaaggaggcaggcgggggcgcagaagacagcaaagcaccaagcaaagcaggacaagcccgacccgggggacccgcacgagacgagggcaccgaccgggaggaaggggaggcgagcccagaaccccagcccccaccaggccgcaacaagcacgccgccccaagagcacagagagcaggcccccaagagaacaagcgagaagcaccacaacagaagcacggcagaaagcaggagggccagcgcgggaagagcacacccgcagaagaaagcaacagcagagagcgcggcaaaccacagccacggcggagccgcacccagcacgccccagaaccacggagcacaggcagcgccggcgcaaccccgcggccccgcagacggcagaggcgggaagggaaaaaacgcccccggcccaaccggcccggaaagcaggggaaggcacgccaaaaggaacagagaggaggagagaggcgggaaaaggagagaggcgaggagggagggaggaagaacaggggaacggaagcgaaaaacaacgaaacccaggcagagggcacggagagggggaaacagggggggagcaggcacagcaccaaaagggccgaaagcagagcacaagaagcaggcagcacagaaaaagagcacgaggaccagaggaggacgggaggccagaaaaacaggcccccggcaggcagagaggaacaaagagaaccccagccgcagcaaagagggccgcgccgggagggggagccaacgcagccagggagggcacaagccacaagaccacacccggcccacccccgaggaggagggaccccggcccaagagccaggacgagcacgaacaccaaagggaaagagaaagaaaagggaggaaggcacgaggcagcaaagaccccgaggccaggggggaaagaagccccccaggcggcaagaaaaggagaggggaggaaggggaggggaaggcaggggcaggaagcagaaaacggacccggggagaggagaggcggggacggggacccagcacgcaccgggggcaaaagccgcacacagggaccagcccgaggaggcaagcccccaccacagagagaagcggggcagagagagaaggaccacccaaaaaccaacaaaaagcccggagccaagcaaggagccagccgggcacaagacacacaccacccagcaggggggcagcccagggaggcggcacccccccagcgaaacaaccagacgggagacgaggcagagagcccccggacacccaccgggccgcaagaggcaaagagggccaaaaaggaaagaaagaacaagaaagaagaagaagagggaaaaaccaaaggcgaggcaagcaagaggcaccagaaaggccaaccccacccacacccagaccccaaagacccagagggcaggcagaaggggaaaaagggaaacccgcagggcggggacgacgagacccaaggaaaccaacagcagagcagaggccccacagaggcagaaggacagcccagagcccggagccggaccccggggggcgcaaacagaagagaacaccccaaaaagacgaaagaggccgccgcagcagaggagacaaaaaagacagggggacagaaccaccggaagccagggcaggagggcggcaaaggcgggcgcaggagccaaccacagagcaagggaagcgggccgagccaagagagaaacagaaagggacacaagaaagaaagagaaaaacacggagagcagaaaaaggaaaggaagaggagcaaaagaggcggaaccgggggggacccggcaggggaaccgagaccacccgccagaacagacagggcaacagaggcccccaggaaaagagggacgcaggggggaacccacagagcaggacgcagcggaggcgaggcacaccaaagcccccccaccaaacacaagaacgcagggacaaggaagcccggccaccacgaaaaaaagagaggagcgccgcgcccaggcggaggcagggcacaacggccacgcaagcccaccccggcacgccacccgcccagccccggaaagcgggaacaggcgcccgccaccagcccagcaagaagagagacaaggcaccggagccgaaggccgacccgacccggacgcccgccggcccccaaaggcgggaacaggcggagccacggcgccagcccaccacagcaaaaacacggagggaggaaaaaggcaccaaaaaagagaagcaccaagcgagcccaagcagggacacagagccacaagggaaaaaccccaaaccaggcaaaaagaccggcacgggcccagaacagacaacggacgcagccgacgcccccccaagggggaagcaagaaaggcagacggaagagcaagcgccgcaacaagggagacagggggccagagggcggggcccgggaggcaaaggggcggcccgcacccaaaccaccgaagggcccaaacccgggggggagggacccaggggagaaagaacagggggcggcccccaacgccaggaggaaaagccacaagacggagaaggggcccccacggccccacccgcgccaccagaagaaggccagccccgcagacggaggccccccaaccagggaacggagccacgaaccccaaaaacccagcgggggccaccacagcagaaaacacacaaaaagaggccagcaaaggaagagcgagcgagggcagaggcccggccaaacacagaggccacaaaaaggcacaacagagggagcacaagacacccacagccagcacagcaggccagaaagcacacgagagcccaccagagcccggacacaggaggggaaggagagcagagggaggcgccccgcagcacccacaagagggggaggaggcacgaccgagacgcaagaaaacacaaaccccccagaaagcacaacagagggaggcacaccagcacaggcccaagccagggagcaaggacgccaccccagagccacccgcaccccgcgggcaccaagggaagcccagggagcgagaacagcaccaggccaggagagcacacaagccaaagacagcgcaaagacccaacccaggcccccacagacacccccccagcgggggaaaggacgacacgagcacagggaggaaaagaaaaaggcgaggacggagcacacaccaaggggagaaggaagcaaagacgacacaaaaaggaaagaaacagcaacaacccagaaaacgacccagcaaaaaacgaaggccgaaaccagcccaagggacgggggaaaaacaaaaagaggagggccaacaaggaagaggggccacgaaacacaagggccaagagccacgagagcagacagaaagaccagcgggcaggcagcgaccgaccgcaacccagcacagggaggcgacgcaggaggagccaggccaggagcaaggccagccgggcaacaagcaagacccacaaaacaaaaaaagaaaagaaaaaaaaacaacaaaaaaaaaggaccagggaaacaagacaccgcagaaggccagcgaaccggacccgcccaaggcacacagccccccaaccaggaaccaacggagagcgaccaaagacagggagcacaaaagggacggagaaaacaggaaacccccgaacacggagaaaaggaagaaaaagaaaaagccgcaaaaggaacgaccaccaaagccagggaaaaaaccacgggaaaaggaccagcagcggaagaaccaaaacccagggcaaaaacacagcaacacacccacgagcagacagggcggcggcggcgacggacggcgcccgaccgggcccaccccggacccacggcgacggaagccacaggcaggcagaagcacaagggagagagcccgaccccacaagacccaaggccgacgaggggccacaaagcccgagccaaagccacaaagcacccaaaccaaggcgcacccaaagccgaaggcagggcagcagggggaggggaaaggggcaaaacgaacggcacaaccccagcggagagagagagagggaaagcaagagaaaaagaggcagggccaacgcaaaaagcaccagagagaaaaccagcagggccaacccaaagacgagcaggggggccgacaggaagcaagagaaaaccaccaaagacccagagccccccaagagcagcaccaccccaacgcgcacagaacacccgggagcacaaacacacagcggagaccgccccagaccagcagaaagcaccggcgggaggggccacaccgaacccagcacgggaggccaagggggcagacacgaggcagacacccagccggccaacaggcaaaacgccacaaaaaacaaaaacaaccaggcagggggcacgccgaacccagcgccgggaagcgagacaggagaacgcgcacccaggaggcagagggcaggagcgagaccgcaccacgcacccagccgggccgcagagggagaccgccaaaaaaaaaaaaaaaaaaaaaaaaaaaaaaaggacccgacacaacacaggcaggcgagaacaaggacgagagccaaacaccccagcagcacagacacaaagaacaaggccacggcaaggcagggcgggacaccccgggagcccaaaggacacagacccccccagagcaggcaggaaacagcaaaaaaacaaacgaagaggaagaggccggggaaaagaacagagcggacagcaacagcaaacccggggaagcaacaaggcccgaggagggcgggcccgggccggcgaaacgcaaggagccccagagaaaagaaagaggagcagggcagcacgccccaccacaccaggcgccaggaacaaagacaaccgcaggaagaggggggggggcagggcccagcagacaccaaagggcggaggagacaaagcgacaggcagaccacgacgccacaggaggagggagaagaacccccgccccccccccccaggggcagcgccacagggagcggaaaggaccaagcccccacggaagggcggaggggagagggagggaacgggaaggcaaggaaggagacggggaagaaagcggaagaggggcgcaagagggccaggggggcagcagcccaaacccagagcggagcggagggcaggacgggggcggggacagggagcagggcccagggccaaagacacaccaaccgcaggacacgcaggggccaaaacagccacgggggagaacaccaggaaacagaaaagccaaaaacagggcccacccacccaggagagccggagacaacacaccacggcggaaggaacagcggaaaccaagagagcccaggccaacaaggagggcagaagcaaaggaagggagcgacaagaacgaagcgcaggaaggaaggcaaagcacagagaggagcaggcggaaaccgcgggcacccagaacccaggaggggaggacaaggacaaagaggcgaggccgaggcaagagcaagcaggcaccagcccacagggcgagcaggaccaggcaagagccccaagcaacacgaaagaacagaacgacaagaaaaacagcaaaggaaggaaacccacaagccacaccacggccgccacaagcagggaacaaaaagaggggaacacgcaacagcaaacgaaagagacgcggaacagcacccccaagcaggagaaaagaaaagccaaagccaccccacccaccacccacccccccccgcacggaccccaacacggagcacaccagagggagggaaagcagaacaaaaccagagagaaacggaagcagggagcagagcgcaagcccacaaaccccgccgcaaaaagccccaagagcccgcgaggccggccgaggccacaggccgcggcacaggaaccaggaggggacaggcacgccccggaagcagccaggcaggacgagggaacgaggagcccagcccgggccacgcccccagagccccagagagcgagccacccacagcagaacagcgaaacccaacggcccccccccccacccccaccaagccgcacagccccaaaaaaaagcaagaacgccagaggggccggaggaaccaaagaaaacagcgggagcaacaggggcgggaagccagaaaacgcggacccgaaacgccccccaaaaggggcccaaagacgcgcccaccccccacagagaggaggcaaggggcagaggcaagagggcgacagggccgggagaagccacagcacccacggggggacacagcggggaagagagagccagagaaagacagacaccccggagagccgagagggaaagacaagaccaaagggggaacggacaccccaaaaagagagaagagagaaaggcaggaaggcagacaagaaggaacggagggagggaggaaagaaagaaagaaaaagaaaaagaaagagaccaacaacccaacagagcacggcaggggacgccaaaagaggagaagaaggcgggcacagggccagcacaacccagcacagaaaggccgagacgggcagacaccgaggccaggagcaagacagccggccaacagggaaaccccaccacaaaaaaaaaaaagccagggagggcaggagccgaacccagaccaggaggcgaggcaggagaaggcgaacccgggaggcagagggcaggagccaagacacaccacgcacccagcaagggacagagcaagacccagaaaaaaaaaaaaaaaggggagaaggaacgacagacccaagaaaaaaaaaacagcgaaaaagaaaagagcaaccaagcacagagcacaaacagacagaaaaacgacaggaaaaaagagcaaaccccccaaaaaagagaaccgcaacagccaacaacaaaagggaaaggaccaaacgcaaaaaaccggacagaaaaccacggagagaaacggggcagcccaagggccggacccagcgagccgcagccgacacaacgggcgaaaaccaaacagcacacacgcaggcccaaagggacagccacaccccagcccggccggccaaaagcggggccaacaagcgcgaagggaagaagaaggggcagggggagggaaaagaagaaaaaaccagcaaacagccccaaccacacgccaaaaaggccaagagaggacgcacagcacaaagcgggccccaggaaaggcagacgagggacccccgcaaccgcagcagaacgagaggcacagcgggagacaccccacgcccaaccagaaaaacggagcgacaggcggggggggccaggccaaacccagcacgggaggccaaggcgggcggacacccgaggcaggaggagaccaggcggccaacaggcaaaacccgccacaaaaaaaaaaacaaagaggccggcaaggggggcaccgagcccacacaggaggcgaggcaggagaacgcgaacccaggaggcggagggcaggagcggagagcaccacgcacccagccggggagggagaggcccaccaaaaaaaaaaaaaaagaaagaaagaaagaaaaaaaaaaagaaaaacggagagacacacccagggcaaggacccaaagccaaaacccagcaaggaggacggaaggaagagggaacaagaagcagggaagcacccgcgacaccacccgcaacacagcgaaagacaacaaaagcacacgagccagacaagcaacccaaaaacagagagaaccacacaaagcccggaagagcaaggaaaggccaccggcccaacacagagcccaagcgacacgcagcggcgaggaacaaaccaccaagacaaggccaaagcgacacaaccgccgcggcgggccaccacgaccacaccgggaggcacaacccacccaaacacgaagaagggaacgaccaaagggaaccacccaaagagaaaaagcggcaaaacgagcgacaaagccccgcccgcccacgccaccgcggccacacccagccccgagccagaaaccgaaaggggccgggcgagccaggaccggaccacccccccccccagcaacccgcgcgcaggacacagcccggccacgggggcccagcccaaggaagggagggccgagaagaggcccgccgccaccgccaccgcaggcccacgcacacaacgccaagcacaacggcaggaccccgcaacaacgagaacagacccgagcagcccggcaggcccacgacggccagggagcgaggccagggagcacgggcacggacgaagcaaggggccagagggaaaagaaaggcacgcacaacacagggaaagccaaaacccccgggccacaagcaggagaaaaaaggccacgacagaaaccaaccaaggagaacaaaggccagcgcgcagacgcacacacgcagaaagggcggcaccacgcacaacggagccggcgcaggcaaccccagagaagcggaaggaggaacagagcgacccccacacccggaaagaggagagaaaaagggcagagggaggccaaaagcgacagccccgaggggagaggggagcggggaggagacacaggagacacagaaggagaaagcaaacacaccagagaccgaagggaaaagagacggagggaaaagaccaccagggaagagcggaaggggcggcgaggacagaaacaacgagggaaaggaaaacacaagacacaagcggaggacaaggagagagacaggagaaaggggaaaggagagcgcaaaggaagcacaggaaggggccaggaaccacacggagggaacaacggacaaagaaaaggacagcaagaaacaaagggaggggggggagaaggagccaccgcgcccaggcggaggcagggcagacgggcacggcaagcccacccccgggcagccaccccgcccagcccccgagagccggacacagggcccaccaccacaccggcaagaagagagacacggcacggagccaggaggccgacccgacccagacgcccacccggcccccaaacgcgggaacaggcagagccaccagccgggccagggaaacacaacaaaccccagcccaccccccgggagcgaagccccagggccgggagccccacacggggagccggccccccaaaacgggaagagccagagacaagcagcgcagagccccgcggagaaggaaggaaagaaaaaggaaaaccgggagaaccaggagggacgggcaccagagaaaaagaaacaagaagagaaacgcaacacccaaaaggccaaggggaaaaggggagacaaggccgcgccacagaagccaaggaaaaaaagccccgagacagggcagcaagccccaccccccaccaagaccagaaagaaaccaaaacaaaggaaagcaaagccgcccggaaggccgagcggaagagacaggaccgccggcccaggcggaggcaagagcaacaagacacgcagcccaaccccgggccaaggacccgcccagccccgagaggagaccacaggcacaccaccagcccagcaaccagagaaacaaagccacaggcccaggcggcgaaccccgacccaagagacccgccggcccccaaaggcgggaacaggaagccagaacccagccacacacaggcccagccaggggggggggggggcggagaggagcaccggcccaggcggagagcaaggccaccggccacgcaaccccacccccaggcaagggacccgcccagcccccaagagcgggaacaggcagcgccaccacgcccgcaagaagagagagaggcaccagggcaggcggcaaacccgacccaaggacgcccgcccgcccccaaaggcgggaacaggcggagccacgcacccggccgggggaaaaaccaagcgaaaaagccacccaacagagagagaaggaaggaaaggagggagggagggagggagggaggaaggaaggaagggagggagggagggagggagggagggagggaaacccgaaaggaaaaggcaggggggaagcccagaagaggcagaacgacccacccgagcaccagccagaaaagggcccgccccagacccccaaagacaaccacgaggagagggagcgggaaaaccccagagagccaagagagcaaagccacagccggaacacagcacccacaaagacaccccacggccccacaaaaacaaggagaggaacagcgccacggccccaaggacgaagaacaaagccccagagccacgcccgcccagcgcaaagccaaaagcccgcaaagcaaccccagcaccggcccaccagcaacgcccacgagcaaaacccaaagagcccccacacgccgccgcacggccgggcccccccccagcgccccccggacgcaccaccacgccccccccgccgccccccagccgggaacccgaggggccaagcaggcgcccgagagcggcagacagaggaaaaaaaaacacacgagaaagaaagaaggcaggacacgcacgcacagaaaagggcccgcgcggacccaggcggacaccgaggcccggcccaacacagcgaggcgcacgccacggcacggacccgccgcccagcgggggaccagagcccgacgccgcccccccagcccgccggccggcggcagcaagacagagcccgggagcccgcacgggccagcgcccccagcgccaaaacccccaccccgcccacacccccccccaaaggccagaaggggacccccaaggacccaaagaacaaagcggagaaagacaaccagggcgacgaccgccacccgaaacaacacaggcaaagacaggccgg

SEQ ID NO: 249 - RNA, 1518 nt, Homo sapiens
aaaacaagggcaaaagagcaaagcagagaaacggcgggaaaaaaaaaacaacgggggcaaaaggaaacacaaaaaaaggcaaccacagagcacgccggggaggaaggagaaaagcgaagccaaacgcacgcgcaagaaggaaacagcaacgcagacggacccagacaagagaaaagcccaaaaagggccagaaaagcagggaaccaaaacaccacagaacacaacaaaccaacagacacaccgagcaaggccacggcagaacacacacagcacaaaccacaggaaggaaaaaaaaaaaaaacaaaaacaaaaaccacccgagacccaaaagaaacaagaaggaaaaaccggccagcacaacagccagcaaccacaaaaaaaaaaagcgccaaaggagaaagagaccggagaaagaaaagcgaacgagccgccaggggcaacaagggcaacccaccgaggcagcacccgggaaagagacagcaggcagcgaaaaaaccagagaggaaaaccaccagaaagaccaagaaagagacaaccacaaaaccgaaagaagacaacagacaccaacaagcaaaagaaacacgagaccaggaggaaaggccgaaaaaccaaaggggaaaggcacgcaaaagggaggcaaagggcaagcaaaagcaaccaaacaagaacgagacgagcccccgaaagaagacaaacagcaaaagaacacaaacagaaaacaaagaggcccacaaagaagaaaaagaaaagaaacaaggcacggcgaagcaaacacccacaaccgagcccaaaagaaggggcagaacaacacacgaagaccaggccagcagagcaaaagcaaaaaacaagcacacaaacagagaaggaaagaacacaaacagggcaccggagacaacaaacagagagaaaaaaagcaaacagaaacgggagaagaaggcaaaaaggccacaaacggccacagggagaaaaaaaaaaacaacagaaaagccaaacccaaaggccccacagcaagacaaaaaacaccagccaaaaagaagagaacacagccaagggcaaagagaaaggaacaaagagaaacaacggaagagaaagagccccggacagaccagcaaaaaggcaaacacccgcaggacaccagaaggagagacaaacagcaaagaacaaagagacggaacccccaggcaggagcacgaaacgagaccccagacaaaaagacagagacggaagagaggagaaaaaggcaaaaacaacagagaggaagcgagccaaaaaaagcaaggaaaaaagacccagcacaaggaaaagaaaacgaagaaggaaagcagaagcaaaagcaccgacagacagacagggaaaaggcgggaaacagcaagcaaaaaaaaaaagacagaacaggaaagaaaagaacagagaagagcaaaaccacccagcacaaagggggaagaacaaagagccaaaggcaaacaacaaaaacaacaggaccacccggaaagccaggaaagaaaccaaagacccagc

SEQ ID NO: 250 - RNA, 70 nt, Homo sapiens
gcagcgcaagagcacacgaaggggacagcaagcaggaaagaaaaccgccccgacacgcaggaagaaggac

SEQ ID NO: 251 - RNA, 9190 nt, Homo sapiens
acaccgaacacacagccaaaagacaggagacaaacccccaccgaagacccggcagagccggcaaacaagcaaaaaggaaccccacgcgggaaggacgcccaaaaggcaacacaaccaggagaggacagaacacagacccgaggccaccacgacgccaagaacagaaagcaaccggcaggcagcaccccacaggaagggcccagaaagcaaggcccacccgcgagaagagcaaaccagggcaagggcgagcgcagccagagcaggagaaaaaacaccaccagccagcagagagccaaacgcaaaaagagacagcgacaagaagcagaaacacacgaagaacgcgagaacagcagggcgccaaaaagaaagcaaaaaaaccaccccccccacaaagggacgaggcccaccggggaaagccggcgcaccgaagaaagggagcagcggcaagcacaagcaaaaaaaaacagaagcaggcagaacagagcagggagagaaaagaaaggccaagccgacagcagaagacggggggccaggaaccacaagggaacagcgacaaacaacagaaaaaagcgccaccagcaggcgggacagcacccagaagccaagaccacggcccagccgaaggcgcaagaaaaggaagacccaagcaagccagaggcagcccagcaaggaaagcccggccgccgagaggggcagccacgagggccccccgccccccgccggggaaaaggaccacacagcagccgacgcaggcagggccaggagcgggcgcagcacgggagcaagagcggacggcaccaggacagacaggggcagggacagaacagaggagggggggggaggccaaaaaccaagaaacgcagaaaaaaagcgcagaagaccgaccgaccgaaagaaaccgcaggggcgccacccccgcggcgccgagcgcgcgggccaaaacgaagccagaccgccccacagcccacggcgcacccggggcacgcaagcccccggaccgagcgcccgccgccccgccgggccgccggggcacccgacccggaacggcgcgcgcccgcgaaagaaggaccgcggcggagcccggccggggcccgcccgcagcgggcgaggggacggaggacaggggaagcgcagaagaccgggggggaggcagagaggacgccaaggacggggaaggggaagaggaaaccacaccaagcccacccggcccgcagggcaagggcagccgcgcccggccgcggcacccagccaggcgcccagggaagcggggggacaacccaggcgagagggggcaacccagagggagcgaagaggaaaacaaggacgagacgccgagaaggcagagcggagaaaggcggagcgagggagcgcggaaaagaaagagagccgaagccggggagcgccgcgcggcaccacagggaggaggcaaaaaacccagcacaggaagaggaacgaaagagcggagccccggcgcgcgacgaaggaacgagggcagggacgaccaggccccagagaaaacgcagcccgcagcaggaaaagcaggcagcagagagacagaaaaaaggcgaccaacacaggaagcgcacgcggacgggcgagcagcggcagcccagcaacacccaccgacaggagacagcaggccaaagcagcgcagcagaacacggaaagcaagccccccgaacccccagcgaagccggcgcaggaccgaggggggcccacaaacccgaaacacagcgacagaaggcaaaaaaacaccgaaaagaaacgacaaaacaaaaaaagacccagagacgagaccagcggcaccacaggccagagcaaagccagggagagaaacaggaaacagcagaggccgggacagccaaagcaaaaagaaaacaaagacgagaggggccaccagccacagcgaggaggacagggaaagcgcaggaggagagcagggcacaaaaggcaggccagaggcagagaggcggagaggagaagcgccaacgcgaggagagccgaagccccgaaagccaggagggagggcaggcacgaggcggagacagaggagagcggggcccaaccccagccagggagcagccaacccggggggaggaggcccaggcaggggagcccgggacgccgcggcccccacggacaacacaaaggcagccgggggaagggccagcggagcaccgcggaggggcggggaggacaacgaccaaacgagacgggcagggaagacagaaggaaaggaaaagcaaaagacagaacgacacaccccccagaagccagaggaaccagaaaggcaaaggaaaagaggaaagagagagaaggaggggggggggcagaggagaagagaagaaacagagcaagcgcacaagagaaaaacagccagaaccaaagcgcaagacaagcagaagcaccagcgaaagcagcagggcgcaggacgacaccaagaaaacaggaaggccacaaaggaagaagaagcaaacaagacaaacccagcaaacaagggcaaaggaaagaaacggaaacaaaacgaggaacacagaaagacaacgaacgcgaagaaggcgaaacaagcaggggggaagcaaaagaaacggaacgcaaacagcaaaaacagcgagaaaaacaggcaagccacaaacaagagacaaaagccaaaaaggcacgccagcccaccgaccacacaaaaggggcacaaagagagaagcaaaagacacgagaaaagggaaaaaacaaaacccacagaaaaaaaacaacaaggaggagggaccccgagaaaccgaaggagcgcgcgaagccaaacagcagcagcagaacgagggaagcagggaccacagggagacaaggccacgcacccccccgccggcggagaggggcacacagccccacaaagagacaggggaggagcgaggccgaggcagaagaccagcaggcccccaggcacacggaggcagcgcacaaacccgaccgcgccgcccaaagagaagcaaagcagccgggagcgcgggaaaggcaagagcaacccagagcacaaaagggaagggaaaagagcaggaaagcgcaaaaaacaaagcgaacacagaaaaaaaaaaccacgagggccaaaacgacagcgagcccgaaacaccgaagcaagaagcggaaccgccagacagaaaggacggcacccaacagggggaagacaagggagcaaacagcggcaaagcagccccacagagcgaaggcgcggacagaagcccgccgaaagcgccccccgagggcccacccagcagcagccgcagcagaaaagagcagaggagcaccaacaggaagagcaggcaccaagcaagaggaaggggcagggcagacagacgggacagggggacagaccgagcaagaaaacaggccgaccacagagacccggcggcagcgcaggacaaaagcccgaaggcgagcggcagggggaaagcagaaccacacacagaccagggcgaagaaaaagcgacggaaaaagagaggagaaacagaaggcccccccaaggcagagaaagaggcaaaacacagagccagcgacccgccccccccccccaagagcagaggggaggagggcagggcagagaaaggaacccacgggggcacgaaacgagcgcaaagcaagaaaagcaaaaacggggaagacaacagaaggagaaccccggcacaagcggaaggggcagcaccagcacgaaaaaccccccgggcgaacaaaacaaaaaaccaccaaacagagaagcgcaaccgcgaaaacaaggggcaggaccagaagaaggaaaaaaaaaaaccagaacaaaaaacggggaggggggcccccaaaaaccagccgagggagcaggagaaacgaacgcccacccacccgggccacaagaaggaaaacaaggcccagaagaaaacgccgcagaagacggagggccggcgacaagcacgcagagacaaccacaaacaacgaaagagacccaccccaggacccaaggcgggcaaagaccagaggaggagcgaagacaaggaacgaaaagccacaggagaaaaaaaagcaacacaaaagaaacaacgcaaaagcaacggcaaacgcaaccgaccacgcgaaagaggaaccgccagagaaaaacggagaacacccgggaacacaagaaaaaagaaacgggcacaaaaggaaaagaaaaagagacgaaacgcacaaggcccacggaaaaaggcaagagaaaaagggagaccaacaaaaaaaaggaacaagaacaaagcaaaacaggaccacaagcggagacacagcaaaacaaaaaaaacaaacccaagcacagagccaagaaacacaacaaaacaaaaccaggaggacacagcaaaaacacaagcaaaaagagaaacgaggaagacgacaaccccacggcgagagccccaaacaagaaaggccaacacacagcaacgaagaaaaaagccaaaaggaaaaaagaacggggacgcccccgaaagaagcaacggaaaaggaacaggcgcagaagcaggcaaggacaaaaaaaaaagcaaaaaagaaaaaaagcacaaaacacaagaaaggaaaaacgcaacaacaaacacaaaaacaaggcaagagaaagcacagccgccaggacccagccaacaaagaaggaaaaaaaaagacacaaaaagcaaaaagcaggcgagggcaagaacccagaccaaccagggaggaagacaaaagcaaaaacaaaaacaaagcaagcaaaaaagcaagcgacggcaagcaagcaacaagcgaaccagaacacagacaagagcaagacacaccgccacaaaaacaccaaaggagcgacacccaccagcacaacaaaaggaacgccacacaggaggcaaccccagaaaggcaacaagaccaagagggggggagggggaaacaaaaaagggaaaaagcaggaggggggccacgaagcgcagggaacgggaaagcccgacgacgcgacaccaagacagccacaacggggaagaacgggcccacacagagcggagagacagccccgagcacagagaagcacaccccaaacgccaacacaaaagaaagacacagaagcagaaggccggaagcaaaaagcaaagaaaccaggagacacacgaaaagggaaagaccaaccaaaaccgaagcgcccaaacgacacgccggagaccacgaccccagccgagccccgggcccaccaggcccgcaagaccagccacaccggggacagcgccccacagccaacccaccacgggccaggggcacagaagagcacagacaaggaaacaaagaagaagaggaagagagaccagaagacagagaagaggaaaagaagccacgggagacaaggcaagggcagggacaacaaagcaaaagggccagaagaaaacaggcgggacgaggcaagcaacacgaacggcgggagcaaaaagcagccaagacaaagaaagaggagaggcggccaacaaacgacaaaaagaggcaaggggggagccggggaagaccccaagaaacaaccgaaaaggaggaacaccaaggacgaagacaggaaaaaaaggaggaagacaaacaacaaaaaaaaagaagaaggggaaaaaaaagcgagagaaccaggcaacaaccaaacccacgagacacggaacaaaaaaaccaaagaggaaagcaaggagacccaaaaaaaggaagccaaagaaaaaggaagaaggaaaaacccaaaaaagggggcccaggggcaaagaggaagccagcccggaagagcggaaaaaaaaaacgggaaaggaaccggaagcacggccacggcacagacgcaacaacaacgaaaacggcacaacaaacaggcagacccgccaccccagcccccgagaaaacgcaacgagaggcggagaacccccccccgccacgaggccccgcccccggagggcagcgggggccaagggggaggggaggcagaaaccaggacggacagccaaaaaccacaggccgggaaaggcaaccgggacaccacccgaccaccagcgggggcggagagccaggaaccccaagcgaaccccacaaaacaaggggagaaaacaccagcagaggcgggaggggagagagaagaacaaaagcccccagaaccaaaggcagcagaacacgcgggcggacccacaccgccgaaacgggaggccgcacaaggaagggcaaggcgacaccgaggcaccaagggaacccaagagagcccacaagagcaaggggagcggaacagaagcgaagccaagagcagagcagacacaggaacagaaaagcggaggaccagaacaaggaaggcgcgcacccaagggggggcggggagcaaccaggagccagagacaccggcgcgagagaagaccaaagacagaagagcaaaaaggacgcccccacccaaggcggaccagaaacggccaaggcgaccccagaaaagccgaaggggcgggagcaacacagccacaaacacgcagccagcgacgggcaagaaaagcacaacacacaccgacaaccacacccaggcccacgccccgaagaggccccaaaagggccgagggcccagaagcgcccagagccacaaagcaaagacagacccccgacaccccaagacgcagaaccaaagggcaccaaagaacccagcaacagaagagccaaggcacacaaggccagagaagaagaaaaaacgcagagccgcacgcaacaaaaaaaaaaagcacggaaagcgaacaagagaacacacacaaagagggaaacagagaacacccagaagagaaaacaaaaaaaagggcaccacacagggaaagagagagaaaagcaaacaggaccccgagaggacccaacaaaacagagacagcagcagcaagagagaagaagagaaaccaaaaaagcaggaagaaaagaaaccaaagcaagaaaacaccgagggacaaaaacagacacggaggagacagccagcaacaaaccagagaggcaaaagaaaaggcaggaacacaagaacggaagaaagcgccaacaaaaaaaaaccagccaacagaaagagaaaaagacgagcaaggacccccaacccacaaggcaaagaaaaaacagagagggaaggcaggaggggggggggaagaacggcggcccgggccgggcgcggggcacaaaggccagaccccaggggaaggaagcaacagcagggaggagagcgggccgccaaaaggggagaaagaaagaagccagacaaaaaaggacaggcaggccgaagaaggacccgccgccaaagggaacgacagaccgccacccccgacagaggagacacagcacaaaggacaccgaagaaggggaggagacacgggagaagccccagccccaaggcggcccgcgaagggaagccgccacggccaagacgagaacaaagcaaccaaaaaggccggaaggcaggaagaagaggaagccaaagcccaagcagaccacgaacaaaggacagaaaaaaggcaaacagaagaaaaaaaggaaacaacccaggaaaacaccaagaaggcacaacaacagaaaacacaaagagcaggagcagggggacaaaccacaggagagaaccaaaaagaaaggaaggccgggaaggcaacacaaaaaaaaaaagagagagccagcaaaaaaacacacagccaacaaagaggccagcaaacagaagaacagcacccccgacaacccaggcaagagaaacaggagagagggcgccacggagccgagaggaggaacacagcaaaaggaggacgagcaggaagaccagcaccagaaccaaggccaggccacagcacagacaggagcaaggaaacaggaaggcaaggacggcgcggggggacaggaaacagaaggagacagacgagagaccagccaaaggagcaagaacagaccaccaccaaacaaagaccaggggacaaggcaaagccacacagcgagccggcccagcaaaaagccaaacacacagaagaaaggaagaaggggagaggaagaagaaacgaaaccaaaaaccagagccgcaaaagaaaaaaaaaagcaccaacaaaaaagaaccacagggaaaaaaacgaagagaaggaaaaccagcagcaaagcagggaggagggcaagaaaacacaaggagaacgagaaacaccaaaaacacagaagaaaagaagaccaaaagagaacaggggcaccgccccgagagaagacaacagaaaggaagaaaacagagcaggaaagaaaagacagaaggaagggaccagaaaaacaacccccacgccagcagcagaaaggagagggcaggagcggaagagagcccaaggcacacagcagcacagagcagaacaagccaccgaccaggcgccccgcaacaggcccacgagcagaagggcacacaaagaagagagcgcacaccaagaaagacacgagagccgcaagggaaaaacgaggaaaacaagccagccaagaaaaaaacagagccccagaccaagagaggaaaacaacaacgcacagaaagcaggacgcaaacagaagggaaccaaccggccgcgcaacagcggagcagcgggcagcccagacaggagagaaagcacgaaggcgagggcccagcgccccaacagcacagcccagaaaaaggaccgagaagcggcccaaaaaccacaacaggcggaacagcggaagaacagaagcgccaggggacaaagacagacaggaaaaagaagaaacggcccgcagcccaacaaggaaaaaggaaaaaaaaagacagaggacgcgccagaagagccacagcccaaggcaggagacgaaagggcagacaaaaagaggcgaagaaaaacggcggagaaaagaaaagaaaagagaaggaaaaagacaaagcggacaaggaaagaaaaggagggggaaaagaaaagggggggaaaagaaaaaggagggggaaaaagaaacaacaacaaagagcccagacaaaaaaaaaagagccacagaacacggacagcacaccaacacagcgacccaaggagaaaaccggcagaagccggaaaccagggggagaacacgagaaggcggagaaagggaagacagggacagaagcagagaggagaagaccagggaggaggggcccggaagcgcagcagccccacaaaaagaagagcacggaagcacaagaacccggagagggacagcagcaccaacacaacaacaacagag

SEQ ID NO: 252 - RNA, 288 nt, Homo sapiens
acggaaaggggagacacgaggggggagagaaggaaagaaaacacgggccggaagaaaagcgaagaacaaaccaagccaaccgagcaggggacacacccacgacagaccggacgccccaaccccacccagcaggggagggcccacaacccgcggcgaagagcagcacgcgcagggcaccaaccggggaggaagggcccacccaacccaaaaggagcccacgcgccaaagcccggggcagcaaccaaagggcgcggcagacgcggcggccccgcggcgcccgcccacacc

SEQ ID NO: 253 - RNA, 1222 nt, Homo sapiens
gggaaacacacagaaacaaagcagcgaaaaacaaaaccaaaaaccagaagcgcagcaacacgggccaaccccggggacaaacggccgagcagagcagagccccccaggggccagggccagcagcgggaagggaccgcgagggggcccagaggggcgcaaacaaagcgggccaagggcccacgggaggaaggggccccccaaccacacaaaggccccagggccaggggagcccagcccccaccaccaccgaccaacccacccacagacccggccccagcaggaggcaacccgcacaacaacaacaaccacagcaaaacgacaagaacagcagcaacacgggaggagacacccacaccggagaaaaccacgggaccaaccacaccaaccaagacccaggcccaaacagcccccaaccacggggacgcccgggcccggaaaaacacaaaacgacccagagccagagcaggcggcggaaacacagggcaacacgcgagaaaagaagagaacggcggccaacgggagcagccggccgaggcgcagcaaccggggcgcagacaccgacccaggagcagaccgggcaaaaaagcaaacaccagcagcaaaacccacgaaacgccaacaacacagcagcaaaggggcggggaggggcggcgccaccagagaaaacgcaaaacaagggacaagccagaccaccccaaccccaaaccaggccacagcaggcgaagccgagaaaaaagaaaggaaaaagaaggaggaccgcggaacagaacggggcaaacccaaacccaacacagccgccccagccagcaagacaaacgcgcaaagggaccagccagagacagcaagccacgccgcacgcccacggagaagaaaggccagagcggaaaacccggaacacagcgggggaccggcaaaccacaggcagaaagacagggggcaggcagccccacgccacccaaagcggccaacggggcgaccccacgaccagccacagagcaccagccgcagcggcaagagcagcagcacccacccagagggcccccaaacaccagaggccccacccacagcagcccccagcagaaaggcaacccccccaaagccaacggcccccacagccccaacggcccagaagcccgggccccggagaacagcaaggccaaggggcacaaaacccgaagagcgagagggacaaggcaaccaccccaacaagaacaaaaaaaag

SEQ ID NO: 254 - RNA, 6299 nt, Homo sapiens
gcacccaccaccccacacggcgcagaccacgggccgaggagaggcacaacaggccaggccgcacccagaaaggagaggaaaacacagagagccacagccacagaaacccccccacccacccacacaaccccaaagaacgcgaccaggcacgggcaggcacgaggagaagaaaacaagaggcaagccgcccccaaacgcccccacagaacaaaacccagacaaggaacagaaaacccacgaagaaaccagaagggaaaaccccaagaagacaagaaaaacagaagaaaagacagcaggcacaggaagcgcggccaccccagcgaaccccccgcacccaacgagaccgacggggaaaaggcaaccaaaacacacgacaaaggaaagaccgcccagccggaccgggaaaaaggcagcgcccaccaccaccagacagaccaccgaccccccaaccgaacaggacgcaacccaacccagcgcagacaaccacacagcggaaggggagaaaaaccgacaaacaacgacaggaaacagcaagcaaggcaaacagcaaaggccaaaccgggaaaaaacagggacggaaccaagggcggaaagggggcgaacagaaggccaggagcggagcaagggacgggcagcggaggacacccgccacgacccggaacacacccacggagccggcgcacagacagaaacccacacaggggaccccgagcagaggaggcacaggagaacaaacgagagcgagacgcaaaaaacgggacagcaaagggcaagcgaacaaggaaaaagaaaagcagaaccagccaggggcagcagcagcagaagaaaacaggcccgcaaggacaagaaccaccacagcagaacaaccgaaaaggcaaacacacacacgcagaaaaggaaagcgcacacaaaaaaaacaacaacaacacaacaacaacaagacacaaaaacacaggaaaggggaagaggcggacagaaacgacaggaacaacaaaacaacgaagaagagaaaggcaacaggaagcaaaacgaagaagagaggaaaacagcagcccaccccaggaccaaaaggggaaaaaacagccgcaagaaaaaggggagcagcagagaaacgacccaaaaacgaaggaaaaaaaaaaaaaaacaaaaaaacaaacaagggcaccacaaagaacacaaaagcaaaaacgacaaagcacagacaaaagaaacaggacgaaaaagcagaagcacaaaggaacgccaacaaaaaaacaccacggcacaaggaacagacagacacccagaccagagagccagaagaaagaccgcacccgaacgggcagggaaaaaaaagaaaaaaaaaaaaaagagaaaccaaacgacacaaagcgggcccacagacaagggacgagggaaaaaaaaaaaaggcacccccaaacgccgacagaaaaaaaaaacaaaaaacaaaaacaaaaaaaaaacacaaaaaaccacagaaacaaaaacaaaaaaaaggcaaggacaccagacagcgaagcaccccgccccagcgaccaagaaggccaacaacaaaaacgcggggcaagcccgcgacagagaaagccgcagcaggagaacaaaaagaagaggaaaagagaggcaaagacacaaagaacccaccaggcacgccaaacagcagccccagaagggcacacgccaacaacaagaacgaaacgggaagacacgccccaccccccgaaacaaggggccaagcacgaaaacaaaaaccaacaaggccgcccggaagcgaagggaaggcacagccccagaaaggggcccagcaagcaggagacacgaaaggacagcagccacgcagcaacacagaacaaaagaaagcaggccgcagaaggagagcagccgacggcggggcaggcacgagacgagagcagaaacagaggaggcgcaacaaaggagcccacccccagaaagaaaaagcaaaccgcaacagagaaaagcagcaaaaacaagaccaaagcgggcgcacgacgcagggaggggcgacggagaagcacggcgcaggaagggccccagagaagcagcaaacggaagcacaagcgacccgccaagcaagacaacgcccacaagcaagccaaaaaaaaaaaagacaacccccagccccacaccccacagcagacgcagcaaccacacaaaaaaagaaaagcccaaagcacgaaacccaagcgaaaagacggaccaaaggaaaaaaaaaaaaaaaaacaggacaaggcgaaaggggaaagcgggcgcggaggggagcaggagggcacccaagccagccagcaacgccccccaagcacagcgggcaacaagacaaggcacaaaaaagaaaaaaaggaaaaaaagaaaaaaaaaaagaaaaaaagcagccaggccacaggaagggaaaaaagccagacaaacagcagaaccgcaaaagccaaggaaccagaaagggaaacaaaaaagcacccaaacaaaacaaacaagcaaaggggcagaggaggagcaggagcagacgcaaagagagagaaaaacgcccgccagaagaagaagaggaagagaacacgaacacccaaaagcaggacgaaggaaagaggaaaaacgcaaaagccagaaaacgacgcaaaaaggcagcgcaagaagcccacccccccgggaacggaaagaaaacccgccgaagaaaaacaaacccaaggaagcaaccagcgagaagaaggcacgaaaaaccagaaaggacgacaggagcgagaaggaggaaaggagaagcaaaaagggaaccgaacagagcaggaaaaaagaaaggcaaaacaagggaggcagcaggggaaacgaacaggggaagaaaaacacgaagacagcagcagccagaaagcagcaggaaacacagggacaagcaggaaaaaagaaacaccaacaggccagggcagcaaaagcaaggaagagcgaggaagacgcaccggggggagacagacagacgagagcacagcagaaggcccagcccgaccgagacacagaaccccacaaaggcaaacaagagggcaaagagagccccaaacgggggggcgggaacgaagcagaggcacgaacacaaccagcacgagacccggcccgcccgccagcaaaacgcccccgacacggcgcagagggcccccagaagccacgccccagcagagagcccccccgagggaacgagcggccacacccggcagacagacggggcagcccgcccccaggcccgcccgccgccgccaggggggccaggcaggccgacaaggacacccccagagcggaccacgacagcaaagggaaggaacccagacccccgagccacgggcagcagcccacaggaaagcaagacccacccaaaaggcgaccaagcccagccccaaagcgaaccgagacagggcaaaaggacgacaaaaccggaaaggaaaaacccagaagaggggaaagggacaagaagcaaagacgcacagccagaaaacgccaagggggggagcccccccccggccgccgccacccacggagcaggccccaagaacaaacaaaacacaaccaccaagaagaaggagagccagggcacccaaaacccaccccgagacgccaaagacagccagaaagcgcacgcccaccggccagccacaaaaaggcccaaggccaacgcgaagcaagcagaacggacagaaacccgccgcccccacgccaaggcggcacgcaaagcgcggagccaccaaaaaaaagcaggggagaaaagcgaaaagcaggaacagaagcaccaagcacaacgaggaaacggcaccaagaaacaaaagaagcaaaccaacagggcaaaggcgacaaaagaacacaaaggacaacgggccaacaccgcccaacaggaaagcaagcaggacgcagagaacagcacaacacgaagaaaaaaacaacaacggacacccgaccaaccgccggcagaaagccagcaggacagaaagaaaaagaaaaccagcaaaaccgaaaaaaagaggccggaaacgaaagcccgaagaagacacaccggagcccgcgcgcagcaggacccggaagggagaaaaaaccgacaaaaagcagcgaccaaagcaggaacgagaaaaccaaagagagcccgacggcgcagcaggaaaggacacgagaacgcaaacgccgacggcgcagaggaggaacaacaaacagaaccggggggcccaggggacaagcagggggacagaaacagaccggcgagagccaaaacgacagaacaagaacggcgcgaagacaccgagaacagcaagcaggggcaccgacccgacgagcagcggagacgaacacaaggacaagcaagccaggacccagcgacgccacaccagacccccaaaaaaggaaaaaaagaaaaaaaagaagaaacacaggcaagcagcacaggcaaaccaaaaaaaaaccgacaaacgggcccgacaaagaaaaagaaggcaaacacgggaaaaacggcaaagaaaacgccccaaaaaaaaacaccacccaaaccagcacccacgccaccccaaagagacccccagaagggggaggagggggagcagaagcggaaagcagaaagaaagggggaccacccacagcggcggagaacagggagacagggggggggggacccacgggccggaccgagacagagagcacgccagacagaaaaaaaaccccaaaaggcgaaccacaagagcaacagggaaggcacccaacaaccagagcacccaggggaagacacccaccaggcaacaaggaacgaccgcagggcaaggacaaaaggccaagagggccaccgcgaaccaacccaaaagaaaaaagcaccgacagggcaaaaagaaaagcgaagagccgggggcggcgacagcaaccgaaggcaaaggccgcagcccgcgggacagaggcgagagaacaacggccgggccccccggccagaccacgccgcacgcgaaggcaggagcccgccacgagaacaacagaccagacaggagcacaggcaggaggccaggaagacccaaaggcaaacccgacccccgccccacccagcccgcccccaccagagcaaaacacggggaccccaccacacaggaaacgccaccggaaacccgccacaaagagggggaggggaggaacacccaggaggaagagacgagaaacgaaacaccccccggaaaacggcgaaacgagagccgggcccccggcccagaacgagacccaagacccagacggcggaaaagaagggagaacacggggcgccacacaacaaacccacagggagcgggggaagaaccgacaaccaaggcaccaccccacaacaaacaaacggaagcaagacgcaccagcaacaaaaaaggaaaaaaaaaaagcaagcaggaagcggcacagcacagcagccggggagaggacagcacggggggacggaggccccacagaagaggcagcaccagggggcaggcacaagcaccggcggcgagggcaggaccaccacggacaaaacaggagacaccacaaggacgggccgaagcgaggcgaagagacagggggcccaacgggaacaggaaaagacaagggccaacaggggcgaaaggccaggaagaacgcaggaacagccacaccccggagcggggaaaccgaagggaaagggggcaccagaaccaggcaccaaggagggacaccacacagcgaagggccgagggaggggcaccacaaaggggggacagcacaggccagggccagacccgagaagacagggggcgggcagaacacgcagagaagaaggggagaagaccgaggagggagggggcgggccagaggcccaaaggagcggaggcgcagggcagcgccgcgcggggcagggacagaaacgaaaccagaaagaaaccccgccccccccccccccaggcccgccggcccccgggcggaccaaggagccgcaggcaagggagcggaaaaggaagagaaaaaacagccccaaccccacgaagcagaaaagagagacagcggagacaagacgaacaaaaaacagcagacaaccagccacaaacccacagccacccgggagagaggacgcaccaagagaggaaaccaaggcagagggagaaaaaaacccaaggccaaggggaagacaaagggggagaaccaagaaaccggccccaaccccaccaaacacgcaaaagaccaaaaacaaaaaacagaggccacagaccagagaccagccaggggcagaaaagaaagagggcacagcgaagagagcacagggacaaacgaaacacaaaaaggaacag

SEQ ID NO: 255 - RNA, 1784 nt, Homo sapiens
acaaagggcccacaaacaaaaggagcaggaaggcccaacccaccaaagaagaggcggcagagcagcagggcaaagaaacagccccacagcaacagggcccccccaaacacccaggccccgcacacggccacacagaccccgcccaaaacccagacccgaaccacacccaaaacagagagagacccaggaagccccacacccgccaaagcaggccccggccagaagggcccgcagcggcccacacaaagacacagggaagagacgggaagcaagagcaaggaagggcagagcacagacccggagccaagcccgaccaacagcagccacccccccgggccagaacaccgcacgccccgaaaccacaaaggcccaacccacccccaaaagggggcaggagcaagacaggcggcccccccacggaagggagaggagcacgaacaagggcaaaagaagacaggaaaagggagaagaagaggagaacacaaggacacagaaaacagaggggaaaaagcagggggaaaaagaagcaaaaaccaagacgcccagacaggaagggccgaagaaggaaagaacccccgcaaaaacccaaagcgccaccagccccagcaacaaccagccagaaagccagcccagccaccccagccaagcccaggaccccacgaaccccagaagcacacgacaccaaaacagaggccaaaagaaccaccccccgggcgccccaccccaagcaccggcaccgcgaaacacgccgcaccaacaccccccccgaacccacccaaacacaacgacacaggcccgcaaaagaacccagagggcaggaagcgcgcagagacagcaaacagaagaggccaagcacagagggccaagaaaaccccaccaaaccaaaccacaacccaagagggaccgccagcccccagcgcgccacacggaacgaccaaacaacaagagcgcgcagcggcaagaaagggcaaaaaaaaagcacccagccaaaaaggagaaaaagaaaacaagaaccagagaccaaacgggacagcaccggcacaaacgaaaacaaaaggccaggaagcccacacgcacccgggcagccggacagaccaggcccggacaccgccgaagcacacgccccgggaccacgagccccaaaggaagaaccaccccaaaaggacagcaggaaacaagaagccagcggacagcacccacgccaaaaagcagcggacagcagcccaagcacaaaggaggggagagaggaaaccgcaagagcaaaagggagagggagggggggggcccagaaaaggccaacgaaaaaggaaaaagagaggaaggaggcaggaaggaaagaacccccgaggcacagacgaagagaacaggagagggcccacggcggaccaaacacaagagcggcaaaaccacaaacagcgccaaaagcacccgccccagcaaaaaccacagcagacacaagaaagcaccgacaaccaccaggcacgcaccaaaggagaggaggagagaacaggaacacgccagcgcccccccgccccaacccggcagagagccagacaacgaacagacgaagggagcaagcgcacaaaaccagggagcaccaggacacaccgacggagacaaccgggccaaagcagaagacaaacaggagcgaggaacagccacaacagcccgcgggaagacgggcgagaccgaggcagcaaggccccgcaaaacgaaaaaccgagaccccccccagaggcggggacaaccccccgcacaaaaaccaagaacggaagaccgagcaa

SEQ ID NO: 256 - RNA, 3109 nt, Homo sapiens
acccggagagcggcacacgcgggaaaaaccaaagacgggaacacaaacaccgcaggaccagacaggacacagaacccccaaagacagcgacacagccgcaaaacaaggcgacgggaacagacagccccagagggaggacccagagggaagaggagaaccacgggagccagcaccgggggccccggggggcaggccaggagcggcaagcgggggggagacagggcaccggccaggcggaggcagggcaaaccggccacgcaaccgcgcccccggccaagcaaccccacaagcccccaagagcgggaacagggagccaccacagccgcaaaaggagagagaggcacgcagccaggcgacgaacccgggccaaacaaccccccgcccaaaggcgggaacaggggagccacagcgcgaggccgggggggggaggacaaccaaaagaaagaaacccaccaagaccagcccccgcacagcggaggccggggccaagaagagccaagacgagccggaaaccaggggaaggggaaaaacgaggacgaagagaggaacaggggaggagaaagacgaaggagcaagacggccagaggacagcggccacaaaaggccagccccaaaacagagacagccccggaaggggacgaagccaacgaaggcgcaaagacaaagaaaaaaacacaagacccggcaaggaggcccagaaagcaggccaccccacgagagcgaagaccgaaccgcacagcagccaagggagaacacaaaggccagaggacaggggaaaagaaacgaggacccagaggggaggggcaggaaggacagggcaacagaaaggagggccagggaaagagccgggaggcagcccgccggcccgcaagaggaccccgggggggcgcgagcagccagggaggcaggaacacacgagggggggacgcccacccagacccgggacaacaacccagacccgaaacagggccagcgcgcccgcagacgccagagcaaccaggagaaaaaaaaaaccaaccaaagcaggaaggccacgggcgaagggcggggggggcagccaaggggaaaccacggggggaggcgcgaacgcaccaacagccggagcaagaccgccggaccgggagaccggggcaggagaaagggcacacacaccccccacacagcagggaacagggagagggaggaggagaacaggcaagccccaggaagcccccccaccccccggcgccccgcccccgcacgggaaggaacagggaaagcagggccggcgggagaagcaagagaagagggggcgcgaagcccaggcgggccgaaccgagggggaaaagagcgaacagcaaaaaggggccggagaaaaggcaggagagccagagcaccagaaaaaaggccaaccagagcggggcccgggcgaaggagccgccaacacaagagcccccaagccacccacacagggaagggacaaagagccagcaaagcccggggcccaaaacccacagcaaaggggacccccaaaccaagcgccccggcgcgggaacaaaaagaaccagaaggcaaacaacgacaggagcgaaacggaggcgcaaggcaccagcagaaagcgcgaaccacaacacggaagaggcgacgaagggcgagggagccgaggccagaaagcacccgccaggccaggccagaaaggagagacagggggagggcagggagggaaaagaagagggaccggaacagaaggggacccccaccaccccccagccgagaccaaagcacagaaccgcagggcaggcagagggaagggacgccccagaaagcagggcgaacacccgcaaaaaccccggagaccgccgcggacaaagaagggcggcaagggcacagagccaccacaggggggaaccacagaacagccggggaacccgcccgaacccaaagagaggccccacccgggggaaaccccgggccccgggcggggccccccacccggcagcacaaacccgcacacaggagccagcgcacagagcagaagagcggggggagaagaggaacgaacccaccggacccagaaccagccacagagcagagggaggcggcggagcaaacaaggggcccacaaacagaggggggggcgggggcacaggggcacgaacaaccccccgacccagcgggggggagccggggaacaaagagaaacaacaaacaccacgggggcgaagaagggggaccacacagccccccaccccccccccgcagaccagcaggccaggggcccaggagccaaccaaagggaaagggaagggagagaaaccaaaaggcaccgcgacaacacaaggaccacaagggcaggaagcagagagacgacccaggggaacgggagaaaacgggaccaaccagccccagcaggcagcacgaaggcagaaaggaaaaagagcaagggagggaccaaacgcaagaaaaccaagcaggcgagccgagacagccgcaggggaaagacggagagcggggaaaacacagccaccccagcacccaagagaaacacaccccggacaggcaccgcgccccaccaccccccaggcaggaagggaaagggaagacccccaagcagccagcagcagcacggggcccagggaagagggagggggcggggcggcgccagaacccggagacacagacaggaagggaggaccgcaggaagcgagagaaggagaccgggccgggaacccagaggccgggcccgggaacaaccaccacaggaccagccgcgaaaaggaaacacagagccgcacagccagccacggaaaaccacgaaaggacaagaccaacgccccggaccaaagagaacgggggccgcacagagcgaggggcaccagagcagcaaccagagaaagagagccacggggcacagaaggggagggcagcggaccacacaggccgggacgccccgacccagcagagcaggccagcacaacccccgccacccaccaccgggaaggcacagcaaaacaaagaccagggaaggcacgaggagacaagggacagaggaagccccgaacaaccagcgcgaaccgaaaacccgagaaaaagccggagggagccggccgacagcccaaaacgcgaaaac

SEQ ID NO: 257 - RNA, 42 nt, Homo sapiens
cccggaaagaagcccgcccagcacacacagcacagagcgcaa

SEQ ID NO: 258 - RNA, 1786 nt, Homo sapiens
gcaacaagccacgcaaccccaacccaggccaagcgacccccaccacaggccacagcaggccaaagagagacaaacccaggcccaggcagccgaacccgggccaagagaccacccacacagccccagacgcggccggcccccagagaaaccagaggccaggacagaccggacaggaagcagcgcaggaaccaggccaccgaacagggcgggacaggccggacgcaaggaggggcgcaccaccgaaaagccgaggacccagcgagaacgaaccagggggcaggcagacccgaaacagccagcgggaaccgcacggggcgaggaccggagagagagaccgaagaaccagcgcgaagagcggaagacggagacagaaggcagagccaggccgaaggaaaggagggagccggagaaacaccagaggaaaagacgaacagcaagcagggccaagagcaaagaagaccagcaagcccgcgcgcgcaccgacaagaacacgagacaggacggaaggcacagcgaacgagaccgggagaaacacaagaagcgagacacaggcagccagcaagaccccccccacgggacagagggaacaaagaaggacaagacagcagggacgcgaggccggccaagacgcaggaaagaagagagaaacaggaagccccggccccccccagaccaccccaaaaaaagggcacagcccgacaaacaaggcaaaaagagggaaacacacgcaacccagcccagggaacaggaagcaaaggcgaaggccccagcgacaggcagcggggccagggccaagcccggccccccgcaccaagaagcaggcccgaggccagggcggagagacacaggcagaaggagaggcccagaggcaaggacaaggcagagaggggaaaagggaggagcgggaaccacgacacagccggacggaaccagcaacagcacagaagaaagagaaccgcccagaggagaggcagggaaagacccacagcagccaccacgcccaggacaccgaggacgaggcccacaggccaagcacggccagggccgagcagaccaggaaccaccaagcccacggaaaacggggacaaaaacaacaggaggcaaagaaaaacacgaaccagcacagaggaaagggggcggaagaaggccccccgcaagcgggggacagggggccggggacgacagacaaggacccccccacccccacaccgcccacccgcccgcacagacccagccaggaccaccagaaccagaaccgggaaaccaaccgacaccagagacgggccagccagacgaggagaaaaccagaaaaacagaagcccaaagccgggcagccccggcgggacacgacggccagaacccgaagacaaaaggccaacaggggcaccccaaagcaaaccaaaaagaaaaggaacacagaacacacacacaaaaaaaaaccaggacggaggagaggcagaaacacgaaaaagaagccacaagagaaggaagaccaagaagacaccaaagagagggagcaccaaaacggagaagggaaaaagcaggcaaaaaacgggcagacagagaaaaaaaaagagaggaaacggggaaagagacacaagcaacaaggaccgacggggggagagaggcgggaccaggacaacacagaacagggacaacaaaaagagaagacaaaaacacccaaggagagccagacagaccagcggcaaagacagagccaagagggggcaggaggagggagagagagcccgaggcccagaagaagaaggcacagggaaagagggac

SEQ ID NO: 259 - RNA, 15433 nt, Homo sapiens
aagccgcacggcgggagccccgggcaggcagaggaccgggccccgccaacaaggagacacagaaacgggaagaggaaggagaagaaggaggcccgacaggacggagaaaggcagggggacagaaagagagggcacacgccaccaagggaagacgaaacacacggggagaaaggccccggcggcaggcgaaagagcacccgcaggggagagagggcaaacccgaagcaaccacccaagcagcgagggaaggaacagccaccccccgggggccccgagagcaggccggagggcccggggcgggcgggcagaagaggcaggggggcagggcggggggcaaggcaggaaaagacccggagagaagaagcaaggaacagaggggaagggggcccaacaaaccccccagcccaggaaggcgccccggggcccaaagggagcgggaccaagacgcccaccacccccaaggcagggggaccgggggcagcccacaccaaagaaaacccaaagcgccaacaggccgacacagaacaccaaaaaggaaaaacagcaaaagggaaagcagggcaaaccaacccgaccccaagagcaaaggagacgcgggccagagcccccgggcccagcacaagcgacagaccaggccgagggggccgggcgcgcagcaggcagcaggaaagggggggggggggggaggcaggggcggggggggggcagcaggacgggggcacacggggcaaggggagggggagccggaggggcaaaagaaggaaagacagacagggcaaggaaagaaaggacaagaaaacgaagaaagaaaaaacgggcagacaacccacaagaaaaagagacccgacggaaacaagggaaaggccagccgcagggcaagcggcccagccccggggaagaccgagccacgcaaacgcgggggcagccaaccaaggcacaccacagcgcaacagccccacacaagccaacagcccaacacccccaacgcaaggccgccgcagaaggcacacaaccacacagcccgccagcaacccacaccgaggcaacagacccacaaagcacgcggcacagaaaaacgaacaggaagcgaaacggagccaccccaggccgggaggaaacagaggggcgacacccacccaaaggcaggaaaagagcacgcgcacgccaaggaaacgggggccccacaggggcgcagcagcgggacaggagcgccgaaggggaccgccgcagccaagaccacaaccgcacagagcagggaagaccagccaaaccccagcagcaacgacacaaaaaaaaaaaaaaaaaaaaaaggaggcagagggcagggccccaccgaaacgcgcgaaaaagaaggaccgcggccaacacagcagggcagaaagaggcagccgaaaaggcaagaaccagggacacagacccgcaagaacacccagaggaaacgaagaagcccccccacccagccacccaaacgggcccgccggaagcaaggagcaagcagaaggaaggagcccgcagccaagcacaaaaaggagggagagagacaggaagggcgaggggggcaccaggaggaggcaggaagaggcccaggaggcagccgggcccagagccgaggggaagaccgaccgggagccgggggccacgcacaaacgaacaagaaccaggggaagaagggagggaggaaaaggacggaaaaaacgaggcgcgcacaaacaggagacaggaggaagaaacacgccccgcacgagccaagagccccaaacgagcaaaacgacaaaaagacgaccagaacaaaccaggaaaacacacccagcaaaacacagagaacaaaaaagcagagacaagaagggaaaaagaaaaaaaagaagaacacgcgcaccaaccagcacgagccgaccaagcgcccgagagagaagagcacgaaagcggagcgcacgggggcccgacccacccccgccaaggccccaagaaggacccacagccccagcacaccaaagacgaaccacccgggcaggaaagcaccgcagccccaagcgaccccaccccgacccccagaagacaccagagagcaaagcccccagccgggaaacgcgagcaacaaacagccacccaaagaacgaagaaacgaaaaccacaacccaaaaacacgagacaaagcgggaacgaaaaccacaaacccgaacaggcagagcgagacagcgggagaaagaaagaacaagccagaacggaagaaagaccaacagggacaaagggaaaaccggaggggggagcgaggccagcggaagccggccgccccgaccacccagcgcagcaagggaacaagagagcaaagcccgcgaggccaaaagacaggagaaccccagacgggagcagacagaaagggcacaccccggagaggaacccggcccaggcggaggcaagggcaaccggccaccgcaacccgccccggacaagcaacccgcccggccgccgagagcgggaacagggagcaccaccaagccggcaaaagagagacggggcccaggacaggcggcgaaccccgacccagggaccaccgcccggcccccaaaggcgagagcacgcggagccaacgcgccggccaagggcaccacaaagacggaagcagcaccagagagagaaccgggcgcaggcgaggccccagaaagagcaaggcgaagcacaaaaccgacacagggaggccggacggggccccacccccgaacagagggcacgagcgggcgcccaggcaggggcgggcggaagagcacgggggcggcagggccccccagagaacacaccggcccaccgccacccccgacaccggcagccggcccgaggccgccggcggaaaaggaggggggaggacaggaaaggagggcacaagcccgcacacccggaggcccggggccacccccgaacggacacaagacgcgcgcaggaggccccggacgaccccaaaagaccgccgccccagagggacacgcaggggccaaccccacaccaaaggcaccgggaaaaccccgcccagaacagccgggaggcccgggaaagcggccgaaagcacgccgaaacacgccggcagggggaggggccacaacccggaggcgggggcgcagggggagccaccaacgcccaccagaaacagacccgggccggccaggacacgaccacaaaaggaggccccgggcaggggaaaacccaagccacccgagcccgccacccagaccggcgagcaacacaacacaaccaagacgagggagagggaacgaaaggcagagaaaaccccccagacgcaggggacacgcagaacagacaaagccaaggaaccgacgaagggagaagcacgaagagacaagaggacaagaagccagagaaaacaaggcccagcaagagggagcggacaacccagcacaacgcagaaaaacccaaccacaaaaaggcaaaaggcgggcgcagggccaggccgaaccagcacgggaagccgaggcgggggacacaaggcaggagacgagaccaccggcaacacgggaaaccccgccacaaaaaacaaaaaaagccgggcgcggggcgggcgccgagcccagaacgggaggcgaggcaggagaaggcggaacccgggaggcggagcgcagcgagccgagacgcgccacgcacccagccgggcgacagagcgagacccgccaacaacaacaacaaaaaaaggcaaaagagaacaaaaaagccaagccccacccagcccccaaagcaccggcaaagcagcagggacaaaacagggcacagcgcgagcgacgcccacgaaccgcaggcaggcacgcaccagcgcccccacaccccggcccagacccgaccaggaccacacagcccaggacaggccgcacgggaggccgggcggcccagagcaacaccaggacggaaacaacgaagaaacaaggcggccgagaggagccccgggagcgagccagagaacagggacacgacaagaaccgcaaacagcgaccagaaaaaggaagcccaggacacagagacaaccaaccaaaaagacacgcacgaaacagagaacgggccccaccggcaaacgggaggccacaaaggacagccgccgggcacaaaggagaacaaagacaacccacaggacagggaggggacgcgccagcaaagagccaccggagagagagggaaaaaaaccagaccacaagcccacaaagcacgggagacgccgcaacaaaaaagagggcaaaaggggcgaggcagcacagccccgacaaaggacacacaaaggaagagcgggacccccaagacaaaaagggaggaaggcaggaaaagaggagggaaaaaccaacgccaaaaaaagcagcgaaagccaggggccaggagagggccggcaccgaggccacgacccgagcaccccaccggcacacgaccgccagcccccgggcccaccacccagcccggaaccagcccggaacagccccccgccaacgaagaaggaagaagccaagacagccaaggagcacccccgagaagcaccaaaaacaaaccaaggacaggcaagaagagaaaacaaaacacaacaaaaaagccaccgaccgaacaaaacgaagaggccagcaacaaggcaaaggcaaccccccacaacaaaccaaagagaccaaggcgcagacacaaaaagagacagaaggggacaacaaagccagaaagacaaacccacaacagcacaaggggggggaaggggacccaacaaagagaacaaagcaaagggagaaagccagaacgaaacgcaagaaaccagacagggcgagagccaaagcaaaagagcaggcccaaaaaccgcaggacgagaagacacaagacaacagaaggagaaaggcagaaccgaacaccacgcacccggaaagccccggaagaacaaaaaaaagaaccgaaaaaccaagaggagaaacgaccgacagccacagaaacaagagacacagccaaaaaaagcaggcaaagaaacaaaaaaacacaggagaagacaacacaaaagggcagaccaggaaacacaaagaacaaaaacaaaaagcaagggggaaaagacaagacaaaacagacaaaaagcaaaggcgacgaaaaaaaaaaacaaaccaacaaaggcccaacaagaaaacaacaggaaacaaaaaagaaaggcaagacagacagaaaacacaaaaggaaaaaaaaaaagaccaaaaaaggaagacacccagccaggacagaaagacgagaaaaggaaaacccaaaagcaccacagaacgcaacccccaggaacagcgacgcagaaacggcaagcgacaaaagagaaaagaaagggacccagaaagcaaaacaacgaaaaagaacaaagggaagacccacgaaaaacacacaaggcaaggagcaaacaggggacggcaaagggaagacacaggaaaaggaaagaagagagccaaaaacaaaaccaacaacggcaagagaccaaagagaaaaccaaggggaaagaaaacaacaaaggggggagacaacggaacgcagggaaaagaagaaaagaccccaccacacaacacaacagaaccaaaggggcacagaccaaaaaagaaaagcaaaccaaaaacccagagaaaacggaaaaaacggaggggaggcacgaccaggaaacaccaaacacaaggaccaaagagagaggaaaggaccacaaaacaaaaaaacaggccaaaaaagagccaccaaaaagaaaagacaacacacagacgggagaacaaggaaacaaagaaagcaagaccaaaacaaagccgggccaggcacagggccacgccgaacccagcacgggaagccgaggcaggggacacaaggcaggagacgagaaccaccagcaacacgggaaacccgccgcaaaaaacaaaaaaagccaggggcgggggccgagcccagcaacaggaggcgaggcaagagaacgcgaacccaggagacggagggcaggagcgagagcgccacgcacccagccgggcgacagaggagacccaccagaaacaaacaaacaaaaacaacaggaaccacagccaaaaagaaagacaaccaaaaacaggacaaaggaacaagacaaaaggagagacaacagccaacaagacagaaaagaaacgaccaaagcacagagaaagcaaaaaaaacaaagaaagcggacagggggcgccgaacccagcacgggagacaaggagaggggaggagagcccaggagaaagcgcaggagccgagccaccgcaccagccgggcagcaggagacccgacaaaaacaaaaacaaaaacaaagcaagaaaaccccaccaaagaaaacacaaccaccagaaggcgagaaagaaaagacaaaagaggcggcaaggaggaagaaaggaacacacaggggagggaaaaaagggcagccaaggaaaacacacagcagcccaaaagaaacaagggaagagacccagcaagaccaggaaacaaagagaaaaaaaaaaaaacagacacacaaaaaaacacaaaacaaacggcagcaaaagccaaaagggaaaagaaccaaagcacacccaggaagggcaaaggaaacagggaccacaagaggaagcacggccgaagacacgcgccaaggagaagccagacacaaaggaccacaggccagcggggggcacacgaacccaacacgggacacagaggagggagaagcaaggccaggaggaaaccagccgggaacaaagacaccgccaacaaaaaaaaaaaaaccacacacagggcacacaccgagcccagcaccaggaggcgaaggggaagacgcgagccgggaggaggcaggagcagagcaccacgcacccagccggggacagaggagacccgccaaacacacacacacacacacacacacacacacacaaagagaacagagaaagcacaaagacaaacggacacaaaaagcaagggggcaaggcaggggggggaggagaggggggagggaaagggaaggacgcaacagcacaaccaaaaaacaaaagccggagcggagcaaaggggcgaacaggcagaaaacacgcaaagagcgacgggaacacccgaaagcacgggcgagaggaaaaggggagacaagccacaaaaaacaccggcaacccagcccgggaaaggcacaaggccaaagcagcaggcacagggccaaaccgggcccaaagacaccccaccaggcacgagccgggcacccccgcccgcggcagaaacccccaaagccaaaaccagccgcaaacccagaggccgacggaaacaccagcagcccaaggcgggccccagccaaagaaaaggcaaaggcaacacccaaaagacgaggcagcaaccaccaccaagcacgcagagccacaagaagggcaagaccagaaacaaaaaccaagagaggcgggccaagcaaagggacaaaaaaccacacgagacacgcgcagagagagagccaacgaacggcaccgaccgggccaacgcaggccacgccaagccgcagggcacaaacacggcacccaggcggagccaccaaagcccggcaaaacaagggacgacaccagcgagcgccgccgccagaaaaagagacaacgcccaacacaaacgaaacaccccgccgacggcccgggccagggggaggcgcacgagcagaaggacacacccagcccaggcgcccacagcgaaacaccggcccaggaagccaaccgccgaaaagaacacaccaaccaggcaaggcaaaaaaccaccaaccagcccaggcaaacgaacccagggacggacgcagcggggaaaccaagcaaaccaaaaaaaacaccggagcaaaaacacgaacccacccggccgaaagaagacaagccgcggagaaggaacgaccacaagaaagccagacacccacgaccgaacaaaacgcacccaagaggaaaagacacaagcacgccaaagaacgcccagaaaaacggggcgaaaggaaaaccaaaaaggcaaaccaccaagcaacagggacgcccgagacagggcacacgcagcccaggcggagcagggcacaaaaagccagagcccacccccaggccgggaccccgcccagcccccaggagcggcacacaggacacaccaccacgccagcaaaaaagagagggcacaggccaggcggccaaacccaggccaaggaccacccacccaaccccaaaggcgggagacagcggagccaccgcaccgcggcccaagcccccaaaagccacaaaaaagagcgaggcaaaccagagagcaggagagagacaaacccaaacgagacaggcagaaaaaacaggcaaaccccaaaaaaaaaggccaggcgggcgcggggccacaccgaacccagcacgggaggcagaggcaggggacagaggcaggagacgagaccaccggcaacacgggaaaccccgccacaaaaaacaagaaaaaagccaggcgggggcaggcgccgagcccagcaccaggagacgaggcaggagaaggcagaacccgggaggcggagcgcaggagccgagacgcgccacgcacccagcgggcaacagagcgagaccgccaaaaaaaaaaaaaaaaaaaaaaaaaaaaaaaaaaaaaaaaggcgacggcacaggcgcggggaaacgaaggcagcgggcgccgcagggagcgccacaggaagccggaaacgcaacggaaaaaaacacaaagcaggagggccaccccgccgcacacagcccccccagaaacaaccaagaaaaaacccccggagcacccgggaccacacccgagggcaccgcggcggcggagacggagccaccggccaggcggaggcagggcacagcaggcacgcagccccgcccccgggccgggaccccgcccagccccgagagcgggaacagggagcaccgcacccagcccggagggcacacccgcccagccccagaccaccccgccagggagaacccaacgacggaccgccagccagcgccacccacgccagccaccaggccacagagggggaaaacgagccaaacagcaacaaaggacaaaaaaaaagcggaacaagcccagacagaaaggcaaaaaagagccagggcggggccagccggacccagcacgggaggccaagggagggacacgaggcaggagcaagaccagccgaccgacagggaaaccccgccacaaaaaacaaaaagcggcgggggcacacgccgaacccagcacgggaggcgaggcaggagaacgcgaaccgggaggcagagggcaggagccaagacacccacgcacccagccgggcacagacagacgcaaaaacaaacaaacaaacaaacaaaaaaaaaaaggaagcagaaagacaagcgagacaccgaagccgggacacggcggaacggcgcccgcggaacacccccagacgggcagggacagaaacccagcaccagcacaaaaaaaagaggagggagaaaggcgaggaccccaggaggaagggagcacgacggagccccgccggaagcagaccgcggccccagcagaccagaagagaacgcccccgggccaagaagaaccgaagacgacccgaggcccgcggccacggcccccgcacaccggaggccaccacggacgccccgggcgggggagcggaggaacacgacccgagggaagggaagggaggacacaccaagaccagggccccaagagccggagaggagcagaagccgacgggcccacagcacgcagcccggggggggccaccaggaaaacaccgacaccgccagaagggggcggaacaccgaccaaaaacacccaaaagggcaaccaacaagaggaaccagagcgcaacccaccacaacaaggaacacacacccagcaaaaaacaacgggggagacagaggcacgcacccaggcggaggcaaggcggaccgccccgcaaccccacccccgggcaagcaacccgcccagcccccaagagcagcgggacacaggcacgcaccaccacaccggcaagaagagagacagggcacagggccaggagggacccgaccagaccaccgcccagcccccaaaggcgggacacaggcggagccaccacgcccggccagcaaaaccgacgacagcacccacccccaacccccaaggccccacaaaacaaagaaggaacgggcaaccacaagacaagaaaagccagcacagcccggcgacaccccacaaagcacacaaccaagggaccccaccggccaggccacccgacgggggacagcccccaccaagggagagggagaccgccgaaacccgcaccacaggagagagagccaggaggagacccgacggcaagcagggcaaaaacagcccagaagcaccggcccaggaccgggcggccgccccggaagcacgcgggaaaccaagcccagcccgcagggcccccgcgccgcccacgccaggacagcccccgccgcgcagccccgcgcgcaccggcacggcgaagccagcgcccccggcccgcacccagcacaggcacgcccgaggggccgcccagccgcgcccccacaacccccagacgggcccgaggcaccccaggcgagaacaacccagcacccccagggggcccaccggaagcgccagggcaggaggggaacgcaagcggccagccccaccacagcgcgggggaggggacaagaaagcaacgagaaagaggaagcgcagaacaccgagcgggagaacgggggggaagccacccaaagggcaaaagagggacgaagcaaagaaaggggcaaggagaacagaaaaaagagcaaccccaagagcagcaaaaaacgaaaaaaacaacacaaaagagaaaaaagaaaaaacaacaacaaaaaaagcaacacacagacaccagccccagcccagcaaacacaacaacgcaccacacggcaaacacccaacgacaagagagcgggaaagcacgggggcacgggggcagggagagggacaacacagaaggcacagcagaaaccaaagcccagaaagcggccaaaagccgccaaaaaaacaaaaaggaacacggagcagagaaaagaaaagaaacagaaaaaagccccaaaggaaaaaacacaccaaaagacacagcagggaacacacagcacccacaaagcaaagccgggaaccaaccagagccaccgggcaaaagagggaacgaagaaagaaaggggcaaggagcacagaaaaaaaagaaccccaagagcggcaaaaaacaagaaaaaaaccaacacaaaagagaacaccagacacggaaaagagaggggacaagacacccagaaacaggcagccaaaaaaggaagagacagccgcagcaacaggggagcggaggccggccaaggaacaagcaggaacagaaaacgaaaacgcaggccaaggagaagaaacaccagcacagaacaaaaagaagggaacgacagacacgggaccccaacgaggaggggggaggagggagaggacaaaaccgacccacgggccggccaaccggggagaaacacgaccacacccccagaagcagaccacacaacaaaccgcacggacccgaaccaaaaacaagaaaagaggccgggcgcagggccacaccgaacccagcacgggaggccgaggcaggcggacacgaggcaggagacgagaccaccggcaacacaagaaaccccgccacaaaaaacaaaaaaagccgggcgggggggcgccgagcccagcaccgggaggcgaggcaggagaaggggaaccccgggggcggagccgcaggagccaagaccaccagcacccagccgggcaacaacgaggcccgccaaaaacaaacaaacaaacaaacaaacaaagaaaagaaaccccagacagaggaggccaaaaaggaggacagaaagaggcacgaaccgcggaaaggccggccacggaagaagggcccggagggggcagaggggacggcggggccccgagagggggccacacgcgggccaccccgagcgcccgaagcaggggggggagacggagggcccacgagcaaggaccccgcccagaggcagaggacggagcagggcagagcaacagcaggaaagggaaaaacggcaccaagcgcagcgggaacgggcgcgaacgcacgccggcggcgccgggcccacccgggccaggacggagaggagccccaggggccgcccccgcagccacacgccgacccccgcaggacccagcacaccgccacgggccagagggcaggggagcaaggacaggagggacacccagacagcaaggccccaaaaaaaaaaaagaaaaaagggacgagccgccaaaccagccaacccagcacagccggagaagaagaaagggaaaacggagcccccccagggaaacggaggccgaggagaaagagaaagcgcgggccgagaaggcgagaagaggccagccaccagcccacaaaggacacgaaccacaaggcgcaagaccagggaaggccacacaaccagcacagggacagggggccaagcgcaggaaaggccgaaaaacagacccaaaacaaagaaaaaaaagaaaaaaaagaaaagaaaggcggaaccccgccccggcgcccgaggagccccaggcgcaccaaggcagccgaagagaaaagaaggaccccagggccccgcccacccccagcagggacggggccccacccccagcccccagcccgggacccagcccagccccgcaccgcgcggccgcaaaagccagagcagggaagaggcggccacccgagacgcgaccccccgagcaggggggagaacgcccgacgcgggaggcaggggcggagggcgagcaaaaccccaggcgcccgcgaggacacccgggacgcacaagcgcaagcggggacgcggccacccgagggcggcgcggcgacggaccgcagaaagggcgcgggccgagcggcagcaggggaagggaccccggggcaaggccggagaaacgccgccgaaaaagagccccgaacgggcagcaacacgcagcgaagaacaagcccagacacccacggggaagagggaaaaaagaacaagaaaggaggcacaccaaaaccagcacacccggggacaacagcccacagcaaccgggagcgcggcacagacgcacggcgacgcccaacaaggcgaggcggaaccggcaaagaggggagcggcggggagcgggggggccgacggcaacaccaccagaacagagccaaaaaagcggaggacaagccggaaagggcccgccaggacaccggggaagcccgcgccccagcgccagccaccccaagggggggcacacaacagaccgggcgccccgccggcccggaggccacgccccgcagaccgccagcaccgagcccgcacggacgccccgccaccggagggccgggccggccggccccagggcgcgcgcggggcgccggcagcaccccccggggagagggcagggccaaccgagacaggacagggcgcccaccgcgacaccagagcccgaagagcccgccaggggaggcagagaccggcccacgagcaggagcgcacggcaccaagaccagaaagcggccggggggggccacaccgaacccagcacgggaggccaagggggggagacgaggcaagagacaaaaccaccggccaacagggaaacccgccaaaaaaacaaaaaagcgaccgaggggcggccgggcccaacaccggaggcgaggcaggagaacacgaaccgggaagaggagggcaggggccaagacgcaccacgcacccagccggcaacagaggagacgcaccaaaaaaaaaaaaaaacaaaagcacaaacgagcagagcacgggcggaaggcaggaaccacgcggaccccgggaaaaaaggcggccacaggaggaggaaccccgggagacagaaggcaggacacagcagagacgagagcagcggccagaggaccggccggaggggacccaaggccccacaccagccacaaggaccaagaccccagaggagaaggcacaaaaaaaaacagaggcacagaaccgagaagcccagagacccaaaagcccagaaaacggaacgaaagacagaacagggcacgagaagacggagagccccccaggaaaacgggaacaagaagggacgggcagaaccaacggcagacagagagcacgacgcaaaccgagccccgcaaaagagaaaggaccaacgcaagcaagaaaggacgacaagacaagcaaaaggccagcaaaagccgaacagcaacacgggaaccaagaaaacaacagggccgacagggcagaggccccaaccccaacgagggccccacccgaaagagcagaacgggcggccaaccaaaggcagaaacaaaagcaacaccagaaaagaaaagcaagccaaaggcgacaaggcacagacaagggggagcaggagaaagagacgggcagaaccaccagcgcccagccgaccgggcaacccggccccaccccacgcaccgaaaaggacaacaaccgaggcaagaccgcggggggggacgagacacgggcaaccccaacaggacccagggcgcggccggcagagccacaccggggccgcgccccaaagcagagagggcaggagggggccccgggagcagaaagccccaaaccaaagcaacaaaggaagccaagaagagccagaggaaggcaacacaaccgaaggcgaaaaaaaaagcgacaggcgagacagaccagaggcaaagaagaaaacaacaaaaaagaaagcagaaacagggccgcccaaagcccgccccagacgcagaaacccccggagcaaaaagcggcaggcaacacagaggacagaggacgaggaagggagggaccagacagagggggaggagaagaggcggccaagaggaggcggcgccgggcagcacggccgcccaggccagcagcccacgcggggaaaaaccaggggagcacggcggaagccacccagcgcagcgcagaagaagcgcacaggcagcggcaccaggggcagagcgcagaagacgaaagccaaccaccgcgagcgcaccgaggaagacggaagacgagcgcgccaggaccgccacaacacgaaggccggccggccaagggacacagaccacaaaaaggcaaaaacggagaagcaagcaaaaccggcaaaggaagagcaaaacggaaaaaagcaaccaggcaaaaggaagaaacccagcggaccccagcggggaggaagccaacagcacagaggccaaaaaagaaacacaggaaaaagcgggacgcaagcgacgacacccgcgccagaggggcgcaccggcaacaggcggacacacaagaaccaccaaacccgaaaagggcccaagcccagagagggacggaccagccacaggagcaacagaaacagcccccaggcggacaccgggaacagggagcaacagcaggaaagagggagaaaagaggggggggggaga

SEQ ID NO: 260 - RNA, 52167 nt, Homo sapiens
aaaggagcagaaccagggaacagaaaagggcggggagggcagaggggggagggaccgggccgcccaagccaacgcccgagacccagggaaaccccaaccagaaacaccaaaaaaaagagggacaagagaggaaaacaacaggaaggcaaacaagcaaagcaagagcgccagggcaagaacacaaaacaccgagcagcaaagagaaacagcgggccaaccacagaggaggaagggcagcaaaccaccaggcacacaacagaacaaaccgcgcaccgcacaggcccggaacaaacaaaaagcccaacaaaaaaaaaaaaaaaaaacaaaaaaagagagaacaagcaccggagggcaagaaccgaaaaaaaggccgaccaacacccccagcccaccaccggcagcccgagaaaaccaaccgccagagcaaccacaccacaaaaggccacacacgaaaacccgggccccaggccccagccggcaggccaggaaccaccaccaaccgccccacccccaacacgcagcaacccgcaaaccacccccaccccaaagcagccaagaaaaaacccggaccgcaacagacacacgagcggaaccgggggagcccgcgcgagccccgccgcacgccacccccacccggcgggcgggccccgagggcgccagagcaggccggggaccagggccgggccgaggagccaggggaggcaggccaccacgggccccgcccgacacgcagaggcaagagaaacagagcagccaccccaaggaagaaaccgacacagcagaaaagggaaaaagggccccgggcagaaagagaccggggaagccaaaccgacagaccaagaaaacccccccgggagaaccaaaagcgaagccccaggacaaccaacgaacaaagcacaacaaggccaacaaagcaaaacaacaagaagagagcaggacagccgaaacaacaagggagacacaggaagagagggcccagcaagaaggagccgagaggggaaaaccccggaaggacggaaaggagaagacggaaaagccaagcaaacccgcagacaacacaaacacagccccaagaaacagcaaccagaacaggaagacagcaaacggggaaagaacaaggccaccgcccggagcaaccaaccaaagggcggcgagccccggccacccaaagacgaagagacacagggcccagaaacccagagggaaagcagaaaggaaagcaaccgcaacagaaaacaagaggcggccaaaaaacacaaaacagagaagacaaagcaggaagaaaggggcccgaaccagaccacgggggcagaaaagaccaccaaccaaccagcgggaaacacaaagccagccacaaaagggaaaaaaaccagggccaaggacaaaaaaggaagcacagacaccaacacaaaaaaagcaggaggcaagcaaacaggaaaaaagacaggccaacccaaaacaaagaagaaacgacgacaaagcacacagaagagagcgaacgggacagaaccaagccgacagccggccaaacaaggggagaaccacgaaaaaacaccaaaacaagagaggagaaaccaccagaagacaggaaggaagaccccagaaaagaccgggaccgcgaagcagggcgaagagagaccaaagagccccaaggaggagccaagggcggccgcggcggaaggcacagaaagggacagcgggacacagcaccagagccaaaggccaggcaccaaacagaagcccacacaagaacaacaaacccgggaccagagccacacagccaacagaaaacaagaacagaacgaacccaacgagcgggcccaccaagaccacaaggagaaaaggaaagaccacggcgaacgccaccccaacccagaacggcgacagcccgcaaagcaagcaaaggcgccccaccccagccacaaagggaggaaaaggaaaacaaaagaaaagaagagacaaaaaaaaacacaaacacaaaaaccaaggaaaaggaggcccaagggcagccacaaggcacagacaaaaaaaaaaaaaaaaagaaaagagccccaggcacaagccacaaaggcagcaccacaggccagggcacaggacacagaacagaaagccggagcagaaagacaagacacgcgcagacagacaaccaagcaaacacacagcaaaaagcagccaaaaggccgagccggggcaaagccaaaaaaacaaagcaaaacagggcacacaacccaagggaagcaaagccagcacagaccaaaagaacccaaggggaagaaaaggccaccaaggacagagcaaaaagccagaaaccacaagagacaacaaaaacacaaaacaacaaagaaaacacccgggagaggaggaacaccggcaaagagagaaccagacacagcaaggaacgccacagaaagacaagaacgaggccgaagacaagagagcagccagagaccagaagaagaacaccaaacagaaggaaaagaaggaacgccaacgaaagagagcaaggagggagaaaaaggccaggaaccaggagaggcgagagggagggagagagcgaacaggcaggggaccagacagagggaagccaggaagagggagcaaagagaaaacaaaaggcagaaagacagcggcacgcagaagagcgacgagagggaaaaagggggcaggaaaaacagaaaagcggaaaagaagcagcaggcagagggagaaaagcaagacaaaagacgaaagcaaaggacgcgagagaacacaagggcagggaaaaaagaaaagaagaccaaagcggaacgaaagcaggaggccaggagcacacggaagggaagacgaggggaaggaacggggagagaaagacaaacaaaggggggcacaggggaaggcacaaacaagagagaggagcgaagccaagggagaagcagagagaagagagaagcgcgaaaaggaaaagccaggggaccaagagcaccaagaagagacagacagaaagagaaagaaccccagagcacgccaaaacgagcgaggagaaacagccagacaaggagacagaaaggaaggacaaaccagggagggggacacaaagccagagaagaaaggaaagaagagaaggagaccagccaacagccaaagcagagcgaaacaccgaccggaaaagaggcagggaccgaaaaggcgaagggaggaaagagcgaagaaaaagagcagaggaggagagaaagggagcaaagaagggagacaggaaagagacacaaaggcggaaggcaaaagaaagggggggagaaagggacagagggccaagggagagcgggaagaggaaaaggcaagagcgagggagagaaaggaacacagaagaggcaagagagaagcaaggaaaggagagggaacagaggacaaaggaagggggccagaaacagccacccccacaaaaagagggaggaggaggggcacagagcagggggaaggaaaaagcaaaacccccgaagcaaaaaggaaggcaaacccagggcagggaggagagcaagggaacaagagggagcaaagggaaagaggacccagaaaccaaaaaggaagcaaagacaaggacccggcacggccgcaggggacacaaaaaaggaacgacagcaggacaagcaacaacaccacgggagcaagcaaaggaggaaagaggaaacacaccaggagcaggccaggacgaaaaggggaaggcagcagaggaaggggggaggaaggagagagaggcacagagagaaggagcaaggggaaaaggaaggcacccagaacacaacacacgggcccacacaaccaaaggcgccggacccacggagccaagaacccccccaaaaaggaagccacacgaccaccgggcccgccacacagaaccccccaggggcagccaaaggaacgaggcgggcaccaaacgggagaagagcacccgagcgcacacacacgcagggagccaacacaagaccaaaaggcggggcggcaggaaaaacccacacagcagagagaagaccgggcacagcgggcaccaaagagaaagcaaccgagcccgcccccacaaaccggccggcaaaaagcgcaacagacgagagagggaagacaaccacaaggaaagaaaggagaggagaaaacagaagaccggcaagggggaccaaagcaaacaaggcaacggggagagacaaagcagcaaaaggcaccaggcaaagcaagccaaaaagaaacagaaagccaagagaaaggcagacacaaaacagaggcaagggaagcaaacccggcaacaccagaacccacggccacaggcccaggaagcgcagggcagccgggagaacagcacaggcgacccgggaaccgaaccgaggagcacaccggaggcccaacgccccgaagggggaagaagaccccccgccacacagggacaagaagacaaaaaaggaaaaaaagaacgagaaaaccggaccgcaaagagggggaaaggaaggcacaaaagggaggcaaccccacccgcacagcccagcaacaaggagcgggacaggcaaaacccaccggaagcaaggccgcacaggccaaaaagagaaaaagaccgccagggcgggacgaggaacacagaccgaaagggccacaaacaagggaggcaaagacaagcaagcgaaacacaccgggcacacaacgcagacaagaaagaggcacccagggcgagggaaacaaacgcaggacacaagaccaaaaaaagagaacaaagcgccaagggagggcagagcagcaaggaaagcaaaagaggcaaaaaaaaaagcgacccaacaagaccacaaaaaagaaggcaaagaccgagagcacagaaaacaagcagacgaagccccccagacaaaaacagaacgaaaaccagcgcccccgaccgaccaacaccccccggcaggcaagacaccgaacgcaaaccccaccagaagacgacaccaaaccggaaagaacacgacagggaaaagaaaagagaaaaaacaccacacaagcacgggaccgaccgcgcaagagcaaaaaaccccaggaggaaaaaggcccacaagcccccaaggccaggacaacccgcgggcaaggaagcaaaacagaagagaagcaggcaaaccaagaaaaaggaaaaaaggaggggcaaggaaaaccagaaagaaagacagggccgcaccagcaaagagaaacaagaacacgaagaggaggaaggcgggaccgggggccaaaagaaagccaagaggaaacacaaaagcgcaaaaaaaaaaaaaagaagacagacaaccaacagggaagccccaagcagcgggacaaaaccccagcagcagccgacccaaaagaccccaggccagggcacagggccacacgaacccggaacgggaggcgagggggggagcgaggcaggagcgagaccagcaggcccacagggaaacccgccacaaaaaacaaaaaagccggggggcggggcgccgagcccagcagcaggaagcgaggcacgagaagcgaaccaggaggggagggcaggggccgacagccacgcacccagccgggcaacaggggagacccgccaaaaaaaagacccacccgcacacaccggcacgccaccccccaaccccacaccaaagacccccccccgaccaggggacagaggccgggcacaaaaagaagaccacagacgagggacaacgaggggaggcggccccaacaagaggaagccggagggagggaccagccacacgaaccccgggcagcacaggggcacagaagagagcaacaccccacacaggcaggcagcgacaaagcaccccaccgccacagcaagcccaacaacaggggccgcaaggcagaaagaaagacgaggggaggaaacgaggcaaagagccaacaccgcaaggcaacagaaaagccaggcccccagaaaaccaagagagagaaaagaacagacgcagcaaaaagggggagccaaagggaagggccacgacggcacagcccgcagcgagagagacccaaacaggcagagaaccgaggaggaccagcgaggacacaggccagccgaccggccagcgcaaagagagagaccaaaagaaccaagaacggggaggcaggaagccagaagagacagaaccagacacaccgggcaacccgggccgccaccaggcacagaaacggcccaaggcagacagaaaagacgggccggaagaagcccaggcaccaaggacccaggccaccaacgcaaacacccaacacaaaaaaaaaagacgaaaaggcgcccagaaaacccaaacagaaaacgcgccagcgcagccaagcccccccccgacaagaaagcagcgggccaacgccagaacggcaggggagacacagcggaaaagaacaaagcacaagcagcaccagagcgaggcacagcacacaaaaagccgaaaaccagaagcccaaaacccaaaagccacccaggccggcacgacgcgggcaaggagaagcaggagaggacgaaccgaccgcacaagcggcgggacccgggaaagccaccgaccgagccaggccagaaaagaggaggggaagcggagccagggcccaacgacgacccgaaagaggacaaacggggggaaaaaaaaaaaccaacagcaagcagaaacacagcgccccacccagaaggcacaaaccgaagcccacggcgcacccagaaggaggcaggggagcagcacggcggcagcagcggagaggggcagggcagggaggagggggaggggagcgagggaggccgcgacgaggaagaggcacaggcaccagaacacagagcgcacaccaacggaagaaagaagaaaagaccgcagggaaaaggcaaaaaccagagaagaacaaagaaacccagcccagaacagaaaagcacagaaacagagcaaaagacagaagaaaaacacaaaagaaacggcgggcgaggggccacaccgaacccagcacgggaggccgaggaggggggaacaccaaggaggagcgagaccagccggccaaaagggaaaccccaccacaaaaagcaaaaaagccgggcaggagcacgcaccgagcccagcacgggaaggcgaggcagagacacgaacccagcaggcggggggcaggagccaagacgggaacgccccagccggggacagagcaagaccgcccaaaacaaaaaaaaaaaaaaaaacagcgaaccccaaaaccaacagcccagcggaaacaggaggccagcaaacggaccaaaaaaagccacacacgagcccaacagggagaaaacgagagcagcaggcccagcacccgcagaagacaaacacagggcaacggagagaacccagaccccgccccgggcggaacccgcacggccaaggcacccacacgcccacagagggccggcccaggcagagagagagaaacgaaaccggaacagggacccgcgcaaagacaagacaacacagacgcagagcagaaagcccagaacaaaggcccagcgagacccagggacccgggcgaacaagagggcaaaacagcacgaaacccaaccccacaacaagagacggaaaaaaacaaaggaagccaggcaggggccacgccaaacccagcacgggaggcgaggcaggggagcgaggccagcaagaccagccggccaacaggcaaaacccaccacaaaaaacaaaacgggaggggcacacaccgagcccagcacggggggcgaggcaggagaaacacgaaccgggaggcagagggcgggagcgagacagccacgcacccagccggggacaaagcaagacgccaaaaaaacaacaacaaacaacaacaacaaaacaaacgaagaagacaacacaaaaaaagagacaggaaacaagacaaaaccgcggccaggaggacagagaacgcccaaccaagaccaaccaacccaccaaacagagagggacgaggcagaaggaacgacgccagagcaccacgacccagcaggaaaaggggaaagcaacaacaaaaccacaccaggcagagaggcgggagagcaacaggcggaacagggcaacgcacacacaggagacccaaaacgggccagaaccccagcaggaccaaagacacaaagacccaaaaagaaaaaaaaaaaacaaagagaagaggaagacagaggagaaggaaagagaccccgcaggacagaaaggggacagcagaaggggaacccaagcagcagcgccgcaaggcaagcacacccaagacacgcgcaggcaaccccgcgcccagacagggccacccagacagcaaggccagggaaggagcagacaaaggaaaggagcacagaacaaggagggaagacccagcaagcccggcgccacacaggccagacacgagagggcacaaccgcagacccaggccccgccaccaagggagagacacgcccaaagaaacccagcagaaggagagggaggaaaacacgacaaacacacaaagcaagggacaagagaaacccagaacgagcaagccagaaaaaggagccccaaaagagggcacggggagacgggagaggcaaaacaacgccggccacgcagggacagaggagaacagaccaaggcagcaccagagcaaagcggaaaagaacggcacaggggagaaagcccgaaaagggcgacgggaaaaacgcaccaggcacacaagcccaaggacacaaaaccaggaggaggaaaagagcccaccacgcccccagcaagcaacaacacggaaacccggaggcaggacccaaagaacgcaagcccgacaagggaccaaggaacacagccacaaggcgccaaaacagagaggaaacaaggacacccgagcccaaaagagcaacaccagaagccaaacgagacgagagacagcaagcacagggaaccagcacagcagaaaaggagcagaacagacaggcaggcagcccacgggaccgcacaagcaccgccacgaaccagcgcacaaagggaagagcccgggccgcccagggcaggagacaaaggaaagaagcaaggcaagaggaggacagcaaaaccaggcgaaaaaagacgcaaaagaacagacaaccagcggcaggcaagccgcacaggaacgagcccacagagcacaagcccaaccaggccgcaagcagcaggccaggggggcgcgagacaaaaggaaggccccaaggccgggagagccaacagggccaggagcaccaaaacgcgcccacaaaccacaacaagaacgggaggaaaaacagaccagcccagacaccacacagggcaccaacccgaagagcgggcaaggacagccaaaaaccccaaccaacgaggccaaaaggcagggcgggcggggggccggggggggcgcaaaacaagcaccccagaacagacaagcaggacggcaaaaaaaaaaggggaaacgaggagcagaacaaggaaaagacccagaccgccaggacgaagaaagcaaacgagggaaaccggcggcagggagaaccaaaccacccggcaggccccccagcaaacacgcccagcacccaaacacacaaagagaaaaaaaacagcggccagggggcacacagaagccagccacgaggccgcaacagcaagccaccacgcgccaccagcacccacccaaagccagcacaaagagagacagagagggcaaagcacgcaccaccagccaaaccaaaggaaaagcggacaacacaacaccagacgacaccagaacaaccaaagacaaccagcccagacagcaacaccacgcccaagcaacaaaacacaggcccaacggcaagcacaaaagagcggaaacaggagacgaggccgccgcgaaaagagcggagaacagaaacaagcaaacaggcagcaccagggaagaaacgagaacacaggaggggcaacaaaggagggaaaaccacacaggggcgggaaggggacaggaaagcccagaaaggaggggaccagggcaaaggggcaggagcggacagaagagagccggcaaaacaggccacaggggcagcgaggcaccgggggagcaagagcccggacggaacagagaacgcagggggggcagcagacagacgaaaaccaagcagggaaagccacgccaggccagagagacaccgaaagcaacgggcagccacagaaagacagggcaaagagaggagagaggaggagagaacaagcgaaacaaaagaaagcaagaagaagcacgaaaaggcagagagagacgaagggaccagaacgaagcagggggggagggaagaggagaggaaggagaaaaacaacgagacaggcccaggacacgggggggcggagggggggaagcacaaacaaccgagacgacagggagagcaggggagcaaccaagaaaaaacacagggagaggaaccaacagaaagaagaagaagcagggaaagcagaggagaccgaaaaccaaggaaaaaaagcacagaaagcgcgcagcaaaacaaggaagagaggaaaaaagaaccaagagaaaaccgcaaagacaacaacccaagaaaaccagaaagaccaggaacacccaaaaaaaaggaaaaagcccaaaaacaggacacaaccaacagaaaaagaaaagacgcacagacgccgccgccaggaagccagaacagccaggcagaacacaccaagccagaacaaacacaggcccgcagcagaccagcaggaacacccagcagcccgaagaaagcgcccaccccggaaaaaaagagagcacgaaaaagaagggagcccaacaaaaaaggccccaaaaagcagcacagcagacagggcaccccagaaaaagagagaaaaaaacaacagcaacaacaacaaaaaaacccaccccggaaagggaagacccagggacagagagccaaaggagccagaagcaagacaacaaaaagcagagccagaccaaaaagagcaccgaaggagaggaagaaaaccgagcagagagccgacccagcccccccacccagccaagggaacgcaccccaagagaggagggccagacgaaaaagcacagagaggggagacaccaagaaagagaaccaaccagagaaaaaaaaaagcacacagaaaacaaacaagcccgaaccaacaccgagccccaggcgagggaggagggcaaaaacgccacgcaaccaagaccaaacccacaaagcacccgggccacaggaaacaccacaagcgggcacccccaaagacacacagagaaagagaaaacaaggcgggcgccgggccacaccgaaaaccagcaggggaggccgagggggggacaccgaggcacgagcaacaccagccggcgggaaacacccccaccaaaaaacaaaaaagcagggggggggggccgaacccaccacgagaggagaggcaggagacccgaacccgggaggggagggcaggagcgagaggccagcacccagccgggcaacagaggaaccagcccaaaaaaaaaaaagaaaaacaagagcaaagaaaccgagcccgcaccagacagagcacgccaccccacaaaaggaccccacagccacccgaggaagcagggaggaaaccccacacagaagaaaaacgacaccagagaggcagaacaaggcgcccccagcgccgagagaaaaaagggaacaggagaccaggcccggagccccacggagcccagcagcggaaccccgagccaggaggagccccaccaggccaacagccaacggcaaggagagcaagaagaaaccaccaaaggacagaacaacgacccccccacaagaagcagccacgcccacaaaacagaggggagaaccccccccggagaacaccgcccggcacagccaagaggccgagagcagccaacaagaaagcagcaacaaagaaaaaggaggagaaaaagaacagggaaagccaggccagaagaccccagcggagacccagcaagcacacccccggcacccacgaaaaagggcgaaaaaagccccgcgaccaccagagacagcaagacaagagggaagcaccgaaaagccagaaggcgaggggaccagcaccagcaggaaccaaacagaaccaaggggcagagaggagccaggaaaagcagggcccagggacacagacacagggggcacggcaggacgccgcaggggagaagagagacacagggagccacaagcagcacacaagaccccccacagacccaggcgacaaaacaccagaaaaacaagccaaaagaacaaagcccacaaaccccagggaagaaaaaacacgcccgaacaacaacccacaaacccgaaaccagcagaaaagcaaacgcaagcaaacacaacaaggggcagacagagggggaagggaacacaggccgaacagaaacgaaaacagggcaaagagagagaacccggcaaaggagacagaaaaaacaagacagagagccagaaaacccagaggccacaagaccccccccacccaacagaaaaggaaacaaaaccagacagacggaccgcccagaaccacaaggaaaacagaaaaacagagcggccccgcaaaccagcacacaacaagcaccaaccaaacgcgaagaaacaaagaggaaagcgcagaagcaccaaggaacagagccaagggagacagacaaaagcagagaccagcacagaggcaggcaaaagaacagaggcagagaaacacagaagggagggcaacgccgggggccaggaaagcccaccaggaggggcagaggcagacagaagagggaagagcaccaagcaaaaggaaaagaggaacaaagcaaggggacgggagagaacacagcggggaaagccccacacaaaaggaaacagcggagggaagaagggcgcaaaaccacccaggggagcacaggcacagcgccacccccacccaggcagccccggggcacggccggccaccaagggccagaaacaccggccaaggccgaggcaggggggcaagaacccgaagagagaggaggagggagaaaagaagccaccaaggagcaacggaacggaaggggccggccgagaccagcaccggcgggaccagacagccgaggcaccccccggggccacagggcacgggaacacaagccagcaaggccaagccacaacaccggccacccccgccgagaccagaaagacccagagccggcgccaaccccggccagggaggagaaagcaggccccggagcgcagcacagcccaggccccgggggagaacacggagggaagaagaggcagacaaaaagcgcacgcagagcaccggggccgagcccgccgagcaagacccggggagcgaggcacagaaagaaaacaaagcaaaggaccccccaggaaagcacaagcacccaagacaccaccacccgaaagcggcaggccccacacacacccggaagaaccgaaggggagggaagaggagagaccacgagagagacgccaaggccccccacaagcaggcacaaaagcaaaacagccaggcaaacagccaggacacaggcagggggaaaccagcaccccgaaccaccagagcagcccaaacaaccaagacaaggccacacaccggcgccaccacacaacggagcaaagagaccgagaagcaaaacaggcccaccgaacgaaaaacacaccaaccacacagaaagagcaagcaacaacaccaggcaaaacacgccccaagccaaccagaggcagacgaaaaacaaggggcacaagcaggcagccaaggcgcgagagaaggaaacgggcaaagaacaaaaaaaagcaagcacagagcagaaaagcacacaaagaacggaagacccagaacacaggaggaagaaaacacacaccaaaggagaaaaaaacaagaaaaaagacagcaacaacaaggaaaaccgaaaaggaaaaaccaaaagaaaggaaagagcaaccacgaaccaaagaaagcaaaaaaaaaaaggagagccacagacccacagaggcaaaaaaaagcggacaacagaaaggacagaaaagcaagacaaaacagagacacgagaaggacgaaagaaaaaaagccaggaagaaaggcaaacacaaagaggagagaccaacagcaaccaccggaacaaccaagagaagccgcaacaaccaagagaagccgcaaccacaaaaaagccgaaagagaagaaaagaaaaaagaaaaaagcaagaggaaaaggcaaaaggaacacaagaagggaaaacaaaaaaggaggaacgaaacaacgacaaagaacacaaaaaaaaggaaacaaaagcaaagaaaacaaaacagcaaaagaacagaagaaacaaagggacacaacacggagaaacaccaaacaggacaggacagacgcaacacgagacggagcacggggaggaaggaaaagggcggaaggaggcaagcgacaaaggaacagaggacgccaaaaagcgaaccaggaaaggaaagaacaccaaaaaacagggggggaaggaagaagggcagaaagagggcgcaaaacagaaaccccaaaccaaggcaaaagagcaaagacacaacagaggggcagaagggcgcgggccaccagggaccaaggcgacagagcagcaccaccccgcggcagcgcaccagaaggaaagagagagcaaacagcccagaggaaggacacacgcgccccacagcaagggcccagacagcaccggaaccgccaagggccaggaggcaacaccagcccagaaaggaaagaacggaaaaagcaacagcggaaaccacacgaggaggacagacgcaccacagggaagccaaacacaagggaagaaaagcccggaaacaggaaggggagagcgagaaacagaagggaaagagcaggggggggacagcagggacagaggcgcagcccaaacgccacccaggccgcccagacgaaaccacaagagcgcaaaccccccagaaagcagccagaaagaccccaagcagggacccgcgcaccacgaggcgagaggcaaaggaacccgaacaaagagagggagcaggcacggaaaaggccaaagaccacaagcagcccagccgccaccacacccgcaccgggcaaagccaaggcccagcacccccgaaaagggcaaacaaaacacaagccgaaagggaaaacaaagaagagaaagggaacgaacggcgacagaaggcacgacaaagacccaaacacgcaagggaagcccagccagaacacggccgacaagaccacacaaccccaccagagccaccgggacaaaaagacccaggcacacgggccaacacgaagaacagaccccgcgaaaggagcgggagcggggaaagcaacgcagaccccaggggagaaaaagggagaggcagaccggaacacggccgaaggggagagccaggccggacgaagccgggccgggacccaggaaaggagcggaagagcacacaagggaaacaggaccccacagaaagaagaaacaggccaggagggccaaaaaggaggcccccaaacagcaagagaaagaaacaagagacgagaacccgggaccaaaccagggcaagccccaccaaagccgcccacaggcaacagggagaaccgaccccagggacaagccgaccaaggacaccagcaacagaaaagcagagagcccgaaaaggagccggccaggagacgaggggcccaggagaccgcccccacacccgaagccaccaccgcaaaaaaagccgggcgcaacagaccggagcccagccggaccccaccaacaaaacaccgccacgaccgccgggggcggccagaaagcccaggggagcagagaacagagacaaagcgcccccaaagcaccccaggggagcccgaggcaaagcgcgaaacaccccagagacacaggaagcgcgcaaccagagcaaggagcgacacaggcagcagggcaccgcgacaggagacgcaaaccacaggaggacccagccaaaccggggccgccccgaggcgacacagccccagaggcacaaccacgccagcaagcccaggaacagagaaaagacaagccccaccaaaaacaaaaggagccacacaccgcaaggcaccagcgcaaagcaccaacccaagcagaagaagaacgagaggagcggggaagggacccggaagagagaaagacgaggcccagagaggaaagaagaaggcagacgacaaccgcccccaggacacgaagaacacaaaaaaaaaacaacaagcagagggcaaacacccaaaaaagaaccacagcccgccccaaaacaaaggaggagaaaccacgaaaccaaaacagcaacagggggaacgggcagaaccaggcagaacccaccccgccacaccccaacgggagacagacaacggagaaggaaaagcaaagcggaccgcacagggggccgcaacccaaaagcccaaagggaccaagggaaggcaaacaggaaccgacgcaagaccgaagacccagcagagggggcgagaaccagcagcacagcacacgagagaagaaagcaaacaggccacccagaccaacgcacagaacaaaacaagaccccaggcacggagagccaaccccaacgccggaaggcaacacgccagaacaccaccacaccgccgcccgcaaaccccccggccggaccaaacccccagcaaagcgaccccaaaaagccaagccagagccccaggagggagaaaccccccaaacccaggccacaggcccgcaccacagaagaagacagaacccccaaaagagcccaaagcaagacgaggcgacaccaaccgaaagcaacgcaaacgcacagccacgcaaaagccccaagcagccaaaaccgcaagaggacagagagaaagaaacaggacaacagcaacaaacaaagaaaacagacggaaaaaccaaaaacagcacaacaagcaacaacacacacccccaccacaaaacacacaaacacgccacagcagaggagagcagggcagaaagaaagacggggaaagacgcacacacaagacaccaagaaaaaaaagaacgaccgaagaaggaacaagaccagaccagagccacacgacgcggggacaagaaaggccccggcccgcaagcaaggaaaagacccaaagacagaagccacgggcccaaaagaacacgaagaaacagaaagcaagccaggcagccgagggaaccgcaaaccaagcgccggggagcacggagggacgaagcgaaagcccacacccaccagcggggcaccaacaagggcaacggaaagggacagaaccagaggaaccaccggggacccggagccgggggccagagcagaggaaaaaagagagaaaagcaaaagcacacaccagacaaagccaaccagaccggacgaaggagggaagagccggacaagaaaaacagaccagccgcagcagagcgagaggggcgaaaacacaagccaacagggggggggcccagggcgccgcggccaagaagaacagacaggaaccacagaagaacccaaaccacccccccacacagacagcagaggggggaccacgggagaaccaaaccgacaggaagccaaaacaccagacgaaacaacgccccaagccagccagggggggcacgcacgaagccaccaagcaaaggcaggagaaaccgccacggaccagaaagggcaaagggacagagaagacagagggagccggagaaaacgccaccagagggaacgcaaaggaacagaaagaagcaccacagggagggaacgccaacaacagcacagccaggccaaagcacaaaccagggaacacggagagcccacacaaaacaaaacgcgcagccccgagacacacaacacaaaaggagcagggagcacgcgcaaccgcagcggggaccagagccgcccaccaggccaccgacccacagagacagagcaccaaggaaggacagaagggggccgaaaggggaggagagcaccacaaaagccagagaggagagacagaaaagccccaaaaaggccaagaaagggcaccccccgccggaccaagcaggaacaagagaacaaaacagggagaaaaaaaacaaaaaagccaggggaggcacacaccgaacccagcaccaggaggcgggcaggagaagcgaacccaggggaggagggcagaagcgagacagcacgcacgcagccgggcaacagaggagacccacaaaaaaaaaaaaaagagaaaaagcaagcacacaacagcacacacaggaaacgaaaagaaaaacaaaccacaagcaaacacgcaggcaaggcagcagaaacggaaggagagaggaagagagaaaaagagaaagccaagaggcgggaccaaacaaccacgcccacccaccccagcaccgacagcgcacacccccagccgacgagaacacacacgccgaagcacaaaaaagacacagagagccacgggccccaacagaaaacgaaacacagaaaacagaaagcggacgaaagggggagaaaacggagggagggacagaacaccagcaagaaagagagaaggccccagacaaaaacaaggcgacggaggcaaggccaggaaagccacccaggcccgggagagccagccaggagcaagcagcaaggcaccaagaccaaaaacacgaccacccaccgcagaaggggaaacagggcccagagggacagaccacgccaaggcacacagccaggcagaaccaaagcagaaacaaaagcagcccaaccaggacacgccacagcacaggacacgcaggcgcaagcccagggagggaacacaaaaacaggaaagccagccgaaggacagagcgagcacaggccgacaacaaacaggaagacgccagggcggccccagaaagggcagccaggcgggaaacggaccagccagcacacacaagcggcgagcacggcccaaacgaaaccccgagccccaggaagaaaaaggggcacaaacaagaaaaaagggccgggcaggggccacgccgaacccagcaaagggaggcgaggcgaggacacgaggcaggagcgagaccagccggcaagagggaaacccgccacaaaaaacaaaaaagccaggcaggggcagggccgaacccagcacaggaggcgaggcaggagaacgcggaccggggaggcagaggggggagccaagacggcacgcaccagcccgggagacagagcaagacccgccaaaaaaaaaaaaaaaaaaaaaaaaaaaaaaacagagagagagagagaaaagaagacagcccaggagcagccgaggagcacaggagggcaggcccgcagcccagagcccacccaagagaaggagaggaaagaaacccacacgcacagaggcgacaaaaagccggcccgggggggggggggggggggggggggggggggaaaaagcccaaagccccccaccaaacacaacccaacggaagaagcaagacaacgacgcacaagacgacgaaagcacgaagggcaccaccacagagaagaccgaggaacaaacaccagcacacagcaaaaccaggagggaagcaggaaagccgagaccagggcagcagcgcccaggagaacacaaaggcaggccggaaagaacagggaccccggcaagggccaccagcccggccacccagcgaacagaaggaacaagcccgaaagcacccgaagcagaacccgcccaccccaccccagccaccccaacacacaaacgcgacacacacacaccacacacacacacaccacaccacacgagaaacccacaggcagacagcaaacccagccaaaaacccccacacaacacccccaaaacaaccccgcgggcccacaccacgcccccaacacacccaggcaagcaccagaacgggccgcgagagcgaccaccgagggggacaccaaaaaaaaaaaagagacagacggcaggccagagacaaggggacggccaccaaaccccgcccccgggcaagcgacccgcccagccccgaggcgggaacaggcagcaccaccacaccggcaagaagagaggcaggaccagggcaggcggccaaaccccaacccagggaccaccgcccggccgccaaaggcgaaaacaggggagccagcaccggcccacgacagccccacgacccaacacgcccagcaccaggagaggaaacagcaagaagagcgagggcaacagaagaagagcaacacaagaccaggaaccccggagggggccaaagcccaacgccaacaacacccacacgccagccaccccacccaaaccgagcgacccccagggcgagcacagcgcggccgcccagacgcacaaaacaccacccaagcagcaaaagagccgcaagcccgaaccaagacaaaaacccccgcccacagcaccggccaggcagggccagggcgagaccgggaacccaacccccaagagggccgccgaggagaccaaaaaagaggaaaaacaaggacaaaggccacagagagcgagcccgacagcaggaaccccaaacccccggcacaggggcacaagaggacaaacggaggaacaaagccacccccagagagagaaagaggcaaagaaaaggaaaaggaaacgaaacccaggcggggccgggaaaagacgaacccacgagcccagccccacgaggaaacaccacgccaagacaaggacaagacaaaaggagagcggcaggcgggcacacaggaggacccaggcacacagcccccccccgaagcacagagagccagcagagggaagccagcccagggccagccaaaccccacccgacacaggcggggagacaggaaaggccgaaggagaccagcccaggacaaagcaaggaggggggggaggaacggggaggggcaaaaaggaaggagaacacaacgagaaggagacccaaaaaaaaaggggggcccagcggccggccgaaacgggcaaggaacaggggccgaggccccagaccccccacccaccgggggaaccccgccacccagggagcccagaacaaagcgagcaccccccggaggccagaccaggcacagagcacacgaagccacgaggaggaagaagacccgagacgagacagcggcaggacaaccgacagccaccgggcccccccgacccagacaacccacccacaccaccacgaaaccccaaaagcacagcagcaaggagaccagcccgccgcagggcaccccagccacagacggcacagaagaagcaaaacaaaaacgcaccccgcaacacccaaggcccagcacggaacagcagaccccacgggaaaagcccagaccagcacccccaccggcgcgcgaccccaccccaaaaccaacaacagagacacacccacacagccagccaagagccacagaccacaccccaccccgggccgaacagccacccccacagcgacacaccccaccgggcaagacgcaacccagagggcaaagcgccgcgggggccccagagccacggccaccgaggcaggacgagcagcccccacagacgacagaccgaaggcaggccccacagaaaccaccaacaaaggggaaacagaaaacaaaaacaggcacaaagaaaaacaagcaaccggcccaggcacaaaaaagacgacagggccaaaaccagcagcccagaaacgacaccaaaacacagcacacccggccccaagagaggagaagcgggacccaaggagagagggaaccggaccacgacacgcagaaaggcgaccagaagccagggacacacaaaacacgaaagccaggcacacaaaggacccaaaaaaacccaggaccggccaacaccagcacagcagggacacacccaaggggacagcaggcacgagagcagcaagcccaggcaggcacacaggggacacaggcaaagaaagccacccacagagcccacccaccaagacacaacccggaccccgcacccccagcacacccacacaccacacacccacaggggcagggcgcgcaaacggagcacacaggaccacagcacccagcagggaaaaaggcacggccaggcccccccgaccacgcagcaggcccacgaacagccgccaaagcggcagagacaaccgagcaccacagccgggggaaaagaagccagagcccagccacaaagagggacagggcccgcacccacaaggacgccaacaaacaaaacaaaagagaaaagcagcaaagcacccaaaacacaggcacaagcaaaggggaagcacagaaaaaaagggggacagagcggccaagaaagcccccaaaaaaaggaacaacaaaacgaaagagaaacaaacagaaagggaacaccaaccaaagaacacaaagcgaagacaggcgagagggcgaaggaaaagcaacaggaaaaaacaagacaacacaaaggaaagagaaaaaacaagacaaagaaacaggacaaagcaaaaacggggggggggggggagaagaaaacacaccagagcaggaagaaggaagaaaaaaaagcagaaggaaaaaacaacacaccagacacaccgaaacaagcgacgggacaaagaagaaaagaaaaaaaaggcaaaaacgaagaaaggacaagagcaaccggaagaacagcgacaaggaagaccaagagggaacggaaagcacaccgacacaaccggaggaacaaaacccccagcagaaaaacaaaaaaagcaacgaaaccacgacagaaacagaacacccacaacagacagggaacaagaaaacaaagcccaaccccaacaaaaaaggaaaaaaaaacagccaaagcgcgggaaacacgaaaaaaaaagaaagcacaggacagagagggccaaaaggcacggcccaggccgccacaaccccgggaccgggacaaacgcccgccccggagcagccaccaagaagggagagaagaggagaccaggaccccagccccaggagcacagaccaaccagacgagcagcacggggaagaacagggcagccaaggggggcccccagccagcggccaaccaaagcgccccgaacggccaggccaccaacaaacagggcccagagaccacaaaaaggaagccaggcagcgcgggccacgagcccccaagcaagcacccaagcccgccgcgggagccggcagagccgggcagcgagccggaaccaacaccgcacaccagcccgggcaccacaccccccccccccaccccgcaccccagcacgaaagcagcgccgggcccaagaggaaagccaaaggacaggacacccggccccccccgagcaaaccgaacgaagccccggcgacgccggcccccaagaaagagcccacgcaggaggaaaaaaaaaaaaaaaccaccacaaaagaccaaagcaagacacgcccgagaaagcgcccgaaagacaaaaaaagaagaagaaaacagaaagaaaaaagaacggggcgggcccaaccacccccaagaaacaaaacaaacagaaaggagcggaggcaaaggggggaaggaaacaagaaaaaaaaagggggagaaaagagaaaaaaaggagaacccaccccagcagggccacaccacgcaggaaacagacaccaacaggggccaacgagagaagcaaaaaccagccacacaggaaaacaacaaccagccaacccaccccccaagaaaccagagagacgcagggggcggaagggaccgaagaaaagaaaaacaacgagcgaaacacccaaacacccaccacccacacaaacacaacacacacacaaacacacacaacagaaacaacaacacacacagcacaacagacccccaaccggccacacacaaacacaccaccgcgccaacaccgccgcccgggcccccccgaaggaccagacccccacaaaaccgagacacccaacagccccccccaagcagcccaccaacccagccaagcccaaagccacaaaaccccgaccccccccccacgccacagccgagccaggcacccccccacagacagcacacccagcaccagcagcgaggacgccgacaaaacacagccaaggggagccaaccagagccccagagcaggcggcccgccacccccgacaaccccgcaccacccaaccacccaaccaaacccagcccacccagccagcccaccgaggccgcacagcggcccaccgaaaaccccaaccgacaagggaccagccagcagcccaggcaaacacaaggccaaggcggaccgaccagcgaccaaccaccacagccgagggcagggaccccggagggggaaaaaaaaagaaaaaaaaaacccgaagagaacccaaccaagacccaacaagcaagcaaagagagagggagccagagggggacacgcccgaaccacacccagggcccgggaagagagaggaacagagccaaacaagacaggggaggccaaccaaagaccgcacagacagagaagagcgggggagggaagcaaaaaacccccacaacggaaaaaacagcaacaacagagcgagacgaaaacggggagacaagccaaccaagaggaccgaaccaaccacaacaaccaggggcaacaaaggaaccccccacgagcgaacacagcgcggagggccaaagaagagcaggaagaagaaaggaagaaaaaccaggagagaacagaggcacccgaaaaaaacagacagaacagagaaagcccgaaggcaaaacaaacgaacagaaaacaaagcagagaaccacggcccaaagacgagccgcccgaccacacccccgcaggcggccacccggaaaaaacgagcagaaagaaacagagcagggcaagagaacaacggagaaacgggccgaaccaaggcggagggaaaagcaaagagaaggccacccaggaagcagagggacgggccgagcgaaaaggagggagaacagggaaccgcacagacccaacaacgagcacaaaccccaaggaagacaaaagaaacaaagaaaaggagagggaggaaaaggccaacggacaaaaggaaggcccaaaaccggcgaaggcagagacagaacaacagggacagaaagggagagcacaagggggaccccagccagggaaagaacagggggccaccccacgcagagcacgaacgaaggagggagaaagaaaaaacaaaaaacacgccagcccaagcaagaaccaacaccaaagcagggaaacaaaaccagaagaaccaagcagcgagaaaagagacaagacaccaaaggcgaggaaaagaagaaagcaaggggcccacccaaaaaacaaagcccccaaacccagaacggaaccaaggcaaacaaagcaggcaaaagcaggcacgagcgaacagcaaaaaaaaaaaaagcacagaaaaacaaaacacaaaagaggagagagaaaaagaacgaaggaaagaaacaaacagaagggaggcaaaccacagggggccgaccgcccgaaggaggaccagcggagccagaaaaaaaaagcgagaggcaagcaggcacaagaccagccgaaggccccaagacggaaaggggggccagaagaagaggaaggacaaaagagggggcaaggggaaaggcaagggcagacaggacccaagccaggcaagaacgaacgacaagacaggagaagccaggaagaggggggggagaaggagcgccgcaccaggcggaggcaggggcaccggccacgcaaccccgcccccaggcaaggaccgcccagcccccaagagcgggacacaggcgccagccaccacaccggcaaaaagaagagagacggggcaccagggccaggaggccgaccgacggaccacccacccggcccccaaaggcgggaaacacagagccacgagcccggcccacaaagagaaacagggaagagggacaaaacaaaaaaagacccacaagggaaaggaggacaaggggagagacaacgaagacgaaaagagagaaagagcagggaggaaacccagaccaaaccaaaccacaaaggccgcaaaaaaaacaacggaaaacaaaaaaacagagccaaaagcagagcaacaaagcacaacaagagacccaaagcagggggggcagggcaagcaacagcggcaccggccacgcacccaggccaagaaaggggagaggggagcaaaaggggaaaaaaaaggcagacgaccccacccagcccaacccacacacagcaacagcaacaaagcagggcaggaagacacaacaagaagaaaaccacaaaaccaaacacaaacaagcagcacacaacacaacaggggaagggaggaggggcggagccagcccacaaccaaaggaccagagccacaaagcaacagaccagcaggacccagaagaggggggggagaagagagagaaaggagagaaaaaaaagagggcacagcacaaaggaagacgaacagcaggcagacacaaagaaagaacaaccagggcacaggcagaaagaccgcaagcaaaaaacaaagaaaggaaaacaaccaaacggagggcgggaccaggacccccaccaacacccacaaagcgacacgaaaggaaaaacggggcaaggcaacagaagggcaaaccaacacaaccaaggcaaggagggacccagccccagaacaggaaagccggagacccacacaaaaaggacgaagagccccagcccaaagagcaaaccaccagacacagaacgaggaagaccaagcccaagacaccaccgaaaccgaagccaagaccagccaaaaaacccgcgccaccaccaggagcagccaacaggcccgagcaacagcaaaaaaacacaaccaggcacgggaaggaaaaaaaaaaaacaaagacgccggaccaacaagcacccagcgcacgaacccccccggaccagagagacaccggcacagcgggcccacgaggcgaacagaagcagcacagcacaggcaacacacaaaagaaaaaacaaagagaggggacagggccaaaagaaaggaggaggaccacagaggagagaagagagaacccagcagagggaacagcagaacaaggggggaaggcagggagcaggggagggcaaccccgcaagaagcaaccagggccacaggacaggaagacaggaccaaacaacaaccaaacgggagagaagcacgaacccagcaaaagagaaaggaacagacggaacaggagacccagccacagaaacaggacccgagcggggccacacgagcccagaccacgcaagaggaagaaacaccccacaaaagcccgagggaaaggagacagaacagaaggaaccaacaggaaagcccagcagaacaggaagaggaaagcacgaacaaacgaagaagaagcagaaaggggaaaacagcacaggagcagcaaggcaccagggcgaaggagggagcagacaagggagcggagacacccaaaagcaagacacacaacagaaacaggcaaccaaaaaacaaaacaaaacggccagaagaacacaaaggaaaaaaaccaagcacaaaccacacagcgcaaagacgacgcacaaccaaaagggcacgaaaaacaggacgggcagaagaaaaacaggaaaaagacagaaaacaagaggaaggagccaacccccggcccaagcggaagcacccgcacacaggcgcagcaaccccagaacaaagccaccaccgaagccagagcgggcaagcgcagggcagaaagacgggagcaggcgggagagacaacacccgcaggccggagaaagacagggacacagaagagcgcccggaaccccaagcagggagaaaaacaaagagggagagaaacaaggcacagaaaggagaagcaggcagacaacagacacaagagaggaaaaagaaaagccaaaacaagccccccaccccaaagagcaacaaaagacaagagcacaacagacaggcaagcacacccaaaccaaaggcccccccgaaggaagggagcagaaaggagaagcccgaaaaccgccagcgggaacagcagagagagagccagggcaggccgacagccaccaccccagaggcaaaccgccccgcgacaggagaagaaaagacggccacagcaggaccagaggccgagggaggcagccgccggcccgggcaaaaaacacggcggacccaccaacccaaaaggagacagagccaaaccccagcaacaccgcaaaaccaagacccaggcgaccacaacgagcaagggccaaaagccagaagagaggggagcgggccgccaccgaaagaaaagaacacacgggagcggaaggaagaagaaaccaaacgcagcacaggggacccagggggcccaaaaggccaaacaaaacacaagaaccagaaagaccgccaaccgaccgcccaaccaggcaccaggcgagcacacggcccgagacagcgacccggaacgaagccaaacaagaacaacgaggccgccagaggacaaggaaagccggaaccgcagcggaaccggccccgagcaccaggcccagggcggaaagacccaagggaaagccaagaacaacagccacgcgcagccgcaaagggcacccccgcaagcaggaggaaggaaacaggagacgagagcgaagccacgagcagcagcagagcccggcgcgcccaggccacccccagggaaagcacgagaacagaagccacagcaacagcgagcagcaggcacgggcaggcagaagcgagaaacggccacaccagcaccccaccccgcagaaccagaaaaaaacagaaaacacagcccaaagaggcgaacacaaggaagaaaagcacagcccagacagcaaagccaggagcccgcaaacagccggcccaaagcacccccgccgaagagagaaaacaaggcaccgcaaccaacaaaggccccgccccacagggacaagggaaggacaccagagccaggcacgcacagaccccagaggacaccagaaccccaaagggcggaaaagaccagagggggaaaccgcggaaacgggccggcccacggacaacggaaaaaaaaaagaacagaaccaaaagaccgggaaaaacccgccccacgaggccagcaagaacaagacagcgcccagcgcaacggagagcaccggggagcgaggggccaaaggagaagaaggaaagcaaagccggacagaagacaccagaaaacgcgcccaccacccacccccccgccacacggggaagaagacccaaagggaaacagacagaggaggagcccaggagccagaggccagggcaaacccaccgccccaccggcgggaacaggcaagccacgccccaccgcgcagaaaagcagacaagcagagccccccaaggaacggaggacaaagagaaggacaagacgcccgccaggccggcacaggaagacacaaaaaagaacaacaacagcaagcacgagaggcagaaaaggaaaaaccccaagacgccaccaaaccggaaagaaggccaggaccgagcagaaagaagggaaagaggagaacaacgacaagcaggaagagggagagaacaagagaggaagaaaaaaaacaagggccaaaggggaaagaggagaaagaacaccacccagcaaaaaaagcagccccaaaaccagccgccgacgaaaacaaacaaagccccgaaaaaagacaagaaagagaaacacaggaaaagaaaggagaaggacaacccaaccccaaaaaaccaagggaaccaacagaacacaaacacccaccccagggagagcagagacaagcaggccggccgcccagggaagcagcaagagggccccaacaagacaaaaaacaaaaaggagaaaggaaggcagaaacccacagaagagcaagaaccaaacaccccaaaaagaaggacaaaaacaaaaagaagaacccgggaaaaaaaggaacagaaagaaaagcaaaaagagggcaaagacaagaaacgaagagaacaaacaaggagcacggacacagggcaaaacaaaaaggaaacaaaaaaaaacacaggagaccaagaaacagaagcgagacaaggccaaacagaacgcacaacaacgaaaaagccaaaacagcagcgggaacaggaggcacggaacaacaaaggccaaggaaaaacacacagagaacacaaaaaggccaggggaggagcaggagcagcagaagaagcaagcgcaccagaaaaaaccaaaacccgaacaaagacaaggcagaccgaaaacaagagacaggcccagagagcgacgcacagggcccgggaagcgcgccaagcacccgccagacaggagggggaggagagaaagccaagacagagaacaaagccagcgcaagacaccaccgagaaaccagaagcagccacaagaaaggaaggaaggaaggacacaaagaccgggcgggcgagcgcgggaagaagaccagcgcaaccggcggcggccaggagcaaaacaagagaacgaaaaagcgaaagacccggccaaacgaacaaagcaggagcgaaagaggaagagaaaaaaagaaaaaaaaagacaagaaacaagcaggggaagagggcgaacgaaagaaaaaaaagaagcaagggaggagaagggagacaagagccagaaggcaaagcaccgccaccgccaggcccgcaggccccgagagggggcgggcggccaggagagagagcccgacaggcacggggcggacagggagccggaacacggcggcaaaccacacacacggaggcacgcaccagccagcgcggcacagagccagaaggggcaggggggggggggagggggaaggcaggggagaggggaagacaggccaaaaggggaacggggaggaggccagaagaaagagggaggaggccccaagggcaggcggagcaggaagcccacagcgggggagaccgcgcaacaccccgcagcagggaaggacgagcaaaggcagaggcagagggaggggcccaagacacaggcaggggccagggcggaaggcagaaggcccacccccgacccacgacgcaccccaagggagcccagaaaccagacagccaccaggccccaccgacaagaaaacaaaccccacccaaaaaggggggggggggcgccacaaagacccaagcgaacagcccccaaccacagagagaacggaaagaaaagccgccacaacagaagacaggaagagaacaagccgaagccaccggcggacaggcaagaacaacgagcaaacgcgacccaccccaacaccagccgccaaaagccggccaaaccaaccggccaagaggaggggagaggaagacacaccaggggagagccaaacagcaccagggaaacgacacaggcaacacgcaggcacgaaaccaacacgcgccagaaaccagcggcccaagagccaccgcgggggccccggaccaccagggccagccaaagggaaccacaagcacccacagcgaaaaccacaagaccccgcccaaaaagcacccaccacagcacacaaggacaaaagacaagacacgggcagcgaaacgacacgccgaaacagcaaaacgaccaggaccagacacgagggcaaaaaaggagggaaaccgacaccaaaaaaaacaaaaaacccagaaaaaagggcccaaaaaaggcaggcaaagggaagaggcaaaccaacgccacagcagggaaacccccgaaaaaagggaagaaaggagaccaccaaaggggagaaagggccaccagaaggcacagaggcacgcacccagaagaaaagggagagcccaagacagggcacacaaccacaacacccaccaacggcgaaaaaaaccccaccggcacgaacaccaacccaagccacacagaaacgacagaagagacaccaaaaccgcaccaggaaaggaaccaggaacaaagcacacagaagcaaaaccagcaaagaacgaacagccacaaacccacccgcaccaggcacacccggagacccaggcccagccgggcccgaccccaccgaaaggggcccagcaaaaacccaggccccacccccaccaccgaggccggcgcacgcgcacaccccccaaccaaccaccggacccgccaacccagccacacggcacggcaaccaagccaaccgcggaagaggggcaaagcagacagcaagccacaaaccgccgaggcgaacagccgaggacgagaccccagaaaaaacaagaaccaagaccaaagggacccagaagcccaacgcaccacaaggacggcacgaaccgcggggacacgcaagagccaacaaccgcccacccaggagagggcagccaggagaggacaagcagcagggacccagcacaaggccccgaccgcacccgggccaggaccacaccgacaaaccacccagggcccaccacaaaacgggaaaaagcaccaccaacagcccaagccgccgcaggaacaggacacccagcccccccagcgaggagagggaaacaaacagcagggcaccaccaaccaccacagacaggcacccaggcccaacccagaaaaggaaaaaaacccgcagagaacggagaaacacacaaagcagacgaacgacacaagcagccaggaaagagcgccaggagaccaaaggcggcgagcggcgccgccagccgccacccgcaccgggcgcgacaccccacacaccacacaccaccaacccccacgagccaaccccccccccaagggccgggcgcgacgcggcagcgggacgggagccaacaggaccagccacaagagcgacccggcaccccagcccacacaggagcacgaggagcgaaacaggcacaggggagaacacagcagaaacagcaaaacacaaacagggccccccaccccacagagccagaaacaacaggcacaaaggcagacccaccgaccccgggccaacgaccgaacaccaaaaagcccaaaggaagacagggcgacacgacggcacgcacaggagaagcagcaaaccagccgaagacagagaaccagcagggaggaaaacaccaggaaacaaacaaaaaaaacaacgaaaacaaacccaggaaacccagcacaagagacagccagacaacccaacgccgccgggccccccgggagacaggcccaggggccaaggccaccgaagcgaggaaacccaggcccgaagacagccgggccacccgaagcccagcggaagcaacgccgaacaaagagggaagaagaagagaaccgagggaaaagggaggccgccccgcgggaaggccgagccacagaggcaagcaagacaggagggccaagcgccaaggccccagaggccgaacaagaccgcccagggaaaaggagacgaagaccacagggagagaaggacaggcaggacgcacaccacaacccgaagaaaacaaaggaaaaaaagaggagccggccagggcgggggaggaaggaaccccaggaggaaaggccacggaagagagcaaacgcacacaccacgacgaggaagcaaaacccagcagaaccccgacagaaaggacccccaccagcccaacaggggcacaccacccgcccgacccaaaaccccccccacaaagaaaacacccaccccaaagcaggcgccacagaagcaaaacacccaccaccccagcccgcaagacccaccccaacgcgccccaaaacggcaccagggcaagagaacaagacacgcacagggaaccaacagaaaggagaggagggaagggacaaaagccaggaagccccaggccccacccgggccggcccacacaaaagggaaagcaaccccagcaagaaccccgacccccgcccagggcaagccgagggcaggaccacagcacccaaaagaacagcagaagaagcgcaggaccaacgaggcaccgcaggacaaacacccaccacgggaacccagaaccacccggaccaggcagagggaccaccaccacccagagagccagggacagagcgcagaagccggggagccggggcgacaccgccaaggcaacaggaacgcgcgccgcaaaccgcagaaagaccgacaggccacgggccgacacgaggcaggagagagaacagccggcaacacgggaaaccccccacaaaaaacaaaaaaagccgggcaggggcgggcaccgagcccagcacggggaggcgaggcagaagaaggcggaacccaagaggcggagcgcaagagcgagagcgccacgcacccagccgggcgacagagcgagaccgccaaaaaaaaaaaaaaaaaaaaaaaaagaaccaaaggcaaccacagaagaaaagcacacacacaccaccacccgcccacggcaacagcgggcgccgagaccggacggcccaggcacagagaaagcagggcacccaggcggacaccaaagaccccgccgaccaagaccagggagaaggcggacaagagaaaaagccaacccaggacggcagcgcacgccaacagccccaagcacaaagacaaggccaagccacagaaccagaccccaaaacaccccagaagaaaaccgagaaggccagaacaaaagccacccacccagagaagaaaacaaaaagaaaaccagaaacccacaaccaacggccaaaagaaggacccacagaagcaggaaccccagcaggagcagagaagaaggagaggaccagggacaccaggccaagcaagaggcaccaaacaagaaggaagaaacacaacacacacacaaaacgagccccgagacgagacgcaacaaacagaaagagaccagccaaagaggaggccccaaaagaacgaccaagccaccaccgcaaacacgggcaaccaccacccgggcccagccagggggggggcaaaaggagcgcccaaaccacagagcaccccccaccaacagcaaagggagcacagaacagagagcgcgaggaagccaaagaaggaaagaacaaggcgcaagaagaacagaaggaagcgggcgagggacaggaagcacagaaacgcaaggaagaaaaccccacaaaaaaaaaaagcaagaaaggaagaaaggaaaaaaacaaggaaacagcaggccacaagcgagaagcaaagcagaggaagcagggaggacaagagccgacacggcaggggccaccaggcagggaacaccagagccagggcaagagacggaaaaacaagggcacaaagaacgggagagccagagacagcagcaggggagccagagggagcagcggagagggcggaaaggacggagacagagcgaagagccccagaggcccagaggagccagcagcagcaccagggaaaggacccaggcgcgcgagggccacgccacagcccgccggggcaggcccagaagcagggccagggcagaaacggcagaggaggagcggcagcaccaccgggcgcccaccaggaaacaaggccaaaccagacccagaacagcacccgcaaaaacgcagccagaaagcaacagcacagagccggggaaggaagaaaggaaggaaaccagacacgccaggccgcgccgcccccccccaagaagcacgcgaaagccccgaagacaccaggcaaggaaagccagagaaccgcacggacccagacaaaagcccacagagagcggcgccgcaacgggcgcacaccacgaggaaagaagagcaccgaacccaacagaaacaaccaaaaccaccgcacaggcagagagaggaacgggaaccgcaacacccacacaaagagaccagaaacccggaggacacagagagacaaccacacaaggagaaccgaggcagggaaaaaagcccccggaacggaagaccggaacgaccccaaccaaacagccagaccaaagcaaacaagaaagaaaaacaaaaaaaaaaaacaaagacagaaaaaaacaaacacaagagagacgagaaacaacgcagcaccagaagaaaccacccaccacaaacaggacccgacgcacaacgccagggcgaagacacaggaggaacaaaacagacaaaaagccccgccccgagcggcacaccaagaagaaccagacaagagaagaaaaagagaaaacagagagcagagagacacggcggagaaaaagcagaccaagaagagggaaggagcggaagggggagcaacacaaggagccagggacacccacgaaaacagacaaaggcaagaccggaacgggaacagccagccagggcaagcaggggggcgggggcaggcagcagcaaagaaacagcaaagcaaggcccgaggggccccagcagccaaggaacagaagcagcaaggggcggacggagggagagacagggagaggcaaagagcagggagggagacggggaagagcacgagcccacgaaagacccgggggacagagaacgcaacaaaaaccaaacaagcacaaaagacaaagcaaaaaaaaacaagacaaggccaaaagcaaacaaccaaacagaaggggaggaagagggaggaagacaggaaaaaacgaaggggaaggaaagaaaggaagaaagaaagaagggaacgcagccgcccgacacagagacagagccggcgccacgggcggaggcagacacagaccagccacgagcccaaccggaccaagcgaccgccaccccagcccccaagagcagggccacaggcacagccaccacaccggcaacaaagagagacagggcacaagccaagcggcaaacccgagccaaggacacccgcccagcccccaaagggcgggaacaggcaaagccaaggcacaagcgcccccccaccacaccccgcgcccgccagcccccagggaaaccagaccaggaacaagccccaagccagcgccaggggccccaggagccagcagggcaggagcaggcagaggagcacccacaccacaagcgggcccacacccagacccagcaggcccgcagcgggccacaagaaccacaagcccgccgggcacaggaggaaacagaacaaaacccccgagccccagcccccaggcccccagggacagccaccccaagcacagccgcccaagcaacagggagagaagccccaggagaaggagggagaaggggaacacaagcgagccagcccggaaaaccaccccccaaacaggagccaaaaccgccgacagcccgaccacgaaggggaggggcgggcaaggacagggggaaggagggaaaagcagacgccccccggaagccaggccccaccccacagggccaagggcaagccaacacagacaccccacacccccaccaccacccccacacggagaaagaaaacagaacgcccaaacgaacaggaccaggagagggcagagcccccaaagcccacaaggccgagccccaaaagacaaagacagaacaggacaggcccaaggcaacaagggacgcaaggggagaagccccgccaccgaccaagaacgagcaaacaagaagcccaccagaggcaacacacaaccagcaacccaagaaccagaagggggggagaaggaccacaaagagcccaaaacccaggcccaacaccaccccccgaagcccaccacccggaacaccaccaggaccccgaacaaaaaacagaggaagagacaagacgaagaaaaaacagagaaaccgacaaccagccccagaacacgcaaacaaggaaaaaacaaaggagcaaagcaagaacgaacccaccccaaggaccacagcacaggcccaccaccccgccccaacccccaacgggcaaccacacgcggaaaggcaacaagaagaaaaagggaacaaccaagaacccgaaaggcggcaaaaccggaaaccacagaagacaccagggggggacaaagggaccccaggagagacgagaaaaaggccacgagggggaacccacccgacacaacgaggccaccgaaggcagccagcgagaaaaaagagaaagagacaaagagaggaaacagcgggccacgggggggacacacaacggaggaccgagcccaccgagccacaaaaccagcaagaaaggacaaaacgggaggggggacaaacagggagagccacaaagacacagccaaagggcaaaaaggagagcaaagacacaaggcaaaggacaaaagcaaagacacaaggcaaagggcaaaagcagaaacgaaagggcaggcagcgggcacgagcgaaaacacaacaacagaaaacagggcgagaacagagaaccggcgaccaaaacgggaggggccccacccagaagccgagggacgcaggagaccagggcaaccagccaccagcgcgaggacagacacccagagcggccgaagacccaccccacaggaacacaaccacagagaaaacaaaccgcaggaaaagaaagcgaaccccacgcacaccaaaggcccgcaagaagaaaaaaggcgcccgacccgcagaagcagaccagggccccgcccaaaaacgccgacgccaagggcacgacacaggcaaacacacagacaacaagacagaacacaacacaagcgaccgagggagacacccagcacgaagaaacagggaagagaaaagaagacaggcaaagaaaacgaaagaagggaacagaaagccagaagccacaaagccgccaggcccagccagcccccgggggcccgaccccacaaaccacggggggcggagacagagcccccccacccaggcggaggcagggcagaccggccacgcgaccccaccccaggcaagcaaccccgcccagcccccagagcgggacacaagcgggccaccacacccggcaagaagagagaggggcaccacgggccaggcggcgaacccgacccaggcacgcccaccggcccccaaaggcgggaacaggcagagccaccagccggccaagaccacgacacccaggaagaacaccggggccagggggcagagaaggagcggagccacaacaggagcagagcacaaacacgagaaaaaacaaaaggcaaggggagaggaggcagaccaaaaaaggacaaccaccaaagagagaccaacaccccaggaaaaggaagagcccagcaaccagaaaaccccacaaaggagcaagaccccagcgaacgccacgaacagggcccacaaggcaaaaaaaggaaggacaacacacaggagggggcaagaagagccgccagccagacggagaccccaaggcccgggcagcaaaaccagacggagaacacaaaggggaaacagggaaggggggggcgccaacagacgcaaaacgcagcaccaaggaaaggcacagaagcgaccaaaaaagagagagaacgggagccagaggacacaccagaccaggcacccacaaacacaacagaagaagagcaaagcaaaaccagggacaaccccacaacgcaaaggagcaaaaccgcccaaaacagcaaaccagacacgacgaaaacgcggaggagagaaacggacaacgcaacaagggaagaagaacaacaggggaggcagaaagacggaaagagccgcacaacccggaacaggaaagaccagggaaaggagacgcagaagggacgaccccccagagcccaaaagaacagccgccaacacgaagcccgaagaccagacaaaccaaaaaccaaaacgaagaaaaaagaaaggcacaaggggcagagagcagcaaaggaaacaaacaaaggaacaaacaagaacaaaaagggccccaaagaccgcgaccagcaaagcccagcaacaagcgaagagaagaacaaggcaggagcaagaaagggagaaacaagccaggcacgaagaaagaagaacagagacgcacgaaccgcaaacacccggagcccgagacccgaagcaaaaagcacacacaaacaaggcaaagcaacacggcccaccaagcacggcagaacagaaccaaaacaggaaaaaaggggaaaggaaaaccgcccaccgacagggggaaaggacagcacaagaaaaaagcaaagggagagacaacggcgagagaaacacaaaacggaagcaaacgccgcagacaaaaacaaaaaccacagcacagcagcccacccaaaaaaaccagagccgaacaaaaaaaaccccacggagggcaaaccaaagcgaagagacagccccagaaagccaagggagagagcgcgcagacgcgcggaaaacaaagcaagcaccaaaaggaaaaggaacccccacaggacaagagaacgggaacccagggaagaaccaggaaacagaacagaaaccgggagaaaacgaacaaccaaaaaagggacaaagacacaacagaaaggggagaggaaggaagaccaagcaaaggggagaggcaagacccaacaggacagcggagaacccgccgcaaaaaggccccccccaccccacaccacccgcacgaagaggacaaagacccaaagaacaagccgcagacagggagcagcaggcgacaaccccgcacgagagcaccggaggcaggaacgcagagaccgagacacaaaaagcaagacaaaacaacccccccccccccaggaccaggacccacaagcaggacacaagcaagaccacgcggggcaccaggcaggaaccgagaccgacccaagaagaaacgggagcccagggagaccaaccgaaacaagaagggcagagaacacaccacagaaaacgacaggccagaacagccacaggaaacggggccgaaaacaaggaacagcggaggcaggagaaacgggaagaccggggaagggggaacaaccgagacgcaggccaaaagaaagggaaaaagccaacaagaagagcacccagacagcacacaaacaacaagagggcaacacaaggagcaaccgagaggaccccacaaaaagcccagccggaaccgccggagccaccacgaaaaaagacagccacgccgaccaaccagaaacaaacaccaaaacacaagagggaacacagacaacaaaacaggcagcaaccaccacaaccacaaggaaagaccaaacaaaaaaagagcagaagcgccacagcacgcgggccccccacccaaggcgcgaacaaaccaaaaaaaggaggcagaaagcgaagggaggagaaacaaacaacaaacacaagcaaacggagcgaagaagaaaccaccacaccccacccccaaaccaaagcaaaacgacaacagagaccagcagacaacgagcgcgaagaaaacaaaggaaggaagggcaagccaacaacaagcaaaggaaaaccaaaagaagaaaaaaggccgcagcccaacccacaaccccccaaagaaggccacccccgcaaagacaccacaaccagggacacgcgggacaaacccagccaagaagcgacccccacccaaaggaagcggaaaggacggagacaggccaaaacgaaaaaaaggcaccccagccaggggcgagagaaacacacaaagccccaagggaaggacaccgcgccaaagacgcagcagaaggacaggagcggagaaaggagcaccgaggcagccaaggaacgcgccaaacgagaagcagcggcgacacacagacaaagggggcaccaacccaggggaagaaaaaccaagcacaccagcccagacaagagggggggcgcaaccgcgggcaagaggagaaacagcccaaaggccgcacgaaccccggcagaggagcaggaagcccagcgcccaagcccagacaccaaaaagaaggggaaaccgaccccaccaggcaaccccaccaccgggggaggggacagggcccgacgcgggcgaacgggagcgggcaccagggcccacacacaagagggagggagggggaaccagccgcagggaggaacacagccccaccggccaaacaccccaggcagggaagaggaggacagcccaggagggcagaagcaggccaggcgcggcagaggagagacagccagaggagagggaaaaagccaacaagaagagcacccagacagcacacaaacaacaaccagggcaacacaaggagcaaccgagaggaccccacacgggagaagaaggcacacaaaagacggcgccagccccccgaccggcaaagacagcaggcgcgaggccgccgaccaagggccagacggccagcccaagcggaaaaagagacacaagaaagcgggggaaccaccgaggccggcgaaccccagagccgcccccaccacagaaacacagggagaacagccaaggaaggcaccagcaggaggaagagagaaaagggcaccaacccagaaggaaagcccacgaacgaaagggaaaacggacaccccaggccaccgcagaaaaggcaaccccaaaaacgagagaccagccaccgcaaaacgcagaaccaagcccggaaaaagaacaacgacgcgaaagccgagaacaccacccaaccgcccccccacaggaccagaaccaggaaggaccgcgggacccgaaaacccaggcgcgcccaacgcagacgaacaggacaccccccaaaaggcaaaccccaaagggcaagaaacacaaccaccacccagaaagaccacgacgggcaccggggggacgccagccggagaagacaggaaaaaacacccacacagaaaagaccgagggagaagcccgagacccggcccccaaaggccggcacaaggcagacacaaaaacagcacaaagaacacgaagaaaaaaaccagaaccacaggcccacagaagccaccaaaaagcaagacgcacaagaagggagcgcaggacggccgaggcaaggagacagcacaaagagagcggcggaaggagggaaagcacacccgaccaagccagaccagggaaagacgggccaaaaccaaaagacgcgaagacacagggaagaaaagagggacgagacagagaccagaaacgcgaaagaaaaacaccccacaccaaaagagcaaaccagcaggccaaacaaaagggcaaaaaaacagggggaaaaggacccacacagccagaacaacaaccaacaaaacgagaggcgcagagagacaccgggaagaaaccaaggagcccccacacacaaaaaggagaaggaaagggcaggaagggaggaagagcagggagagaacaagaggagagaagagggaaagccacgaagcaagagccacccgagaccgcccccccgcgagcccccccacaggcgcagaccacaggccccagcgcagccgcacacccagcaaacacaaacaccaaaacaccccaaaacggaccgcaccacacacaaagaaaccaccccaggcacagaacagccagaacccaccaggcaccaggaaagcaccccacacccagacaccaagcaggaaaagaaggagggaaaaaacagccaagcagaccgagccaacccagccagccgaaagaagacaggaacaaaccgaggagcccgcaaaaaacgaaaaaaaaaccaaagggcgcagaggaaaagcaacggggaaaaaaaagcagaaagggccaaaaaggagcacgacagccaaccacagaacaacccgccaaaaaccccgagcccaggccaaggcccggcaagagccaaaggccacagaaagaaacaagccaggaggaaaggagacggcgaggagaaagggggggggagagacagcaccacaaaggaagcgccccgagaaagaaagagaaggagccgagagaggcgcagggaaggggcaggccacaaacagagggccaggcagggcaggcagcagcacgacccccgaccaagagcaacccggccgcccacaacaaggaggacacaccacccagcagagaagcggcaacagagaagacacagagcaaccagcacagaagagaggagcagagggcaaccggcggggaaacgaagaacacaggcgacagaagacccaagagagaaaaggggccaggaaaaggcaggagaccaccaaagagaaacccgcgcaagccacacaaaaaaagcggcaccagaaagcacgacagcagcagaacaaggccaacaaaacagccccccccccccacagggaaggagaagcgcgccccgcgccaggcaaaggccagaaaaacggagacacccaggaaaaaaagagagaaaaaaaaccgcaaaaaaaccccccccagccaaaaacaaaacgggggagggagagagaagagagagaagaacacaaaagaacagaaagaaggacgaacaagcagcgccagaggagacccagcacaaagccacagcggaccccccgaccgaagcagcagaaggagaaggggcccagaaaggcaaagaccccagcagagcgaagagccagacaggcaccaacacaacagaggcgaaagcaggcaagaaccagagaccaaccccagcccaaaaaaaacaagagggacaggcacaaggcaggagacaagaacaggccaggggagcgcacccaaaccacgagcaaggaacccaagcacccccccgcccccccaccccacacagccccagagggagccccccggccacggccagcaaacccacggaggagaacagcggggggccgagaaacgagaacagaccaacaccagcccacaaaggacagaaccaccaaggcgcaagaccaggccaagaaaagcaggaagccaaaaaggaaaacaggaggaaaaccaggccaccccgccgaaacccgcgcccaccaaccgccacagaccgaccagcgcaccagagaaaagggacccgacacagcaaggaaccacgggcagacaggggaaggaccccccacgaaccacagccgcaggcaaacagcagcacacccggccgggcagaacaggccagccccgcccaaagcaggacagcgccaccagcaccacccccagccggacagccaggccgagcagagccagagcaaaacaccacggccggcaaaggggggggagcaggggagcagcccagccgggcgcggcagaagcggcagaagaaagcccgagggcgaaggcacacaccccgcccccaagaaaaagagcgaagcaacccccaggacccagaagaacccggagacggacaagaggaacaagaaaagagaggaggggaaccccaaacagcgggccgaaaaaggagaaagcgacacgagagaaacacccacacagggagaagccaggaagagaaggcggagacagagcaagcccaagccaagaaacaccaaagcgacagcaaaccaccagagcggaagaaaagccggagcaggccccccagcccagaaggaagcaacccgcgacgccggcagaccggccccagaacggagagaacaccgacaaggccccagcaaacaaaacaccccccaacagcaggcagaggggcagcacgaggaaccagaacaaagcagaaaaagaacagacggaggccagaagccacgagcccccccagaaaacacagcggcaggagagaaggcagaaacacaggagagacaagccccaaccccacacaaaacacacggccggccgcggggccagccgaacccagccggggaggcagaggcaggcagaaaccgaagcaagaaccagaccagccggccgacaaggcgaaacccgccacaaaaaacaaaaaaagcgagcaggggcacagccgaaccagcaccgggaggcgaggcaggagaacacgaacccgggaggcagagggcaggagcgagacgcccacgcacccagccggggacagaggagaccgccaaaaacaaacaaacaaaaacaaaacaaaacaacaaagggaaaagaaaaacgcccaaacacaaaaacaggcggagcaaggaagcaaagcagacaacgcacaaacagaaagacacagcaccagggaaaagaaacaaaagaaaaccccgagcaccggcaaaaaaacaccaaagaccaacccccgggacacaggaggcgacccccgccccgcgcagaagggccacaaacgacggccaaagaccaagagaacgaccaagggaagcaaagaagagggaggagccccaccgccccccgcacagagaagcaagcagaagggagagcaaaaaaccagacggacccaagcacgagaaagggaccgcccggagaaccaccgcgcaggaaggcgaagaagaacagggccgagaagggagaagacacccaacacaagccaacccaacgagaggccccggacgcgaccagaacacaaaaacaagccaggcgggcacagggccagccgaacccagcacgggaggccaagggggcagacacgaggcaggaggagaccacccggccggagggaaaccccaccacaaaaaaaaaaaagccgggcgggggccagccgagccagcacgggaggcgaggcaggagaacacgaacccgggaggggagggcaggagccagaggcacacacccagccgggcaacagagaaagacccacccaaaaaaaaaaaaaaaagccacgaaaaaaacgggcaccagcggcgagccacagccaggggagcaacccaccaaaccagcaggaccgccgaaacacagacccagccccagaaaaggaacgaccaacagcccccaaggaaaaaggagcccacccacaaagcagacaccagaccagcccgagagaaagaccagaccaccaaagccagaccccgcaccacacaccgccccagcaccccagagccgggaaaacaagaaacagccaacccccaaaccccccaggcgagaacaaggagacccagaagccgaacaagcacacaacagcaaacccaaagaagcaggccaaaacagcccaaagggaggaaaaaaaaaaaaaaaaagaaaggaaccaccggggccaacaacgagaaagaggcacaagaaagagcagggagaaccgccaagcgcgaggccagagaagggaaaagccccaccaagccagaaaaaacgcagcgaaacacaggaaaagaagagggacagccccaaagcaagggcccaacccacggacgcgcccccacaaggcaaagcagagcccagaggcgaaggcaaagaacacgggccagaccaacggaagagaagaaaacaaacagagggcagaacgccagcagcaagagggaaaaagcaacaggagaacagcaagaacacgggcaaaacacacccagagggaccccagaagggaaaaaaaaggcaacaggagaccgagccacacaagacaagggcacgcaggagagggaacaacaaacgaaagacgaaagaaaccagcaacacaagggcaaaacaaaccaaaaaaaaaaaaaggaaacacaaccaacaaacaaaaacaagcaagacggagccgggcggggaaaacaaacccggggagaaaacgaggaaacggaaacacaaggcaaaaacaaaagcccaagggcaacgcgacgcagacccacgacacgaggaaacaaggagaaaacgggaggcaaagaaacgaagagagcaacagaaaaagaagcaaagaaaacaacaaaagccaaaaaagaaaaggcaaaaaacaggacagcaaacaagaagacagccaaaaaagaagaaaaaaaaagaaaaaaaccaaaacacaaagcgaagaagcaaggaaacagcacaggaaccaaggcaaacccaaaagcgagaaaagacaacaaaacagcagaccacccgaagggggaagggggacccacccgaaccgaagaaggaacacaaaagccacaaaaaagagagaaacaagaaaagacaacaaagagcagagacgaaacaggcgcaccacggcaacacaacgcaaggaacgaaaccggcaccgacacacagcgccaaacaacccacaaagcaaggaaaaccagggacaacacaaagccaagaaccagcagccgaaaaaaaagaggggagccaggacaggaagagaaaagaaccacccaagagcaagagggagcaaaacaaccacagcaagcaaacaaacaacaccagggacgagcaagccagccccaagggccccagacggaacaaagaaacgacaaaaacaaagggaagaaagacaaggcaaccaaaaaccaccaaagcagcaagaaagcacaagcaagcaccagacaagaacacaaaacaaaaccagcggagaagacagagaaacgaccgcagcgcgggagaaaggaaaaaaacaacacgacgcacaaaggcgaagcaaaagacagaacaaagcaagaagccccaggaagccccacccaaggaagaacggaaaagagccagcacccgaaggaccgaggccgccccaacacacgcccgcccggagcaccaccccgagacggacaccgagcgaagaccaccaaggcaaacaaaccgacggaggaacaaaaaggaacaacaggaaaaagcagagagggaaaaaacagaaaggaaaaagcagagaaagacaaacagcaaccaaggggaacaagacagaggcaaccacaaagcaggggcgaccaaagagaagcagcagcaggcagacacccacccccagaagcagccaagccacggacaaggaccacgaagccgaggaccggccaccggaggaaaaaaccacccaaggcgaaggggccaaaacaccgcgcaaaacaagcaggcccccggaggagccccagaacaaggccaaggcaaacggaagggcagaaacaaacacacagaggagagaaagagcaaaaagcaagcaagcaaaagacgcgcgccacagcgaagaaaagggcgaccgggaaaaaaccaagccccaccagcgcagcaaaaagaacacaaaaaagggcggccaacagccagcccaggacaaacacaccagaaaagcaagcaaacacaaccaccggcacagaggcccagggaagcacccgcccaggaaacaacgccacgagagcggcaccggaacgaccaggggccccaggccgaggcgaggccagacaccagggcccagcggcaggccaaagcgccaccccggcagccacccagcaggacagagacacgcagggaaggggggggcaagcgggaggcaacgcgccaccacaagagcaacgggaggagcaaaacagaagaagccaaagaaaggggaaagaggaacaaagagaacgccaacaggccacccgaacacccccacaacgagcccgcgaaccacccgggccaaaacgccaccaaggacaacaagacagcaagagaacaggggcagccagaccaaaagacagaacagaccggccaacccccagagagcagccaaaggacacgcgccccaagaagccagggcacccccgagacggagcacgcaccagccggagaccgaacaccacccaagacagggacacacccaaacaagaacaggacgaccagcaccagaccgcccaaaaacagggcgccaaggaagacgccaaaaccaccccggcccccgaccgaccaaagccaccacaaccccacagccgcacacacggaaccacccacagcacggcgcccagaacacagagggcaccaaccagccacacgccgacgcccccagccacgaaaggcccaaaaaaaaaaaaccaaaaaaacccccaaaggccggaaaaaaaaaaaaaaaaaaaaccaaagaagaaaaagcaaaaagaaaacaacaaaacggaaagagggacaaaggaaagacaaccagggaggaagacgggacagcaagaagcaacacaaagaaaaagagaaaaaaccaacaaaacccagaaagaaaggaaagaaacgacaaaggaaggaaaacaaggaacagaaaacaaaacgagcgaaaaagaagaaaaagggaggaggcccgcccccgccgacacagccaaacagaacagaaaggggaagcaaacaaaagacacaagacacgagaaagaaaaagacccagaaaacgcaagcgaggccaaaacacagacacaaagacaaagacagaaacagcggaacaaaacgaggcaaaggaaccaccaaccaaacacacaccaaaaaaaaaaaaccaaaacagacacagaaagaaacagaaagcaaaaagagaagaagaaaaggagaaacagaccagggcaggcagagacccgaagacaaaaaaacaaaaaagaaaaaagaggagagcacaaaaaaaaaacccaggaaagaagaacaaagacaagaaaaaaaaggaaagacggaagaaaaagcccaaacacaacaacaaaggaccaacagaaaaaaagaacccaaaaccaaagaaaacaaccaacaaaaagcaagagaagaagagacacacaacaagagaaacagaggcaaaaagcacaaaggaaaacacaacacaagccaaggaaaaaaaaaaaacacaaggaacgcacgacaggcaagagacagagcgcgcacccaggcggaggcagggcgcgacggccacgcaacccgccccgggcaagcgccagcccagccccgagagcgggaacaggggcaccacgacgcccggcaagaaaagagaggggcacggggccaggcggcgaacccgcccaaggacgccgcccagcccccaaaggcaggaacgggcagagccaccggcccagccacacaaagcaggaagggcaaaaaaaaaaaaaacgacagaccaagacaacaagaagaagagcagaagagcaccgggggaaggaaaaaaagaaaaaccgaaaacagggaggcaaaagaaaaacacacccaggacccggcaaaacagacacaaaaaccacacaaagaagcacccacaaaaccacaaagggaaacagccaaagcgaacagagaagaaaagcaacgaggacagcaaaaggaaacagcaaaaaaagaacaacacacaaccaaaggcaacacgacgaaagaagcaggaaaagacgacgagaacccaaagacaccggacaaggcaaaaagcaacagagaacaacaggggcggggcacaagaaagggagggagaccaaaggacagcacaaggggagggacggaacgcgccaaggggggaaaaacaacaagcaacccaaaaacgacacagcagcaaaaaaccaaaacaaaaaaaaagccagcacaccagaacccaaggaaaaaaaagaacagaaaaaaagaaaccaaagaaaagcgaaaaaccagggagaaaagcacccaaccaagaaggggggcgccagaagcaagaacacaaacaaaggaaaccaggagcaggggcgacaacgaaagaagaaacaccgagaaaaacgcaaaacaaagcagaaaagggaagaaaaacgggcaaaggggaacaaaaagccagaggcaaaagccccagaaaagagccaaaacccagcccccaccccaggaggcaaagaggcccacacaagcccaccacacgcaaaagggggaaaacccaaagccccccacagcaaacagagggcacaaacaaacaaccccagagcccagcacaagccggcacaagaagacacgaacgggcacggggccacacgaacccagcacgggaggccggggcgggggacaccgaggcgggagggagaccagccgacaacaggagaaaccccgccacaaaaaacaaaaagccaggcgggggcgcagccgagccagcaccggaaggcgaggcaggagaacgcgaacccgggaggcggagggcaggagccgagaggcgccacgcacccagccgggaaacaagagagaaacccgcccaaaaaaaaaaaaaagaggacacgaaagggggcaagaaaaagaagaccacagcggcaaaacccaaaagcaaaccagagacaaaacaagcagcaaaaacagcacagagcaagaccaaaacaaaacaaacccaccaagaagaaaagggcacacccaaacaaaaaaaagaacacccgaaacaacaaaagaaaaaagggaagcaggagaaaaaaggaaaaaaaacgaaaccacacccaaaaagcaaccccaggcgggcacacgcagaacgccaaaggagccggacaccagacccggacaccagaagaaacagcaaaggacaacacaggcccgcccaggacaccagcagccgggaacaaagccacacgaaaagcacagagcaggaaagcagggaaggagagagcccacggggaagagaagagccagggaagagggggcccggagcagaacaaaagagaaagaagaaggcgagcgagaaaacccccacccacgcccggcaacaacaggagcagcagggaggcggagggggaagagcgacaccgccagaaaacggggggccaggcccggaagaaacacgccccaggacacaggacacaacagggcaaaggacaagccgaggggggggaggaagagcccggcaaagaggcgaacgacaagaaaccaagcgccagccacaaaaaagaacacagccccaaaacagaaacaagacaggcccccaagacccccccacaccgagggccaggaaaacaaaaaaagcagcaaacaaaagaaagacccgaagccaaaaggaccgacccgcacaccagaaacagccaaagaccgcacagaagcaccaaacccggggcacaagagccaaacggccaccgacaccgcagccccacccaccagacacacaaaccaagccc

SEQ ID NO: 261 - RNA, 2411 nt, Homo sapiens
caaaacagcaaccccaaacccacaaggagaaaaagcagcaccgacaacccaacaaaccacaaaacaaaaccaacacaccgcaccacaccaacaaacccagcaccacgacccacacaccgcaccgaaacaagcaacagacaacacccaaccaccacccccccccaggaggccgcccccgcaaccggcgcccaaagggccaacgaagaacacaaaaaacaaagcccacaccccaccacaagccaccacacccccaacccaccaccacgccaacacccacccaacacacacccccaacaacaacgaaaaaaaaagacaggaacaacaaaacccaccccaccccccacaccacgcccaccacgcacccaccacccccaacaaaacaagaaaaggaaaacagaccaagagcccaaagccccagaaggcaaacaacgcaacagcaaggacgcaaaaccccaccgcacaacgaacgcaaacagccacaaaagcaagcccacagaccaagggacaaacccacaaacacagaacagcaagcacccaacaacggccaacacccccgccgccgggaaaaaaggcgggagaagccccggcagggaagcgcccgaagcaacaaagaaaacacccggagcggaaaaagaggccaaccccgcagaacagccaagccaccagccaacccacccccacgagcgccgaccggacaccacaaaccacaaagacaggaacacaaccaacggcgcagagcggagccaggcacagccaagccccacgagccgagcgggccagccaggcaacccaggaacgaccacacacaacgacgcacagcccagcagaaaacccaagaaacccacaaacggaggcggcaacgacagccccaaaacgggcccccgaaggcgccccgcaaaacaacaaagccgaccacccccccccacccgccgcacgcaagggaggccggagcaggaacagggaacagcaccccccagcagggaacaccccacccggagccccgagaccaaccaccccacaccagcagggccccacaggggccacaacacacaacaaacaaaaaaacccccgccaaacccaaaccaaacgccccccgcgaccgccaacacagcagccaccccacccccagccagcgcggcacacaacacaacagaccgcaacccaacaccaccccgaccccgccggaggaggagaccccacaaccaacaccacgacggcacccgaagaacaccaccaggccggaaaaccccaagaacacacccggaaaaaaagaaccaggaacaaggaggcgagcagaacaaggcccagggacgggagcacaccaaaacagaggaaagacgagacacacgagcaacaccccgcaccaaacacgcaccccaccggcgcaaagaagcgaccgccacacccacggaagcaaagaaagacgcgcaggccgagcccaggacacccaccgaggggccgacggcagaagcaaaccacacagacacgacacacgacacgacacggagccacccacagccacaaaggagcgagccacaaggaggccacacgaccccaccaggcacacccagaccaaaccacgccaaaaccacacacaacacggcgaaacaacccccacaacacccggccaccggaagccccgacgaccggacaccccgagcaacaccacagaaacaccacacgaggccacaccaacagcagaaaaaaacagagagaagcccgccgaagcgaaaagccaaagagaagaacccccaaaaccggaggacaaggagccccccacccaccacacacgaagaacccgaacaaaaacagacaaaaaaggaaggaacgaaccccccaaagcggcaagccaaccccaggccccagaccaaaaaggaagaaaaaccacaaacgcaaagaaaaaggcaaaccaaacaaggcacagcagcgcaagaggcacaagacgcacccccacaagaagagcacacccagacacgccccaaacaccacgcccagccgagcccccaacaccacaacaaaacaacaaacaacaccagacgccaggaaaagaaaccgcgaacaccgcccgccacaccagcccacgccccccacccacgcaccacaaacagacgaggcaacgaccccccaccacaaacaaggccaccaaggacgaaccacgagacaccgacacggcggacaaccaacccacaaccccccaaccagaaccaggcgaccgcgacccgacggacaacgagagaccccgagaagcccccacgaaaaaacacacaagacgcgcaccagagcgccccacaaggcaaaaacagagcaacccggacgcaaaccaaaccaccaccgcacacgaccgggggaacacggcaagccgaaacgggagcaaaccacagcagcccacgccagaaaaccccaaaaacgaa

SEQ ID NO: 262 - RNA, 321 nt, Homo sapiens
cgccaccgcccccgcgcccccgggcggccccgcccccacccaccccccgcgccacccccggcggccgcgcgcaggcggagcgaggcgcccgccgccgccgagccgagccgaggggcgagagcggcccccgagccgccgcgacaggagcaccgccgcgggcgcgccgccggcgcgaggccccgccgcgccgccgggggcagaccgccgcggggcgggaggacgcgagggcccgggaacgcgggcggcgccggcgggcggcgcggcccacaggagaccccggggacggggcgacccggagggcagagagcccccagagcggca

SEQ ID NO: 263 - RNA, 9681 nt, Homo sapiens
ggcgggggagcaacggcccgagccacgaagggcagaagagggccgaccaaggcgacagagccggacaaaagaaagccggccaaccagcccaaaccaaagcaggcccaaacgccagggaaaaacaaacacagggaagggaacaaacaagcaccaacccacccacagggcgacaccccaaagacaccagcggacccccagaaccagaccgcgcacgccacgccaccaagcaaaggcaccaagacaggcaaaggcaaaccgcgaccccccaaggcaccccaccagagacaaccaggcaagcaaaaaccggacacccaccccccacacccgcaaccaaagacagcaaaaaccacccgagacgggccaccgcccaggcggaaggcagggcgcaacggccacgcaaccccgccgcgggcaagcgacccgccagccccggagagcgggaacaggcagcacgccagcccggcaagaagaaagagggacaccagggccaggcggcgaacccgacccagggaccacccacccggccccaaaggcgggaacaggggagccaccagcccggcccaaccacaaaaagagaaaaccgcagaagaacaaacaccaaccagccaacagacaacacaccaccaaaacgcagaaaccgacgcagaaggccccacccgccaccccccgcaaccacaccaacagcagccgaggagccaaaacaggcacccgccaaacccccaagacccacagcaggaagcacgaaggggagggaggaaaccaaggaaccgaccaccgagaacaccgaccccaccgaacacccaccccgcagccccgggcacaagacgaggcccccacgagagacccgccaaggagacccgagccccaaacggggcacacagaggcccaaagagaagaagaaggaaaacccccccagcccaagggaaggggcagaagcagagggcagcgcgacccaggggcagagagcaaagcccgaagaccgcagggcgcccccggggaaccccccgccccaggggggacggccacagcagagagcccaggcagaaggcgcagagccaaacggggcggccgagcaaggacacagagaagcgggagacaggaccgggaaagaggcagggacaacccgagggaaggacaaacccggggagaccccaaaggccccacacaagagaccaggcgcccggcaggaggcccagagacccacggcaaaaggaaaacacaccaccccgccacggcacccccccaaaggcggccccaaggccccaccgcgcagggccagagccccagcaccaaggggccagcgacaccagaggcacgagacgagacagaagggggggggagggagaaggcccgcggggcgaagcggcggaaacggccgagcgaggcacccagcagagcgggggggccgcgaccgccccccgcggacaggccaacgagaggccgaagggcacgggaaagaagaacccaagggcaaccgaggcccgcccagcagcacagagcagggcccggccggcccgggcaggggggagagacgccgcgccgaagcaaagggggaagcaccaccccagaaaagggaccccccacccccggacggcccaaccacgggaggaggaggccgaccaaagagcggacgccccaacgaggagacgggagggaaaaggagagggaacagaccgcccccccaggccagccgaggccgcgcgccacccgccacaacagaacgccaggccagacaagccgacccgggagcgccggcgaacaccaggccgcccccccaggggcgggaccccaaaaccaccaacagaaagggcacgccggcaggccccgccccgccccgcaccgccaccaggagccccgcggcaccgcccccgcgccccccgcagggggcgacgaggcggacccggaagggcgggcacgaggccacggaggaggggggagcagcgcgcgcgcggaggggaggagcggggggggaggggaggaaaggggggcggggagagcaagggcaaccgggcgcacgcgcacgcgcaggggacaccgaggggggggagggcggaggggggggagaggagagagggcggggcgccagccccggcgcccaacggccccaacggcacagccggcgccccagcggcggagcccgccgcgccccccagaagcgcgccgcccaccagcacccgccgacccccacaaagggaccccaacggcccccccagcaagggcacaaggccgaaccaaagggaccaccacgggagcgacaccgagccaaagaggcccggccgggccagggcacgccgaacccagcacgggaggcgaggagagcggacacgaggcaggagcgagacagccgaccaacagggaaaccccgccacaaaaaacaaaaaagccgggggggagcgcgccgaacccagcaccggaggcagaggcagaagaacgcgaacccggaggcggaggcaggaccgagacgcgccacgcacccagccggggacagagcgagacacgcaccaaaaacaaaaaacaaaacaaacaaacaaaaaaacgggggggcccgcagccccgaaaccccaaaaggggccgaggacggaacccggagcaccgccccagaacagcgcccgacaccgagggaagccccagccgccagaagcagagcccagggacccgacgggccaccacccccacggacccaggccccaagacccccgcgaccagacagcaagccggaccccgggaggagcgcggcacaggccgccccagggcgggcgagaacagcggagccacccgggacgggaggcaccagcgcaggacgcccggacggggagaccggagccgcgaagaccaacccccacacgccaagggacaccgccggaaaaaagaaaaagggaaggaaaagagaaccagaacggaggcaacgaccaaaagaaaacgcaccacccagaagcaaagacggccgaaaacagaggccagggggccgacaaccgcaaccccagggggcagccagagaagagaaacgcacaaggccggggacggaggggggcaagacaggcggaggcgcccgcgcccacaccccaccccgaaaagggggaggggagggggaccagaggcccccggccaaagacagaccagggcaggacaggcagaggcaggacgacaggcgaggcggggacaggaccggggaggcgggcaagcccagcacacacccgggaagccggggcggggcagggcaagcgcgaccaccggggccggcccccccggaccggcaccggcccgcaacagacgggcggaaggggcccccccgaggagggcgggaggccaccagggccgggaagaggcgcagaccccgcggagggcgggggggccgcgggggggccggggaaaggggggggggggaggggaggcgcgccccgcagcgcacgcagccccccagggccgcgcgccgcgggcgggggcccggccccgccccccccgccgggcagcggcggaggcggcggcccgcggcggcggcgcggcagcgacggcggcggcggcagcggcagcagccgcgcaggcccgggaacggaaccccagggcgccccggcccccaggcgcagcgcgggaggccgccgggaccgcggcggcggcagcggcgcccgcaggaccggccggggccgaccggaggccgggcccaccgaccccccccaccccccccaccaccccgggccgcgacgcgcagggcggggccggccgaaccagggccgcgggaggcggggcccggccccccccacccgccccccccccccgcccaccccgcccccccgcgccccggccccccccggccccaccccaccccccgccccaccgcccccgccgcccccccacgccagaccgcccccaccgccccccccaggccgcccacccccgcccgccccccccaagccccaccggcgcccccccccccaagcgagggaagcagcggggacagggcgccgggagagggaaagggaagccgccagggggggggagcaagggaggcggggaggaaccgcaggggaggggccccccacggaggacaggcccggagaaacggaagccagggaaaggaggcgaacccgccgaggcgagggaaaacaggagccccaggaccgggagaagacgagcggacccacccaagacccgaagaacaacagcgagcgaggagcaggcaggggggagcgcggaccaccccagcgggcaggggcaagccgggaccgggggcaacgacaacacccgggagagaacaacaggagccagacaccgggaaacccagggccagcaagggaaggcccaacccgggaagccacccgaaggagggaggccgccccaagccaagaagggcagaccggcccagggagcgaggcgaccccggcccagggacgggcggaaaggagggagacaagccagcagaccccgagacaagggcgcccacagaaggaccgagaggggcgggcggcgccagaggggcagacccgacagcccacccacgcggcaggggggcaagcggggccccggcagacggaccccacaaggcagagagcaggagcggggaacggcagaggaccccagcccccccagcgaggggccccgccccggggcccccgagcgggcccccacaaccgccccggagcccccaggaccgccagaaccccaggccacaggagcggacaggcacgcgggagcgaacacacaagaagggggcaagagagcagggagcagacagagcgggggcccgggccacacgccccacggcggcagcgcgggcgagaggggcggccacacaggacggaccacaggccccaagccgccacccaggcccaggccccgccccagccagcccggacccgagcccccccccccccccagccgccgagccgggccgaaccacccccggccccacaccacccgccaggaggacgaacaagcacggcaggagagccgacgcgccagcaaccccagcccgacccgccccgcagccaagggcacagagcgcccggagcaaacccggagcacccccagcgagggaccgcaaggcggcggaggccacaagccccaaggcagaggggaggggcgccgagagacagagaaagcaaaagcaagcaaacacgacgaggagcccccacaggccagcccccagggcccgccgcccaccacaggcaacgacccggccccgggaccccgggggggcggggggggccagcacagaggaggacagaccaagcggcaaccaccggcggaaagcggcaggcaaccgaccgcagcaggagaccaccgccacacccccgggagccgccacacagaagaccgaggaaaaccaagggcggaaggcgggggggaggagccgagagggagcaaagagaaaggggaggggggggagcgcaggaaaggagggcacagggagggggaacggggagagggacagagaagacaaaagagggaaggggagccacaggcgaccccacaagcaggagagggagcgagcccccaaagccacacggccccagggcccccccgcccgccccccgcgagccccacaacccacaagggggccggcccccccccagaaccaccccagcccaggcccccaccagcaggcccggggggcccccccaaggcgcgacccagccccgggggcagagcagcccccgcccccaaggggcaagccccccccagccccaccccccaccgcacagcccaagcccccaacaacggggagcgccccagaccagccgggccccgaccgggccccccggcccccagcccccccaccacccagacccccccccacgaggagccaacacccccccccgcccccgagcaaaacccccgcccacccggccgccccagccaccaggccagccacagcaccgccccggccggggccccgggaggggcccccacggggaggggccggggcaccccccccgcagcagccacccgcagcggccaaggcacagcacccccacaccccccccagcacacagggccgaaggccccggcccaggcaccccagccccaccccacaccgcccccagcgcgccccgcagacccccacgacgagcagaagggagaggccccaaaccccagacggagccgcccgggccccgcccgcccccaaccccccccggagccacccaaccaacccccggcgcccgcgggacccccaccccggccccccaccgaggaagcaaccggggcagagcacacccccccccccaacccccccagggagcccccccagcccaggcaccccaccagccccccgccgggaccaccagggcagcccagcagggccaggaggagagggagccccccaccggcggaaagaggcagccaaggcaaggggaagcagagagccgagggcggggggggcagggaggggccggagagggagaaagggcccccgagcgaacccccacagggccccgccccaccagcgccccaaagccccagagccccagcccggccaaagcccaccgaaggacggggagggggcaggcccggccgccccgccccccggcggggagaggccccccccagcccgagcagggccggcacgagggagcggccccgggagcggggccgcccccccgagcggggcagccccacccccagccaaccacagaggggcgacgggggaggaggacaacccccccgagccccgcacccccaccaggaggaccggccccccagccccaggagagccgaagggcccgcggggcccgcccccaccaccccagacccccacccccagcacccccagcaaccccgcccccgccccgggccgggccccacagcggggaggggagggacgcagagggagccgggggccaagggggagccacaggcgggagaccgccccccacccccccaccagcccccccaccccaagcaaacgcgcgcggcgccacccggacccccccggggacacccccccagggaggaggggggagagggggacagaacaagagagaaaagagagggagcgggaacaaaagccagcaccgagccccggggccggggaggccagcggcgggggaggagacgcaagaagggcgaaaaagcaggccaccacgaggccagcagaagggaggaaagcacaaaacggagaacacgcgaaggagaacaccagcccggccgaggccccccaaccggaccaccaccccaggcaccacggcaacacgacccgggggccccccgggcaaggcccccccaaccagggagacccccccaacccagccccgcggggccagccgcggggagcgagggagggaacacaccggggaaaaagcaggagaaaacgggagagggcgaaaaaggggaagaaagcggccacggaaaagccaaagagaaagaggcgccagccaagggccagggagagaccccgacaaaccaacagggaccgccacgaccagcagcccggagcccccccagccggcagccccggcccccccggccagggggcgcagccccccggggggggagcccccaccccccagaggccagccccagccgccgcacagagcccagggagggggggcaaagcagggagaaaccaaacggaaaagggccgagaagagaagagggacggagagagacgagaacagccagcagacccccagagcagccagaagcccccgcaccccccgagagcccgcccagccccgaaccagagccgccaggcccccccaggccagccccaccccaggccccgaccccccagcccgagcgccacgggagggggcagggaaacggggccggaggggaggagggggacaggggcaaagggaggccaggccagcccggggccgaaagccggcagccggcgggagccggccgacggccccaaagggggacacgggggccaaggacaaaggaaaggccccaagaagaacccaccaggcagcaaaggggagcggcgaaggggggcgagcccaaggaccaccccccccgggccccacgaggaccaagggaggcagaggcggagcgggccaggggccgaggaaaggggggcggagcccgaaacccacacacaagccacccagggcccccgggagagcagaaagccgcgggccgaggagaaaaacaaggagggggccacaaggcggccgccaccggggacagcaagccaaaagggcggcaaaagggcagacagaaagaaaaggaaagccacaccaaagagaaagcccacccaaaccgaaacaccgggcgggagcgccgacacggccccagcagcccacccggaacagcaaagccccgccaggacaaccggaacccagcccacagcccgagaagggggggggagggggagggaggggaagggagaggcggcaggaggaaaggagggagagggagggggagaaaagaagacccgaaccagcaagaccaccacaaccccccgaaaggcagcgccccgccccccgggcccgcccggccgccgccaaaaacaagaggaggaaacggccccaagcagccaaccggagcggacgacccgaggggagagcgaggcgagccgggagccccgccagccaccgcaccgggacagggggggggcacacccccaccagagcacaaagcaacccccccacaacccaccgagccagcagggggcagggaagcacccccccccaccacccccccgcccccccgaagccagcacgaaaaggccgggggggaggaaggcccccccaccaggcgcaaggggaacacccccccccaggcagaagagcacaaagaccaaaacgacagccccccaaagccaacaggccagacaaaccggagcacgggcgcgccccccccaggaaaggacaaagcaaaagcacagcaccccccaccccccaacacccccgcccggccagggccaaagcacagaccccaccccgccccagggaaacacaagcccacaagggagccaggcccccgaccccgggaaaaaaaagggggaagggggcaaagagagccccgggccccccccaacacacacacgcccccccccccacaaaacgccagagacgggagagcgacgaggaagcaacgggccaaccggagcggccagcagaccagcgccaggggcgccccgcccgaaagacaagacccgggagaacggacgcccgggggccccacgccagggagacaccaaaacagagagaaagaaaccggccggccgaccaaagcggaagaacaggacaaaaaccaccgagaagagggcagagccgagacgaagaaacaaccaggcgcccccccaggaaacacagcagaggccacacagagacaacagcaaaggcagaaacaggacagaacagcagccacagaagcgggggggacaagacccaaccccccacaccaggcaaagcagaggacagagggcagggcgggcccacgccacccccaggccgaggggagaccacccgagaaaccaaccccagcaccaccgacacaggggaggggaaaaccccacagcaagaagaacccgcccccaggcaaagggaggggagcagagaagaaaggggaaacccagaagcgaacagagcacaggggagggaaaccccgcccagccccaaaggccaccccagcccaccgcacaagcggcaaagcccccaacgggccaggcacgcagggcgcaccacaaagggagagaggaccgcaggccaggcaacggagaggaccgaaggaacc

SEQ ID NO: 264 - RNA, 18556 nt, Homo sapiens
aaggaaacgagaagaggagccgggacaaagcgcccagcccacgaaaggggccacagaaaaaaaaagagcccagcccgaaacaagaccccccagccacagaagcagggagagggggcagagccaaaaggcaggagagaaaggagagagaaagcagcgaacaaaaagacgcagaaaggagccaaaacagacaccaaaacaggacaaaacccacccgaacaaaaaaacaagaggcacaagaagaacacaaaagcccaacacagagaaggcaccaaaaagaccccacacagaccaagaagacaaggaagagaagaaagggaagaaaaaaaggcaggagaggaaacgaccccgacacaggagaagaaaaagggaacaagaaacagggccccagaggaccccggggcaaagcaaggacagaaggagaaaacaccgggaaacgaggggcaacgcacgaagcagggagaagacacggaaagacggagcgcgccgggagcggcgagggggcgaaggcaaaccggcggagggacccggccagggagccagaggaccagggagcccgccggaaggagaggggccagggcacaggaccagagccaagggaaggagaaagccaagaagcagagaccgggagcggcaaacaggcccagggcagaaccaacccgaggccaaaaagaaacaccagacaaacggcgcacagcgcagaggggaggaacaaagaccaagaccacaaagccaaaacaacgcgggcccaggaaaaaggccaacgcccagaccagaaagcacagaacacacgcaaggaggcagacagggaaaagccggaaacagaggagccgaggaacaggcaagcaaaggagagaaacccccaggaggcacaaaacaaagcaggcccacccccagagccgagacaccagcggagagaagcggagaagggacaaaaacgagcaagaagcaagagacggacaaccgaacaaagggaagacaacagcaggcgaaaagcccaaggagcgggaaacgaggaagccagacagcagaagaaagaaagagcccaaacacacacaagaagaaacccaccaccaaaagaagaggccgaagaaaccagagaacacaccacggacagaaagaaaacaggccgaaagaccagccgagaaggagaaaagaacgacaccagaaccaaccccgacccaaggcccaaaacccggacaggggggagagggacccaaggcacggaggaaagagcagccaaacgcaaagaaaggagaaaggaaaagaaacgcaaaaggaggcgaaggggaaccagcagggagagggcagacaccaggacaggacgggggagaccaccaccagggacgggacaaggggagggggccgccagagagagaccaacaagaggagaaaggcagcaacaaagccccaagggcaaaaccagggaaaacagccgacacaccccacacagcccgagacacaccaaaacaggaagcccaagagggcacaaaagagcacccaagacacagaagagggaaaagacagaggggaaaacagaaaaaaacgagcacacaaaaaagaaccggaagcagccacacggagaggcaccaaacaaaaagaaaaagaaggagaaacgcgacaagcacagaacagggaccgccaagacaacaccaccaacagaccacaaccccagaagaaaagcaggagagaaccccccacaaaagaaagaaggcccggcgaaggacaaagaaggcggagggagacgacacgcgcgaacaaacaccacaaacagcagcgacaacaacacaaaaaccacagcagggaggaaccggcacaggaacgggcccgccaaccacggacgaaacgggaggcgggcagggccaccagagcgaggcccaggcacggggcggcagagcaccgcagcgaggacgaggcccgaccgcggggaggaacagcgggggccccagcccagaggcgccccaggccagcagggcccccacaagcccccacacccacccagggcccacccacaaaaccccgaaagaaaagccagcagcccggagggaacccacaacaccggcgccgcacacaaggggaaggaaacagggcaggcaccaaagggggaaccagggccaggaacgccacacaaggagcaagccagcccaaacccagaaaaaaaaacagaacaccgaccagaacccaaacccagggaaaaacaggaaaccagaccacgcacacagagcgggagaggaggcgagccacaggcggcacaagagccacgagagggaggggggacgcgcacaaagaagaaaagaagagaaaagagcgaagggaaaagaaaaaacaccaacccaaacgacacaaagaaccacagcggcgaaaccacaagcaggagccaaaagggaaaagagacaaaaccagaagaggaaaccaacacgaggaaaagcaacaaaccaagacagcaaaaaccaaaaagaaacaaacccccaacaaagaaagccaaaggagcggagaagaagcagcaacaaaggccaaaaaaacaaaagagaaaaaagaagaaaccacaaaaacaacaagaccacaagggaggcaagagcagacaggacccaaggaggaaaccaagacacggcaacggacagagaaaagaaagaacaacagcacaaagccagaacgcgcaccgaggcccagggaagaaagcagaggggcagcagggggccggcggccccaaaagcgcgggccggaccaacgacgcaagacaagcaaaaaaaccaaaggacaggaacaggagaaaaggaggggcagaaagcacgaaagaagcccaccccagccccaacccacacgcccagcccaaagcacaagcacaggaacaggggagagaagaaagaagaagagggcagggaaaagagaaacggggaagaacgggaaacgcacagaaaggaacccagaaagaagaacaaaagcagcagagcagagagacaccgacaccaccacaccaaaacaacaaccaagcaaaaggagacaccaacaaaagcacagaccacgaaaaagcaaaaaaggaggacgccacaaaagagaaacaggaaagaaacagggaacccacaaaagacaagcacaaaggaagcaaaaaagacaaggaccacaacacgaagaagaaacgaaggacggggaaacaccagaggccacggaagaggacagggagggcagcacccgacaccggcgaaccacaccacaagaccagccagcaggggaccagacaagaagaaacccgagggggcagccaagggcaaccagggcaaccagccaggacaaagcaacaccaaggaagccaaagaacccgcacccacagccgggagaccacccacagcagagaaagccaccaccaccaggcaccagaaggggaaccagcccccaaaaaaggagcaagccacccacaagaaagaaaaagaaaggagaagggcagcggcaggccggcaaggcaaacagagccggaggcccccccaagcaccagcaccaaggcaggacggacagggaccccagcacaagaaaggacaaaaaaggcacacagcgccaccacaaaaggggcgaaaaagacaggggcagcaaacgcaaaaagaccagaagaaaaaaggccggcagaacaacagcacgacaacaccaacgacgagcaaaaagcagccaaggcaaacaggaggcgcgccaaaaacaacaaagcagccagaaggcagaagcgggaggaggccaaccgaagagagagaagaaggaaaggaggcaacagcaggaccccacccacccccgaacacaccacccccccaccgcaggagcgaacacacaaagaaaaacaaacagcaaacaggcaccacgggaaggaaacagccgggcgcacaacgcggcaacccccaacacgggcggacggcaaaggaagcaagcaccggaccagcagcaaccaagacaggaagaccccacagcgccagagcagaagacaaggaaaaggaagaagggcgcacaagagagaaggccccgaaggaaggacacaagacaaaaccggacaaaccaaggaaacggaacggcgcagagcagccaccggcaaaacacagcaaccaccaacccggcagaggggaacagcagcaaaaaaagagcagggaggagaccaaaaacccgagggcaaaaacgaaaacaagaaaacaacaagccaccgagcggcaaagagagaagaagcgagcacgagagcgcccagcaaaaccggggcccccgaaagggcaagcgagccaggagagccaccacggcacgcaaagaaaaacccccaagcgacagccagcacgcaacgccccgagccaggcgggggcaccccagccgcggaagaaacgagggacacccgcagggcaggaagaaaaaagcggcccagaggaagcgcagagcaaaacagccagaaaaagaaaaagcaaagaaaagcaggcaccgagacagacacagggagaaaaccacagcgacaaaagaccgaaaaacagaaacagaggaagaaggcacaccagccaaccagagagaacaagagagcagagcagggccaacaaccccacaacagaaaaaccccagaacagaacagcgggaagggggaaacaacaccagcaaacgccagccaacggaagagacccagggacgaggccagagcagggaacacagcaaacaaacccaagcacaaacaaccccgcaccggagccggcaaagcaaaagcccgccgagcacagaggaaaagccacacaccccagggacaacccaagcaagggaaccggcacacagcaacgcaaaaagacaaggagcagccaggagaagagaaaagccaaaacgaccccccaacagccccaacaagcccagcacgcaggaggcagccaccaccggcaaagccagacggagcgcagaaggccaacaaacacccagccgcggacaagccccggagggccggggagaagaccaaagccccaggagggggaagagcccagcgccgcaagagggaaaccaaacccacgccgccagaagcaaacacccacagagaacgggaaaagagaccaggcccagagagagaggaaaaggcacacaaaaaagagaaaaagagagcccccaagaggccagccggaccccagggcaaagccaagcacgccccagaacgcacgcaagacagagcaagaaccacccccccaacagccacagagacgaaaaggcagacaacacacgaaaggcaaaggccgagcacaaggcaggggcgcacaaaagacaaacccagccaaccaaaaaaaacaccaccaccccaaaacccagaacccagagaacaggagaaaaagaaacgaccaaacagaccaaggagacaagagaagcaagaaacagaacccacaaacaagggcgagccagacgcaaagaggggcccaaagaaaaggagcgaaaaaccagccaggaggagccaggaaccaggcaacacaaacacacgggggagcgaggaaacaaaccacgcacggccgggaaaaagaaaacacaacaaaggcagacaaaacgaaaaaacaacggacgaaggacagcaacaaaagcagagaacccacaaaaaaaaaaggaacgcaaaacagcccaggcaggcccaggaggaccagaaaaagacagacaaggagagacggcccagaagaagcccgaagaccaaagagggaggggaagacagagaacgacaccgacccgaggccaagaaacgaggggcgaacaaaaaagcagaaaggaaacaaaaaggaaaaagcaagaaaggaaaaagaaaaggacacgacaagggaaagaacaaaaaacaaaagaaaaaaagaaaaaaaaaaagacagaagaggaaacagaagaaagaaaaaaaaggagccaggacaagaaaagcacagaggacagaggccaggcccacacaccaccaccaccaccagagcaaccccagcccacagccccacaggaaagcccaacaggcggccaaaccaacgccacgaccccagacaagagaagacaaacaaccaggacaagccacagacagacagaacagcgacagacggccaggagcaaggccaacaaaccagggagaggcaaccgcagggcagacgacaccggacgggcacaacgacaaaacgccaacgagcaccagaagaccccagaaggaccagacgaagggccaggaggcacccggcaagacagacaggaaaggaggccagacaaagacaacacaacacaaaaagagagccaggccacaggcaaagagcccagcacacgaaccaaagaggaagccaggaccaggaagaggggaccggaagaaagggagggaaacacaaagggacaaaaaaacgaaacaacgaccgacacgaagccccacaacacagacaggacacagggccaggccacacaacgaagaaggggagccagaggggccgccccacccaggacgggaaccagagagacacagcagaccaaaagcacgccccccccaaaaccacaaccacaagcaaacacacaggcacaacgcagacaaaaaagaggaaaagaacaccacgagagcagacgagcgagaagaacacaggaagcaccgaaggacagacaggagccggagaaaggcagaggaagggagccccagcgacagaccgagacacagaaaaaagaagcagaaagaagcggagacaaagaggccagagggagaagcagaaaggggacaagggacacgagacgccgccaaaacagcagaaacggcagaaacaacaagcaaagccaagcaaagcaacagaggcaaccccacgccgaacccacaaggggacgggcaaagcaagacaaggcccaaagggagccgaacgccccagcacaccgacccaaccgaccaagcggcccccgaaacccagcaacgggcgcggacagccaggcgcccaaaaacccgggccaggcaggggcagccgaaccagcagagaggccaaggcgggcgaacacgagcagaacgagaccagccgggcaacaggcaaagccccaccaccaaaaaaaaaaacaaaaaaaccaagggccgggaggccgagcccagcacgggaggcgagggggagaacacgagccgggaagcaaggccgcaggagccagaggccacgcacccaagagagagaggagaccccccaaaaaaaaaaaaaaaaaaaaaccgccaccagaaaacccacaacacacccaagccaaagaaccccagacaccgggcaggaaacagccccacggccaggaagacacaagccaagggagagggcccccaaagagaaccccagagaggaggaggcaaacacagaacacaaagagccacagagggcccaacaacaaaacaaagaagaagaaaaagcagcaaaagggaagaagcagagaggacagcagggagaaagccaaacaaaggcaagaaacccagccaccgcagaagcaccacccaggcagaccaacacgccccaaaagagcgaacccaggaaggcaaagcagaaaaaccagggaaaaaccgggaccgaaaagaagacaaacaaaccaggaaggacaacagccgcaggacagcaaagagaggaccccaaacccagcggggaccacaccccacacgccaacaccgaaccacaaccagaggcgccgggccggccacgccggcggcacaagggaaccgcggcccgcagcgcagggcagcacccaggggcggggccggccgccggggagcaacagcacacaggcgggcaaagagccccccggccccacagccgccacgccgcaaagccacaacacgagagccaggacagccccacggaggaaaggaccagccaccacccacacaccaggcggcacggaaggaaagaagaaaacgaggaccacagaaaagaaacacccaaaaagggaacaaaaaaacaccacaccacagaacaccccccccaaaagaaccgaaggaagggccccccccccacccggaaacaagaaccgaacaacacacccaaacaaaaaagaaaagaaaaacaggacgaaaaccacgaggccccccgagagcaccgacaccaaaaaaaacaaagacccaaccccagaagggcgagacaagggacacggcaacgcagacgagcaacaaccaaaggcagaaaaagagcccaaaaaaaaacagcaacaggagaaggaagccggcggggcgagaaaagaccggaaccaggaaaaggaaaaacgaaagacagcaagaaaaaggagccaggacccacgaagacagaccaccaaaaacccaccaagcagacagagaggccacgggcaggaagggggaaggagggccggccaaaccagacaagcgcgagcacgaccacaagaaacccccaggcggaagcagggaaaaacgacgcagagggacggaaaaaaaagacaacagcagcaaacacagcgaggaaacagcaccccacgaagagacccccccaacggcaccaacaagcccccaacaggggcacgagggaacgcaagacacccaagaacggggaaggagggggcaaacagacacaggaagcaaagaagaacaaccccggagaaaacgcaccgggacccggcccagggcgggccacagccagagacccccagcccagccgagaacaccacccacacccccccaaccccagacccaggagcaggcgcgcccccacacccgccagccagccagcagcccccgggccccacagaaaaaccccggcgagccagacccacccgacgaggcgccccggacacacccgaggcacccagcccccgagcaaacaccgcccagaagcaggcccgaaggggccacccccagcgggcaacaacccgaccggaccaaaggcacaccagcgcacagcaccaccaaacccagaacacaggaaaacccgccggcaggagaaagagagaacacagacaaaggcccaaagcgaacaacacccgacggaaggccccccacaaaagcgaagcaccaagcgcacaccaaccacacaccgccccaacaacagaaaggagaagaggacaaaaaaacgccccccccccccccccccccccccccccccccccccccgccgacggcccccggcgaggcggacgacgcccgaccggcggcgcaacccccgccgggccccggacccgcccccgccgccgaggccgggagcaggcaagcgccgccacgccgacggcaggggagacggggcgccgaggccgggcggcccagcccgaccccaggacgcccgcccggccccggagggcgggagcagacggagccgccaccaagccaaggcccaagcggaggcagggcggaccggcagcacaaccccacccccagccgccgccggcccccaaaggcaagaacagcccgcccggcgccaccccgcaggaaggaggagcgccgccggccgcccacgcgggaggagagcccccgccggccgcccacgcgggaggaggagcacccgcccggccgcccacgcgggaggaggagcgcccgcacggccgccccgcgggaggaggagcgcccgcccagccgccacccgccgggaaggaggagcgcccgcccggccacccgcgggaaggaggaggcccgcccggcagcggcaacccaacggaaggacaccccgcagggacccaacagcccgaagagacagcgaccacgagaacgggccagagacaaggggggaaaagaaaagggggaaagggggaaaagaaagagagacagagacggcggagaaagaagagacaaggagacccagcacaagaaaaaccgccgggagcgaacaaaccacccccaaccccggcccgaaacaggcggcaaccagggaaaggaaaagggcggacaagaggcgcaaacagagcgaaggcagcagccgaagagcacaccaccccaaccaagacccagggacacaaaaagcggaaggccgcagggacccgccaggaaaaccagagaccgcaggacgcgacccccacaaccagacccgccacacccccaccaagaaacacccaagaagaaaaaaaaacccaaaaaagacaaaaagcaccgaggagccgcggcagaagccgcacagcagaagaaacaccacagaggaacaggcaaccacagaagggagaaaagcaaccaccacgacaaagggcaaaccagaacacaaagaaccaaacaaaacaagaaaaaaaaacaaacaaccccacaaaaagggggaaggaagaacagacacccaaaagaagacaagcagccaaaaaacacaaaaaaggccacacacggccacagagaaagcaaacaaaaccacaagagaaccaccacaccagagaaggcaacaaaaaagcaggaaacaacagggcggagaggagggagaaacaggaacacacacggggggacaaaacagaaaccagggaagcaggggcgacccagggacagaacagaaaaccagacccagccacccaacgggaaacccaaaggaaaaacagcgcaaaagacacagcacacgagagcagcacacacaaagcaaagacggaaccaacccaaagccgacaagaagacggaaagaaaagggcacacaacaccaggaaacagcagccaaaaaaaggagagcagccaggcacaggagaagcggaaaccacaccagcaaacacgcaaggacagaaaaccaaacaccacagccaccaagggggaagaacgagagaacacaggacacaggaaggggaacaaacacaccggggccgggggggggaggaggggggagggaagcaaggagaaaccaagcaaaaagagaaggggagcacaccgacaggcacaaaacaagaacaaaccgcacaggcacagacccaaaacaaagaaaaaaaaaaaaaaaaaaaaaaaaaacagagaacaaaaaaagacaaaaagaaaaaaacaaaaagaaaaaaccaacccaaaaccagaccaaacagcaagacgcaaaaaaacacacaacaaccaaccagcgcaaaaacccaacaaagaaaaacaagcaacccaaagccggcagaaagggcacagacccgcaaaagaagcaaaaaggacaagacacagaggaaaacaccacaaaaaacaggaagacaaggcaagaaaaaggcaacacgagcaggaaaaaagcaaacacaagaaagacaacaagagccacgccacaacaagaagcaaaccaacgaccagacacaggacagaaagcagcaaaggccagcccaagccccccccgggccagacaaccacgagagaagggcaccgagcacccaccgacccccaacccgcacaccgggaccccacacccacggacaggccgagcaggagaggccagcaacaaggggacccaaaaaacagagccaaggaacgaacaagggacccaggcccaccacgcacccgccacagacaaaggccccaccacccaagaggccccaccaccagacaaaggccccaccacccaagagggaaaggaaagaggagggcacccacccaaaacagcgcacagccaaagcggacacagaaagccagagaacaagaaaccgaaagaaaaaaaaaaagacacaccccgagccccggcagcagacccaagcgaccacaccaccccccgaagaaccgaacccgcaaggaggcacacaaccgaaaagcacccacggaggaaacacgggacaaaccaggagacccaacaaaacaccacagccgcgcaggcgaaaagaaaccaagcaagcccgaggaaaggacccccccggcccagaccgcagcgcaggaaagggaggggcaggaacccaccaggaccagccagacggggaaaaggaaaaacagccacaaccaaaaccgccccccccggcaacccgacaaagacacccgaagcaagcgggacgccaaaaaacccgcggagaaaaagacaaccaggccaagaccccacgacagcacggcacccacgacaagggcccggcaccaccagcaccaacccgcaaaaccaccaccggccaccaagacccagcaccagcaaaacaggaaagcgaaccaaaacacggcgaaagggcgcccagacaggggggggccagcagcgaacggaaagccaaacaacgacaagaaaggacgggaaacagacccaggaggcagacgaagaaagacggacagcagagaggggaaagaaaaaaccccaggccgccggccgggcccagagacccccaaaaggcgagcaagcccccacacaaagccgaggaggcgaaggggacccccagagcagagagcagaaaaccaaacaagcagaacaaaaaagacccgagaacaagccgaaggagaacagaagccaggacaaaagaaccccgcacccccaccagagcagaggggaccgcacccgaaaaccagggacccagaggaaaacgagacccaaagcggacccaggaaggcccaaacagccaaggccaaaccaacagagccaacaagagcccagagcaaccgcccagagcggaaccgaaccgccgccacaggggcagcaggcccgggcccaaaccgaggacaagaagagcggacaagcagcccaggaggaggaaggaaacccaagcacacagggaccagaaaccaaaaacgagcacacagcaagcagagccgaaaaaacaaaaacaagcagggggccagaggagcaccggcccaggcggagcagggcggacggccacgccgcccgcccccaggcaagagacccgccaagccccccaagagcggacaaaggggccaccagcccggcaagaagagagaggggcaccagggccaggcggccgaacgccgacccaggggacccgcccacccagcccccaaaggcgggaacagacggagccaccagcccaggggcagaggaggcaaacgaaaggcaaagaacacagcagacccagccggggcaccaaaaaaggaaaagaaaggggaagccaagaaaaaaaggaggcaggcaacaagaaagacaaccaaggacaaaaaccagcccaaaagaaggagacaccaggcagcaagagcaagcagggaggaagggccagccagaaaagaagaacaacaagagaaaccagcaaaaaaaaaaaaaagagcccccacagaagcggaacgcaaaaacaacgaccaaaaaaggcaacgaacggcacaaaaaacacagccaaagccacacggaacggaaaagaaggaaaccaggaggagccccagccggaacaaacaagggaacagaaacaaaaggaagcgcaacacacagaaaaccacgggagaaagaaaagacgagaaggggagacgcacaaaaacccaaccacgaacacaaacgcaaaggcaacccaaaagaagagaaaaggcaccgcaaacaccaagaacgaaaacacggaaacaaacgaaaaaggagcaaaacgacggaccgcaaccaccagcgaagacgcgcgaacagacccggagccgcagggggaggggaaggagaacagcaccccgggagaaagcccacacccaacagccaaccagccagcacgcaaggaaaaaacaaaaacaggaaacaaaaacaccaccccagcaaggaggaaacagcgacgcaaacccgagaaagaggagaaaaaaaggaaaaacaaaggcaaaaacaggagacaggaaacaacagaagaaggaacagaaaaggcagcgccaagaaacacacgcaaaaaaacacagaacaacacagcagcaaaacaagaggaaaaaagagagcgcaccaaaggagcgcagaaaaggaaaaggcgaaaacacgaaaagcacaggacaaacacaggaggccaggggcggaaccaaggagagcaaaccgccagagggccccaaggaaaggaggaccagccccgaccagcgaggcagcaaaccaggaacccgccagcccgacaagaagagaagaacgcgccagagagcaccgagaaaccagaacaaaaaccaaagcaagccaaaaagaacagccagcgaaaccggcagagaaagagcgaaacaaaaagcagagaaagaaagccaccaggacccaaaaaaggagaacccagggacgacacggaacaggaggaaaggcaaaaaggcaaaagacgacagcaaaaggccgaaaaaccaagcgaaagaggaaacaagaacagagaaaagaaaaaaagaagagaagcgacacaacggaagaaaaacaaccaagcacagaaagaaaccagaagcacaccaaccagaaagagcgagcaaagaaaagaacagcacaaaagggcaaaaagcaaagggaggacaaaacacaagcggaccaggaggggcaaggagcagcgaaagggacaaaggggaaaaaagaacagaaaaaaagcaaaagacaggaaaaagaaagggagggccgacaaaaaacaacacgcccccacgaccaaaacagaaaacagacccgagccaaaaagaacaaagcaaacaaaggacacaacaacaaaaacaaagagcacaggaaagaaaaaacaacaaaagcgcgcaaaaaacacagcacagagcggaagcagggagcagggccaaggacaaaaacaaagacacggcaggagcgcccgacgacccgcagcaacaaaaggcacaagaagaccgacccaaagcggaaaaaagggaccgagaccaagaagcaggaaaggcacacccgacgcacggggagagggccacgccaagcaccgccagaaggggcgccgcaaagcacagccggcaggaaggcaggacggggcaaacggccgcacaacaggaagaaccccccaaacagcaaccgcacaggaagcaacaccaaccggaagagagggaaaagacgaaaacaaagacccggcgggcaggggccagccgaacccagcacgggaggcgagggggcagacaccgaggaggagccagaccagccggccaaagggaaaccccaccacaaaaaacaaaagagccggcagggggcggggccgaacccagcgccggaggcgaggcaggagaacacgaaccgggagcggaggcgcagcagccgagaggcaccacgcaccagccagggaagaacgagacccaccaaaaaaaaaaaaaaaaaaaacaaagaccagcccaaaagcacaaaaaggagcagaaaacaagccaccacacacaggaccaggagaaaacgagaaaagaggaggaaaaagaaaccagcccccgccggcccggaccccacggaccagagagcaaggagggaggggccaggaaaggggcagagccacagccaggcccaggacacccaggggcaggacgggaacagggcaacagggcagagaaggaaggcaagccacaggaggaaagcagacaaaggaaggagaaaccagggaggagaagcggggcagagcccgggcacgaaggagcgagaaaagcaaaggacaagagggcaaggccagaacccaaccaaagagaacggaagaaagcgagaccaaaaaaaaaaaaacaagcacagaacaaggccagaacaaacagagaccccaacgaaaaagaaaggcaaaaaaacaaaaccagagggggcaaggggagcgggaccaccccgcaggacagcaaagagaaccaggacagcaaagagaagaagagaaaaacacacaaaaccaacaagcaagaccgaagaagaaaaagcacccgaagaaggacccagagagccacaccagaagacgagcggaccacaaggccgcaccaaccaagaccaagagaaacagaggacgaacccccccaacaggacacgaggacagaccaggcacagcccccccaacacgacaaacagcacccagaggaaacaggagaagaggagcccaccaggaagggagcacaaaagaccaccccggaccacacccccggcaccgaagaaaagggagggaacaagaagacaggaaagggaaaacaccagacaaaaaaaaagccaccacgaccaaacacagcccgaaaaaaccgagaaaacccaagaagaaggaaagggggaagagaggggagaacggccaacaaaagcggagcgaacaaaaaaaacaacgaaaagcccaaagacaaagccaaggaaggcaaaaaccggcaggcaaaaaagccagaaccaccaaaaaagacaagaaaagacaagaggacaggagcaagaaaaaaagagacagaagggaaaccaacaaccaaacaacaccgggggaaacaaaccccagaaaaacaaaaaaagggcacagcacaggggacggaacaccggaaaccccagagcgaagagaggacgcaacagaacaagaggaacaaaggaggaaaaacaggaccgccaaaggcacccgggcaacgacacagcaaggaagagcaccaccaggaaggcaaggccaaggaacacaacgcgaacaaacgagagaagcacagaaccaaagagacaaaacgaaaccccaaagcacagcaaaaaaggaaagggacccacccaggcccaaccaaagcaaccaaaggaacacgaaagagaaaaacaaaacgggaaaaccaaagagaaaccaacagaggaagacaagcaagagcgcacagaaggcaagcagaaagcagaaagcagcggaagccacgaccacagacacagaaaggcacagaaaaggcgaaggcagaaaaagagaccaaccaaagcgcagacaaaagaaagcgggaaaccagggaaaccacgaaaaccacagcggaaagacaggagccagagcaacaagaaagcgcgaacaacaaaagcacaggcaaaaaaagaaaaaagacaaacgacacacaaaaaaaacgcggcacaaaggacacaacaacaagaaaagacaaccacagaagggagaaaaagcaaagaaacaaaaggggagaccagaaaaaaagaaccacaaccaacaacaaccaaaaaaccccaggcaaaaaaaaggacaagggacgagagacaccaaagaaaaacaaaggcaaagaaacacaagaaagacacaacacacgagaagagaaagcaaacaaaacaacgaaacaccccacccaaaggagacaacaaaaaaaagaaaaacaggcggagaggacggagaaaggaacacggccggaaagaagaaaagggggcacaggggaaacaaagagacccagaaacaaaaaaaagaacaccgaaacagaacgccggaaacccccaaagaaagaagagccagaaagaagacacagcaagcaccaagcaaagccaaaaggggaagcaaccaaggccacaacagagaacaaaaaacaaaaacagaaaaaaaagaaaacagccaaaaaagagaaaacgacacgcacaacaagaaaaccgaggacaagcaaggaaaaagccagaaaaaagaggacaagacagaccacgaggagaaagaagacaaggggaccaggggcggagggaaggagaagggacgccaaggggaaacaggcaaggaaaagacggagagggaccacaaggaagaacacacgaacgacacaaaagaaaagaggaaaagaacacaagaaaagcagaagcgaaccgcagagggggaagggggaaggaaggggcacaccacagcaacccacaaaaaagagggggagaaaggagaaaaggcagaaaaacggcacaagggggagagaaaacacccagaccaaggggaagcaagacgaaacagaaaaccccaggcagagaacgagggaaggacaagcaaaaaacacaccaggaggacccagaaaggagaaaggcagaaaggaaaaccaaacagggagggcaaggccaagaaagcaaaagccagacacaaggaaaccccccagacccagaacgagcaaacgcgacaaccaagaagaagcaggagccacaacaggacaaagaccagacggaccacgacacccaggcacccacaaaagaaacacggaacccagagacgcccagcccagaaacggcaacgaacagaggagaagaaaggaagccaggacaaccagaagaagaggacaagggaagaaaacagagacacagggaaccagcacagaaacaccaaagcggcagaaaacaggggcaaaaagacaagccagaagaaaacaccaaaaaaaaaaacagaggccagagagcgaaacacccaagaacaaagcacacagaaaaggaaaagaacagaaccaggggccgagagcgccgccggagggacgggggaaacgagaaccagaacaaagccagcaaggcccgacgagaaagacaagccccaccaggcccccaaacgggaaaagagccccaaagagagaagcaacacacgccaagaggaaaggggacaacccacagggcgacccaaaaacgccagaggaaaacaaacaaaccgaggaaagggggagaaaaagacacaaacaagaaaagagagaagaacccgcgccaaagacaaaaccaaaaggagacacgaagcacaaccagacgacacacagaaccacacgaacccaaccaaaaaggaaagagcacaagaggagacaacgaaaagaaaaagaaagaaggcaagcaaacaggaaaaaaagcacagcaagcaacaaacgcaagaagaaagagggcaaaagagaaaaaacccacggagaacgcccccgaggagagaggaaaaaggagagcagacagaaaacaaacgcgaaaaccaccccaaacgcccagcgacaagccacaaccggagcacaggagaagcaccgaac

SEQ ID NO: 265 - RNA, 8542 nt, Homo sapiens
agaaaaaaaggaaaaaaagcccccccaacagccaagaaaaaaaaccaaaaaaaaaaaaaaaacaggcaagcaaaccgaagaaaaaagaaaccaaagagaaaacagccagacggaggaaaaagagaaaaaaacccaaagcaaaaaacagaacagagggcaaaagaaaagagaaaccacaggaccagcagacacagagaaacgaaggaaaagcaaggcaagaaaaggcaaaaaaccaaaaagaaaaaacagcaggggagaagaagagaaacaaaggacagaagaaagggagaggaaacgaacacagagggaaggagagaggcgggggaagaccagacaagaacaaggagcagccaacagaaaaaaaacacacgggaggcgagacgggcgacaccgaggcaggagcaagaccagcggccaacagagaaaccccgccacaaaaaacaaaaaagcggcagaggcgggggcgaacccagcacggggagacgaggcgaaagaacggaaccgggaggggagggcagaagcgagacggccagcacccagccggggacagagcgagacccacgaaaaacaacaacaacaaaaacagagaacaaaaaaaaaaaccagccaagccaagaaggagcacacaaaaaaaaaaaagagacagggcccacgacccaggcggaagcaggggcaacaagcacgcagcccaaaccggagcaagcaacccaccaagcccccaagagcgggacacaggcagcacaccagccggcggaaaaaaaaaaggagagagagaagcaggcccaggggcggaacccggccaaggacccgccgcccccaaaggggaacaaaggagccaagaccagacagaagacaaggagcacaagcagggacaggaagcagaagacggggcaagggggcaaagaccgaacaagaccaagaagaacaaaaaggcaaaggcagaagagaagaaaccaggcagcagagcaacgccaagcagcacaaacccaaaaccagcggcacgaaaaacccccaaaaccaaaggcagcgaagaggcagcccaaacacacaaacgagagacacaaacaaagagaccaggaagcaagcaacagggacaaccccagggcaggaagaaaacaccagcaaaggaacagagccccgcagcaagcaaaaccaaacaaaaccaaagggaggcaaaagaggcaaccgcaaaaaaaaagggaacaagcagaagagaaggcgaaagagaaaagagcgaagcggcacacgcaaaagaacacgagacgggaaaaaagaaaagaagaccacagcgcaggcagggaggcccaggaaacacaacaggcgaagggaaggggaagcaaggcacgcacaggcagcaggagagacagaggaggggggagcacacaaaaccacagaccagagaacaacacacacaagaacagcaaggcaagaacgcccccagacccgagaggaacagcagcggcagccccgcagccccaccaccggcgcccccagccgggcccaccggccacacaaggagccccagcccgccgcgcacggggagcccccggcggccaaggcggagcggcccccagcgggggaggagggagggagaggggggcgggaacaggcaagccgccgcgggggccagcagagcggggggcggggcggcagcccccaccggagccgcggccggcccccccgccccaggagaaggggcagcaccgggccagcagcgcggaggggcgccaggcccccagcaggccgccacacaggcgcggcgacccccgggccagcgcccccgccgggcagggccgggaccgcagcccgccagccgagccccccggcagccagggcccgggcggccgagccccccaacgagcaccgcccccgcccacagcgcccagcccacaacgcccaagggcgaggagggggcacagggcgggacggcgggcagcccaccgcggcccgggcaggaccacggggaagccagcgggccgagcagggggacggagaacccgcagcaagggaggaggcaccaacagcaccggccagccaaggggaacacaccaacagcacccggcagccagggggaagcaccagcgacaccgaccagcaacggggggacggagaacagcagcaagggaggaagcaccaacggcaccgacagccaagggaaagcaccaggggcaccgacagaacggggggacggagaacagcagcaagggaggaagcaccaacggcaccgacagccaagggaaagcaccaacggcaccggcagccaggggaaaaaccaacaacaccgacagcaacagggggaggggagaacggccagccagggagaaacacaccaacagcacccgcaaaacagaccgacagcccgaaaacagaccaacaacccgaaaaggaccaacagcaggaagggggggccagacacgagaacaaacgcaggcgccaagccagcagggcaacccgcaggccccccacacgggaagcgcagccgcaaaaacgacgccacgggccacacgccagagcgaaggccaccgcgaaagcgcagcacccgaagccagcgagaccacgaacccaccgggaggaaaaacaacccagacgcgccgccaagagcgaaacaccacggcgaaggccgcagccacccgagccaggagaccacgaacccaccagaaggaagaaaccaaacacaccgaacacagaaggaacaaacccggacagcagcaagaacaacaccaccggagggccgcggccagccgaagcaggagaccaagaacccacaaccggacacaaccaacacccccaccaggccccccaacacaggggacacgacgagagagagggacacagaaccaaaccaacacagccgaacacggagaagaaaacacaagcgaagaaacaaagaacaggcgaggcgccacaagagagggaagagaagcaccagaagcaacacagcacacgagaagcaccgcgacacacacgagcgcaaaagacaaacagcacgagagaaggcgccgggccaggcggaggcagggggacggccacgcaccccgcccccaggcaaggacccgcccagcccccgagagcaggacacaggcagcaccaccagcccagcaagaagagagaggggcacagggccaggaggccgacccgacccagggacgccgccggcccccaaaggcgggaacaggcagagccaccgccccggccgcacacaaggagcacagacccccaagaacgggcacaccaggcgcagacgggaaaaggagcagaaaaaaggagcgccaagccgggcacaacaaaccgaaaacgaagccgcaaaacccaaacaaagagaaaaaaagaaacaggaccagggacggccagccgaaccagcaggggaggcgaggcaggaggaaacgaggcccagagcgagacagcgggcaacaagcaagacccgcccacaaaaaaaaaaaaaacaagccaggcaggggagagccacggccagcaccgggaggcgaaggggaggacgcaagcccagaagggaggcgaggagcagagaccgcacccagcggggacagacaggaccagcccaaaaaaaaaaaaaaaaaaaaacgaaagaaggcaaaagcccaaaagggaacacaggaggaagacaggaaaaaaacaggacacgcaagcaccaaaacccgccggcaacaagagaagcaaaacaagggcaacccaggaaagaagaaacagccgcggagaacgaagccaggcaaagccagcaccgaagccaagacacaaggaaagaaggccaaagaaaaggaccacagaggaagcaccaaaaccacacgcaaaacaaacccacggggcgcaaggcagacagggaagacaggaaccgaaaaagaggggaccgaaagggaaagaccaggcagaaccaaaaccagcacagcaagagcaaagcgcaaaaggccccccgacaacgaaaggacagggggaaagaagaaaacacacaagccgcaagaaaacaggaaaaggacaaagcaaaaaacaggaagggaaggaaagaccacagacaagcaaacgaccccacaaggagaggggaacagaaacagcaacccagaaaacaaggaaaagcggaaaaagggcaaaccccaaaaaggagaaagcgcagcccaccagcagacagcggaaaaccccaagcagcggcagaaaacaaagcagcagaaggcgaaaagacaaagcgcagccaaacaggcgggccccaggacgccccccgaaacacccccaacgagcaagcaacccgcccaaaccagacaaagagcaacccaggaagcggcagaggagggccccgacccccagacgcccgcacaaccggaccggcaccaccaacagacccagcgcccggagcaaaggaagcccccacagaggcggacagcccaagaaagcgcccaagaaggaaacacagcaggaacagccagagaagaaaaggaagagcaaggaaacgggggggcagcagagaggcgggagaagaagaccacagcagcacccaggaaagaccacgccacaagagggaaggaaggggcaaaagagagagaacccagccagggaaagaggagggagacggagcgccggcccaagcggaggcaaggcgcgacggccaccgcaaccccgcccccggccaagcaacccgcccagcccccgagagcgggaacaggcaggccaccacggccggcaagaagagagacggggcccagggcaggcagccaaaccccgacccagggaccgcccgcccggcccccaaaggcgggaacaggcggagacaccggcccggccaagaggagaagaaggaaggaagggaaggaaaaaagggacaagaggcaaaaaagaggaggcgaaggccagagagagcaaggggacgagaaacgagacacagcccaaaaagagagaggccagaccgccacagggaaggagccgaaaggcagagcaagagaagcaggaaggaagagacccccgagaggcaagagaggacgcgaacaacggggggcaggagggacccagcaggaaaacaagaaacgaaccccaaaagcaaacacaacagcccggacagaagccacaaaacaaagcaacaaaacgaaagagcaagaggaaggggacgcgcccacaaaccagcgaagaaccccagggggggggggccgggggagggaagaggggagggcccagaaggaacaccacccagggcgccggaaggaggaggaggagacgcgagacggcaaaaaggagcagcgggcgggggccacgccgaacccaggacgggaggccaagggggcggacacgaggcaggagacgagaccaccggcaacacaggaaaccccaccacaaaaaacaaaaaaagccggccagcggcacgaccgagcccagcagggaggcgaagcaggaaacgcgaaccgggaggcagagggcaggagccaagacggccacgcacccagccgggcaacagaggagacccgccaaaaaaaaaaaaaaggagcaccccagcgcccgcccgcccgcaggagacgcgccccccgccccaccagggaagcccgaggcgccccagaagcagaagcgcaagccgcacagccgcagagccaaaaaccccacaaaaccccagagaacaagcagggagaacagacaaaccgaaagaaggacaaaaggagaagcagagaaaaaaaagaaagaaaaccaagagaaaaacaacacaaagggaagggacacaaaaggcacccagccagcgagaggcaaggggaggaggaggaggcagagaagggaggcgcgccggggaacaaaggccccaggaaaagcacgaccggaaacccgcggcaagggccacgaaagacaacacaggccagaaacacacaccgggcagaagcaacaaccggcggggggagacagagcgccggcccaggcaaggcagggcacgaccagccacgcaacccgccccgggcaaggaccgaccagccccagagcggcaacaggcaggccaccagcccggccaaaagaggaagggcaagggccaggcgaccaaacccgacccaagcaaccaccgccggcccccaacggcgggaacaggcggagccaccacacccggccaaagcaacaacccgcagcgcaaacaaaaagcagcgggagaacaagcgcgacacagcagacagggcagaggggccgggaagagagaaacaaccaaaccgggcaccccgaaaggcacgaggaggcggcccagggaaggcccccaggagagcacgcacgggggaacccgaggaagacagcccggaagaggaaagacggaaaaacccccagaagaaccacacaaaacaacccccaggcgcggggccacgccgaacccagcacgggaggccgagggggggacacgaggcaggcgcaagaccagccgaccaacagggaaaccccaccacaaaaaacaaaaagccgggcgaggcgcagccgaaccagcaccgggaggcgaggcagaagaaggcgagcccaggaagcggagggcaggagccgagacacgccaacacccagccgggcaacaagaacgaaacccgccagaagcaagacgaaacaaaacaaaacacagccacgggagaggaaagaggaaacagcaaaaggcacagggaccgaaaggggagaaacccagagcacgaagaagaaaaagggaagaaaagagaaggacaacaggacaagaagcaggccgggacgaggaaaaaggccaaggcagcacacacaaagcaaaaagggcgagaaaagggcgggcagaagggagaaaaacacccagcacggcagacgcaagagaacaccccgacaaaaaacagcagaaaagagaggaggcgagcacacgacaacccacacaggaaaaacagccgagacgcccagaaacggaagccaggaacgaaaagccccacacacagaaaaaccaggggaaaccggaaagcgacgggaacccaaagaaaccacaaagaaagaggcaaagagacaaagggggaaacgcaacccaagcaaccaagaaacaaaaaaagcagcaaaacaaaccaggggaccggggagccaggcggccaaccgaaacagcggagggagacgacgggacaacccaagaaaaaaaggcaagcacagaacccaaaacagccggccggggagaagaaacaaaaaaaaaaaaacaaaggaagggcaccaaaagaacaaggaccaaaagggagagggggacgagaagcagagccgagaagggaccccgagacggagcccacgcacccaggcggaggcagggggacggccacgcaaccccacccccgggcaaggacccgcccagccccccagagcgggacgcagggcacaccaccacaccagcaaagaagagagaggggcacaagacaggcgccaaacccgaccgaaggacgcccacccagcccccaaaggcgagaacaggcggaaccaccagccggccggggaggggacggcaggacggggagacagcgcgggggaaaaccgaagagacacagcagcagggccgaggaggagcgagcaggggaagcgaagcggccagcgagcccaggggagccgaagggaacaaccccacagcagcccccgaagcaagggcgggccgcacaggcaccaggagaacaacaccaaggaggcagcccgcaacccgagagggccagccaagcacggggggaggagacggcagaaaggggagggagcggcagcaccccccagcagggggaggaaaggcgcgaagaacccaggcaggaaaagggccgacccgggcgagagggagaggaccccgggaacgcagggagggccccaggggagcacaaagcccagaccccgcgcccccccccacccaccaccaccggccaaagaagaacagagaagagagacaaaacaaaacaggagagcaacgggggggacagcagaaacggcgaccaccaaaaggggggaacgcgcggaggcaaccgagcacagaacagaacgcagaccagaagcaggcccagccccgggagcacgccggacgggcgggagggaacaaccaaaaaaggcagccaacaacccgaagaacagagagggagaacaggcggggcaagacccagccaccccgaacgacccggagaacaaagagaaaggaaggaacgcaaagacaggaaagccagcgcccagcacgaaagaaaggagaaaaaaagccacacagagaacgagaaccaaagagcacaaagaccccgcaaccagaacgcaacacagaaaaaagaaaaagaaaaaaagaaacggcaagcagaggcgccgaagccaaaaaacaagggacaaagacagaagaaggagccgcaacaacagaggggcaaaaacaggagggacccaagaggcaaggcgggcagccaaaccgcaccacaacaccgggcggaacaggaacaacccccaagcccaccccaacacaaaaggaaagaaccccccaagggcagcaggaggcgaggggcggagacaggcgcaggcccagagccacggcgggcgcaggcgccacaacacacagcgccgaccaggcacaagcccccgggccgccccgaaaaga

SEQ ID NO: 266 - RNA, 189 nt, Homo sapiens
acaaaagaacgagcccgaagaagagcaaagaaggaaacacacaaaaaccaagggaacgggaaagcagggggaaaccgagaaaacggaagaagagaagaggcaggaccaaagggagggaggggcgccccagaagaaaaggaaacacaacggaaacacgaggcaacgcaaaaacaggaccaacaaacaaaa

SEQ ID NO: 267 - RNA, 812 nt, Homo sapiens
aagcagaacacccagaaaccaaaaacacggaaaacggaaagccccaaagaaaaccgagaagcaggcagccgaagggggaggggagccaggcaccacgaccccacagcggggaggggggcggaggacccaaccagcgcaggacccaggccgcagaggcgggacgcagggaaaggccccgacgccggacccccgcagggcggcgggagggggcgccagaccgggcgggggcgcgcggcccgcacaccgaggacaagacccgagaaggcgaggccccgccccccgccaggcccgccccccaggagcaggaaccgcagcgccccagccagcgcagggcgcccagccccggaggggacccaggcccgccccggacggcaccggacccccgcccaaaaaccaacagagaggaaacgaggcacagcccccccagcagaggaaccagagaaccggccgccagcagaccaacaacgggcaggccagaagaaggcagcaaggggagacgaccacagaacagcccaaagcccaaagcacaaggagaaaagaaccccaaccacacccccaccccacccaggacagacaggaccccgcacaccagcagcaaaggcacccgagcccaggccgggaggccgcacaggagaacggagaaccagagggggggacagaaggaggaagccagaccaaccagaaagggggccaggcaaaaggccaccccgcaaccagcacgggaggccgaggcaggaggacgcgaggccaagcacaagaccaaccggccaacaaacagacgaacccccgcccaaaaaaaaaaaaaaaaaaag

SEQ ID NO: 268 - RNA, 1883 nt, Homo sapiens
acgacaacacaccaacaaaaacacacaaacaaaaagagaaagagacaagaacaaaaaaaacaaaaaggggaagcccccaacagaagaagaaccaaagacaacaaggcccaacacccacaacacgcgaggcacacagggaaccagcaacacagcagagcaaaccccacaaacaccaaaaaaaaaaaaaaagcgaaaacacacgagcaaaagaaagaaaaagagcacacaaaaacaagaaaagaacagagagaaaaaacccagaaaaaaaaagcccaaaaacagagaggaggaacagcgaagcaacagcaaaaacacacaaacacagaaagaacaacaagaccggcaaaagaaaagacaaaccaccgaccgaagcaaaacccagagggacaaaaaggggacacaaaccgaagagagaacgcacagccaaaaagcccaccgagacaaaagacaccggacacaaggaggacaaagggccccccaaaacaaggaaacaaccccagagcaggcacaggaagggggccggcaggaaaggcagaagcagagccccagaagggaaggcccgaagaacgggaagagagcagccccccccccacggagagcacaagaaaagcgagcgcaagccaggaagagaacccgaccagaacccagccaggcagcacccgaccagacccagccccaccacagagagaaaacggaaagcgcccagcgaggacgagaacacccaaacaaacaagacaacaagcaccaccagaaacccggaaaccacacagcgaaggaagccaacaagccaagaggaaaagcgagcccaggaaggaacgccccgcgcgcacagccacgcagcaagacacaaacaaagacacacagcagccacaagccacacgaggcagaacaggcacagggccggccccgccagggcccacaagcggaacaagggcagcaggcccacagaaacccacagagaaagagccccaccccagggggaagaaaacgccgaagaccaggccccaccgccagggcgaggggcgaggacacccacacccagagcgaaccaggcgcaggaccccaccaaaccccccaaaaccgagacagaccaccgcaccaggcggaggcaggggcaaccggccacgcacccgcccccaggcacggacccgcccagcccgagagcggaacaagccgcaccaccagccggcgaggaagagagagaggcaccagggccagcggccaaacccgacccacgaccacgccgcccccaaaagcagaaacaggggaaccacgagcccagcccacagaacgagaaaggacaaacacagaccccgaaggcaagacacagaagaccccgaaccagcaacgaaggaaccaaacagcaaaacacaccgcaaaggaaccaacaaggggagcaaccgcaacaccagccggggcaccaaaggagggggggggggggggagcaggggaccagggagcacagaccggggacaagccaaaagccgccccaaccacacggacaagcacgaaagacgaaaccacacagacaaccgcaacacagaccgccaagaaccgaccaggccggccggcgcaaaagaaaaaaaagggacaagcaggcagggccccaagccccaagaaaacgcgcagccaaaaaaccccaaagacccggcacacaagccccaccccagcggaggcacagaaaggagagcaggaaaccaagaaaggggaaaaaacaccacagaggggccacaagaccaacaccaaagaaaacacacggggaggcaaccccaccagacagaggaacaaaagaagggcccaagagccggagaagaagaggagaaaaaagaaacaaggaaaaaaacaaaaagcaaggcgggaagaaagggaaacgaggaaaggac

SEQ ID NO: 269 - RNA, 560 nt, Homo sapiens
agccgacccagcacggcgcagaagcgcgcggagcgcacaaaagccccagggcagaaggacacaccggcccagggcgaacaaaaacgaaacgaagacggccaaagcaccccagccagaggggcagagaaggagggaaccaggccgacccccgcaggcccaacccccaccacacagaccccacaccgacacgcaggaggccagaccgggagacacgaccacggcagccagacacaccacaggggaacaaaacagacacaacgcgaaagcgagcagccacaccgcagcgagaaagagccccccaccaaggcaaaagggcaagagagacacacccagcaagaaaaccgaaaaaacaaaacagcaagggaacaaacaacccccggcaacggggccaggaagcgcgagagacaaaggcagacccccagaagcacgcccaaaacagcagagggcccgcaggggaaccagcggaggaggaggcacggcagaggagccaggcgaaaaacacaagggcggaccacacaaaagccggcgggcggccccgcaaaccagacccccagggacgg

SEQ ID NO: 270 - RNA, 3535 nt, Homo sapiens
caccacggggcaaccaaaccagccgcaaagacagcgaagcaagaaacaggagggagagccaagcggaccaaggaccgaagaacacaacccacaccacaccagagaaaagcgaaaggccgcaagagaacaaaggcaccagcaggggaagaggcccaagcaggggggggcacaagaagggaacaagcgcgacccacgcaaaaacccaaaaacaacgaaagcaacagaaggcaagagcgggccagggacaaaaaagaaaaaaaaaaaaagcaaaggaaacaggcgggggggggcagcaggcaggcgaggcaggaggaggcgagcccagcaggagacaggcgggaagcacgggagacccgccacaaaaaaaaaaacaaaaaacaggaaacaaccaaccccacaggagaaagggagaagcaccaggaaaagcccgaacaaagaggaaaaagccaaagcaaaccgcacagagaaaacagccacagagaaaagcaaacccagcaaaagccccccggaaaagaaaggaaaaaagaaacagcgaggaacaggggaggcaggagacccaccaaaaacaacaggagaaaggcccagaggggagagggaggaagcaaggggcagagggcacggcccgagagaaggacacggacaaccccagacggaaaggagcccccccaccggggccccagcacagcacagggcacaacagcaggcgggcgccgacgcaacacggagcacgacccaccacacacaaaaccagacaaaaaaaaaaaaaacacagagaccgaaaacacacccccagaaggcacacgccagggcggggaagcaagagacaaaggaacacagggcgacacgcgcgaagagccagagagggccaagccaacagaggagcccggacacagccggcggcgcccgagcccccgccaggcagcaagacgcaaagccggagccacacgagcagagcgggccccggccggcagggcgcagcaaggacacgggggagagccgggagaggccacgacacgagagaagcaaagacaagaaaggcccagagccacccaaaaaagcaggggaagaaaaacaggaagaaccccggaaaaagcaccagccgggagaaccgacaagcaaaggcaaagggcggggacaaccaggccccaagccgggcagcccccagcccagagacaccacccagcggaaaaacaagaaacgacacggaaggggggagagcccacacaccacgcccacgacgccggcgccccagagaggggggacaggagaaacaggagcacagcacaaaagggacaccaaaccaaggaccaggacagacacccgggagcacacacgcagcagagaaaaaaaaggacggggaaagaggggccaggcaggcaggcagcaacaggagcacaagccggaccgccacagcaggcgggggccgacaaccagagggacgggccacaccagggcacccacacacagaggaggccaggcaggcaagcgcgccggccgagccaggaccagaccaaccagccgcccacccccacagccaggcaaagcggaggcaggccccgacccccgaacagcggagccacacagacagaccggggacagaagcccgcagcaccacgacaaccaaggaacagcaagacgccccggggccaggggagaacgaccggcccagcccagggcgcagcagccggccgggccccccccaccaaagcagcgcaagcacaaaccccgaccgcccgcacgcccccgacgaccccccccccacagaggacccggaccacgggccaaccgagcaccagaacccccacgggacagcagggcaaccaacaccgcaaccgaccccgaaaaaccacaagcacagaccagcaaggacagggacaccgaggggccaaagcccaccaagagaaaaaacagaaaaaaggaaggagcgaaagagacaaagggacaacagcggaacagaaggaacaacccaaaagaggaaccaagcagagcccaaaggagcaccacagaaccccccacagaggccccaggcccaacggggaaacacggacaaagcagaggcccaggcaacgaggcacacaaggccccagaagccggggacaaggagaaacgcgcggagacaaaagggaccaacacgagagccagaaacagaacgaggcaaccgggagcagggcacaggcggccaggggcccccgccaagggagaagaggacccacacaagacagaggcaaacagaggcggaagccgggaacaggacgacaagcgggagaccaggcaggccgggcccgcagcaccacgagcaaggaaccacccacccaaagccgcccagagggccgccaagcggccgggaagagaacacgcggccggggggggagcgggggacacccacccgaaggccaagcccgcaaggagcccaaaccagcaaagccacaggaggaaaaaagcagaagagagcaaccggacagaacaccaggaacgggaccccaagcccaagaggaggcccaaccagcccagaagccccaaagggacgcaaccgcccaaagacaagccccacgacgagcgcacaagaaccggaaaagcagacgccaggcacagggcacgaaaaacggagagcaagcagacaccaccggaggcagcagcggggcacgggacccaggccccacaggcccccacccagccacccccacgcgacaacccccacccacccggcagcaaccggccagcccagagggaacgagggggcccacagggcgcccaccgcagcgagaggagcaaggacagcggcccagggaagggcccacacaagacaggcgcaaggcggccggcccacccggggaggcagccacgcggccagaaacaaccagccaggacaagaggcccagcgccccgccaagcaggaagaaggaaacacacaagggcggggccgggcagcgaacacacccagggagcgcccagcccgagggcggcgagggcgggggagcacacagaccgcgggggagggcgcagccaagcgcccggcggggcccccggacccacacccacccggccaccgccgaaacccaggaggggcggggaaccccaggggacagacacgcgaccggggggcggacagggggcacgcaccgccccagggacccggcagcccgcccccggcccgcgggggagggcgcagcccgggcgcgacgcagccgcaccgcgccaacgccccaacgccccccaccccaccgggcccaccagcccccggcgacagacgaccagcggcccccagagcgccgcgaacgcacccgggaggagcccaaccgaacagccgcgacacaagcacgccggcaagcaggcccagcaacaaggacaaaccagcaagcaagcgggacagcagcaggcggcgggggcggggcggggccagaggacaggcagcccgcgggccccggccccccccacagccccgagacggcggcccgcaggaaccggcggccacccggcgccggcagcacgacagcacaggcccccccagccccacgggcacggcaacagggaggca

SEQ ID NO: 271 - RNA, 4197 nt, Homo sapiens
aaagaaagaaagaaggaaagaaagaggaaagacgagaaccaggcagaagcaaaacaagaccgcgacaccccaccggggacagcgacacggaaggggacggcaagacggcacaccaaacaccaagcccaccccacacccacagcaacacgggaacccacaaagcccgggcgggagccagagcaccggaaggaagggccgggcgggggcccgagcaagcagagggacagagagcaccgcgagagggggagccaggaaaaacagaacaggaggaaaaaaaccgccaccaaaaagcccggcaggaaaagcagacacgaggaccccaagacacaggaaccaacaggcgagacaaaagaccgcgccagcgaaacacaaaaaggagaggaaaccaggaaagccccaggacacccgggcaaccgacaaccaccaacagagggccagcacaacccacaccccgacagaacaaggccaaaagcaagacgaagacacagaagagggaagacagagacacgcacacgcagagaaaacagaaaaaggaagaaccccgcccccgccccagaacccggcgccaaccccccacccaacccccaaccgccgcccaacccacagcccccagccccccccgggcagaggagcagggaccgcccagcccccacccaggcccacagccccccccaaaccaaagacaccaggcgccggccacccggggccggggagacaaaaagaaagaagccccccaggagacgcagcccggacaaaaaacaacccccgcccaccagaacaaaacagagccaggggaaggcagaagagaaggcaaagagacaagcggagaagaaccaccaaggggaacggcagggaagacacgacaccagggcgcagcaggggccgcggggagaggccggggcggcgaccggaaagccgggccaggcccacagcggcccaggacgggcccaaagagcacacaaaagagaacaaagccgggcaggccagcggcgcccagccacagcccacgaaaaaagggggccgagcgcgaggccaggccgaaccaagcaccgggagcaaaagggaggaccgccgagccaggagcgagacccccggcaaagagagaccccaccaaaaaaaaaaaaagaaaaagaaagaaaagaaaaaaagggacaaaaccccccaccaaagagagaggacaggaaggacggcaaaaggcgccaagaaagagaagaaagaaaaccgccgagccaggacaggagccggcagaccacccccacccccccccgacacagcccaggcgcccccacgccccaccaaacccaacaagagcggacacgggagggggggaagaaaagaccgcgggaaaggacaggaaagcagacaccgaaagagcaacccacccgccagacggcccacccgccgacggggggaaaggcaggcagggccaccccggcaggccccacaggcagggcgagccagcccgagagggcgcaaggggcaagaccagaaacaccaagagcaacaacaggaacgagccagcgccgccaggggcaggaagaacacgacggagaggcaggaagagagagggagaggaggggccagaggacccacgaacgcaccaacacgaggccccagccccagggcaagcccgggcacagagaaagcacacgcaacaagagaacaagccgccaaaaaagccaccagccaaccccccaaaaccgggaggggagggggacgccagcagagacaaggaggcccagaagccaaggaggccagccccgaagagagcagagggaacccgggggccgcccccaggcaagcacccggcccgggacagggaccaagcgagcggcacagagaccgggagccaagggaggcgggcaggagggggaggaggaggagggaaaagaaggaggaaaagcaccgggaggggacgagccaaggagacagacagccaggagccagggcccacggggggcacaaacagaaaagaacaagacagaaggggagccaacccacaccccccgggcccagaagggccccagcagggaggaagaagaggaaccaccgggcagaggccgagcaaccggacagccaaaggcacccggccaccagcgcaccccccagcaccccagggcccgccgagcgaccccccccccccgcccccgacgccggccgcccaaacccgagccaagcaccaggggccaaccggcccagcaagaaagagaaaacaaagccaccagagcggcacagggccacaccgaaccccagcacgggaggccgaagaggaggacacgaggccaggaggagacaagccggccaacacaggagaccccaccaaaaaaaaaaaaaagacaaaaaaaaaaaaaaagccaccggccagggcggggccagccgaaccagcaccgggaggccaagggggcggacacgaggcaggagacgagaccaccggcaacacgggaaacccaccacaaaaaacaaaaaaagcggggagggcaggcaccgcagcccagcagggaggcgaggcaggagaaggcggaaccgggaggggagggcaggagcgagacacgccacgcacccagcggggacagagcaagaccaccaaaacaaacaaacaaaagccaccaacagaaaacaggcgaccaggagacagcccacccccccggggagggcagcaaccagaagagggaaggagaaagaggcaagggggggaggagcgcaggacggagcgcagacggcaccaggccagacacaccagcggagacacagccaagccaccggccccaacccagccaccgaagagggaagggaggggcccagcccaagggcggggacaggagccagcccacgcggcacaggagcccagaggggagcagcgccgcaaccgaagaaaccagcgaaaagccaggaggaaagaaagaacagacagagacgaggggcaaagagaggagaggggcagaaggaaggcgaggcagcccacgcgagcaggaaagggagacgcccccaacgcaggggccagcggagcagccgggaacacaccgccacggccacccgcgccggacaaggcgcacccccgcagagcccccaggagccacccaccccaacacagcagaggccagagccaaagcagcacacaaaagcccggacccacccaacaacacggggaaggaaaacccccagagaggaaacgaggggggagggcagagcgggaccaggccccaaagacggaacacgggggccacgggccggcgggccaggccaccgaccaacaagcccaagaaccaagcgcgcgccccaggaaaaggccccaaacacacgcaaggacggagaaaacaccaccgagcccagaagccgccgcagggaagaagaccagccacggaggcccccccgggggggggagaggagccaccgcacccaggcggaggcagcgcagaccgccacgcaaaccgcccccgggcaaacgacccgcccagccccgagagcggggaacagaggcgccaccaggcccagcaagaagagagaggggcaccagggccaagcggcgaacccgacccagggaccacccaccggcccccaaaggcgggaacaggcagagccaccagcccggccaaaaaaaccagccggccccccaaaaaagcgggcggaccggaacacccaggcaggggcaaaggggacaccgcaacagggcagggcagagggaagagagaccaagaaggggcccagccccccaaacgccccagccagggcagcacccaagccacagggggcacgcggggcaaaacaagcccagggggcacagccggaccggcgcccccccgggcgcccaggccccgcagcagccggcgcccccagggagcaggcaaacaagcccagacccccgggcagaagaagccccggagcggcaccccccccccccggccgcccaggagaggagcaggaggaagcagcaggccaggcccccccagggacccaagaggaaagcaggggcagaacacgcccagccccagaggaggccccacgcccacccccccccccgcgcccgagcgggcacccgcccacacccggacccggcaaccagggaggccagcccagacccaggcaaaacccacaaggccgccaaagcccacgccacggagcccgcagaagggagccgccaagggaggcgacaccggccaacccagaaaaggccagagggccagcccagccaaggaacaa

SEQ ID NO: 272 - RNA, 634 nt, Homo sapiens
ccccgcaaagacgaacacaacggggaaaggcccccccgcccacaacccgcccaaaccccgcccgaagaaccaacaggaggcgaacaagaacgaagagcaacccccacaaagggaaaagcaacggcaagcggagcagaacggaaaacaggaaacgaagacacacaccaaaaacaccaccagcgaagccaaacaggggacggccaggaacaaaaaccccgagacagacgccagccacaaagaaggaaagccaggcagcgaggggaacaaaacggcagcacaagacgaggagggagccgaagcaaagccccagaaaaaaacacaacaccaggaagggacggccggagaaagacaaaaagcgaccaagaaaaggcccagaaggcccggaagcagaaacccaacaaacaaaaagaaaaaaaaaaagaaggcggcaaacagcgcaggccaagggagcgggcaagacaaaaacccggcccccaccaccccacacacaaccagggaaaggaaaaacaacacaccacaaccaaaggaaggaaacagacaaaaaacccgcaaaccaacaaggaggaaaaaaaccgggacgcaaacacaagaaaaagcagaagggaccaagagaacagaaacaaccaaggagagg

SEQ ID NO: 273 - RNA, 5673 nt, Homo sapiens
gcaaaagaaagccggagcgaaacaaaaagcacaagagcaagcacccccaagacggagacaaaaagggcgaaggcgagacaagacaacaaagaagccaacaaacgcgaaaggaccaaaaagaaaaaaacgcagggcggggccagccgaacccagcacgggaggcgagggggggacaccgaggcgggagcgagaccagcagaccaaaggagaaaccccaccaccaaaaaacaaaaaagcgggcggggcacagccgaacccagcaccggcaggcgaggcagaagaacgcgaacccgggaggcagaggcggcaggagccaagacgcaccagcaccagccgggcgaagagcgaaaccgcgccaaaaagagaaagaaaaaaacccagagagcaaggacgaaacacaaaacaaggaaccgggaagagagaggaaagaagcaaacagcggagacgaacagcagacgccggccacaggagggacaccagggagcagaggcagcaacagccaggacggccaggacaaaccaaagcagagggcacacacacaaacgcaaccgccagggcgggcccagaggcagccagagaagagacgccaagcagacacaggggaaggagacgcacgggggaaaaagccagggggagaaacacacggcgaacggcacaaaccaaacaacagaaacagagcagagggaagggcaaagggcggcgcccagcaccaagcagagcccccccagaagccccgcccgagccagggcgcagaacgccaccaacccccaggcacagcagagaaggagagcacaaccaggccggccccacaaggaaaaagccaggagcaggcacaacagggaggcccaaccaaaacgaaaccgaaagaggacccgaagcgaccgaggcgaaaggaaaaccaggagcacagaggacagaagggagcgagcggaagaaaacaaaacaaaacgaaaacacgaaacgaaacaccggcccaagcgagaaagggaacaaccgagaacaagagccaaacaccccccagaccggcaacagagacaagaggcaagaacaaacaaacgcaccccgagcgcaaacaaaaaaagcagagagagcaaagaagagaaagcgccacagcggaggcgggaagccaaacaaggcccagggacgagcgcgaggccgcccacagaggcacccaggccagaggcggaagggacaaacaagcccggggcccgaaaagacacaacgcaaaggcagagcccagaccaacacccccaaagggcccacccgacgcacaggggaaagcagcaagaagggagacaaaacaccagagcaaaacgaacaagaccgcacaccgagaagacagaggccagggaagaagaacgcccagcacgcaggcagggcagggcgggagaaacacaaacccaaccaagcccccaccaaccaccagggaacagacccgcagccagggcaaccagaacccagcacaggggagggcgcgaagaaaagcaggggagggaacaagaagaccagaaccggccaacaccccaaggcccagcaccaaggagagaccggggacccgagaggggcccacccaaaggccaccaacgaagcagcgggggggaaggaaacgagggaaaaacccgggccaagacgcccccaaaacacaaaagcaaacaggaaaagaaaaacgaccaacaagcaaacgaggcacaccccccacgaacgaagaccggcgagaccaagcaaacccaggaccgcaccaggaaggacagggacccaggggagaggagaaggaggaaagcaaaaaagggacgagccaaacgcccagcaacgaccgcacacccagcccgagaacagaacaaaacaggcacaccacaggaccacagggccgcaccccagcccaaaccggggaccccagggaaagcccccagcgaggcccgccccacgaagagcccacagaacacagagccagcaggcagcccgaaagcaggccggcaggcgccgaacgaagccgcgcgcccccgaaggccagggggggcacaggagagaggaagcccaggggccccggcgcccgagaacagaaggagaagggagaagaggcagccggcagggcgccagaaaccagccacccaggaaacaacacagcccacagcgcaggagcacagcgcagaaacccaggagcgggcgagaggggggggaagaccaggcccaccccaggccccagcaccagcgggcaagcaggccacggccccgcccagacggcagccagccccgaaaggccccacaccccacccaccaacagcaagccccaaagcccccgccgcccgcgccagggcccagagggaaccgccgggggcccccaccccggcaccagcggggcacccccacccccgaaaggacccagcccggggcacccagcgcacagcccacagcgcgaaagaccccacccacccagcccggcccggaacgcccggcagccagaagaggcccagggacaacccagaccgaccaaggcaaaaaccagccccgccgccccgggcccacagccaagggccagagccccaccccgcagaaagggacaaacccacaaggcacaaaacacgcccccccccgaccaccggaagcagaacaagggcaaaggcagaaggggcaggacagggcaaccgaagcacacgaggcgaacccaggaaaacacaaaagaagcccgacaacacgaagcagacacaacagaagggggacccagccacgaccccgcgacaggacggaaaacggggggcgcccggcagagaagagcagcaccggccccacacagacgcagagcaccgagcagggacaagaaaaagcccggacacgccaaagccggggagaacgcccggagacccaggacagagaagcaagccgggggggaagaaaaacccaggcaggcacccagcgcagccacagagaagcccacaacaagaaacagagccaccgcacccaggcggaggcaggggcaaccagccagcaacccgccccccggcaaggaccggcccagcccccgagagcgggaacaggcggcgccaccacgcccagcaagaagagaaacggggcaccacgggccaggcgccaacccgaccaagaaccacccaccggcccccaaaggcgggaacaggggagccaccgcaccggcccagacgaagccccagaggacacgcagggcgcgacgcgaaaagcccagacacacaaacagaacacacgggagaaccgaacgggagaagagagaccagcagaggcagaaacccagaaccccagggggagccgcagggacaccgccgcgccagggaccaggcgagcaaggcgaagcgagaacacccgcccaacggacaagcagaaaggccacagcagaagcaacgaaaggccggaagagggacacacacagaaaagcaaaggaggccaaaagaacgaagcaacacgcccagagagcaagagaagaaagccagagaggccagggacggcagaaagcgggagcaaaccggcccgccggggagccgcgggcagagcacagaagcagaaggaggagcccaagggccagaaggcccacgccaccacaggcggggggagagcagaccaaggccagacagaggcgggagaccagagccccagcacggccagcacagggaaagcccccaaagggagcccccgaaacggacaacacgggaacaacacacggagccacccccagagagaacagcccaagagcaggaacaccaaagagagagagacgacgaccgccccgaaggggaaacgaggagggcccagaggccggaagggcaggaaccaggaagggacaggaagggagggagacagacgggccccaggcccaggcagaggcacacgggcaccgcagcagcagagacccacccagggaaaccccgacccaccagccaggagagccggggccaggggggaggcgagggacagcagaggggcggagagagcgccagggccaccaagcccagaggagccggggaagaaagccccacaggccaaggcaaaagcaagagccaccagcaggcggggaagccggcgcgcggaaagcaaaggcagggagccccacgcggacgcggccccaggaaaagaacgggccacgccgaggagcaagacccgcaagcaaagaagcgcaaggcacagagccagacccaggcaagcagacaggggcaaagaaacaaaaggccgagggccagaggaaaggggacgggcccagccagaccggccagcagcccgagggcgaggcacacccccacgggcggggggggggagacgggccacggacaggcggaggcagggggacggccaagcagcgcaaccccaggcaagcagcccacccggccccaagagcgggacacagccacagccaccagccggcgaaaacaaggagagaggccacaggcccaggcggcgaacccgaccaagcgaccacccacccagcccccaaaggcgggaacaggggagccaccacgccgcccccacggggcaaggaaaacaccgccccccgagaggcccggacggccgggaaggagccagaagagaccgaagccccgaaaggaccaaaggcagaccagggacccacaaaccaaagcccaagagagaggaccaagaagccaaggagcacacacaaaaaccaagaccaggggcaaagcaacagagaaccacagccagaggcgaggcaagacagggacagcagggggcgggaggggcagaggcgaccaacacccacaggcagaaagagaggagcaggccccagggcagggcgggcccccccccccccccccccccccccccccccccccccccccccccccccccccccccccccccccccccccccccccccccccccccccccccccccccccacccccccccccccccaccccccaagaggagccaccgcaccaggcggaggcagggcacgacggccacgcaacccgccccgggccaaggacccgcccagccccgagagcggaaacaggcggcaccaccacgcccggcaagaagagagacggggcaccaggggcaggaggcgaacccgaacagggaccaccgcccagccccaaaggcgggaacagacggagccacgcccggcccccggcccaaagaaggagccgccgcgcccaggcggaggcagggggaccgccacgcaagcccgcccccaggcagccacccgcccagcccccgagggcgggacacaggcgcccgccaccacgcccggcaagaggagagacagggcaccagagccaggaggccgacccgacccggaccacccgcccggcccccaaaggccaggaacaggcggagccaccgcgcccagccccgaccaacaggacaaccacagagggccacaccagacccaacccaaggccccaccaaaacacacagggacaggcaacaaggaagggggacacaaacaaagcccaaacaaaggaggacccgagcagggaagggcacagggacaagacagggaaaaacagaccccagggcagaaacaggcaggcaaagaggcagaaggagacacagcagaaaaagacaagcaaggcgaggaaaccaaggccagaggggcccagcccccgacggagaaagcagggcaaaggcagagagggacagaggaggagaaaggaaaacaacaaacgagacaagaggcaaacaagaggaaaa

SEQ ID NO: 274 - RNA, 3039 nt, Homo sapiens
cagcaccccagcgggccacagaaggccgcgggcaggccagaacacacacagagccgccagaaggcagggccaggagaaggcagccacacggcaggaggcaagggaagggagaccaccagccgccagcaggagcgccccagagggaaaaggggaggagagggagccaggccaagaaggacccaagggaaaccgagagggaaaggcccggcagaagggcagagagggaacccaagagcggaagaggggaaacagccaggcaacaaaccaagccgcccacgcggaggccgggcgagacccgaaccaacccaggggagggggaaaagcagacgcggaggagaggacagagaccaaggagacgcaggcacacagcagcaccaaaaaggggagccacaacagaagcacccgcggaagaacgaaaaaggccagggcgcagaggacacccaggcaagggcacagacgaacgagaaaaggaaacgaaaaccaggagaaacccacaagaggaacggcccagaaacagcgggggaaggcaacgcagaggaagcagccaaggaagaacggaaaccagggcagagcggccaaaagcaaacagcaggagggggggggacagggggaggggggaggggggaggcagagaggggggaggcagagaagggggagaggaaggaaaaaaggggacagcccacggaagagggaagccgcccacccaacaggccaaagacaggaaggaaagacacaaaagaaagcgaccagaagcaaaccccagggcccagacaaggaaaggaggccagagaggccgaaaccaaccgcggaggccagaggccacccgggcagacgcgacaacagaggcagggcgacccaaaagaagaaggccacaaagcaaaacagcgggggcaggcgcccaggcaaccgggagcaccaggaccggcgcggcccagacgcaacccgcacagcacggcaccggagcagcccccgaaccaggcccaccccagagaagcagaccagggagggcaggaacagccggggcagggccagccccgggcgagagaagcacagcgcccaggcgggacagcggaggcagccgcgcgcgccgggaccagcaggcgcggcccggagggccagccccgccaccgggaggcccacagaggccacagcacccggcaaacacagcaaaccaagcagagcgcaaggcgaggacagcagcagcacccgagaacccacacacaccagcaaagacaggaggcacgccgggcaaaccaggaagaaaaccggggcagcccagacaggccgacagaaaaagaaacaagccagccaccaaacaagacaaccaccgccacaaaagccgagcaggggcaagggcccagaaggccacagccagggggaacgagcaaaacaaacagcgagcggggagcagcagaaacagaaggcaacaggcaggaaggaggaagagcccaccgcccggccggggaaaacccagggaagcaacaccaagccgaaggacagagacaaaagaaaaaaaacgaaagcaaaagaaaaaagaacgcaaagcaagcaccacaagacacaaacaacaaagaaaacacccaacaacgaacgaaaccccaacagggaggaaacgaggacagaaaaggaaaaaccaccaaaacaggaaaagaagaacaaaagcaaaccaaccgcagaccagagcccaggcagcaaagcaaaaaaaaaaaaaaaaggaaagcgccccccggcacccgcggccgaacccaacacaccaacgccgcgcccaagagaaacagacaggaagacaggagcaaaaaagagcgagaaaacaaccccccacaaaagggcaaaaacacgagacaagagcggagagcaggagaaagcaaccccacgcacaggaagaccagcgagcccaggccaaacacaaggcaaagcagcggaaacaaaggaggcgcaaacgcaaacagaggcaccaaggagcaaaggggaagaaggaaagaagaccaaaggaggaagagcacacagcacagccgccaaacagagccccacccagacaaagacagagacgccacagggggcggagaaaagcccccaggaacaagcgacaccggcccggccgcagcccgcggcccgcaagagcccccagacgccgggaaaacggaacccggccaggagcagaaaccacggagcaaggcacccgggcacgccggggacgcaaagacaacaaaaaggcaagagccgagacgccacaggggacaaagacccaggcccagacccgggaaagcgcgcagggcgacgaccaaagccgaaggaagcggagcagcacccccgagagagggggccccacagagaacaaaccgggaaaacggcgaaaagaggagccaaggaggacacaggcaaaaccggggccaaagaggggagccaaaaaacagccccacaaagcacaggccaccagcagcgccgggcgagcaggcaggaccaccacaaacacacaggaaaaagcgaccaagcacagcacggacagcgggcccgacggccacccaaagagcaagagaaggagcaaaggaaacagcaccacacagcccggaagaaaacagcaaacggggcaaggcaaagcagaacagaccagaccagccaaccacagacaaggaagaacagccccagaaagaacgggaaacgaagcacacccggagccacaaaaccaaggcaacccaaagagcacaacaggaggaaccaaacccgccccgccagacccagccaaaaggccaaagaccaaagacgaaagacacagacaaaaggggaggcagaaagaacagcaaacaggggaaagaaaagaagggacagacagaacccagagccaaaacaccaaaggacaagaggggagagaagcagcccaaacaccaccaaaacccgggggaacacgggagcaagagagacaccagaagcccccaaaaagcaagagaaagaacaccagggaaggggcgacgaggaaaggggaggggcaaggcccagaagcacaaagggaggagggccaggccgacggaagacagggggcca

SEQ ID NO: 275 - RNA, 3032 nt, Homo sapiens
gaaaaagcagaagaccgaacagccaagacaaaaaacccaaaagaccggaaaagcagaggggcaaccaaaaggagaagacgcagaaaacacaccgaaggaaacaaaaaaggcaaggaaaaccagggaggagaaccgccccagaacccaaaaaccccgcaccaaagcagaacccaaaggaacagcaaaaagagggacaggaaccaagggaaagaaaagaaaaagaaagcccgggagaaagagacaaaaaaaagcacgggcacaggaacaaaaacagaaaagggggaagaggaagacagaaacacaaaacaacgaccaaaaaacacaaaaaaccgcaaagaaacaaaagacaacgcccgaccacggcccaggagacacggggagcccaaaaccgggaccacaaacaagcagagaaaagcacacaggaaggagaacgaacgccccagacagacaagagaccccacgcaacaaacagcccaaagaagcgaccgaaagaaaaaaacaaacaaacaaaaaaaaacaacccgccccaaacccaaggggagggggcgggggaaaaagccaagcgaggaaacaggagcaaacacgccaaggagggagggacgaggccaaaggccgagagaagcacgggaaaaacaccaccccacacgccaacaggcaccgaccccccccacaaccccaaacgaagaccccccggagagccgaggacgacggcccagcgcccaggcgccgcacggccagacgccaccgaaccgcccgacccgcaccccaggagcaaaccgcgccccggagaagcccaaccaccgcgcgcccgccacggccaggagacgcgccagaaggggaaaacccgccccacaccgaggcccaagggccgacagcggcagccaaggcagacccaaggccaacacaagccagcaaagccggcgcacagcccaaagaaccacggggaaaaacacccgcccccgccaggggcccgacccaccgcgcccccacaccccccaccccgccgccacacacacaaaacgggcccaaaggagcagcaagaccacagggagaaagacgcgccacacccgggagagaggacaccacgcaacgcgcccgccgagggaggccgcaccacaagccaccaccgccgccgcccgcgcaacgccaaccgcccgccaaaacggacccccgcgccgcgcaaccaaccgggaccggacccccgcccacacgcagcgcaaagcaggacaaaccccgccaacacgcaggcgccgaggcacgccacccgcccgccacacggccagaggcaggggaaccaagcgccgcgcaaaaccgccaacacacggcggcaacaagagcagcaaaaaaagaccccggcgcgcaaacaaggaacagcgccaagcgacgacgaaagcgcgggaagaaaaaagagaaacacccaaggagacaaaggaagaggcggggccaacagacggaacaaaacaaccgggaaccaaggacccaaggggggagacggcgagaacgaccgaaggaagacgacacagcaagggcaccacaggccaaagcagggggaagcgacaagaccaacagagcgccagggcggagcaccaagccgaaagcgaggaggcggggaaaaaagagagggcgaaggaggcggcagaacgcgcagcgccccgcccgggacgccgccgaagaagcacgaaagccccacccgccgcagcaagcagagggagaggcgcgccccacgaaccccccccgaacggaagagcgcgggcgccgcaccagcccacacagcccggcgcgccacggccacccccccaaagcaagcgccagcccgacgccagaggccgccccgccaaccagagacagcgggaccgaccgagcaaaacaggcacacaggacgcaaaccgccgggagcgagcaaagagcgaagcccagggagagcaccccaccgcccaagccggcgcggcgcggaaggcgacagggacgcagcgcgcgaccagcaccccaacccagcaacggcccccgaaggcagaagcacggcggcgaccgaacgaacaaaaggcaggacacaggggcagccccgaggaaagcgggagcccaaacaccccccccccccaccagcccaaagagcccgaacagcgaggaagcccaggaggggagcgaaacaacgagagagccgaggagccagagcaaggggaacgccacggacggggaagaggaagggacaaagcagaaaacagccgaccggcacgggcagccccgaagcagaaagagaaagcaaagagagcgggcaaaggaacgccgcgaaaaagcacccaaacagggaggggaaacggacgacaaaaaggcgggaaagccagcccacaaagaaaagacaaaagcgcggcagacggacaaaaaacacgccaggaagagagaccaaacaccaagcgcccaggggcggggcacaagccacgggaggaggggagcagcagaagcaaggccacacaaggggaggaagaggggaaccaaagagagcgcccagagaaggaggggccccaaacacggaaggcgcaggacaagacgggagcaaacaccaaaaacgagaaggcgcaacaaaccaggcccaaggaccaaagaccagggcccacaacggaaaaagaagggggcaaaagaagacacgaagaacacaccaagagaagaacagaggaaaaagaaggagaaacagacgaccgaggcagggcaagaaaaggggcgccgaaccgacgaccagacccgggaaagagcagaagacagaagggcaagaagggccacaacgaggcacaaacccgaaccaggacagagcagaaaaccaacggaaggccacaacggaagagaaaagcccgcaaagcaagagaggcaggccaccagccaaagaggagcggcaaaaaccaaaggaacgagacccagagaagaaagcaaaccagcaaggcgaagggcggaaacggggggcgggaggggcgggggaagacaaccggcgggaggaaaccagggcgggagaggacacagagcgacccaccacgcagaagaac

SEQ ID NO: 276 - RNA, 5689 nt, Homo sapiens
gagggaagccggaaacccccccccccccccccccacagaccccccccccaccccccacgaaacggccagacagcagaagcacagcaggcccaagggcaaccccaggccagcaaaagccagcaaaggccgcgggagaacgcaggggaaagcaagccggaacggcaaagggcagccagagaccaggagagcaccaggagggaggccggggaaaggagagaagggaagggagaggagcgccgacccaggcggaggcagggcgcaacggcacgcaacccgccccaggcgagcgaccagcccagcccccgagaacgggaacagggcacaccgggcaccgcaagaagggagagggggcaccacagggccaggggccaaacccgacccagggacgccgcccggcccccaaaggcgggaacaggcggagcaccacgccgggccggaaggcgaaaagagaaaagaccgaaggagcggccccagcccacccccagaaaggaaacccaaaaaacagaggccggcccagggcccaccacgggaggccaagagggcggacaccgaggcaggagcgagaccagccgcccaacaggcgaaaccgccacaaaaaacaaaaaaagccaggcgggggcaggcgccgaacccagcaccgggaggcaaggcaggagaacacgaacccagggggcagagggaggagccgagagcgccacgcacccacccgggcgacaagagcaaaacccacccaaaaaaaaaaaaaaacaaaacggaaaaaggcgggcagggggcacaccgaacccagcagggaggccaaggcaggcggacacgaggccaggagcaagaccagccggccaacaagggaaaccccgccacaaaaaacaaaaaaagcgggcgggggcacagccaaaccagcaccaggaggcgaggaggagaacacgaacccaggagaggagggcaggagccaagagcgccagcacccagccggggacagaggaaaaccgccaaaaaaacaaaacaacaacaacaacaacaaagaagccgggcaggggcacagccgaacccagcacgggaagcgaggcaggagaccgcgaaccagaggcggagggcaggagccaaaacacgccaggcaaccaggcgaaggagcgagacgcaaaaacaaaaaaaaacggaaaaagaggcggaacaagcaaaaacaaaggggcgcccacgcaccccccacacaccccaaaaaggggcaacaaaaaggacagagaacccaaaaccccccgaaaaaagagacggagccgcgcccagacggaggcaggggcaacggccagcaaccgcccccaggcaaggaccggcccagccccgagcagcggagaacaggcacaaccaccagcccggcaagagaagagacagggcaccggggccaggcggccaaacccgaccaaggaccacccgcccggcccccaaaggcgggaacaagcagagccaccggccggcccccccaagcacggaaagaccggaccgcagcagaaagaaaaagaacagccaaaaaagaaagagggacgccacaagcaaaaccaaaacggaacgagccacccggcccaggcggaggcaggggcaggggcccagcaacccgcccccagcaagcaccgcgcccagcccccaagagcggaaacaggcgccacaccagccggaacggagagaggcggggcacagggccaggcggccgaacccgacccaagccaccaccgccggcccccaaaggcgggaacaggcagagccacgcgcccagccaacccaaaacgggcgggggagacggagccgccggcccaggcgaaggcagggcgccacggccacgcaaccccacccccaagcaagggacccagcccagcccccgagagcggaacagggccaccaccacgccggcaagaagagagacggggccggggccagacggccgaacccgacccagggaccaccgcccagcccccacccccaaaggcgggaacaggcggagcaccggcccagcccaaccaaaacgaggacacgaagcaccgcagacccaggagaagaaggagaccgaaaggccagccgccccagagagacccccaccagcaggacacggcaggaaggacagccaagggcagcaaccggcaagacacagaaggagaaccaaaaccccgagcgacaccggggggacggcaggagggcagacagaagggggggagggagcccacacccccacacagcacccccccacccaccaagcggcccccacccagccggcagagacacaacaggaaggagacgggacacagcgggcaggagcgaacacagcagcccccagacacagggggcccaagcgcaacgggacgacaacaacaggaaggagcaagaagacgccgggcggacaggggcacgccaaacccaacacaggagccaaggcgggaggacagaggcaagagagagaccaccggccaacagggaaaccccgccacaaaaacaaaaaaggggcggggggcgcgccgagcccagcaccgggaggcgaggcaggagaacgcgaacccaggaggcggagggcaggagccgagacgagccacgcaccagcccggcgacagagcaaaacccgcccaaaaaaaaaagaaaaaagacgccgcaaagaggagagggggcagggggaagggggcagaaaacgggcgaaaagcaaaaagagacaaaagcccaaggcaagaagacagaaagaaacagagaccgggcacgagggaagaccaccagaagagggaagagaccaaaaagggaggaaggaggcagcaccagccaccacccagccaggaaaccgcccgagcaaagacaggggaaggaacacagcgacaggccagccagcacgagcccggcagggaacaaagcgaccggccaacaaacgaggggagagaagaaggggcccgggagccccaacaccccgccgggacccccaaaccagcccccgaaaacgcaacagaggacacagccaccccagcacaccaagaaaacagcaacacggacccaagacagccaggagacaaaggagcaggagaaaacccagagcagagggagggaggaccagcggggggaccagggaaaacaggaaggagggagcaaaaagggaagggacacaaggcacaacccaaaagcccccaacaacaccccccccaaaaagccgacagggggacgagggacaggggcacgagggaggcaaaaagcacaggcagcggccaaaggggaaaaaggggagggaaccaggagccagcgggcgcagggagggaaaggcaaaccgcccacccacacgagcacaaacacccacccgcaggaggcccaggcaagcagagacaacagcagcaggagaccagccaagacagcagaacggaagaccccggcaaaggaaggcagaacaccgaggccccccccgaaggcaaaaaagcaacccaaacaaggaagggcgagacccgcaaaaacaggaggaaaaccaaccgagaccccaccggcgcagcagccccgccaaggaaggccggccagggggggcaacaccgaacccagcagggaggccgaggcgggcggacacgaggcaagagacaagaccaccggccaaggggaaaccccgccacaaaaaacaaaaaagcgggcgggggcgcacaccgagcccagcacgggaggcgagccaggaaacacgaacccgggaggggagggcaggagccgagaggccacgcacccaccggcaacagagcgagacccaccaaaaaaaaaaaaaaaggcaaaaggaaccccccaccagaacacaacccaaaccccccccaacagagccgggcgggggaggcagaggggagggaagaaagcaccaacgccccaccagcaagaaggccaaagaggaaccccagaacgggagggcagcaggccgaagccgggggggacccagaacagcccagcagaacaagagccagggagcaacgagggggggcagcagcaaacaagaggagcagcacaagagcaagaaaaaccccacccacccccagcacacaaccccacggaacagcacacgagcccggccccaagggcgccccgacagcccgcaggcacaacgccagcaacaaacaccaggcagcggccacggccccacccccaccggggcgggggcaacccccccaggacaccccaaaacaaacccacgaaaggacaagacagcgacacgacccccccccaggccccccacagaaaacaccgacccgccccccccgcggcagcccgcgagcccccccccccaggagcagaaaggggaacccaggaacgaggaaggaggccagcaacaaagggcccgggggagaaaaagccagagcaggagggagaaggaaacaccgaggggagccaagaaaacagcggaccagaggccgggaggggccaggagagggagaaggggaggcaagaccaggcaccaggcaggagggccgaagcaacgggcggaggggagggcaggcaacgggccgaacccaaaggcccagcccccacgcagcccaggagcgccccaacggggggggaccccagagcccaaagaacacgggccgcacggccgcggacgaggaggagggacagcggacccacccgaaacaagcacccccggccagaggcccagccccagccaccaaaccccgcaggcacaagaggagcagggggacgaggaaggagaacgccccccacccaacaagaaacgaggaagcgaggcgaggagaggaagaaaaacaccagggcagcaccaagccacccacgagcccccaaccaaaaaccaacgccaagcaacagacaagggccccggagaaaagagcaagaggaggccaggaagcacaggccaaggaggggagaaaaaggaggcaggcaaaagggaggagcgcccccaggcacaccaagaaccaaccagccacccgaaaaggagacacccacgacagcgcacccgcccccacaggcccgcgccgaaacgaaagcccccaccaaccccccacccccccacagcaaccagggaaccagaccaaaggggcagaccacagaggccccggggccccgacaaccaccgccgggagagggaagaccggcacgaaggaccacaacggccaaacagaggaccggcccaaaccagccccaacccacagggaagagccgagaagccacaaggcaaaagagaacaagccgccagcccggaggggaaagaaagaaaggaaaggcacaggaccaggaggaaccccgcccggcgcagacgcccacccagaacagcgagaaacagaagcgagacgaaggacccagcaggcccacaggcccaacccccccaggggcagccagcccaggcccgaaacacacacaccccccccccagaagccacggccccccaagcacccaggcaccacaagggaagaacaggaggcccaaagccagaaagaagcccggcagccccccggagcaggaggaagagcaacgggccgggaaaccacccccaggcccccccccccacccccaaggaacaggaggccagccgggccacggcgccccccacccaccaccccgccccgagccggggcggggacagcgacccagccaccggcagaaggggggggggggggccgagaaagcagcccccccccaacaaacaacgggaacagaagcgacgcgaaccgagaaagaagaaaaaaaggaaaaaaagaaa

SEQ ID NO: 277 - RNA, 10085 nt, Homo sapiens
aaaagccacaccccccagggccaggcccaaaagcaggagcagggagagaaagcccaggcaaaacaagagcgaggccaagcaaaggagggccgaggacagaggagcaccccagcaggcagccagggaggccggaggggcagaagagcccccgccccccaccgcccgagggcccccggagaaggagacggaacgaaacggcagaggggaagccggaggccggccaaggagggggcggcgcgcggggacaggggaggggcgggcacagagaggcgcagggagccccagagggaaggcaaggagggcccggagggacagaaggaggcaggaagggagagacagggccagagagggagagggaaggcaagaaacgagggcggaccagccacggcagcagccacgggcgcacccgaccacagacacacacaccgagccgcagggcggggacagagacaaaggccaggcccgcccagaggcacaggagaagggagaacccagacagggggacacggaagggaggggcaggggagcaacagcgggagagggcgggcggcagaagggaggccgggcgccgcagaggaggcaggcacgaggacccggagaggaccacaggcacagggggagaggcgagagaggagcgggagggccagaagaagcgggccgcaggggggggggggacccagaagacaacagagagaagcaggaaaagcaggggggagggacagcccaggagaaagaagcgggcagagagagaaggcagaaaggggagccaggaggagacagcagaacccaggcagcagcaaaaagagggaaggaagagggaaaaagccagaagcggaaggccggcagccccagcagccacaggcgaacccagcccagccaccagaaaagcacaacaagccacacggagcccaggcccgccgaaaagccgaccccagcaccagccgggacgggcccagcgaacccaaccccaacgccgcccacccagaggaagccagccacggaccggccccgggggacgggaggccggacgggggaagcccggggcggaacggcagcgggggaggccccccaggacgcgggccacgggggcggcggaggagaggaggcagggggcgggggaggagccagagggagccgggcagcacacggccaccgagaggggagggggagacaagaggcgggaccgggggggagaccccccccccaaccaaacccccgacaggaggagcgcgcgcccacccccgcagcaggggcgccgcgcgggaggacgcgggccggcgggaagcgccgggagagggacgcgacggagcggcggggggcagccgccgcgccgggaccccacggggcccccgcccagcaccccgcccgccgccagccgccccagccccgcgcccaccgcccggcccccgcccccagcccccagccgccggcggggccccggacagggcggcagcggcacccgaagcacccaccggaaagggaacccagcccagcccagcgggcgggccaggcgggcaccgggggggccccaagcagccccgaccccaggggccacacagccccaggagggcaggccccgagcggggcggggaggaggggccaggaacaaaagagaaaggccaccgcacccaggcggaggagggcgcgacacggccacacagcccacccccaggcccaagcgacccaccgccacaaaaaaacgaaaacaaaacaacaaaaaaaaaaaaaagaaaaaaaaaccacaaaaaagccggccgagggcgcagccgagcccagcacccggaggcgagggggaggacacgcgcccaggaggggagggcaggagccgagagcccacgcacccagccggggaggaggagaccgccaaaaaaaaaaaaaaaaaaaaaaaacgaacccaggcggcagcagagaagagggacaggaagagggaacaagccagaagcggaaggccggcaggaaaagaaaaaaaaggaaggaaggaaggagagaaggaaggaagggaagaaaggaaaagaggaacggaaaggaggaaaggaaggaaggaaagaaagaaacggggcaccaggcccaggcggcgaacccaggccaaacgacccgcccagaccccaaagaagcaacaggcaaagccagagcccagcccaggaacgcaggcaagggggcacaagaagacaaaaaaaacaacagccggggaacagccagcaccccaaccccacgcgcaagagggaaaccgaggggcccaggggaccccacgggcccccggcccgcggccccccccccacccggggcgggccacacgcacaaaggaggggaggcccccgccagggacagacgggggcgggaggcagagcggccaggagggcacgaggggggggcgggggggagggggcgggaaacaggagccaccgcaggccccccgaaggagcgggagggcggagcgccaggagggaaacccaagcagggagagccaggggcagagggaaggaaagggcggcggggagggggcgaccagagaggcgcgcccagcccaggaccgggccccagccgccccccccaggccgcaccccaaggacagcgccacagagaccaaacgggcagcggaagaagaggaaagagacaacagagcagaaagagagaagggcgcggagcacagagggcgccccgggacaccgaacccgaacaccgcccccaaggcaccacccccccagcggggggggggagggggggcccacaccagcgacagccgaaaaaaaagccaacgcacccagcccagggagggagccccggaaagagccggcgcgaacaggggcaggagcaagaggaggagaggacggaacgcaaagcacaccgggcagagacaggggggagccgagaaggcgagagggaggaagggagccaagggaagagagaacgggcgagaagggggggaccagggcagcccggcaagaagaggccgcacggcagccgccgcacgcggggaaagaagcccagggcgccggcaggaggggggcgccacagggaggaagggcgggaggcgggggaagcacaaggcggacaggaggcagcagaaacgccaaaaccgggggcagcggggggggaggggggcggggagaggaagggagagagagccagacacgggcagccagggagggaagcgggcggcaaggcgacgggaacgcgacggaacgaccaggagaaggcccgaggcgcgaagaagaaaaaccgccaagggcgagggggcagcgaaaaccacaacaggccccgagcagaaggggagggaggaggccccagcccacaaggagccccagcagcgggaggcagcgcaaggccaagagagcgaagcgcagagaagcgccaggggagggccaagaggagggacagggagggccaaagggaccggaggaggaaggagaccagaggagaaaaaggacaggccaagaagagaacacgaagcaaaggcaccaaggcgggaaaggggggaggggagagagaaaggacacaagcgcaacagaagacaccaaagaaggaaggaagggaggagaggggaagaaggaagagggagcgagagcggccaaagggagcgggcaggccgggaccaccccccagagccaagacaaaagcacccagcgaggagccccacagggaccccagccaccagcccgcaggcaccacaaacagaagcggagcaagaaacaggcaggacgccgcccacccggcccccagggccaggcaccaggccgcgggagcagcgccagcccgaggagaggggcggcaccgggggacgaggggccagaacccccaccaagaggcagcacagccagacaggagggcgccacgaccccgggaggccggccaggcccgaggccaggaaagaccaggacccagggacagggccccgcgccagcggaggagggcacagggcggggccgggcccccagggaggagggcacagggcggggccgggcccccagggcacaggggggccaccggggccaggggaaggagggcgccggccgagaaggacaaggagccccaaagcccccccacgcccccaagccaggaaaagggagaaaggcccaggccagggggcggagacgcaggagaacacccaccaccccagaaggacagggaggagggggagaaacaccaccccaaaaaggaaggagaggaggacagagagaagaccccagaagaaggggagggcccgagcggggagcgcagcagacccggagccccacccggagcagcacaggccacagacaccccccaggccccgaggaaaagccagcccaagaggggcaggagagcgacacaggccagagggaagagggagagagacccccagccggcgggaccagaccacccggcggcccgggaaaggcgccaccccacagggaggcccagccaagagcaaggaggaaggccacaaagggcggacaagaggcaggaggagaggagagagaggaggagcgacagcaggaccagccaggcgaagcgacggaccggacaccaaacaggagagagcaggggcaacaggccacaaaacgaggaaacgaggcaaaacgggccacgccaagccggagcgggaaacagcagagcaggggcagcgaccgaccgggccggaaaccgacgcagggagcagggcagaggggcaagcaggaaggggaaggggcccagcagcgcggggcagagaagaggcccagcgagaccaggcccggccagggcagccgaggggagggggggggaacggccccgaagggaaggagaaggggcggcccggggcaggcaagggcccaggcggcgccccacagcccccacccccccccggggcaccgggagaagcaaagagagacccaagaaaacacacacccccaggagggacggcagagggaacaagaccacggagggggggaagcccgagaagaaagcagcacaaccagcccacccagccccccccccccccccacaccacccccccccaccccagggggacgaccggcccgcaagggggggggcaggacagggaacgaggcggagccagggggcgcaggggacgaagaggagcaccaaggagaggcccagagcgggcccgagcacgggggcagggcagggggcccgcagggcgcagggaccagccggaggaggggaaagagaaaaaagccggcacagagcaccagagagacacaagaaagcggggccccgagaacaggggcacggagcacaggggggcccgacccgcccaccgcgaggccggacaggggccacgccgggcccagggccccgccccaggggggagaacaaacgagaccgacgcagaggagagaacgcaaaggacgcgcccccgccccgggaagagcacacaccagggcgagcccgccacagaaacacaggagggcaagggagaaaacgagggccccgaaagacggcgagagaagcaagaacgaacagacgcgaaaaagcgaaaggaagcaagcgagcggagggccgccaggaacgcggcaaggcacaagaaaggagagaacagagagaaccggcacaggagagagagggaggcagagaaggggggggcagagaaggaccggccaagaagcaagccaggaagagacccggcggggaggaccaacaggaagaggaaggcgaagggaccggcaaacaccccccacccccgaacgaccaaacgggccacacacaagagccgggagggcaggaagggagaaagagagagggcgcagcagagagaggcggcagagagcggaagcaggcacaggcgacagccacaacaaggagcaaaggaccggagagcccagaagaaacgccaccccaaagaaccccagggaggaaaaggaagggaccacaaaaccggagaaggaagacagaaagcagaggcaccagaaaagaaaaggggcagacacaaggcacaaaagcccaagaggaagagcaagcgagaaaaggaacgaacaagggcacagccgggcacggcgggccgaaagaggaagagggcccgcccccaaagagccaagaggagacagacgagcaggcagacgaaccccacaccccgccagcagaaccccacgagcgggcacaggcagcccagaaaaggacacacaggcccgcaacaagagagcccagaccagagccagagggagggcagcgccaggcaaacaaaacaccaagcgggaaaaaacaaagaaagaacacagcggaggccaggaagcccacggcagagcaggcggaagggcgcccgcgagagaagaagagccgcggcccaggcggaggcaggggcgacggccacgcaacccacccccaggcaaggacccgcccagcccccaagagcggaacaggcacccaccaagccggcaagaagagagacggggcccagggccaggcggcgaacccgacccagggacgccgccggaccccagagcaggaacaggcagagccgcggcccagccaccaccaagagacacccgcggcccagacagggaagggcaaaagaaagggacaggggcccccaacccaaaggcacgaagccagggcaaaaggaaaccgaggcggaaaaaagaaaagaggaggccacagcgcaggcgacaggcaggcaccagcacgcagccggcgaagcccagaagcacagcagaaagcacgggaaggaaaagggggagccagggcccagaaaagacagggagcaagagagaggaggacggcaggccaaagaagagcaccaccccgccacaaaaaaaacaaaaaaagccgggcaccgggcgggcaccgagcccagcaccaggaggcgaggcaggagaaggcggaacccgggaggcggagcgcaggagccgagacgcaccacgcacccagccggggacagagcgagacccgccaacaacaacaacaacaaaaacaacagcccacagaacaacggagaagaacaccaagcaagggagggacaagccacagagggacgcccccagaccaaacacccaaggcccaccccaacagggaggccacaacagagaggaggaaacaaaaaccaaaccagcagcacaagcccacagagggccgcccagacaacacccccaaaggccacaaacaacacacggcaaaagcaacacaaagggggacacacggaccaagcagagggaacagaaggaagaacaacaaaagcacagcccgcacccgcccccgcacggaagggaagggggcaacagggacccgggcgaggacaacacggaggggaggcaagacaaaagaagccagagcccgagacgacagcagaaccacacaccagccagccccaggcagagaaaaaaacccgaagcgcccaggggccagaagcgccaaaacaccaaacaacagaacgaaaggagagacgcaaaaagagccaagacagacacggccgaggcacaggaaaaaaaaacaaggcccccaaccagcgcaagaccccacccagccaagggcaccaaagccaccgaaaagcagcaggccagaggggaaggagaagccagaggccaaaccccccggaaacgcaggacagacccaaggaaagaaacaacaacaccccgaagccggggaagcgggggaggccaccgcaggaaaaccggccacaaccccagaaacccagacacccagaaacccaaccaagcaacagaaaacaaacaccagacgagaagccccccacccaaagacccgccccagaccaaaccaagacacaacagaacgaggagcagccccaaaaagaaaagcgagcggccacgaccaccgggacaagcaggaacccgaggcggcaggggcaccaacggcaaaaaaaccagaggagagaccgccagaaggcacaaaagcaggggagaagacacaaagcagacggcaagggggaccccaggccggcaaaagaccaggaaaacgcacgggccggcagggagaccacagaccgagccgaaccaggacaacgagaacaggagacgacgacgcgccagcaaaccggaaaagagagggaagcagggggaaaccggcgagcgcaagaagagagggaagggaaaagggccaagagaacccacgccgcgccgcacaaggacgggagccagaaggagcgaagagaggagacccaagcgcccagacccaaaggaagcagcgaccaaggggcgcggagacagccgaggggaggaagagaggcccgagccaccaggcaccagaagaaccaccagacaagggagaagccggcagccaagacagaaaggggcccccacccaagccagccagaggccgaagaaacagccacagcgagagaggggcggggagagcacagagccagaaaaacagaaccagagcaggcggcaaaccgcaagacaagaccggcggagaccgcacaggaacgacagaagcaaaagcggaagccgaaagaagagcccaagcccaccagagaggagaaacccaagagagccccccccagagggcaaaaccaggggccaaagaaaacacggacaagggaggacccagaaaaggaagagcaaagagcaaacgacggcaaggaagcaagacggggccacggcagcccaggaccgaaagagagaagggagggccgccacaccacccacgaaccacaaggaggggaggggggggcagagacggccaggcggcccaggccacaggagccacgccgggccgacgagggggggcacaggacagggggacgagaggccccaaaggagcggcgaggaaaaaaaaggaaccgggggcaaagggaacgggcagagacgaaagaccccaagacaccccgccccaaaagccagcacgacaggaaacgcaggaccccggaaaaagcacccgcccgcagaagggcgaacaagcagccaagggaggaacaaggcggacaagcagacagccaaaaaaggcaggagacgcgccccccccgccgaggcggaaggggacgggagaggcacgcgacgggaaggagcggaccaacaacagagagcgaacaagcagccagaggacggagcgagagagaaagaacggagaccacggaggggacgacagcagcggagcaaaaccaagaggcaccaaacacaaacaaggaaaaggcacagagggcaggcaaggcgcagggaggcaggaaaagggaaaaaccgcgggagaaacgggaagccccaaaggggggaagaaaagcgaagggaggagaacccagagcacaagaaggaaaggggagcaggacgacaggggcaggagcaaaagcgaaagagaagcaccgggaaaggccagagcaaaagagggggacagggccgggagacaggaccggagggagaggggggggagggagcgaagccgacagagagacacaggaaccaccaggggcgagaggaaggaacgcaacgacgagaggagccaccgcacccaggccggaggagccccaacaagccacgcagcccaccccggcccaagcgaccccaccagccccaagagcggggcaaggcaacaccaccaacccagcaaaaaaaggagagacagggccgcaggcccaggcgccgaacccagccgaggacccccaccggcccccaaaggcgggaacaggagagccacaccacggcgacaaaaaaggaggcgggccgggcaggggccagccgaacccagcacgggaggccgaggcaggggacagaggcaggagacgagaccacgggcaacagggaaacgccaccacaaaaacacaaaaaaagccgggcgggggcggggccaagcccagcacgagaggcgaggcaggagaaggcagaacccaggaggcggagcgcaggagccaagacgcaccacgcacccagacgggagagagagcgagacggccaaaaaaaaaaaaaaaaaaaaaaaaagaaaggaggccggcaacaggggagaggagagaagaggaggcccagggcagaaggagggaacagaaaacacaaagccaacgacccacagaaacaaaaaaaaaggaagccggccaggaacgaaacaaaaaagaacgaccacaaaacaaaccaggcagcacaagggacacccaaacgacacacaaaacaacagaagaaaaaagcagggccacacagaagaaaaacaagcagagaaacaaaccagccaac

SEQ ID NO: 278 - RNA, 2113 nt, Homo sapiens
caccgccaccccacccaagcaaagagagagagaggcgaaaggggaggagcagacaagggaagaccgaagaccaggcgaggagccgggaccccgcagggacgaacaagacacccgccccaggcagcccggccccagagcaggagaaaagaagaaacccccccgcaaacccgggccgaacaacgcgccggaaacaagaaagacacagcccacgaccccaccccaccagaaacccgcgaaaggcgggggcagccgccaaccaacccaaaagaagaaaaagaaaacaacaaaaacccaggcaaacggaaaagcagacagggcacccacacccagacagcgaaaacagaagcgggggcgggacagacacgagcaggagcaagcacacaacacaagaaacaaagggagcgcccagggagaaagggcccgcaaacccgcccggaaggaacgagagaagaagagacgaaaagcggacagccgccacacggggcccaaaccggcggaggcccgcggcaaaaggaaacagggggagaggaaagagcccagcagcacgaagaggaccacaagaccgcggaagagcacacagcgagacagcccaaacaagcagaaaacagacaagcgcaggcgacggaaagagggcgcggaaggggcagaggcccaccacgaaggccccaaaaaaggaaggcaggaggacaacaccagcgggccggcgggaggcccgcacacagcaacaaaacaccccaaggaggagcccggggcgcgaccaaccggagaaaagcagagaaaccaaacacgcacacagccagagcaaggacgacagggagcgcgcccccccggagaaaagaagcacaggagaggccggaagacagggggccaagccgagaaccagggcagccgaagaaaacagaaaaaagcacgggccccaagccagacacaaggcaggaaggcgcaaagcagagcaaagcccagggaccgcgaggccgccgaaccaggaagagggaaggaaggggggagaagccagcccggaaaaggccgcagcaagaggacagccgcgggcaagggaagccacagagccagaccagaaacgaaggagcaccagggaagccagcaagaggccaacacaaaccaggagggagggcccaccggaagcaggcaggaaacacaaccaacaaagcaggcaccgccaggggagagaagagaccacaggaggccccccggaaggagccagagacaagggaagcgaagaccacacaggaaggcacagagggcaccccacgacccccaagcaccgcaaagagggaagacaaaccacagagaaaggaagcgagaggcaggaacaacagacaaaggggcaagacaggaccagagaaagggagaaggcagcaaacacggcgacagaagaacaacaccaaaggcgccggggaggggcacaagggccagggagaggcacggggagccggggaggcgaggagggacaaccacgcccgaaggccagacaaggcagacgaaacaggagacggccaggaggcacccacccgccgcagcagaacgcccccacccacccgccagagacaagagacaggagagcgagaagaacgaacaggaaggcccagacccaggagcccaggaaaccaagaagagggaaaggaggacgcagggagacccacacccggcccaacacccccacggccaccagaacaggaggagagagaggccaggcaagggaaggagcacacaggaaaccgagcagcgagaccaggaccacaaaaaaaaggaggaaccaggaaagagcaagcacaaaagcaaagggacaaaccacccagcacacgcagccccacacaagcaggcccacgcgcagcaagggcaacaaaggacaagagagaaaagcagaaccagaccaaacaaaaggaaaaggagacacgcagggaacagaagaaaaaaaagagaaaaaaagaagaacgcacagcaaaagaaaagacgcaaaaagaaaacaggagcaaaagaaaacgccaggacaaaggcgagcacaacacacgagacacgcgaaaaagaaagagggggaaacaaaagcgcagaaaaaaaagacaaaagcacaaaggaacaacaagcaagaagggaa

SEQ ID NO: 279 - RNA, 1946 nt, Homo sapiens
cgcagcagcaccagggcaaaggcggcagaagcggagacgagccagaagcgacccaaaaaagaacgaaacaagagcaggcggcccaccagcggaccacaggcccacggggccagcagaagcagccccgacacggcaggccgggccgagaggcggcggggcaggcggccccagcacaggaggggagcggcaggaggcccggaggccaagagagccacgcacaccccagcccggccgaggaaaaaaaaagggccagagaaagacgaaagaacaagaagcaaggccaccggccgagaggaggcccggccaggcggaggcagggcggacggcacgcaacccacccgggcaagcgaccgcccagcccccgagagcgggaacaggcacccaccaccacgccggcagaagagagacagggcgccgggggcaggcggcccgacccagggaccgcccgcccagcccccaaaggcgggaacaggcagagccacggcccggacaagccaccggccaagccccggaagagcacaaagcaagaacaaaaaagacgaacaaaggaagaacaccgcgagcacaccagcgcgagggagcacagcggggcggccagggacaacggccagagaggcaaagagaaagaagaccagggccagaacacagaggccccaccaacagcaaaggggccacacagcccacccgggccccgcaaccccaccgagggagcggggcggagacggagggagaaagaggggaagcgccccgccccgccccgagccggcccagggcgggcccccacagcgacagaaagagaaaagggggcggggcggggccagccgaacccagcacgggaggcgagggggcagacaccgagacaggagcgagaccagccggccaacaggcaaaacccgcacaaaaaacaaaaaaaaaaaaaaaaaaagccaggcgggcggcacagccgaacccagcaccgggaggcgaggcaggagaacacgaacccggaggcggagggcaggagccgagacggcacgcacccagccgggcaacaagaggagacgccaccaaaaaaaaaaaaaaaaagcgagacggcacgcacccagccgggcaacaagaggagacgccacaaaaaaaaaaaaaaaaaaaagagggaacagggccaaaaaaggaaaccagcaaggagcagagccggggggaggccggggaaggggggggacgagcagccccccccgccccagagaacacggagcacggcggccccccgggccgcccggaaagggcagaacgcaccacgcggccacgcgggggaacaagacgccccacccaccgggacaaagggaggcgggagccccaaggggccaggcagaaggggaaaggcgcgcagcaaagaaaaccgagacgggaagacaagaaaagaggcaaggccaggcgcaggcgacaggaagcaggcgcacagcggcagagaaacccagaagcccagaagcacagcaggggaggggaaagggggagcaggcacgacagggaaagcaggagcaaggagagcgaggcgggaaggggaggccacacacgcaagaaccacgcaggaagacagcaccaagcggagggaccgccccagacccagacacccccaccaggccccaccccagcacggggagacaacacaaacagggcagggacaaaaccaaacacagggagagagaagcaggcccgccccgggggagggagaggcgagagacaggggagagagggaaagggagagagagagagggaaagagagagacaggggagagaagacgggggggagagagggagcaaaggaaggacagagaaagggggaaggagaaggcaagcggggggaagaaccggagggaagcgacaaaaccaccagcagccaaacagaccaaaacgccagggaaaaaaaaagcgagccaacacagggagagaggagcgggccaccgcggaag

SEQ ID NO: 280 - RNA, 1199 nt, Homo sapiens
aaacaaggcccaaagaggagcgaggcacaacaaaagaaagcaacaaacaagaaaaaaaacacaaaggaaaaaaaaaaccacacaaaaaaaagagagaaagacaaaaaacagcagcccacaaaaacaaagaagaaagaaggaaaaccaaggccacaacgaaagggaaaagaaaagggaaagaccaggacaaccagccaaaagaagaaaagagcagcaacggacggaacgggggcgaccaagggaagaaccaggaaggaaaaccaaaacgcagccacaaagggaagcagcgaggacacaagaacaacacagggaaagggagggagaccagaagggaagagggcggaaggagggaaggagaaaaaaccagggacaagacacaccagggacaagacaaaaagccgagccaccacacacaacaccccgaagcaaaaagggaccccaaagcaaaaaaaaaaaaaagaacaaccaaacaggcaacagaagaaaaaccaagaggggaaaaaaacacacggaaaaagcgcagaacgcaggcaggagacgaccaacaccccccaccaaagggaccagagacaaaaggaacccgggggcaggacgggaaaggccacaacccacgaacaaaagacagaggagacagaggagagggcggagaagccgaaaaagagacaagcagaaggagaccaaaaaaggccaccccgggcagagggaaggggcccagaaacagcacagccacagcaccagagcgagaagaagccagcgcaaagaggcagagcagagagcgggaagaacccagacccgggacgacgaaggcggagccggccggaacgcagaggggaaaacaccagcaagccagaaaggagcgacgcagccaaaagccccaacgaaacaaggaagaaaggagagaaaaagcaagcaaacagacagaaaggaggggcaaaaacccgacaaacaacaaagaaaagacagaaccccgcccgaagcaaaccaaacacaacaacaacgccccacaaagcgacaaagaaaaccgaaagaagaaaacagcaaaacagcgcaagggcaaaagaagccacaaccagcacggaacggcagagccgaggggccgagagaggcacagaaggaaagaacaaaaccaaacagaaagaaaaaacagcaagcacccaaaaccaaaaacccgcccgcccgaccaaaggagcacaaacaaa

SEQ ID NO: 281 - RNA, 5546 nt, Homo sapiens
aaaacagaggaaaggcgagaacgaaaagaaaaacccacagcgccgagaaaaaaaaacggaaaacaaggcagcaggcagaccgagacccaaacccaagaaaggagcacagagaggaacccagaaggccagcgccacagcaccaagaaacccggcccagacaacagagcagggaacacagagaacccccagggacccagcaaaaccagcacagcagaaccagagggcagaccaccaaggagcagaggagcaccagcgcaagggaccagccggccacaaaacggaagcaccacagaagaaaaggacaagagcaaaacgccagcgcccaggggacccaacggacccagagacagcaaaccaaaagggacgcagggaaacaaagaagggacgaccccagaagacacacaacgaggagcaggcacccgcgcaggaagggccaggagaaaggcggaaggcacccaagcacggaaaggaagggcaagaagcaggcagaggggcagcaccacaggggaggacaacgggaagaccccaacaagcccaagaaaggcacaacggacagcgcagcggcccacagccagcgcacaagcaggaacagacaagcaccaacgaacacagggcaaaccaaccaccccaccagaaccaccacgagccacccagggcaccagaagcccaggcccaaagaaaaccaaaaccgcaacagcagaaaaacacgacaaacgcaaccaaaaaaaaaacaaacacccacaacaacaaggccaacaacacagcgaaccacgggaccggcaaacccgagaagcaagagacagagccgccgcgcccaggcggaggagggcacgaccgccacgcaagcccagccccgggcagccacccgcccagcccccaagagccgggacacagggcccgcgccacgcccggcaagaaaagagagacggggcaccagagccaggaggccgacccgaccggaccgccgccggcccccaaaggcgggaacaggcggagccaccgcgcccagccaagaagcaaaaagggggccgacaagacggcccgacgacaccaagaacaaacgaccacgagcgagacaaaaaaacaccaggcaggcaggagccacgccaaacgcagcacgggaggcgaggcaggggagcgggcaggagcgagaccacccggccaacacagcaaaacccgccaccaaaaaacaaaaaagccaagaggggcaagcgccggacccagcacccgggaggcgaggggcaggacacggagaccaggaaggaggcgcaggggccagaagccacacacacagccgggacagagcaagaccaccaaaaaacaaaaaaaaaagaaaaaaaaaagaacaaaagaaacaaaagaacccgaaggaaaccccagaccgcagggacccccagccgcaccaacccaacccccgaggaggcggccaggagccccccaccagagacaaaaaagaagaggaaacaaacggacccccacccgcaggcccaggcagggaggcacaagacaaagaaaaacaagaaacaacaaagaaaagaagacaccaacaaacacgaacgaaaaaaaacagaggaaagagcccaacaaaaaaccaagaccagagaaaacaaaccacaaggggccacaggagcaagcaaggagacaccagagacaaagggcagggaacagcccagaagacaccgccaaacccaggagaggggacaggggcaggaacaaccaccagaagaccaaagaggagcacaacggacgcggcacggaagaggaacggccacacacgcaccaccccacaccgaggaaagacccagagaggagaaacagaaacaaggcccaccagaccagcgccaaaaagagccaggaggcggacggaaagaaaagagggccaaaaggcaaaggaaaggagagcccaaaccgccgcaaaagaagcccccccaaagcacgacacccacccagacaaccaccgagcagaagagcccgagccggcaacaagggggcgcggggcagggaccaagagccggacacccagagcagcacacgcaggcacaaaaaaggcggaaacaaaaaggaaccggaccccaaacgacaagccaaaagaaaagcaagcgggaacgagcacaaaaaaacgccgaggaaaaaacacaaagcaaggaaccaaaaaagagcccacagccaagcaaccaagccaaaagaacaaagcggaagcacagcaccgaccaaacaacacaaggcacagaaccaaaacagcaggacggaccaaaacagagaaagacaaggaacagaacagagccccagaaaaagccacaacacaaccacgacgaaaaccgacaaaaacaagaaaagaggggaaacgacccaaaaaagggcgggaaaacggcagccaagagaaagcgaaacggacccccgcaccaacaaaaaaacaagaggaaaagacaaagagaccaaaaccacaaaaacccagaagaaaagcaggcaaaccaccaggacaaggcagggcaaggaccagcaaaacaccaaaagcaaggcaacaaaagccaaaagacaaagggacaaaaacaaagagccgcacagcaaaagaaacaccacagaggaacaggcaaccacagaggcagaaaagcaacaccacgacaaagggcaaaccagaacacaagaaccaaaacaagaaaaaaacaaacaaccccacaaaaaggggaaaggacagaacagacacccaaaagaagacaagcagccaaaagacacagaaaaaagccacacacggccagagagaaagcaaacaaaaccacaagagaaccaccacaccagagaaggcgacaaaaaagcaggaaacaacaaggcggagaggagggagaaacaggaacacaacacggggggacgaaacagcaaccagggaagcaggggcgacccagggacagaacagaaaaccagacccagccacccaacgggaaacccaaaggaaaaacagccgcaaaagacacagcacacgagagcagcacacacaaagcaaagacggaaccaacccaaagccaacaagggcacaaacacgaggaaacagcagccaaaaaaggagagcagccgagggacaggagaagcggaaaccacacccagcaaacaagcaaggacaaaaaaccaaacaccgcagccaccaagggggacgaacaagagaacacacagacacaggaaagggaacacgcacaccacggccggggggggggggagggggaagagaagcaggagaaacaagaaagacgagacggggcagcacaccaacaggcacagaacaaaaaacaaccgcacgggcacagacccaaaacaaagaaaaaaaaaaaaaaaaaaaaaaaaaccgcccggaccaggagcgcaacaaagaaggccacaacccccagaagccccccacaaagcacaggaaagccggggcccaaaccagaagcaacccccaaaagagcccaaaacacagcggaaccaccgacaaaacagccaccaagaggaaaggacaagacggaaacaccccgcccaccccaagacaaacaaagaccccccacacaacagaaaagagaacgagcagagaggaacacaaacagacccacccacccacacgcaaaaggaacacgggcacaacaaagcccacaagaagaaccccccagccacccccaccccccccccccccgcggccccccaaaacgaagcccaaaaacccgcaaaaggcacagacacagagccgaggccccggggaagccaaccggcaaaaaaacccaaaacgagagaccgccgcagggcaaaaccagaggaaaacacaagacgggaaacggcggaaagaggacagagcagaaccaccaaaaaaaaacagaaagcccgagagaacagaacccgaaggacaaaccaaaaaaagacgagacggcaacccaggccacacaaaaaccaaaaaaaacgaagaccaaggaagaaagccagccccaagaccagaaaaaagaacgcagccagaaggacgaggaacaagaaaagaacagacaggacacaaagacagcccccccaggggaccaaagagcccacgaacagcgagacacaaccgccaaaaccgaagggcagcaaccccaacacaaacgccagagccccaaagcgagcgcgccaaccgggagagccggacaaacgccaaaggagaggaccaccaagcaacaaaagacaaaacgccaagaacagggccaagaaaagccagggcagagacgagaaaacggggaaggggagagggggaaaggagaggagaaaaaaaagcccagaaggggggaaacgcgaaggaaagggcccaaagcaggccacgggagagaagcaagcgggcagaggagggccgcaggaacgcaggaaaggcaggagagaagggaccgcccccggccagggcccccccaccgaggaaacgacagagagaagccaaggaggaaggccagaacgaacaagccgcagggacaacgaaacccccccacagaggcgggcccgcaaccaagcagggaaagaaaagaaggggaccccgaagaggaggcccgcggcgcacccgaccccccagggcccaacacgcgaaaaagccaagaccagggacgcacacggagaaggcggggcccgacacacgcgggaggccgaagcaccgggggcgcgccgggggacacgccgaagcccaccccccgccggaaagcagccccgccccagcgcccgcggggcgaggcggcgcaccccgcggaccccaggcgggcgagggggcagcgaggccacaggcgcgccggggagaggcagcgcgcgccagcaggaagggagcacggccccgcagccccagagcgggcaaacaccaggcccaggcagcgaaaaacacagcaggagcagcaccgaagcgacgcagccccccccccccccccccccccgccacgcaccgccaccaccgggagccgccccgcgcccgccccgccccgccccccccccacccgcgaacagcagcggcgcgccgccgagcgcccaggccagcggaacgcgcgcgcacaaggagccggcggaggcggcgagccggacagcgccggggccccgcgagcccgcagccccggcagccgggaaaggcgggcgcggggccgcagccgcccgcccggagcggcccaggagcacgccgcggggagcgcgggcgccggggcggagcgcgcaggaggcggagcggacaccccggccaggagggcgagccgcgccgaccgaggggggaggaggaggaccggaacggggacgcagcaggggggcggccgaacagggcggaccgcacgcccaccgcgagccaggcgcgggccggagcgcggcgcagagacgagggccgccgggccccgcccgggagagacggagcccacgcgagaggacccccgggcggggcaggagcaagaggggggcggcgcgccgagacggcacccccccccgggagccggcggcaccgagcggagcccggggcggggcgggaaaggggccgccccaggcggcgccgcccagagagcgcaacccccgaggggcccccaggcgccggcccccgcgcggcgcgg

SEQ ID NO: 282 - RNA, 3601 nt, Homo sapiens
cgggaagaccaacccacaaggcagaggacacaggaaaacacagaacccccaacaacgcacaccacgacagaaggccacaagaccaagaaacaccaaggcaagaaaccacaaaagcacgcaaagaaagagacggaaccagaaacaaaacacagaaaaaacaaacaccacagaagaacgagcaccagcgcaaggcaccgaaggcaccgcagggagacacacccccacggagcaacacgaacacacggaaacgcagaaaggaaacggggcgagaagaggaaacacacaccaagcagacggggcaccaggaaacaagagaggaagagaaggcacaaagagcccagaggaaggaggagaggcagcggagagcacgaggaaggggcacaggggggggagggccaaggaggagcccggccacagcaagcaggaaggacgcacaaagaggcccccaagggaccaaggcccagaaaaaaagggccgcagcacgcagcggggccaaaccagagacggggaagggcagcaaaccgccacggcacagaaccagaacaaaccgaacgcagcacagaccagaacaaaaaaaaaagccggggcgggggcggggggggggggggcggggggcgggggcagggcacagcaaaaacacaaacagaggagcgcccgagcccacccccggcacgaggggaaaaaagccccaggaaagggaagaacacccaaggacacaacaagagccaaacagagaccagaaacaagagacggccgcggagacagacccaaaacacaaacgggggaaaccaaaaacagccggggcaagacggggacgagcagaggaacaccgcccggcggcgaggcggccgcggggggggcaggcggggggcaggccccccccagagcggacaccggccaggggaacacgccagcggccgaggaagacccagccggcaccaaggcaacccaaccgggcacgggagacacgcaagccacacagaccaccacagaccccaaaggccggcacaaggaacccacaaaccgcccgccaacagcgccggagaccaggaaacagggggcggggacaaaaacacacagcggcaaggcacacccacagcacgaaggacagaacgagacagacgcagcaaagacgaggagcccccaacaggagaccaaagacagaaaagagagagaagccgaagaaaagaggaaagcggccccagcaaccagggaggccaaccaggccaaaaggcaagaaagggggccggccccaccaccccagggcagaccgggcaaacaaccaaacccgggccagcgcccgaggggcaaaagagggaacccgcccgccccacccccgggcgggaggagaaagaaagaggagcaaaagcacgaaaaccacaggaaagcagagagcaagacgcgacaccccggacgggccccagggacaggccgcggccccgccacgaggcacacggggccaacaaggaggcaccagaaggaaaacggggaggaaaggaggcagagcagggccacaaaagccagcgacgagaacgacgacaaaaaccaacaggaggaaaaaggaagacaaagacgagaaaagacgaaaacaagacgccaacaagaggacccccaggccacaaaaagagagcccacacaagggccgaccagacgcgagaaaaaacagacaaaaaggaccagaaagcagcaaaaaccgaacaaaaaagcaccacacagaaaccgagcacacgagcggagacaccaaccaccaggcagcggcgggcaagccgggccacagcaggcccaggaacgcccaagggacaggagcacagcgcggcaggagggcggaaagagaaaccccagccagccgggcgcgggagcacagagaggaaggaaagggacaaaaacaacaacaaaacgcaacaggccagcccagagaaggaggcccaggaggccgggacgcggcccaagaacaagaacaacccaggccccaggagggcccggaggcaggcgagaggaagccacgaaggagggaagaaaggaagaggacgaaacgacacagcagccaaggacccccccagcgaggaggccggcgccccaccccaggagacggccccaccccacgccggcccagcaagggacccaccccgccccaccaagcccagcacaggagcacaggagccgaccacccccccacgcaagcgaccgccaccccgccacccggacacacagaggagccgacagggcaggcagcacgacacgcgagcaccacgagccccagagccgacggagccgaggagccgggccaacccgagaagagggaggagaagagcaagaagggaggggcaaaggcaaagccagacaaaaacaaacaaacagaacacccgaggaggggagcaaacgcaaagcaaaagccaaggggccgcggagggggcggcggggaggggaggggccggggaggccgccaccgacccgcccaagcgccgaggcaggaacaagcgccagagaccagagaccacaaggaaacaggaaccaggcgagagaggacccgacaaagaccacaacgcccaagaacacggcggaccaacccaacaacgggacgaaccagcccgcagcgccagcggcaagcccaaaaacagacggacaacccccgccaagcaggaagaaagagcaaaaagaaccacagaacgcgcacaaccagaaccagcagcccaaagcagcccaaacagcgcaacaccccacagcccagaacaaaccccgagcccagggaagagcccccccgcaggccgcccacaagccacccgggagccccaacgccagccccaccccacccccgcaccagaagcacgagagagaaagccccccgcacccagcgccggcccccaaacaacccccaccaggcccacgacaggcccccaccagcccagcaaggcccggccaccccggcccagacgcgaccccaggcacgggacccccaaaggaggccagaccggaccgaggaaacaaggaggagaacccccaaggcccgccccagccaggcacgcgcagagaaagaaaagcccaaagaacagcaagaccaaaagaccccccaggggaaggagagccgcacaccaaggaggacaggcaagcaagggggcgggagaggaacaggccagagcgcacacagcgggaggaaggggccgacccaaaaaacccggagccaagcacgagaacaaaaacgcggccaccagggagaggagaagaacaaaagcaacgcggcgagaaacaaaacagcaaaacccaacacaacaaggccgggcaggccgccaccaccaccaagggccccccgaacaaaaccccggagacgaaaggggaagccaaaaaaaacccaacagaaacaacaaaagcgcaaagcaaagggaagcacgagaaagccagcagagaccaccaggaaaggcacccacccaggcgcgccccagcccggcaggaaccacagaccagaacgcagcaaaagacccgcaaggaggcggacccagccagcccacacgcaaccccaacgcaggcgaggccgacccggcgccaaccagaaccaccgcccacaaaagcaccccccacacccgcagcccggcagcccccccccccc

SEQ ID NO: 283 - RNA, 3064 nt, Homo sapiens
cacccccaaaggccccacccccaacccacaggggaggaccaacacacgaagggaggacacacagccaagcacacacccaagcaggcgacgcaccgaaggaacagagcaccccggagcggaaggcacagcgaggaacagagggcagcccgccccaagcccccaaacagaccgccaccacacagcccgacccaaggggccacggcacgcccgcccgaacgacaacagaccaagagccgcgaccgcagcgcacaccagacaagcagaaccccaggagcaaggcacaaaagagaacagccagcaaggagaaccacaggaggagaggcagaggaagacacgcacaggcccaggacgacccaccaaacaccccaaaccaggaagaggaacaggaaagacgggacccaaagcagagaccccagacggacaccaggccacaagaggccgaacaaagaagcaccgaacagcgggagccagcgccagcccaagaaaaagagagagaacgagaaaaaaacagaaagaaaaagaacagcaacccccaagaaaggggagggaagaccacaaagcaagcagaaaagaaaaacaagcaaaccaaagggagggaggaaggaggaaaccaagcaagagggaaacgcgagggagccaaaaacccccagaaggcggaaaagccaaaagcagggagggaggagaaagcaaaaaaacaggcagaccagaagaagacggcaccacacacaaaggggccaccgaaccgacaaaacgaacagacgcaccacaagccagcaaaagaggggaaacgcaggccggccggaagaaagcaagcacacaaccccccaaagaagcaaaaaaaaaaagaagacgggggagaaacacagaaacagagccaggaaaaaaaacgaggaggccaaccaaccagaaaaacagcccaaaagcaaagacccacccacaaccccaacaggcaggaaagaggcaagaaaagcgacgccccaaaggcccggcccaaaaacgcccaaaaaacagaagcccaccgaaacaaagaaagcgaagggaggagggcaggacagagggcagagagcaagcacagacaaaacaaccgcgagaagaggccacacaaaaacccagcaacaaagccaaaagcaaagccacgcagcaagaaccacaaagagccgaccaaagaacaccacaacacacacacaaaaaggacaaggggccagccaggaacacgacacacagcccacacccgaagcagcggccaaaaaagggaaggccaggaagcccaaacagcacaagggagaaaccgaaggcaaggcgccgagagcccaggcgaacaggacgaaacaggccaacccagccagaacaagggccagaaagcaaggagaaaggggagggcaccacagaccaaagccaccccagaagcgccgccgaaaccgggcccggggaagcggaggcagggcaagacacgccacgaagccaacccccaagccaagcaacccccacccagcccaagagagcgggaccacagggcgccaccagcccagaaaagagaggcaggggcccaggcaggcgcgacccgggccaaggaccccccccagcccccaaggcagggaacaagagcaaccaccacaccggcgcagaggcaacaaaagagaaaggaccagggacacacaaagccacgacagaaggagaggcaggaacaccggggcccaccccacgaccagcaggaggggaacgacgggaccggacaagagaaacagaaaaaaaccaagaacacaagagccccagagacagaacccacccaaaaaaagcaaggaaaagacagcacaagccaaagcaaaaagaagaagaaccaaacacggaggaaagccaaaggggagacgggaaaaagcaacccacagcccaaagcacccgacgcaggagcggggcacaagacccggggagggcccgagcaagagggaacacaggggaacagaaggccggggaggaagcgcgcccccaacagcccaagcagggacccccacccggcagaaggccacacagcagacagaacacaggcaagccccccccgagcgcccagcccagggaggcacccagcaaacggccagggacgcccaccccccaaccaggacaacccaaaaacccccgaaaaacagagggggccgacacacacgaaaacagccaaaaaggaagccaagacagacaccaaacacaccagaaaaaacgagccaacgcaaaaaaaaggagaggaaaaagaaaagaaaggaaacgcaaagccacaccaaacagaaaagagagaaacccggaagccggagaaacaaacaaaaaaggccccgaggaggaaagaaagaagacagccaccaaacaaaccacacaggaaaacacaaagggaaacggccagaaagcacacacgggccccaaaagcaacacaggacaagggaaaagaaaggagccccaggccaaaaagcacagcacccgcagccacacgacggaacacgaccagacacagacggacagagaacccaggggccacccacacaccacaaacgacaggaggggcccagagaaaaagcggccggcacggcaaagacaacaaacacaacacggaaacaaggcaaaagcccaaaaagaaggaaaaaagggaaaggaaggcgaccgccagaaacagaaagagaacgacccaccggcagaggcaaacaagccacagaacccgaaagcaacacaggaaggccccagggacaagaagggaaaccaaaaacaccaaaagaggggcaagggggggaaaccacacgaaccgaggcaaagaaagagaaccaggaaaggaggagagacccaaaggacaaacgggcaagagaggcaggaaggggggaggcaaaggcgggagggggcacgggcaagccacagccacagcgggacaagggcagaaaaccccgccagccccacgaaaaagaaaaaccccgcagcaagacaacaagaggaggggagaccagcgccggccaaacccaagccgccccacgggacaaagcaagaaacacgacgacaaaaaggaaaaacgacgcccggcagggggaagaaagga

SEQ ID NO: 284 - RNA, 5167 nt, Homo sapiens
ggaaaaaaaaaacgcaaacagacagagaaaaggaaggaaccagcaaaaaacaaaaaccagaaagacagaagcaaaaagaaaacaagaaaaaaggagaacagaacacagaggaaacagaaaaagcaacacaggagacaagaaaacaaagggagagagccaccgaacaaagagacagagacaaaaagaagcagcagggcaagggcagaaaaagagaaggagaaggagaacgaaggggccagaagagagggcagagggaccagaaagggagcagccgaagccgaaaaagcagcagaccacagagacaggcccggcccgcacgcaagcaaccggccagccggaaagagcccccaagaaacacaaagagagcagaagagagcagcccaagcggaggagaagccgaagagcagcaaaaacccacgcaggaggaaaagccccaccccccccaaaacaagcacacacacaacacaccacacacacaaagacggcacagaccgggcgcgcgacagggagggagcgaaaagaaaaagaagagcgggcccgaaggagggaggagacacgagggaaaagaaggagaaagaaggagaaaggaggcagagcaccaaagaaaagaaaagagcagccaagcaagggacaaggaacaaaaccaggaggggaaggggggagggagggaaacaacacacccagaaagaccagaaacggaaaaaaaggcgagagacagccgcaaggagaaagccaaaagaacagacaaaggaaagagaggcagggcaggccaacagcaggcagggagaaagaaaaccggagaaaagagaaaagagaagaaaagggaaaagacaaagagaaagcaaaaagagcaagacaagaaagggccaggcgcaggaccagccgaacccagcacgggaggccgagggggcggacacgaggcaggagacaagaccaccggcaaaacgggaaaccccaccacaaaaacaaaaaaaaagccaggcaggggcaggcagcgagcccagcaccaggaggcgaggcaggagaaggcggaaccggaggcaggcgcaggaaccaagacgcaccacgcacccagccgggcgacgagcaagacccgccaaaaaaaaaaaaaaaaaaaaaaaaagcaagacaagacagagaaacaagcagaagagagaaagaaggaggaaggaagagaaagaagcacccaaaaaaaacagacaaagaaaaacagaaaaacaggggaagagaacacaaaggggagaggggaaaaaaaggacaacaagaagagagagaaagaaaaaagagagagaaaaaggaggcaagaagggggaaggaaagggagagaagagaagaggagaaagaggacgaaagaccagagaaaaagcaacagcacaaggcagacacaaagcagaagcagaaaagggccccggcccccgaccacccagaaaaaaaggcccacccaggcacaccacccggacagcaccacccacaacccagaccacaggacccagccagcccgccaaaccacaccaaggcagaaggcccgggagacgaaggccagaccaccacggagaccaagacccaaacaacaccccaaaacgagcacacaccccaaaaccagccgcccccaggccacacgaaacaaacaaagacccacaagagaaaccagggaagaacagaagggaaaaaacaggaggaaccacaaaagaaaaagagacagagagagcccacccaaagcgggggaggggcagcacaagggggggaaggagaacgaaggggaggggcacaaaaaaaagacaaacacaaaggacacagccacaagaaccgaaaaaagaaggcccggcaggccaaaaggggccaagaagccaagaagcaaggacgaaagagcaagcacgacagagggaaggcacccagggcgggaggaagggccagggaacacagacacgggagggaggggaaggacagaggaagcaaagcagaaacagcccggacaccaacaggaaggggcccacaggccccaagccagaacaaaagcgaaacaagcccggccgcgcacgacggagcagacggacaaagaacagggggccgccagaaccgccacagcaacccgacccgggaacgcagggaggcaagagacaaaaagccaaaacagaagggcccggaggggaaaaaaaacacggaaacaagagaccacaaagcaacaaagaaagggaaaaaagcgagccaccgcgaaaaaaaaaaaaagaaaacagcccaccacaggaaaggcagcacaacggaaaggccaaaaagacaaaagccgcaccgcaggaaagaaaaacagaaccaccagcaaaaaacaggaaagaacccggacgagaaaaggaccaaaccgcaagaagaaaaacaaaaaaaaagcgaacaggaaaccggcgcccgcaaaagaggaaagggcaaaaagaagaagagcgcaaagccagagaacagacgaagaccagacacaacaggcgccggaaggaagacagaaaaaaccagaaagaaaacgcaagccccagcagggaagcaaagaaaaaacaaaaacagccgaccacaccgcaccagaaccaggaggaaaacaacacggaaaaacacaggggaaaagaagaagaacaaaaagaaacaaagacaaagaacaaagcaaggaacacaccaacaaagaaaaggggcagcagggacagggaaagggagcgaggcgggcccaaaaacccacacccaggcagaagcaagacccaacagaggccagcccagccacccccccccgccccacagggccccaggccgccaccacaaggacgagagcccacgaagaagaacagcagaggcgcgcaaaggcaggaaaggccccgcccaccaggcgcgaagggggacacaggcgcaagacagggaagggccacacaccaacacggagggcaacagaggccggcgcggaaagcacaaaggaacaagaggcggacgaagaacaagaccgggaaaccaaaggaggggagcgggagaaggcacgcaagcgaggaagccacacgcccacaagggaacaaaccccccaccaacaggagagcaccccccacaacccaccagcacgacgacaaaaagccaccgagagggagaggaccacggacgagcaacgagaagaaggggcacagggaccacgagccgagaaggcgcagccgcccaaaggaggcggagaagccgagacggaacagacccgaagcacaggcaaaaaccccacgaaggcgcgaccggaacggacagaagcaagaacgggcccacgcagggaggcaagcggagacagccaaaacgccaaagccagcaggaagggaccaggacaggaaagaggcacaaaacaaccacgagaagaaggagagaagagggccagcgccgagcagccagaccagcacaagaaagacagccacccagcaggaggaagacagagggaaggagcagggcgagccgcgccacggcaggcggaccagaccagccagaacgagccaagaagagaaggggcaacgcgagcccagcgcgacaagcggcacaggccaggccaacgagagaaagacaacggaaaaagacgcaaaaaggaggggaacaaaagaaaacagaagcacaaacgagacccaaccagagcaggaaaacaaggcaccgaccagcagggacccgagaaccaccccggcggagaaccagggaccacaggcagaaagggacggccagaccagcagaacgaggaaaagagcacgaagcacgagacgaaacacaaagcagccaggagcacaccccaaagaaaaaccgaagccaaagagccaacaaaagccaggcacgccacgccacgagaaaaagagcggaacagggcacccagaaacagcagaaacacgggaaaagaaaagagaaccgacacacgcccgcaaacaaaaccggacaaaaaaacgaaagaaaaaaaaagcacagagcgcaaggcagcaaggcgcaggaacaaacggcaccccaaaaaccgcagagaagccggcggggggagacggagcgcacggccaggcggagcacagggggaccggcacgcaagccgcccccaggcacaccacccgcccagcccccgagagcaggaacaggaccgccaccacacccggcaagacagagagcgggcacggagccaggaggccgacccgaccggacgccgcccggcccccaaaggcgggaacaggcagagcaccacgcccggcccccaggaagcagggcaacgaagaaaagaaccaaaaaaaaaaacggcaaacggcagagccaggcagagaagggaacgccagagaagaaaagagcaaagcagcccgacggcgggccaacaaacaacagcaccccaaaaaaaaagaagacagaaggaaaacgacaaagacaagaacacaggggggcccggaaggagggggaaaaaaaacccacacaggcagggacagggagaacaccacgaacacacgccaccgcaacagccgaagaaggcacacagaaaagaaagaagagccagaggagaaccaccgagccagggggaaagaagagccaagaagacccccaaccccccaagccagaaagccgacagaaagcagaacggcaggcacaggcagccaaacccagccaggaggcgaggcaggagagcgaacccgggaggcagagggcaggagcgagacgcaccacgcaccccagccggggacagaacaagacccgccaaaacaaaacaaacaaaaaaaaaagcagaagaaggaagggaagaacagagacaccacagcagaagcccacaaaaagacaacggcaaaaaaagaacagaaaaagggcagaaaccaacaaaaacggagggaaaaagagacaagacccaaaacaaaaaggaaacgagcaaaaccacgcaagagagaacagaagccacagaaaaaaaacaagcaaaagagggaccagagcacaaaaaaggccaggcccaaaaaacaaaaaaaccacgacagaaacaggcggaaacggcagagaagggcagaacaggggaaacaagaccccaaaagccccaaggacaagagaacaagaacagaacaaacagaacggagaaaagacacacccaagcaagagagaagacgaccgaaaccaaaacacgcaaacagacagagcggggcagaagccccccccacaacagggcgaggggcccccaccc

SEQ ID NO: 285 - RNA, 2308 nt, Homo sapiens
aaaacaccaaagccagccggggaggcgcagcggccgcccacccgccgcgcggggaaggggaccagcccagcgcccgggcagggcacaaggccagcccggaaaggcagaccacaacacagccaggcagcaccaggaaggggcccgggcgaagcgcaggggcagcagaggcagagccgccagaccgcagacacgcaggaagcacgcccaagagagcacaccaggcaagcgagccccggggggccgggggggggggggcccaaacgaggggagcagcaggggaccccggggagagaccaacaggcaggccggccggggcggcgggacccaggagacccagccacacccccgggaaggacgccggccaccaaggggagcacagagggcggcccacccccggggcgggcaccgagcaccagccggcgcgccccgccaggcaggccaaggcccagaccccccccgagccgaaagaagcaaagcacccgcagaggggacacccaggaggaggcggcaaccacaaaaggcccaccacacagacaaagggggcgggggggaacagagcgccggcccaggcggaggcagcgggcaacgccacggacccccgccccgggcaagcgacccgcccagccccgagagcggaacacaggggcgccaccacacccagcaagaaagagagacaggcagggcaccagggccaggcggccgaacccgacccaaggacgccgcccgcccccaaggaaccgagacggagccgccgcacaggcggaggcaggggccaccagccacgcaacccgcccccgggcaagcgacccccagcccagagagcgggaacacacggcgccaccaaacccagcaagaagagagacggggcaccaggcccaggaggcagaccgaccggaccacccacccggcccccaaaggcgggaacaggcagagccaccgcgccggccggaacaaaagacaccgaccagcaggcaccacgaaacccagcacgcggccccgaacaacgaagcgcggcccacgcgcgcaaaccaggcgggcacagccagggaaaaggggcagggcacacaccccgcacagcgggccggccaagccccgggcacgaggccccggcaaggccggcccgacaggggaggggcacgaggggggagcccggacccagcagcaggcaggccccgggcagcacggccccccaccaggaccgcagcagcgaagggagacccccccaagggaaacccccagggcacagagcaacaccgcccgcagggaacaccccacacacacagaacgcaaaagcagagaagaagggggaaaagaacgaaaaggggggcagaggcagagagccgccaccccaaacgcacagcgcacaggccagcgccaccaacaaagcagcagggcacaccccgggggggagggaggggacgagcaaagcccagggaggccacaacgccagcgccagcggcgggacggcagcaccaggcagggccggagcacggcaaggaacagagcccggccgcacaccaacagggcaacgcaccggcggcccccgggcgggagcagaacagaacacacacggggacagagcgcccgaggggcgcccaggaccacgggagagacaccacccgagccacccacagcaacccaggagagggaaccacgaccccacgaaggagacgagaggaggaggggaacagagggacaaagcaggacccaaggacagggaaggcaaggagggacgagcgcaaaacaaggccacaggcccacccagaagccgggcaagggagacagcggcacacagaggccaggggcaggggcagggaggccaaaccagggggcgacagcaccgcgggaagccagagacccaggccccacagcagcccagacaagccggaaggcggggaaagagaaaggaggccaggccaggggcgaaggacagcagaaggcaggggggggcggacaaaaaggggcgaggaaagaagaaagaccaccacacgaggagaccccaagaccccccccgaccaccccaggaagggcagcagaccacaagaccaggcaggacaagccagagaggagaccaaacaggcaggaaggggcccaacaaagaacgcaagccaccagcaaaccaccccgccagcaagaagccaggagcccagggcggcccggagagaaccaacgcccacggcacgaacacaggaggaagcagccaacaggagcacaaccagcaacacaagggaagaggcaccagaggaagcagagggaaggggcagagcaaagccaacagaagccccgcagcacacgggagcgaagagga

SEQ ID NO: 286 - RNA, 3319 nt, Homo sapiens
ccccaaaccggaaggaaggggggagcaggaacgagaggccggggccaaagcgccaggagagccaacgggccgaaaaggaccggccacggccgggggggggggggggggaggggacaggacacacaccccgccggcaacccagaaagcggagccccgcaccccccgcaacacagcaggggcggcgcgccgggcccgggggagagccgccccggacaggccagggagcggcaccacacacccagaaacgggaacacaagggcccaggacccagagaacaaccaggcacaaagccccccccaccccagcgcccgcaccaggcccgcggcccgcccccccccgccccccccccacccccccccaaccccacccccccccggccggaagggcggcaaagggagcccccaccacccacgcaggggggggggggggaaaacgcgaccaggcaaaagagcagagacagcggggggagggggggggaagccgccgggaacccggaagggacgggaggggccaggaaccgcaggacgaccgaggcgggcaaggaagagggaagacaggggagcagagccggaaggaacccagacccacacccaaagccaccgcacgcccaggcccaggaaacaccccccccaggcacgggagggcaggggaagaagcgcccaaccccagaaggcccgcaggagcaagcgggacagaccaaaccaagagggcgaaaaccccccccacaggccccccaaccccaaaagaagccggagaagacagaaacccacccagggggggaaggacaagaccagaagccggggaggaggagggcgcaggccccggcgcccagaaccccacacccggggagacacaacggcccagcccaaggggcggcccacgcgcggccaggggggaagcccccagcgaggggggagaaggagcgagaaccagcaccaggcccagagaccccggaccccagcaccggagcagcagagcaaacggaaacagggggccgggccccgccaaaggaagaacccggacaaaccccaacagaccccaggggggggccaagagggggagcagccagagcgggggacgaggcaacaggggaaacagggcccggagcagagcaacacccggccagaacccaaagacgcaggagcggaaggccaccacacgccgggcaggcaccaagccggcggccggagaggggaagaaggggccacccccacccccgccgcggagcagaacgcaccgaaggaacaaggaggggggagggaccaccaaacgaaggcaaaagaacacagggcgcaccaccacaccccaggaggaagcacccaggaaaaaccacccccccgccaggaagagacgaggccaaggcccagggcggaggaagccccaccgccggcaagaggggaccaggagccaggcgcagggcaaacggccacgcacggcgggaccggacaagcacacccccggcccgggaggagaaagaaggcccagaaaggacgagagggccggacacagaagaagggggggggaggagacgcccccagccggcaaaaaggccagaggcgcgaaggcagagaaacacccccaaccccccggaaccgccccccgccacagccccacacccccccaaacgcagggcccgggaagagccgaggaccccccaaggcgcagaaacaccagggaacgcaaagaaggagaaggcagggagaggccgacgagcgaaagcccgagccccagcgcccgggcgcaggcccgggcggggccaaggcggcccccagcccggggccgagaccagccaaaagcggccggccacggcacaagcagaggcggcccagacccgcacggaccggggagccagggccccacccaggcccccaagaggacccgccagggagggcggaaggagcggaaaggagcggaaagggggacacccaaaccaggagcaggggaggggccagggcccggcgaccccacagggagaagacgaaagcgagaaggacaaccagaaaggaaacagaccaggcagggcagaggccgaagagccagcgcaccagcggagaccggggcagcggcccccccaaagccgcccaaaaagcagcgaggcgaggccgagcaagaaacccagggccccacggcagcagcacaggccgaagccaggccaccgagaacccaacccccacccccagcaaggggccaacaaacccacaaagagaagaaaaaccaaccaagagggaggaaaaagggcccaagcaaaggcacaaaagggggccagaggggcgacgagcagggaccaagcacagggggggggccgcagcacaggggcagggggcgagaagaaaccggggcacccgggccacaggacggggcccacaaggcaaaggaaacgaaaaaaacaccccgcacagccccaaacgggggcacgggagaccccccaccccaaagggcacccgccgggggcccaagcccccagcccgcagggagaggggcccagggccccacagcaggagacgccgcgcggccccgcgacccagccacaccccacacgcccagggccggaaagcagaacacggagacagggagggagacggaggaggagcagggggggggggggggcgggggaaggggggacagaggaaagacccaaacacaggcaaaagaaagccaaagcgggcagagggccgaaaagagcaaggcagacagcccgagcggggagcccagagaagcagggaggcaaagaaaaaaaaaaaacagaaagaaggcaaaagcacagcagacaaaaaaccacgccgcccacgcaaaaacacacggcgaggccagcacgcccccagacggcagggggccgagaaggagacggcccggagacaccccgccagccgcccacgcccgggcagaggaaacagcacccaccacccaccccacagcccgccaggccgccggcgcaggacagccccagaacaccagcccaggccccacgccaggcccagcacgcaggggcgggggaggggggggagaaaccgcaccagggcagcaccagagacccccacaaaaagcaaagacacgaaaagcaacagaagaggcccaaagaacaggacagaaacaaagcagcaaggcagcgggacaaaaaagagaaaggccggcccgggaccacaccacccaggccaaacccagcacggaaggccgaggagggcggacacgaggcaggagacgagaccaccggcaacaggaaacccgccacaaaaaacacaaaaaaaagcgggcaggggcagggccgagcccagcaccgggaggcgaggcaggagaaggcgagaacccggcaggcggagcg

SEQ ID NO: 287 - RNA, 775 nt, Homo sapiens
gaagcacacaaacacagacaaccagagggaaggaacaaggaacagcagcaccagaaaggacggcacaaggaccaaaaacaacagaaggacaaaaaaaaaaaaaccacaccagggaggacgaggcggcccaagacaggcgggaccagccagggaaggacccaggcacagcaagacaaaaaccaaccacaaagccccgaaagagaggaacggaagcccgccggggggcaagcacagacgagccgacggaggaacagaccaccggcccaaggagaaggcgcgacaaccacccagcagagccaaaacaaagccacccagagacaagagaaaggaagggaagaacaccaggaagaaagaacacaaaagacgcagaacagcaacagaggaaaaggcggggacgcaagaacacaacagaaagagcacaccacaaccggagcaccggccaaccagacagcgcacaacaacccccgaagagccaacaaaaaccagaccacaacccgaaaacaacgacccaaagagaaaaacgacagaacgccgagaacaaaaaaaaaaaaaaaaagggggggcaaggcggacgaggggcggggcacaaaaccaggcaacaagccaagaaaaaaacggggagcaggggcaagacgggaccagaagccccaagaacaccgccaaaacgaggaaagggagaggggcaggaagagaaaaaggagaacccaccaagaaacgagaccagaggcaaaggcaaaggggggggcacggaaaaaggacaaaccaccaggggcaa

SEQ ID NO: 288 - RNA, 3650 nt, Homo sapiens
ggaggaaacaagaacaaaacaaaaacaacaaaacgcaagagcaagacccgaaaaaaacacaagacaagagacaaaaaaccaggaacagaccagacgacggacacaaacaaagcagagaaagagaaaaaaaaggaacagaaaacaaacacaagacagaggacaaagggacagaaaagaccagaagcggcacagaagcagccaaagagcagacgaaaagaagccaagaccccacccgacgggagccaagagaaaggcccaaccgcaaaaccacaacgaaagacaggaagaggaaacgaggagagacacaagacaccacaaaacaaggcaaaaacaccaaggggacacgcagacaacgaggcaccggaagagagggagggcgaaagaagcaggacccaggcaaaagaggaacggcacaccaggaaccacaaaacaaaagacacagaaaaacacaagaaaggcaacaagccaaaaaaaaaacccacaaacacgaggcacggagggagcagaaaagaagacgaacaaaagcaaaagaccgaacagcgcccaagcaaaagaaaccaaaaaaaagggaaagccaggaagcaaaagcagccaaaaggaaaaaacgaaacagccgcaaaccaaaagacaaggacagacaagacaaagcgcaacagcaaacacaccagacacccggccccacagaggcacacaccaccaccaacgccccacccccgaaacaaaacacccgaaacaaggcccagggcaagcaccagcgaggacacacagggagaggaaagaacacaggaagcaacagcaaaaccaaaccggaaaacaaaaagacaaccaacaaaagagaaggaagggggaaaagaaaaggggaaaccaggcaggggggcacacaccgagcccggcacgggaaacgaggcaggaggacacaagcccggaggaggcgaggaaccgacgcaccaccgcacccagccgggggacagagcaagacccgccaaaaacaaagaaaaacagaaaaagaaaaaaacgaggggcaggagggaaaggacaggaaacagaaaagaacagcccagacaaaaaaaaaaaacccaacgaaaccaaaacaaaggacacccacaagggacaagagagcaaaaagaagaagcaaaagccacacacagcaagcaagccaagcaccgaaaccaacaaggagaggaggaccgccgaacaaagaaagcccaggagcgagggaagaggaacgccgcacccaggcggaggggagggcagacgggccacgcaaccccgcccccggcaagcaccccaccagcaccaagagcgggaacaggggcgccaccacacccggcaaaaagagagagggggccagccaggaaacaagggcccaggacccaaaggcaggagcgccagccaggagaagcccccgaaccgaccacagccggacggcaaagcacaagggccagccgccccaccaaaagggcaccaaggacccacaacagaagcaaaaggaacaaaggcccaaacaggagacacccaaccaacccagagcgcgccagccaaaggaagagagaagacccagaaagcaaaggaacgccaaccccaaccacccaagagccgggggacgaccaaaaccacgcgggagacacggcgaagaccccgcaaaaaacaaaggagacacaaaacacgcagacaacagaccaacagaaaacgggaccaacgcacaaagcaaaaccaaaagcagaaaacccaaacacacaaaaacacacagccccccacgacaacgcggacaaaagccaccaagcccacgcagaaaacacccgcgcacaggaaaacaacagcacccaaaggcgagaccggcaaacggcaaacaccagaaggcacacacacagcgacccgccaaagaacaaaaaccaaaagaagagaaaaagaggcaccccaccaaaaggcaacaccaaacaaccagaacaaacgaacaaaaagacgcgaacaacaaacccaccaaaaaaaaaaggcaaaagcaccaccagggaacaagagcccccccccaccccagggaaaagaagagaacaagagaggcacagaaacagaggcgcaagcaggccaacaccaaaagaaagcaagagaaaaaggcacaacacaaacacccccgggaaaaccaaccggaaaacccaagcagcaaaaccacaaaaaaagcaagcacagaaggaaacaaaaaaagaggcaggaagaagcaaaagacaacggcagaaacaaaaaaaccggagagacggggaacaacaccaaaacaaaacccgaaacagcaccagagaaacagaaaaaggagaagaggcaaaaaaacaacgacggaggaggacacgaggccaggagccagaccagccgggcaagacgcccccacgcccacacacaaaaagaaaaaaagccaggggggggacaggcccgagccccagccacaggagacaaggcaagaggacgcgagcccaggaacccaggagagagagcaaggcacacgcacccagccgggcaacagagccaagacccgcgaaaaaaaacaaacacagacaaacacggccggacagcacccacaagagaaacgaaccacggaaccaaggcaacacaaaccacaaccacaagcgaaaccccggcaccaaaagaaagcagagcgagaaaacgacacagaggacgagccggaccggaaaaaggacgacacgggccaaaacagcgccaaggaccgcgaccggcccaggaagaaccagccggcgcaagaggacaacagaagacaggagacacagcaaaacaacgccgcgcgaagggcgacgaacgcggagaaggggaccacccacccacaggccgccagaacggggagggaagcggacgcggaggagccaaaagcagacggggacgcacggcagaaacaaaaaccaccagcaggccccggaagaaacaacccgccacaagaggagacaggcgccacaccgcaagggcaaaaagcaaaagcaaccgcgacgagccgggaggacgcgagcccagaagggagaccagcccgggcaacacaccgagaccgccagaaacaagaaagccacagcaaagcgccacaaggccaacaggaaggagcaaagagcccggaacaggccggcacgcggaaaaacccgacccgccaccacccgcggacggcgcgaaaaagcaggcgcgcagcagccagcgcgggcccgaaccgcgcgccagcgggccccaccccacgcgggcaggccaagagaaggcgcggaggcccacgccagccaagagggcaggccgaaagcgccccgccaagcaccggagggcaggcgggccggggccggccccggggccgcgaggccaccgggaggcacgcccaggccagggcggcgcagcggagggcgaagccccagaccgcaggggagcgcaccaaagagacggggacgagccagccgcaggacaccgcggagcaaacccagcaggcccggagaggccgaggccccaacacccgaggaggagcccggaccaggcgcgcccgaacaggggcggagggcaacaacgccgcacaggcaggcgggaaggaggaaagcagcggcggccaggagcccagagcgagcgggcgaacgcgcgacgaccggcgagaccagaaagacaacgaccaccgcacgccgcaaccg

SEQ ID NO: 289 - RNA, 14542 nt, Homo sapiens
cccgcagccaaacccaggaggcagcaaacacgcgccccaggcagagcgcgaccagggggccagaaacccggagacgcaccacggccacagggccccccaaagaacaaggcaaaggcggggaagaggacgaggagacacccaggcaggaacagggcccagaaaccagaaagaagagcagagagacagcaaacaaaacaaaaaaaacacaccagaaagcaaaagcacagaaaggggggggcagagaagaaggaccgaagggcgggcagagccaagaccaggccggagaaaacaggacacagaggggcgcagccgccagaagcgcgaggcccccagccacagcaagccaccggccgggcgaccacgaccgacacgggaaagggagagcccccagcacacccaccagaccagaaggacgaggaacagaaagacagggggaacccagcagaccaggggaacccagaaagacgagcaagcgccgaagcccagcccacacaagagaaaaccgccacagaagagaagagcaaaaagacaagaccggggcacagccagcccaggcacagaaaaggccaaagcagacagccgcacaccacacacacaccacacaaggaacaagggaggaggcaaagccccagggaacaggaacaaagcaccccaccgcgcgaacagcacaacaaacaccccacacaaagaaaaaaacaaagaaaacgaaagcaagccaaaggagcacggaacaacagaaggaaaaaaaaagagagaaggaaggaaggacgaaggacggaaggaagggagggaaggaaaaaaggagggaaggagagaaagaaaacccgaaaagcccacaaaagaaacaaaaggagacgaaaaggacagacaacaaaaaaccaacagaaaaagaacaaaaaccagacagcaaaaccgggaaaccagaaaacacaggcaacagccagagaaacaaaagacaacaagaagaaaagggggaggggggcaaaaaacacaaaaaaaacacaagccagcgcaacaagcaggaacgggaaaggcaagccagacgaaaaaaaaaccacagcggcaggacaaccaagaaaaaaaacaacaaggagacccaacaaaaaagcagaaacagcacacgaacaaaaacgaaaggacaaagaaaagaaccaaacagacaagggcaaaaaaaagagaaaaaacaaaacaaaagaaacaacagcgacccacagccgaaaacgcacggccacagggcaaggaacagggacaagggagaaaaaagcaaaaggaacagacaagaaaaacgaacaaaacaccccaacacgcaggggaggcccggggccacagaggccaccccaaaaacaaaaacacgcggagccagcacacaggaagcacaggcagaacagaacaaaacaacacaaaagacccacgggaacaaacacagacacaggagagcgaggagaacaaaagacagagaaaaagaaacaaaagccgccagcccgcaaaaagcacaaagacaggagcgaccaggcaggccacgagaagccgaaacgcgggcggccagcccagcacgcggagcccgggaaggcaggggccacgaaccaacacaggcgagccagagaagaagcgagcacacccaaagcgagaggcagcaagagaggacgcagaaagcagaaggacacagggaacaaaccaggccaaaaaacagcaagaagaacagaaaacccaaccacaagacgaccagaaaaagggggcaaaccagcaaaggcaaaaccaggaccacggcagaagaagaacgagccaggagaaacaggacagagccccagcaagagcacaccacgaacacagggcaggaccaccaccagaaagcagaggcacaacaaaacaaacccaaggcagaaaaggcaccacgccaaggcaacaaaacacgccgcaccacaacgaaaagcacacaacaacagcagggacaaaaggcaaaaaaaaaagaccaacaggacaaacaaaaccaaagaacagaggggaaaaaaaacccaaaaaacagaaaagagaaaaccacaaacaagaaaaaaaggagagcaaaaaacaaaggagcacaacaagcaagaaaacacgccccccacgcagaggcgaaaaaaccagcaccccacaaaacggcagcgggaaacacaccaaggagcaacccaagcacgaccgccacaaacagcggaaacccgaaagggcaaaaacccgcgaaaaggcaacagaaagaacaccagcaccacaaaaaggggcaggagaaaggggagagaggaggaacagggaggggagaggggaagccaaaaagaagcagagacaccacgacaaaacaaccaagacaaagaggcgcaaacaaacaggacacccccgccccacccccccccacagacaccccccggaagacaagcccgccacgcgaaggagagaaaagcaaaaggaaaagaaaaacaaaagacagcacgaacaaggaccaacgaaaaagagcagagaaagagagggaaaggccgaagaaagcaaggcggaggcagcccccgcccggaggcgagggggaaccccccagcccccgggggcaggccaccccagagaaggagacccgcagcgaagcccaccaagcgagcccagcagccagcccagccggcacgccgagggcgcagacgagcgcagacgagcaggagcgggcaccacggccccaagggaaagggagggagcggggcacagaaagccaaaccccccaggcagaggcacagggaagcgggagcaggagggaggaaaagccagagcgcaaaacacaaaaaacagaaacagcacacacgcccaggacagcccagcaaacaggggaaacccaggaacccacaacaacccagaggaagacacaagcccagacagagaggcacagaaaaacaagaacgccaagaacacacagcacaaggcaaacagagacgagcccagacacagcccgaccagcacccggacaggcacaaccaggcagcacaagaacacggagagcgaacaaacgaaccgcccaaccccagaacacagaaagacgcagggggcccagggcagaggacaaggccccagggacaaagacagccaggagagagccacacaaggccccacacggaccaggacccagcacccgccccccgaccagacaacaacacccgacacaccgccaccccaccccgcagggaaaaagccacaaacgaacaccacccgaaaggagagagacccccccccgagaggaccccaaaaagaaagcagcaggagggcggacccaagaccaggcaaaagaccgcagccccccggaaggggagcccccgggggaagccagcgcagcaaagacaccagcccagaagaggaccccgggaggaacgggacccgcccacagccaaggaagaaggaggcccagcaagaacacgaagagccaaagggagaaacccagccccaggcaacccaaaagacagaacccggggacacgaagcacccagaaagaccgagcggaaccaccgcaagcgccccagaccgaccgcagacacggcaagacaaaagccaacacacgaaaacggggcagagagcaaagaaacgaaacagccaccaacccccaccccaaccgcaagcccccaagacggagcgggaaggccaggcacaaagaaaaggcgacaccaaggggaacgaagcaaccaagaaacaagcgcagaaaaaagacaaaagagagagcaagaagaagcggaagaaacaagcacacgaaaggagagccgagaaggaaggggaggggagcaggggggggagaaagccaaagggaacgcgccgcaggcacggcaggacgcacaccaagaaaaccagcaccacaggaagaaacaaccgcaaaaaggagggaggaaaaaaaaaaagggcaaacaacccaaggcgggcgggaagagaaacagaaagcgcaagacagggaacagagaagagccgccgagggccaaaccaggagaacacggagaacaacaggccgaaccgacccacaggcaacgaccaacacaaccagccggcaagagaaacgcgagccgcccacgaaagggaaagagagaaaagaagcaaaaaacacacccaacaggaaggcggaggcagcaccaaggaagcgcaacggggaaaagagcagccaaacacgacagggacaaccgaaaaagaagggccagaaaaagcaacccggggagcaaacaaacagaaacaaagagaccaagaccaaccgcagaagcaaacaccagaggcaaaagcaaaaggaaaaggcagaaaaagcaaccgagcacaagagagaaacgaggacagggagagagaaaaaacccaaagcaaaggagcggacggacacggaggggcgaagaggggacgccacccacaagagaggcacacacagggagcccacagaccccagcagccaaaaacggcggacccaacaagcgaaaagcagaaagacccacaaaagggaagacacaagaaaaaaggcaagccaaaaaaacgacaaacggcacacgggccaacggcagaacgaacgggaccccagaggggagggccaagaggccaaaacccacggacggcccgaaccccaagggacacgccaggcacaggcccacgaaacggagaccaacagaagagggcgggagggagaccacagccaagaaaaaacgcccaaccagccgcaagaagagacccagaaaagaggccacccgacagaaccaaagaagaggaagggagccccaaaagccggaggaaagaagagcgaaaacacaaccacaggagcaaaacaggaagaccccagcccaaaggcaaaggcggcacagccaaccacgcacacccagagagcgggacgcccgcacagccaaaccacaacggaagaaaaagcgaacagacccgccgaaaaagagagaacacgaggggaagagcaaaacacggagcacggaacaaaccgccaaagcaaaaagccccgacagaaaaaacaaacaaaaaaggcaccaaccgcgaggaccaaagcaaaaacccccaaaaacaaaagcaaaagaggcaaaagaccagcagcgagcaggcacggccaggagaaaaaaaaacaaacaacagaaaaggaaagaaggcacaggaacacccacgacacccaagacaaaagaacagcaaaacaccacaacaaccaaccaaaagaacacaaagaaggcagacacaggcaacccaaacaccagcacaagcaccagagcaaaagaaaagaacgggaaaaaacacaacaaaaaaccaacaaaaggacaccgggcaaagacagcacagagaaaaccacaccaccaccaccaaaaccccccaacgaaaccacccaagacacaacaccaccccccccgccgaaaacaccaacaccccgccagaagacaccagaaccaaaagggaacaacaagagccggaccaccacagcaaagccaagggcaccaggcacagagaaccccaagacgaaaaaccagaaacaacacagaaccacacacagacaccgggcgccccacccccaagacgcagagcagaagacccacggcagggaaaacgcgcggaaaggggacaaaacgcgagaccacgcacaggagagacccagaagggaagcggagcaagcaacagaagaggaaccacggccaaaacaaaccaggaaagcacaacgaaggaagagacagaacaaagaaccagggaaccaggccacgaaaacaaaagaaccaagaagcacacagcagggccaaaagccgggaaagagggggcagagacacaagacaacagagaaccacggccacccacaagaagcaaaaaaggaccacgccgaaacagaaagcaaaaacacacccaccacacgacaaaacaaccggaagcaagaccacaaagccaaagaaggagaaacaaaagaagcagggggccaaagccccacccaaccagaaagagagacccccacaccacagcagaccagagcaaaaacaagcaggagagcaaaacaacagacagagaaaagaaaggaaaacaacaagaaaagcaagcacagagacaaaaaggacagcacgggaaaaggggagaaacaggcaggcagagcgagggacaaaaaagagggcaagcaaaacgaacaaaaacaaccaacccagaagcacccaggaacacagaaaaccaacgagcgcaccaaggaagacagggccagccacgggcgaggagcaaaaaaggaaacgacccaaaacagcagaaggagcgcaaaaaaaaccgaaacacacaaacggaaacgcaccagcggacacaaagaggacacacaaaacaaggcccaaacacaggccagaaggccagaggaagccacgccgcccccaaggcccccccccgaagccaaacacccggggcacccgcaaagcagcgagcgccaaagccccggagagaaaacagagaacgaagcaaggagccacaacgcggccggccaacggacggaaagcgcaaaagaaaaaagggagagggaaaaaaagagggggaaaaaaaaaggcgagagcggaaaaaaaaagaaagacacgaaaacagagcacgacaaagggggggaaaaaaaaagcaaacgaggcaacaagaaacgagaaacaaagaagaacaagggagggcggggggaacacaacaaaaagaaagcaaagacaccccaccacacgacaaaagcagaagacaagggcaccgaggaaaagggagggcaacaagcgagacccccaacgaacaagaaccgaaaaagaccgacacgccacaagaacggcaacacgagaacagcaggaacagcccaaaacacaaggcaaaaacagcacgcaagagagcagacagcaacgaaagcaaacaaaggggagaaacacgcaacaggaaaagacggcgagggggaagaggcgaaaaggggagggcaaaggaggacaaagaagggcagcaagggaaccgagaccaacgcccacacaacagcaacacggagagaaaaagaaagcggaaaaagaaacccgacacgcagacagagaggaaaggggagacaggaaaaacacacaagcagcaacaaaaaaacaagccacagaaagaaaccagcagaaaaaaacaaagagaagcaaagaaaaaaacaaaaaaacaaccggaagaacccaaacaagcagcacgagaaggggggagggggaaaagaccacagaaagaaaaacaaaaaaaaacagggaccaggaagggccacaccaaaacccaagcgggaagcgaggcaggaggaacgcgaagcaacaagcgagacagccacaaaagaaaaagaaaagcggagggggcacagcggagacgagcaccggaggcgagggagagaaacgagcccacaagcaagaacaggagcgcagacaaccacgacacagcggggacagaggagaccaaaaaaacaacaaaaaacaggagcgaaaagaaccaaaggaagaagaagaagaaggaagaggagggaggaagggaaggagaggaaggaagaaaaggagggagggagggagacagacaggaaggaaaaaggaagagggcgcagaaggccaaacagggaccagagaagcccagaagggaggaaaggcaagcaaccaggaaaaaccccagagccacaaaaaaccaaacacaaacaggagaacgacaaggacagcgcacaggccagaggaaacaagaacaaagaccagccccaaaaagcaacaaagaagaacaggaaaaccacgagaagggaaacgcaccagcccaggaccaagaggcacagcgggaggggagaaacgacagcgacgcagcgcgcgccagacagggaagcaagagagagcaggacgaggcaagaaacccagagaaaaagaacacaaggaagggaaacccacagaggcaaaggccagagagcccacagagagagagacagggggcgacaggaaccagaagggagggaaagagggagaaaacgcgcccaaaaacaaagaacaagaaaccaggacaccgcgcaagagcagaacaggaaaacccagacccgaccagagccgcacaacagaccacccaccaaagacgcaacgcagggcgagacaaaggagaccagacgccggcaaggaagagagcagcaggacaacaaggaaacggagaccccagaagaaaagaggaaaccggcgcgaaaggaaggaggaaggaaaccccgccaaacaacacgcaccggaaaccacagccggaaagagggccaagacgagacaggcccccacccggaaaaacccagggcagaagaaacacaagcaggaacaccgccgcgagaggaaaagaaacgggccaaccacggggaggacggaaagcaaacacccccaagaaaacggaagcagccgaaaagaaaaagaccagcaccaaaaaaggaaaaaacggaaaacaggcacggaaaggcccccaaaaagcacggggaaacaacccccaagcagagggggagagggccaagggaagaaggcagaggggaaccccaaaaggaaagcgaaaaaagggcgaggcaggaggaccaccccgccaaggagcccaccagaagagcaacaagaaggcccaccagagcagccccgagccaaaaaaccagaaaaaaacccagcgggacgaagcagcacaaaaggaacaagacaagagcaaaaaccccgcccaccgagaaggaggacagcagaacagcaagaaggacaagcaaaggccgaaaaaaaaagccagcgaggcaagcacagaaccaaacaagcgagaacaaacacgaaggaggggcccagccaccaccggacacacacaagcaagacacagccaagcagcgcaaaaaccggaagagaaaaacgcggaaaaaggcccgaaagaaagcaacgaggcgggaaaaggaggcaaaagcagaaaagaaaacagaagaaaaagagacaaagggcacaaggacggcgcgaaacagaaaggagggccggacagagacaccaagccggcacagccggaaaaggaggcaagaaaacccggcaccgggacggaaaaaaagaaaaaacggacgggaggcaggcacagaaaccaaagcggcacgcagggcgaaagcgggcaacaaaagccccgggcagggaagcaggcccccaaacaaaaaacccgcaggacccagcaccacgcagagagaaaggaccaagcagcgagagccacaagcaacacaaaagccagaacaacaaaccacgaaaaggggcccccaacccgcacaccaggcggacaggcgaagagcgaagccacgaaaacccacccccccggaagaaggcacaaggcaacggagcacaacagaacaaacgcacagccccacggagcaggaaaccagagagaaaccccacccaggagaggagacacaggcaagagcaagcacccagaggccagagggccagccagagaaaggcccgacaagaccagaggaggcaaaaaagcaaacgggcacgaacaaggagcggaaagggagcagacaggggcaagccgaagaacgcgccagaagaaccaaggaaacgaaccagaccggcaaagaccaaaaacgcgagccggccgagcaaaaaagcaagacagaagcagaacaaggcagaaacaacaaaaagaaaagacggaggaagaacagacagggaccgaaaagagacgggaagggacgggacggaagaacggcaggaagagagcaaggcaaagagaaggggagagaagaccaccgcgaggcaggacaaagaaaaaggcccaggcagacgacacacaaaaccacaagaggaggaaaaaagaggcgaaagaaaggacaagcaaccccccccacccgaaccaaaagggagaaggccaccaaagcggacggcaaacaccaacgggccacgaaagaaaacgcaggcccagggcacaagagaccagccaagaaaaacccgacaggcgggaccaagaaaagaaaaacaaagagacaagaggaagacgcgggccaggcccaccacgaagggcggaaaggaccgggaaagaaacagggggcagcccccagagacacccacaagaaaaccagcacaggacagcaaccgacaaaggacaagcagcgccaaaaccagaacggaggggaggggaacagaggagaagcagaggaggaagaacaacagggagcccaaccaaagaaacccgccagaaggaggaaaagggaaggggaaaaaaagcaagaacgccacacgaaccaaaaccacgaagaaccccccaccgcacgccagcgaccggagaaagacaaaaacgacaaaagcaggaaccccaacagaacccagcccggagcgaggaccaacacccacaccaacagaccaagaaagacaggcacccccgaccaaacaccaacagcgcaccacgcccaaccaagggccgcccagcccaagggggcccgaagacaggacacacccaccaggcacagcaaggaagaagccaacaaacagaaccaacgcaagacgacgaaagaaagccaaccaaagcagaggaagaaaaccccaagcgaagagcacacccgacccacaaccaacgaaagagaaacagccccggaaaaagaccggccaaacccaagacaccgaaaacgacaaaccgcaggaaaaagacgcacccacccgcggaaaaggcaacccaacaccgccaaagagacagacccaaagaccaaagccacgcgggaaggaaaccgagcacagcccaagagaagcaaagggcaacccccgaccggacaggcccaccagggggccaaaggggcaagagacccgccccgaaaaaaaggaacgcccaagcagggagcccgaacagcaacaggccccagcaccccccccaagcccccacccccacccaccccagaaaaagacaagccaacacagaggaagaaggagcccgggaggcccaggccccagccaagaagaaacccaggcgccagcacagaccccgagcaggaaaggcccccggagcgggccgacgcccaaggacacacacaaagaagccaaggggcggcaggccccacacggaggaacgcaacagaaaaaaaggaggcgaaaaaacgcaggagccagcaggggggaacaacccaggacagaggaggcgcccacagccccgcagagcgagaggccccgaggaggagaacaaaaagcggaaggaaaagcaaggcgcggagcaagcaggaccagagaaggggcacgcgaggggggccggacggccgcgcccggccaaccaagcgggagaccagagcgagggaagagaaaagcacccaagccaacaagggggaggccgggcagcagacacccaaaggagacggggcgcagccagcagcccaaggaaaggaacagaaagagcaaaaaaaaggcaggaggaccagaaggcagaaaaacaggaaaacacagaaggggcggaacacgcaaagaaaacaggaggaaaagcaaaagagggcccgggagcgggcaaagagagagggggagcgaaagggaccgccggggaaggcagcagggggggaggggagagagaaagagaagagaaagcgagacagagaggacacacgacaccgcccagcagccgcagccgaaggcaggggccgagccgcaggaaggcgggacccagcgagagcccaaaaaccgggccgagcaaacacggaggcacgcagcgaggggacaggaaaccggggggagagggaaggccagccaagacacgagagaggccaaagagcccggcaccccaaaggagaaggggggggaagagggaagcccgagggaaggaaagagcccgccacccacccccacgacagagggcagagccgggagagccagaggagagggaaaccggaggacaacccaaggggccccagcagcacaggggccaaaacgcaaggggaggaagagcaggaacacagcccaccggagaaggcagcacaaagaacagggcagccccccagaaagccccgagaagggaaaaggagggagggaaaggagagacgacacaggccaggggagaaagccaccaggagcccagcaccccaaggggccaggcacccaaaaaaaacaggccagccaggcaagcccgcgcaaagagaagaaaggacaaaccgcaaaggaagcaacccccccccccaggccacaccagagggccagaggggacagagggaggaaggaaaaagccccaccaaaacaggaaaggcaaccacaagccccgccaccccgcccccaagccaaaggcaaaacaaaagcacagcaccagcaagaacagcacaaggaaaggcacagcggcacgacagagagaagcaggaaaaaacccccaccccaacccggcaaagcagcgaaagaagccaccaggcaggccccacgcggcagggcacaaccacagacgaaggggaggaagaaacaaaccaacagcgcgaccccggcgcagccccaagaaaaaggagagccagaaacaaagagggaggggggagagaaaagggggccagggcgaccgcccaaagaagcagggaacaagaggcagaccacgcagccgcaagcccgccggggcagggaggagcaaagaacgaaagcccccccggcgcccggccgcagccccccccaacgcgcgcccagaccagcgccggggaggagccgagccgacacagaaccccagccgggcggcgaaacgccgggcgaaagcagcgccgccgcggccgcccccgccgcggcgccgcgccccgcaaagcagcccaacccggaagggcgacacagccgcgccaccagaaggcaacacaaaccccggggggacgcaccccacgagaaacgagccaacaagcaaacaaacaaacccaaaaaaccgcccggaggggcgcccggaaagcggagcgaggaaggcggggggcgagaggccggggggggcggggggggggcggaggagaaagggagacggccccccgggggggaggaggaaggggcagcggaggcggcaggcgggcagcagagcgggggcgggaaggcggcggggcgggggccggcgaggggccgcagcccggcgcgcgggaggagacggacaggggcgaaggggcgggcccccgaccccgcaacaaaggaaggaaggaggcgaggcaaagcgggagggccgggacgcccacggccccacacccgcaggacacgcagacaccacggcaccggaaaaagggcaggggcaaaaagacgagacaaagcaacaaaaaaaaaccaaggaggagggcagggagcaccacacgcgagaggcccggaccgaaagaccaggcaaacaacgaccccagccaggccggcgagcaaggcagcaacacaggaggggccaggcccccgcgagacgcccagggcccaccagcgccggggaccgaaacacccaccaagacccggacagggcaaccgccagagaggagaggacaaggcggccgcagaggagacacaggcacagaagggggcacgggggccacaggcgggaggggcggaaccagacacgaaaaacgacgccggaaagccacagacgcaccaaacaggggagaacagaaaggggggcggaaaccccacggggccaggcagaggggcggcgagagagcagacgccaccgggggcagccacacccacccaaaaaaagcggaggagaaaaccgaagagaaaaaccaacccacagaaggggagggggaggcaggcaccaaggaagcgaagagcgaacccgggcacgaggagagaggaaaaaggcacagcagaccaaagcaagaagcaagagccccccaaacgcccaaacggaaaagacagcaaggggccagcaccaaacaaaaaaacaaaacgaagaaaaaaaccggggcgcgaaacggaaggacggacaaacagaaacaaagcaaaaaacagaagagcaggcagccaaagcgcgcgcgcccacacaacacacacacacacacacacacacacacacacacacacggggggggaggggcagggcagagagaaagggaaaagggcacacacggaaaaccccggccagcccaaaaacccaaaacagacccgccgggggacaacacaagccacaaagacaccaacaaggacccaggggacagggaagaaggacagggagaaccaccaacccaggcagaaagcccgggcacgcaaggaaaaagccgaacaaagacggaggcccgcagaacaaggagagcccagggggcaacaaaaaaacagcacgcgaaacccacgcacaaggaaacagagcagcagccggaagggaggggaagcacgaggaaacaacacaggaggagccagccacggaagaccaaaggaaaacacaaaggcaggggcagagacaaggcgcggaggggaaaaagcacggaaagcgaagaagcaaacaacgaacagcagaacaagggcaacagggcaaagggagagagaaaaagaaagacagaacagacaaggaaagcagcagacagaaaccagaaacaaaaaacagaccgaaaaaaaacccaggaaaggccacaagaaaacaagggaacagcaaacaaaaaagaagcgcaaaaaaggcaaaaacgcaagaaaagccaaagcaaccaaacgcaaaaaaagaaaaagaagca

SEQ ID NO: 290 - RNA, 2112 nt, Homo sapiens
aagagcaaaaacagagaacaaagagcacacaagagaagcgggcgggggacaaaaacaaacaaaaagaaacgaggaaaaagggcacaaacaggaacagagcacaaaaacacgcagggaaaaaaggccagcacaagagaggccaccacaaggcagcagaccaggcacaccgagaaaccagacaggcaccaacaaaaaagaaacgcaccagaggcccgacggaaggaagcggagcacagagacccagacgcccaacacaagcacaaaagagaagaaaaacaggaaacaacccaagggaggaaacacaaacacgccaaggaaagagaggacacaaacaaacggaaaacaccagacaggaaggaagaacaaaggaaaaaggccaacgcccaaagaaaagacaagcaccccacaagcaccagacccacggaaggaaaaaacacaaacacaggaacgaaaaagcccgcaagccaagaaacaagcaaaaaaacaaagcgcaggcacacgcaccgacaaacaacacaagccacagaaccaaaacagcaggacggaccaaaagagaaaaaccaaaggaacagaacagaggccagaagaacaccacacacgcaaccagaccgacaaaccgacaaaaacaaggagaggaaaggagccaaaaaaggggggaaaagggccagccaagcagaaagcgaaaagaccccaaccaaaaaaaaaccaagaggaaaagacaaagaagacaaaaccaaaaaacccagaggaaaaccaagcaaaccacaggaccaagcagggcaaagaccagacaaaacaccaaaagcaaggcaacagaagcaaaagacaacgggaaaaaaacaaagagccgcacagcaaaagaaacacacagagaaacaggcaccaaacaagggagaaaacacaacaccacgacaaagggcaaaccagaacacaaagaacgaagcaaaacaagaaaaaaacaaccccacagaaagggggaaggaagacagacacccaaaagaagacaaagcagccaaccaacagaaaaaaagccaaacacggcaagagacaacaaaaaaaccacagagaaaccccacgccagaaaagcgacaaaaagcaggaaacagcacggcggagaggagggagaaaaggacaccacggggggggaaaaaacacccagggaagacagggggacccaaggacagaacggaaaaccagccccagcaacccaacggaaaacccaaaggagaaacacacacaagacacagcacacgagacggagacgcacaaagcaaagacggaaccaacccaaagccacaagaagacgaggaaaagggcacaaacaccaggaaacagcagccaaaaaaggagagcagccgcaggacaggagaagcggaaaccacacccagcaaacaacacaagaacagagaccaaacacgcagccaccaaaggggaggaacaagagaacacaggacacaggggcgcacacacacggggcggagggggggggcgggggagggaagcaaggagaaaaccaagagagacagggaggggcagcaaaccaccaggcacagaaccagaacaaaccgcacggcacacgaccccagaaaaagcgaaaaaaaaagccacagacaaggcaaaaaacacacaaaaaaagaaaagaaaagaagaaaacaccagacaggcgagacgaggcacagccgccggccaggcggaggcagggcgcaacaggccacgcaagcccaccccgggacaccacccgcccagccccgagagcgggacacaggcgcccgccaccagccgggaagagagacagggcacggagccagcaaggcccaccccgacccagaccaccacagccggcccaccacagccagaaagcaaagaacaaagaaaaaaaaaacaaaaccaacagaacccaacacaacaacgggaaaaaggggaaaaaacagaaacaaacaaacaaaaacccccgccaagaaaccaaaagaaacaaaacaaaaacccacgaacaacaagcaagcaaaccacacgaggcaccaacccaggaagacaacaagcgccaaagggcagaagaacaaaagagccaaaaagggcagccggcccacaagaaagcccccgggacaagcagac

SEQ ID NO: 291 - RNA, 4511 nt, Homo sapiens
aaaaggagggccagaccgcgcaaaaacaaaaaaaaaacaaacgccggaagcccgcaaaacgaaaaaaacacaaccccagaggcccaaaacaaaaggaaaaagaaaaagcaacaccaagcacaaaaggaacaccccgaaaaagcagagacaacaagagagccgcgggggggagaggggcaggccgaacccagcacgggaggcgaggccagcggacaccaaggcaggagcgagaccagccggccaacagaagaaacccgcccacaaaaaacaaaaaagccggggggagcagcaccgaacccagcacgggaggcgaagcaggaaaagcgaacccaggaggcagagggcaggagccgagaggcacgcacccagccgggcgaccgaggcccaccaaaaaacaaaagaaaaaaaaaccccaaaaaaaaaaagaaaaagaaccgcgaacgcagcccgaagcgaggaggacccggccagagggaaacgggcagaaccagcacgacaccaggagcgcccggacagggacccaaacagaaccgaaacggcaagggacgacaagagaagagcgaagaaggaagcagaaaccaccaagaggccccaaacaccccccaaacggaggaccagcaagacagaggccccccgccgcccccccaaaaccccaagagaagcaaaagaaagagaggagccaaaaaaggagcaccccagaagggagagaacccccaaaacaacaggacacgccggaaacccccgaagcagcccgcccacgaaacacgggccacaagaaacaggaacacacccaccagcaggaacacaggagagaagaaaaaccacggagacggggaacggcagcacgaaacaaagagaaaaacccaaaaaaggagaaggggaaaaaaccaccaagccaaacacaacaaagaaggggaaaacacccagaaaacggcccaagagcagaggcaaaaaaaaaaaaacccacagaaaggaaggaacaaaacacgaaaaagcaaaaacaaaaccgagcccaaacgccaagaacacgaacacacaaaaaagaccaacgaaaacacacacaggaggagagaaagagcggaaccagaacaaaaccacaacacagaaggaaaccaacaagaccagccacaaagaaagggaacgggcgagagaagaagcgcgaagacgacggcgaagccacaaaaaaagcacaaccgagggcgccccacgaaaaaggccacggaagacgaaaaggaagacgagcaaacacgggggggagcagcaaaagaggagagcaggagccaaagacagcagcccaaccagccaaggacaaggcccggacaggaagcgccaaaagaggccggcaggggcccccacacggccggaacagccccgaccagaagaaccaaagagcaaccaggcaagggcagcaaaacagacaccagaagcagaacgccgcacccagccgcgcccaacaagcagcgcggaggaaaggccgcgacggaacccagccaccacacaggcgaacaaagaaccagcaaaggaaaaagacaagccgaagaaaggaaggcaaacccacacaagaccaggaaagcagaaggaaagcaaggaacagaggaggcgcaaaaaaacaacacagaccacggagacgaacaaaagcaacgacgccaaaaccagaacccacacaacaagagggaaggcaacaagaaagcaaacagagagcaaacaacagaaacaaagcaacggcccaaaaaaacggccgagaaagaaaaacaaaaaacaggcaaacacaacaaccgccgagacacaaacaacaaagccacacaaaaaagaggaaaggcaaggaaacacacacaccaaagaaggacgaagaggaaagcaccaacaccaaaacaacaaaacaaaacaaaaaagaaccaaggaaaagccgccaaagcagagacaggaaaaagcaggcaaaaagccgcccaaagcgaagagaaaaaagccacggaaggccaagaaagcaaaaaggcggcaaacgaaagggacagacagccccaacagaaagcaaaagcgccacaaagaaggagcccgcagcaaggcaggggacgaacagaaaacacaagagaacaggaccaaaccacaaaaaaaaaaaaaaaaaaaaaacaaagcaaagcaaaaagcaaaacaaaacaaaacaaaaaaagaagaaggaacaagccgaaaaaaaccacagaaccaaaggacgaggacagagaaaaaccccagaacaaaaggaagccaaacaaaaaaaagggaaccggaccagccaggaggggcgcaaccacgagaacaaggagacaacaacgaaacggaacaaaacacgaaaagacccaagacgagccaggacccagaacccacaggccccggagagggggaggcaggggaaagggagagcaaacagcgcgagagggagggggcagagagggaggaggagaggagcaggaggacgagacccaaccaccccaaagcgggcacaaaaccggaagcaaaaggaaagccaacaggcgagggaaacaagccgaagggaagaaagaagggggaaggagaaggaagaaagaagaaaagaaaaaaaaaaaaaagagggagaaaagaaaccgacacaaaaagacggaagcaaacacacgagcgggggccaggaaggcaacaccaacaccccaaacccaaaagaaaccacccagcgacacccccagccaaacagcaccgagggcaaagccacaaacacgccgcaaagaccacagaagaagggcacacaggcacaaagcggcccagaaaaggaaagggaagaagcggacccagagaagagcgaagacacaaacagcacagccccagggaccccacgcccccaaagcgggacgggaccccacaccaggccacgaaaagggaagcaaggacaaaccaagcggcaacggaggccaaaagcaaggaggggagagaagccccaaaaaagacagccagcgggccagcggagaaacgaagcagcaaccccgggagagggaaacaacaagccgaggaaaaaaaaacccggaccacagggcaaaaaaacacaagcaagcaggaaagaaaagcaaaccagggaaaacagcaccggaggggaggaacggccagacaaagcaggcaagccaaacagacacagcgagaaaacagcacaaaacaaaagggccgaggaaacaaaaacagacagagcgccgcgcccagacggaggcagggggaccgaccacgcaacgccaagggacccagcccagccccgagagccgggaaaaacaggcaggccaccacgcccggcaagaaaagagaggggcgccagggcaggcgcggaacccaacccaaggaccgcccaccggcccccaaggccgagagacaggggagccaccgcccggccccgaggaaagacacacgaggaaagacaccccgcaccacaccaaggacaaacaaaggacacaaagaagaggagagacggagaccccgcgcccagacggggacagggcgcaaccggccacgcaagcccgcccccgggcacgccacccgcccagcgccgagagcgggacacaggcgccccgcccggcaagaagagacgggggcacccgagccaggaggcccacccgacccaaacggcccgccggcccccaaaggcgggaacaggcggagccaccgcgcccagccgaacaggaacgacaaaaagagggaaggacaacccgccaagagaaccgaaagaaggaaggcaagaaaaaaacaaaaaaacacacaggaaaccacaccagcacgaagagaaaacaagggaaacggagaggggagagggagcagaaggaaagggcacccacagagacccccaacaaaggggcgagaacgcaagaagaacaaggaaggaacacggcaggccaaagaacaagggggggggggaggggacggcgggagaggggcagggggggcggggcaggaagaaagggggcccacccgaaggccaggccccagccaccccccccaaccggagaagccccgcgggcaaggagcggcggccccacgcagcagcaacaacaacagccgcgcgagggccgcagcgccacgccgcccgcgagggccgcagcgccacgccgccagcgcaaagcgggcgcacagccggcgcgagcgaagcggagagggcgaaaaagaggggggcgggggagaccacggacggaacgcggccgcccagaccgagaaacacaaccccaaaagcggagggcacggaaagagaaagcacgccgcggaaaggacaccaagcacagaaccacgacccccagcgcaagaaccccaaacaaaaaggcccacgagaaaagccaagaggacccgaaacacgaagcccccagcacacccaaagggaggaagaggagaaggccggaggccagggcaaaagcacccaaaacccggcccaaagagcgaagaaacacccagcgcggaagacgccaaaggaccgggcgcaacacccaagcccccaggacccgggggcaaaagacagacagagcagaaaggaagcc

SEQ ID NO: 292 - RNA, 493 nt, Homo sapiens
ggagccaccacacccagccaacaagaaaaagcaacaaaacggggaacaaggggaaaaaaaaaacaaaggggcaaggggcacggccacacaaacccaggcgagggggggggcgaacaacaggcacaaagacaggaaagcaagaccgagagaaaccggaagaccgcacaaaggcaaaacaaacgaacgaggggaaaggccaccacggaaaggaaaaaaccagagccaggccaaggaagaagacccacgcaggggaacaagcggcggcaaccacaagcagagcgcaaggaaccacaaggcccacaaagacaaagccaaaacagcaaaaccacgagcaaacccagccagcggacagagcaaccaccaagacgaagaaagcaaaagaaacaaaccagacccacaaaacacagggacaaacaccagagaccaagcgaacccgcgcccaaaaccccccaacgggaagagaaacaacaaagaagaaaaggcgaagggcaaa

SEQ ID NO: 293 - RNA, 162 nt, Homo sapiens
aagcacaagaaaagaaaagaaggcaacaaaaaaaaggaaacagcacagaaaggaaggcaagaaagcccccccccccaaggcaccagagaaccacacgacaaaacaacgaaccaagacgggagagagccgggcagggcggaagaggaggaaggaggccaggag

SEQ ID NO: 294 - RNA, 57929 nt, Homo sapiens
gaaaccgacccagcagacaaagccgggaacgacaacaaaaacgagagaggaagaaaaccaggccgggacacacgaagcccaaccaggcaccaagagacacagcccagcccaagaagagggaggaagacaacacgaccaacaccaagcaagaccgcagcggggaccgggcaagccccccccagacccgagcccccaaaaaagggaagcccaccgcccgcagccacaggaaggcggcccaagacacacggcacaaaagcccccgagcaaagccccccgaccacccgccccccaggagggaacggagcgcgcaggacaggacaggaggcggggaggggcggaggagcgcccagggagaggaggaagagggggcggggcggcgggcgacgcagcggagcagacacccgccacaggcagccggcccaggcaacggcgcccgcggcggccggcgccgcccccccccccccgccaccccccaacccccccggccccccccagacggccacccccaggcccagccgcccacaagacccagacacaacggggcggcgcgaacagacagaagccggggagagaaaccccggcgccggcgccccgggacaggacagcgccaagccgcccccccccaggggcccaccggcagccagggacacccccgggccccgaccagcaggggggagggcgagacacacaacccccggcggccagggacaagggaccggggccagggaacccaggccggagggaaggggcaggccaggggggggagaggggcgaagggccgacaaccacggccgccaccaaacacgggaccggagcagcccaacgaaccaagacggccacggaaagggggaaacacagcccgacccacaggggcggaaggaccgagaagacggacaggcaccgcaggaagcgcccaaaaaaaaagggacgcgagcggcagacacgcaagacccggagaaacaccagcggaggacgcccccgaaacacccacccccccgcggaacaaaacacaccaaaacccagacacagcaaacaagagcaccacggccggccgcaccaggccggagaacagcagggacaaaacagaaagacaaaaagccccgccgggagccgacagcgaggagaacagacagaggcacagaaggagcagggcccaaaggaaaaaagcagaagggcgaggagagagccgggaggcccccgagggggacagaacagaagccccaacaaagaggagaagcccacggcaaaggcaggggggggaaacgggcccaggcagagggaaccgcagggcaaggccaggcggggacccggaaggccagcaagggcaggggcggagcagagggaggaggaggggcagagggggggagggagcagggggcccccacccggagcagccccaagccaggccccgaaagggccaccgggccgaccaccgaggggcagccaccgacaagggcccagcccccaccggggcccaaggccccggagcgccgccacagagaaagcccacccaggaaccccacggagggccaggcccccgccccgcccgccaggcgccgcgggacccccgcccccccggaggaggaccccccgccccagccgccagagggggcacgcaccggagccagggcccaccggagagggcaccaggcccagggagggagaaaaggaggaagggagccggccagacgccccgaacccggaagaaggaaaacacggggccacggggaccaggcggcgcaagcggacggagagccaggcgggaggcggggcaggggcacgcgggggcaggggggcacgagggggggggagacgggggggcacaagacccaggagccacaagaggaggaagagggaagggggggcccagggacagggggcagcagagccggcggcgcccaagggggaggggcagggggaaaagaggccgccccccccgggggcccagcggcagccagggagaccgggagaaaaacaacagaaaagccacaccccaggcacggaggcgagaggcgacggggaggggcgggccgaggcacggcccaaacgaggcaaggggacgaagggcgcgaggcgcagacggcaagggagaaacaaccacaggcccggggaggggccacgcccaccccgcaccgccagggccagcggccccaaaggcaggggccaagagggggggccgagagccgcccagaaggaagacaagcaggagggccagaggagagagggagcagaaaggagcggccaccgcgccacggccacccgccagggagccccgccagggagacagcaagaaggcccgcgaggagccccccaccggccccggccccaggacgagaaaacaccgcgaaaacccaggcgagaccgaagcaacacaaaacagacaagacacacagagagaagaaacaggcccaagagggaggagggccaggccggccagaggagcggcagagagggacaacccgggacggggcggaccacccagccagcccgcccgggcgaggggggggccagaacgaggccagaggggcacacgggcccacccaccggaaagaggcggccgggggaagagaaccagaaggaccaggcaggacccccgcacccccccaggccggggaaaccgcccaggaaagcgcccaccccgccacccacaaggcccggagcgccaggcagaaaaccccacagcaccccgaagcagcacggaggcagacgggagaaacacgaacaggaggaaacgaggcagaacccagcagccgggagccagccggccccggaccagcagccaacaaccgcccccacaggaagcaccagagcccagagcccacggaggagcgcaggcggagaccggaaggccccgcagcgccgccccaccccacccacgaaagcgcaggaaggggggagccaagaaaagacggaacggccgccggacccggacaagcacgccccccgggccagccccggaacacagaagaaaccaccccgggggaccgaacacccccagcagcccccgcgcagccacacggccccgacagccgaacacaacaagccccccacccagggccgcaggcaggccagagccggaagccccccaacccccaggccggccaccaccggccaaagaccccccaaccagacagcaccgcgccaccccaccccgcaccccaagcaccggaggacgcaacgaaccagcccagagggcaggggagcgcacacaaggcccagagccagcacaggcaggcacacacagggagaagaaacaagccccacccccccgcagccccaagcagcaacggcgggacccggggagccaccccggcccaccccgggacaaaggaggccgggcagagccaaggaccgggagcaggaaacccgggacccagcccagaccccccaggcaaggggagagagcaagaaggcagggagcaaggaccagccccgccacgcagacaccccccggcccgccccacgcccggggggacaccgggcagacccacgaccaaccaccccccccggcagcgcagcacccgggggaaagaaggaaaggggagggagaaaaagaaagcaggggcgaggggcggcccacaccggaaaaagcacaaaagccaagagccaccaagccggcgggcaccggcaaggcccccacgggagggaacggccaaagggagcccaggcaccaaacagcccaggccgggggccggggagggccggcgagcccacccgccccagaaggcggaacgccgggacagggagcgacccagccggaagcgcccagaacggaagggaacaaacggccccgcccaccggaggaggaacaaagacccagagaggggaaggggggccgaggcaacaaggcagagacgagcagaggcgggagaagggcgggggggacaagcagcacaccccacaggaacagcacccgacccacgaagaacccccccccccagccagaggcggggggcccagaggcccgcccaggggggacaggaccgggcgccaggaggccagggagggcacagacgagccgcccaagaaacgacgggaccagggggccagaggaaggagagccaccaggaggacaggagcaaggaacgcagagaagaagaggacaaaacaagggaaaagccgccgacaggaagcagcacagagcggacaggcgaacccggacccacgaccgaaaaggcacccaaccagaggagccacgccccaggcgaaaacaggggacggccgcccgcaacagaagggcgacgaccccgccccaggaagaagaacccaggcagaggaaaagggaagacaccccaagcgaagccaagcggggcaccagaccaagaagaaggaggaggaggcaccgggagcgagcaagagagcgggggcaagggggagaagggggacagcagagggaacaaccagcaaaagcggagggggacagaggaagacaacgggcgagccgggggggcaagggacacagacgaaaagggcacggggaacccagcacccaccgcccagcgcaggcaggcgcgcggagccgagccggacaccccggcccccccggcagaggcgccagcacgcgccagaccccagcacccgggaggcacaggggaccacacaagaaaaggcgcacaggcaaagcaaaaacacccgggcacaagcgagagacccgcaaacacagcccaaccagaagagccgggggcaacgcccgaagaccaaaaagcagccccggaaaaggagagcagggcaggccacagccaggcacacaagacagcagaccaaaagccaagagcgcagcacaagaagagggccagcggcccaaaccgaacggcaccccaggagcagacggacaccccacccccacagcgccccccccccaccagccccagggccaccacgacccgacgacaccacagagagcacaggaaacacacgcgccaacaaggccgaaccaaaaggggacacaaggaccaagagcgccgccagcagaggagagcaaagcggggacgagaggcagcagaaaagccagggaggagaccaaagcgcaccacaccagcgagggaaggacgccagcagccaaaaaaaagccacagaaacagcaaacaggaggaacaaaagacgggaaacaggagggaagcgggccaggggccaaggagcacacagaaaccgcgagcgccaagggcgaccacacccaccagcaagagaaaggcaggccgaccaccagcacgggggagggggacaggacagcacaaaagggaaaagaccaggggaggcacccaagacaagaggaacacgaggcgccaccgaacgggagacgcaaacagcagaaaaaaaaagacccaagccaaagaggagagcaaaacggaacagcaagccggaaaaggagcaaaacccgcgggcgcaccaaaggagacaaaacacggcaagacggacgagggcagacggcaaaggaaacaccaaagcaaaagaaaaagaaaaacgcagaaagaagaaacacaaaaaaggaaagagaagggacagagacagcaaaaaacggaaggcagccaagcaaaccaaagggggcagcccgacgcgcaacaaaacgaggagcccccacgccaccaggccgagccagggcggggacacagcaccaagcgagaagggccaagcggcccaggagccccaccaaaagccaagaagaccccccaccagacccccggaaggcacaccacgcaaacacgaccccaggcaaggggcagcgggcagcccggaggggagagagcgggcaagaaccaaaaaagccccacaagacaagcagagagggcgaagaccaggcgacaagggaaacagccaggccgagaaggggccgaggacccccgcgcagcggcgaccccaagcaaaccaaagccccccggcccccccccacaaaagaaccaagagaaaaagcccccaaacccacgcccagcccgcagccccaccaggcccaggagccccgcaagacacagacacacagacacaccaggcacgcgaccgccccaggaccaccaccaccggcccaccaccaccccgccccacccagcacaccagccagggccccccaacagcccagccacccaccccgggccgcacagcccccagcgccccagccccacacagcgaaccacgaccccccagaggcccaggcagcaccaaagccccccccgagacagggcaccgcaccaggcggaggcagggaaacaagccacgcagccccaccccaggccaaggaccccgcccagccccgaaagcgagacacagggggccacagcccagcaaacaaaaaagagggaaaccaccacgagccagagagccaggcggccaaacccgagccaaacaacccccacccggcccccaaggcaggaacaggcggagccacggccagacaccccagagaccccacgcgccgagcaggaagcccaccgagagggggccgccggccccgggagggcagccagagggagggcgcccccacccccaggccagcacaggcagcacacagcggaccaacagaaggaacagaggaagaagaagagccagagccccccccagagcaccacggcaaaggaacccacacgcccagcgcaggcaggccggggccccccggggggacgagggagcccacgggccagccaggccggcgcagcgcccaggcaagggacccagccggagggccgggaaaggccaggacccggagccggggccaggaggggcaaaggaacgcaaggaagggacccggcggaaaccacagaacacgaaggaggcccagcccccgcccccggagccaaggggagggagaaacccacgggggcgggcgagcaccccaccaccgcccggaagaaacagagcagacccaagacaagccgcacggcaaagagcggcgcacgaacaccaagcccagcagcaaggccagaggggccgcaagcagaccaacagaaaaacgaaggcaagagccagggagagccccagaaagcacggagggaaggagacagggaggaagggcgccaaccaagagcgcaccaagccagaaccacaggcagcggggccggccgcgggcacgcgggagcccagagaacggagagccccccaggggcggagacgggggcagggagcggggaagggacagcagcccgccacagcgacagcgccgcggaggagcccagcacaccagccgccccagagcaaagccacagggaaggggacagggcgcaggggaaccgcggcaccggagaaaagggagaggaggagggcagggcacagacaacaaaggcccacagcaacacggcccaaaagccaggaaaaagagcaaaaaaagcgcaaacaaaaaagcgaagaggaaagagaggaaaccgcagggaaaggaacaggcaaagcgcacaaggcgccaaagccaaaggcaaacaggccacgacccacaagaaggcggggggcgggaaaacaccccccccccagcagccaggccagccacccaacacgcccaggaccccgggagccggaaagggccagaggcggaggcagaagcccgggacgggggcccaacaccgggccgcgaaaaggggagccaagcacaaaaagagaaaggcaaaaaagcaaagcaagcgaaagaagaacaagagagaggacgccgccagacaagaaaagacaaaggcaagaaaaaaacagggaggcacaagggacaaaacacacgggaacagaaagcaccaggaaaacccggcacaccggccaccccaccaagaggaaaggaagaaaagggaagagaggcaggcagggaccggaagagcgggcgggaagaagcccaacaggcccccacgcagccccccccaaccaccagccaggcaccagggacaccacgcagagcgcaccacccccgccgccggaaaacagagcccccacgcaagagggagaccacaggcaccaccccgcacccgaccgaaacccaaggagaaagccaggcgggcgcggcggacgaaaccccccacggccgccccagaggcagagcggccaagccagggcccagcaggcaggagaaggagcaagaaggaacgcggaggaaggacccacagaaagaaaaggcccccgaagaacacaaaccaaaaaacaaccaaacaagagaagaaccccaaaacagagcaaggaaaaaagccagacacagaggcgagacaggcgccggcccaggcggaggcagggggaccggccagcaacacgcccccaggccaagacccacccagccccccagagcggacacagggcggccaccacaccggcaagagagaggcagggccccagcacaggcggccaaacccgggcgaagaaaccccgcccagccccaaaggcgggacacaggcggggccaccagccggccagaaggcacaagagacccccaggaaacccaaaaaggacaccagagaccaggaagaagggggaggggaaggggagcggcgcaggcacagggcccgggggagaaaagggaagcagagggagggcagaacacaagcaaaaagccaccgaaagcacaaaagcaaagagcaggaaccgccagaagaaaaaaaccagggagaaaccaaaaaacaaacaagaaaaggagaaggcaaagaggcaaggacgggggagacagggcaaggggagaccacccacggagccgggaccaggaggggccagaggagcgcaaggacagggacccggcggaaaccacagaacacgagggaggcccagcccccgcccccggagccaaggggagggagaaacccacgggggcgggcgaacacacaggcaaccgccaggccggaaggccccgccacgacggaaccagcacccgggaacccagccaagcccacccacgggaagcccccgaacacaggggcaggcggggcagccgcagccccagacccggggaacccagcgccacacaggggaggagccaacagacaaggacaagagggcccagccacggaaaagggggcagaagccaccacagggagcccacaagaaagaggacagaaccggggagagagcgccccacacaccagcgacacgacacacacaggcaccccccgcccacacggggcaagggccagccggaccgacaggcgacagaaccacacacagaggcacccaagaagggcgggggcgacggcagaggaaccccagaaccaccccccaccccacggccccacccggccagacccgcaggcaccggacagggccccccccggccggccgccgaaccccaccccaaccaccccacagcagccagagagacccggagaacaagcagaccgcccccgccggaaaccccacagcccaccgcagaggaaaagccaaagcccccgggccaccacggggacagccccaggccccgcccgccccccccaaggcccacccacgacagcccgggcccgacacccaggcccacccagaacccgcacgccgcggccggagcacccaaccccacacggcccgcgccaccccaccccccaggcccgccaaaagcaccgcagggaagccccccgccccagggcggacccaaagccccccagaggcaaagcccggcggggccgggcccagcccgggaccaggcggagaagagccccaggcccccgcggaggggcccagggcagccagggggaggcggaccaggcgaccggcgcagaggcccgccgccccgccggggaggcagcccgcccgcacacacgggcccaggcgcggggggaaagccccacacccccgcaccgacccagcgaccagacccccagcccggccagaggggagccgcagcgcccgccccgagggaagcagagcgggcggagggccggcgggccagacacgaccacccccacccgccccgcgcgggagccacgccccccggccagaacccggcccgcggggagcgccccaggcggagccccgagggggccccgcccgggggcccgcccaaggcccaggagggccacccgcaggaaacacaaagccccggccagaaggggaaaaggaagggagaggaaaaaagaaaaaaccagcaacagaagaaaacaacgaacaagaaaaagcagcagccagccacgggccaggcacggcaaacaccacaaaccacaacccacaaagccagaggaggaacccacccaaggcacagagggcagaccagcccaaggcaccagccagccaggggaggaagggaggaacaggcagcggacagagcgcaccacccccagccgagaaccgagggaggcccccgaggcggaacgcagggagcgggagggaggggagccaggccgggccgccaggcccgccccacaggggaaagcccccaggcagaggccagcccccccccaggggaagaacccccagagggagggcccgccgcagcacaggcgggcgcccccaggagggagccagagcagagggcgggcagcaccaacagcccagccccaaggagccagccccgccgggcagccaccaaacaggaacacacaggagggcagggaccaggcggggcacaacccacacccgccagccacacggaagggggacagacaaacaccgacagaggaggagacaaggccagggggcaggacgccaaggccacagaggcagaacaggaggagcgaacaaacccaggagcgagccacacggcagagccccacggggggacacagcaccaggaagaacagggcaggggggaaggagacgcaggaaaaagccggagcccagcacacaccccccccggccccacaaccgaaccaccagccaccaccacccaaccccaccaccaccaccacacacaccgccaccaaacaccccacgccccaaccacaccccaccaacccagccacccccacccacaagaccccccaccgcccacaccacccaccaccaccccgcccacacaaccccacaccacgccacagcaaaacacaccacccccccccaaccccaaccaccaccaaccgccgcccacccacaccaccaccaccacccacacaccaccaccacaccgcccacccacccaccacccacaccacacacaccacaccaacagcccacaaagcagaagacagcggagcccaagccgggggccggccgagccaggagaaacagccaaaggcgaggccaagaaggcaaggggcgaaacagcccgaggcgaggagacaggaggacagaaaaaacaacacgggagaaaacagaggcggacacggcgggccggagcaggccgccacagaggagggggagacgagccagacaggcagagcgagcagaggagggaagcggcagaacagccacggggggccacgggccagagcggccaaggggccccacagcaacccagggaggcaaccaaggcaccaaagggagggagacgaggcggggaagaggaagcgggccaggcgcagcgagaagagcacagccagacacgacagaccgccggcaaaaaagaaaaaaacaaaaaacaggacacaggcccggcacgcaagagcccaccgacccagaggcagaacaaacacacccgacagagagaaaacgaggggagacagaagcaacgcgagaagaaaaaaaacgggccaaagcaccgacagacagggaagcaccagcaaaccagaccagccaacagacgccagacagaaaaaaaaagcgacaaccaaaaaacacaaaaaaacaggaacgcgcgaggggaaaagcgaaagagccagaaaaaagaggaggggccagaccccagcaacacaaccgccggggcaggaaaacagccacagacgagcaggaagcggacagggccaaaaaacaacaaaaacagggggggcagggggccaaaggcgagcgccagccccgacgcagacgcagagaaccaaaccagccgcccagaagagaaaaagccaagcagacaaccaggccacaccccaggccagccaccacagcccaacacgagcaggcccacaggcaaggaaggaagcaaaacgaaaaccgaccagcaaacagaaaaagacaccggaggggcaccaacggccgcaccccagcagggacacgagggccacccaaacgaaacaagcgaaaaaaaaagaaaaggaaaggaggagcgggcggggcaacgcagggacaagaacaaggaaagaaaggagaagggaggggaacaaaagaccagggcaggggaagagaacggagaggcagaaagacccccccgaccccaccccccacaggcacccaacccagaaaagggagccgggaaaacagagggccacccagagaaaagacaaaggaaccaggaaaaaagaaacaaaagagacaagaaaccacaaaaaaagagccgcagaacaaaagaaaaaaaccacaaacccacagaaaagggagggaggaaaggcaaacaaaaaacagaggcaaaaaacagaaagagcaaccagcggaacaggcaaagcaaaaaaacaacaagcgagaacacccagcccagggacagaagagagggagaaaggaaggagacgggaaacggcacaccgaaacgccggggcaggaaagaaacagcccccggaagacaacacagagccagaaaacgaagcacagggggaaacacgcagccgagggcaccccaggaaacaccacacacaggcacagggagaggcaagaggcacgggagcaaccaaaaccacaggaggaagggaaacacccgcagggcgaggcccccacgaagcacagcgcacaccccacacgaggaaccgcagggccaccccaagcacccgcagcagggggggcacggacccagggccaccgacagacggccacgagaccggaagcagggaagcaggggcagcagagagggcccaccgaccaggggggaggggacgcccgcgaccaagccggcgcaacccccaggccccaaacccaagaaccacgaagaagcacacaagagaaaaagcaaggcgaagcgaaaccagagcccaaaggagacacggaaccagccccacaagaaacagaaaccagcccaagccccaagccccccagcacgacccccgaggcaaccaaggcgagggcacaggcaaaaaggaacaaagagggcgggcggccccccaagcaagcgagacacccagcggagggggcagaccaccagaggcaaaaccaagggagcaggcgagggccgccacaccacgaggacagggaccagaggggagaagaaagggcgcagaaaaaggcccgggaaaacgcgcacacagaggagccccagggcaggcaaggagcaccaaaggccaggccgaaggcgcaccagcacaccagcagagagggcaaagcccgacaccaccggaccaacaagccacagggggacagggaccacaaagcagcacccgcgagcaaggaggacacccgggagaccgggaccccggaaagccaccgagcggccagaggagagccccccaaaagacgaaagacgcccgaaaacgacagccagggcccagagaaacaaaaccaacaggagcggggaacaaaaacaaaaagggagaccagcaagagaagcggcaaaggaaagagggcaagccggcagacggggaccaggcaagaccagaacacacaaggcagaacccaccaaaaacggagcccaaggccgaacgagaagaggcccacacacaacgagcccacacaaaaacaagaaaagagaggagccaccggcccaggggaagcaggggcaaccagccccgaacccccaccccgggcaaggaccagcccagcccccgagagcgggaacaggcgcccccaccagccgggcaagggagagagaggggcgccagggccaggcggccgacccgaccaaggacgccccgacccccaaagggagaacaggggagccaccagcgggccagaaacgagacagagcgcggggcccaggggaagcaggggcaaccagccacgcaaccccgcccccaggcaaggacccgcccagcccccaagagcgggacacagggccgccaccagccggcaaagaagagagaggggcacagggccaggggccgaacccgacccagaccgcccgccggccccaaaggcgggaacagggaagccaccagcccagcacagaaacaagcaacacagaccaggaccaaacaacggacacgaaccggcaaggacacgaaaaaacaccacaaacccagagcgaggcccaaccagccacaacacggaacaacagcacaccacacacagcacacacaccaacaacagggagacacagaaggcacagaagaaaaggaaggagcaaaccaacagacccccggggaagccaggaggacacaaaggggaaacacaagcgaacgaaaaaaaaagaaaaaaagggaagaaaaaaaaaaaagggcaaaacaaaagaaaaccaaaggagcgaagccccaacacagcaaaaacgagcaccacgcaaaggggagacacggaaagacagaccagccacggggagcgacacaagcgagaagacaggcaaaaagaagcaaacagggaaaagcagagacagaaaggcaggagacgaaagcaagcaagccaggcaggggcacagagaaggggacagggagggggggaagcagggaaggcccccgcaggaagagcgagcccgaaagaggagaaggagcggaagagcacacgaaagaggacaaggagcggaagagggggaccaaccggacagcaaaggccgaagccaccacacgcaaaaagacaacccaagaggaaacaaagaaaaagaacaaggacacagccacaaggcggggaggcccacaacaggcagaagggaaggaggagaaaaggcacgcacaggggcaggcaagagacagcaggggaacgcccaaaaaccacagcccgagacacacacagagaaccgaagggaaagacccaaccccagacaaacccccacggaaccccccacacacaggggaagggagcacaaacaagagagaaggaggggacacagccaaacaacaggccgaggcaggaaggaccagagagcgggagagaacccaagcaagccgacggaaaccgaggccagagagggaacacacaaccaaggccacagcacggacgggaaacgaacgagaaccagcgggcgggcagagcgccgacaggaaggaggcccgagcgccaaagggccacgcaccccccacagaaaccccagacagagccaaacaggagacccagcccccaggcggccagccgcccgccagccaaggccagaccccacgaggggcacgagggccgacacgcccgaggaggacaaagaagcaccacgcgaccaaaaaacagggccagggaggaagggcagggaagacgcaccggcaccacccacaaaccgcaagaacccagaaggggaaacccagcaggggaacacgagaccagagagacaaagccgaccagaacgagagacagggcggccggcccaggcggaggcaggacagaccagccacgcaaccaccccgggccaagccacccccacccagccccgagagcgggaacagaacaaccaccaaccaggcaagcgggagaggggcccaggcccaggcggccaaacccgagccaagagacgccgcccagcccccaaaggcaggaaaggcagagcacgcgccgcccagagccgcacaccacagcagacccgcccaagaccccaggaaagagcaagaccacaaagccagagcccagaaggaaaggagaccacccaggaccaaacagaaagaagaccaaggccaaagaaggagaggaaccacccgacaacagagcgggcccgccccagagccccccagcacccccgcccccccccccccacagagacccacggccaggcgcgcccaacagcgagccaaccgcccagggcccgacaccccgccagacagccacacgccagaccacccacaagggccgcgggcccaccaggaaccagcaacacccgcaaaacgaaaagcgccacaccgccagaaaagaaccagagagcagagacgcacagcgaccccaggcccaacccagggccggccccagagccaaaggcggggaggaagagggggagaaggaggagaaaaagggggagaaaggagagaagagggaggaaggggggaagaggagaaggagggagaaagagggaggaagaggaggagaagaaggaggaggaggaggaggaggaggaagaggggaggagggaggagggggggggaagagagggaggaggaggaggaggaggaggaggaggaggacagcgaaggacggaagaggggaggaaggaggacggggggggaagaggggggggaggaggagggaagaggagggaagaggagaaggagggagaggggggggagaaggacaagggaggagagagggaagggaggaggaagaggaagaagggaacaagggggagaaaggggacggaggaaggaagagggcggagggggggagggagggagaggggggggaagagggggcggaggacaccccagcgcgccccacccggcggggcccacgggcgcccgacgccccccggccccaagcccgagcagggagccgggggcccacagagggcaggacaccaccccccgaggcgggcagacaaaagccgccccccgccggcccgcccagccaggggggaaggcggcaagcagcaacaacgcgcaacgaacgaacgaggcgaaccgcaagcgagccccggaggccgcggccacaggggaggggcagaggaggcaggggggagcaccaggccaggcacagagagacccacgggggacccccaagccccagagagacagaagcaaggaggggaagcaaagagaagcggccgggcccgggacagcggggacgggcgccccagaggcgcaggggaggggaagaaagggggccgcacaaggccacggggccggaggggggcacggcaccagcacagaggggaaaacgaggccaaagagacaagaacacgcccccaggacacccggcagagaggaaggcaaggaggaccggacaggggccagaaaaaaccagcccagcaccccgcacacggcaaagagccacagccccaacacgccgcggagaaccaggaagcccccccccgggcagcccccgaaaagagaggcggcgggcccaaagaagcaggaccgggacgggacacgggcaacccaaaaaagaagccaaagaaaccaaacccacagccgggccacacccgggacccacaggcccaagacagagcagcaaacaagacccgacggcaccacaccccagagcccagagggagggacgcggcccgccgaacccgcggagccagggccgccccccaaggcgggcacgcacgggagagagagcagagaaagcagaacgggcaggcgcgcgacccaggggggaggcaagaacaaggcgcaggagggggagagggggggggcccccggaggggaccccccggaagccaaacgaaggcaaccaaccgcgggcgcacaaccaccaaaaccagggccacgccaaccgcgccagggcagaagaacgcaaaaaaccaaaggccaggagcacgaagcaagacggagaaggcaccccagccgccagcccacccaaacacccaaggacgcaaaccagccagcccgccacccaaccagagaaggggaagaagcccaggacccggcggggggaggcccgcggcgcccgaccggccggccccagccccccaaaccaccggcacaagcgcggcacccccgcacagcggggccggcccgggacccgcacagcagcccccacgagccccagaaacaggccccagacacgaagaggcaaggagaaggggggaccaggaagcacccaagcagggggaacaaaaagggaagaaagaaaaaaaaaaagaaaaccaacaccgcggggcaacagacccagacccaccagggaaccgggagacagcgaagagcagcgccagcaccaacccaggcaagggaagagacagacccgaccccccagcggagcgcgggcaaccaggggcagccaacccggaaccagcgagcggcacccaggccaaagaaagcacaagcagacacgcaggagcgagaggggcacgcaggggacgcgggccgggcagcaacagcacgcacaaagccggccgaccgcaaccgacccaccacccaaagcccaccagagcaccccccggggaagcccccgacccccaaacagcaacaccagagcaaacgcagaacacagggagaagccgcccacaggggaggaacaacaaggcaaaggacacgggcgaagaacagcagcacgcagcgagcgccccggcccccgaacaaacgggcccacgccccagggccgggagggccccaggaacgccagaaaagggaggaaggcaacagccagaccccccccgaacccggaccagaggaggggcagcaagggcccgacaaaccccagaacacaggaagcaaaaaaacgggggcggagccccacccccgagacagaccgacgggacacggccacccaaaaaagaagccaaagaaacccaaaccaaccggacaagggcagcagggaggaggcagaagccacggggagagggccagagggcaggcagccggagccagcgggagacaaagggaggaagcagaaaagaaaaaaagaaagaacggacaagggcagccacaggagagcaaaaacaaacaagaaaaaagggaacaggggagcaagaacaaacgagaaaggcgagaaccacaagagacggccgccaggaaggggcgcagaccagcgcccacagagccggaacccaaagaccagcccagccacccccaaagccacgcagggaaccggggcgagaccagaaaaagcgaagcgggcgagaacgcagaacacgggagaacagcaccaacgcccagaggggaacaccgaaaagacaagggaaaggaaaaccaacaagccaggcacggccagagcgcacacaaccacccgggggagagcaaacccaccaagaggggaaacgaggcacagaggggaagcgggaccaaggaccacagcacagagcagagcaggcgcccagacccggggcgcaagcggcaaaggagccggcacccccccgggcccaaaagccccgacgcccgaccacggcagcaaccgcaaggagggcccaaaacccaggcaaacccagcgcacaggcaaaccccacacagaaggcgacggcgaaggcgagacccacaaaggcacagcgagagccggaagagcaaaagcccccaacccggaaaggcgggaagcaaaaaccccccaaaacggcgccacccaacccggaagccgacgcaaaggaaaaaagagaaagccacggagcggagacacacgccagacgcccaccaaaagaaggaacaaaagcaggaaacagaaaagagggaaacgggccagccggaaacgggaccgggcaaacccccccccgagcccgcagcgaggaggaagaggggaaaacccaaggaagaaagaccgccagcgccaggccacgccgacccagcacgggaggccgagggggaggacagaggccaggaggagagaagccggccaacaggggaaacccgccacaaaaagcaaaacagccaggcggggcgcagccgaaccagcacgggaggcgaggcacaggaacagaaccgggaggcaaaagcaggaaccgagacagcacacacccagccgggcaacagagcaagaccgccaaaaaacaaacaaacaaacaaaaagaaggggggggaaaaaaaacacacacacacacacacacacacacaagaacccagaccaaaaagccaggggaagaagaggaaggacaggaggacaaaaggaacaacaaaacaagaacaacacagaaagcagacacagaggaggcaagaggaggaggagccgccagcagcagcaccaggaacgacagagggggccagcacgcaacaggagcccaaggccccgaggacaacaccagccagcgccagaagagggaagaggagaaacccagccaaccagccagccgagaagacgacacacagcccccacacacggaagaaacacaggccaccagagcaaaggcaggggaaagagcccgggggggacgcaccacaacacaggaggaggagagagcggggaccggcaccgccagaccaaaacaaagagacagaacgccgaccccaggcggcagcagaagaccaccagccacgcaacccagccccggaagcaccccccgcccaggccccagagcgggaacagagggcaccaccagaaggagagagacgaagcgccagggccaggcagccaaacccgacccaaggaccacccacccggccccaaaggcgggaacagacggagccaccacaccggccagaagggcagcaggggacaaacccagcccgaagagacggagcaaacaggccagaccgccggccacccaccccgggaaaaaacccaaaaaaaaggaaggacagagagccacccacccaagaaaaaaacaaaacaacaagggggagggccagagcaagcaaggacgcagcgggaacaagacagcggggcagagggacagagcagcaacagggaacagagagagaacccaagaaagacacgcacaaaggcccaaaagagacaaagagcaaaagcagcaaggaagaaaaaagcccaacagacggcggggcaagacaccacacgcaagaaacaaagcacagaccaaacccacacgaacaaaaccaccaaaaggacaagacaaagaaaaacaaaagcaaaaacaagaaaaaagcaggagaaaacagccagaacaaggcaggcaaagaaacagaggaaaaccaaaagcacaacaaaaaggaaaaaaagaaaacggacccacaaaggaaaacaacccagagaggcccaaaagaggaggaaaagacaagcacagaaggagaaaagcaaacgcaacgacaaagaacagaccagaacaaaacgacggaaccgagaacccaaaagcagcagaaaaaaaccaaaagaaaagagcaaaagacacaaacaaaacacgaaaagaacagcagaggaaaaaacacagaaaaaagcaacacaagccaagggaaagcaaaaaggccacaacggaagcacacaccacagaagaccaaaaaaaaaacgagggaaccgcacaacacgggaggaaggagacacagaacaccaacaccgagggaagaaaacggaccgacggaaaacagaaaaacgccagacggcaggcaaccggacaaaaaagaaaacagggcaaaaacagccaaaccaagcagccccaaaaggcaaaaacggaaaccacccggaagccgcaggaacaaaaaaagcggaaccaacaggacgcacgcaaacaaaggaaaaaaagaaacacacaagaaaaaccagagaaagcgaggaaaaaaaccagcccaaaggacaaaacaagaccaagaacacgaaaccacacaaaagaaaggagaacagaaggggccaggccgggggcagggggggggggagagggggaacaagggcaagagggacccggggaagaaagcgacgacaacacgcaaacaggacgaacagggggaaacggaaagggaaggaccccgacacaacgcagaaacaaaaaccaaaagaaacaaaaaagaaaaaacaacaacccagacacacaaaaaaaacggaacacagacacacgccagaaacggaagaggcgggaaggggacgacaagggagggcgggcaaaccagcaccagccccaccccgggcccagccacaccgcagggcgagcaagagaggaacgccggggggcggggggacacgagacggacagagacagcagagcacaagccacgcagggcgcccagaaagaaagccacccgggcgagaaaaggcacaggagaggcaggcagaggaggacccgagagcacccgagagccagagggacagccaccagccagggggggacccgcagggaaggcgcgagggccaccacccccgagggccggcgccgcgccccggaccccggggggcaaaccaggggccccaccggagccggggggacgccaggggggacacagccgggggggacccgaaggcaaaaggagcaggagggaacccagccacgcaaccagggccggacacggcgcagccacggaaccccaacaacgagcagagggcaaacacccgcggaccagagaaaaccgagacgggaggggaaggacgccaaggggcaacagaggggcagagcgagacgagcccggcgcgaaaaccagaacacacggaaaaacccaccacaaagacacagagaacaaagcagccccagaggagacaccccaagagaagaggaaaaggggaggcaagggcagccaagaggacaacagcccaaaaaacagccaaccgcagccaacgggcagccgggcccccaaccccaccgagcccagcccagccagccaagacaccaagcgggacaaagcgagcagcaaacagccccaccgagaaccgccaggcagacgggggcaccagccaggccccagggcagcgagaagcaagaccccccgggggcggaggggcagggagccacgagagacccccccacggccggcagacagagggcagggaagaggccgaggggcgggggaacaacccgagaaaacaacgaaaagcaacgcagcaccagaagcaccaccgcaagcaggcgccaagaaacccacaaccacagcagagacacagacccgcaccccccaggagagcacaggggagggaaaaccaaaaccacaaaggaggggggggaggggggagagggagggagcgaaggaggccaggggcacaaccacagcccccaaggcccacaggcagcccgggcagcggccagccccgccccagacggaaagacagcggacgagccaaagaaaccgacaggcgacaaacccacaagaaaaagaaaggagcccaaacaagcagacggaagccagggacacccggccaccgcaaaagagacagagccaggcgcccagaggccccgagccccgccgcacccccaaagcgcggagcaggccgcagcccaaaaccagcacggggcaaaggggacaggaaagaaaaaaaccaacgcacgggaggggaagccaaagaggcaccaccgcaggcagcgggggggcgagggcaagggagaaggcagggggggaaggaggggaggccaggcagagccaggaggcccaaaaagcagccaaaaagccccccccccagcaaccagccccgaccacgccagacacagaggcagcgagggagggaagaggcggcgggagccacagggaggggggcaaacccagccgccacgcggcgggaccggggggaaccaccccgagaccagcccaccaagagaggagagaaggaggcaggacagaccccggccaaaaccccccacggccccacccacggcagaaagcaaagaccgggccaccaggcccacaagaccccagccccaaacccaccccccgccaagacagggccacgcacccaggcggaggcaggggccaacacaccacacagcccaaccccgggccaagcaccccacccagcccccagaaggaggacacagacacagccccacggccagcaagagagagagagggggccaggcccaggcggccgaacccgagccaaggacgcccaccggccccaaaggcgggaacaggggagcaccgcgccggcccaccccaccaccccggccccaccccgccacacgggccccgccccaacagcaagcacacgccacccggggcgcacacacgccgcgcccagcaccccccagaagccacagggccccccccgacggggcgcaaagaccccgggggccgccgacccccggcccccaaagcccccggccaccccacccgcggaagcccaaacacgaccacacgacacaaaaagggggcaaacccccaggccagacgaagccccagcaggcagaggccagcccacgccccaaaaccagagccggcacaagggggcaccaccagcagaagaacagagcagggggggagaagggaagaaggacgggggcgggcagcaccagcccaggggcggccacgcacccccccgcccagcaccagccccagcaggcggaaccacaaggaaggagcaacagagcaggaagagaccacagagcccaagcgacgccagcccgcagcggggcaaggcgaacggcgcgggccggccccaggacaagggacaggccagcgacggggcggggagagaaaggcggggggccacagaccgagaagaggcccggcgaggacccagccgacacgggcaggacggggcacgccccgccccgcccacagcccacacgccccaaagcagaagcaagccccacaaggaggccagggccagagaggggccccaaccggcggaaagcgcccagaaagggcagacgcgaggagcccggaccggcagaaggccgagacaggagaccccgggcccgcccccggcaccccgccagccgaaacaagggacccagagaagcagccccggcgccccaagccgcccaggccgcaggcccaggcccagaagccagccgcccggcccgaacggagaggccaaggagggagggaacagcccaacgagcacaaccccaggccggggcaaggaaggagccaaaacaggcccacagcccccagagagccccccacacccaccacccggaccgggcgagcgggcaaggagcggcgggggggcgggggccgggggcggccagagcgggggcgcacccgccccgcccccacagagcgccccagcgagagaacccccccacaaggcacaacagagggcacgcaaggagacgccaggaagaacgccagccgacccaaagggcgacccacaagccccagagcagaccccagacagcgcccagggacaggccaccggagaagagggccaaagaaaggaacaagccaacacgacagccaggagacacaaaagccccggcccgaaaaagggaagagggccaacgggcccacaccacggacacaggaggccgggaggggggcgggaggccccagggcacaagaggacccgcacccagcccgcagccccaccccaacaccgccagggcgaagagagaggaggcgccagaaaagggcagggaaaagcgccagcaaaggggaacagcggagcgggagagcacgcaagacaccgacaaaagagaacacgaacacagggacaacagcaagaaaccaaacaaacaaaaccgccccggccagcagagggggccccagggacacggagcggagaggggggcacagcgggggagggaggggcacagcacagggggagaggccaaggaggcgcgaaccaaccacaaagcccagggcagcccagggcagaagacggccccaaagcagcaagccaaggcgagggacccggccgggggcacagacaccaaaaggacaagccaagaaccaaaccggaagccagcagcgagagcaccggaaaagagccggagcagggagagggagcagagggggggcgccaaacagggccgcgcacaggggcaggccgaaaagagggcacgcggcagggggcccggcagagggcacgagggcaccccacccgccaaccagacgccgcgggagcagggacggccgaccgggcacgcaagccgaagaggcgacccagggcccgaccaccagcaggccggcgccggaggaggaggccgaagccccgcacagcagcaacaaacacaacaggagcccaggggcaagggggagggagcaacaggggaacgccagcacaacagggaggacgcaggaaagacgggaaaggaagaaaagaaagaaaaggaaaagcaagcccaggccaaagacaagacaggccagcagagaggccacggggcaggccaccaaacccccaggagagcacagaaggaacacccgaaaggggggccaacgaccaccccaccaagggagaagacgaggggaagagagggagcaacgcccgaggccagcaagagaaggcaaggcgcgccggagccgggccaccagacccaggggcaccgcgcccaggggagcgggccaaacgagccaccggcccggagggagggcagcaacccagacagagaggaaaccaagccagagacaggaaggacgcccaaggcacacggcaggggaacagacacgcagccaccaaacccgcccccgaagcccggccgccggaggaggagcgaagcccaaggggggggagggaaaggggccagggagcaagcccccagggcgcaggaccaggcaggaggccgaaggaggcagggcccgggggcagagggagcagggggccggggagccgccagccccgcccccacggcaggcagcccgccaggagggccgggagaggccgccccgcgggggccaggcgacaaggcccggcggccgacgggggagaggggaggaggccaggacacccccgccaaggcggcgcaggcggccgccaggacgcggcacggggcgccgggcgccagagggaaggggggcagggggcggggcgggccacggggcggcgcggccccgggggccggcacgggggggggagggcagggcacgagggcccagcacgcgcacacccaggccagggcgaaagcgggcggggcccaggccccgggcgggcgggcggacacgcggcaccgggcccgacccggaccacggggccgagcaccgggcggcccagagccagccgccccgcggcccacccccggggcgcgggagcacgacccaagggggcaagaaagcccgcagaggcgggcgagccacgggcgaagggagggagggggccaggcagagggaaggggggcccaagcggggggcaggaggagggcagacgcaagagcagccaggaggcgggggccgcaggaaggagggagggagaggacaccaggggccaccgcaggccagagccaaaggaggggcagccacagaggacggagggaccagacaggcgcaggcaacgccggcgcagggaaaaaggggagggcaagccgagaggggggagcgcgggccaggaggaagcagccacagcgccacccaaggaacccccacccaggcagggggcaacccccagcagaggggaaacgaggcccagggaggagaaagcccccaaggccgcagccgggagcggcccaagcaaagccaacccccaccccccacggcgccgccccgcaagcgccgcacgaggccgggacgccggcaaagcagagaaccggagcccgcaggcaggaaccaggaccggagccagagacgggcgaaccgcccgagcgggaccgggcaaacacagccccgcaccccaggacccaggccaaagggaggcgcacaaccccaaaggcggccacagacccaccggacagccgcacccacccgcacccaaaacaccacacccagcaacacacgaacccgagacacggaggccgccacggcaggggcagagaggcagaacagggccgcacaaggggccaggacaggcaagaaccaggaaacaggacaagggaacacagccggcacgaggggggaaggagggcgcggcaaaggggagaggcacggaagcaggacagcccagcaaccgaaggaaggggcccaccccgcacacccgcccaggaccgccagcccaccgggccagacacaaggccgaaaaagggagaccggcagggcagagcgcggcaagccagagggacaggacccggccccaccgaccacagcgaccagaggccgaggccgccccaggacccccgaaccccaaaaacccccgaccaccccacgccccagaccccagccccgcggaaaacagggcagccggcaaaaagccgccaaggacaacgagcggggaaaaggaagcccagcggggcaaggaagcagcccgagcaaaaacaagaaagaagaaaggaggggcccggcccagagacaggggggggcgacccccaaggcacagccagcccgcgcaggcagccgggcccaggcaccggcaccggccgagaagggcaggagcgcagggggaaccaggcccaggcggagaacaaccgccgccccacccccgccccagaccccacccggcgggacagcgcaggcagcagcgcacaggagaagcagggggggcgaccagggagccaggcccgaggacccacgggggggggcgccagcgaacggaaaacggacggcccccccccgcagcgccaaggcaggcccccccaccccccaccccacaagagcaccacaggcccagccccggagacaagaaaagacccgcccaccgcccggcgagccagacgccgggacagggacagcgccaagccccagcccccgcccagcccccccccacaacggcgagcaccagaaaggcaacccagacgccgccgccaaaaccacaaggcccccgcgcgaccggagaaagccaaacggcccggcggggagccggccgcccacaccccaacgccccgcagccgccccacgcgccagccacgaggagaccccagcgaacacaccggcccccccaccccacccgccaagccaccgccagcccaggcccccagccaaccccggcgagccggcccaggacacacacacaggcgaagcacaaacccccccagagggcaggaaggccagacacgggcggcgccaggccaaagaggccgagacgcggcgagcgggaggagcgagcgcgggcggggccacccagcacaggcccccggagaccacggagccccggggccccacccccggcggaaaggagaggaccccaccacccagggcgcaggccggccagcaggccccggccacaggaggcaggggaagcacacgaccaacagggccaagaaaaaaccggcgacggaagggaaagacggccgccgaggggcgagccggaggagcagccggagcagcgaggcacggccacccgagaaacagagaccgccgagaagccaggacaggggcaaagcagagccaagaggcgcagacagcccccagacgaaaacgcagcgggcccggaccagcgacgaagcagacaggccccaccccaaaacccaccggggggccagccgcagcacaagaaaccgacaaaagcgagcccgaaaacaccacaccacgccgcacgccagaccccagcgaaacccagaggaaccccgaaaccaaagcgggggaggcgccccccacagagcagcccaccagggcaaagagcaagacgcggcgggcccaagcccggaaaaggaaaagagcaagggaaaaccaaaggacaaaagggccgagcccaggggcaaggcgggccccagccccacacgcagcaggacaggcacacagcagagcccggccacacgcgacaggcaaggcaagcccaaccgggccccgggcacggacggcgcccggaaaacgccaggggaggagcgaggcccagcggcacgacaaggccaaaaacccgggggggcgcccagcagcaggacgagcaggcccggcccacacccgcagagccagagcacccccccgagggacagccacacaacccagacggccaaacaccgcagggcaaaacacccccgggagaaacgcgaagcaaagggccacaggaccggcacaagcaaggccaaaaaacagcaaagaggcgggacgagagcaaagagacacgaggaaaggggcccaggagaccagaggcgacaaggggaaggaaaaagaggaacagaggagcacagaaagagaaagcggaagagcagcaaaacaacccagaaacggaggcagcagaggcccgacagcaagaagcagaagcgaagcggcaagagcacccgcagccaccccccacccccccaacagaaccagccagcacaagaaacccgcccccacccccccagggcccaggaagagggcccagccaagcccaggggacgacccggccaagcagccacaggcccccaccccaacaaggccaggagaaggcggacaggaaggaagccaagagagggagaaagagaggccgggaaaggccgcccgagaagaggacacgaaaccaggccgaaggcgaaaagcggggagacagcgccggcccaggcggaggcaaggcgcgacggccacgcaacccacccccgggcaagcaggccccaaggggccggcagaaagagacggcagccggagggggagaccgggggaaagaagaacaaccaaagcaagaaagaaacgccagaagcgagcccccgagaagccccgagcgggggaacccaggacccacgagacggagcgccggcccaggcagaggcaaggcacgaccggccacgcaacccgcccccgggcaagcaaccagccagccccgagagcgggacacaggcgcgccaccacacccagcaagaagggagacgaggcaccggggacaggcggccaaacccgacccaaagaccaccggcccagcccccaaaggcgggaacaggcggagccaccacacccggccggacccacaaaaaacagaccccgggcagggggaggcgagggacacccagcgaagccaaaaacagccgaggcagcacagccccccccaaaggcccccagcccagggggggagccccagccaggcgcggggacccccgccacaggcccagcccccacacgggcccgagcagaccggccccccaggacccgagggccgcgcaccggaggagagcaaccaaccgagggcaccagccaggcaaccaccacagcaccccccacgcaagaccagggccgcaccaggggacaccagaccccggaaccccagagcaggcgagaacgagcacccagagcagcaaccgacaccgcccccaaaccccggccggcccagagaaaacaaaaaaaaaaaaagaaaagccacaaccacaggccgagagcacaggaccgcacgaccaggaggacagcgccccaccagagaggagacgagcccagagaagggagaacgcaaagggaagaaggagcggacgaagcaagcaaagggggaacacaagcagggagacaagcaaaacaccgcgaaaaaaaaggaaaaaaagagaaaaaaaaagaggaaaccaaaagacaccagcgggaggccaagggggcggacaccgaggcaggaacgagaccagccggccaacagggaaaccccgccacaaaaaacaaaaaaaaaaaaaaaaaaagccaggcgggggcagacaccgaacccagacccagaggcgaagcaggagaacacgacccaggagaggagggcgggagcgagacacaccagcacccagccgggcaagaagaggaaacccgccaaaaaaaaaaaaaaaaaaaaaaagacaccagcccaccacacagacacagccaagagaaccggccggaaggccacgagggacagggaggaacaaacaggaaggccccccccccggaacgagccaggaacacaacaaccaaggacgaacagaaagagaccccgaccaaaacagaacgagagaccgaggggaaagagggaccggggcgccaaacacaacaagaaagagaccgcaccgggcgcccaccgcagggaggaggagaaagacccagggacccacagaccaggagcacagaaggcacaggacgccagggcaggggcacacgaacccagcacgggaggcaaacaggggggcgcgaggcaggagcaagaccagccgagcaacacagcaagaccgccgcaaaaaaccaaaaaccaaaaccacagggcggggaggcagaccagcgccggaacccagcccagaccccaccagcaggacccaggacgggccacggcgccccaggaagcccaaccacggagacagggacaagaacccccaggacacggaaaagacagggagcaccaacgcaaacgaaaccgaaagccccaaacgaaaccgaggcggaccgagccgaaggaaagcccgcggcggcgcggcacggcgagcccccacgcgaacgcgcgcggcgcccgaacccacccacgaaagcagcaacaccaggagacagggagaagggagacaagagcagaagcaaaaacagagcaggaaaaggggagccaaacaaccacagagccacggggaacgagaaggggggacgccccggggcgagcacacaaaagcagcacaaaaaaaaaaagacaagcacaggcgggaaagggagaaacaaagaaaggcagcagagggcccacccaagaaccaggaagcaaaaccaaaaggaaaaaaaaaaccaaaagaccggccaagcaggaaagggacccagacggacccggcaaggggaaacagaggaaaagacgggcaacccccagcggccgagggaaagcgaccagaaaggccaaggagaaagccacgggacccacgggccaaacacaaacagacccaggcaaaggagcccgaagccccaacaagggggcggggaggacgggcggccggagggagcgcgaccagccccacggggaacgcacccagcagccaaaaagccaccccaagagaagccagagaccagagaagaaacccccaaaggccaggcgcagggccacaccgccagcaccggaggcaaggcgggcagacaccgcggcaggagcaagaccagccagccaacacgggaaacccgccacaaaaaacaaaaaaaaaaaaaaaaaagccagggggggccggacccagcacgggaggcgaggcaggggaacccgaaccaggaggcagagggcaggagcgagacagccacgcacccgccggacaacagagagagacgagccaaaaaaaaaaaaaaaaaaaaagaaacgcccagaaacggccacaagacggcaaagcaggccgccaccgcacccgggaggcaaagacaaaaacacagacacagcaaaggggggggggagcagcagaacccaacgcggcgggagaaagaggacagccgaggaaaacagccagcagccccaaaaggagagagaccacagacccagacaccaccaggaaacccaagagaacagaagaagcgcgcaaaaacacacacaaagcacagcagcacaacaacagcgcacaggaaaacagcccaaggccacacggagaaggggaaccccaggggggccaacaagggaaagggcaaaaaaaaagaacgacaaaccagcacagggaagaacccgaaaacggggcgaggaaagaagccagacacaaaaggccacaagggcacgaccaccaggaaagcccagaagggcagacgagaaacagcaagagaggggggggaggcgggagagggcaaggggagaggcagggaacggggcgggggagggggaaaagcaaaagaggggagggcacaaccggaagacaaaaccagaagacaacagcgcgaaaggagggaaaagaagagcgaaaaacaaaaggcggccaacagagccccgggggagagcaaccacggccacgcccaccgaccagaggacccagaccggaaaccagccaccggaacaccggccgcgcagaggcgggacgcccagaaggcagagccccaggggcccagcaggacagagaaacacccggaagggagggaggggggcgcgacacgccgcgaaaaacagccaaaagaggcagagaaaggccgaggaaccagccccagacaagaaggaagggagggggagcgggggaaaacaggggggcagaggccagggaggccggcagaccgggggccgagaggaggcagcaggacaagcgcgaccgaacgcggcgggcccccgcccacagccagggcagcagcacgcagcaggcacggcggggggggagaagcacagggagcgcaggaacaccacacaggggaaggagcggagagaacgggaagacccccggggagggacacagcgagacgaagaaggacaccggggcaggggacgcggggggacaggaacgcaaggcacaggcgagcggccggccccagagaaagaggcgcggagcgcagccaaggggaagagggagacagggcggaggaggcagggaaaccacgagggaggcccagaccaggcagggccgcgggcgggaggacgacgccaaaagagcgggagccagcaaagccgagcagagagccgaccgacccggcaaagagcccccagcccaaggggagaagggggggaggggcggagcagggaggccagggacgcgggaggccagaggggagcagggaacaaggcggccaggggggcaggagagggggagaagaagcggcccacgcacaagaccgcggcagagaacagggcagggaaaccggagaccacacaaaagacacacacacgcacacacacaacacccaaagccggagaaggaccagcacaacacacacaccaaagccacaagagagacaagaaaacacacacaaaacacccaaaggcacacaaaacacacaaagcaacaaagaggcacaaaagacacacacgaacaaagaaccaagaaaccacagcacagaggggacgagacaaaacacacacaaagacgcaacaagagagacacagacaacacacacaccaagaccacaacacaagagcacacaaaaaaccaaggacccgagcggcagccagggcggaacggccggaaggggccagccggagagggaggcaggacgcgcagagcggggacaggcgcccgaacccacccacaaaagggagacaaaccgccgcagggggggaagcgggagacaccaagcaaagcagcgacgccgggaagacaaaagcagcacacacaaaacgaggggggggccaagcaaaccccacggagcaccccggaacacaggggcaccacgccacacgcccccccgccagccagaagggaaaaggagaggccggggcccggggaaggaggaccaagaacccaaggaaaccagagcagcaacaggcaaaaacagaaggggcgccgccagcacagaagaggggagaggaagccagaaacaccagaaggcaggggaagcagggcgccaggcaaggaacaaaaaccaacaaaaccagagggaaagaaaagggcacaaaaaaaaccagggaggcgccaggcaagcagaccaggggaagaagccacgcccggaagacgagaacaaaaagaagcaccaacaccacaccaagccagaaaacagcacaaacacaacgcgcgcacgccacggacacgaccccacgaacaaagacccacagcccagcgacccagagggaagcccagcaccccaaccaccacaaagcccccagacggcccaggcggacggacagggccacccacccgccccgggcccaggccaggcccagcacaacgacaccgaagcggggggggcagcgccaaacccaggacgagaggaagagcgagacccaaggaaacagaaagacagagagggagacggccaggccagccacccaggggcccggcggggccaccgcgccgccgcccccacaggaggggcggccgccagcacccacagcaggagccccacccccacacgggagccgaggccagaaccacaagaccagcacaagaggcccggaggaacggacagggaaccagcagcagagccacccccggcccagcccccaggaaagggaaagaccacccaacagcagaaaggaacacacggacagggcaccaccgcaacaccagaccgcaacaacccgagagcaaaaaccaccaacacagaggaaacgaggcacagagaggcacagcacgccaaggccccaccaagaaggagaggcagagcgggagaacccagggggacaagccaaggcgccagcgcccggccaccgaggaggcggcgagggaccccaccgcccagcccacggaaacggcccaggcggagcaaacagaagacagaaaaagggacaaagacacagggccccagaacaagacagagaaccacgggcagggcaccaagccaggcgggagaaaacagaagcggggacaggagggagaggccagaagccgcaggaggagaaggcaggagcggaccggggcaggggagggcccccgggaagacgggggggaagcgccgccaggcagggggcacccaaggcaaaggcccgagggggacagggagagaagaccaggacaagccccgcggccgcgcggaaaccaaggcacaaagagaggaggggacggagccaaggccacgcagcggcagaggggagcgggagaggggaggaacagaggcacgacccgcaagccacccccacccccacccccagccagaacccagaggggggccccccccgagccaccccagcggcggaggcgcgcgccggcccgaaacaaacaacacgccccacaaagcaacagacgcccgggacgccaccacggccccaccggcgagacgacgagcgcaggaccgagggcgagaggggagcaagcgggaggcacccggccaggagggcaccgagcggcaggcccagccggagaccggccacaccgagcccacgcagaagggacaagagggcggcgcaagggcggagacaagagcgcggcaaagaggagccccagcccaaagggggcccgaggggccaggagccaccccgggaggcagagagccccccggccaaaagagagagagagggcaaccaccccggcaagcgcggggcagcagagcccaccgcagagggaagaagaggcccaagaggccagggacgccgaggcccggcacgagggggaggggcaggcccaaagccccaccacagaggcgcaaacgcaacgggcgcagagaggggaacagcccccccggacccccgggagcgggggggccgggggcccgcgcagcagaagccgggagaagccaaaacggcccccagcggggaggggagcaagggaaacaagcccaaaaaaaaagaaacacgacaaacaaaacgacagcaccaggacccagaaaccacaaagacaccagcccgagggaggcgcgcggcccaccccaccgggaggagcccaaggcacgaacacgggggcgaggaggacgaacccaggcccgcagacagcagagacggcgcgcgagagcgacgggaacacggggccggccgcccggcccaagaggcagcaccagcagcggaccacgaggcagggccggggggaaccgggaaaacccaacagcaagcacccgggcgccccgcagggcaggggaagacacagcagaggcggacgccaggaagggggggaggcaagaacagggcccggccccccaggagccagagggcaaagagagccgcaaggccccgccaggcgcccgccagcagaagccgagccaccccagcccgcacacccacaaaccagagcgggccggcggacacaccccccaacacccacccagcccggccgaccggccccagcccgcccccccaccccgcaccgccccaccccaggaccacccacacaggaagggggagccgcaggacccaaggcgacaggcccccccgggaaacacgagggcccccacgccggacaacccccaagcggcagccccgggccgcagggcccagaaccgcacgccggcccccccgcccagaaccaccagacagccacccaggaccgcaccggcccgcccgacccgccacggacaacagccgacaccagccacacgggccagagcaagcccgaacccgcaccagcaggcccgcgccaagcccgggcgaacaccccaccccaaaccaaagcccggaggggcgaggcgccgcgcccccccagcccccccgagccaggcccccaaaggccgccggccagggccagcccgggcggaccacccagcagggcgccggccgaaggacacaagcagcgccaaggccggccacggagccagcagcaccccccagggaaaacaacacccagaccaccaaagcccggggagaacaaaacaccgcagcgggacccccgggcgaggcgcccgcggcccggggacacccccaccagccccgcacccacccgccagccccggacacaacccagagccaccgcgaggaacccccagcccaggcaggcaggaggccggggccccacaagccaaccacacggagaccgagagccacgaagcagggggcagggcccacccccaccccgccccggggagcagcccacaagggcgggcccagcgccgccccaccgcggacacgcacaagcaccgagcacagggccggcgcgaaggggagccagcacacaccaccccacgccgcccgcccacacacaaacacaccccaagccacacaggggggccgcgaggcgacaagaacagacgggccgccccagcccaccacacagcgggcaacacaacacagaggggagccacaggggaccggcagcccaaagaggcacgaccaaacaggggaagaagggagggcaagagggcccgggggagggacgcggagacgaaaggagaaaaggaggacagcaaaaaaggccaggaacggggacccaacgaggaagccaaagccacgacgcacaaaagaacgcagcacagaacacccaaaacaaaaaaaaaaaggcaaaagagggacagaaggaaagcggggacagaaacgaaggcacacggagcgcaggcaaaggagcagaaggaaggggagagacaggagagcggccaggggcccgggccacagagaggagcgggccgaggaggggagcacagaaggcgaggcagaggaaggaagggagaagagagggggaggcggaagcaggaagagcagagaaggggcgaggccacagccacggggagagggaggagccggcccagggcggccagggagggaggagagggggaaaggagaaagggcaaaacccgacagacgagggagagggaagggagaggggagcacacggacaagccgggcccagcaggaacccaccaggaccgcccccagcccccaagagcccagcgggggcagggcagggacccagccggcccccccaggggccgcccccccaaggccgaaggggggcggcaccccagacccgggacccggcaaccggccccgggccgcggggcacgcaccccgggaggaggagaggcacccgcccaggcagaggaccgaagaaccgccgcaggggaggccccacccgccccccggggaccagcagggaggggacaccgggcacagccgggcaagagacccagcccaccacgcccgcacggcgacggcccgccaccgagggacgcggggccaaccccaacccaggggcggcccccaggcccagccgggacgagcccacaccggccaggccgggggagaacacccccgcagcagccggggcaagggcagagggcggagccagggccggggcaaacccagccgccccccgcgagcgccacgcaaggaccaaccccgagcccaaagaaagagacgcaggaggcacacccacacaagggggcccacacgggggggagagcccggcacacacggcacgggagcggcacaaaggaacgaccacggcgggagccaggcggaggaggccacgacgggacccaccccgccaccaccccacccacccgggaaggccgggccccggcccagaggccaagggggggaaggaagaggacagaggcacgggggggcgccccaccaggcagccgacacaggcggccccccccgaggcccgcgggcggccgcccccccagccccggccgggggcaggcgcccggcaccaagggcggggaggcgccccagaaccggaaaagcgccaccgaggcgggcccacgggccagccccaggcgggggccaccccgacaccccgccgaccaccgcgacccggccgacggggggggaaccgcccgcaagacggagcccgccccaacgaaaccaaaagccaggaagccccgggaccccgacgggccccgccccccggaggcacgagacagacacagggggaaggacggaagggagaaaggaagagagcaggggccaggggggcagggcagggaagagaggccagcgcagccccccagacagggccccgggacccacaaaaaaacgcgagaaccccaaggagcccgcggggacacagcgaaccacgagaaagaaaacaagaaagaaacaaaacaccaaagaaaaaaaccaacagaacaaacaaaaaaaaccagcaaaaaggacaaaaagagaaaagggcagggagggaacgcacccgaacagcggcccgggggacagcgggcccacacgccgcagggacgcggagacgaggagaagaccgagaaaaccggcccaaaggcacacgggaaaaagggaggaagcacaggaaaacagaagagacggagccaccgcgcccaggcggaggcagggcgaacaggccacgcagccccggcccgggcaaggacccgcccagcccccgagagcgggaacagacacgcgccagcccggcaaggaagagaaaggagcaccagggccaggcggccaaccccgacccagggagccgcccggcccccagaggcgggaacacgcagagccacacacccagccagaaagcaagcacacaaaaacaacagggaagcaaacagagcaagggaacaaacacacaagaaccaaaccacaccaggagaagagagaaacagggcaaaaaccacgaaccccaagggcggggaccccagggaccggaccacacagaacgggccacaaggacacgaaccacaaggcgcaagaccagggaaggccacacaaccagcacagggacagggggccaagccgcaggaaaggccgcaaaaacaacgggcaggcaagcagcagaaaaccgggaaacccagaagggagcgggcaaacggacagggacaggagaagcggaaaccacaccagcaaacacgcaaggacaaaaaaccaaacaccgcagccaccaagggggaagaacaggagaacacaggacacaggaaggggaacacacacacaggccgggaggggggggagggggagggaagcaggaggaaccaagaaagagagacggggcagcacaccaacaggcacagaacaagaacaaccgcacgggcacagacccaaaacaaagacaaaaaaaaaaaaaaaagaacgggccaaagagaagacccagcagcagaaagcgcgggacccccaccagggacaaccagggagagaagaagcaggcaacccacgcgcccggcgggccggggaggcacgcccaagccaagccacaaaacgggaaagaagaccaccacaggcgggcaggacccagaaaagcaggaggaagcaaagcccgccaaggcccgccacagggccgcgcgggcgcccccacgaaaccccccccccgggccaagggaaccccccagccggcaaggccccccaagaagcccccgaccccggaacgcgagaaaccccagagcagacaaagcaacagggaagggaacgccccaccaacccaagccggggacgccccgccgaggagcggggaagaagcggaaagaaagggaaaaggccacgcgaacggccaccggaagaaaaagcgggcgacaaggggcccccccaacccccaccccgccagcagcggacgcaccaagcaggggcaggggaggggggccagccgaagcgcaggggcccgggggacccagcccgccgagcccccagggggaccccggaggcccggggcagcccccaccgcagcccccgcacaggaccgcccgcccagagcaacccaagcaccaggcggcagacgcccccccccccaccccccagagggccagcaaggacccgcaaccccaagccgacgaccggcccgccacaggcacaacccaaccccacccccaaccaggcagcacgcccaaaggccaggaggccacaccgcccccgggacagacaggggccgggccagaaggccaaacaagcaaaagacacgaagcaggaccgggagaggcccacgaaggagggacaagagcgggcgcaaggaaagaaaccagccacacgaaaagcaaaaaggcacacggcgaaagaaaagccagagaaggggagccaggggggacagagccaacccccgcgaacccagcgcccggggggggggcccggcggccacggcggaaacaagcagacgccaggccgcgccagagaagacccgagggcacggaagcacccagaggccccgacagacccagaccaaacaaccagacagccgccccgaaccagcggcgcagccgaagggagaggaaaaagcagagggcaggaaggcgacagcccccaaaaagggggaccacacgagagaaggggcaacccccaaaaacgagagaccaagagaagagaaaggggcaagaccgcaaagcaccaccgaggagaaaacaaacccaagcaaaaaaagaagcggagcaaaaaccaacccagggaaaacgcaaacgccagaacaccagaacccgcaaacaaagaagaaacagacgacccgacgaagcgaccaaaccaaagcagcacagagccacagagacacgaaaaaaagggccgaagaaacaaacagcggaaaaaaaaaagcagaaaagcaaaaaagagccaaccaaggggggcccccaggagacagggcaaacggaacagggaggaagggggaggggagcccggcacagggggagaggccagggagccacagacacccacagcgcccaggacagcccccgcaagaaaaacgacccaaaagcaaaggcaagggagaaacccgaaaaggaagaaaaaaccccaaaccacgccagaaaaaacacgccgacaggcaaacacaagaaaccaaaagcccagcacacacaacaaacaaagagaagcacagaaaagcccacaagcaggcgcccgagcgggggagacagagccgccggacccaggcggaggagggcagaccggccacgcagccccgcccccaggcaagccacccgcccagcccccgagagcgggaacaggcgcccgcaccacgcccggcaagaaagagagagggggccagcgcaggcggccaaacccgcccggaccacccgccggccccaaaggcgggaacaagggagccaccacacccggccccaagccaaagagaaaacagcaacacaagaaaaagcaacaaaaaaacagcacaaagaggacaggcaagaaccgagggcacagaacccccaacacaaaaacaagcgcaagaacgaccccccgagagacacggccaagaaaaagcccccaagaaaccagggcaaaacgcccaggaacagcagggcggccacgccccagagacccgagagccgcgggacagagagaaccccaacccaaccgcaacacgagaggccaacgccaacgaaggcagaaaagacaacagagcacagaaacggggggggaacgccaacccgaggcaggccccgccccaggcggaggcagggcaccaccagcccacacagcccccaagagcgggacacaggcaagccaccacaccgcaaccagagagagagaccggacccaggcggcaaacccgggccaagcaaccccacccggcccccaaaggcgggaaaggcagagcgcccgccgccagaaaggggaaacgggaccccaggcaagaaccgaaaaggaagaaccaagagcaaagacaaaaagcccccccccccccccccccccccccccccccccccccgccccgccaaggaagccgggggcaagcagcagaaacaaggaaaaacgaacaaacccaaacaaccacgccccgccccgaaagccagagccacagcaacagccgcccaacccagcaaacccgacccgcgaaagcagagcccggggcggcaacacagcacaccccgcgaggaacgcccggccggccagaggcgacaaagaaagagaaagcacagccaaggcagccccagaaaaagaagccagaaacaaaacaaagccaaacggacaaagaaacgcagcccaccaaacccaccaaccaaacacagccagagaaaaaaagaacagggaggcccacaaaaacggaggggaaagacaaaaggaaagggaagccaggcacccagacaacccgagccgacccaacccagccgaaccacgccggaccggaaaagcgacgccaaaagccccgcagaaaaggcaaaagaaacaacccagaggacgagaggaaaggagaaggcaaagaacacccagcagaagcagccgcaaggagcagaacacgacaaaggagggaaaaaaaagcagaggacaaaaaacaggggcaggaggcaaaagagaaccaggacacacccccgcagccaccagcaaaggacagccccaggcaagacagcgcgggcccaggcacacacgggacagaaaaacaagcaaagaggaggagggcaccccggccccagaggagaaaagcccaaaccccccgcagacgcagaccaggccaagaggcgacacaaaccaaaccagcacgaggaggaagagaagacgcagggcggaccaaaccaccgaagccggggcgaggaaagccaccgcccgagcccgagagagcacaaccaacaaaacgaacccgcagcgaaggagcaggggggcaacccggcggcaccaaagcacaacccgggccagagggcccccaaaggcggcaggcaagccaagacgggagccacacaggcccagggggaggacacaaccgcgaggccagggagccccggggccagaccccgagcaaagccccaccagcacccacgaggcagggaacccaaaccaacacacaagaaccacaaccccccacggcccccgggacccaccgccaagccagaagcggcggcccaggagcccgcccccccacggcccacgccccagccgccacacccaccggacaccaaccaagcccccgcccccgcgcgggggcacaacagccagcgccccgaacggaacccccgcccgcccgcaccgccaggaaagcccgaccccccaaggaaccccaacaaacccacaccgacaacaccccagcccgacaaccaaccgggaacaccagccaccccaccagggcagcccagaggggggaagggcggcacgaaacccaggccgacacaagagggcccaaaccgaacccaaaagaaaaacaccccgcccgggccagggagacaccaagaagcaaacaacacccccccgccaaagccccaggcccccacccacaggacaaagcaaagggcaaccggcccaggccccaaagggacgccacccccagccccaccaccgccccagccacggccagccaccccacccagggccaaagcgcagccccacccggagccaagcagccccggaaacgccaaaaaaccaccagccaaggcaaaagcccggggaaggagcgaagccacggaaacgggcccacagcggcacccagccaagcccagcaagccaaaacagcgcaagccccgcacacacgccaggcagggggagagagaaagggcacccaagggcagaccagaagcaggcacaccaccaacccaggcggagccagcaagaccagccaacgcaaaggaggccgggaaaagaacacacgccgaagagcagcccacaagcccaaaacccagagagaaaaaagcgaggagggggacacgaggccgccacaccacccccacaggccagcaggacaccgcccagccagacggagccccaaggacagggaccaaaggggcagcagcaccccgcaaccacagaggcggggacaaggcaaacagaggaagcagaggccggaaaacaaggggagaaacgaggcaggcaccaggagccacacacacggggcgaacacaaagaacccgggcggcccgggccggggggcagcaacacgcggccggcaggccccaaaagcacccaggggggcgcaaggccccacccggggggaagcgcagaaacagagcagagccacagcagaacaggaggcgccacaagggccacaggaaggcaggcccaggccccagcccaccggcccggcccgcgcaccggccacccccaacaacggccgggcccagcccgagcaccgccccccgcccccgagaggccgagcggggccccccccgcggcgccggggaaaggccaggagcccaaggccaagccagcccaacagcgccgacgcaccccggccagacccccccggcgccagccccgcccagcagacggcacccccacgcccaaagaccaccgcccaccccgggcccccaccacaggcacggccccagcagggcggggggcgaggggaaccgccgcacagggccgccgcgccccccagagagacaggacacgcgccacgaccagagccagcccagggccggcaccagagggcaggaaacaggacaccacaacacacacaggaggaaagacaagagaaagcaccacgcaccgagacagccagcgcagcggcaccgaggcccacgacacagccggggaacaacccacacagggaggaaacgagaccagagaaagaaggaccgaccgaggacgccaaaggaagggccaagccagacggggggggaaaaacgaaagcaaagacggaggagggggggacgggacacacgacaaagccacaaacgacaggaaacagaggccaaccaagcaggacccccaggagacacagcaaaggcagagacaggcacagggggaagcaagcacggcaccggggagaggccagagagccgccaacaccacaggcccaggacagccgccacagcaaagaaacgacccaaaagcagaggcagggagaaaccgcgaaggaagagacgaacacaaaagacccaaaaggcaaacaagcagaaaaagaaaaaaagaaaagaacaacaaaggaaaagaaaggaaccaacaagacaaaacaaggccacaaaaaaaaggcaaagaacagacagaaaaacaaagagccaagaaagacaaggggcccaccaaacaaaagggaaacaaaaaacaaaaagcgggggggcccagcgaacccagccgggagcgagaggagaacacgaagccaggaggggagcagccgggcaacaaggagaccccaccacaaaaaaaaaaagcagggggggcggagcgagcccagcccaggaggcgaggcaggaggacgcgagcccaggaggaggcgcaggagcaagcaaaaaaaaaaacaacaaaaaaacacaagggaaaaaaaaagacagaggggccaggcgcggggccacaccgaacccagcacgggaggccgaggcaggcggacagaggcaggagagagaccaccggcaacagggaaaccccgccacaaaaaacaaaaaagccgggcgggggcgggcgccgagcccagcaccaggaggcgaggcaggaggaggcggaaccgggaggcggagcgcaggagccgagacgcgccagcacccagccgggcgacagagcaagacccgccaaaaaaaaaaaaaagacagcaggcgggagggggggaagaggcccccacccccgggaggagggaggcaaacggcaaagcccggcgggggggagcacgcacagcagcaacccagggcagaaaacacagcgccagagagcgggcggagccacgggagaaaaggaagaggcggaaaacaaaacaagaaacaagaacgggaaaggaaaaaaccagggcacagccaggaaacagagcagacaaaagaaaggcaaaccacacacaagaggcggaacaaaaaaagcgggcgcaaaaccacagcaacgcgaacaggggcacaaaagaaaccagggcccaggccgcagcgcgccacacacacccccccccacgaaggggcggcaaggcccaaggaaaaagaccccccagccccccgaaaccacgcggggcaagagagccagagacccagagcgcacacacgccccccgccccgccgcgagaagcaaccccgagccaggaggaaagcacaaccaacagggagaccaggaagcggcagggagcccgaacaagccacaagcccagacgccacccagaccacacaagagaaggaaccccaggggaaacccggggaacgcagccaaggcaacagaggcagcaaaccacggggaggaggacgggagccgcaacagaacgacaaggcaacaagaagaccaaaaaaacaaacacaaaaaagccgcggcagagcggggaccgcgccaaaaaggggaggccaggcccccaacccaggcaaaaagccaaggggaagaggagggacacgaggggcccggaccgcgaaggagaggggaagcgcaggaaaagcccaccggaagaggacagcgccgagcccacccagggaggccaggggcagccaaccagcccaacccgggcgccccacaaagggaccccagccagacagcagccccaggcaggaccggcgcccccaccggccccccagaaggaggagccccaccaggccaaagacccccccaccccccagggaaggggaggaagccaccgcacacgggaggggagcacccacggcggaggccaagccagcccaacccccgcccccagccccccggggggggaacgagggaaacacccaaaaacggacagcaacagcgccaccgggcaggaaccgcacggaagcgaggcacagcccgggccaagcccagcccagcaaccgggacggggggagcaccccccgaccccaagcaggcaaacgaagcaagcaccgaaccgggcaggggggcgaggagccacaacgaacaccccgaaacaaccgcccgggaacccaaggagagacgcaaaacaacaaaagaaagaaaaaaaaaccgaggcaagggagagcacagagagaaggggcgaggaggcgggcagaggcgcagaagcaggggcaggacgcccgagaacgaaaaggaggaaagggcggggggggccacaccgagcccagcacgggaggccaaggaagcagacaccgaggcaggaggagaccaccagccaacaggcgaaacccgccacaaaaaacaaaaaagcgggcggggggaagccgaacccagcaccgggaggcgaggcaggagaagcgaacccaggaggcggagagcagaagccaagacagcacgcacccagccgggccaaaaaaagaaagaaaaaagacaaagaaaaaaaaaaggggggaagaccggaggagggagagagggaggcgggcccagggcacagagccaggaagagagaacagcaagacaaaggccgaggcgccgggacgaggccaggagcagggaggaggccaggggcggaaggaagagccagaaaggcagagggggggacaccacacgggaagggacacgccaggaccgcgacgggggacagggagccagaggagggggagcagaggagagaggaccgacccgggagcaagacaagaggaagggggaggagcggaagccaggcaacaaccaagcacacacaccagccagggcggggcgcggaccggagggggaggaccggagcaggcgggagggaggggggggcagaggcagagaaagagaagagcaagaggacaccagggggccgagccccggaaggagagagggccaccagaggcaaagacgagcaggagaggaggaccgcggaggaggcgggcaccgggagccgagagccgaggcaagagcgagcggaacaagacgagcaaggcaggaaagaggagaggcagcggagaagaagagaccagcgcgaaggggagaaaacagcacgcgcaagggcggagccggggaggacgagagcagggcaggagcaaaggcaggaaagcagcccgacccacacccagccaccaacccagaggcgaagccacagcaaacagggagggaggcagagaggaaggacggccaaggcacaagccgaaaacagcgcagccaggaccaaggcgaacagagcgcggccacccgcgcccccccgcccccagcaccaggcccggacgaacgacagacgaggggccccaggggaagggagacaaccggagggaaagccccaggcagacaggaccgagccgccccacagggggcaaaagaaggggggccaggaggcagcacagccagggaagggaagcacggagccagaccaccgggccaaggccacccacagggggaccggagaggaccagaggcccagcgcgcggaaagggaaaacaggagggaggacgaagagggccagcaaaggcagaacaggaccagaaaccaaaggcgcccagccacccaccaaacgggcccccagggccggggccaccgccagcgggccacacgcccgccaaggcacacgccggcgcggagcagggggccacccaaccccgcaccacacccgaccccaaaggggaaccaacaccaggggaggacaacagcacaggccgcagaggacacggagaacggacaggcccaagggggccagggcacaaagcagacagcggaaacccagagccccgcagggaacgcaccagcacaaaaaggaacaaggcggaagcaacaagcaaacacgcaggcagggagaccaaaaagaacgcccgggaaaccagagaaacacaacaaacgggacagcaagcagacagggcccccggcgggccagggaggggagggaaagggaaagggaaccgagaaaggaagggggggacaggaacacagacaaacccgaagaccggcagagcagcacaacccacaaaaaaaaaagagacaaagccacggcgcccaggcggagggagggcacaaacagccacgcagccgacccccaggcaggcgacgcccacccagccccgagagcggaaacacagacgacacaccagcccagcaacacgagagaggggccacaggcccagggggccaaacccgggccaaggacccggccgcccccaaagcgggaacaggcggagccaccggcccggcccccaaaaaaaagcaacaaaaaaggcggcacacaaaagcaccgacgcaggcaccaaggcccccagccccccgaggccagcagagacccagagcaaggggggaccccacccggccacaaaggccgccacaaaggcagagagcggcacgagaaagagccccagacccaggccaaaccgaccggccgcccgccgcggcgccccgaggggcaaagcccagcccacgaaaggggcaaagggcgccccgcggagggggccaggacaggagacagagaaagaggggcagggccgggaaggaggccacagaaacaaaacagaacaaagcaaaaacccccaaaggaaaaaaaaacccaaaaccaaaaaaggcgaagcagcgggagagggggggggacgagcgcagcggccggcgccagaggccgggcacaggccgcccgggccacgccgcaccccggcccagcgcagaaagcaaggagaaccagcacccagcccacaggcgggagggcgagagcaccaggagacagagcaggcggggccgggcagcggcgaacgaggggggaaggggaggagcgcaccacccgggggaaccagagagcccagcccgaagcgccggcccaggccagggcccagcagggaagggggggcagccagcgccagcccgcagagcagccgcaggggcgggccaccaaggcccggggccgccgggccccacggcccgggcgggacagagcccccccccggggccaggaggcccagaaaccaccgagcagcaaggccggccacccacggggggaggaaggggcggggcccagggacagagagccgggcagacggcccgaggcagcacagcagggcgacggggcaagcacccggggccagagcggcccggcccggcccacacaagcaggcagagggagagggccaggggcgcggggcaaggcagcacgaccaggcgcgccccaccccaaaacacagccaggagagagcgcacggggggggccgggaagaggggcagggcggccagagggccggagggggggcgacgggcggacgggaggagggacgggcggcaggaagaagaaggaagggaggagcggcacaggggggggcacgggggcaagcagggaggagaggcacgggccggggggagccgggcagggggcagcggaggcgagggccagcacagcgagcagaccgggcgcggggggaagacaaaaaaggaaggaaacagaggggaggaggggggaggggagggaccgaggggagcagaggggaggggggagacagcgcgggaagagcgcaagaaccccccccaaaagagaggagcgccggcccaggcggagcacaggggcgaccggccacgcaacccgcacccggccaagcaacccgcccagcccccgggaagcgggaacacacgcgcaacaccacgccccgaaagaagagagacggggcaccagggccaggcggcgaacccgaaccagggaccacccgccgggcccccaaaggcgggaacaggggagccaccggcccagccaagaaaccccgcaacagagcgcccgcacgaaaagcagaacaggggggcagcggggaggaaaagacagaaaggccaaggagccagaaagggcagaggggagcgggaaccaaggacccgaccagcagaacagggcagcgcaaaacccaagccagcgagccagcccggcacccaaccgccccaccagcagcaccaagaaggcgaccgagcaccaggccaccccaaagcaaacaggaagggagcaaaaacaaagcaacaaaaaccagggccgcagacaaggcaaacacacacacacaccaaacacgagcaccacagccccaggcacagcgggcggggagcagccaagaacaagacggacaaaaaccgcggggcgcgggggaacaagcagacgacaaaaaaggaacagccgggagagggaaggggaaggcgagaaaaaaaaagcaggaacagagaccagaacgccaggggggcagaaaaagacggcagggggcccaagggaagcaggcgggggaagaccgaaggagggagggccaagccacaggaccagcggaaaagcaaagcaacccccaggcagaggccacggcaagcgcaaagggccggcgacagcacacacggccagcaaggaacagagaaggggccaggggaagagcaaaaacaagaaaaagcaaagggcgggaaccaccacacagaaaaacgaaacaagagaaagaaagccacagcgcgaaggggggggcaggggagaggacaaggaccggggcggggacagcacgaaacaaagcaaccggacaaggcaacgccaaaaagcgcagcgcaccaaacccccagccgcagcgaaacacccggcgacaccgaccccagcccgacccgagccaggcacgagaggcgccggcgccacacccccagccccgggccgagggggcgaggaaagagaggcaaaccccccaaggacagacgacaccccagaccccacaggccgccagccaggcccccagcggccccggaagacagcgcgccccccccgcagagcggaaggaggcgccgcggcacaagccccaagcaccccagagaaagcaggaaggccgccacgaaaacccacacaggccacgcggagccggccagcaacccagccgaccaccccaccggacaaaaccgcccccgccccgggacccaaggagagcacggcccaaaaacgacgcaaaaaaaaaacagaacggagaaggggggccacagcggccccaccgaaggccgaggccggagaagcccgggacggggccaaacccccccccagaagccccagaaaaccgccgcgagcagggcccagcaggacaggcagggacaccagccaagcccaggccccgcggacagacccacccgccccggcaggccgggagacgacggaggcaggcaaaccgggcaaaccagccgacacgacagcccacacacacacacccaggagacgcccgaggcggcccggcgggcagggggaaaacgagaacgaggcagacacagcgcgccccaagaacaacagaggcagagagggcacaaaacacaaacgaaaagggcaagaagaaaaaagacaggcggagggagaacagcagggcgcccggagacagcagggagaacccggcggaggggcaaagcaaagaccccagcagagaagagccggaccaggaagccagcccaagagggaggggccaggagggcccgcagcaggaagaaggaggcgcgcccagccagccacgcgcaggggcagagaggagagccccgaaagccacccggggaccacgccccaaccagccgggccgcgggaaggaaaggcacaagcaaagggcgcagcgaagcaaaggcccgcaggggagagccggcgccgggcagagagagccagggaagaggcaggcagggaggggacgggggaagcggagaggggggggcagaccacagagggcccgaaggccagcgaggaggaagggagaagccaggagggcagagcggcaacccgggggagggaagccggggaggagggaagaccaggggcacaggccggagaccgagagaggagagaagcaaggccaccagcaaaccacgggaaggggaaaaaacacaaccccccagagaaggaccaacagcacaggaaccgggcacccaggaagcgggccagccaggacggaacccaggcccgccccaggagacgcaacaggcaggggcggacggcagagacccagcgagccacccccggccaaacaggcccagcagcaggggcggaccgaaggcagcgggggcgacaacggcgaaggagccgggcgaaacaacccaaaaacaaaggacagcgggaaaaaaagaaaagaaaaaagcaagaagaaaaagaacgagagagaaagagggaggaaggagggaaggaaggaaggaaggaaggagggagggagggagggaggggagggagggaggaaggaaggaaggaaggacaaacaacacagacaccagagcaaaaaggacccagcagcaccgacaaacaaaagccccaaacaaggaaaccaagaaggggcccgagcgcagaaaaagagacaaccggcgagacgaaggaaaaagcagaacgcgacgagaaacaacagccaagagaaaagccagaaaaagagagaaaaacaggaaagaagcacaaaggggggggggcgggggggggggcggggcggggggggggccggggggcgggcggggggccgggcggggggcggggcaaggagagaggaggaaggaccagcggagagccaggccgaccgcgggaaaaaggcaagcagagagggaggaaggagaagccgccggcacggaaaggaaaacgggccggggccaggcggccgccggcaacaagcaaagaaaaacagagaccgaaaggcccgagaaacaggcggcgccgaaagcccccaaacccaggaccagcaagggccgaggccaggggcggggggagcgcaggcagccgacccccaccagagagcccacaaggggacaagaaaggcaggaaaaggggccgcgaaacgaaagaaaaacgacgaaaacccacaccgagaggagacaggaacccagaaaggagaaaaaaaggacgccagcacaggcgaccgggcagcagcggcgcggccggaagaaaccccgaaccggccccccagggagaaaaaccaccgaagggaagacacagaacaaaagggaagagacccgagccagcaaggacagaacgacgggcagaaacggcacaggaaacagggcccgccaccagcggggccaggaaggcaaaaggcccccccacaccaagcagaacaggcaaccaggagaagcagccacacaaaacccaggacccgggacacagcaacgcaaggggcagggaaaccaaccaaagacacaaaggaagggcccgacacagaaaacccagagaggcaggcggccgacaggcagcacagccgaggaacacagacccgaccccggcagcaaaagccccgcacaagaaaccagaggcaccagagcgagggggaccagggggcaccaggggcaggccccaggggggaggagacagagccaccacgcccaggcggagggcaaggggacggccacgcaacccgccccggccaagcaacccgcccagcccccgagaggagagacaggcgcccgccaccacgccggcaaggaggagagacggggccagggcgaggcggcgaacccgacccaaggacgcccgccagcccccaaaggcgggaacaggcagagccgccgcaccggcaccccaggcagccaccgaacagggccgcccaggggccaaagcagcagaccaccaccccagccagccacaacaggcggaagaggggacaagggcagagcagggccaccaggcccagaaagcccgggggccccacgggaaaaggccaacaggcagcggacacgggccaccggcgcaaggcagcaggggaggaggcggcggccagccacccaaaaagcagggcgcaacaaggaagaaaaggagcgagggcagggcaggcacgagcaggcgccccagagcaagaaggaacaaggcgaaagacacccaaaaccggcccggcacaccacccaggggggcccaccgagacgacccccagcaggagggggcccccgaaggcaggcgagccccccaaaaaaaaggccccaccagggaggagaggaaaagagcggggggcaggacaagcgcccacccacaccggaacccgccaccccagcagccacgcgacaccaccacagcgggacagcaccagccacaagaagcgccgagaaaccacccccaaccgaccgaaagggagggcgcaggggggaccggcggacccaaaaaccgcagcggagcgcgcggcgggcggccgccgcccacgggccccgcccccgggaccaagggccacgggcaggcgcgaaggggggcacaggcacaacagccacgggaaacagcaagagacccgagagcagccaccgcacccaggcggaggcagggcggaccaaccacgcaacccgccccgggcaagcaacccgcccagcccccgagagcgggaacagggggccacagccagcaaagccccccccccccccccccccccccccccccccccgagaggagcgccgcacccaggcggaggcaaggcgcggaccgccacgcagcccgccccgggcaagcgacccgcccagccccgagagcgggaacaggggcacaccacacccagcaagaagagagaggggcccacgggccaggcggccgaacccgacccgacgccgcccagcccccaaaggcgggaacagaggagccacgcgccccgcccaagaaagagagcggggcacagggccaggcggacaaacccgacggacccgcgcccagcccccaaaggcgggaacaggcagagccaccacgcccagccacacaagagacaaagcggccaaaagacacacgcaccaccagcaggcaaaagcaagcccaggccgaacgaagcaaggcgggcaaaacacccacccggggaggaaccacagcacagggcgacgcccacacacggcgagccccgacccgacgggccaaagggccccccccccaaacacgggggcccaagcgccagccagcccccgccaggggccgggccacccaaccaccagcagcaccacgggcacaaagacccccaaaccaaggggcccccgagccaggccaacgggcaggccaccgaacaccacagaaccccagaccccgcgacccagcaccccagcccagccccacccaaaccccccccacccaggcacacaacccccccagcagcgcccaacgggaaccggagcagcaagcccaccgcccaggccgcagcacagcgagcgacagaccacggcgagacccggcgccaaggacagggcaagcccacccaaacgaaaccgaaacacccgccccccccccccacccccgaggaggggggcacgaacaaggcgaccaaggcacagccccagggacaggggcccagaagcgcaggacccccaaaccaaggcgcaaccccaggaaaaaccaagaacccagcccagagaccgggcaaaccccggcgaagcggcaggccaagaccaacacacacaaaaggaaagagcgccacccaaagccagcagcccgggcgcggagaaacagagaggcccgggaacaggcccaacggcaagagagaaaaaaaaaacaacagcaggaggacgaacagaagaagacaaaaaggcaaggcgaggggagacagagaagggcacacaggagggaacagggcagccccgcaagaagggagcaagaagaagggggggcaaggcaaaggcacggggagaaaggggcggggccgccggcaagagggagaggggaagaggcacaa

SEQ ID NO: 295 - RNA, 6309 nt, Homo sapiens
gaccacgagcccaggaaagaggccagccaggcaacacaagagacccaccaaaaaaaaaaaaaacaaacaaaaaaaaaaaaaagaggcaaaagaccagacgggagacgagaggcagggagaggaggaagcaccaaggagaccccaaaccgggaggccgcgagggcgccacccagcgagaaacacacgagaaggggcggaggaggaagaggcaaacaccaaaaagaggagggccgcaggagccagaagaggggccaggggcggaagaaagcgaagccggagagacacgggcagagagaggaggaagacagagcccgaggaaccccagcacaaaggaggcaggaagcaggagggcgaagaagacggaaagaaacaccagagaggaggagaaaaagggacggcaggagccccaggagccaggagaagaagcaaagagcaaacgcagaaccaggccaagaggcaggagcgaaaagcccaggaagagcggcaaagcgggacgggaaacggggagcagagggagggggcgaggcggggaggaggaagggaggaggcaaccccacacaaagcggcggaagaggagagacaccgggacaccggggcaaggaggaggaaaggagagcagcaagagcgacggcccccccccagcacggggagaggcgggccaggggggggagaagaaagccccgccaggcgccagcagggccacacggccccccccagcgggcacacccagcggcagaacgccaccaacccccaaccaaaaggcgggaacaggcaggagccaccaggcccagccggcccacaaaagcagaggaaagagcaaagaggagaggaggaagcagcggaccgcgaggaccaagaaacgagaaggaaaaggggggagaagggccaaacagcggcagagagaagcaaaaggggaagcccgacaggacaaggagcgcaaagcggcagagaaggagcccaagaaaggacaggagaaaaggaagaaagaaaaagaaggacagacaggacagaagaccaggaaaaagggaggagaacgcaccccagagcagcacaacaaaggaacaaccaacgccacaacagagaaggaaaagaaaacaggagaacacaaggaaacaccagccaaaaaaagaggaaaccacaacagcaacacgaggaacggaggccaagaaggaaaaagagaaagacaaaacgcagccaccaagcggagcaaaaaagagaaccacaagacacacagagaggggcaccagaggccaggaaagggagagggggagaaggaagaaaagggaaaaaaaagagaggagccgccgcgcccagacggaggcagggcacgacgggccacgcaaccccaccccggacagcagcccgccagcccccgagagcagagcggaacaggcggcgccaccaggccagcaagaagagagagaggcaccagcggcaagcggcggaacccgacccagggaccaccgcccggcccccaaaggcgggaacaggcagagccaccgcaccggccaaagaaaccacgaacgacaaaaaaggaaagagggcgggcacagggccagcccgaacccagcacggaaggcgagggggcagacacgaggaggagcgagaccagccggccaacaagcaaaaccccgccacaaaaaacaaaaaagcgaggcgggggcaacaccgaacccagcacaacaccgggaggcgagacaggagaagccgaacccgggagacagagggaagaagcgagacgcaacagcaccaggcgggcaacagagcgagacccaccaaaaaaaaaagaaggaaagaggaaaaaaagcagaagagaaaacacaagaaaaagagcagcagaaagacagcgacagcaaacagacaaaggaccacaagaagcaaaaaacggacgaggagggggaacgggcgaaggggagcgagaagaggagccgcaccccacgaaagggaggagaagccaaaaacaaaaaacggagaaacgagacaaaagaagaacaacagggccgaacaacaagacaagcacgaacgcgcggcaagaagcaaacgcgggccggagggggacgccgacagggccccaaccaacgaggggggcaagagacaaccaaacagacaaaaaaagaaaaaaaagcaccacaaacagcgcaaccccaaacaaacagagacaacaacaagagcgaaggaaaaaaaggagggaaagaaggaaggaggaggacaacaagacggcccaacagggagagagcaagagggcgagggggcccggaaccaacccccgcgacgagggacagcggcccaccccccacggggaccgacagccggggaagggacagccggcgggcaaggaagaggaccaggccggaacaccggcccaccacaagcgaccgaggggccaaggcggaagggaaggaaagaggaaaggggagaaaggcaaggcaaaagcccacacggcgccccccccgggaaaaaacagcaccgaaacaggaagagcaggcgaagaacaggagaaacgacacgagacagagccgcgacccaggcggaggcaaggcacaacggccacgcaacccgccccgggaagcaacccacacagccccccagagcgggagcacaggcacccgccaccagcccagcaagacagagagacagggaccaggccaggcggcgaacccgacccagggaccacccgcccggcccccaaaggcgggaacaggcagagccaccgcccagacacgaacaaccagaaacagcgagcacaccccaccaggaacacagaagaaaacaaaaagaggaaaacaaaacgaaacccacaaaaaaacacacacaaaaaacccaaagggaccaggaaggagaccccagagaggacagccaacgagcccaaaacccaaagaacaaagaccggagacgaggaagcggaacacgcccgcgggccaaaggcagcacgaagccgggagccaggagaggaagcaagaccaccccagaacccaaggccacagagggagcccccccgcgaggcaaaagggggacgcagaaggaagaaaggcccaggcagcccgcggccccccgagacgagcgccgccgcacccagacggaggcagggcggacggccacgcacccgccccgggcaagcgacccgccagaccagagaggggaacaggcacggcagaccacacccagcaaaaagagagaggggcgcacggccaggcggccaaacccgaccccagggaccacccgccagcccccaaaggcggaaaggcggagccacgcacccggcccacggcgggacaaaaggaagccagaccaaccagcccaaacaagcgcccagaccagaggcaacgagaaaaggagaacggcagggaccagcccaggagcggcgaggagacaaagcaccagagaaaaaaaaaaaaaagacgcgaaaccagagaaagcaaccccacgggcagaccccaagagaaggaagcaggaacacacagccagccaagggagaacaacagaagcaggcggagagaaaggagggccgccgggaaagacccgcccaccagaggggcggggcggcagaggccgggaggagcgcgggcaggcggcccggaagacaccaaaccgggcagagccagacagaacaggacaaggacacggggccagagcagggccagagaggaaaagacccagccaaaaaaaaacaggagaagaaaaacaaagcaagaaaccaggcacaacaaaaccagagcaacccagacagccaacccagccggacacgagcagccaaagacaacagggaaaaaaagggggcggcgaggagaaaacacagcccaccggcaaagagaagagagaaaacgaaaaggcaccaaagacagacaaacaaaaaaaacaaacgaggaaagaaaacccccaaagagaaaaagaacccccaagaccacaccagacaaacaacagccaccgcacgccccccccgccaaccaaaacaacccaaaccaggaaggccaccaaggaacacagcggggacggggacagaagcagggggggaaaggagggagcggcaggcgacagggccgcacaaaccacggcaggaagaggggggggagaacagaggccaggcacgcccccgcggccgaaggccaccgacccgggccccaaggggccggccaggccaccagccacaggccggacccgccacgccaagcaggacaaaagccagcccccgcagcccacaccaaagaagcaaacagccccggaggagaaaagggcaaaccgaacccagaacaaccagcagcaagcaaaagaaaaggagaacacaccaacggaaggccccccaccacccaaagaacacaccaggggggaggggggagggaacaggcagaaaaccaccgggaggcgggggcgccgggaaagacagaaaggccagaggcgggcgcacacccgcagccacccgagaacgaagcgaaaccaacgggaaagagcgacagaaaagaggagagaaaagaagccccaaagccccaccagaaaacgacaacacgcaaaacgaagcagccagagaaaaagagaaccccaagggagcgaaaagacaaaacacgagaaaaagaacaaaaaaaagaaagcaagggaaacagaaccaagccccaacccagccaccgaaaccccgggggacacacccggagccaaacaagaaacaagaacagcaaacacggggagcccacggggcgacgcggcaaagcggagggaagagcgggggaggccacgcacagccgcccacagggcagggaagaacagaccaccccagggagaagccgccgagacaagaccaccgcccgagcaggacccccagcagaaccgggcggagcagcgacccagagaggggccaaggcccaggcggccccacgagccaagcgacccccacccggcccccaaaggcgggaacacgggagccaccaccacacccagccaacagagaaaagccggccccggacagaggcgagacaccgcaaaaacaaaacaaccccaaaacgaccacacggagcaccaacagacgaacaccccaccaaaaaaacagacaggaaggggcaacacaagggccacagacagggaaggccaggccaaacagcaggggggcgggccccggcgcgcccaccccagcccacagcaagacaggccggagaagaggaccccagacagcggcaaaaaaggcaagccccaggaaaaacaaacaaaaaacccacaggggcaagggccgaaagcaacaccgcgagacggaaagacagccccaaagaaggaggcggcaggcgcgggggaaaagccccaaaacccagaacagcgggagcccacaggagggaacgaagccccgccgcggcaaccaagcacgcagagggcaaaggaagagggggggcgcgcagagaggcggcggggcggcaggcgacgcggagagaacagaacccgaagcccgaagagaaaagggaaaccaagagacaccaccgcaggaaggagacaaagaccaaaccccaaggcagggaaaaagcagccccggggacaggcccacgaccccccacgcagagaacaaaggagggcggcaggccagaagacccagcgggcccaagagaggcacaggccgaagacgccaaaagaggggggcaaacacccaagccagcgcaaaaaaaagagcccgcaagccaggaaccgccacccaaacgaaaaccacccaccaacgcgagaggagcccggcccaggcggaggcagggcacgaccagccccacacccccaccccggacaaacaacccgcccagccccccagagcgggaacaggcagaccaccagcggcaacgaagagacaggggcaccagggcaggcggccgaacccgacccagggacccccgcccagcccccaaagacgggaaaggcagagccaccggcccggcccccagcagaaaaaaaagaggggccaagcgccagggggacaccaacagaaaaagacggggccaacgcgcacagcaagaacaaagaagaaacaaagaagaaccaagcagcacagggcaagcggaggcccagagagcaaggagagaaggagccgagagccaagcaaacggcagaagggagaagacacacccacaggccacaccagcacgccaaccagccccccacccaagccgggaaacagaacaaacccaagaacagaggaaaagaagggggggagcaaacacagaggaagcaacgcaagaaagcggacagcaaccgacaaaaaaagagaacacccaaagagacacggagccaacgcaagaggggccggagcacaagcagggcagcaagacgaaccgaagaacaaaccagggaaga

SEQ ID NO: 296 - RNA, 1473 nt, Homo sapiens
gaaaacaacgaagaacagcgaagaacaacgcgggaacaaaaaacgccaacacaaaggcacagacaacaaacaacccaggaccacaggaacagaaaaaaaaggaaggagggggggaaacgacacaacaaaaggaagaggaccaaaggacgagggccgcaacacgagagaaaaaaccaccaggaggcagcggggcagacacgcgcaggaaccacagccacagcagccacaacagggagaggaggggagggcgaggccgcccaagacccacgggagaaaggagaaacccaggaagcggacgcagagcagcacacggcaaacgccaccaaccaagaaaaagcagaagaacagcgcaggacacagaaggccaagcacgaacccagggaaacaagggaaaaggccccgaagaaagcaagggccagcgggcaaacacaagccgcaccgaggaaagcagacaccaagcacaggaaggcccagcaagagaaacaggagccgccccaagaaaaaacccgcaacgcagagcccaagcaaaccccagagagaacaacaagaggacccgaggaggaaaacaacaaaccagcaaagaagaaccaaacagaaagcggcacaaagagcccggacaaaccgccaaagccaaaaagcgccaggacacaaaggcaagccggcgagcccaagaaggacagagcaagagggcaggacaaaagcagaacacacgaaccacaagaacaacagcaccaagaggacaaggcgagggcgaaggccccaaagcaaaggaagccaaccccagcacccagaagggggccaagaaaagagcggcagacaaaggaagagagggcacacggagagggggaccccaaaccaaagagcggcgcaaaaaagggaaaggagacagacagcagggagaagccagggagagaaggcagagacggggggagcagaagcaaggaacaccaaaggcgccaacaagcccccggagcggggaggaggcgggaacagaccccaacagccccagagggaaccaacccgacaggacccagccccagaacggagaaaaaacaccggcaaaccaccaggggcagcccgggaaaaaggagcccaaaagcagaccggggaggaaacaacccccaaaaaacagcaacacgaagcaaaaaagacaagcacaaaggagaaccaaaccacaacccccaggggaaagacgaccccccgagacagaaaccaaggcgcacagagaaaaaaaacccacccggggccccagcaagaagcacgaggcgaggagccacagaaagcaaggcccacgacgccaggcccggaaagacaaaagccgggaaagcagcgggaaagaggaaacgaaagacaaagacagaggggaaaggaagggaaggggcaggagagacgggggaagaggcgggacaggaaaagaaacacggggacacaccaaaagacaggaaaacccgcccgagagcgcaggaaaaaggc

SEQ ID NO: 297 - RNA, 7521 nt, Homo sapiens
agaaaggaagagcaaaaggaaaacagccgcagggagaggaccgccccccgagaagagcaacaagcccaaaggacgaacaaggagaaggagcccgcaggcacggcaccaagaaaacgaaggaaggggcaggggaaaggggaacacacggcgacgggacaaacaccgccaacccccaacccccagccgagaaaagaccccccagcccaggccaccggagaagccagacagaaggaagggccggaggcacggcagcaaacccgcgaacagaccccaaaaaaccaacagagcacacacaagaaagagccgcagggaagagagaaagggggaaacagggcgaacagcaaacaagagcagccaacagggcagcggagaaccccagcacgcaggagccgggaggcaacgcaaaacaggaaccaggcacaacacagaccaaggggcggagcccacggagaccagccaaagaagccacaagggcacgccgaacccaggcagagcagaggaaggacaggcacgaaaagcgacaggcggggccagccgccggagaccaacaagaaagaaagcgagaagagagcaaggggaacgcggagaccgagaggaggcaacagaaaaagccggggcaggggaaggggcaggagaggcaccagagcccacacagcccagcagcaagacaacccgaggaaggagccgcacaccccagaccaccgagaaggcgcgcgcacagccaaacagcagacagacacacaccgaggaagggggcagcagaacccagcagacaccgccggagaagaagcagagagaccgcgcccaaccagccaggagaaaaccggcccgcaagcagggagaaacggagaaagcaggaacaggaggcaccacaaaacgcagcaacccaggagagggcacacccaggcccacaaaaagaggacgcgggagaagcagggagcaagaggaagaaggcagggccgaggggcagaaaggaggccaggaaaggaaggcacgcaggaggaagggggcaggagaagcgagcaacccaggcgggacaccgcgggcggccccagaacacacggaaagacaagaaaagaaagggaagcgaacacaacgaaagaagaaagccacgagaccagaaacaccacaggaagagggaaaaggaaggaggcaaacacccccagcagcacaaagaagcgagcagccacaggcagcacacggccaaagcccggggacccagacagcaacacgggacccgggcaacacgagccggaacccagcccaaaacagcgaacaagccaggagcaaaacgaccaagggacaggaaagggaggggaaaaagcgaccaaaaggagaacgagaagaacgaggaaagagcccaacgagccgaaagggcggcgaaaggcgcagcagggaagacgggggggccagagacccaagagacagaagaaagagcgggaccgcagaaaagagacagagcacacagccaccccagggccaaaacaaaggacagccgagcaaggggaaacacaacagccacagcacacaaaggacaaaaaggacaaacggccccagagaacaagcagccccagccaccagccccaaaagcgggacggcaaacacggcaaacacacgccagccacacagcacagcggccacaacagcggggcccgcccagccgagagcacacagcggcgccgcaggccaggggcggccggagggaacacggagcaaaaacaaacggagaggggggacagccaaaagaaaagagccgacaacgaagggcccacaccagagcccgagggcggcacgcggagagcaccgcacccccaagcgccgcgagggagaggaaggagaggcgagagggaggggggaggagaaaagaagaagaaaagagagccgcccgcccccgacccaccacgagacacagaaaacgcagaggcaagccaggaacgggagaggcgacacccgggcgcaaacaaagaccacagacggcaaacaacagaacacccacggcggaggcggaagggagggagggccggcggggggccgaggccccggcggaaaggccaccaccccagcccagagggcccccggggcagcccacccccagaagaacaccagcaaggaagggcccaccggacccagacaacacccaaagaccccacacggccaggcacagggcccacaccaaaccagcaggggacacgaaggacaccgaggcaggagcgagaccagacgaccaacagagaaaccagccacaaaaaacaaaaaagcccggcgggggagaccgaacccagcacgggaggcgaggaggagaacacgaacgcgaacccgggaggcagagggcagaagcgagacacgccacgcacccagccggaaacagagcgaggccgacaaaaaaagaaaaaaaaaaaagaccacaccaaaaaggcacacgaggccgggggagaacaaccacaacaaaagcagagcaggaagagagaaacaaaggcagagcccggcagaagcggcacggccaggcaggagagagaaaaaggggagagacaaccaacggagaagagaaagaagcccgggaggaggaaaggggaggacaacagaagaagaagaacacaaaacgcccccgaaccagaggaccaacaaacccaggcaaccaagccagaagccgagccagagcgacagccacccaccaccccacggagcgcagagacaagggaacaacgggccacgccagcccacagaggcccaccagccccagagcagaaccaccggcagagagggaggcaccccagagaaaccaggccccccacggagccccccaaaggggccacagcagcccacagcacaaagcagaacgaaacccccacaggcagcaccaggcagcggcggacagcgcaccgccacaggccacaccagcgcaggcgggacggggggcagccgggaaggcacccgccaaagagaggaaagcccacaccccacgccacccccaaaacaccccgggcccgaaacgaccccaagaaggaagccaaaagaggaacagagagggaacagccccgagcccacaggcacccacgcacgcagaaacagcacgcaccaaagagcggcggaggacaacaaccaaagagcccagagggggggacaaacaaggcagagccccgcaacaagcagaggcagcagggggcaggcccagcgacagcacgacccgcagcggcacaaacgaaccagccaggcccaggcccccagaaccccagccagccacccgaagcaacaacacacaacacaaagcacacagcgagccccccggagaccaacagccgcacaccccccagccaaacaaagcaaggcacagcgaccagaacccaacagaacgcacccaaaagcacggcggacccgccccggagggaaggggaggcagccagccgagaaggcgccccaccaccgcagaccccaaggcaccaccagaaaacacacggcgcgcccccacccaaaaaaagggagcgagaaaaacccccaccaggacaagccaaaaaacaagggccgggacagagcacccccccccaggccagcccccacgccaggcaggggaagcagaggcgaaggaggagggcccacgcgcccaggacgggaaagcccagcaccacgggggggcccagagcccaggacaggggccccccggaaagaccccccccagcacaaacagagccagaggagcaggcacagcagcccccaagccgcagggagccaagaggcaccggccccaggaaggccggaaggccccccgccccggcaggaagcagaggacaaaagcaaaagcgccacggcacaaccgccaagagaggaagcagcaaagagaagacagacagaggaaggaggcggagaaaagagagagcacgggcaggggccccaggcagggccagggcacacaaagcccccaaaagcccaggcgggacgcaccccagaagcccaagccggaaaggcaggacggagcggccaccaccgaacagaccagccgagcccgccggccaagcaaagggaggagaggagggagaaaagaggaaagggagagacgggccggaagaagaaccccgccaagggaggagggcgcggaacacagaacaccgagcaggcagagggcccaacacaagccgcacccgaccaggaacagcaggcacaagcaaacgaaaaggaggcagaagaggagggcagcagcgagcgcagacggcacacaggacagaccggaaaacccagccagaagaaaaagccaaccgaccaccggaagccagcccccaccgaccccccacgacaggcaaaagacaaagggaccacaagaaaacacccccccaacgccccccacagcagcgccgccaggggagccccgagaacagcgccccccaaagcaaccccacaaaggagggagccgaggcaggcacagaccaggagcccggcccagcacagcccccagcgaaaccacaggaaggcccaggcagaaggcacccaaggaagcaaggcaagggccagcgagccccccaccaccaaaggggcaagggagggccagcggcacaaggggcagagcccagggacccaagcaaagaacagcaaagccacacggcccccggcaccaccccagaaacagaccaaccgagcagagaggaagcagacaccacgaacacgcaccacccccacccacagccgccagccaagaccagcagccgcccaagggacaaaaggacgacaccggaaaaggagcgaaaggagagcaagcagggcgccacgcacgcggggaaccaccaggaccgagacgggcccccacccccgcacagagaaaacgcacagaacagccccaccgccgcacgaccggcggacaccccgcagaacacagccacacccaaagccagaacacaccaccgagcaacggccaagcaaggcaggaaaccacgcgcaccaggccggaaggagagccccgcaggggccccccacccggcgcgcgggcaagagccaccacggaggcggcagggcagaggccaccccagccagcccaccacgcccgggggcccagcccccgcacaggcacaggcagcgagccaccgaccccgaagccccgggcaggcgaaagaagcgcaccccaaccggaagggagagaaacgggacaggcgaaggaagcgcacccacccagaaaggaaagaaaggggagacccacgagaccaagggaggccaggcgccaggccacgccgaacccagcacacggaggccgaggcaggcagacgcgagccaggagcgagaccagccgggcaacagggaaaccccgccacaaaaaacaaaaaacccaggcggggacagccagcccaacgggggccgaagcaagaagacccgagccagggaggcaggagaagacaggggacgcacagacacaacaagacagggacggcacgccgcaagggccgcagaaggcaaagcaccgcaccagaccagagccagcaggccagagccacaaccagccgaaagagcaccgggagccaaaacaacaacaacaaaaaaaccccaaaggacaaacgcggcaggcaccggcaccaggcccgaaaacaagcgcccagccagccagcccagagaagaacccaagaagcaagcccaaaccaaaacagaccacaaaagaaaagacaggaaaggcaaacaaacaacaaaaaacacagaaccacagaggccaaaacaaaagcaaggcaggggccagagaggggaaagggaaccccaaggagagaggaacacgggagaaagacccgacaaaaaacagagaccgccaaaaaacaggaaaccaggagccaccagaaaaaaagcacagaagcacacaggggcaaaaaacaaaaaaaaaaaagcgaaacaaccagaaggagagcaggacaagagaacaagcagcaaccaaaacaaagggaaacacaccaaagccaaggaagaacacaggacacgaagaaaaaagaggagcgaacaacagcagcccaagaaaaaggggagggcgacaaaaagagacaccggaggcacaaacggacagggcacccgcagaggggaggggagaaccccacacgagcaaaagccacaaacaagaagcaacacagcagaaaaaacacacaggccggcgggggccacgccgaaccagcacgggaggccgagggggggacaccgaggcaggagcgaaaccagccgaccaaaggaaaaacccgcacaaaaaacaaaaaagcccagcgcagggcagcaccgaacccagcaccgggaggcgaggcaggaaaacgcgaacagggaggcggagggcaggggccgagacagccacgcacccagccgggcaacagagcaagaccgccaaaaaaaaaaaaaaaaaaaaagagagaaaaaacacacaccaaaaaccaaagcaacacaaacaaaagcggccaacagacaacggcaagaaagacagcccgaggaagagcgcggacaccaccagaaggcggggccaagcgccagagccgaaggcgaacgaaagcacacccacgcagccccggggcaaccgaggacaggaggcgaccaggggggaggggagagacagggacaggcagagcccaacagggccaagaccaggggaacaaacccagcggaaaacaaaaacaccacagaccccgggggccaagcaaacagacggaaaaaaaaccacaacccccccccagcccagaaaaaaccagacccggagacacaaaaaccaaagccagaaagaccgaggcagcagaggaccccggacggagggaaccaaggccagagaaggaaggacaccaaggcacacagcaaagggggcagacacaagagagcggcccacgaaccaagggcgcaaagcacagcaccagacaggggcaggggggggaggggaagagcccaaccacaaaacggccggaggggccagaaaacagaggcccggcccgagaagagcagagagacaggagcacaaccagaaagcagacgaaaggggaagagagagagccacaacaaaggggcccacacacaaggaaaacaaaaaggagaacaaagcagggagcagagcacaagcccacgagaaaagggcgcaggccgcaggccccccagcaccaaccgcccgacggaaagcagccagacaaaggaacaaacgggcaggggccaaaaagcaacaaaaacaagcggggccagacgcccagggccaaccccaaaaccaaggaccgacaaccccaacaagagcgcgccccgcccggggaacgaagacaccaaccggcaaggaccagcacagccagggaccaccaaggaagggagaggcacaaaaaggcacgcaccaaaacaacaaccgaaccaaggaaaccacacaagaacgagggcgcaaccaccgcgcccgcgcaggacagcaaaaaaggaggggaggcgacagacccggggcgccagcaacaacgcgaccagcaaagggcgaaacacacggcacacccccgcagaagcccagacgccgaaacggagacaaaaaagaccaaggggagcgaggcaggagggaacggagacccg

SEQ ID NO: 298 - RNA, 1856 nt, Homo sapiens
aaagaaaaaaaggacggcaaaggggcgaaccaaccaagagcaaggccgagaagacacacccaacaacaaaagaccaaaccccgcacgccggaggacacaaaaaaaaaagagaggaaaaagaccagaaaacggcaaaaccaaccccacgcaaaagagcagaaaaaaaaaaggccaagagaaaaggaggaaaccaacagcaaacccaacacccaccaaggaaaacacgaagagaagggcagcaacaggaagacagagaacaaccagggacagacaaagagcccgcaccggaacaggaacaagagccagcagaagagccacacaacaagaaaacaaccacgccacagacaggcaaccaaaagaaaaaggaacaacacaaggggcgaagagcagaaaaaacagacaaagcggccagaaaaggaccccgaaaacaaaaaaaaacccacaaaaaacaggaagccaaacaaagggccaagcaaagcacaggcaagaaaaagcccaaaacccgaagaacaaacacccccaccccggccacgaccgaaggccacacaggaaaagaaaacaaaaggagggccacccggagaacaaacagcgaccagacggggagaacaaagaaagaccccacacggaaggccagccacagaagcggacccagagaggaaggaggcaggggaggaaagggaagaagaagcagggaccaaacgcaaaacgaggcaagagaaagccaccagggggggccggccgaacccagcacgaggaggcgaggcggggggcacgaggcaggaggagaccagccggcaacagggaaacccgccacaaaagacaaaaaagcgggggggggaggccgaacccagcaccaggagacgaggcaggagaagcgaacccaggaggcggagggcaggagccggacacgccacgcacccaaccgggcgacaagaggagacgccaaaaaaaaaaaggagaaagccaagagccgcccacacacaacccagcaaacgagaaaaacgggccgaacgaaggagaaaaaccagacaagaaggcagaaaaagcaaaggaaaaaaagaccccaagaaaaaaagcagaacacgaaaggaaaaacaaagacaaaagccccccggaaaagcgaacaacaggccaagagaggcccaaaagcaacccaaaaaaaaaacaacaacggggggggaaccacagccgggacacaacagaagagggaaacaaaaaaaacaccacgcaaaagcccaaagaacaaaagagcgcagcgagaggcaagaaaagacacagcccacccaagagggaaaaccaggagaaacagcagagaaccagcaccaagagcagaagagagcagaaccaaggagaaaaaccaacaaccagaaccagaaaacacaaaagaacggaagaaaccgccgcaagggacgaaggacccaaagccgcacaacaccggcacagaaaaaaaagggaaaaaacgaaaaaacggaaaagagcccaaagggagaaacacgaaccaaaaaaaagggcacagcagacaacaaagaaaaagaagcaaggagaagacaaaacacccaaacggaaaacaccagaaaaaagaaaaaggaagaaaaaaaaaaaaggcagagaagacaagagcaaaaggcaaaaggaaaaaaaaagagaaaacaggagaaagaacggcagaagagaacagagaggccaaaagaacagcggccacaaaaagcggacgggaagacacgcaggaaacaacaggaaaaaggaagagacaaaaaacaacaaaaccaccaaaaccgcgaaaaacgagcgaacacaaaaaacaaaaaaccacaaaagagcaaaaaacaaggaaaaaaaacaggaaaaaaaaaacc

SEQ ID NO: 299 - RNA, 7161 nt, Homo sapiens
ccaggccccggcggccgggcggggagcgggccacgggccgagcgcaccccgggcaggccggcccagcccaggcgggaacaccaggaaaaacccaggcacccggccacccacccggggcccaacagcgccccaccagccccaagcgaggaagaacaaagaggaaagagagaaacaccaccccaggggaaaccagaacagaggaaagaaagcgagcgaaaggacgcacgaaggaccccaaaaggacccccaaaaggaccaaaggagagcacaaagaccacgccaggaggaaaaagggccggcaaaacagagaaaaccccgggcagcaacacaaagcccgaaccacacgaagacaggaaccaagagccaagaaagcccgacacggcaaggaagacggcagcaagacagaaggacagacagcaccacagacccgaggcccagcagggaccgagcccccggcccaacacagacgaccaacagagccagacagagcgagaaaaaacaaagcgccccacacgacggccgaacccccaacccgcaaggggcaggcggaaacccaaagaagaggagaggggacgaggggcgaggcacgccaagcagaaaccaagcagggcggaaggaccaacacacgcgacaaggggccagaacgccaccccaaaaagcaacaaagcaagaaggagcaaaagaaacgaaggccaggcacagggccagccagaacccggaacgggaggcggggcagaggacgagcccaggaggagaccagccgggcaacaagggagacccccaagaaaaaagaaaaagaagcggggggggaagcgccgggcccagaaccaggaggcgagggggaggccacgaaccgggagcggaggcgcaggaaaaaaaaaaaaaagagagccaacacaagaagccgcccccaaaaaaccaaaaagaagcccaaaggaacgacacgacaaggaaaaggccgagaaagacgaccaggaggagagaccagacagcccaccccagagcaccagacaaaccgagacagggcgccgcccccaggcaggggcaaggcaccacaggccacgcagacgacccccaggccaaggacccgccagccccgagagcgggaccacagggaaaccaccagccagaaaaaaacgagagaggagccaccggcccaggcgggaacccgggcaagcaacccagccgacccccaaagagagcaacaggagagccacgagccggcccagagagaccaccgcacaacaggcaacacaccagacaggcccgcaccccccaaaacgccccagcacccccaagaagccaagcccaccccgggccaggagcgaagcccccacagcggccccccagcccgaggccccggaagccaccggggggcaggcaccccccgccccacgcccccaccccacccacacagcgggcgcaagcaaggacgaaccccgaagaccagagcacgcagcacaacacaaggaggcacagccaccaaaaccgcggaagcgggagcagcaccacccgccccaagcacacccgagggagaaaaaccaaaggacaaagaacccaaagcaaaaaacaaaagacagccccaaaccccccgccaccagccaaaacaacgaaacaccaaccaacaaacccacaaaacggcccgacaaaaagaaaagcaggaacacgccagaaagagaacagcaaaaacagaggaccagcagggggcaggacgcggccacccaacccgacaacacacccagaggagggaaaagagagcaaggcacccacccacccgggaccacgccagggggagaaacaagcaacggcccaacccgcaagacaccaaacaaaaccgcgcggaacagccagagacacacagaacgccaacacgcaaggcagcccggggaagggcgacggaaaacagaaaacacagcccagacgaaacaaaacaacaaaaccacccgaagacagaacggagaggccaaaacaaaggaagaaacacaagaaaagaaaaacagcaaaaaaaagaaaacagaaacaaaaaagaacaccaaaacacaaaccacaagaggagccaaacaggagaccaacaacacaaaagagacaaccgagcaaacgaaaagcaaaaagggacaagagaagagaaaaaaaagagcagaaagacaaagcccaaccccccccagcccaaaacgcaggcgggcacgacaacagagccaaaggaaaaaaacaaaacaacgagaacagagaaccacggggcgaaaaggggagaaaagcgaagaccgacccaccacacagcacacagagccacgccgaaaacaccggcccgggccaggccccccaccagcccggcaaccaggagcccgcccaagcgccacggacgccgagcggaacacacggggcagcccagagaaaagcccagaaccccacagaacgcaaaacccacgccacggcgaaagccagcccaaacaacccggcgaggaaggaaagccaaccccaaaggagaaaagaaggagggggacgccaggggagggagaaaagaaaacccagaacgagaccgaggcgagacggcaggagaccggcgcaccgggccccgaacggacccacaagcccccgccacgagcgggacccccgccaggagggaccggcgcgcccccggggccgcgaggagaggcaagccccaaaaaaggaacagccaacgcccagcaagcgcaacaaaacagcaccgggcggggggagcaggcagggcgcggagcccggcacgagagcgcagagcgagccggagcagagagcggaaggggcccggggaccggaaaggcaaagaacagaaaacgagggggaaaaaaagagcacacgcagaggcgagggaggaggcagcccgcaacaaaacacaaggcgaaccgaacccggagggggggagaaccagcacggaaaaagcaaaaaaaagcaaaaccccaaaaaacccaaaccaaaaccacaacaccccccagggacaaggcaagcgggcccaccaaaaaaaggccgcaaaagaaacagcacgcagagacaggggggcagagcccagggagaggaggaaacgcggaaaaccaaccaaacccaggaaaaaaggaagaaagcgacacggaacaaggcaaacccacacaagcccgggaagcacagaggaccaaagaaaagccgcgccaccccgacagagcgcccaggccacgaaagacgagacacccacacaacacgagacacgccacgacggccggaagggcagaaaccaaaccacgggggcagaaagacgggaaaagagcagagagaaaaaggcccaaaggagagagaaaaagagcaaagggcacaacaacccggagacaaagaagccgcggggccaagccaacagcaacgcaaaaagaccagaaccagacaagaggacaaggagacagagaaacagagaaaccccacacccaccaaaagcaggcgccagaaagcccaaaaggcacagaaaacggagggcccaagcacaaaacacccgggggagaaccagacgcacagcggccgagaccgacacagcagagcacccggagcacgcacacgagaagacgcacccgccccggcggcacagaccgcggagggaggcgccgaggagaaggaccaacaaaaccagacaggacaggcagagcacccacaagaaaaaaagaagagaagcaaaagggaaacgcaaagcaaaaagaaaaaacagcaaggaaacaaggagcaggccaaaaaacccaaagaaaaggccagggcagggccagccgaacccaggcgggaggcgaggcaaggggaccagagccaggagcgacaccagccgggcaaaagggagaccgccacaaaaaacgaaaaacaaaaaagggggcaggggcgcacgccgagcccagcaccaggaggcgaggcaggaggaggagccgggaggcgagacgcaagagcggcgacgccacgcacccagccggagcagagcgagagcaccaaaaaaaagaaaggagaagagcaacaagccacggggagagcgagggacgggaccaggagccaacagcgggaagcaccagagcaaaaggaaggaaagacacgccaggaaaaccggacaaccgaccagaggcccggacgccaaagaacaccccccacgaaaggaccagaggagcagcacgcaacccaccccaccaagcgcagcaaaagcaccccacaaaaaaaaacaagacccaaccaacagaaaaagaggaagagcaaagacggcgccgaggagcagcaggcgagccagaggcccaagccccacgccacggagggccaaagacaaacaagagagaacaaagcaagcagcaagccgcaaagaacagggcaagccgagggaaaggacgaacagaacaacgcaacacagaacagcagaggaaaagcccaacagaaaagccagggcccgccgggagaagaaaacgcagaggacgaaagaaagcaagaaaagaacaacccaaaaaaagacagccaggaaaaaacggagaccaaaaagaggcaagcagcaaaaacaagaagacaaaaaaaaaaaaagaagaaagaacccaagggaaaaagcacgaagggaaaaaccaaacagaaagagaacaaggagagcagaaaggacaaaggaacaaagaacccagaagaacagaaaaaagaagccaaggggaacaaggagacagaccaaacaaaagaaaacaaacagagaccaacagaaaaacaagaaaaggaaaaaaggaagaaggagaaaaaaaaccagcagaacgaaaaaaaacacaaaaagccaaaagccccaaggcccgagacaacggccgcaacggaaagagccaaaaggcaaaagcaaaggcgaaaaaaagagcgagaaggcacggcaaaacacgaggcacacaaacacagacggagacaaacagccccagcagcaacccagaccaaacacacacgccaagaagcaaagacccacaagggcacacccacacccccaaagccgcgcaggccagcgagaaagaccaggcccaaagccgggccacaggccaagcacaccggcaacccgaaccccaggaaccagggcgcaacccgagccccaggaaccagggcaacggcccaccaaggaaagcagggccggggggcagccccaagaccagcgaagcccagaaggcagccagaagcaccgcgccggcggcagagggagaaccccaggcccggcggcccggggacggcacgggaccccaccccagggcagcgggccgaccccagggacaggcagggggaggaggaggcagggggaggaggaggcagggcagcgagcaagggccgcccccggaacgcccaaagacgcaagcaggacccaggaggcacggcacgcagaaaaggagcaacaaggacagccgaagaaacaacccgacaacccggggagccagccacgcgagaacggcacgacggaacaccggaaacgacaggcggccggaaagcccaaggccagacgcacccgaagacgagcccccgcagcgcgcagcccagccacgccacgccccacaaacagccccagccaccgaggggggagcgaggaaccacagacccgagaacccccgcgagacggggcgacccagaaagcaaaaggaacaccaacaacgaccaaagccaaggccacgggacagcacaacagaaaacccccagcggaagagcagaacgacacgacccaaggaaacccccggcaacgcagacagggcgacagcaagcagaaaacagacgcagaacgggggaccggcaggacgcaaggcggggggcacgacccccaaacaagcccagggaaagacaggacccccaggcacgaggacaaaaaaagagaaggagggaacaagccacaccacacaacacacaacaacacggagcccggccggcccgacaagaggagcgggagacgacgaaaaagcacccggacaggggaagggagggaacaacccacccagccaaaggcccaggcagacaccaaggagcgcgcgggaaagcacaaggagagggacaaacggacgagccacaggccacccagccagcaaaaggacgggcacgcccacaagccaccggagcagacgggcacgccccagcagcccgacccacggccacgaagaccagcccgcagccgcaaagcgcgcacgagcgggccccggccacgcaaaaagacacacacaaagcgaaagagacagcccgaccggaagccaagcagcaccacagcggaaggcagcccccccccccacggcaagcgcaggacccggaaaacaggaagggagacagggcacaaaacaagagaccacagagggccgagcgggaaaagagaaacaagaagcccaagcccgccccagcaaaacagaacaagacaaagcaaggcacaaaggccggggggcgcaccacgaggccggggcacgacaccaccgcaaagggaaggccagacaaggcagggaacggagggaggcgcagcgcagacagcaggcaaagcagaacacccgacgcccaggggaggcggcgaccccaccaggaaacaacaaggacgccggaaaggagcagcagcaaacaggaaagacaacacagcggaggaccgaggagaagagggaagacagaaaaaacacccagcaagagcagggaaaagccagagaggacagaaaagcacacgaagaaaaacgacaaaacaacccgccgccaaacagccccaagaaacgcgggccagcagcacagagaaccagggaaaaccaaaaacaagacaaccagagagagagcccgaaaagagacggggaacgggagacacacacacaccagcccacacccgcccgcacagacacgccagcccagcaaggcaagagaagaaagccgaaaaacacccgaccggaaccgaagaaagaaaaagaaaaaccaagggacaccaaagaaaccgaaccgaaaaggagcacaaagcccacgagccggcaaagggcgaggcacagacgaacggcacacaggggcaggacaagcaggggcaagagggacgcgaacgaaaggcgaagacaggcccgcggccaggggggcggccgccgccagagagaaacccgccacggggaggcgaccgaaccccgcacaccccagccccggcaagcggacagcgcggccaacaaacccagacaggacggccagagcacgccccaggaagga

SEQ ID NO: 300 - RNA, 2364 nt, Homo sapiens
aagcgagcgagagccccccccccacccccccaccccacccccaccaccacgaggaaagcaagaagacagccacgaagccagaaagagagccccaccagaaccccaccagcagcacccgacgggaccccagccccagaacggagaaaaaagcgcaaagccagcagcagcggcggaagcccaagaagacaaaacagcccgccggaaggaaaggcacggggcgaagaggaacagcccagaaccccacgcaacacgcagaaacacggaagagccaggcaagggaaaaaaggaaaaggcacccgcggagccaggcgcaccgcgaagcgcccgcggcggcgcagccccacagggcgaccacacacaaacaccccagggcaggcccagaaacagagccccaacgagacgccacgaagagacgcgagccagggagggagaacaaccgcaaagcaagacagaaacaaaaggggacggccccaaccggggcagacagagagggcgcaccagacagcaggggagggcaaagggacccggggaagagggggaaaggggagagcgagccccgaaacaccagcccccagaggcagcagcggagcccgcgagcggcgccccgcacggcaggacaaacccgcaaggcaacagaaaaccaccacaaaacaacgccaagggccaaggcaacacacaaagcccaggacaaggaacaggggcaggcaaggagggggccccggggagccaccaggcccaaaaagaagggagcacagagagacgggccccacacaaaaagcgcagagagaggaagagcaagaacacacgaaaggggcaagaaccaaaaggaaacacaacacccagaacgcaaaacggaaaaaacgccgagaagggccgcgaaggaggaaacaaagcaaaagcaagaagaacgaccaacggcaaagcagcccgggaccaagaaagaggccccccaccacccgaaggcagcggcagacacaaaaaacgaccgccacacaaggggagcacaccaaagacaaaagagagacacaagaagcagaaaacacaaccaaacaaaagggccaacacacagcgcgaacgaaacccaaggccagcaccacgcaccacgaagcaggcaaaagagcaggacacagacagcagccgagaaaagcgagacggagcccagcccccccccaaaaggcgggggaggccccgaaggacagaggccggccgacccccgcccgccgggccagccaaggcccaccccggcgaggacacaggccagcggaagggggcaccaaaagccgcccacggagcgggggcggccaccgcaaggccagcaggccaagaggccagggggcgggggaggccaagccgaaccaaacccgacggccaagcaaagaccgcggcaagacacacacgacacacacaccacacaccacacacccaggaagcacacaaccacaaccacacacacaagcacacacacaccacacaacaccacacacaaagcacggaagcacacacaccacacacacacacaacacacacacacaagacacacaccaacacacacaacacacacagcacacaacgcgcacacgcaccacgcacaacagcacacacaccgcacacacacacaacacgaccacacaaacagcacaccaacacacgcaagcaagcaccacacacacacgaacacccccacaacacccaccggcgccccggcccaccacaaaggaacgcagagagccggaaggcccccaggaagcacccacccgcaggagagagacggagagcgcgccagccccccccagcccacacgcgccacaccccaacacacggaggcccgggccaagcaccccaggccccaggaggggggaggggcacgagaaaaaaagggcccaaccggagcagaagcgggggggggggacacaggaaaagaaagaacaacggaacacgagaccaggaaacaggagggaaagagcaccgaggagccgcagaaagaggcccggagcccggagcgagccaaaggcgccaggaggagcaaaggagcagccaggaaggcccggggcacagcaagaggccagaggaagcccagcaagggggagggcggcagcaggagaggaagaccagaggacaggccgacccccccgggagagggggcaggggggggagggagcagaagcccgcagcaggaagaaggccacagagccccagaagaggccgaaagcccaggggggaggaagaagggaaggggaagccagagaggagacgagcagggccgcacggaaccagccagggagaaagaaaaaagaaagaaaaacggagagcgagcaaggcacaaccgggaaaaacgggacagacagaaaagacaaggaagagcca

SEQ ID NO: 301 - RNA, 10547 nt, Homo sapiens
gccggccccaaaccacggccgcggggaggccaggagaggggccagcccaaacccaagacaaaggacaggcaggacccacacccgggaagcccccccgccccccaccccagaaagcgagcgaaaggggccgccacccacggcccagggaaaccaccaacggccggaaagaggccaaagggaagacggcagccgcaggcagaagcaggccaggagcagcgcaaacaacgaagccacgacaccccggggccaggcgcgcggggggcagaggaccaaggaccagacccgccggcacccacacaccgaagaaagagacaggcgacaagggacccggggccagacgaaaaccaagacacaagagcgggaaacccccaaccaagaggcacacgcccggagaacaggggaagccagggcacggacccaccaaaagaacacgaaaaccacgagcgcaccgggacgggaccgcagagcagggaaaccgggaggacaaaaccccgccaaggagcgcagcccagcaagggaggagccgaaacacaaaacaagcagaaccaggagggcgacccaccgagagggcacaaaaagaaccaggaacaggcccgcggaagcaggggagggacagacccaaagccccagagcagagcacaaggaaagccacacgggcccgcccgggaagaacacaggcccccgggacgaaagaggcacccaaacggacggacgcggcccacgaccaccccacaaacacccgggaagccaggaacgggcaaacacccaacccccccagaaacgcagacggcgaaccccggcaccacgagccagggggggcgggggcgaaggccaacaaggggcgcgcgaaaaaaacaacagaaccaggaaagaccccacacaggaacagaacgcagccagggcaacccggggaaggcagcgaaaaccacacaagccagagaaaaacacaaacccacgacacacccaggcggacacagcccggccgcgagacggggaggagcaggcggagacgagcggaagcgccggagcccgcacgaagccccccaagcaaaaacacaaagcccacaaacacaagggcggccaaaaacaccagaccccgcagcccgagacggagaaaacaaggcaaaaaaaaaaaaaaaaagggcgggcggggaccaccccgaacccagcacaggaggccgagggggggagccgagcaggagccgaccaggcgggcaacacaggaagccccacacaaaacacaacaaaagccaggcaggggcgcagccaagcccagcaccgggaggcgaggcaggagaaggcgaacccgggaagcagagggcaggagcgagagcgccacggacccagccggggacagcgagacccgaccaaagaaagagagaggaaggaaggaaggaaggaaggaaggaaggaaggaaggaaggaaggaaagggagaaagaaaacggcccagaaaaagcaagcagaacgacgcgcgccaaccaaggggacgacaccaaagcccagagacaagggaaacaccccagcagaggcaaaacacccggaacagagcaagcacagaaaaaacccagaaagcaacaagacaaaaggggagagcacaggagagaaaaaaaagaggacaccaacacaagagccccacaggaacaacccagaaaccaaaacccccccaaaccacaagccaaaccggccagaaaagggcaggcaaaacgaaccaggcacaaaaacacgaaggggcacaaggaaaaaccagcagaccaaaaaaaaacaaaagaaagaggggccaaccggacaacccaaaaaggaaaggaaacagcaagacaccacaaaaaccaaacggacccgacaagggccaaaccgggaaaacaaccagggcagggacaccccaaggacccacccccaaccagaaagccacaaagccgagaccaaacccgagcaccaccacacgccggccaggggaaaaacccccacaaagagcccccacgggaagcagccagaggccgagggcagacggaccaaccaagccaaaaaagcagggcgggcacagggccagccgaaccagcacagggaggccgaggcaggggacacgaggcaggagcaagaccagccagccaacagagaaacccacccagaaaaaacaaaaaagcgaacgggggcacgccgaacccagcaccgggaggcgaggcaggagaacacgaacccaagaggcagagggcaggagccagggcgcaccacgcacccagccggggacagaacaagacacgccaaaaaaaaaaaaaaaaaaaaaaccggagggcggggccaggccagccgaacgaaccagcacgggaagccgaggcaggcaaacgagagccaggagcagacagcgggcaacaaggaaacccgccacaaaaaaacaaaaaaaggcggggggggcacagccgagcccagcacgcggggcgagggggagaagcgagcccaggaggcgaggcgcaggaggcgagacgcaccacgcacccaaccggggacaaaggagacccacaaaaacaaaaaacaaacaaacaaacaaaaacgcaggaccaggaggcgaagaggaaaaggaaaacaaagccacagcccccggaacaaacagaggaagacagaaaaaaacagaaaaggacaaaaaaagaggaggaacaaaagaaagaaaggcagggaaagaaacgggaagagaggcagggggaggaagagaggccaaaggacaaacaggacaaggaccgaccagaaaaacccgaacgaggggagagccagcaaacggggagagaaaaaaaaaaggccgaaagaaaagcgagcggggaaaccaagaggccacaggaagaggaaacaggaggggaaagaggaggaaggagccgagaggagccagcagggcacacgaaagcagggacagacagacaagaggcccacaaacagccgaaagcggcaaagccgaaaaggggcacccagaagccccagaccaggggggccaacggcacagagaaagcaggaccacccccccacggacaaacaaaacacgaggcccccgcacaagaaagcaagaggcgcgcaacgcacgggagacggagcgccgcacccaggcgcaggcgggggcaaccggcaacgcaacccgccccgggcaaggacccgcccagcccccgagagcgggaacagggcagccaccagcccagcaagaagagagagggcggggggggcaccagggccaggcggccgaacccgacccagggaccgcccacccggccccaaaggcgggaacaggcggagccacgcagggcgcaagcacaagccaacccagcaggcccacaacccaccccgccccggccaagaccacgacacaagaagccaggaaacccaccaaaacaagggggccaccaaggaaagccacagaacaaagagagggcccacaggcccaggcggaccaaacaacccccgcccagcccccaagagcggacaaaaaagccacggaccggccagaacgagagcccacgagcaaaaagccagccaaacacagaacgaggagcaggggccagaagggaagcaccaaaaccacaaaacgacacagcccagcaagagggcccggcagcacaagaaagcacccacgggcaacaacagacaccagcaagacaaacaaagacgaggaggcaagaagggccccgggaagccaaaagaaccccgcgaaggaaaggaccaaccaagacgggaaagagcaaccagcagcgcaaacaacaagaccagacacccacaccccaagcaacaagaagaacacgaaaaagcaagcacgaaaaagcaccgccgacccgccaaccagcgcaaagaaaaagccacaaacgaagccaccggcgccaccaaccagacacccccacggggcgcgaacgcagacacagccaaccggaagcagcccccacgcaacggcaaacacgccaaagaaacaaaacggaaacgagcaacgggacacgaacagaaaagagaggagccgccgcacccaggcggaggcagggcgcaaccggccacgcaagccgcccccgggcacaccacccgccagcccccaagagcgggacacaggaccgccaccgcgccggcaagaagagagacggggcaccaaagccaggaggccgacccgacccggaccgcccacccagccacccaaaggcgggaacaggcggagccaccgcgccggccgaacagaaaaacaagaacgccaacacaacaaaaagagacacccccccaaagcaaaccaaaagaaaaacgaaacaaagaaaccaacagaagaccaggcgaaccaaaacagaaggggccggccccaccaaaccaccgaagcagccccaggcaggggagggacccagaggagggacggacacggggccagccagggcggaaggagccacaagacgaggaaaaggggcacccccccaacccccgccgccccacccccgccaccagaagacagccgcaagccccgccaccacaaaagccgaggcccccagccagcagaacggagcaaccccaaaaaacccagccaggacaaaaacagcaggagaacggacaaacagagaaaaaaagaaacaaaaaaaacaacaagacagagggcacaagcaggcgacagagaagggacacgagggaggcaaaacccacacgaggcgagcaagaccaaaggagcagcccgacccccccccccccccccccccccccccccggagcccaggcgcgccacacgccacggaccaagagccacacaaaggagaaaagcaggaggcgccgcaaacacgggcaacagcccagcgcaccaggcgcaaaggacagacgcaggcgggcagacagggaggaccacaggcacaacccaccacgaggaccccagagaccagcgcaggaaaggcgcaggaacaagagcacacgcgcggggaaacagcgggagaccaagaagggacgcgggcaaaggagcaagccgaggcacccaaacgcccacagggcggacaaagcccacaacaagaaagcaacaccacagcccaacagcacgaagacaaaaagccacgacagaggagaggaccccgggaaagcaccgagaggagggaacacagcgggcgcgagccgagaaggcgcagccgcccacaaggggaaagaccagaaagaagcccaagagcggagagccccgcagagcacagcggaagaccccacgagggaccggaagcggcagaagccaaaaaacaacacgagcagccaagaccccacaccaaaaaaggagaaccccagagaggcaacaggaaaccacaaaacagaaagaaaaaacagaaaaaaaacaaaaaaaaacaacaaacccgaaaacaacaaacaaaagaaagaaaccaaaacaaaaaagaggagaagagggcagacacagagccgaagcggcagaggacacagcagacccagcgcgcaaagcggggagcacaggcaagcccggaaaacccacgacacccaagagaagacaagaaagagcaaacaagcgggaagaaaaaggacggggcccccgaaagaggaggacccagagagacacgaaaaaaaaaaaccaggcgaagcagaaagccagagcacaagcaaccaccaggccggaaagccgcagcgccaacgcagcggcgacgcccaccgggacagccggccaaccggaagaccgccaaaccggaaagcagggggggacaaaaggaaggcacaagcaacacaaacaacacaagaaaaaacgacagcaaaccaccagcaaacacacccaacaggagaaaaaaagaagcacacaaaaaaaagacaccccagagcgaagcacacacaaagcccagaggaaggggacagcaagaaacacaaaaaaagaggcgggcgcggggccagccgaaccagcacgggaggcgcgagggggacacgaggcaggagcgagaccagccggccaacagggaaaccgccacaaaaaacaaaaaacccggggggggcacagccgaacccagcacggggaggcgaggcagaagaagcggaccgggaggcggagggcaggagccaagacggccagcacccagccgggcgaaaaagcgagacccacccccacccaaaaaaaaaaaaaaaaacagcccaccgggcaggggccacgccgaaccggcacgggaggccgagaagggcggacacgaggcaggagcagaccagccggccaacagggaaaccccgcacaaaaaacaaaaaagccagggcgggggggcaccgaacccagcaccgggaggcgaggcaggagaagcgaaccggaggggaggggggagccgagacacgccacgcacccagccaaacagcaagaccgcccaaaaaaaaaaacagcccaaaagacaaacaccggaagaagcaaaaacaaaacaacagggaacgccaagcccccacagacagccacgacagaacaagagccaaaaacagaaagcgaccccaccccccccggagaacgccggcacagaggagaggccccagaggccgccagggcaccccccgggcacaccgaggacaagcggcaccgacccaggcgggacaaccaaacccccccaggaacggaggacgaggacagccaccaccggcaaccaggagagaagagagaggaagggagggaacccgcccagcaccacagagaagaaagggagcagagggagacacgaagcagagaagaaagcggagaaggggacgcaggccagcagcccgggcaccgaggccacgcccggaccagagaacgcaacccagcccaagcacgcagccaaggaacccaaccaaaaggacaaccagacaaggacaaagccaagaccacaggaggcaaaccaggcccacagcaccggggagcacgaggccaaaacacaacacaacaccccaaaggcccaaggcaaaaacacccaccaaggccaacagaaggaaaggcacaggcccaccccagagggcaaagcacagagacgcagagcaagaccggggagagcgagggcacacacccgagacgaagacagaaaccccagggccaaggaggagacggcaaagccccaacacccccgcgccgccccaaacagcacccccaccgcgggaccccaagacggcaagacgacccaaaagggccaaaacagcggaaacaaaaacgcggggagggaagagcgggaggacgaccccgcgcaaaagcaaaagagcggggaaggcaacagccacagaaagagcacaacccgccacggagcagcgggaggggcccccagccccccccgggcccggcacagcgcaaaagaggaggagaagagagccaaaccccaccaaccacaacgaagcggaaagagacacagaaccacgaaacgagccaccggacagagccagcggcagcggcaggaaagaaggcacccccgagagaaagaggggaaaacccaaagacccccaggcgccaagccaggccgaagcccccgccccagagccagaccgggaccaggacaacacgcaaaaggcaaacagacagacagcccagagcaaagccggacgcccggagcccaggaagaacaggccgggaccagcagaggccaggaaaggccaggcacagggacgggggcagacaggccgggcagaagaggggcagggagcccggagggcaagaagcccaaaggggggacagcccgagccaacgcggcagagggaacagggcgcagcccagcacgcacgccagccaccagacccgcccccaggggcccagcaggaagggccaacacccagggcccacccacaaaaaggaaagccgacaaggccccagaggagaggaaccagcagccgccggcccagccgcccaggcgcagacaaaaagacagggaagggccagcggagaaaaggccacgggaagaagcagcgccggaaccacgaagcccccccgggcccccgagaagcggagggagcggcccccaaggggcacccgaggagccaagaccacgccccagccccaaaggaaggcggggggggaagaagccggggccagcacccaaaaaaaaaggagaagggaaacacgaggagacccccagagcccagggaaaaacaaaggcagcacacaggagaaaaaagaacacagaagcacccaaggaacccaccacagggccaaacaccgaccgaccaggaacaggagacagagaaaaccaggccccacgacccagcaggcgggagcaaaccccacgggggggaaggggccgggcgagagggggagaagcggagaaaaaagcaacgaagcaaaaaaaaacaccaggggaccaaaaccgaaaaagaaacacggaggggccaacagacagggcaaggcggggagaagcagcaaagggacacacacacgcagacaagaagcccacacaacccgcacacccacaccaggcccaggaggccccaaaaaagggggccaggaacccacgaacccagaagaagggaaggggaagaacccgggaagccagaaccgcacaggaaccagcgggcacagggaacccaaagagccacaaggagacgggaaccagagacaacagccccaagacccacgggaggaagagaggaacagaaaccgggcaagaaccgcccagaacgccgaggggaaagccgcggccagggaaaggagggagagaacggggaacaacaaccaccgcgcaagccaccgcccaccgaaacgcgggcccccaccgccccaaagcgaacccgaacgcccccaaaacgaaggcccaagcagagggagccaagggagcccggcggcgcaaagagcggggcaggccaagcacagcccaccaggccagccccgggaaaagggagaaggagggccaagcaaggaaaagcaaccaagggcaaagagcacaggcccacggagcgaggggccggagccaggccgcgcggagacgcaggcaagccccgcacaggcccaacccacaccccacacgcgccccgcgaggcgcgggccacgaagaccggaaggacacccggcagcaaagcccgccccccccccgggccggccaggcaccggcgacaaagcacgacacagccacccccgcacaggcaccaaaaggaaaccgcccaaggaacccacccaccaccgccaccagcacgaaccgcgcgccggccccccccagccccgcgccccaccgcaaaagaaacggaccgcgcccacgacaagcaggagcagaaccgaaacgagcagagcaagagcgcgcgcccacagggcggggcgggcgcacgggcccagaaggccgggcccccggggaagagcgaaggcccgggaagggaagcacgggcggcggggcccggcccgaggaccgcccccagggcggggagggggagccgcggcgccgccagcaaacccccccgaacgaccgagagccggaaccacacgcccaaacgacacgccggagccagggagccgcccgccgcccggggagcggagggggaaagagggggggagaagggaccggggaggagggggggagggcggaggaggggaaggagaggagcgggggggaggaggaggaaggggaggagggagaggggggcggggaggagggagaggggggcggggaggagggagagggggcgggaaggagggggaaggggagaccggggaggggaggggagagaaggaggagggggagaggggaaagcggggaaaggggaaggggggcgggcggagggggggagaaagggggaagagcggggaggcaagccgcgggggcgagcggccccagggagcggcgggggggcgaagcaagccagccccaagccagcccgggagcgggacgaggggagcgccggcaccgcaagccgggcgcgagcgccgcagagccgcagccgcaaaaaaaaaaacacggacgcccgccccgccccgccccgccccgcccccccagcccagcccagcccagcccagcccagcccagccccgcccagcgcagccccggccgcggcggcggggggcagcggggggcggcgcggcgcaggcagggcgggcgcggggagcccgcgcgcggggcacccccggaccggcggccgcgcagccagggaacccgcccggaggcccgggagagggaaagcgcccgagccggacagggaaaacacaaaaaaaaacaagccggaaaaaaagagaagaaccgcggccacccggaggcgggcgaaacaggacgcgggcacccgaaggccaaccacacaaggagcggagccgcgcgaacacggcagcggggacagcaaagccgggagacgcgcaggagcagcccgcgggacacgaaaaagcacacacggcaaaaaaggacacagagggagaggcaccaaccgcaaaaaaagaaagaaaacccaaagcgggccaaacgggaaaaggaaagacgggagaaaaaaaccacaacaaaaccaaaaaccaagccacacaaaagaacagaaaaacaaaaaaagcaagacaaaaccagggcaaacacgcagaaggacagcagaagaaacacaacagggcagggcagagacagacagacaggaaaccgccgaaacacagcaggaaggccaacagagaagccacggaaaacccaaaacaaacaa

SEQ ID NO: 302 - RNA, 836 nt, Homo sapiens
agcaccaccccagacacaacaaccgacgagagacagacgacaaagccaccccccaccagcgcggacggacggacaaaccaggcccagcacaggccagaggagaggaaaagagacccaaacgcccaacagcacccacgacccacagcccccacacaaacgcacaggagcccgcaccaacagcgcaagaaaacggaaacccagagaaacccggccccgagacagaggccggcccaggcggaggcaaggcagaccgaccacgcaacccgcccccagcaagcgaccggcccagcccccgagagcgggaacaagcagcacaccagccagacaagaagagaaacagggcaccagggcaggcggccaaaccccgacccagggaccaccgccggcccccaaaggcgggaacaggcggagccaccgcccggccaacccggccaaccccccaccaaaccaccgccagcgggccagccccgaaccaccaccccagaccaccggccagcacccccgccaagacagaaccgggccagacgcacggcgccacgcacgcacacaccccgccgggggcccaggcccagaaacccccgcacgaacccaaagccaaggcaggagaaaaagccccccagcagggaccacccaaccagaaagccccgcccccggccccgcgcaggcgaggaagaacaccccccgccaacaggcccgacccaccccagagcacaccccaggcgcccaaccagacacacagccccaggccacaccccccccgcaaaacaccagacccccacaagacacccagcccacgccagaaccacccagcgaccacccaaaaccaagacagagcc

SEQ ID NO: 303 - RNA, 43645 nt, Homo sapiens
gaaaaaggagaagggcgcaaccccaagacacaagaacgagccacaacagccacaggcaaaacagcggagagcaccacacacaagggaagggcgagaaagggacacagagagaggcccaacagacccccagaagagaggagggaaaacacggacaagcggccccccaagggaaaacaacaaaacaacaacacccgaaagagcaacaaaaaaaaacccaaagacaagaaaaaacgcgcgggagaaggagaggcagcggaaggccgaaaaggagcaagaaggaagagcacaacgaagagaaaacccccagaaggagaacacccagcaccaacgaaagcgcgcacgggacccagaggcgaagaaaagccgcccaaagcacagacacggaagaccccagcaagaaaacgaccccagaaaacaagaagacccaccaggcagaaggaacgaagcagaagaaagagccgacacccaacagaagagcgcgaagcagccaaacaagacagccagaggggaggaccgacggcagcagcgggaagccaacacagaaaccgccacagggagaagcaagcgacgcaaagagcaaccgaacaacgaagaagggcaaaaagcagcagaacgaaacaaggggacgaacaacaaacgcacaaaacaagacgaaacaagaacaagccacgggacaaagagacgaagggaaaagaaaaaaccgagaaagcaagaccccaagacggacaccgaagaggaccagaacccaaaaacccagccggcaccgggacgccagacccaacggagagcaaaagccccccagcaaagaggcggggagcacaaaccgcgaggccaaaaaagcagcagcggagaacaaccaagccaaaaaccaaccccagacaaagagacaaggaccacggaacgaccggcacgaaaacaaaaaaagaaagccgcccaagaagcaaggacacaggaaacggacagaaacagacagcagaaagaaaggacacggcccaacacagacaggacagaagcaacggagcagaaacgcaccagagccacacagccagacccagcacagaggacgggggaagccaggcccacggccgcgaggccacgcaaacggcagccggcccgggcaccccagagacagcaccccaaaaggagcagagcacgggccaggcagaggcaaggcacgacggccacgcaacccgcccccaggcaaggagcgcgccagcccccaagggcgggaagaggcacccgccacagcccagcaagaagagagacggggccagggcaggcggccgaacccgacccagaccacccgccgccccaaaggcgggaacaggggagccaccagccggccagccccacaaacaaaacaagcaggccagaccgagcacaacaccccccgccggaaagcagacccaaagccccccccaaaaaccgccggcccagggaaaagcaaaccagcccaggccagcacgggcaaagacaaaagaagcgcacgcaagaacccacgcaaggggggggaggggaagagaagagacaacagccagcaacagacaaaaagcagccagaggaagaggagccagacaaggaaacagcagagaaggaagggaggagaccgcgccggacgcaaagaaaccgaaagcagacacgcagggacgaaagaagaggaggagagcaaaagggaggcacgaggggaaaacacagagagccgacgcacacagaccagcacccagaaaagagagcgaacccaggaaaagaaggagcagcagaggcagcaagaaaaagcgaagagaaaacagcccggaagaagggacgaagggggaagcgaaaaccacgaaaagcaaaagaagaaagcaggggagggcaaacccgcaaagacagcagggaagacagcgaggagaaggaggggaagcagccaggcgaaaagagggaagccggcaccagcaaaacagaagacaaaaccaacggagaccagaaaagccagcagacggcaccacagacgaagaagcagaacaaaggcaaagagaggcaacccgaaaggagaccagcagaacacaaagaaaaaagaaaaaggcgagaaaggaaaaggaagagaaagagaagaaaagcagccgaaaggcggggggggggaggggagaagaaaacagagaaaaagcaacggaacacagagaaaaaaaacacaccacggaaacgggcaaaaaaagaaaagccacaaccaggggagaaaaagagagccgaaggaggaaagcaaaagggacaaagagggcgaaaggggggagaagaaagaaaaagagggaaccaaggggaccggcaacacagcaccaggcggaacccgagcagcagcaacccacacacccccgcaaaaacaccagccggcgggaacacgagcaagcaacaacaggaaggacaggggcccaaccggagaagacagccaaggagaacgcaccaagcgaacccaccccacaaacacaaagagaagagagaaaaaaaaaacggacaaaacaaagagcacaggaaaaaggacaggaaaagagaccagagagaaaaaaacacgaacccccccccaccccccacccccgccccaaaagcgaaggcaacgggcaggcaagacgaaaaagaagaagggacagggaggagaggagagaaaggcgagagggcaccaggaaagacccagccgaaccaaggaggcagaagacagccagaacgaagaagaaacagccggagaaacagaggagccaagcacgagccaaagaacgcaggccagaccaaaaaccagggaaaagacccaccagaggggagcccgccaaacaagccagccccacaccgaccgcaccccaacaaggaaaaacaaagacagaaaaaaagcaggaaaacccaacaccccacagaacaagacccaggcgccaccacccacccaccacgaaggcacaagaggcagacacaaaggcccccaacaccagcgcaaacaaacggaacaaagaaaaagaaaagagacaaagaaagaaaaacacgagcgaagaccaagagaaggcaaagcgagcggaaccaaacacgagaacagaacaaaacacccagaaagggacgaggcaacaaacaacacaagaaacccgcgagaacacaagaggagagaaccgagaggcccaacagcagagaaccaacagcacaaaaggacacacaggaacggccccacagacgaagggagaagcacaaccggccaaaacagccaccgaagcaggcaccaaaaaagaaaaaggaaggcacaaaagaagaagacgagcaagggcaaaagccggcggaaagcccggaagaaaggaacaaggcaaaagccacgaaaaacaggaagaaagaacgaaaggcaccagaacaaacaaagagaaggacccagacagaggggcagggaaaaaaagagcgacaaagcggaggggaggaagagaggggaggaagggaagaggaccggaagcaggaacaagagaaaacccgggaagacaaagggaaggaggaaggaaagaaggagcaagaggacaacagaacgaggggagaggaaaaggaagagacgacagggacgcgagcagaggcagggagggagagaggccaaacagacagaaagaggaaaccgggagagagacaaggcagcaagcagcacgccaaccccgaaaaggaagccagaaggcccagcgcaccaaaaaagaagacaaaacccacacaagcaaagcgcagacagggaaaagaaaagaggagacagagagaccaaccaaacacaggagaagagggagggaagggaaggggcagaaaaagagcagagaaccaaacagaaggaagcaccaggagggggcagaacacacgggaacggccggccaaaccagcccaccacaaggacagccagcaggcgcacggagcaggagacaaagccagagcagcccccaccccgaccaccccccgaaagacccccccgcgcccaaggccgccggcaccaccacacggggaccacggagcaccaggcccaagccggacacaacccgggaggacaccagcacgggaacccgggccagcgccaggggaggagagaagggcacacacagggacaggagcccggggcagacaggaaaggccaggcgccccgggaccaggaaccggcgagaaggcagcagcgggaacgggacacaacagcccacaacccgggagccccagcacaagcagagagggggagcaggcaggagccagaagaccacaaacacgaaaccggcacaaagccaagaaaccgcggccgagaaagccacccacaggcaaagacaaaaaggcacagaaaagcacagaaaaagaaaaagaaaccgaaagcagcgaaaaagcggagcaagaaaaggagaaagacaaacaagaacaaacacacgaaacggaaggacaaaagacaggacagcaggcggaacgaaggcacgaaagagaggaagagaaaacgaagaaccaggaaaaacagaaaagggccaagcccagaggaggagggcggggacccccaaaaaacgcgaacaaaaaagacagaccaaaacaaaaagcaaagaaaaaaagcaagccaccacgagaagggcaaaaaccagagcaaaagagagccgcaggcaggcagcagggcaggagagccaaggccgggagcaccgggaaagcgacaggggaagacaaacagggccagaaaaaaaccggagaagccgaaggacaagcagagacaagaaaaagggagaagaggcagagagcagcaaaaaaagcaaaaaacaaaaagaacaacgaaagcaggcaaaaaaaaacagcaaccacacagacaagaaacacacagaccaaaaaacgacaaaaaaaacccgcggggcaggccggcagggcgagaacgagcaaaacaggaaggcccaaacgggagcgaggcaaaaaggccccaacgaagggagcgccggaaagcaaaaaaaaccccagaaaccacacagcgagcacaagaacaggaaggcaagcggggccacggggccagagggccacaagcggggggggcgcagcaggaggaggaaggcacccacagcaaacccaagagagcggacggccgcaggggaaaagccagaaagcaggcagcaggagccggaagggaggaagagacacgaaaggcaggacgaaggagaaacccaaccccccgcagccagaaccgccgccaggggccacggagaacgacgcgggaacaccaggcacaggaggcagagaacgccaaacagcagacgaaggagccgaaaggagaaggaagaagggaaagaaacaaaacacacccaacacagacccagaaagacaaccaggaacccccaaccaggagacaacagaccagaagacccccaaaacacgaaaaacaaaagagccaacaaaacagcccaaacaccaaaaccacaaccacaagccccacccaggcacaaaaaccccagcagcaggcccccaagaacgagggaaacccaagaaagaagagacaaaaaaacaaccagaaaaacgaagaacagacagggcgggcgcggggccccgcgaacccagcacgggaggccgggcacgcagacacggcaggagcaagaccagcggccaaaggaaaacccgccacaaaaaacaaaaaagccaggcaggggcacgcgccgagcccagcaccagaaggcgaggcagaagaacgcgaaccgggagacggagggcaggagcgagacacaccacgcagccagcggggacagagcgagaccaccaaaaaacaaaagaaacagacaaaacccgagggaaaaagagaacaacaacaacaacaagaacccaagcaaaaaaggaaaccaaaggacaaaaaaccggaaaaacagggaaagacgaaaaggaaagaaagccagacagaacacaaaggaccagcagacagcgaaagaaaagcagaaagagagaaaagggaggaagccaacaaaaaacaaacacaaacagaagaaaaacacaaaccagaaaagaccacaaaaaccaggagaaaagaaaacagacaaagacaagggaaaaagacaggggccaaaaacaaaacagcgagaaaaagcaggcaaaaacagaaggcacagaccagaacaacacgaaaagcagaagacagggaagagaggggccagccaaagcgaaggaaaagcccaacaaaacgaccagccacacgagggcaagaaaaaacacagcaaccaggccaaaagcaccagcccagaaagcacaggacggcccaaaacgggaggaaagaaaagacgggaggcaggaaagagggcgcaggagaggaggaaaggaagccgcacaagaaaaggaaagcccaaacggcccagacagcaccaccagacagaagcaacagaaggcagggcaacaagaacagcaagagcgaacgaagaggagaagcaacggaaaagaggggaacgaaagaagagacaaaagcaaaggaagggagaaacagcaaagaaaaaaaagaaaggggagccaggccacgggggagagacaagcaaagaaacgaagggaaggacaacaaggaaggaagggggaggagggaaggagaggagggcaggaaagagaccgcagccaccccaaaaaaagcaaacaaggaaaaaacaaacacaaaagcaaggaagaaaagaaaagaagaaaaccaaaaaaaggacgaaacaggaaaaggccggggagggaaaagaaggaaagagacagaggacgggcaaaagccacagacgagaccgaggaaggaaaaaaaagcagaaggaaaaacacgaaagaagaagaaaaaaaaaagcaaaaaaaaagaaaggaaggaagaaacaggaaaccaggaaagcgaggacagcaaaaaaacaaggacgcagggaaaaccaaaaaagcaaaaggaaacgacaggaggacaggggagaagccaacagaaagcccagacagagacaaccgacaggccaaaagaaaaaaacccccccggagcaaaaacaaaaaagaaacaaaccagagcgaaggaaagcaaagaaaacaagacagacgaaacagaggccaggaggaaaaaggcaagaaaaggacccgagcagcgaacgggaacaggacacaagcaggacagggagagcaggcaaacaaaaagggcagcaaagagaggaggggcaaacagggagagcagaaaggacggaaaaaaaaaaagaaaaaagcaccaaaaaaaaaaaaaagggcgggggggccccagagaaaagaaaaaggccgggcaggggccacgccgaaccagcacgggaggccgaggcggaaggacacgaggcagcaggagaccacggcaacacgggaaaccccgccacaaaaaacaaaaaaagcgggcgggggcggcgccaagcccagcacgggaggcgagacaggagaaggggaacccgggaggcggagcacagagccaagagcgccacgcaccagccgggggacagagcgagacgccaccaaaaaaaaaaaagaaaaaaaaaccaaaacaaaaacgggaaaagcagacccccaaaagcagaggggaagggaggagaaggaaagaggcggacagggagaccgagccccccgggcaggacaacacaaaaccaccaccaagagggccgaaagcaccacaaaaaacagaacaggaaacacacacaacacagaaaagaccccaaaaaaagagaaacgaacacaaaaacacagaaccacacacaagcaagaaagagaacagcagcaccccaggaaaccccagcgcccgaaacacgccccgagcggaagaaaaaggaaaaacggagaaaaagaaaacaggcaaaccagaagaccaggaaaaaaaaaaaaaaaaagacagagcgcccgcacccaggcggaggcgggcaacggccacgcaacccaccccgggcaagcagacggcacagcaaccgagagcggaacaggaggggccaccaggcggcaacgggaagagagaggggcccagggcaggcggcgagcccgacccagggacacccccagcccccaaaggcgggaacaggggagccaccacgcccggcccaccagaaaaaaaccaccaaaagaagacaaagagaaaaacgggaacacagaagaaaaaagagaagggagaaacaagagagagagccaaaaagaaaggaaaaagaaaaaacgcaccaaaacagagaccaccaaaaccagaaccaaaaaggaagaagcacaagaaaagaacggcacacagagaaagaacaggggcagacaccacaacaaggcgacgcaaaaacagagggacgaaaaagcaaaacagaaacaagacacggccggaaaaaaggaaggccaggaaacgaaaaaggagaaaccaaaagacagacaaaaaagacagaacaaagcaaaagaaccagaaaaacaaagcagaaaaagggaaaaaaaaaaaagacacggggccccagagggggaggcagggcacaggacaaagggagggaaggcagcagaaaacaaggaacaaaggccggccaggcagaggacccgcggccccacaggggcccgggacgagaagggaggggagaccaaggagagcgcccaagcacgaacaaagcacacgcacgcccaaccaaacccgagggacacagcacagcagagagcacaggggggggcaaggcaagacaacagcacccaaggcagaagagccagacagaacaaaaggagcccagcacccacacagacacagcaacaacgaccacccccacaccccccaccacaaaaccgccacacacaggcccgccaagagcgggacaccccagacggggggcggccgggcagaggggccccaccccagaaggggcggccgggcagaggcgccccccccccacccccggacggggcggcggcgggcagaggcgccccccaccccccccggacggggcggcggccgggcgggggcgccccccaccccccccagaggggcggcggccgggcgggggcgcccccaaagcgcaacaagagcgcaggggcgccccccaccccccccggacggggcagcgccgggcggagacgccccaccccagacggggcggcgccgggcggaggggccccacccagaggggcggcgccaggcagaggggccccacccagaggggcggccgggcagagacaccccacccccagacgggcacggccggcagaggcgccccacacccagacggggcggcggggcagaggcgcccccacaccagacgagggcggccaggcagagacaccccacccggacaggaggcggccgggaagaggcgccccaccccagacgggcagccgggcagaggggccccacacccagacgagggcggccaggcagagacgccccaccccagacggggggcggccgggcagaggcgcaaccggcacgggaggccaaggcaggcggcgggaggggagggagcagccgagacacgccacgcacccagccgggcaccagagcacgaggaacgagacccgcgcaacccggcacccgggaggcgaggcggcagacaccgccgaggagcggagaccagcccggccaacacaggaaaccccgcccaccaaaaaaaacgaaaaccagcaggcaggcggcgcacgacgcaacgcaggcaccggcaggcgaggcgggagaacaggcagggagggcaggagccgagaggcagcggacagccagccggcggcacagagggagagcgggaaagagagggagagggagacgggggagagggagagggagggggaggggaggggagggggagggggaggggaggggagagggagaggcaacgacaacgcgaaacggaacgaagaacaaaagggggacccccgcaacaacgagccaaacgaaaaaaagggaaaaaagaggaaaaaagacaaaagagaaaagaacaccgaaaaaaaagccaaaaagcgggggaagcaagaaagcacgaacgaaaaggaagagcaaagagccaggggccacgagaaaaagggggaacaaagaaaagacccaggagaaccaagggacaaaaccgaacaccacagggagagaccacaaccaccccagggaaaagcaccagcagaaaaacacacagggaaaaagacagcgaagaccacgcaaacaacacaccaaaaaaagaagcagcaagagaagaaacgagggccccaagagacgcaagcaggcagagacgagagaaggcaaaaggcaggcagcccgaaaaggaaagaaaggagaaggacagaagaggcccaggaaggacaaacagacaaagaaagacaaaaaaagacaaaggcccaaagaaagacaaaggcccaaaacagacacaaagagccagaggaacaaccaaaagagaaggaaaaaaaagaacaacaaaacagcaaggcgcacaaggccacacaaacgagcccaccgaccaaacgcacaaacgcacgaagcagcgaagacggcacaaccacacacaggaccggaaaacacaaccagacccccagacaaaaagcccaccaaaaacacacaaaacagaaaacaaggcagagaaagaagggaaccaggaaaaagcaccaggccgacccacaggaaagagaacgaggaaaacagggccgaagcaaaagcaaaccagaagcaaacagacaagacacaagaagcacaagccacagaggccagacggggacacgaaacggccaaaaaaggcagagggcaacacagcgcaaccggaccccagaagaaaagaaggaaaaagggcgaaaggagacaacaaaaaaagacaaaaaggaaagaccacaggagaacagggggagggaggaaccggaggagagagaacggggagagaaaagggaagggacggaggcaaaggggaaacaaaacaccagacacccggaaccagcaaaagggagacccacagaggcccgaggaccagggaaagaggcgaaaagggacaacaagccagccaggagccacagggggaagacaggagccaccggcaggaagaaaaggcagcaaaaaggcaggaagggagaaaaaagaaaaaaagagcagaaccacgaacagggcaggcaagagcagagcggaacagcaagcacgcagaaagcacaaagaaagaaggagaggccgggcaggggccagccgaaccccacacgggaggccaagagggggaggacaccgaggcaggagcgagaccaccggccaacggggaaacccccacacaaaaaacaaaaaaagcgggcaggggcgcgccgaacccagcacccaggaggcgaggcaggaaaacacgaaccgggaggcagagggcaggagccaagacacaccagcaccagccggggacaagagcgaaacgccaccaaaaaaaaaaaaaagagggagaaaggaagccagagaacaaaacgcacagggcccagacagcagaaaaaagggcaagccccccccgaaggggcaaaaccagagagggaagcgcagcaaacgaccaggcacagaaccggaacaaaccgcacgcacacagacccagaacaaagaaaaaaaaaaaaaagaaaaaagcaaaccgaggcaggacaaacaacaggaaaaggaaaaaaaagaaagggagaagggaaggaaaggaaaaaaaagcaagaagagaaacagcgaacgaaaaagaggaagaaaacgccacaagagagaagaagacgggaggggaaagaagaggagacgagaagagaagggacaaacaccagaacaacaacgggcagcggccaccaggaacgccgaaagaacagggcaaccagcggaaccaagcagggagcagcaacagaaccaacgaacccacggaaagcaaagaagagaacaaacccccccagggccgcacccgaccaaacacaacagggacagaaaggaagacggacaagaaagaacaaaaaaggcgaaaaaagacaaaaaaaaacagacaacaaacaacaaagaaccacggggagcaaaagcacaacaaaaaaaacaacaacccacaaaaggccaacaaaaccagacaaacagagccagcgcagagcaccacgacccccagacaagaagcaacaccacggcccacaaagaacagaaccgaaagaccaaaaaacaagcgcgaaaagaccaagggaacagccaaagcaaacaccggagaggagggaaaaaacaaaacaaaaccccgaaaaggggacaaggaggagaaaagaaaaaagacggacaacacagaagggaggcaacgaagaaaccaaaaaagaagcagcagaagaaaggaagaggaaagagacaagaaagaaaagaagaaccccaaaaccgcgcagcggcccaaccacacagaggaaaagaagccagcagggaccaccccggaagagcagcagggagggaggggcagccagccaagcgccgcgcccaggcggcccagacgacagaaacgggaaggccaaaagcgaaagaaaaccggggaaaagaaaaaagcaaacaccaaaaaagaaacaaagcgggggacacgacacagaaaaccgggaacagggcagaagaggaacagaggacagaagaagacgcaagaaagaacccaaacacagaggaaaccagacaacacaagcggggaaaaggaaggcgcagaccagaggcacaaggacccgggccgcccgccgccaccaacgcaccaggccgaccgaaaccgcacagggcccacaccaagcaggcaagaagaaagagaaagaggaagaaagggcagaggccgggcaagcccgccacagcgaaggagccccaccaggcccgccaacccaggccagaaggcaccaccaaccagcgcagggaagggggaaggaagacaggccacgcaccccaacaaaacagggggccaagaacaggggaagaaaaagagaaaaacgggcgacaagaaacacaagagcaaacaagaaaacaggaagaaagcaaaagaacgaagaaacaaccagaaaacaggaaagaaggaggcaacaaaaaaggagagagaaaaaaaaagaacaaaaaagacaaaagaacggaggaggagaaggggcagaaagaaaaggaaacgcaaaacaaaaaagcccaaaacacaaaccaagcccccacacccccaagaagaggaaggacgggagagaaagagagccaggaaaaacacgaaaaacaaaaaagaaggaagcccccggacaagaacaggcggcgggagcggggcacaccgaacccagcacggggaggcgaggcgggggacgcgagccaggagcgagaccagcccagaaacaggcaaaaccgccacaaaaaaacaaaaagccggggggggcgcaacgagccagcaccggggcgagggggaggagcgagcccgggaagcagaggcgcggagcgagacacgccacgcaccccagcgggaaagagcaggaagaccgccaaaaaacaaagaacggcgaaagcaaccaaagggaccacacgcaaaaaaaagaaagagacagcccgccgggcaggcggaggcagagagggacacagcacgagccccaccccgggccaaggacccccaccagccccaagagcgggacaggcaggccaacacacggcaaaaaaaaaaaaagagacaggacccaggcggcgaacccgggcaagaacccccaccgccccccaagggcgagaacaggcagagccacgcgcccaaccccacaaagaaaaaaaaaaggacgccacagcggcacaccaaaaaacacgaacccccaaccccaacaggccaagagcgcagaaaagacccaggaccgccaccaggcggggaagcggcaagacaaagggagaaaaccccaaaaaaaaaaaaaaaaagccaaaaaaaccccaaagcccaacaaaaacccaaaaaaaaaaaaggaaaacaaaaaacgagaagaaacgaacaaagaaaaaaccaaaaaaaaaaaaagggaaaagaaaaagaaaaaagggaaaaagaaaaagggaaaaagaaaaaaaaacagaaaaagaaagaaaaaaagaaaaaaagaaaaaaacacaaaacaaaaaaaaaaaccaaaaaaaagaaccaaaaaaaacaaaaaacaaaaaaagggaacaaacccgaagaaaaaaaaaaaaaaaaggccaaaaagaccaaaagaaaaaaaccacaacagaaaaaagagggacaacagacagggacggaacaaacacaaaaacaacccaggggaagaccaagaaccaagggagaaacagcagccaagcgcgcaaacagaggagaaccaaccaaccgaagagaaagaccagaaaaggcacggaaacacagcacagaagaagaaccccgccagaaggcgggaaaagaaaccggaagggaaggacggacaaacacaagaacaacaacacaaagacccgcaagggaagcacgggaggaaaaccgaagcccaaaagcaggagcacagagaagccaaacccaagagcaaaacaacggcaagaaaaccacacaaggaaaccagaagcgcgcccagacaaggagcagcagaaacaagaggaacgggccgaggagcaagaccaaggaaaccaacccaaaaccccgaggagaacaacccaccaaggaggagaggaagggagcaaacaacggcaaagaaaggcaagaaggagcggcaacgagacagcagccgcagaccggccaacgccacacacacgcgcaagagaggcaggaaagaccagaaaagaaccaaaagcgggacagacccccacaccaagggcagcgcaaacaagaaaaagaagcaaccaaaaggcgcaaaggaccaccaacgccgcccaccacccccccccgccaagagaacgcagaacaaagccgccccgcggacacgaccacccccaccacaagcccaacagacaccgggcaacaggaccacaaaaacacagcgacccagaaaaaaaaaaagcaaaaaaaaaaagaaaacaacccccaccaaggcaacgcagcaggagacggaccgcccggcccaggcggaggcaagagcgagcagccacgcaaccccaccccgggcaagcgacccgcccagcccccgagagcgggaacaggcacccgccaccacacccagcaagacagagagaggggcgccagggccaggcggccggacccgacccaggcgaccaccgcggcccccaaaggcgggaacaggcggagccacacacccagcccacagcaagcccccacaggaaagcacgcagggccgagcgcaagcccaaaccaacccaaggaagccccgacacgaagcaagggcaccaagaccacagaaccaggcggggcagccgccgagacaccaggaacagacacaaacacccccggcaaaagaggcggagccaaccgaccccgcgcgccacagcgagccccccaagcccgaacacacaccgagcacaccagaagcaaaacaggccgcaagaccacaaaagccagacccacgaaagccaacagcgcagacacccacgaaccccggaggccgaaaaccgcccggccaggcaggggcacacaccaaacccagcaccgggagggaggcgggagacacgagcccaggaggagaccagccgggcaacaagcaagagcagccaaaaaaaaaaaaaaaacaacaacaacaaaaacccagccaccggaacccgcacaggaaacccaccagcagggcgggcaaaaagaaacaccgaggggccacgccaaacccagcaggggaggccgaggcgggcagacaccgaggcaggagcgagaccagccggccaacaggaaaaagcgggcggaggcgggccgaacccagcaccaggaggcgaggcaggagaacgcgaacccaggaggcagagggcaggagccgagagcaccagcacccagccaggcaacaagagcgaaacccacaggaaaaaaaaaaaagagaacaccacaaccccaccccaccacaaacagccacaagaacagacccaaccaaaacaacagaaccagcagcccaccacccccagccaccaggccaagcaccaacggccggcggagcagagcccccgcccccacaccgacaaggaccccaacagcacagagacgaaccaaaacaaaaaaaaaagcaagcacaaaaccccagggccaccaaaagagaaaaagcacacacaacagccaaaggccacaggacgacccccacccaacccccggcgccccccacaccggcagccaggacgcagcggcccaacacccagcccaccgggcagccaccgcgccggagcccccgaaacccaaggcgcccccccaggccaaagcacgcggagccacccacccgaaaacacaaaagcccaacacccaacgccaacaagccagagcaggcaggaggaaagacagacacaaaagcaccccacagaaaagcccacaaaacaggcaaccaaaaagaagcgcacgcagaagaaagccaggaccagcagcacagaaagcgagaaggaacacgaaccgacaacacaagagaacacacgccaaaggccaacaagaaagcggccgcaggccccaacaaaggcaagagaccaggccgcacggagcaaaccaagaaaaccgaccagggccggccaccaaccgcccccacgaccacggaaccgggacggagacaaggcaggaagagcgcaacccaggaaaggggaggaggcaggagggagaaccccacgcccgcggagcccgccccagaaaggaacgaagacgaaaagcgagagacgaacaaaccacaacaaaagaccagccaaaaacaagcccggaagggccggcgaaagccccaacgagccggcccaccagagaaccccccccagcagaaacccgggagggacagacaccgaaacgaaacaaaacaacaagagaaggagcagaacaaaggggccacaaagcagaacgcggcaggggaagcgccacccgaggccaggacaagggaaaaaacaaccaaaaagcccaacaaacaaacaaaccagagaaagaaagagcaagcacaccagcagaaagacaaggcccggcagacaggaagaccccaacaggaaggaggaagcagaaaaaacaccagccagacggcacaaagaaagcagggagagaaaaccacccagaacacagcaaaaaaagacgccaccaccacggaggccggggcgcaaaagagaggaacgccaggcccaggggccaacccgggccgaacgacacccacccggcccgaaaagcgggaacaggcgagccacgcacggccgaggcccaaacaagacacaaacccccaaacgaggaacagcaaaacaccggcacacaccaacacgcccacagcacccgagaagcacagacccagaaggaaaggacgagacgagagacaacagaaagaggaacaaaaaaagcaaacagcggaacaaggacggacacaaacggcaagaaaacccaaaggaaagcacaaaaaaaaaaggagaacgaccagagaaccaaaacacaccagcgaaaggaccagagagaccccgagccacaaagaggcagcccccccccacagcacaccagccaagggcaccaaaccacccaacaaggagcccacagaaggagcccagagagcagggacaggacgcgcgccagacgagaaaggccgcacaagagggacaaaaaagagaacaaaaaagaagcagaccccagagcacgcagaaaaaggaaaaaaccaaaacgagcaggcccaagaagggagaacaaagagacgcacccccccagaaaagagaaccaaaagcggaccaggcaacagggacaaacgacaagccaaaaggagaagaaccgagccccaagagaacaaaccaagcaaacgaggacgggcagaacaaacaacaaggagagaaaaacagcaaacaaggaaaaggcaaccaaaccggagaagaaagacacgaacaggagacagcacccgcgggaagaacaggcagagaagcacgagcccacgacgccccaaggaggcagcgggagcggcccaacccagacgccagcggccggccgacaaggggaagaaacaccaaagaaagccacacagaaccgagaagcaaaagaagaaaaggaacgagaagaacagccggaaaaacacagaaaaaagccaaagcgagccccacgagaaaggaaggggaaaacaggagcagaacaaagcgcccaagacgcagcagaaaaaaccgggaagaggacagggggaaaccagaggggagaaaaaaccaaaagccggcaaaccccgcgcaaacccaaaaagaacaccaaaacagaaggaggaaagagaaggacccaaacaacacaggggcagggggcgaccccgcacaggaaaagccagaaacgacaccccaaaacgaaacaaaccaccagacggaagccaccaaaacgaaagagcagaacacaagagcagaacacaagaaaaagaaaacgacgagacagagccgccgcgcccaggcggaggcagggcacgaccggccacgcaagcccacccccgggcacaccacccgccagcccccgaaagcgggacacaggcgcccaccaccacgccggcaacgaagagagacggggcaccagagccaggaggccaacccgacccggaccaccgccggccccaaaggcgggaacaggccgaggcaccacacccggccgaacgacaaaaaagaagcagagaaaagaaaaagaaaacaaaggaagaaaaaacaaacgcaaagaaaagggacacaaaaggcccaccagccacagaaaggcgaggaggaggaagagggcggccggccaggggggcagaggcgaagaaaacaagaaagggaccggcacaccaggacaaaccacgacgggcaacaaggaaaggagcaggaaaagcaacagagaagagccacagggaaagaaaccaacaccgagaaaagcagaaagaaaggaaaggagaaaaagagaaaaaaaggaaaggaacgacgcaggagaaaacaggaaagaaggcaaaaacccagacgaggaggcgcaagaaaagaggagaagaaggacgaaggggccagcgaggaaaaaaaaaacacaacgccgaaaaagaaccagaacagggaaagaccaaaacaaggaaaagaaaagaaaacaaccagaaccaaaaaacacacggaaccaaaaacaccggaccaacacacaaagaaagaaaggaaaagaaagcgcaacagaacaacaagacaaaagaggacgagaaagggggcaccagagcaaaacaggaggaagaagacccgaaaaagaaaggcggacgggggcacgccgaacccagcacgggaggccaaggcgggggacagaacaggagacgagaccaccggcaacacgggaaaccccgccacaaaaaaaaaaaaaagccaggcggggggggcgccgagccagcaccgggagggaaggcaggagaaggggaacccaggaggcggagcgcaggagcgagacagccacgcacccagccggggaggagcaagacgcggcaaaaaaaaaaaaaaagaaagcgagaaagagggccacaggcccaggcgacgaacccgagccaagagacccccaaccggccccaaagacgagaacaggggaggcacagcaccagcgaaacaaaaggcgacaaacggaggaaaacaaaaaagaagcagcaacacagcagaagaacacaaggagagagccaacgagccgggaaaaagcacacacaaaaagaacagagaacggaagcaaagggggaaaaccacaagcccagcgccccagccaaggcaacaaagagcaaaacagaaaaccaaagaacaaacgccaagaaacaacccgaaccacagagggacagaaacaaaacacagaacacaacggcaaaaagagaacagaaccaagacaacgaggggaagaaagaaaaaagggaaacagaggaaagcaacccaacaacacaaaacccagaaacgaaacacgccacaaaaaagcaagcacaacgagaccaacagaaagcagacaaagaaaggacacagaaagaggaaaaggaacagggcaaacaacacacgagcccagcccaacagggcaagaagaagaagaaaagcagccccaaacagaaccaaaaaacagagggggcagacacaaaggaaaagagacaggagaaaccacagcgcaaagccggcacaaaaacaacaacacagaaaaaccgcacacgccaaaccagacagcacgcagcagaagagacggaagggaggccagccccgaagaaccacccggggcccacacagccccgaagcaaaacacggaggacaggaaaaaagacccaagcagggaagccaagcgaaacgccagccaccaggaacacagcagggagggaacccgcagcacagcgcacccgacaacgcacccaagaccaagccacccagcacggcagacgcccacggcgccaaggaccaagggacgccaccaggccgcagccacggccaaacaacccggcccagagagagagagaagaaaggaaagaaccgcccgcagaggaaccccgcagcacagaggaaaagagagagccagagccaccgaagagagccgggcgggcaaaaaacgaagcacggagggaccagaaaggcaaacacacccacaagaccgcccacccaccggggagcaccagcccacaagagggaagcacggcaacacacagacaacggacagaaaagggacacaggaggaggacccccaccccaggcagacaggaggaaaccagaaaaacgaaacaggcgccaggccagagagccacaagaggggccccaggaacagaaaacgagacagaaaacaagaagcaagaagaagacgacccaaaacaccgaccgcaaccgccccagggcgcaggggcgaacagaggccccgagaagcaaaccgcacagggccaccacgcccaggcgaggacacgaaaagccagaaaccccaaaaccaaaacagcaggaaaaggaaggaggagggcaagcagagaaggagccccacagagaaagagaaggaaccccgacacagaacgaagcagagggaaccccagaagaaagcagaaaagaaccagagagggacgaaaccacagggacgcaaggacaaaagggggaaaaggagagagcacacaaaagaaaccaaaagcaaagcaagacaaaaagaaaaggaaaagcagcaggcggaccggacaccgcaaagaaaaaaccggaaacaccagaggcgaagagaagaaacaaaaaaaacaggcgccgagaaacacagcgaggaggggcaagcaggcaaaaaagaaaaaggagggacaacagagacaggacgaaaaacaaaacacggaaagcccaaaaaaggaaagggaaagcgaagaaggaggagacaacccaagcaaaaggggcaacaaaaagcagaacaagaggacaggaagagggccacacgaaacagcaggaacaaaggagagccagacaagaagaacggaagagggccaaagaagggcagggagcaaagacggagcagaggagagaaagaaaaaagacgaaacacaaaagcaaaaaaaaccgacacaagagaaggcgccacagaaggaacccaagagcagagagcgggcaagaacaacagcgcagaaaaccagcacaaccaaaccagaccaccaaccgcaggcgagccagggagccgacaaaaaaggacaaagaagagaaggcaaaaaaaaaaaaaaggaaagcaaagcacacaaggaccaagaaagcccggagaggaaaaaaagagaccgaaaaacaagaagaaagaagaagaacagccacagcaaaagcccaaaaaaaacccaaagagacacagaaaaagaaaaaaaacgagaaaggacacagcggcccaggcggaggcagggggaccagcaacgcaaccccaccgcagaccaaacgacccccacccagcccccaagagcgagacacaggccacaccaccagccagcaagaaggagaggggcacaggcccaggcggccaaacccgagcgaaggaccgccgccggcccccaaaggccagaacaaaggagccaccaccccagccaccaaaaaaggaaaacgagcacaaaagagagggaaaagcgcgcagaagcccaggaacagcgggaagggaaaacgaaacacaacaaacacagcaaaaaagacagccacgaagccaagcacgaggcccagagagaaaagaaacacagcccgcccagggaccaaaccaagaagaaagagaacaaagaaacgaaggaaagaggggcaaggaggagaggaaacccacgaggagacacagaacagaaagaagaaagcagggacgaacagcagaacggagacacaggcaagggaacagcaagacaaaggccaaggggaggcacgagagaaagagaccagaaagcagcagaggaagagagagaagaaaggagagagagagagagcgggggaccaggaaacacaaagaggagagggcaagaggaccgacaacaacagacgacaaaaaagcgcacgagagagaagacagacaaagggggcaaggaaaacaggaagaagcaggaaaacagaacaaccagggaaagaaaagggcggacggccagcagggaggaaggagaaggaggacgggaagcgaagagaacaacagcgacagaagagcaggggggagagagagcaagaggcaacaaaaggccagcgcgggcaaagggagggagaaaccagaaaaggggcgaaggaagagacaccacaggagagaaaagagaagggaggaaagcggcaagaaaggaaagggagaaggcagggaacggcacaagagagaaaaaggcaaagagaagaggagaggagaagaaggcaaggacaaaagcagggagaaagaaccaacaaaagacgaggagagaacaaaaggagggccccagaggacaagggaagaagaaagggcaagaaggaagacaggcaaccgcaagacgaagacgagcaagagaagccgggagaccagacgcaaagggaaagacagagggagggggaaagacgagggagaaaacaagagagaaggagggagagggaacagcaaaaaaacaaggaacaagagaaggcacaacggaaagcaggagcaagaagggaggagaaaaaacagagcgaaggagacaagacagcggggcgaagggaaaccagaggcggaaaaaaagaaaaggggggacggcaggcgacaagaagcagggccagcacgccgggagggcccaggcgcccaccaggcacaaggggaagcagcggagaaagcacagagagagaggaagcaagggggggaggaaggccaaccaaaaccagccgagggaacaaagaggagaaccaccagggcaagcaaggcaggcaaaacgcggaaagaacaggggacaggcagggaaaaaagaagggagcgagaggggagagaacccacagccaggaggaacgagacccaaaggagcaacccgcccccccccccccccacgagccccagggcacccacaagccagggcccaagcgagccccaccgacgaagaacagcagaggagggcgggaaaaggccccacgcacggggcaaaggaagacacggcgaaagacagggcacagccaccagagggcaccggaacaggcccaggagagcgcgggggaacaacaggcggccggagcacaaacccggaacaacccagaagggagcgaccaggggcaaccagcagagaaaccaaccgccaaagggcgaacaaacacgaacaaagaagcccgaagccgccaacacgaaagaacaaaagccacgacggagagagggcaggggagaccgagaaggaggagcacaaagggcgcaagccccccgagacaagagcgccgcacccaggcggaggcagggcagaccagccacgcaacccgccccgggcaagcaaccgcccaaccccgagagcgggaccacaggcacgcaccaccacaccagcaagaaaagagaggggcaccagggccgggcggccgaacccaacccagggaccgccaacccggccccccaaggcgggaacaggcggagccacgcgcccagcagcgcagaccgagaaggcgagcgcccagaagggcggagcacccagaacagaaagaccgggaccaagggaaaccccacgaggagaccccccgcggcagaagccagaaaggccaacaaggggacagccagaaagcaaggcaaacaagagggcaccaggcaggaaaagaggcacaaagaaaccacgagaaggagagaaaggagcaccagcaccgagaagaagccagcgggggacacacaacagagaggggagacaaacacaaacaagaccaagagaggaaaagaagaaaagcagaaaaaggaaagagagcaagggcgagggagagaggaggagaaagcacacacaccaaggaggaaagaacaaaaagaaaggacagagcagaggagcagaaagagaacacaaaagccgggccgcccggaaaaggaagaagacacaaccagaaaaggagggggagaagagaggaaagaagagaggaagaaaagcacaggaaaggggagaggaagcagagggaaaggaaccaggaaacagaccaggagaaaacaacgcggcaagagcagcagcgggagcacagcagccagccaggacaggcagagaaccgagaggaaagaggcgggagcagaaaacacggcagaggggaggaagggagaaagagacaaagccgccgcacccaggcggaggcagggcacgacggccacgcagccccacccccaggcaagcaacccgcccacccgaaagcgggacacaggcgcggccaccagcccagcaagaagaaggacggggcacggagccaggaggcgaccaacccagaccacccgcccagcccccaaaggcgggaacaagggagccacgcgccccaccgaaggagaaagagacaggaacaaacgagaagggaagacaaaccagagggggcaaggagaaaagccagggaagccccaaaagggggagcggggccggggcgggaaaggagcgaaggcacgaggggagccaaaagcccacaggcagcaggagagaagaaacgaacgagagagcgcccagggcacagggcccaaccaccagaggaacaaaaaaacaaggaagagaggcagggaggaaagaagcacaccaacaggaaagaaagcaggaaaaaagagaacgcaaccagcaaaaaaagcagaagccacacacgaagcgacggaagccagacacagccaagaaagagcaaaaaaaaaacacgcaggcacacaggaaagacgaacggccaccacacaagcgagaagaaaaaacacaaaggaggaacagaacgaaaaaccccacggaaagggaagaggcaaaagcagaaacccagcagaaaggaaaaacacccagagaaacaacagaagaagggcagaaagaccggacaggagagggaaaagaccacagaccgaaggggaggccaaacgggacgaggagaacaaagagaaaagggaagggaaaccaaagcaacagaacaccagaacaaacccccgacccaacacccccagccgggaagcccaccagaccaagcgaaaaaagagaaaaggccacccacgccagcgaaccacaccacccccagcacccaacaggcaaaaggccaccacagccgcgaaaccaggcgaaccagaccagcaacgacacaccgaaagagagagagcaccgcgccaggccgcgagggcggacaagcacgcaggggaccccggccaagcaacgccagcccgagagcgggacacaggcaacaccacccagcaaaaaacaagaaagaagggccacgagcccaggcggccaaaccggcccaagcacccccccagcccccaaaagcgggaaacaggggcaccaccggcacgccaaggcagcaaacccaccaaagaggcaccaagaacaaccgcccaaaacgcaacaagccaacgaaagaacgaacagaaaaaccagccagccaggaagccaaacacaggaaagaaccaggcagaaacaggcacaggcacacagcaacaccacccgggaaggcaaaggagcaagacaggaaaaagaggggcggccagaaaacacgagacacgaaagagaaacagcccaaaaacaaacaacaaaaagaaaaacacagccaaagcggacaaaaaaaccagagaaggcccagggccgaagccagcacggaacacagagacgcacaaaagaagggccaaaacaaaccaccagaagccccacgagccagaaagacaccacaccccagagcagcgcaccgcccagagaaggaaaagggaggaaacacaacccgagcacgcaaggacagacagaaacaaccaaaagcaggacaggggacaaccagcaccgcaaagagacaaggggccaggggccacgcaaacaagacagcagaaaacccaagcagaaccaacaccgcacgggggcagaaaaaaggaagacgggcaaaaagaaaagaacgcagggcgaaaagcacagccccccccgaaagcaggcccaaaacccccaggccgcaccaacaagaccccagcggcacggccccacgcaaaccagcaccgaggagagaagaccaaaacgacccaacgaccgaggaggcgcacagggcaaacgcagggaaaaaaacagaacacaagaggaaaaaacacaaaagacagcaaaggcacggaccaagaagccgagccccacaaagccaacaaaaaaagaccacaacaagggaaaaaaaagcacagggcaaaacaaaaacagcaaaaaaacacagaagagaacaccgaaagaagcacgcaaacaacacgaaacagaagcaacagaagcagcaaggaggagcagccaaaaaaacagacagcgaacgccgaaaaaagaaacaccgagggaaccaaggcacaaaaaggccacaggaacaaagaaagaaggggaaaaaagaagacacggaaccaaaggggaagagagcagcgcgggaggagcaggaaagccaaggacaagaagacagcaaaagagcagagaggcggggcccgccgaacccaggacgggaggccgagggggggacacgagcccaggagcaagaccagccgagaaacaggcaaaacccaccacaaaaaaaaaaaaaaaaaaaaaaaaaaaagcgggcaggggggcacgagcccagccacaggagacgagggggaagacaccaagcccagggaggcaaggcgcaggaaccaggcaaccgaggagacccagaaaaaaaaaaaaaaaaaaaaaaaaaaaaaaaaaaaaaaaagaacagaaagcgcccgaagagggagaggacagggaaaacagcaagagcagaagacgaaaggggaaaggagggagaaagggcaagggcgccacaggaagcaggaaaaaccggacaagggaaagaagggagaaaagaaaacacgagaagggaccaaagaggggggaaagggaggacagagaaaaaagagacacgggaaaggaagggggaaaagaaagcgaacaccgggacaaagggaagaaaagggagggaggaggaacgggacaaagagggagaagaagaaaagggaggcagccagaaaagcaaaggccagccccagaaagcaaaaagaagagagaaagggaggagggaacagcggccccacgcagaacgggcccgagagggggagcgccaggagccagaccacccggaacccacagaggcacgacagacccacccgcaaccccgccacagcgcaaagcccagaaggcacaagagccacagaggaaaccggccaaaaaacagcaggaaagaaccgcccagccaagcccccagaccaaaaccacaccagcacaggccggaacaaggcaacaacgagacaacccgccgcgggggaaggcgagcagagcccaggcgcacggcaagcgggaagaagagccgaaagacagcgcccccgggggcacagaaggaagcagaaaaacaggaaaaaaggcaggaggcacacaaaaggaagaaccccaacccggccccaaaaaagcaccaaagaacaaggagaacgacccaaaggaaccaaaaaagacaacaaacacacacacacaaagaaaaggcaaagaaaaagagaaagaacaagaagcgggaagaaccacaaaaaaccaaaaaccacacagaagacagaaggcgccgaggagacaagaacagaccaaagcccgaggaagaaggccccagggcacagaccgagaaaaagaaagaggaggcccaagcagagggaagagggggggagggacaaaggcacagaacaggcacacaaaaaccgagcacaacgaaccccagccgagcaaggggaacagcagggaagagcaaagccgaaccaaaaccagagcacaaaacacaacaggcacgaggggcgaagaggggaacaaaaaacgaaacagagaggaggccaaagacagaaaagcagagcagggcaacgaagacgagaagaacaggcaggaaaaaaacaaaaaaccacaacaaaggcaaaagaaaaacacaggcaccaacccagaaacaccgcaaaacgaaaccagccaagacaagcccccccccagccccggcaacaccccacgcggaggacacggaaccccagaggaaacaacagaaccggacgggacaccagccaaacccaaggcacgccgagcaggcagaacccagacgaaaaacccaaagagaagacacaccacaggaaccagcccgagggaccggggcccacggcgggaaaggcgcggaacacagggacacaacgagacccgcggaagaccaggagggagggacaaggaacccaaagaggaacaccaacgcaacaggcacaacaccaaaacagagaaagaccagcccacaccccaacaacgcggggcgaaagaccacccaagggggaggggaaccaggggagcacccaagaagacaagaacaaagcacccaaaagaggacaaggcgggcagaaagccggcaccccgccgcgggggcaaacgcagccacgggccaaagaaacggccagaacaaaggcaagaaaaacagcaccagacaacagaaaccagaggaagcccggcaagcgacaaccaggaagacagcacccagacggggagaggcgagggcaccgggacaccacaaccaggacaccaagccacaaacagaaaaaggaagagcaaaaccacacacccccacacaaacaccagaacaaaaaccaagcaagcaaagcaggaaaaggaacaaaaaaagcaaacccaaaacaacaccagggaacgcgaacgaaagcgggaaggaaagccgaaaagaaaaccaggaccgaaccgacgacaagacgcacaaccggaccacccaacaggcacacaaaaacagaaacaaagaagaagcaggaagacaagagagaaaacaaaaaccacgaccaaacgaagaggacacgcacccaaacaacaccaaaaccaaccccaaaagaagcccagagagggcaccagagagggagaaggggagcccaagaagggagagaaacaaaacgggagacaagaagcaaagaaaggaacaacagagacccggcagggaaagccacaacgcccgaggggaaggccaagaacccacaaaagagacgaagcccaagaagcccgagcaacagaagagacagaagaggcaacaaaagaggcagagcgggagaaaaacagagcggcgcgagacaccaacggcccacgcacagccccaccaagaaggaaacaacacaaaaggcagcaagcacaccgcccaaggaacacgaagcaagaagaacagagcacagaaaaccaccacacaggaaaaaggcaaccaggaaaagggaacacacaacaacaaaaaacccagcaacaaaggaaagaaagcccagaggggaaaaaggcaaagagcaccaccaccacaaaaccaaaacccagccagggcaaaagcagaaaaagaagaaaagagggaaaaagaaaacgccaacacagagaaaacagacagcagaagaaaaccaggaacccaccaaaaaacacagaaaaaaggaaaaaaggcagggacaagaaacaaaaacaacgaagaagcaacagacacaaaaagaggcaggaaagcacaaaaaagagcaaaaaccaaaaacacacaagacccaacaaaaacgaaaacagccagaaaaaaaggaagaccaaaaaagaagagaaacgagaagaaaggcagccccaaagagagagagaacaccagcagaaaagaaaggacaggcgacaaaaagaaggaaaacagaggcccagaagagcaaagccaagagaaaggacagacggaggagcacaccgaaagacaacaccaagaaaaagaagcgggaggaaagaaagacaaaggggaacacagaagccagaagagaccacaccacagcaagacaacaaaagacaagaacaacgggaaagggaaaccaacaaagaggaacaacagaaccaaggaagaaaaaacaaagccacccagccaaaaaaaacgaccacccgcccaaaaacagcacaaaaaaagaaaaagccgaaggaaaggaaaaacaaagagaaacgagaggcagaagagaacacaaaaagcaaaaccagaaagaaaaaaggaacaggacccaaaacaaaaacgcccaaaagaaccaaaggaaaaagcaaccacacccgggagaaacagagacaaagacaacggaaaaaacaaaaaaaccacgaaccaaaaaaagaaagaaaacaaaaggacaaaggcaccccaaaggaaacacagaggcaagaaaacgaaaaagcaagaaggggaaagcaaacaaagcaccacgagaaggggagcgaagaaagacacaccaggccaccagcacgagggacaaaagaaagaaaaaaccacacaaagaccaacaacagaacaacacaagcaaaaagaaagaaccaaagcaaacaaggaaggaaagcaaaggaacaaaaggaaacacaggaagaaaaagaacacggccaacaacagcaggagaaccaaaaacaggaggggaaaaacaaaagaggagggaaggaacacaaacacaaaaaagagagcaaaagacacaaaaggacaaaaaacggggaaacagacaccaaaacagagagaggagaggaacaaaaaggggagagagaacaaaaagggaagaggaaaacaacgagaaggggacacagggaacacggaaaaccgaacaaaccaagggcaagagaaaaacccaaaggacacgaaaaaaacaagagaaagaacaaacaaccaaaaaagcacaacaaaggaggggacaacacaagagaaaccagagaaaacggaaaaaaaaggaggagaaacaaaaaaagaagcaagaaaaaagagaaccagaaaaggggaacaagaaggaagccaggggggagacacgcgcgcgcgcacacacacacacagaaaaacaaaaagaggagggaacacacacacaccaaccaaaacaaagggaacaaaagaacacacacacaagaaaaacaaaaagaggggcgggggaaaacacacacacaccaaccaaaacaacggaaaggaacagccagaagcgcgaagaaaccaaagcgggggagcaaaaacagggaaaaaaagaccagagaaccagcaaagccacaggaagcaggacaaagccagcaaagccacaaagccaggcaaacgcaaggaaacagcaaaaacccacaaacagggccgacggccacccaggagggggcagcaggagggacggcagaggcagagaaaacgacgacaaacaagaaacagcaagcaaacaggggcaggagcacgaaacaaagaccaacaacaagaaaggggaaaaaagcaaaagagacgcggacacagaaaaacaaacaagcgaaagggaacacgaaaagaccagccgacgcgcgaaagaaggaggaggacagaacaaagaaagaagaaaggaggcgagcaacagggacaaagagcaaaccacaacagaagaaagaggaagaggaggagagcaggcagaacaacccgaggaaaacaacagggaaaagaagacgaggggaaagcaagaagacacaaagaagcgggggcaaacaaaaggaggccaggaaccaaggaccacacaacgaacaaaaagacggggaagagaaaaaacccaaacagggaaccagaaacaccacaagggaccgagcaacaggacggaccggcaccgcaacgcacagggaagagaagcgggggaagacacccaaaaggcaccaaaggagagggagagcgaaaaagagagagacaccagaaaacaaaaaaccaacgggaaagggcacaaccaaagaaagcaacacaggaacaacagagacgaaacaaccaaagccacaggagagacgagaaaaaacagaacaccgcaaagcaaccggagcaccccgagacagagccaccagccaggcggaggcaggacaggaccagccagcaccccgcccccaggcaaggaccccgcccagcacccccacccaagaggggaacgggggcgccaccagcccggcaggcaagagagacggggcaccagggccaggcggcgaacccgacccaaggaccacgccggccccgaaggcgggagcaggagagccaccagcccggccccaaaaagcaaaaacaaaaagggagaaaagcaaacaaaaaggggagaaggaagagcaaccaaggaaaagggcggaaaaagagcgaagaaggagggaaaagcacgaaaaggcagagaaaaaacggaaacagcaagaggagcgagcagggaggcaaaggaggaaagcgacaaaaaaaagccgcacaacaaccaaaaaaacaacaaaaaggaaggaaaaaccacaagccaaaaacgaacgcaaaacagagcaaccgggaacccccaggcacagccaacagcgggccaggccgacacagaccacaagcaagagcaagcagagcaaaaaccaaagaaaccgcgaagggcagggaaaggagaggggccagaccggaaaagcgcggcgagaaaaggcccagcacaaccacgaaaagggcagaagcacagcagcaccagcaaagacccaaagaacaccaccaacgccccagccgccgaaccaaaccaacaaaagagcaccaccacccaagcggaaaaaaccagcaagaaaagaaaagaggaaggacggcaggacagcaggaagaacacaaaggaggaaaagggcagggagaaaaaccacaaacaaagagggcagcagggagggcagcgaggaaaggggagaggggaagaccagggaggaaaacagggagggccacagacgagcaaagagcgccacagcaggggaaggacaaacaaaacccaggccccaccaagacagggggagcaagacaccaccaagaagggagaacaaaccagaaaaccagggcacacaggcaggaacccaaagcaaaacaacccaacaacaacacacgggcaccgggagaccacaaaagacaaccccaagaccggaccccagaagaggagagaaaaagggccagccccggccagaggagaacgaaggaggcacagaacagcaaggcccaaccaaaaagacaaacccacaacccagcacacgagacagagcgccgcgcccaggcggaggcagggcggacggccacacaagcccacccccgggcacgccacccgcccagccccgagagcgggacacaggcgcccgacaccacgcccggcaagaagagagacagggcaccagagccaggagaccgacccgacccggaccgccgccggcccccaaaagcgggaacaggggagccaccacgcccaaccagcacacgaaccaacaggaaaccaaggcacaccagagaagaagagcacaaaaagacaaacaacagggaaagagacagacaagaagaagaagcgacagcagcgcacggaaccgccgacccaggaggagcgagccagggaaagaacacgaaccgacgaaggaaaaaggccggacaacaaagacgagaaccaaagaacccggcgaggagggccaagaagaaagaaaaagagggcaaacaaagcacgaagacaaaaagaaggcccaaagcgaggggccagcgccccagggacggaagggagcgacacgagagagagccccaagacaacagcggaccgcaacaacccaggcagaagcagcacaggaacagacacaagacggcaacagcaaaagcaggcagaagaaaaaagaaaggaccagaaaacgcacgggaggaagaagggcccaaaaggcagaaaaagggcaaagacacggaccaagaagccaacaggaagcaagaaccaaaacgaagggaaagccacagagaacggaaaaaagaagaccagaaacgcacaaaagagcagaacaagagaacagaaaacagcacaaacgaacacagcagccaaaagaaaagagaaagcaccaggacaacaagaaggacccacaggaaaagaagagaagacccgagaagggccccaggggggcacaaagacaaacagaaaacaaaaacagcaaaccgggaagcccgaagggaaaaagagagaccaacagagaacaacaacgggaaccacggggggggcaaggagacggaaggggaagaaaggggaaagagcagaggggagacgcagagaaagagcacgaacagaaagcgaagaaacaaagaccccgaagaaagcaaggaaagaaagaaggggaggaacggaaacagaagaaagggagagaaaaaagggggagaggcagggacaaaagacagcgaaggcaaaaagaacgagagcaaagaaaaaagacagcgaagagaaaaacaagaagaacccagaaaaacggccagaaaacagaagggaaggaggagcaaggggaagcagggagagagagaaaagaggacccaggccaaagagacaccagagaagggaccaagaggcaaaacacaacaagccaagccacagaaacgcggggcaaaagcaaggggaaccgcggccagcacaaacaaggcagggcaccaaacgcacccaccaacaccaacccgaggaaagaaaaaaaaaaaaaagaaaaaggcaagcggaagcagaagcagaaaaaacaacaaaacgagcgagaagaacagggacaaaaaggaagcgaaaagcacggcacaccagagaagacgaaggaaagcgggcagggaggaaagcgaacagcgccaggaacacaacgaaagaagacccaccaacagagagacaggagacagacacgagaagaagagagcgcaaaggaaaacaacaggcaggggggaaaaccaccagagcgacagccaagaccccgagagaagggggggggagaggagccaccgcacccagcggaggcagggcacaacggccacgcaacccgcccccaagcaagcgacccgcccagccccgggagcgggaaaggcgcgcaccaccacgcccagcaagaagagagaggggcaccagggcaggcggccaaacccccaccggacgcccgccggcccgcaaaggcgggaacaggcggagccaccagcccggccaaagggaagcaaaggacaaaaaaaaggcaacaagaaaaccaaagagagccaacaaagacaggaagcgcaacgaagacaaaagacgcagggaaaagacaaaggcaagacaggccaggcacggggccacaccgaacccagcacggaaggccgagggggaggacgcgagccaggagcgagaccagccgggcaacagggaaaccccaccacaaaaaaacaaaaaagccggggggggcacacaccgagcccagcaccggaggcgagggggaggacacggagccggggaagcaaggcgcaggaccagacacaccacgcacccagcggggacacagaagacccgccaaaaaaaacaaaaaaaagacaaaaaggcaagaagaggaaacagagagaaacaaagacaaaggcgacgacaaacccaaggcacccgcaaaagacaaagaaaaaccaaaaccgacaagagagaacccacaacaacggggggcaagaaaagacaacagaacaaaaccaagcaacaccagaaaaaagaccaaaacaaaacaaaacaccccacaggaagaggggcccaaaaagagacaacaaaggaaaaaaaaccgaaccaaccagaaaacagagcaaacaaaaaaaaagccgcagggaaaccacccaagaagagcgcggaccagagaggcagggcacagacacaaccacgcagcccaaccccgggcaagcaaccccgccaagcccccagagcgggaccaccaggcacgccacagccggcaaaagagggacaaaggcgggcccagggggcaaaccgggccaagcgccgccggcccgaaaggcgggaaaggcagagccacgccccagccaagggacagaaagaggaaaaggagccggaccaaaagaagacccgcccaaaaaaggaagaccaagaacacacagcgcgcgcggggggagagagagagagagcaaagggagaaaaaaagacaaaggaaaggaaagaaaccacccacgacgccaaagaaaggagaagcacggcaagaggaagaaaggaaaaacgagagaaagaaggaagggagaagagagaaaggcaagacaagaggaacacggcaagagcaggcaaaaggagccacggaagagcagaaacaaggacagcaaagagcaaagcccccccaccacagcccccccccacccaagcaaccgaaagcagcaaaaggaagagggcaaaacggagcagcaaaaagaaaaaagaaacaaaacaaaagacccaaagaaccgaggccaggaagagagaggggaagcaaacaaagggagagggcagagaaagagaggaggagccgggcaacagacaaaaccgccacaaaaaaaaaacaaaagagcggccaggggcagcgccgaccccagccacccagggacgagggggaggagggaggagccagccgggaggcgaggcgcaggagccgagacagagccaggcgacacagccagacccgcccaaaaaaaacaggagaaaaaaggaaaggagaagaagacagaaggcaaaggcaaggaaagagaagagaacagaaaggacgggcgaaggaagaaaaaaaaacgaccgacaaccaccgaagaaaaggggagggcagaaggcgcaggcgcaaaacaaccaaaaaacaaagaaacagcagaacagcacgaagagccgcaaaggccccgaccgacagggagggcaagggcacaggaaaggggacagggaagaaggcaccggaaaccagaaaccccacagggaaaagaaggacagaagggcgacaccagggcaccacagcacgcacgagggaccaaaacccgaacacccgaaccaacagcaccaggcgacccacaaaacgaaagaccaccgaaacgaaaaaaaagaaagcaagaaaaaacagaaaccagaaggaagagaggcaagagaaaaaggcaagaagagaaagggagaagaaaagacaaagaaacaaaagaagacgccaccccagaagaaaccagaagacagggaagccacgacacagcacagaaaaaaaaccggaaagacgagaagaggacgagggagaaagaaaggaccaccaagagaagaagaggaccagacacagaacaggaaagaaaaagaaaaggaaaagcaccaagcacacaagaaccacccggagagaaaaagaagaagcaaaagaaccaaaaccggcaaaaaacaaaagaacaaaccacagcacaggcgaaaagacaagacaagaaaacacgaggcgcagaacgcggacaccaccaaaagagagaacaacaaaggaaaaaccgcaaagaagagacagagggaggacaagaagaagggccaggaggagccgcaaaaaccccagccaagaaaaagcacagaaggaaaagcgcacgacaggaaccgaaccccaaagagccgcccacagaaaagcaaaacagcacccacaagcccgaaagacgaccaggaaaaagacaccaaagaagcaaggagagacaaaaaaacaaaacaaaaacaaagaagggccagaagagcccaaggaaaacagacagccacacaaaagacggagcaccgaaaacaggggaaaaaggcaaagcccagccccccagaacacccgaggggaggcaggcgcagaaaggaaagggcaggccaaacacgagagaaaaaaaaaaaaagcgcggccgaagacagggcgaacgcaggaaaaaaacaaaggaaaaccgacacagaaagaaagaaggaagaaccaaacacacagaaagcaaacagaccaaacaagaacgaaaggaaggacagagcagcaagaaggacagacgagagcaggagggaaaaaaagaacaggccgacgaaacggagccaaaaacaaaaaagagcaacaacaggaacaacaaaaggaagaaaccgccacggcaaaaggagaagccagaggagaagagacaaagcagaagccaaaaaggcaagacgagggaaaccaccccaaacaaacagcaaacgaaaaaaaccaagaaaaacgggccccccacacagaaaagcaaacacaagcacaaggggccgcgaacacaaaaaggaacaaaaaaacgaggaagaaaagcacagcaaacgggcccaaacaaaaaaaccagacagcaaagcacgaaacaaacaaacaaaagccaggaacgaccaaaacggccaaaaacacgcaagacaacagaaaaacagaaaggccaaaaacacaagagagggcccaacagaacaagaaagacgaaagaaaggcagagacgcgggaaagacccccaaaccaagaacaccggaacaagccaaagaaaaaaaaaaaacaagaggacaggaggaagagggaaacggcccaaaaaggacgcgaaccaaaaagagaagaagaaacaaaggaccacgcgaaaagccagacagaagagaaacacagaggagaagcagagacgaagaaggcagcccagcgcaggggcggcccccaagaagaaaacgagcacagggaggcacacagaacccacaagagacaaaaccagcgggagaacacagggcccaccaacccaaaagaaccaagaccacaggcagagccgaacacccagagcagcagaaaaacgagaaaaggcccccaccaccccccccccccccaccgcggcggacaaccgaaagaaaaggaggcaagacccggcccaaaacacagcagaggaaacagacaagagggaggccagagacaggaagcaccagggaccccccacccccaccaccagaaaggcccagggaaagccacaggcccaaacaacgcgagacagaagcaacacaacacgagacagagggcccagggaaagcagcaccagggggcccgccccccccagaccccaagaggaaaagaaaaggaacaaaaccccccgagaccgaacaccagccccacccgacaacaaaaggaggaggcaacgaagccagcagcgcggaaaagacccgacggaaggcacggacgggaaacccagaacacgacagaaagccacagcgggcaaccgagggaaaaccgaacgagccaaggaggaccggagcgcaccggggagaaccacaagagcgagaagaccgccgagaggaggcaaaagccgcgggagcggggccgccaagcccgagagacgggccaaaacagccagagacaaagcgaaggggaaccaagagagggggaggcagaagaaaaaccccggaaaaaacacaacaaaagcccgaacaccagggccaaaagccaagcaggcaacgaggagacaagccaaaaggacacccaaccaaaacccccaaccaaccaagaacaaaacagagaaaagaggaacggacaggaaaccacaaaaaccgaccacaaccagaaagggggggcaagagcaaacagaggaaaggagagagagaagccaacaacacccacagcagacacagcccagaaaaaaccaggagaaacggccacaagaaagagagcaggcaagaacacggccaccaaaacagacaccaacccaaaaggaaggaaggaaacacaaaggagagaaagccagagaaaacacagaacacagagacaccaacacgaaacagacgggggaaaaagcaccaaccagcagcagccggaaccacacaagaacaacagggggggcgcacgggaaggagaagaagggaccgggggccagaagggccacccagggggaaacgcacggaccaaggacacgggggaacaggcccgggaagcaaaggaagagacaggcacagaacagaacgggaaggcaccagcgcagaagaaaccaaccccagagagaaaggggaaaaagaagaaaaaggacccaggagccacacccgggcagacccagagagaaaaacagagacaaaaaaccgcaaaagccaagcagcagaaagcaaaaacaggaaaaccaaagcccccagcaagggaaggagcccaaaaagaaaacagcaacgaaaaagaaacaaacagaagaacaggccaagggaaaggaggaaaaaaagacacagggccacgagaccagaaacaggaaaaacaaaaaggagaacagaaggcgcagagagggaggggggggagaggaggaggagagggggacgaaagggacagcacggggacggagacggaacaggcgacgaaggggcagaccaaaaacacaggaagaagcaacaacaacacacaagagcaaaaagggaaaaaaaaaaggcgggcgaccaagcagccagggcagacacaggaagagagagcacgggaaggcgagagaaaggacacaggaccaaggaacagagaaagaaaaaaaaagcaaaaggaacaggaggaagaccccaaaaaagcaagaagaaccgaccacaaaaaacaaacaacaagcagaaaaacgaacaacccagacccccccagagaccagagcggaaccaacaaaaaacacccagggaaaaaaaaaaagcaccaaagagaaagaaaagagaaaaaggagagaaacaacacaaagcaaagaaaaaaagaaaaaaaacgaaaagcaacaaaaaccagaacggacaaacaaaagcagaggaagacggcaaaacaggaaaaaaacggagaaaaagacaaacacaacagaggaaggcaaaaaagacaaggaagaagagaacaaccaaagaaaaaagggaaggaagaaaaagaaaagagccaagaaaagaaacaaaaaggcaaaagaaaaacagaaggaaaaggaaagcaggcaaagacaaagaacaagagccggaaaaagggaacagcggccaaaggggcaaagaccaacggaagcgagagaacagacaaccggacggccacaaaaagcaaggcaagaagaaaaagaggggaacggggaggaaagaagcaacaaacaaagcaagaaacggaccgaagaaagcagagacacggggacagagaaaagaaagggagaaagagagagagaacgaaccccagggaaagggggaggaagagcacgagaaaagcagcgacacagggggaacaagagcgcaacagcaaaaggagaaagaggcaacacacacaaacacacagaaaaacagggaacacccaccaaaaacgaaaccgaaacggcccaaacaaaaccgagcaccaaaagagcacaggagaaaaccacacgacccacaaacaggcacagcaaaagcagggcacaacacagacggccccaaaggaaaaaacccaaaaaagccaccagcagaagccacacccagaaagacccacccggccccagcgccgcccaccacaaaaaaaaaacagaacaaaaccaaaaacagcacaaaggggaaacgaaagccgccagggccgaacagcgaacaggcgggagcacggccagcacccgaccacaacacgacagggggcaagccaccgccggcgagagcaaacgaagacagcagaaaagaaagaaaaaacgcaggagcaaacacagcaggaagagggacacaaccaaccacaaaacccacagagggcgagaaagacaccgccgaggcaaggagcaaacggccaagcacaaaaaaaaaaaagaaaaagacccaagcaggcaaaggaaagaaacaaggaaggaaacgggcccacccaagaacagggagcaggaccaaaaggaaaaacacccaaaccaagagccacagcccaagacagaaagggaacacaaccaaagcaaaacacgaacaagagagggaacaaagacacaccagccggaaaagacagacaaacaaccaacagcagaacaacaacccaaaccgggaaaaaccaccacacacacagcgcacaagggacaagagcccacaaaacaaaaagagcagggggcacccagcccaaggagagcaagccgccaaaaaacacagaccacaccaagggccccaccaagggaaagaacgcacgagacaaacagaccagagacacaccacaaaagaaacggccagggcggggccacgccgaacccagcaagggaggccaaggcgggcagacacgaggccaggaggagaccagccagccaacaggcaaaaccccaccaccaaaaaacaaaagagccgaggggggacaacccgaacccagccaccaggaggcaaggcaggagaacacgaacccgggaggcggaggcgcaggggccgagaggccacgcacaccagccgggaaacaaaggagaccgccaaaaaaaaaaaaaggaaacacccaagcacccacagcacacacaggagcccaagaaacaaacacagcaggaacccacaacaccaaccacgcaccacacccccaagacaacagaacaaccaagaaaaccacccccgaaccccaagaccacccccccacaaaacgcgaccccacccaaggacaaccagaaaccaaccagcagcggaccaggagcaaaaaaccgccgagccaggagaacaccaccaggcgaaaacccaaggaagaagccagaaaaaacacggaaaggcacaacaaaaaagccgagaacagaagcaaaaagagaaaaaagaaaaggcaagaagcacaaaacccgaaaagccaacccacgaaacgaagcaacgagcagccgcgacaaaaggaaaaaacagaaagaaacaggagagcaagagacaacggaaaaagaaaagggggcaagagccaaaaaccagaaggacaaaacaaaaaagcgacaggaccagagagacccagccccacagacacacccagacagagaaagaaccgacgccagggcaaacaggaaaacgcagagcaggcaacccgaacaccaccgggaagaacaaaaccaaagaaaaaaagcaacaaacacgaaagaacacacgcaacaaaagcaagaaaaagcaaagaagcaacaccaaaaggcccaaaacccgccacagggagagaccgacccccggggcggaagccggccaagccagaaagcagcaagcgggagcaagagcccaaaagaagaaggcgagaagggaccacgcacaaagaaagaaaaaagaccagaggaaacagggcaaaagggcgaggcaaacaaaaaggggcaaaaggaagacaagggaaccgcaacgaaccaaacaaaagaaaaaaaaaccaagaaaaacacacaaaggcaggcacgcaaacacaccacacaacgaagaggacccaaagagagaagcgaagccccgaagaagagcagaggacagcaaaccaaccagcccaggaccccacggccacaacaggggaaacaaacaacacaggacacggcgaaaaggaagaaagagagacaaaaagacaacaacggagcagcaacaaacaagaggagaaacaaaacccgcaacaaagaagagagaaacagaacacaacaaagaaaaaaaagaaaggaagcacagaaacaaacgaacgcacaagaaaccaaaaaaaaaagggagaacacggcgaaagaaaagcaaaacagaaagccaga

SEQ ID NO: 304 - RNA, 229 nt, Homo sapiens
ggcaaaacagagaaagggcaggagcacaaaccgcaaagcaggaggacacccgccacaggagggcccaccgaccaggacacgagcgaaggaaaagccacccaggggaggcgagagccgggcaacacgcccgccccgggcggaaacggcaacagccccaggaggcgcccagccgggccgagggaggccagagagcagaagcccagacaaacgaacagacacgcgaagaaag

SEQ ID NO: 305 - RNA, 3489 nt, Homo sapiens
ccccccagagaagaccaagcgacccgcccggggcccaggccaccggaccacgggggagaaggcggccgcgcaccgccagagccccaaagccggcccacaggggccccgagggcgcacggggcagagcgaggaccagacggccgccgacaggagccgggcaggccccgaagcgggagggcaccagcagcccgggcgggcacgagggcaggggggcacgagcacgagcaaggcaggccccccgggaagcaggaccgacccagagcggcccggccagaaggcccgacaggaggccacacaagacggaaggaaacagccaagacgggccaaaaaagcagcagagacccccgggacccgcgcccgccgcagccccccagaagcccacaaggcggaaacagccagcccacccagcaggggggccagagcacaccgggcggagaaagcaaccccgaccacccaagcggggggcaggaggagcccaggcacccgaaccagaaggcaggggccacacgagacccagagggacacaggagcgacaagcaacaggggaagaaggccccagcacagccccaggagcagagggaccggaagggaaagagcacgaacggagcaacacaggcaaccaccggaccgagaaaacgggggccggcacgaccaggccacggggcagaaggaccaggaggggggaggggaggcaggcagagccccgccccaggagcaggaggcaggagcccggcagcccggaaacccagcccgcagccgacggcggcgccccacagacccacggggagcgccagccgcccagcggcgagccgggagggaaggcggcgcggcagggagcgagcccggcgggcaggggcgcaccgcggggcgcggcccgggccgacccggggcccgggagaagaccagcccggagcgcgagacccaagccccagcaagccggagggggacggggggcacccaggggcccagaacacacacggggccccgagcaggccacggcagccaacgggacaggggcaaagagcggcccaacagggagaaccccaagggaaagcgaacccacagagaccgccgaccggccagcccgccagccacccgcgacgagcacccccacccccccccggcgagcccccccccccccgccgaggagccccgggggacacagggcacaccgcagccaccacagcagcggccggggagacccccaggcaggaagggaggggagccccaggggggggcgcagcggcggacccgccacccaaggggggaggggcgccacccaggggcaccaccggggagggagggacaggggagccggcccgccccggagaaagagaccaccagacacagggaacggcccaagacccaaagcaagcagccaaacaagcgaaagccacaaaaagaaaccacagacaccgagcccccgagccccagcggggcagaggcccagaccaggagacggagagcccgggcagggggggcagcaccagggagaagcgccgcggccaggacggccccaggccagcagggcaggagggggaacgcaccccaccagggggaacacgcagggcagcagaaggggaaccgcgccacccgcgagcaccccagaagaaacgaaaagggcagggccagcggggcccccaccaaagcagaaggaacaagccagggcaggcagcggagagggggcccagagcgcgcgggcggcccccacccgcccgcacaccaccgagggaccccgcgcccaccccggcccaccaccgcgcgccccccaacccacagagcacggagcgaggggccacgccccacgggacacaccacgcagcacagcacaggagggggccgcccccacaaaaaagacgccaggcacaagccagaagggcacccaggccaggcagcccagcggggcacccgcagcccacccccccccgccaccaccaggaccaggcgcgcaggaggggggaaaacagggacgccacacggccggaacacagagcagcccagcagccggcgccgcgaggccgcacggcccacgccggcccgcccgcagggccccagcggcgccggggcgggaggggcgccgcggccacccacaaacacggcaaaccgcaaaccaagggcaagcagcggcgccggacccacggcccgcggggggagccagccagcccgcccgcaacacccaacacccccgggccgggcccagccaccagagccgagacggagccgccgcacccaggcggaggcaggggcgacggccacgcaacccaccccggcaagcaaccgccagcccccaagagcggagacaggcggcgcagcacgcccagcaagacagagagacagagcaccagggccaggcggccgaacccgacccagggaccccggcccagcccccaaaggcgaggaagccacaccaacgcggagccaccagcccggcccacccagcgaaacagaaaagcacggaggccaggaaaccagggcgggaacggcaggcacggaggcggagagccaccacggaaacccagggggccccagggagacggcaggggaacagcagggcgcgaacgagcgcagacccagggcaagacagcaaagaggacgccacgggcggagaccagaagcgagaggaagggcggcagggcggcccgaggcgcaaggaaaaccgccggccccccggcacgcggacgggcccgagacagcgccccccccgaccagcgcccccggcccccacgagcaggacgcggcgggccagggcccccagcaggccgcacagacgagagcccgcaggaccgcccagaaaggcagccgagggcgggaggacgacggaaggggggggggggacacaacagccccgacagcagccccccccccgacgcgcgcagcgcaggacagacgagaaaggcggcaccagcggccagcgagaccgaggcggccaagccggcgcccaccgggagccacgccggcaggcagcccccggacgagcgccgggcacacgaacgggggcgacgggagggggccacagcagaccaagacagaagaaaaacccaagcacaagaggaccgcgcagcaccgagggggagggacccccaccgggagggccaaaggagcagcaggggcggggccgcgcaccgcgcacccgccagcccagagaccccacggcagggaggccccaccgcccccgcacagggggaaggccagcccagagcacgcccccccagccgcccagcggaaaggggagaaaggacccaggcggcccagggacacaaccaggacagacccacggagagagggaaccgcgccccaccccagacgccacgcagcacgccgaccacacacgggccacacgggccgaggcaggccccgggagaaggccccgcccccaggagcgccagcaggggagagggcccagcggcccccggagcgggagcggggggccgaaggaagaggaggacaggagaggaggcggggggccggaggacagaagagggcaggcgc

SEQ ID NO: 306 - RNA, 2048 nt, Homo sapiens
ggggaaggccaccaaggaccaacaaaagggccaaagccaaggaaacagcacccacccccaaccgcgagcaacggcacccaaaaccagcccccgaaagccacgccgggccaagcccagcagagcgaagaaccgaagaagggcccccccagaaccaggaccacccacacacaggaccggaggaggcaggagccggcagggagacaagccccagagaccccggcaccagacagccgcaaggccccgccaacgccagcgcggagccacagggacacccaggccccgcaccgcccaggcgcccgagcccgagaaccagagcagggagaaggggggaggggaggaaagggagaggggggccgcacgcccaccacccacccaagcccaccaaaccccccaccaggccccaccgggcccgcagacaccaagcgccggggaggccagaggccagacagcccggagcagaaggacccggaggagcggggccgggcaggcaaggggccggagccgggaggcacaaaacacggcgggaggggaggaaagggggggcaaggcgcccagggaaaaaagcaacccccgcccggccggccagccgagggaaagaaggaacaaggcaccccccccaccccccccggcgcagcgagcgggcggaaagacgcggacgggggagggggggcaggagaaggagagagagaggagcgaccacaaagggacccccccccaaaggggggagggcgagggggaagaagcaggccaaagagacaagccgcaggaaggagcggccaagaagcgcaggcacccggaaaaaaaaaacggcgggcaaaaagcagacgggaggggcccagcggagaaaaaaaaaaaaaaaaaagcgcagccgcaagcaggacgcgaaggggcgagaggaaaggggcggccacagcgccgcaaccacgcccccgaccagcaagccaagcccagcaagaggcaccgcagcagaaaggggcacgagagggggcagaagcagagagccagaaggggggcgggagaggcccagagaaggaccaaggaggagagggccaggcagaggaagggggcaccaagagggaggaggcgaagccgcacacgcagcgcagcacacaggggagggaaagccccaggccccagccccggccccccacccaagagcagagggacccccccggccacaacccacagaccacggcagaaccgccagccccaaacacacaaacccgaacgccgcaacccggagggggcacgcgcgggggcaccccccagaaagaggggacagggagccgaggggagcccaggcacagggaagccaagcggccgggcagacacaacacacaccagagggcgggggggcgcggcggcgggaaggccgcgaggcagggcgggggaaaacaccaaggggcgccgggaggaaaaagcggggagaccagccgggggcccccggggccaggagagacaaaaggagacagaagcaggaaaagcgcaaggagacaagaagggagccccgcgcgcccccccccacgccccgccggcccacggaggaaggggcccagggggccggccgaggccacgcgggcgccggggcacaggcccgggcaggcagccgcccacaccacaacaaccgccaaaacagcccggcgcgcggcggggcggggagacaggcaagcgagggggggggcacgggcccgcccgagccaagggaaggcgccgccagcacgccccaccccccccagcacggcgcgcccgcacaggaaaccaggcccggcgcgcaaaacagggggaaggaccaaaaggaggaacaaggacaaaaaagagacagaaggaaacagagagaccgacacgccgcccacccccaagaccgacggagggggaccagccccccaaaaaaggaaccagaacccagcacgggaggccaacggggcggacagaggcaggagcgagaccagccggccaacagggaaaccccaccacaaaaaaaaaaaaaaaagccaggcaggaggggcgccgaacccagcaccgggaggcgaggcagagaacgcgaaccc

SEQ ID NO: 307 - RNA, 2431 nt, Homo sapiens
agggagccccaggcaaacggaacagaaaacaagaagcaaagccgccaacagacgggaacagcccaaaaaccaccgccgagagcagacgcagggccccgcagcgcaccggcagccccgcccagcagccacaggggcagcgccccggacgagggggaggacgagacaggagcagcaaacaagggcagaaagaggaggccaagagagggcggcggcagcagggccggccagcaaaccgcggagggggaccgggagaggggagaaacaggcccaggcccggagaggccagagaggacggccagggaggacagagaaggaaacgggccccaggcaccacgggcaccgacagaggggggagggaggcagaggcagggccgcaggagaggcagcggcgaaagcgcccaggaggcagcgaggagggaaaccagagagcagccggaggccccaggccaggcaaacacacaaaccgagcacggaaaccaaccagcaaacaaggccaaagggggacaggaagcacgaagaaacggcagggaggaacacaagaccaccggccgagaaacagcagcgccccacccccacgcgcaccaggcccccacagagaccacccgcagagaccacaggcaggaaccgggccgggccacaccgagaggggaacccccaacagcggcacgcgggcaagaggaagcccccgggcggacggcacccggccgaaggcccgcggccaggccagcaaaggcacccgaaccagggggccaccacccaacaacccggcccagcgacggggagaggaccacgcgagaggggaggacagcagcgccccgcgcggcgaggcaaacaaggacccgaacaacgcaggggggggcgccgaacccccacaggcagaaacgaggagccgaccccccaaagcaacgacagccacagagcagaggccacgaaacaacggagaacccaagagacagagaacgaccgagacgagcccccgcccaggcgagacaggggcgacggccaccacaaccccaaccccgggcaaggcccgcccagccccccagagccagaaagggcccgcaccagcccggcaaagaggagagacggggcacacggccaggcggccaaaccccaacccaaggaccagcacggccccgaaggcgggaacaggcggagccacggcccagccaacgacaaagaagaagcagagaaaagaaaggaaagaaaaagacccagcaggaccacgccgaaccgcagggaggccaagggggaggacgcgagccagggggggagggcaagaaccaagacacaccacgcaaccagcggggcaaagaggagacccaccaaaaaaacccacagaaaaaaaaccaaaggaagggacaccaaggccaggaggaggccaagaaggaggagcaagaggaggggggcgcgccagggcggcagcggcagaagaaaagccagagggaccacacagcagagccagggcaagagaacaccaaacccgccccggggccagagcagaggggggggggggggagagggaggagaagcacccccgggaaagaagcgccggaaggaagaaccgcgaggacacaacaaccgcccagcggacagccaggcggcaggccgcggcacggcgaggcggacacaggagaagggcagaggcgcgaaccaccggcgggagaaggagcgcccaccggcagcccggcagccagggcgggccacggcgaggggccgcccgaggagcgccgacaccgggagaaccagcagggccccaagaacagggggacccaccccgggcaggaagcaggagaggaaaaagcagccgaagacagagggccacaccgcaaaaccaccggggccaggccccagggagaaaaggcaacccagaccgggaaggccccgggcgcggaggagcgccgcgcccaggcggaggcagggagcgagcagccacgcaaccccacccccaagcaaggacccgcccagcccaggagcgggaacgggccgccaccagccagcaagaagagagaagggcaccagggccaggcgcccgaacccggcccgggaccacccacccagccccaaaggcgggaacaggcagagccacggccggcggggcggcgagcaggaggacacccgaaggcaaccacaacaaggaacaaacaaccccacacggaacacgccaggcaaggaagacagacgacagaaggacagggaacggaggccccccacgacccccccccaccaaaaaaaaaaaacaaaaaaaaaaaaacagccgagacaccacaccgaagccaacgcacgcgcggcggggaagaaacgcacggccgcggcagcggcggaccccgaggcccgccggccagggaacggaccgagggcgcccagcacggaagggaagcaagacaaaccaggggcccggcggcccccgaaccagcagagcacgggcggg

SEQ ID NO: 308 - RNA, 11540 nt, Homo sapiens
aaaagaaaaggaaaacaagaagagaaaggacagcacacaacccaccccagagaaacacagggaagacacagcaaaaaagaaaggagcagagcaaagaaaggacacaaaaaacgaaacaagcgaagagggagacccaaaaaaacccaacaacagaagcacagaaagggagcaagggcaaggcaacagccagaaaaggagacggaaggcacgaccggacaccgggccagccgcacaagcggcagcccaagacccaaggggaaaagacaaaacaaaaaaaacaggacccagcaggaaagaaaaacgggcaaacagaaagaaggaagaagccaaaaaaaaaaaaaaacagaacaaccagagggaagaggcaggagaaggagaaggagggggacaacagcaaagggaaaagcaagaaggaaaaaaaacccagcgcacagacaaggagcagcccacacaccacaagcacgcgaggagaagagaaaaagagaagacccgagacacggagcgaccggccagcaagcgaggagcaaggcagaaaacgagaaaagaaacgcagcagcagaaaagcaagaggacaagcagcaaaaccgaaagaaccaagggacaaagccaggccagcaaaaaaaaaagacaccgaaaccaaaaacacaccacacaggcaccagacaacccaccaaagcaaaacgcacagagaaccccaggccaaagcaggccaggcagggcgggggcagccccacaaagccccggaaccgcgcagccccagaggagaaggaagaacagccagggacaccaaccaaagggagagcagaaggaagaaaacccgacgcgcacacacagaaaaaacaaaaagcaggaggaaagcagccgacggccagggcaggaggcaggccagaagccgacaacccggaaacccagaacaaccagagggagccgcggagaaaccgacaaaagcagcccgcacgacaaaaaaccaaacaaaccaaaacaaaaaccgccaagaaaaaaaagcgcaaaacaaagcagagaacaaacagaacacggagaggaaaaaaacaaacgagccccacccagaccaaaaacaagaacgggggggagccgggccaggagaagagcccggggagaaggcagcaaagccaggaacaggcgccgacagaggcgagcacaagacccgacgcccgcccccacccaaccagcaggcaaaaaaaaaaaaaaaaaaggcagcaaagaaagaaggcaaagaacgagaaacaaagcgaaaggcaagaaacgaacaacgcgaaggaaaaaaccacaccgccaccagaacaacaaagcaaccaaaaggcaacagagaggcccacccccagaaagagacaaggcgggccaccgggagagccacaccaacaaaacgccacaaaaaaaaaagaaagaaagaaagaaaaagaaagacaaagagccaacaggaaaaggaagagccaaagcccgaagaacggagggggagggaaaagacaaaaaacagagagaaaaaaaccagagaccagaaaagaagaggagaaaagaacacacaaaaaaaagcaggaaggaaagagcaaaaggaccagggagcagcgaacgaaagaaagaggaaagagaacagggaagggcaaaccaaaaaagagcccagagcccgaaaggaacccccggggaaaggggaaggaagagggaaggacaacacggaggaaacggagccccgacgccaagggcagcaacagaaggggagaaagcccaggaaccagcccacacaaaagcacaccaccagaaacccagagcaccaaaaaacaaccaccaagaaaaacaaagaaaagcaaaaagacaaccacggcaccaacagaagagaaaaaagcagaggaagaggagccaacaagggaaaaccaaaaaaaaagaacggcgccacaagaaccgccgccgaccaaacacaccaagggaaccacccacaagaggaaagacaacaaacccaacaacggaccaacgagagagagacaaaagggagacaaagacccaaagaagagccacacccaaccacagcacaaagaacccgcaacccgggcggagagagaagacaccccaaggaagagccagcaagaccacagacaaagcccaagagaagcaagcaacgacccaaaccgcggaccggaaagccagagacccacaaagcccaggaagaggaggcaagagaacacacccccgcgggcaaaccagccgaacgagccaggaacaaaaccccacacaaagcagacccccaaacaagacgagacacggagccacagcagcgaagaaggggcgaaaagagaccaccaccgcagaggcagcaggcaagcagacccggagaaaagagaccccaagcccacaaccaggcccggcggagagagaagggagggagagggaggagacagggggccaaagcaagccagagccaggccagagcaggagacaggggaagcccagcaccccggcagaggcaccccaacgacccagccagcacaaacaagaaaagcaaggaaggcgggacagcgcgcagcaaagcagcaaggcgaacgaagcgagaagggaggggcgacaacccaacagacagacaacggcgagacccagacacaagcacgaaacacagggggaggggggaaagacgaaggcgcagccgagacggaaaacaagaacacaaacaagacgaagcaccccgcagacaaaaaaaaaaaaaaaaaaaaaagcaaacccaaaccaggccaggagacagagagagggggccggggagacagcgagccaaagcaagcagcacacaccagaagagacaaaaacaacagaaaaaacaaaaaacaaacaaacacacaagaaaaaaccaacccaagcacaaaagagccgacaaaaagaaacaaacgccagaaaggaaccagacacaaacacccaacaacccccacacaaaccacaccaccagccccgccccagaacacaccccgacggcaccagaacaaccacggagggaggccaagagccaacgaggcggggcccaccaccgcagacagggggccgagaggaaaaagagggacaacagaaccaccccccgagaagaagcaaaaaaaaaaaagaacaagaaagaaaggaagacacaacagggcccacaccgcaggcagcaaacagcaaagcaagaagcggcgaaagggcagccagccacaacccacccccagcacacagcggcacacacgagcccaagggcacacacaaaccaagccccagcagcccgggaaagcgagcccccaagccacaggccaacccagaccccccggaagcccaggaccccacgcggacccgaacacacgagcaaggacgaccacaaaacaacacaaaaacaacaaccccgacacggccccaagacaagaaccgacaaccgacaccaaaagcacgagaaagaagagaagaacaagacagcaaacggaaagaaaagccaaaaacccagacagaagggaaaggacacgagcaggcgcaagggaacaggggaaagggagcaaaaaagagggagcaaaaagaagaacacaagcagaaccgcgaagaacaaacagaaagcagacaaccccaaaacagaaggaaaaagaaaaagaagaagagaggaaggagaaggaggagaagagaaggagaagaaaagggagaagaagagaagacaacagaggaaaacggaaggaaacagagacagaggagagagaacacgagcaaaaccacaaagaagcgagcacaaaaggaaagcaacaggaagaaaaccaacccacaacagagaaagaggcaaagccaaagagaggaaggaaaaacaaaaacaaggagaaagaaccccaaaacccacaaagaagaagaggggaccaggggaaaggaacccaacacgaaggggacgcagggagaccagaagaacgaccaaagcaacaaagcaacagggaaaaccacggcacaaaaacagaagcaacaaaaaagaaggaacgggaacagggacgaagaggcaccgaaaagaaaaaagcagcacaaacaacaaaacgaaacccggcagaaacagccgggggaaagcagcacaccaagaggacacggcccaccagagcaccccagccaagcgaagaccgacaaagcagccacaggcaaagacccaaccaccaaaagaccgccccaagcgcaaaaaggaagaagaaagaggcaggagcacgaccagaaggacaaggccaaaaagaaagaaaggaaggaggcgcaagggacaggaggggagagagaagaccaaggacccaacgcggaaacacaacgagggggccaaaaaagcccacaaaaccggaaaaagaaaacagcacagaagaaagcacaacccaaggccaggagacaaaaccagagaaaaacagcccaaacacggcaaaccgaccagggccgagacggccccagcaccgaacacgccccaacccagcccccacccccaaaacccgcaaagcaaaaagacgagaaagcaagaggaagaacgaaaggcgggaggaagaaagagcccacaacacaaaccacagacacggcaaaccccgcaccagaaaaaaagaacgaagaacagcaaacgaaggcacagcaaaaaaaaaaaacggccgaccgccaccagggacaaagcccggaaaacgacaaaacaccaggacagaagacaaagaacaaggagaaagaagcaaagcaaacaaagcgaaaaccaccgcgccaaagcgagacaagagacgacgaagaagaagcaaaaaacacaaaaaagcagaaaagacaccaacaggcaccaaaacagagcgaaaagacggaaaaaaggaacagcagccaggacggaacgcaagaccaggacccggacgaccggcacaggggagaaggagaacagaccaaaacacagacccgggaccccaaaacacaagcgggaacaggagaacacgcagaggcaaggaacacagccggggcacgcacccacaaccgcacacaaggaccaagcacccccccagcccccaacccccaacaggccaggggagcccccccggccagccagcaaccccaaagacgagaaacggggggccgccggaggcgagaaaggccagacaccagccgcaaaggacagaaccaccaggcgcaaaaccaaagaaggccacacaccagcacagagggcagggggccaagcgcaggaacagggcaaaaacaggcagcaaggcagagaacggaaaccgggaaacccagaagggagcgggcaaaggccggcagaccaagaagacacacgcccacaaaggaacagacacgcccccaacaggaaaagcacacccacacccccagcacggccgacaagacgccacaacggcagagaggaccaggggagcacccaagaccaggagaagccgagcggccacaaaagccgagaaggcgcaaccgcccacgaggggggcgaaagaagcgagacggaagcccgcagaggaagagcaaaaaccgcacgagggccgcaccgagaagccgggcagaagccagaaaacccaggcaaggcggccagcggagcaggaagcgcccagccagccgaagggggccagggccagggaggaggcagaaacaaccagagaagaaagggaaggaaggggccagcagcgcaaggcagccagcccaacaccaaaaaggaaaccccccagcggcaggacaaagacagagggagacggggcacacgaggcccacgcaggcagagcgggaccagcaccagcgggacgagccgagaaggaagcaggagcagagccccagcgcgagaagcggcgacgggccggccaagaaaaaagagcaacagaagaaagcagggagcgaggggaagcagaacaaaaacggggcagaggccgcagaaaacccaccagagcaggaagccagggccccacgagcagggcgagcccgaagaggcccacacccgaggacaggaaccagagcaaggaacggagcaccagaggcccggcaggggaaggaagccggagcacacgagaccgagacgcgaaggcacagcaaggagaaggccaagacaaggggcaaacaacaaaacagcaaacagagacaacgacccgcccagaaacgcacccgccgagcccggccagaagcaaacaggaaacgacgggagacagggcaccgcggccgacaaagggaagcccaggcccgcagagaagccggggcaaaaagcaagagaagccacaaacagacgagagagcaaagggacagaagcaaaggcccgcacagagaaacagaagcaggcgaggaggaaggagagcaaggagccagccgcacccagggagaagcccgggaaaggggaaagcgaggcgcggacaggccagaagaggagcagagcacagggaaggccgaaacgggccgccaggggacaggagagcaggcccaaaaagagagagaggagcccccaaggaaagcagaaggaaggaccagcccgacccggagaaggcgggaaccgcggcccaggcggggaggcaaaacgcccaacagaagggagaccagggaccaccccggagcgggaggggaggccagaaaaccaccagacagagcaagagggaagacccgaggaggaggggacagaggaaccccacaaggcagacccccaaacggcagcagcacagaacccaagaaacaagcccggacacgagaagggcagccaccccagcgccgacagagccgcagcgaaggcccgcccagccaaggagaggggcgacagacccgccccggggcaaggcaaaacccaaacacgcagcggcccagagacggacgggcgccaggcaaagaacaacgccaacgagaccaagagcacaggagcagggcagccaggaggggggaggagcaaccgagcaagagcacgggccgagagacggaaacccacgcagcgaggaggacccaaaaaggcaaagaaaaggcaaggggccaaaaagaagaacggaagggggagagcgagagcaaggcgcggccacagcgagcaagccgaaaccgaacgccaagaccacaaagacacgggggaaagccccacaaagggggagcaagccgaggccaagaacgcagaacggggcccgaggggcaaaaaggaagagcccggcaaccaccaagaagcccgcgacgagaaagcggcagagacaggagcaacccgcaaccagcggaaaaccccacccagagccaaggcgaggagaggcccgaaacagcacaccaagggccgaccaccaagccagcgagcaagaggcaagcccaacaaaggaaagagggaagaccgcaagagcagcggagccgaggagcagccaaggcgaggcacaaggagacagggcggaccagcccaaagaccccaggagccgaaagcagcccagcagcgcgaaaggaaccccacagaacagggcggaagaaacggggaaaaccaagaagaaaaggccccaccccggcgcagggcgcagagagaccacgagcaagggccccggggaacccaacccccggcgccaacaccacaaccgggaacgagaaggcggggcccgaggagacggggccgaccgaagaagggccgccagaggggaagcccggaaaaccaaagaggccacggccacccccacaccaggacaccaacaaacgaggggccacaagcccaacggaggcgcaccacccaacgccacacacaaaggacccaccgaacccccacgacaaggcagaacggagccacgaaaccggcggcagcccacaggcaaacccaaacggacagagcgacccaacccaaggcgagccccgcagggagaacacacccagccagaggaggaacccacccgaagccaccgcaaacaaagcaccccgccaggccacggcaaggagggaccggaggagaaggggcacggggacgcccggcggccaaccaggacacacccgcgaagagacccagaggggccgggccaccggaggaggcaccccgggcccaaggcaggcaaagacccgcgcaggcgcggaggcggagaccaccagaccagccggggcaccagggaggcgcagaacagcaaagagcgccgcccccggaagcggcccagaggggcacccaccagagccacccagagccccgagagggcgcgaccccgcgggagagccccagcaggaggcacgggggcagggacccacgagaaggcagcgcccagaagagccaagcgcgcgcgggagacgcgccccagagccagaggcaggaaggcgaagcgcgcccacagccacccccccagggccgcccagggagagagagcacaaagcgccgacggggcgcgccccagggagcccgccagagaggaggaacagaggcagcggcacggggcgcggcgcgggggccgcccagccaaacccagggcgacacggaggggaaaacgccacaagcccagaaggggacacaccccccccaccaaacccaacaccaggcaacagacgcggcggcagcaagaacaagccagggaccagcgcgggcccaggggagggacccacgagcagaccacggccccggccagcccccccggggaggaacagcgcgcgggccagggccacggggagaaagaaaacccgcagccgggcgcccaaacgaggcccagcggcgaaacccagggccggggcaagggagcgagggaaccggcggggggaagaccagggaaaagcaagaccgggccagaagcacgccgcacagcccagccccacagccccggaggggaaagaggcccgaccccggccccagggaggcaagccccacccgccagccgccccggggcggccgcaaccagcccaagagagagcgggaccagggaaagcagaaacacccaccgcagaccacaggagcgcagacggaacgccacagccaccgccagcacccccacaccacacagaaagaaccacccccaagaagcaggcccaccaaacaacacaacgagcaggaaaaaggcgggagcaacgaggaacaacagccgaacacgggccaaaccaacaaggagcccagcacaaggaaagcaagacagaggcccagcccaggcggagggacgaccacgcaacccgcccccaggcaagcaaccagccccaagagcgggaacagggcgccaccagccggcaagaaagagacggggcaccagaggcaggcggcgaacccgacccaaggaccacccacccggcccccaaaggcgaaaacaggcagagccaccagccggcggaaacaaaaagacggggagagaaagaagcagagagcccaacacagcgcggacggccaaacaaccaacacaaccacaccaaaaggaagggaaaaaccaaaaaggacgaaagaaaggggaaggggcaagccggcaaccagagcaaaaaaaggacaaaaggaaagacaacaaagaaagacaacaaagacaaaggaaagggagaagaaaaaaaagaagaggagaggacccaaccaacccagaacagacagaaacaaccccaccaaccaggagcggggaagacagaagggacacgaaggacgagggagacagagagcaggacaagcggcagaaggacggcccccccacacaaaacgggcccaacaggccaggccccccaggcacaggagaacagcgggggaaacgagccccgcccccagaacagaggcaggggagacaaaaaaagaaaaaagccaaaaaaggaaacggaagagaaaaacagcaaggaagaggcagggaaggggagcggggagcaaaacgaggacaggaggacaacagcaaaaagaaagaaaaagaccaaaggggcaggggggggccagccgaacccagcacgggaggccaaggcaggggacacgagggaggaggagaccagccgaccaacagggaaaccccccaccacaaaaagcaaaaaagccggcaggggcacgcaccggagcccagcacgggaggcgaggcaggagaaccgcgaacccagaaggcagaaggcaggagcgagaacaccacgcgcccagccggggaggaaggagaccgccaaaaaacaaacaaacaaaaaagaccaaaggcggagggagcaaacacaggaagaggaaaaaaacaaaaacaccaggaaaaaaaaaaaaaaaacgagccaaggccgaagggggcaagcccagaagccaaacagccaagggccacgggaggaagcccgagcaaaaacaacagaaggaggacaaaaccagaggggcagcagcgggaacaacaaaccaaaggaaccaggacgagacagggcggccggccaggaggaagagggcacaacagcacgcaaccgagacccgggcacaagagaacccaccaacccgagaccgggacacagacgcaggcaccacgccaggaaaagagagaggggccaccggcacaggcggccaaaccgacccaagggaccccacccggccccaaagggggaaacgcaagaaccacggccggccaagccagacccaaagggaagccacaaaaacgggagaagagggggacaggccgaaccgaagaggacacgcgcgggagaaagacagcaagcgccagagaagaacagaaaagagggggagaaacggggcaaaacagagcaggagcaagagaggggggagggggcaacggaaagggagagccaaaagacaaggaagaagagagaaacaaggaaacccccaaagaaacgggcgaagaaggccacaacaagcaagaaaagacagaaggagcggagagagagaagggggaaaagaggaccaggaagcacgcagcggaagaagagagagaccaagcggcgggaggcgaggcaggaggaccgaggccaggagcaagccgcaggagcggacgcccacgacccagcggacaacagagcagacccgccaaaaaaaaaaaaaaaaagaaaagaaaagaaaacagaacaaagaaaagaagaaaaagccagaaggagcgaaagcaaggagggaaaacaccaaaacagacgacgagagagcagaggagagcaggggaaaagaacacagaaaggaaagcaagggaagaggccgcaagggaccagggcaagcagccaagcacagcacacggacaggaaacggccagggggcagggcggaaggcagagagcaacgcccccggccaccagggccccgagaccacacggcacacccgaccacccccacagcaagggacagccaaaacaacaaccaaaaaagaaaaacaaagggacaaaaaaaggaagaaagcagaaaggaaagacacccacaaggaaaaaaacagcaaagccaggggcgaggaacccaacacccaaggaaaaagcaggaccgagggggcacccagacaaaccagaccggacagggggaaacggggcgggggcgccggccggcgcagcccccccaccccaggaaccagggcccccccaccgacacacaccccgggaacccaacacccaaaaccaccacacgcgaggccccagccaccagcacaaagccagaaaacaagccaccagaccccggcacaggcaccagaagccacacacccaaaccacacccagacacccccaccagaacccccccacaagccaccacacagaagc

SEQ ID NO: 309 - RNA, 1293 nt, Homo sapiens
caagcaagacccaacccaaccacgaaagggaaagaagaacccaaaaggcggagaagaaaagagaaaagaaacaagaacgggcagagaaagcaacagaaggaagaaaagcgcagaaccaaacccgcagccaagagggcgccaaacccccaaccaagggccagacaagagcccaaaggaagacgagacccgggggcggccagcacaccacccacccgcaccccacccaccacccacccacccaccgggcagggcaacaagagagggaaacagaagggaaagaagcgcgcaaacaagcggcagggcagcagagagacgcacaacaggcaccaaccaaaaagggccaagacaaaaggcaaagaaaagacaagcacaaaacaaagcgaccaggcaaaaacaccaaaacgaaacgccagaaaaaagcccaggggggacaaggagcccagaaaagaaaaaggacaggacaagggaacagggaagagacaaaacgcagcacaggggaacaaggcgcccgaaggaaagacacaacagggaagcaagccaccaaagcacacgaaccggggcgacgagaagaagaaaagaaagagaacaagaggaaagaagagcagaacacaaaaaaaacgccgcccgacacggaaaagcacaaaaacagcagagaccccacgagccaacaccaagaggcgcgcaggcgccaccccaacgaagggccaccccgcccagcgcacccccaaaagagggcagagcaggcgggcaacagaaacaggaaaggacgccaagcaaaaaggagcggcaacacgagaagaagcagcccccagcccccaggggagacccacaaaacgccagaacaaggaacaaagaaagacacaacagggccagagggagaaaagaaagggagcaagcacacaagcgcccgcccgcgaggcccggagcgaggaccaaacagacagccgccgggcagcacaccgacagcccagccagccccagcgagaggcgcaacaggcggccccccggcagcggggcagaaggacagagaaaggaaacccgcgaaaaaaaagaaggacaagagcggaaaacaaaaaaaccaaaaagaagaaaacagaaaaacacgggcgcaggggaaaccaaggccaacaggagcacagagcgccaccagaacaagaaagagacggggcaaaaacaaaacagcaggagacgagaccacccggcaaaacgggaaaccccgccacaaaaaacaaaaaaagccgggcgagggcgggcgccgagcccagcacgggaggcgaggcaggagaaggcgga

SEQ ID NO: 310 - RNA, 6743 nt, Homo sapiens
caggagacaagggcacaagcccgcacgggcccgaaagcccaacggaagccccacccgacaacccggcccggaccggcagcgggccgccggcccgccaacaacaggacacggaacaccgcaaagcacaagcgcccagagccccggaaaacagagaagcagggaagcccaacgggcagggccgcaaccccgcgaacgggcgcaaaccgaaagacccacgggacggacgcgaaggcgagggaaaaacacccacgaggcagcggcccagaagccaacaagaccgccccagccccccgccccgccaaaaaaacaccagcaagaaaaaggcgccaggaaacaggcagccacgcccaggggacaacacacgcgcgcacggcggccagaaacgaaacgaggccccaagaacgcaccaaaggagccacagggccgccaccagcaacacccagacccaagacacggcgccggacaagaccaagaaccaggccaagcagaaaaagaaaagcacaaaccaaggccgggaggaccaagaccaaaccacagccgccggccaccacgaaggccccaaggaacaacaggaagagacaagcagggacgggcagccaggcggagcaagagaagcgcccaagagccccaccaagaggcggacaaccagaagacacccgagccaaagggcccaagcccaccacaggaagagggacagggggggggggggggaacaacgaaccaaccagagaaagccaaaaccaccccaagaaaagacagaggccaaggacagaaaaaccagcacgaaaagagaaagcgcgcaaaaagaaagaccacgaaacggacagcccaccccaaacacacagagaaagcaaggacaagaaaaaaaaggggacagagggccaggagagccacccgaccagacagggccacaacaaaaagccagagaacaaaacacgcaaaaaaagcggcgggcgcagggccacgccgaaccagcacgggaggccgaggcgggcgaaccgaggcgggagcaagaccagccggccaacagggaaacccgccacaaaaaacaaaaaaagcccgggcagggcgcgcgccgaacccagcaccggaggcgaggcagaagaaccacgaacccaggaggccggaaggccggagcgagacacgccacgcacccagccgggcacagaacgagaccgccaaaaaacaaacaaacaaacaaacaaaaagcagcccaaaagaaaaggcaaaaaaaaaagcaacaaaggcacaacaccaaaaacgacaacgggcaagaacaaagccgcaccaacacaaaagcagccaaacaacacacccagcggaaacaacgagacaaggaggcccgaaggaaaaaaggaacacgcgggaaacgccaaaagaaaacaaagccaaaaaaaaggaccaagaaaacagaagaaaaacaaaagcgccaacaccaccccaccaaaaagacaaaccaaaacccagaccgagcagacagcccaggacaggaggcggaaacacaaacacccggaaagcaaaaagggcccaagcaccaaaaaagcaaccgacaaaaaaccagacacaagccgacaaagaaggcaggaggccacaagaagcccacgaagcagaaaggaaaaagggggcgaaacaccgcggacagaaaaaaaaaaaggccaaaagccaacaaacaagcaccaacaaccgcacaagcggggacccaaaacaaaacacagccgaaaaaccagaaacacaacagaagaacaaaggaaacacacacaaacccacgaggcaccacaagcagcgagagaaggaaacaaaaaaaagaaaaacgcaaaagaacgagacaggaaaaaaaacaaccaaaaacccccacacccagcacaagcaggcgcgcgcgcgcgcgcacacacacacacacacacacacacacacacacacacacacacccacccaaaccacccaggcccacacacaagaagggcccgaaccaacaacacagaaaagagaccccaaacaaaccgaggaacaagaagaggaaaccaagcacacggacaaaccgaagaaaagcacggaaaaaaacagaagggaacaaaaaagcagaaagaaagaaccaagaagaaagaaccagaggaagcacgccaaaaagacagggggcacagggacagggcaggagggacacacagaaagaggaaaccgcagaacagaggaaaccgcaacgaggcccacaagccaggccacacacaaagccacaagcggaaaagccagaaagcggacgaagaaaaggaaaagaacagaaagagccaaacgcagggagaagggagaaagaaaaaacacgaaaggccaaaaagagagagcggcgaaaaaaacgcaaagaagcccacaacacaaggcggacaaggaagaaaacggaaggcaagcaagaaacacacgagaaaaacacacgaggcgacggggaacccagaaaccccgccagccgaaccaaaggaggcaacgaaaaaacaagaaaagagagaaagaaagaccaccacaccgcaagccaaccagaagggacccgacaacacacaccccaaacagagggggcacccccagaggacggcgaaggacaacccaaaggcaaaaagacaccacaagcgaacacgaggaacggacaaggaggcccccccccaccgccaccgcaaaagaaaccagcgacccgccccccacccggggagggcggcgacaccaagaggagccggacaaagggagccaggaaaggaaagaggccggacccaaagagggaccaaaacaggcccaccggaggaccgccaacacaaacaacacaaacacgacacaaggacccaaaggcgccggggagagaagaaagggcaaggaagaaacaggaacgcaaaccagacgggaagagacggaaaagagggccaccgccacccgcgagggcaacacagaaacagcgacgagcgacgcaagagagggagagagggcaaagaaaccccaccggcacgggcacggaaccgggaccagcaaggcgcgcaggcccaccacccgaccagaagccaagaaaccaaaagggggaaacaaaaccgacccgaggaacagggcggggcaccccgcaccacaacaagaagagggcacgcccacacacggcccagcagcaaggcaagcaaacggaccaacagcaggcagccaacccacgagcagggcccagcaccgcagcgaagaggcgaaaaggcagaggcaccacaccaaaggagagaccagagacagcccaaagcaaaccccggccagcaaccaaacacccaaggacagcagaccaaggcagaaagcaggaaagcaaccccagggacccaggcgagaggcaaaaacccagagagaagcccacccgggcaagagaacagggggaccaagacagcaggcagagaaaacacccccgaagggcagccacgaaccacacgaacacgagaaaacccacagcagcaacacaaaagcccgcagcagggcaaggccgagggccgaggccagcagagggcacaaggaaccaagaaaaaggcaagaagcaggcacagagaacaaacgcaacgaagaacagaggcccaagccaaggcccacccaggggaaggccaaagcaaagaaccacgccaaagagcaagagaggccaaaaggaggcccacacgggcccagaaaaaggcgcaaagccaggagcgaccccggccagaaaaacccaggccggggaacgcacccagagcaaggaaggcggccaaggacacacacgccccccaggcccgccaggcaagggggcaccagacaggaccgagacccccagaaagcacgcggcgcgagaacacggaagagagcacgcacccaacagcacaccggccaacccccacccagcaaagggcaggccagaggaagggccagaagccccccaaaaggacgagccagagccccaccccacgggagaacaagccccaaacccaacccaccgccagagcgccccagcccccccgaccccccacacagcccccccaggaccgccgccagagcccggaaggccagaaaaggaaggggaccacagggcagggccaccaacccacaaaaggcccaacaccaggcaaaacgggggggccaacaacggggggcaaacacacccgaggcagagccggaaaagcgaagccgccgggcaccccacccccagagccccccccacccacaacgaaaaaagcaccaagacaaaggagacaggaaacaaagcgccgcaggcccgggggaaaacgcccgaaacgcccggccccgaaccagacgaagccaaccacccagcacagccaacgaaagaacccaccgaagcaaggagaaaccaagcaaagacgagaaggggcagcacaccagcaggcacagaacaagaacaaccgccaggcacagacccaaaacaaagaaaaaaaaaaaaaaaaaacaaaaaaagcccaccaccaccaagcgaggcgccccacaaccgaccccaacaacccaagacgccaggggaaacagggaccagggcaagaaaggaagaaaaaaggaaaaacagccagagaagaacaaacaggcaccaggccaggacgcacgccaggcccgggagccccacgaccgggcacaggcggagaggggggcagccagcagaacccaaaggagggccagaagaccaaggcgaaccaacaaaccccgggggacacacacacccaaacacaaaaccagagaaaggaacagagcaggccacacaacaaaaacacaagcaagcccagcacacaagacaaggcccaggcaaaaggggccacgcaagcaggaacagcagggcccaaagaaaagacagggcgaaagaaagaaaaaaccaggcgacaagaacaaaagcacgcaaaaacgaaaacacaaagccgcaaaccccaacaacagcacagaggcaaacggaaacacacaaaagcaaaaaaaaaaagcacagagagcaaaccacgccaccgggaacgaaagcagaaaagcaagaccggaagaaaaaaaagcaagagccgagacaacaaaagaagaggccaaaaaaaaaacacaggacaaaaccaaagccaccaccaagacaagaaccgccaccaacaagagcgacaaaaaaaaaacagcaacaggaacaggcacaggcagcccagaacaagggcgaacaaaacaaccaaaaacaaaaagaaaacaaaaggaaacgcaaccaccaacacgaccagaagcagaagcaaagcaaaagaaagcaagaagaaggccaagaccggacaggccagagggaaaagaaaagagcaccaaaaaaacccaaaacagcccgggagcaggacacccaaagacaagaagcaaacggaacaggcacaaaccaacaccaccaaccagcaacagaagacaagaagaggcggagacaccagaagacccacaagaaaacaaaagacacccacgggcaccgagaaagaaaaaagagaaagaaacggaccaacacaacaagaaaagccacaaaaaaccgccaacacaaccacgcacaaaaaaacacaaaaaagcaaaccgacgaagcaaaacaagcccagaacgaagcccaaaccaaagacagaaaagacaggaaaacgccacaggcacagaaaaacagccacaagaccgcaaacagccagaggagaaggaagcgaggcacaggaagccaccccagcagacaagaacaaaaggggcaccaaccccaccggggccacgggcgggcagccccagcaaaaggcaaccccggggcgggcgacccacccaaggccccagcgcaagcaagggcaccgggaccccagcaagcacaggcaccaaagcaaccggagcggccgcaggaccgcaccacaaaggccaggccccagagccgaaggcaccacggcagcccccagacccaggggcggggagagagacgaaacccacaggcccagaccgggggggcccccagcccgcccaacgggagaaaccaagaccccacccacaacccgggccggacccgccagaggccgacagccccccccacgggccagccacaccggacccaccgccagagccaggaggcccaggaggggaacaagaccagccaggccgagccgccagcccaacagaaggaacccaaaaagccccaagggaggggcccagaaacccacgaggcagggcccggaacaccaaacgcccccaagccccccccgcccgcggagaaaaaaaaaggaccaacagaaaggcaccaggaaaaggcgacgagaaaccgccaacaggagcggcacgaaacaaacggcgccaaaccacacccacaggggccagcaagaaccaaccacaccagccacagcgcccaccaacccaggacaaagcgggacaggggcaaacccagggaccaggccagagggaaaagcaaagggcacaagggcggagaagagcaaaccaggcgccgaccaccccaggcccgggagccaccaacggccaggcacaggccggggagggagaagcaggcggaacccaagcaaggcagaggccaagacgcggcaacaggcccaggaagggacacaaaccaaaagaaaaccagcagaggagacgaacagccaagcaaaaaaaaaacggaacacaggcagccagcaagacgcaaggccggacagggaagcacacaggggcaacaggaacacgaaaagacagggcgcaaaggagcaaaggacagaaaagaaccaggcgaccaagagaaagcacgcaaaacagaccaagaaacgaaaacacggaag

SEQ ID NO: 311 - RNA, 2111 nt, Homo sapiens
ccgcccgccccacgccagcacgccccagagccaccagaaccgccccgccagaacccccagccacccgcccgcccccacccacccacaaggcaagcccggccccaagcccacaggggccacaacaccccaccgggccagacacccaccaaccacggcggggcccagccacagcccaccccagccccaacagcccgagagcaccacgggccaggacccagcaagcacgcagaagaaccacacccaaagaccccagacaaaacacggaaaccaacacagggaggaaacagaggcacagagaggacacgccaagcacacagcaaggccagagagggcggacccagcagacggacccacacccaaccacacagaacccccgaccgccaagcaggcccaggagccccgaggacagccacccagagccagaaaagccaagcaggaggaccagagagccccgcgcggcggcgaggggcacccccccgggcccacccgcaccaaagagaggagcgagacccaccagaggcaaaggaggcccagacccacgggaggcgcagcgcggagacaggagacagagggagccgccccaggggcccaggaacgggccagacaagcggcccagcccagaccacgcgccacaccgcacggaggaggggccagggggccacgcccagcccagacccacagacaccccccaaaagggcagagcccggccggagcgggggcacagagccacccccgcaccaaccgcccaccccgcacgcaggaccacacccccccgggcagaaacagcccagaggagccgggcgacccagcgcaccccggccagaccgggaaaacccggcagccagcaagcagaagccagcccacaaccgaaaaccgagccaggccggcagacacccgaacgcccaccccccccaggcagcgcccagaagcgcgcccaggcgaagggacccagggcccccacggccggcacggaggggagcccaaagaccgacagaggggcaaacgagacaggagaggacaggacagcccaagacacacagccccaggggagccgccggccccagaggcggggaaacagagcaccgccaccggccaggcaccgaggggcaggggacagaggaccaagggcaaaccaacgcccacccgggaggcccagagcaaggcaacacaagggaccaccgcacgcgccacacaaagggcgcagccgggacccagcccgcgccccaccccccaagcggcaaacacccgacgcacacccccaaggcaagcggggaccgggcaagcacgaccccgggcgccagcacaaagccgcaagcaaacaaccaagacacggcggaaccccaaacaccaagagggacagagaccccacaccaaagaggaaacgaggccagagaggagggagcgcgcccaaagcaggaaggccaaggggaggcagaggagggggccacgggggcaagggcccgcccagagccaggggggggacagccaggagggaggaaccccccccccccagccgcccgccccccccacccccccccccccccccccgaggcccaaacaaagcgccacggacgagcgcacccaggacacagaggacaaaggcgggggccaccggcagcgacaggaaagcccaccgccccaagccagacagcccccacgccccgcccccacccgcagggccccccggggccccaggccggcccgggggagccgggaggaagccccaggacccgccccgccccaccggagccggcggccggggaggaggcgagccgcagccggaccaaccccagcccgcccgggccccaacacacgcggggccagggagccgaacccaggcccgcccggcgaaaacaggagggaccggaggggcaggagacagcaggaggcagcgggcacacgagaaggccaccagaggaggggagcaggccaccagccagagcccccagcgagaggcgcgcaccccagaggagcacagcgccccgccgggaacacaccacccgcccccccggcaacccgcagggcccaaacaccccccccaggcagccgcccagaagcgcgcccaagcgaaggacccagggcccccaggccggcacccacacacaaacgag

SEQ ID NO: 312 - RNA, 29511 nt, Homo sapiens
aaaaagagccccgcccagacaggagaacagccagaccaaaccacccccaacaccccgcaaccgacaggcaaaagccaagcaggaaaagaagccccaaggaggagaaaaccgacacaaaaaaaaaaacacaggccccgcgagacggagccgccgcgcccaggccggacgcggacgcagggcgcaaccggccaggcaagcccaccccgggcacgccacccgcccagcccccgagagcgggacacaggcgcccgccaccgcgcccggcaagaagagagacggggcaccgagccaggaggccgacccgacccagaccacccgcccagcccccaaaggcgggaacaggcggagccaccgcgcccggccggccccgccaagagcacagaaacgcaagaccaacagaggagaacgcacccccgaaaaacaaaaacaccaccaacgaaaaagggaaaaccaccaaaagacgggaagagaagaagacaggacagagcgcagaaaaggggacaaaacaacaaaaaaagaaaaccagacgaggaccgaaaaacaaacgaaaaacaacaaacaaccaacgagcagacagaaaagaacaacagaaaaagaaagaagggaagaagcagaagaaaaagcaccagagagagaaaagagggaaaggcccgcaaaaccaagaaaggagcacgcccacccaccgcaccccacaaaaaaagccacacagaggcacaccccgcaccgcaggagcgcaaagcaagcacgggcgaacagaacagaaagcaagaggaaacaacaagcaacaaaccggcaccggaaaccacaagagagcaagaacccaggcaacacaaagcgcaaaagcagagccagaagacgcagcgcagagcaggccagaccaaaagccagacaagaccgagacgggaaagaacaagacaaaaaaaaggagcaaaagcagcccaacaccaagcaacaacaaaacaaaaaaaagcagagacagccaggaaaccaaacacagccagagaagccagcagcccagaccccaacaaaggcagaaaaggggcaaaaacaagcaaaacggaaaaaaagcacagggaaagaaccgaaagaaaaacaacaaaaaaaaggaggaggaaaaaaaaaaaaaaagaacaagcaaaacagaagaaccaacaacaaaagcaaaaagagagcagaaaaggggaaaacaaaaaagaaaagaacaacacaacaaaaaaaaagggcaaaggcgggcaagggccacgccaaacccagcacgggaggcgagggggcgacccgaggcaggagcgagaccagccggccaacaggaaaccccgccacaaaaaacaacaaagcggggggggcaggcgccgaacccagcacgggaggcgaggcaggagaacacgaaccgggaggcagagggcaggagccgagacggccaggcacccacccagacaacagaccaagacccaccaaaaaaaaaaaaaagagcaaaaagaaacacacgacgcacgcaaaaaaacagcaaccaccccccccaacagacagcaacagcaaaagggccaaaaacccgggaaagggggggacagggaagggaacaaccacaaggaggcacgaaagccccacaaccacaaaagaagacaaaaagcaaaaccgaagcgaaggggggggggggggcacagaagccagcgggggacaccaggagcaaggggagggggagagcagggaagcgaccaaagaccacagccaccagacaccagccaggggaggacccaaaaaggaaaaccagaagccccccacacccggcggcggcgaaaacagccaagaaagcgacccacgaaagccgcggacacaaagcccccgcccaaagccacccggaggagggaagacaacagaaaagggggaacccaaaagcaaaaaggaaaaccagacagaagggccggaaacccgacgaacaagacaagaagcaaaaaacacaagaacgagacaaaacccacaccagcaaaaaacagacaaacaaacagacagcagacacgaaaaaaacaaaacaccaccaaaaaagggccccaaaagagacacaacaacgcaagacaaaaacccaacaaaaagggaaacgcacaggaaaacaaaagcgggcacagggccacaccgaaccagcacgggaggcaggggcaggggcacggaccaggaagagaccagccgggcaacagggaaaccccaccaccaaaaaacaaaaaaaaaaaaaagagcccagcagggggcacaccgagcccacacgggaggcaaacacgaggacacgaggcaggagggagacgcaggagcgagacagcgcacgcacccagccggggacaaggaggagaccgccaaaaaaaaaaacacaaagaaaacaaagcaacaaacacaccacaggaagacacagcagcaacaccgcccccgagaaccccaacccacaaaaacaccaaaaaccaagaaaaccaacaccaacaagaacccgaaacgagaggcaaaacagcaaccagacaacaggaaagagcacagcaaacgaacaagggaagacaaacaaccagaaaaacagccaacccacaagaccggaaaagaaaaaaaagaaacacaaacaaggagcaagaggcaaaaaaagaccacaaccaacaagacaaaggaaaaaaaaaaaaagaaagaagaccacaagacaagaggaaacacacagaacaggaaaaaaaaaaaaccaaggaaaaacaaagaggacaaaaagcgacccaaacacgcaaggagaacaaaggacagacaaggaacaaacacagcagaggagacaaaaagagaaacagaacaacagcaaaaaagaagcacagacaaaaggacaacgccagaaaaaacaaaccaaaagacaagaaaaagaaggcgggacagggccacaccgaagccaacacgggaggcgagagagaggacacaagcccaggaggagacaaccgggcaacaaggagaccaccacaaaaacaaaacaacaacaaaaaaacaggccaagcaagcggcagcgccaagcccaacagcggaaggcaaggaggaggagcgagccgggaggggagggcagcaaaggagacacaccacgcacccgaccggggacagagcgagacccgccaaaaaaaaaaggaaacagaaagccgaacagcacagacaaaaaggaagaaaaaaaaaaaaacccccccccccccaccggcacacacacaaacaggcaaaaggaaaagcaaggcaccaaaccaggaaacaagaaaccagacacacaaacccagagaaagaaaaggaggaaaacaccccccaagcaagaggccagaaacggaaccaaaaccagacaagaacaaaaaaaagaaaaacaggccaacacaaaaacaacagaaaagagccaagcaaaaaaacaaacagaaccagaaccaacagaaaaaaaaacaagaccaaagcccagaaacaggaacagaaaaagacaaaaaaaaaaacaccaagaacagacaaagaaaaacacaaagagaaggaaaaaggaaagaaaagcacagcaaaaaaaaaaaaacaagcaaacaacacacaggaaaccaaaaacaagaacaagagagcacaaccaaacaacaacaggaggccagaaaaaagaaaaaaagggaacaaaaagaaaagaagaacgcacaggaaacaaaacaaaaaaggaaagaacagcaaggaggaaaaaagcacaagcccccaaccgcgaaaaaaaaacagcaaaaaaaaaaccaccgaaaagcaagaaagcaagcaaaaaaagacaccaacaacagcaacagcaaaaagaagcaggacaaccagaaaaaaacagaccagggaaagaaaaaaagcaaacagaggccaaaaaaaaaaaaaaaaaggaaaacgaagaggaaaagcacccaggaagaagcaaggacaggccccaacgacccaaaaagaacaacgggcaagaagacaagcgaaccaaaaaaagcaagaaaaagccaagaaagaaaggaagagcagagaaggccaagccacccagcaccaaaaagccggcacaagcaggcccaaaaggcgaagaagaagaacacagcagggaaacaccaccccacgaaaagaaggaaagacacaagaaaggcaaaaaagacaaaggaacaaaacagaaggccaaaaaaaaccacagaagaaacgaaaaaaagaagagcagacaaggggaagcaagaacagaccaaaaaggagcgggaaacagagcagggaaaaaagcgagagaggggagagaaaaagggcaaaaccaagcacagccgaaccagacccagcaaagcccacaagacaaagagcacaagagaaaaaaagacccaccggaaggaagcacaaaaaaaacacacgcagagcacacgacgagccccaaacacccgaggaagccgccaccaccccagcgcaggagaagacgaacaccgcaccacaaaagagcgcacagcacacccagcaagagacggggagcaaccagagagacagagccgccgcgcccacgcggaggcagggcgcgacggccacgcaagccgcccccgggcagccacccgcccagccccgggacacaggcgccgccacgacgccggcgaagcagagagggggcaccgagccagaaggccgacccgacccggacccccgccggcccccaaaggcgggaacaggcggagccaccggcccggccccaaaaagaaggcaaaggagaaacaaagaagacacgaagaacgaacagacggaaaaagagccgaagcgcaaaaaaaaaggcaaaagaggaagacgaaaaaaaaaaacacacaaagggagaagagcggcacaaaagggggccccagaccacgagaaaaaccaagaacaaaaaacgccaagggaagcagagaggcggggaagagcagcaacgaagcagaaggaggacaagcggaaccacagccccacccccgaaaagagaagaaaacagaaagcacagcaaaacaggacggacagaaccccgagagaacggacgaagggcaaaaaggaccaacccaagcaggaaccaaaaaagagaaagaaggcccacagaaaggcaaacgaaaaccagggcagaccaagcaaacacaaaaccggaaaaggacagcaaaacaagaacagacgaaagcaaaagcgcgcaggaaagcagaagaacagccaggaagagccacgaacaacagagccaaaaaaaaaaaagacacacaacaaaccaacacacaaagaacaaaacacaggaaaaggccaacgcaagaagagaaaagagaaaaacaaacaaaaaaaacaagacaccaacgaaagaaacagaaaagaaaaggggaaaagcaacaaccagcgacgacaaaaaagagccagaagagcaaaaggcccagggagggggaggggacagggcacgagcaacaagcagaaaacccagcgacaaacacaaacacaaaaagaaagaaacacaaccaaagaaagaggccgggcgcggggccacgccgaacccagcacgggaggccgaggcgggcggacacgaggcaggagacgagaccacccggcaaaacgggaaaccccgccacaaaaaacaaaaaaaagccgggcgagggcgggcgccgagcccagcacggcaggcgaggcaggagaaggcggaacccgggaggcggagcgcaggagccgagacccgccacgcacccagccgggcaacagagcgagaccgccaaaaaaaaaaaaaaaaaaaaaagaaagagcacgcgcgggaaaacaagagcacgaaaaacaagagaagcagacaagcaaaaccaaaaaaaaacaaaacaacagaagagcaaagcaacagaacaacagaaaagaaaaaccacgaggaccaccaagggggaaaaaaaaaaagcgaagagaggaggcaaacccaaaacaagacaaaccaccacccaaaaagcaaaaaaaggaaggcccagagaagaggaggggaaaaaaccacacacagggaggaagggggaggagagaaagaaaaacaaccagcccccaaagaagaacaaagcaaagacccagaagcaacagacccacaaaagccaagacagaaacacagccgagcacccacccccccccacgacaggaaagcaaaagagacgcaccagaaaaaaaaagacacaacaaacccaaacaaaaaaccccaagccagaccaaagcagggaaaaagaaaaacggcagacaaaaaaggccaacaacccacagacaaaacccaccgaacaaccaaagagaaaaaaaacaaggagaaaaggaaccccaacggcaggaagagaaggaggccacaagacacaggcaaacaaggaaagcaggaggaaaaaacacaaagaagccaaacagaccaaagagcggacaaagaaaggccaagagaaaaaaaagcgacaggacaaaaaaaaacaccacgaggcacaaagacaaaggcaacagaaagaggagaaaaaggccaggcgcggggccagccaaaccgcacggaggccgaggcaggcggacaccgaggcaggagcgagaccagccgaccaacaggagaaacccaccacaaaaaacaaaaagccaggggggggcagccgaacccagcaccgggaggcgaggcaggagaacacgaacccaggaggggagggcaggagccaagacgcaccagacccagccgggcaagaagagcaaaacccaaccaaaaaaaaaaaaaaaaaaaaagaggagaaaaaaaagagcaaaagcaagccaggaagacacggaaaaacaaacaaacaggaaaaaggcaagagcaagaaaaaagagccaaggcaacagaaaaaaaaaggcaacaaaaaagaaaacaagaaaagcagaaacacagaagaaaaacagcaagagaaagagaaaaaaaaacagacacaaagaagacaaaaaagcagagcaaacacaacaccaacaacaagagcgccggcccagacggaggcaaggcggacccgccaccgcaaccccacccgggcaagcaaccccggccagccccccagagcgggaagaggcagcgccacagcccagcaacgaagagagacagggcccagggcaggcggccaaacgccaacccagggaccaccggcccggcccccaaaggcgggaacaagggagcaacagcccggcacaacaccaaaaaaagggggggggggggaaaaaaaaacacacacacaaaagaaacacacacaaacaacacacacacacacacacacacacacacacgcaaacaaaaaaagagaggagcacccggccaggcggagccaaggcgcgaccagccacgcaaccccccgcccccaggcaagggacccgcccagcccccaagagcgggaaaggcagagcccccacacccagcaagaagaaagaggggcaccagggcaggcggccaaacccgacccaaggaccacccgcccagccccaaaggcaagaacaggcacaagccaccacgggggccaaaaaaaaaagcagagaagacaaacacaaaagaacaagaggcagacccccgcaacacagaacccacaaacaaaacacaggcaaacgacccaaagagggcccaaaaaaaagcgaggcccccaacaccggacgaccgcagaaacagcaaaaacaacccaagcaaaacgccaacggccagagccaaaagaaaaagaacaaaaaagcagaaacaacaaagacaaaaaaaaaaaaaaacacagagaaaggacacaaaaaggaaaaaaaacagggccaggcacagggcccagccgaacccgcaccaggaggccaagggagacagcaccgagcccaggaagaggcagccgagcaacaaggagaccaccaaaaaaaaaaaaaaaaaagccaggcggggacacagcgagccagcccaaggggcgaagcagaggacgccagcccaagagcgagccaagaagcagaggccacgcaccccaggcgggccacagacaagacccaccagaaacaagaaaaagaaaaaaaaaaaccaaagaccaagagacacgggaaggaaggcaaaaagagaaaaacacagcaagaacaagaagaaaacaaacccaaaggaaaacagaacaaaaaaaaggaaaaaacaaggacacaggagccgaaaaagaacgcccggccaggccagcagcacacgaacccagcacgggaggcccaacaaaaaaaaaaaaaagccgggcaggggcacacgccgagcccagcaccaggaggcgaggaggaagaccccaaccgggaggcgaggcgcaggagccagaggcacgcacccagccggaggacagagacccgcaaaaaaaacaaaaaacggccgggggggggaacaccaaccagaaacaaagagaccacgagagggggacgcacacagacccgaaaaagcagaggcaagagacagagaacaaaaaaaaacagagaaaaaacaaacgaaaaaggcgaacaaaaaaagaacaaccacagcaaggagaaaaaaaggcaagcacaccaaaaagaagaaaaagaacacaaaagcacacaagaggagaaaacgaacaacaggagaaaagacaaaagacaacaaaggagaacaagaaaacagggcaaacaggggcgagagacagcacggccagggggggcacggcggacaagcacgcagcccaaacgcgggccaagcaaccgcgccgagaccaaaggcgggaacaggcagagccacgcgccgacccaaaccagaaaagaacaaaaaaaagcccgggagaaagaagagaacaacacccaacaccaagcaaaaacggcacaagcggaaccagaaacggaaacaagaaacacaacacccaacaacaaaaaaaaacaagaaacggggaaaagagggaaaaacccccaggacaagaaaaacaagacaacaacacagaaggcaacaaaaacaaagaggaccacacagaacaaaacagcacggaaaaacagcaaaaacaaaaggaaaacacaaaggaacaaaacaccaaaaaaaaaaccagacacgagagaaaaaaaagaacaaaacaaggacacggcaggaacagaaaggcggccgggcaggggcgcacacaagcccagcacaggagacggcgggaggacacgagcccagaagcaagccagcgaggcaacaagggagaccccaaccaaaaaaaaaaaaaaaaaaaaaaaagcggcaagcacacagaaagaggagaagaaaaagggaaggaacaaagaaaaggcaagaaggacagaagaaacacgaaacacagcgacaaaggaggccaaaaaaagaaacacaaccagaacacaaagcaaccaacaaaagagacaaaagacaacagacacacaaaaggagcaaccaaggccaaaggcacaaaaaagagcgaaacaagcgcaaggaaaagcaaaaaccacaagagaaccacagcacagccaagaggcaaaaacccagacggaaagacccagagaacggaaccaacccaggcgggaagaaaaggacaaccaaaagaaaccaccgcccaaagaaacaccacaccaacgacccaaaacacaacggaaccaagcaaagaaaagaagccaaacaagacgacacaagcggggcagcacacagaagaacaggaaacaacccaaagcacaaaagcagacaagaaagggaacaacaagaaaacaccaaacaaaaaaaagaacaacacagccaggcgggggcgggccgagcccagcacgggaggcgaggcaggaggcccacgagccggggagggaggcgcaggagccagaggcaccacgcaccaagcccagcaacagaagagaccgccaaaaaagaaaaaaaaaaaaaaagaaccaagaaacaagcaaacaagagaagcaaaacacagccaagcaaaaacacccagacacaaaaagagacaacgaacaaaaaagcagaaacaggcaaaacgaacaagggaaaaaaagcagaagggagacaagggacccggagagaagaaagccaaggcgaagaggacacaaggggaacaaaaccacagacaggcccaagaaagaacagaaagggcaaagacagaacaaacaacaaggaaaaaaaagcaacagaaaaaaagaacagagcccggaaacaaaacaaaaaaccaaaaaaagaaaacaaacaaagcaaaaaacaaccaaaaaaaacaccagaaaaacagaaagaaaagaaaaagaaaccaacagggcaacaccccagacaaaaagaaaaaaaaacacaaaaagaccaggaaacaagaaagcaacagcacaaaacaaaaaaaagcacaccgacgcaagccacagaaaaaagagaaaaccaggcaaagacaacagaacacaaaagcagcagaaaaacacgagaagaaaggcacccggagggaacaagcaaaggaaaaggcgaggcagaaaaaacacaaacaaccagaaaacacaccaaaacccaagcaaaaccaagaaaaaccccaaaacaagcagcaaaaagaaaaccagacacagaaaagaaaaaaacaaaaaaaaaaacaccaaaccaccacaaggagcccaccagcggccgccagcaaaaaaaacagcgacggaacaaaacgcaaaacgccccacccccacccgccccggagacaggccgcgcccaggcggaggcagggcagcgacacagccacgcaacccgaccccaggccagggaccaacccgcccaagagcgcaaccacgggcacggccagcagccggcaaaagagacgggcgccaggcccaggcggcgaaccccggaccaagcaaccacccccccacaaaggcggaaacaggcgcagccaccacacagccccgcccacaagagcaagcaccagcaaaagaaaagacaggaccaaaaccaccaagaccacaagggacaaagaaagcaacagcaaacagcacaaaggaaaaccacagaaaaagaccggaaaaaacacgggcgaaaagaaaaagaaacagcggaccaaccaaagcagcacgagaggcccacccaaacaccaaacaggagaacaaccggcaagaaaaaaaacgagacgccggccacaggagggcaacaaaaaagagagcaacgccaccgcgcaaagaagagaaagacacagcaaaaaaaaagcagcgggacaaccaaagaaaaaacgaaaccagaaccacaaacgaggagggaaaacgaaaagcaccaacaacacacacacacacacacacacacacacaaaggaagcgcccacacaaagaaaaacagcgggaccccacaagcccgcaaaaaccccgcaccaaaacaagccaaaaaacccccaccccagcgaggaaaaaaaaaaagaaacgcccacacccagagaaacaaacccccaaccccaaaggccgccacaacaacgcccccccaacaccccagacagccccagcaaaaacaagacaccccaaaaacaccacagcaccacgcacaccaccaaccagccccaacccgccaccccccccccacaacacgacgcccaccagcggcggccagcccacacgcccggccgcagcgaaccaaacacaacaccacagaaaccaacaagaccggacccgcgaacaccaaagccaccgaaacgcccggcgaaaccaacagaggccagcccaggggcgcagcacgccccccagagcccaaggcaggcccagagcccaccgagccggcagaccccaacagaagacccacacaccaacagccaaaaaccacacacccaaacacccgcaccaaaccaccacaccccgaaaaaaagggaaaacccaaggcagccccgaagcaccaaaccaacaggcagaacgaaccacaaaaaagagaagacaaaagacgcaagaagaggcaaaaaaacaacagagcagcagagaagaaaaaagaaacaaaacaaaaccagaagaaaacacaaacaacaacaaaaaccaaaaagcccaaaaaacccgaaaagaagagagacaaccccacccgcaaaaacaaaaaccgacaaacaaagaccgaaaggagggaaggcaaagaccaacacggaaccaagaaaccaacacggggagccgggcacaacaaacccagagggaggaaaaagccagcaacaggaaagccaacagacacagacaaaaaaagacaacaaaagaagccccagcaaaggaccagaacaggacgcccagcaagacagaaaacagagacagcgccaccccaacagacaccaaagaaaaaacccgcccacaccagggaaggcaagggggaccagaacccacaccaaaaggcgaaaggggcaccccaacaccccacgcaggggcagggaagaccaagggggagcaagaccacccaacggccagcagaaccccccccagcaggcaaggacccaccccaccaggcagaaaaagagcgccccacaggacaagaagcgagagggaacagacaccgcccacccacagaacaaggcagcacccccccgccagagggaccaaaaaagccagcaacccagcaaaaaaaacagagccacacaacaaaaagaaaaggcagacaaaagaaaaacccaaggaacaggaagacccaaaccaaagacaaaaagacaacgacagacaccaacacgagaaacaaagagcagaaacggcaaacaaaaggcagcccaaaaaagcaacagcgaaacaaagaaaaaaaagccagcaaagaaagaaagccagaaagacacagaagacaaagaaacaaagggagcaaaacaaaaaaacaaaacaaaaaaagagccagggaggcaacagaaaaggaagggacagaagaacaacaaacagaagcacaacagagaaacaccaaacgaaaaacagaaaacacacgaagaaaagaaagcaagaacagagcccaaagccgggaagacaaaagacaacccagacagaggacacaagagaagacaaggagaaagagcgaaaaagacagaaaaacagcgaaaaccccaaagggaagacaaaaccacacacaagaaggaaaaaccccaaagaggaaaaacccaagaaacacaccaagacacacaaaaaaccaaaaacaaaagacaaaaaaaagaaagcagccaggaaaaacacaccacaggagaaaaacagcagaccacagaaaccaggggacagaagaagggcacagaccagggcgacaaagaaaacacagaccgcaccccagcacccggcagacccacagcaaccacagcaaaaaaaaaggaaaacagaaaaaagcaaagaccacgagagccgagaaaccacaccaccacccaggacaagaacacccgccagagaccacacgaagcaccaaccgagcacaacacgacacgcgccgaacacaacggacaacagcccaacaagccaacacagcccaacgaccaggacaccaaagcagagacgaccaacacagaaggcaaagaacaagcaacacacaagccacacaacccacgcccacaagaggcaaccaacacaaagaaaagaacaaaaagaagagaaagaccgcacagaaaccagagaagggaacaaaaaacaacccacggccaaaaaaaaacacgaggacacccaggaaaaacaggaagagggcaaacaccacagcaggcacgcggggggaaaaaagcccgcaggaaggggggacacgaaaccagaacagacagaaaaaaaagcgggagaaggagaaacaagaccccagaaaggaaaaccaaagagaagagccagaagggccacccaaaagaaggcaaagaaagccaaacaaaaaaggaaccgaaacacagaaaggaaaaaacaggagcaaaaaaggacaaacccaagcccccgagcaagagcgacagcaaaaaaaaagaaacgaaaagaaaggagaaaaaaagaaaaaacaggaaaaaaagggacaaaaggccaacacaaacggcaaaagacagacagagggcaaaaaaacaaaaaagaaaccagagacccacaaaaaagcaaaaccaaaggaagacaacaccccaaagagaggaaaaaggccagaggcaaaggacgcagaacagaagacaggcgagacccacgaaaacgggacagaaggcagacgaaaaggaggaaacgcaaacagagaccgggggagggacccaagcaaacagagaaagcaacacacacaacacaaggagcgacacaaaaaacgcagaaacaaagggacgcaaggcaagagcaaaacgaggcaagaaaccacgggcacaacagaccaaaaagcagaggagacggacagagaaaggaagcacaacagaaagagagaccaacccgaagcaaaggcccaaaccaaaaaccacaaaaaaggggggggaaaagccagagacagaaggaacagaacacaaaacaggaaagggaccaacccaaacgaccaccacaaagaaaggggcgggaaaaaccaaaacagaggggaaacggcacaacccgaaaccaaacaggacgccacgggacgagccgacacgcccaaaagaccaaaccaaaagaagacccagcgaagaagccacaccaccacgccaacgacccagaaacaggagaagagagagacagccaaaacccaaacaggccaaagcggcacaaaaggaagcccacgcaaccacaaggaaaaaacaaaaaacagcggcccgggccagggcccacaccgaacccagacgggaagccgagggggaaaaacacgaggccaggcgagaccagccgggcaacacaagagacgccaccaaaaaaaaaaaaaaaaggggggggggggaagaaaaaacaaaaaaaaaaaaaaagaccgaccagggcccagccccgcaaaagccaaacgcggccagcacagaacagcacaaaaaagagaggccagacaggacaaaaagccaaagaccaaaaaggaagcgaaccccaacgaaacagcaccccaaaagcaccagcaaaccgcgagcaacaacagacgcagaacagaaagcacgcaggaagcagaaagcaacacacaaagaaaaagaaagaaagaaaaagaaagaaagaaaaaagaaagaaaagaaaaagaaaaaaagaaaaagccaacagaagaaaaagacggccccaaacaaacaaaacaaaaaaagacggcgggagcagggccagccgaacccaccaccgggaggcgagggggcagaggcgagccaggagcgagaccagccgggcaaaggagagaccccgcccacaagaacacacacaaaaaaaagccgggggggggcaggccagggcccagcacaggaggcgagggggagggcgagccaggggggggggggggagggcaggagccgaggcgcgccacacacccagccgggagacagggcaacagagcgccccgccccaggcggaggagggcgcgacccggccacgcaacccgccccaaggcaagcgacgcccagcccccaagagcgggaacaggcgcaccccaccagcccagcaagaaagcagaaagggggccacaaggccaggaggcccaaacccgacccaaggaccagcgcccggcccccaaaggcggaaacaggaggagccaccgcaccagccaaaaaaaagacgagaacccacaggcaccaaacaccaagagcccacacaaaaaagaagaacccacaaagaaccaccaaaaaaaagcaacagaccacagccacgcacggaagagaagaaggccgcagaagacaccgaaagaaaaaaccacaaaacaaaccagcagaagcaaagccaagccaaaaacaaaccgaagagagacccagcagaaaaacaccacaacacaaaggaccccaaacaccagagaaccaggaacccaaaaaggaaaaccaaacccaaaccaagaacaagagcacccaccccccaaccccacccaccaccccacccacccgaacaaaacgaaacaaagaggagagcccgaggaaaagcaacacaaagaaaccacacgccaagaacacagaacccccccccacccacccccaaaggcaaagacccaaacaggcaaagccaagagaacaagaccacggcacaacccagagaaaaaagaccgcaacgcaaagccaccaaaagagggcagcacaacaaaaaaccaccccccccgaaaacaacacgagaaaacccggccaaaagaaccacaaaggaaaaacagagcaaaaaaagcaacagcaagcacagagcacaggcagagaacccaggccaacggaaaccacccaaacacaaggggcaggaaccacaaaaggagaacgggcgagaaaagaaaggcacgaaaggaaacaaaggcaaaaaacacagccgaacaccaagacaaaaaagaacggcggagaaaccagaaaccagaagaacaaagcaaacaaacacacacacacgacaagaccacaaagaaaagaacacgaaaagaagaccaagagggagaaggaccaaaaaaaaaaaaaaaaaaaaagccaccgaaggaaaaccccgaagaaaacacggccgcaaacaagcagaaccaacaccaaaaacagcaaaaaccagacacacagaagcagagacaccgcaaaacaaaaaacccagaaaagagaaaaaaaaaaacgcaaccacccccgacaggaaacaaaacagaaagagaagaccgcagcccccaaaaacccccccccccccaacaccaagaggaacaaaccgaaggacgcaccagcaaacaacaagaacaagaagaccaaacacgggagaggacaccacgcaaaccagccaacagcacagagccacaagcagaaagaaaacaaaacacaagggcggggaaacccacccccccccccaccccacgccccccagacaaagaacacagcacagaccaagaaccagaaagagacacacccagccccccagaaggggcacaccaacaacgaaagcgaggagaagaggacaaagaaaacaaaaaccaacaaacccagccgcacgcacaggaccgggcaaacccccccaagccgcacccacgaggaggaaaaagaccagacgagccagcgccccaacaaaaggggaacggagaaaagaaaagcaaaaccaagacaaggaccgcccaaaaaaaacaaaacgaaacccagaaaaacagaccgcagaaggaaaagaagccaaccaaccaaccagcacaaaaaacaaaccaaagcacaaacaggcaacaagcaagaacagaaaacccacaaacagaaaaagcaaaccaaggaaaaagaaaaagaagagccagcaacagaacagcacagggggacaaaaagagggcccaagaacacaacgccaaacaacacaacgcaacaacaaagaaaaaaaagacaaggcgaaacagcacaaacaggcacaccaagaaacagcagaaggagaaaaacgaagaaaagcacaaacagaccaaagaaaagaagaaaacaagaggcgaaaagaaaaggaagggggaggacaggccagaagacagcggaacaaagcggagcaacagcggcaccagacgcacaaaaccacaaacaaagaaccagcagacaaccaggaaacagccagccaaggcccgaaacccacacaaagaaaagacacaaaaaacgcaagagaggaaggagacaaaaaaacaagccaaaaaaaaaaaaacaaaaaacagacaaaggaaacagaagacaaagccaacacacacccaggccaaaagaaggaaaaacccaaagaccaaaacaaagaaacaaagcaacccaccaccacccacaaaaccaaagaacaaaggccgcaaaaacaccgcagggacagaaacacaaagcacgaaaaaagagcccgaggccaggcgggggccacgccgaacccacacgggaggccaaggcacgcaggcagacgcgagccagccgaggacaacagccgggcagcacggcgaaaccccgccaccaaaaaaaaacaaaaaagcggggcagagggcacgccgagcccagcacccggggcgaggggaaggacgcccacccggcagaaggaggagcaggagccgagacgcgccaagcacccagccggggacagaggagacccgccaaaaaaaaaaaaaaaaaaaaaaaacaaaaaaaagagccccgaacccagcaccgggaggccaagggggcagacacgagccaggagcgagagcagccgggcaacaaggcgaaacccccacacaaaaaaaacaaaaacagccgggcaggggcgcacgccgaccccagacggagaggcgaggagaagaacacaagccggggacacaaggcgcaggagccagaggccagcaccaagccgggagacccgccaaacaaaaaaaaaaaaaaaaaagagcacaaaccaacgggcaggaaaccagccaacgaaaaaaaacagagaccaagcacacaacaaaaaacacgcaaccgcaaaaacagacaacgcacaccacaccaaaaacccacaaacccccaaccaaacaccccccaagaaaagagcccggaccgcacacaagccacgcaggggcaaacccaggacacaccaaagaggcaaaaaggacaaaaacaaaaaagccacaacccaggacgaaacaaacaaaacaccacaaaccccgcaggacgacaccgcagccccagccgcacgacacgaaacgcaaccacacgcaaaccaaaaacaggcaaagagaaaacacaggaaaaaaacaaaagacaacaagaccacccagacggaaccccaagcagaagccagacagaaaaagaaaggacaccccaaagacaggcaaaaccgaagcacggacaaccaaaaccaagacaacggaagccacacagacgaaaccaaaagaagccagccccccagaacagagcaggaaccaaaagaacaaccacccaaaagcccccacaaccggcccaccaagacagagacagccaccgcacccagacggaggcagggggaccagccacgcaaccccacccgggcaagagaccgccagcccaagagcgggaaggcgcggcacagcccagcaagaagagagacgaggcaccagcagccaggcggcggaacccgacccaaggacgcccaccagcccccaaaggcgggaacaggaggagccaccgcaccggccccaccaaaacgaacagcaaaagcaacaaaagggcagcggaacaaaggaccagcacgacgaaaagcaaaagaaaaaagacaaaaaacaagagacaagaacagacaaagcacaccaaaaaaaagcccacaaaaacaagcaggcacagggaagaaagcaagggaaccagacacagacggcaaggcgagcacagaagaacaaaagaaggaaaaagggacgcaaccaaacccaagaaacacacaccccacgcccacgcagaaagcgggagaaggaaaaaacgaaaacacccaaacaccaacacaaaagaaccccagccaaaagcccaaggagaaagaagaggggagaaaagaggaaacgcacgaaacccaagaaacgaagccccaacgcaacgcgagcaccaaaacaaagcagaaaccagaccccaaggcaacgagagagaccagccaacccaaaccaaaaaagcagagcaacccagaaaaacaagaaaaacaaaaacccacacaaagaaaaacaccccgaaggcaaaaagacaagcacaaaaaaccaggggcccgaaaagacaagagaacaaccggaaacagaccgagaaacaagggcacaaaagggagacagaaagggacaccagaaaacacaaggaggagaagacaaagaaaacccagaaagagaggacacccaagcaacaaaacaagacaaaagacagaaaacaaggaaaaaaggacaagaagaaacgaaaaaaagaaacaaaaaggagaagccccagaccgagaggcacacccgagaaacaggacagagaaaaaccagcaaccgaaaaggccaccaagaaagagaagcgcaagcaacaccaggaagacacagaaacgaggccagacaaagaaacaaaaaagcaggacccacgaaacacaaaaaggggacccaaaaaacccagccaaacacaacagcaaaagaaaaacagaagcagaaaaagacggaaagcaaacacaacaaaaaaaaagagcgaaagcaagaacaagaaaacaaaagaccgaaaaagcgagggagacagccaccacaaaaagacaacaggacaagacgagagcaaagcaccacaagaaaaccaaaacacccggacaaaaaaacaacaaacgcaaaaaaaaaaaaggccaggcacagggcacgccaaaaccagcccggggaggccaagggggaggagcgaggccaggagaagacagcgggcaacaaaagagaccccaccaaaaaaaaaaaaaaaaagagacgggcaggggcaagccgagccagcaccagagggcaagacaggaggagggacaaagccaggagcaaggcagaagcagacagccacgcaccccgcggacaacagagcaagacccgccaaaaaagacaaaaaaaaaaaaaaacagcgcagaggaggaaacacaaaaccaggagaagaagaaaggcaaaaaaagcaaaacccaagacaaacggaaagccaagggaaacagaagaaaacaaaacagaagcagaagagaaacaaaaaacgaacgacacaaggggaaaaaggacaaaaaagacgaaaggaggggagaaacagggaacaaaaggcaaccacgaacgggaaaagacacacgacccaaagagaaaaaaaaacaaacagggacagaggccacaccgaacccagcgcgggaggccaagacaggaggacacgaggccagaagcaagaccagccgggcaacaagcgagacccgcgcacaaaaaacaaaaacaggacagggccacaccgaggcccgcgcggcaggcagaggcaggaagacacagcccaggagccgaggggcaggaccgcacacaccacacacacagccgaccgggcaccagagcaagacccgcaaaaaaaagaaaaaaaaaagaaaaccagagaaaaaaaaaaacacccaaaaaccaccacagaacacagaaaaaaacaaaaacaggacagcaaaagacacacgggcaaagggaggaagaagcaaaaaagaagagaggacaaaaccacggccaaccaaaacaaccccccccaagacacggcacaaaaaagaagaaaaaacagaaaaaaaccggccccagccgcggccaggcaacacaagcccgcgaacaaaaaaagacaagaccaagcaaacaaagaaaacaaaccgccaaaagagagaacacaaagaggaccacacagggcaaggggcagacccccgaaaggacccccgaaaaaacaaaacagagaacaacgagacaaaacacacacccaaaccacaacagaacaccaacccacagaagaccaaggcacaaacaacgaaagccaaaaggcaacacaaccaccccagcacaagcagaacacaaaggaccagacaaacaagaccaccaagggaaaaacaagacgccaacaagaaaagcccaagcagcaagggaggccaggcggcccggcccaaaaccccacaaccgagcaccccagagacacaagagcccaagcaagaccccccacggaaccccaccaaggccccagagagaaagaaaggaagaaaccaagacaggcagggaccagcaaaggggacacgcccggccacagcagacagaagggaaaaagagacagagacgcaggaccaaagagacacaacacaaccgcggagaagagccgccggcccaggcggaggcagggcgcgaccggccacgcaagcccgcccccaggcacgccacccgcccagcccccaagagcgggacaaggcacccgcgaccacgcccggcaagacaaaaagagacagagcgccgcacccaagcggacgcagggcgcgacggccacgcaaccccacccccaggcacaccacccgcccagcccgagagcaggacaaggcacccgccaccacacccggcaagaagaaagaggggggcacggagccaggaggccgacgcgacccggaacacccgcccagcccccaaaggcgggaacagggcagccaccacacccggccaacacaaccaaaacagaaagccacacgcaaccaacaaacacagagcaaacccacacaccgaacccccccaacaggagaaacggccccaccacaaaaacagcaaacagaagacaagccaaaagcaaacccagccagacaacaacaaaaaccaaaaacagaaccaaacagagcaagccaacgcaccgaggacagagcaaaacaggacaaaagaccaaaaggcaccccaggagaagaccagaaaacggcagcagcagaccccgaagggagcacaggagggggggcgcaaaccagaggaaacaaacaggcaaaagcagaaaggacccagaagggcccgcccccaccccaccccaccaaaccacccacccaggaaacaacacaaccccaaacggggccccaagaacaaaacaacgacacccccacacaaaaggagaacacacagagagaacgcaccacgacgaagggggcgaccccaaaccaagaaacgaccccaaagggaggggggcaagggaggggggcaggggagaaccccagaaagaaagccccccgggacggggggaggagccacaagccaccacagcagggaaaaagagccggcgcccccccacggcgcccccaccaggaccgcacagccaccccccaccgcagaaggaagcccacaccccaccagaagcagagcagacggccgacagccgcaaaaaccaagccaacaaaaccccaaaaacccagcccaggaccagggcagggggccaaccgacccgagccacacggaagaacgcgggccacacaaaaaacgcaaacaacgaagcgacgaggaaaaaaaaaagcaaaaaaaaaaccagaagaaaagaagcgggccacacaaagggccgagccgcagccaccgcaggcgaggggacaagcggaaagcaagacaaaccaagacaaggaacaacaaccaagaaagcacccaacagaacagccccagccacagggcaaagcccaggaaccaccacgagacgcgaagaaaagaaagcgcaaccgacaggacaacggggaaggcaccgggaaacgagagggacgcgagcaaaaggcagagggcaaaaaacacacaggccaaaacacaaacgaacgccccccaaaaaagcaaaccgaacaacagaagaaacacagccaaacccaaacgaggggaccaaagaacaagaccaaaaaacaagcaaaaacacagagacaaagaacgccaaagaagacaggaaaaagaaggaaacgagacgcaaaaaggcgaacggaacaacggcaaacaaacaaacacacacaggaaagaaaaacaaacaagaacgagaggagaaacagaaagcaaagcagccaggcacagggccacaccgaaccagcagggaggccaaggcaggggacacaaaggcaggagcaagaaagccggccaacacgggaaacccgccacaaaaaacaaaaaagagccgggcaggggcaagcgccgaacccagcaccgggaggcgaggcaggagaaggcgagcccgggaggggagggcaggagccaagacgcaccacgaacccagccgggcaacaaaaggaaacccaccaaaaaaaaaaaaaaaagccaggggggggggcgccgaaccagcaccgggaggcgaggcaggagaagccgaacccaggaggcggagggcaagagccgagaggccacgcacccagccggggacagaggagacccgccaaaaaaaaaaaaaaaaaagaagacagcaaagcccggcggaaaacacaaagagaaaaggaaagggggcacagccaacacacaaagaaaaaaccaaagcagggaaaagcaaaaagaaaagaccagggaaacggaaagcaaaaaagaaagcaacacggagcaacacaacacacgcgaaacacaggaaaagagcccccagaaaaaagaacagaaagggacagaagaaagacggcaaaaaacgagaaaccgacaaaaacgacgcaaaaaacaaagaaagcgcaggcagcaacaaaaacacaggccaaaaacacaaaaaaaaaaaaaaagacacaaggagccagccaaaccaagacaaaagacaaaacgcacgaaacacacgcaaaagaaaaaacaaggccaccaacacaagaagcaaccaaacagaccagcagccgcccaaagaacaagacaaggcccaacaaaacagacaaacccaacgcacacgcaaaggaaaaccaccaacaccaaaggaaggcacggggaaaaaccaaagaccaccccaaccagaaaaaaaggcggcaagggcacacaaaacgcaaaaagaccaacaagaaaaagaaacaaaaaaaaaagagagagagagagagagagagagggagagagagagagagagacagagaaagcgcgggcccaggcggaggcagggcagacccgcccacacaacccccgaccccaggcaagcagcccgcccagcccgagagagcgggagcaggcgcccgccaccacacccagcaagaagagagacagggcaccagggccacgcggccaaacccgaccaaggaccgcccgcccagccccaaaggcgggaacaggcagagccaccggcccagcaaaaaaagcaagaaagcccccaccaccccccaaaaagacaaaccaacgaaggagcagacaacaaagcaggaaagaccagaacagcaacagagaaaaaacccacccggaagcagagccgacaccaagggaaagcagacgaccaccaacaaaaggccccaccggccaggcagggcaggcccaggcgggggacaccgaggcaggagcagaccacccggccaacagggaaacccacccacaaaaaacaaaaagcgagggggcacagccgcaaacccagcacgggaggcgaggcggagaacgcgaaccaggagggaggcgcagaagccaagacacgccagcaccacgcaccagccgaacaagagcgaaaccgccaaaaaaaaaaaaaaaggccccaccaaccacaacccacccaaaacaggggacgcagcacacaaacacacacacacagagacagacacaaagagaaagagaagaacaaaacaagaaaagacgaagaagaaacgcaggaaaaccccccaaaggcagcacccaaagaaaagcccggggacagaaaacaggaagccgcaggaccacaacgccccaaacaagaaaaccagaggaccacgggggcagggcaccaagcaacaacagacaaagaaaaaagaaacacaaaaagcagcaaaaaaagaaaaagaacagaagagcaagcaggaaaaaccgagagagcaaggaacagcaaagggaaaaaccacaacccacagggacaaaacaaacacaaacccgaaaccccggcccgccccaggaaaaagcaagaaaaagaccagcaaaagacaaacaaaaagcaagcgggccagacaacaggcaaggacgacgaaacaagacggagaaacagcaaccccaccacccaaaacggcaaaggaaaaaaagaaagcaaaaaaaaaaaaacccccgaaaaaaacaaaggccccagagaccagaaaagcacaaccccaaaaaaagcacccaacaaaaaaaccaaacgacaaaaagaaacccaaccaaaacggaaccacacacaccgaaaccacacagaagaaggaggggagaaggggagccaggaaggagagggcaagaagacaaagaaagaccagaaggcaaagaaaaagaaaaaaacaaagggaggaacaccaagaacagaacaacagcagcaaaaaaaccaagaacaacgagacaagagccaccgcgcccaggcggaggcagggcgcaaccgaccacgcgaccccacccccaggcaaggaccgaccagcccccgagaacgggaacaagcacgcaccaacacgcccggcaagaagagaggggggcaccagggccagacggccaaacccgacccaaggaccacccaccggcccccaaaagcgggaacaggggagccaccacgcccagccaacaacagcaccgagaggcacgggcggagaaccgcaaaacccaaaaacccaagggacaaaagaccccccaaagggaaacgggagagaaccaagaaacgacaaacacacagcagaaagaaaaaaaaaaaaaaacacccagaacaaaaggcagaaagcaaccaaacccaacacaggggaagaaagagaagccagcgagaaaaggcagaaagaaacaccaaagcaccgggagagagacaagaccccacacacccagcagccccaaccaccgaccaccgaagcaccaccagagacaacaagggcaccaccaacagaacacacacaaagaaaagagcaacagaaaggaggaggaagacacacacaacaaaaaacaaaacacaacaggcacagagaaaaaaaaggaaaaggaccaaaaacagcccaagcaacccaagaacagaaggaacaacaaacaagcaaagaaagagggaaaaggcagaaacccgcccaaaacgccaaaacacaagagaaaaaaaacgaaaagaaaaacagcgggcaggagcaaaaaagaagccaaggccacaacccaccaagagaacgaccgcaaaaagaagcgcggcccccccagacacgcaaacaacaggggaagaaaacaccaggagcaggcaagaaagcacccaaaggaaaaaaaaaaacgcagcccaaacaaaaaaaaaaaagagcagcacacagacgacagacacgcaagcccgacagaaccaaacacagcaagggccaccaaccccagacagaggggaaaacaaggacagagaagaagaaccgccaaaaacacagcagcaagggagagcgagacgcaccaggggcgggccgccccaaaaaggcccgcagagaccagacacaggcccaaacaacacaacccacccccacgccaccccccccaaacagcaagaccccacaagacaccacccccaccaccaagccacaaagccacaaccacagacccgagcgaacccgcaaaacagacagaacgaggcaaaacacgaaacaccaccaacgagcacaacaacagcggaacaagcaccacgcaaaaagaaaagaaggaacagacccaacggcgagaaaacgaggccagagaggcgagaggccagccacagccgaaaagacagagcaaaagacacacagccaagcgaagaccaaggcaaccagacacaagccccaacaaccgcccaccaaacacagagcaccaggacaacacacagggaggaccaacaaagacaaaaaaggaaaacggcaaaagcgaggcagagccgccggcccaggcacaaccggccacacaacccgcccccgggcaagcgacacgcccagccccagagagcgggacacaggcgcgcgccaccagcccggcaagaagagagacggggcacaaggccaggcggcggaacccgacccggacacccgcccggcccccaaaggcgggaacaggggagccacgacgccaggcccaaaccgccaaggaaaccaacccccaaaacaaaaaggcccaacaccaaaaaacagggccaaaaacagaggcccccccaaaaaaacgaaaagggcaaacaaaaacacaccaaagaacccaagaaccccacccagaccccccacacccccacccccacccccccagccacagacagccccaaagggagcaaaaggcgccaagaacgacaacccgcgcccagggaaaagcaaccgacagcacccgacgagccgcaaacaaaccaaccaccccaccaggaaacccacaaaagcaacgaaagccaacaaaaacacccccggacaaaggagcagcagaaccagggaaaaagcagcaaagccaaccaaggaaagggacaacacagacagaccaaaaagcacaaaacacaaggaaaaagcacaggacccaaaagacaaaggggaaaaggaaaccagacaaaaaacaccgcaaccagaacggaaaaaaccgccgaaacagggacccgcccccagcaagccacaccagggacaaaagcagaaagacacggggcggaaaaacccaaaaaagacaccaaacccccccaagagcaaacaagaaggaagaaaccaccccccaccacaaaccccgacaccgccagcaaccagagagggcgggggaggggagagggggagaaaacagaacgcacgaccggcaaccagcccggcccacccaaaccaccaggcacggcgagaagcaggacggcacaggaaccaggaaaggccaccccacagagaacaaacccagaagccaccaccccggggcaacacacaccccacccggacaaaccaagagagacaaaaaagagcgaacacacacacaaagaaaacacagacgaagcgggcagcccggccaggcggcgcggggaagcccggagaccacgcggagccgcggccaaggccaccgcacgccccgacgggaaggcgcggccgcaggcggcggaaaagcagcgcgcggggcccagcccagccccacgcccggaccccggagcagaaagcccggccggggcccagccccccggaggccggcccggccagagcaaaaggggacgggccccacccccagcccgccccccgaccacaccgagaagcccaccccgcgacgccgcgcccgggaggaggcaggagcgcgacgcgcggccgcagggcaggagcgagcggccccgcgccccccgcccccggccccggcccgggcccgcgaggcgcccggggcgaggcgcggcggccgccccgccacaggagcgccagcccccgcccgccgccgcccggcgccccgggcaggcccgcccaggaccggagaacggagggagcgccgacgcccacgccgcccccgccgaccaccacgagccggaccccggccggagccgcccgccagccggccgcggccaggggacgcacagagcccagccgacgcgccgagccgccgcgccgcccgcccaggcccggcccggggacgggcggccggcgggcgcgggcgagcggccgggcggggcccgggaccgggaggcgcggagggccggcagcgcggagcgcggcgcggggacggcgggaccgcccgaggcgcggagaagcgggggacggcacgggccaggggcggcagcggccggggggcgcgccccacgcgcccgcagcgccgccgaacgcagccccagcgccgccacaaaggccgcgggggccgggcgccaggcgagggcgcaagcagagggggcggggaggggcggggccgcgccgcggggcgaggcgggaggaacccgggccagacccccacggacacaccgccaacccagccaggagcgaggcggagagggggagggggcaggggaggggacgaaggcagaaagagggcacccaagcagaagggaggggagaaaaaacaaaggacggcgggcgaaaaaagggcgggcaaaaccaaaaggagagacaacccgcaagagacagagggaccaagggaaaaacagaggacaggagaggaagagcggcacagaagaggggagggcggggggacagggaagaagggacagggcgagcaggagaaaagcaggagagcgcagggcaagacggaaggacagagaggcagacaggcaagggcagagggacaaaggcagaaggaagaggagggag

SEQ ID NO: 313 - RNA, 5397 nt, Homo sapiens
cccaccgaaagcgcccgaggccgagggcccagcccgccgggcagccacgaacgcgagccagccaccaggaagggcccgacaccgggacggcgccgaagaaccaggccgagggggcggcgccgcgaggccgaaacaggcaggaagaggggaaaaaaaaaaacgagaaaaaacgaaaaaaaaaccacccacgggaggaggaccagcgggcccccgcccgccaaaaacacaaacacagaagaaccaagcacaagaacgaggaggaaaaacagaccgaggcgccgcagaggaaaagagaaagaaaagaaaaagccagcacaacccaaacgcaccaccagcccaagcaggaggaggcgggaagcaagagaaaggaggaggaggaggggaaaaaacacgcccccccaaccccggccggccagcggacggaaaaacacacacggaggcaggcgccgccccccaaaaaaacccagaaggggacggcaggagggaggggagaggaggaggaggaggagggaggaaggcgcaggaggcggaaaaaaccgcccgaggccggcgaagagccacggcaaacacaaacaacgccacggaggaacccagagcccaaagaggggcggagaaaaaagcgagcgagaggaagagggggaggggaaacgagagggagagggaccgagaagggggaggaggaagaaggaaaagcaaaggaaccgcagccggcaccaagcggggcgcgacggcacaaccgaggaaagggacggcgggcggaccgggagggagggcggaaagaaagaggaaagggcagaggacaacaggcagcccagcgcagaccgagaacacgacaaaaaggaaacaacaaaaccagagcacaacccgaaccgccggggcaaggcaagaaggaaccccagcaaagccgcaggcacgcaaggcggcaggacggaaagcgcgaggagggggggggagggggaggggggcaggggggggggcaagacaggcgggcgacgcgccccaccccggcgcccccgggcccgggcaccgcgcgaggggggcggcccggccccggaggggggggagggacccgcagcgccgggcggggcgggcgacaccccccgccccgccgcgccgcggggcccggccgcggccagggcgcgacagaaaaggcccaggaaaagaggccgggggcgggcggccacgggggggaggggaggcaggggcggaggcggcaggggcggggcgcgggggccgggccgcggaggagagaagcaaaggggaaaagcggaaagggaaacccccccgagaaagggggaggagggagaggcggacaaagaaagggagaacgagacaaaacggaagaccgcggcaaccccaggggacgcagaaaaagcgagcccgccccgccggaggccagagagccaacaaaccaagaagagacaagggggcgggggaggagggcccggggagccggggccaacaaaaggaacggagacgagcaaacggaaacgaaggcaggcggggcagggaacccaacgcgaaagaggacccaccaaaggcagcaccagaacgggaacaggaaaacaggacagaaaagaagaaaacaaaaggaaagaaacaaaacagaaaaaagacaagaacaagacggaccacggagaaaaaaggaccgaaagaggaaaaagaacacggaaacaccggaagaacagccgcccgcaaaaccggagcaaaaaggacaaaaagagaaggagacaaacagggaaggcagaaaaagagaacagcaaagggaacacgaaggaaggaaccggaagggcagacaccaaaagcaacgccacaggcccgccaagcgaaccaacaaaacgaaacacaccacaaaacacacgaaaaaaaaggacaaaaaagggggacagacggcgacagagaacgaaaagagccagccgaaagaacgggaaaacaagaggagggaacaaaagcacaaaaaaacagcaaagaagaaagaccggcccgggagcaaaagaaaacaaaaaaggaaaaagaccggagaacaaaagccaggagaaagcacacacaggaaagcacccaaaccacgaaaacaaccggacaaacacagaacaaaaaacaaaggggcagcgcccaaaacaacaacaggccggggacgagccaaaaacgagaccaaggaaaacaccaaagcaggaaaaagaccaaaaacagccagcgcggcacacaaacaaacaacagcggaaaaaacaagggggagaaaagccgggacccgaaccaacggaagaacaaacggaagccacaggaccaaaaacaacagagaaacaagccagacacaaagagagaggggaacagccacccacccagcccaagcaaaggggagcaaaagacaggaggcgcacagcaccaagacaaagaaccgggaacaagaagaaaaaaacaaaagccagaagacccacacaaacaacggaaggcaccagccccgaagcaggagcccaaaaggaacccacgaagaaagaaccccaccaaggccgggagcggcgagcccaagcagcgaccggacagcgcacccccacgcgaacgaggacgacaaagcggggcaggaaaaaagaaagcagagaaggccagaccggcgacccacacgcaggggcaaaggcgaggggcagaggggggcgccacccccccacgcccggcgggaccagccggagccaagccgaaacccccacgcggggggcacacaagcccggcggcgccgggcccccggagggcaacaggccgcgcgaacggcccccggaccgacgaaacagaggcgaaaaggaaaccggacgcccccggaagcgccgccaaagaaaaaaaaaaaagggccccgggagagaagagggggcccccggccgccccgagaaagagggcgggacccacggccacagggggagggccgcggccgccggccgcccggagggccggaccacggaccgcccccccggggcccgccgcgggaccgcgggccggcccccggggcgcgccgagcgcggagcggggccgggccgcgccgcgccaccccaccgagccgccggccagcgcggggacgcaccgggcagcgggggcgaccccccgcacccggccaggcggggcacgaggggccaagggcccagggagcggacccacgggggagaaccccgccgaacccgcgggcgcggggcgggccgcgagacggcgcgcaaaagcggcccaaggcggggccccgcgcccccggggccggcgccgagccaaggagcaaccggcgcgagagagacaccgccccgcgcgggcgggggccccccgcccgaggcgacggggggaaccacgccgcggccgccccgccagagcgggcggcacaggccccggagccgccccggaccacgggcgcgaaaaaacccgcccccgggggagggagggggggacggcccccgccgcccgccgcccaacagccgcccccagccccaacccccaaggaagaaagagggaggaacgcgaggaagggggaaagcagcgcgccggggggagcccgccccggcgaccgcagggcccgcacggcccccccccccagcgccagcgcccggaggcggagcgccagccagcagcggagcacaccgcccgcccaccaacacagaggagcgccacaaaacaacacaaccaaccagccaggaccagaaccgggccagagaaacgaccgcccgcccgccccccaaaccccgggccacaggggaagcaaaacaaacaaccccccaaaaaaagcaaacgaaaaaccgggaaaacaacagcgagaccacgcggaagcgcccaagaccaagaagcgagaccgacccaaggaaacgacgagcgaaagcaacacgacgggggagacgggagaaaaaaaaaagaagacggaaaagcacaaaacaaacgaaaaaaaaaagaaacgagaaggcaaacagccacaggggacaggacgggcgggaggaaaaaaaaaagcgggcacaaaaaacagacagaaccggccggacaaaaaaggaaggaagaaaagggaacaaaaacagacaccaacccaacggagaaaaggaaagaccagaacaaaaagaaggcagaaagcagcgacaaaaaccgggaaaaacggaaaagaaacagaaaaaaaacgagagaaggaaacagggagcaaagaccgggaccaggagacacggagacacccgaggcgaaaaaaaagcggagccaaaaacaaagaacaaaagccagaccaaaaaaaacaaaaacaacgaaggagaaagaaaaacacaaagagaagaacaaaacaaaacagaacaacacacacaaggggaagagaacgcagaaaaacacagaaacaagaaaacagaaagggaggagaaaaaaaaacaaggacgaagagagcaaagaaagagaaaaaaaaaccacaccaagaaaaaaggaagaagaaggaaagacagggcaaaaacaaaaaggaaagaacagagaaaacagaggaaaagagaaaaggagaaaaaaaaagcaaaaaacaagacaagccaagaccaaaaccggaaaagccaaaacaaagaaacaacaaaaaaaaaacaaacaaaaaacgcggagagaaaccaaaacaacacaagcaggaaggaaacggaaacagcaaggaaagagagaaagcagagacaggaaaaccgaaaacaccacagggaaaacaaaaaccaccggagaggggggggaaggagagacccaaaaagaccgggaagggacaagagcagaccagccaagaaaacagagggaggcagaaaggggaaagggggaggggcggggaaacggaaagaagggaaacgcgggcaaccaaccgcaggccgccaggggaaggaagagggagagagagaagaaacaagggaaaagggaaagaaccagcagaaaccacggaaagaacagaagaacccaccccccacaaaaaacgaaaacaaagcacagcgaggaggcagcagcacccaacaccacaaaaagacacagcagggcggcaaggacccgcgaccacaccagaaacaaccaaaaaccaggaaaaagacaaaaaacagcagaccagacaaaacaacacaaacccaggcagcaaggaaagagaagcccagcacaaaagaaagaaagagacaaggcagaacaaacaaccacgcaagagaaaagacaaaccaccaggacgaaaaacacccaagacaggccaagcgcccagcagagaccagcaaagagggaaacagcaggcaagaagggggggcagcaaaaaccagcgaagcaaaagaacgagcgcaaagaaaagagagaaaaacaaaacaacacccacaacacacaaaaaaagccgaaacagccaacaaccacgaaacagaccaaaaagaggagaaaaaaacacagaacaacggaacaaccccaaggagggca

SEQ ID NO: 314 - RNA, 28520 nt, Homo sapiens
aagaaagaacccaaaagcgacagagaaagcaagcagaccccagaagagacagggaacagagaaaaagaccaagagggcagagagagaccgaaaagaacaggcaggcagcaaggacacagcacagagaacgaggaccaagacccagacagggggggaggagcaccagcccaggaggcaggcacacacacccaaccaccaagggacgagacaggcaagcgggggagaggaaggagagagagaggaaggagccgggccaaggaaacaaaaaaaaaaaaggcgaaagaaaggcacagcggcgccaggaaaaccccaacagaacacacccagccaagcagcagagcaaaggacagaagagaaaaaagagacagcaggggagaccccgggccacaccaagagccgggggagaggcagaagagggcagcccgaagaaaggcacagcacacacccacaagcggacacagagacggaagcaaaacaacagccaaggcgaggacgacgggccagccaacaaacgagacagagccagggagcgcagagaaccccccccgcaagaggaagcgccaacggagacgcaaagaagaacagaaaccaagcccagcccaacaccccacagaaaagaaagaacgaaccaaccggagaccgagagcagcaaaaccacagccccaacagccgagccacaaagggccaggaaaaaacacccccaaaaaaccgcaacaaaaggggcgcccggcggccgaggacacaaaggaaaaaaagaaagccaagcgaagaaaaccaaaggcaacccaaagcgaggaaagaagacaaaaacaacaaaaaaacacccaaagacaaggaaaagccgagggagcacaacagcacagcgaaacaaacacagcaagccaaaaaacaaaaccgggccaacaccagaaggaaaagcgcacgagaccggaagaaaaaaggacggaacaccagcacacagccagcaagaagcaaccgcagagccagacgaacaagggaagcagaaaaggaccccaaaaagaaaacagggcgggcgcggggccaccgaaccagcacgagaggccaagacaggcagacacgaggcaggagcgagacaagccggcaacaggcaaaacccaccacaaaaaaacaaaaaagccaggcagcggggaccgaacccagcaccgggagcgaggcgagaacacgagccaggaggggggggcaggagcagagacacaccacgacccaacgggagacagaggagacccgccaaaaaaaaagaaaaaaagaaaagaaagaaaaaagaaaaaaagcacccaaagagaagggcaaccccaaaaacaagcaggaagaacgaagggcgcagaaacgcccccaaagaaccaggacaaaagcgagaaaccccaaggaacaacggcaacaacacgcaaaaaggcaaaacccaacaagccacaacacccccgagagggcaaggcaacagacccaccggagacgagagcaaaaagcggacgaaaagagcagaccaagcagaaaagcaacgcaaacaaaaaagacagagaacagcacaagaacaaaaagccccccaggccgggaagacggccaaggcaccagaggacacagggccgcaggacaaaacaacgcaccccacaaacaccacacgccagaaaagaaaagagaaaccaaccagaaacgaaaaagcaaaaaaaaagaaaggagaaaagaaacgaagaaggcggggcaaaagcagagggaccaggccaaaaggaacccaacagggaaaagacggacccgaaagggcaaaaaagaaagaaacacaaaaaacccccaggcaggcaaaaggcaagaaacaaagaaacaacaccgagagaagcaaccacccaacccgacaaggcgcagccccagaagagccaggagcgcccaggaacccaccaaaggcagagagagggacaagacgaaacaagcaaaagccgagagccgcgggagcaggaggccaccaagggcgcaaaaaagaagcccagaaagaggcgaaagagagaccaagagcaaccaaaaagggacagcccacgccaccgcgacaaaggccgcccccccaggacaggcaggaagggggccagagaccagaggcacagagagaaggcaggcacaaggcacaaggggaggcacaccaccacaaacccgccggccccccacgaagagcccaaagggaagcgaagcgagccaaccacccaaaggaaagcaagagcaaaaagaacgaaggccaaaggggacgcagaggagcagaaaaaagaggggaaagcgaaagggcagaaaggacacaggccagccagaagcacccgccccacgaggggggcccccccagaggcagagcggaacaggagacacagagaggaacagggccgaaggcgcggaacagagccaggggccaagccaaagagagaggcagacggcaggccgcaagggacaaaggacccaagaccggacaaagggagcagggccaaacgcaccgagaaaggagcaacacagcaagcacaggaagggcacaggggcaagcagggggagaacacagaaaaacgagccaaggaggaaagaaagaaacaaagcaaagaggaaaaaaacaagagggcagagccagagagcccaacccagcagaaacaggcaagaagcaaaacaaagaccccagaaaaaaaaaaagcaacacagccaaaccagaagacagaaacaaaaagcaggcaaggagaaaaacaaggcaaacccggagcagggcaggggggcaaggagcaacgaaaccaaagaacaacaacacaaaggcacaacaaggacagaacaccgagacacggaggggagagcaaacacgagcaaagagacagaacagacggcccacgcgcgccagggccccaaggcacaagaacaccacccaaacggaaaggccagaaccaccaacacaggacagaggacaggggccgggagggaaacagagcccccaggcgcccaacgggcaaggcaagaagaaagccacagcggaaaaagaaacccgaacgggcagggcacaggacgggacaaagcgaagcaccacccgaaaaaaagcgagaccaacgcccacaagcgcccaggcagaccgggcacaaaaaggcacaaaaaggacaaccgcagcacaagagagagaaccggggggggagagagagagagagagagagagagagaaagagagagagagagggagacccacaagaggagagagacagcagaagaacccaagcaaccaaccgcccccccgcaaacgaaaaccagagccccgaggaaagaagaagcagcggagcccagaaggccaccggccaagaccagagcagggaccaggacagcagaaagacaaaccccacaggacggaggaagcgggaaagccgcccaagaccgggagagcggccaagagaagaacgcaagcgggaaaacgaaaggcaacacaagcacaaggggagcaccaccccaacaaccacgacccccccccaccccaaaaaagaaaaaacggggacaggagggaaaaaaggaacaggcaagaaaggaaaaagcacacaggagaaagggaccacccccaagcaaccgagacaaacaaccaaacaccaaaaaagaaagacaagcacccgagcacaaaaggaggcaacacccaggacccaaacaccccacccccccacaacccccacaccccccagcccggaaccacccacccccaccagagcaaggaacccacaaaaaggagaacagcaaggccggccgccccacacaacaaagacccagccacagggcaaaaacggacggcgaaagacccaggaaagaccacacaccaccacggaggccacagggcacaaacagcagaaacagggcaacaaacaaggagggaaccggaaacgaccccggaaacccagcaggggagcgaacacaagagcaaagaaaggaacccaaacacccaaagagacaaacacccaccaacaggacaagagccccccacacccaccagcaaaccgcaaaagccaaacccagggagagaaccacgaagagcaccgagcagcagcgaggccccaaaccggccagagccgagaaagcacacagagcccagaacgaaaagcccaagagggacccaaacagaaccgcagagggcaggaaaaaccccacgggggcccacgggacgaccggcggcagaagcaaccgaggaccacgccagcgggccgggcggggaagccaagacagcccagaccaaagccggagaccccaacgccgagacaaggaggcagacaagcaaccggagagaacggaagagaaggggcagccaccgcaggaaccagcccagcaccaagaagagacgcccccaggagcggcaggcaaagagaccacacgaaaccagggaagaagggcagaaagggaacaaaaaaaacaccgacacgggaaaaaaagcacgagaggagccccaacgcgaaagacagcaacacgcagagacaggccaaaagaagacaacacgcaaaccaggaaaacgaccccaacgagccaaccagggagccagcaggcagggcccaacagcaagaaaaaccaaaccagaccacggcacaggagcaagaaagagagaaccaaaacccgaaaccaaaccacgggcagagaagagcaaaccaaaagaagacgggagaacaaggcacccagaagaccaggcgaggaaaagcaggacgcagccggagacagccgaaaacagaggccaggcgaggcacaaagaacaggcggagcggaagcggccaagcggaaggaggaaaagcccagcaagacggccacccagccaaacacaaacaggggccagggggcaaaaaaaagacccgcgaagaccccacaaaaggacccggcaaggcgaaacacgaaggaagcaacccgccggccacgggggaaacaccaccaacagcgggacaaggggaagggcgaggcaacagacaggggcgacagcgccgaggagagagccaacaccaagacagaaagaaggacacccgccagagcggggcaccccccccgcccaggaaaggccgggaagaaacgcaagggccaggggcgacggggaccagaggcgcaaaacacaaaccgaaaccgaaagaaaacacagcaaaacaaggaaaagaaaacaaaaaaacagccaacccaccccccacggcagacaagacgaccgcgacaaggagaagaggccacaagccacaggaaagagagacaaccacagacaggaaaacggggacacaacaggaggaccagggaaagccacaagccccgagaaccccagcacgcagaacagacggagaggaagcccagcggcgggaaagcacccgaggagggaagccagaaacgacagggaaaagggcccgcacaaaagcagcacccccggccgaagaccgcgaaaagcgcgccagagacaaagcccagaagagcaccgcgcaggacccaccaaccgggaggaaaaagccgaggagccggggaaacgcgggccaaaccccgacggaaaacccagggggaagccaaaccgaaaaaccacccgccccaccccgaaggccaacaaccaaagccccgaggcaacagaccgaggggcagcaccacgccccacaaaagccgcaagccacaaaacgcgaccagcaaaagaaccgagcaccagagccaagcacagcccagaacgcggacaaaaaaccgaaaacgaagaaccgaaccccgggaacgagcccaaaagcgacaaaaaaaaaaaagaaaggaggccacaggcccaggcgcccaaacccgggccaaggagcaacaccagccccaaaggcgagaaaggcggagaccccacaccggccagcacagcaagaaccgcgaaacacacaccgcccaggagacccgagccaagcagggaggcagccggagggagcagagagcggacaggcagaagagaggaaagagcccacgcgggcagaaacaacccgggaagacccagaagaaaggacggggggacaagcgagacagggacaccccaagcccagaacacgcagcgcagacagagaagaccaccgaggcggacaagaacgggagaacccggaaccaggcaaagaccgcccccacccccaaacagagccccccgcgagccaccaaagcgggggggaggacacaagcaccccgggccacaaccacagaccacacgggcagaccgaaggcagcacagcacgggcgcccaaggccgcggaccacaccggcacgccaggaccaaggcccggaaacaaacaggaggcggcaaaaccagcaggcggcccccagaggggaggcccccaagcccggggggccagaggacgccaggggcagggacggagcaaaaacagaagcaccgggacaaggcagcgagcggcaccaaaccacaagagagcccccaccccccccccacaggcagaggggcccacccagagcaccccaccccaaaccacgaagagacgccagacacgcccagcccaaggcccaaggccaaacagcggggaagcgccggccggaccaccccagggcaggggccccccggcccagggcaggccaaaaagccagcaaagggccaagccggaacagggacccgagggccgcgggccacccccggaccagcgccagagcaagccagcagccagagaccgccaaggcccgagagacgggacacacgggcagggccaagggcccagagcagggacgagcgccaggacgagccccaagacagcaggccccgacccaggaggcagaaagcccacgagcgagggccggaacaggggcccacagccgcgggcccaccgcgagcgagcggacaagagcaagacagcccccacccccccccaagcagaggaaggagccggagccccgaacgagagagggaaggggagggggagccacaccccggcgccccagcgagccagagcaccccgagccacgcccgggccagcagcaaggccccaagaggagaccacggccagacgcccagacggagacacaggggcgagcccggggagggcaggcaccagcagacgcgagacaggacccccagcaggccggaaaagcccccgggcaggcaggcgagggcggccgccaacagaacagcccgaggaggcccacaagcggcccccccccagccccagagacaccgcaccacccgcgcagccagggggggggaggggaggcagcaacaggacgcacccaggcccagagaagaagaaaaccagaacagaggccaccgaggccagaaggggccgagaagaaaccaggccgcgggggggggggggggcaagaggaaaccacccacacgccccccccccccaaacagaccagaagggccgagcacacaaacaaaaaagaggaaagagaaacggaggcccaaaggcccaccaagaaaaagagccaacccaacaaacgaaggaaaaccaaacgcaaaagaaacaggcgagcgagccacccgcaaaaaggcaaaaagcaaaggaaaaaaggaagcagaaaagggcagaaaaagagcaaaaaaaaacccaagaacaagcaagcacaaaggcagccaggcaagcagccgggcaccgcaggaaccacaccagcacacaacagaacgaggaggcaagcgagcaagaaagaacacagcaaggggaagaaagaagcacacacaaagagcaacagaacacaacagcaaacaccaaaaacacacaggcagcacagcaaggaaaggcaaaaaccgcaacaggccgagcacagggccagcgaacccagcacgggaggccgagggggggacaccgaggcaggagcaagaccagccggccaacaggcaaaaccccaccaaaaaaacaaaaaagccaggcgggaggcgcaccagcccagcaccgggaggcaaggcagaagcacagaaccaggagggcagagggcaggagccgaaagcaccacgcacccagccgggagacagaggagagcgccaaaaaaaaaaaaaaaaaaaaaaaaaaaaaacaacaacaaaaaaaacaaaaaaaacaaaaaaaaaaaaccacaacagccgagaaaaggaaccaacaaaaaagaaaaaagcccaagaagaaaacgagaagcacacagcagaaaaggcaagagacacaccagaaccaccgaacaggagaaacggcagagaaagacaaagacgagagaagccacagcccaaagcacacacaaacgcccacagcgaacaacggagaggcacgcaacccacccacagagaagaaacgagaccccaagaagcaacagaaaacaagcaacggagacagcggaaagcaccgacgaagaccaagaacgaagggaaaaaagcgccccagagaagacgaccaccagaaacgagcaaacaaaaaagcaaaaaccccaaccggggcccaggagaagggaggagaggccccagcacagaggagagcaaggaacgcaccaaccgagcaggcacacacaggcgggaggcacacaggggcagcacacggcagccgcagggcccgaggagcggggccgcaccccggggcaaggaaaggaaaccaccagggaagccgggaccacagaggccggcccagaggcggagagaggcccagagggacccccaggggcggcgaccgccaagaacgccaggcaaagaacagccaccacacacaccagcaaaccccagagagcccccacagcccacacccaaccaagcgggcaggccgcccaaaccgcagaacaaaagaagcccggaaagggccgcaggcacagcacagagaacgacgcggccaaagagaaaagaaaagggggcgccaggaaccggagaccgacaaaaacgaagaaagaggccacaccgaaaagcccaagcaaagagcccagaccccgggaaacgaccagaaacccaaacgggcaagcaagaaacacaagaaccacgacgcaaaggaaaaccacagacgcaagcaagggcaagaggggccacagaagagcggggggcaaaaaaaaaaaacaaaacacccagcacgcccacccaaaccaccagaaggaaggcccggcagacgaagccagaggagcggcgcccggaacaccacggcacacccagagggagagaggagaggcggagggcgggaggagcaacagcggcagcaagggcgcaacagcggcacagccgagcccaccaggcagccacggggacaagccacaaccagcacacagagaaagcggagccaaggggcgagcacccgaccgcccgaaagaaccccaggaacccaagcacaccaaaacacacaaaaaagaagaagaaagcaccgaagggaacacaagaaagggaaacgaagaacccaacacaaaagaggaaaaccagaaagcaagccaaaaaaagccagccccaacaaacagacaaaaagaggggcaaccagggaggaagggaaggaaaaagccagcgacccaccaaagaagacaaacgaaacagaccacacggaaaacaaaagacaagagcaaaaaagcaacgggaccccccaccccgcccaccaacccaaagacaaggacccagaaccgaaagggacagacaacaacaccgaggcagaaaaaaccgccacaagagcaagagaagcaaacaaagaagagaaaaccaacgggaagcccaacaagaaaggggcacaccaaaaaaaacacagaaggcaaaaagaggaacaaaacaaagaagcagacaggaaagaaagggcaccgaagcacaaaaacaaaacgaacagccagaacacagaggcccccaacaaaggagaaaacaccagaaaaggaacacgggaggagaacccaagaggggagcggcaacaggggagccaggcagcaagggaggggaggcagggcacaaccaaaaagggggagaagcacccagcacggccacacacaaagaaacagaggaaaaacggggcgacccacagaacacagcaaaggggaaagaggagacaccggaaggcgacaagggaagagcaggacggaagcgcggaggagcccccaaacagacggagaagggcgcaagcgaaaccggaggagcagaggagggagaggggagaaacaaaggaagagaacaagagggaaaccacagaggcaaaggagagcaggccaggagaggagacagaggaaaagaagcgaacggagccgagggcaaagggcgcggcaagagaggaagccacaggacaaaaagcgaaagccgaccagaggaccaacacagcaaccacccccgaagacgccccaggcccaaacaccacagccgccccaccaagaacccagcccgagcccaccgccagcccaaaaagagcaagacagccgagcaccccgccaacgccacaacaaccaaggacaccagcaggacaaaagaacaggccagaccccaaaccaccccgcccgaccccccaaaccagaagcacccccggccacccagcgcaaaggcaaccagacacaaaccaaagagaagcgcggcggagcaacagaaaaccaaccaaaggcaaaagaaggcacacagggccgaccaggagcgagggaggagagggagaaaaaaccaaaaccaaggacggggcgcaaaaaacgacaaaaggaagaaacaggagaaaaagaagcagaagccaacagcaggaagccaggagagagcaaagggagaggaaggggcaacaccaacagaggagaaaggaaaggggagaaaaggccaggaaaggacaaaacaaaagaaagaaaaagggggggaggacaaagagagagaaagggcgaggcaacaggcgagccacccaccccagggcaaaaacccccggggaagggagaaagaccaaggcccccggcaccagaccacccaagagggaaaggagcccacccagaacaaaacagccgaaagggaaacgagaaggcccgcacgcgaaaaaagcgggcaaaaaccagccaaagcacaagaagaggcaaccgaccccaggcgcacaggaacaaaagacaaagggacaggcagaaggggggcaacgaaagggaacacgaagggccaggaaagaccagccgaccaacccccaaacacaccaaggagcaaaaaagcaagagaagaccagaggccagagaagacgaaagagaaaagccaccagggcaacggggaaccagacggggaagaagcaaaaagccccaaggcccgacccgccccccgaaacgccgccaaggaccgaaccgagagacgcaggccaaggaggcagcaaaggacacaaccagaggcaaaaggagaaagaacaaaccaggcagcgccagaggagaggggaccacaggggcagagagagcgcccaaagaggccacagagaggggccccagacaggcccagcaaccgcaaagcagagcagcccagccaagaccagcagcagccaagcagcagaacgccagcgacgagacccacaaaaaaaaaagagaacaagcacagaggggggagagaaagaagcaaaaacagggaaaaccaacgaaggagaggagagagaacaccaacagaggagcaaggagagggaccaaacgaccagggggaaacgggaccaagaagaaaaaccaacgggcagcccacaaaacagcgcaaccggcgagaagaggaaccaaaggcgcaaaggccacccccgacagcaaaaaacaggaagcgcccccaggcagaaggggggcaacagcgcggaagaaggcggacggacagagaccgggaagcgaagaggagcacaggcgccagagcacaggagagcaacccaagaggaaccacacagcagaaggaaggcccgggagagaaccagcaaaaagcacagccaaacccgaggcagacaagcccggccagcacacaaggcggcaccccaggcacaggagcccacgccaaaggagcaccaacccaagccgcaacacccaccccaccaacggagcacaaacgcagcacacagcgcgccgggccgcagaaggcggcaccacacagacaccgacacacagcagaaagagaagcgcaaggaaaaaacaacagcagaccacaggccaacagcccaggcagagggcgcacacaggggcacgcgcggcagagggacgcgggcggcccagggaagagaggaagagccaagagagaaaagaaacaagacaaaaagaaaaacagggcaaaccgcagaaggagggccgagccgcagaggacgcacagggccggaacggccccgcagaacaaggggagaagaccaaaaagaaagcaaaaaagagcacgaaagcacaagacagaacagacaggccggggcaaaaagaagaacaagcccaggagcgacaacccagccacggcaagaagacagaacccacccagggacgcaaggaaaagagacaagcacgaaaagccagcacagacaaaccagaagcaccgaaaagggagaaaaagagaaccaagaaaccccaaaaacacccaacaagggaggaaaaaaagggacggaaaaaaggcagaggcacagagaacacaaagaggaagaaacaggaaaaacccagcccacagagaagacagaacccggaaggccagacacggggacagcaggcccccagaccccgggacaagcggccagaaaaaacagggacagaaaaaccccaccagaaagcaaaagagaagaaaaaagaagcaacggaaaaaccggccccggggagggagcaaggcagggcgcagcccggagccggaacacaggagacgcaccagccacgcggaaggggcagcagcggcaggggacagagcagaaggcgccacgccagcacacgaaacagaagccacagagggcccaggacagccagccccgaagacaagcccgaaccggacgcccacaagaccacccaaggccaaaacggacccagccagaagggccacacaggagggaaggaggcaaccacagaagcacagacccaggaggccaagcggcccgggaggagaagccgggcacagggaggaagaagaaaggaccacgcaaagaacaggagaccaacgcagaggaccacaagagacccaggcaggccaccccccagcggacaggcagggaaacggaagggaaagaagaaaggagagaaggagaacgagacaaaagacaaagagaaagaaagggcaaggaagagcaggacaagcaaaagaaaacagggaaagaaaaaggcaaggaagagaagggaaacgcaaggaaagagacaccaaacgcggacggaaggaacgcacgagaaagaaccagccaaaaagcacaggcacagagaaagaggaaacaccaacacacgaaggagcaaaacaaaaccacaaaacaaacaaaaaccacaaacaaaccccaccaaaacgaaaaaaacaaaacccagagcaacgacacgacgggaagacaaaaaaagagggaaaacagaaaaaacaaaccacaaaaaaaaaaaagaaacaaagacaaacagaccagaaggaccaagaaagaaggaaggaaagggaaacaaaagaaaaaaaaaacacagcagagaacccacggaaaaaagaaagaggaaaagagagagccaacagacaacaaaagcacggagacaacgagagaggcccaagaacggaaaacgaaacaaaaacccagaacaaaaaagagccacaaaaccggaaggagccagaaaaagaaggaaacaaacaaaagacagggaaaaaagggcaacggcgggcaggagcgagagggcaaacaccaggagaggccgaaaaaagaaaaaaaagagacgaggaaaacagaaccccaaagggggggcagccaacaggcaagagaaaagaccagcccgagggagaagaaacgccccacacgccggacgagacgcaacacagcccccgggccagccgcggccgccgcaaggaaccagcccagaaaggagccaacaaaaacagccgacacacacacacacacacacacacacacacacacacacacacacacacacacagccccaggcgccggagaaccaaacaacagcaacaacagcaacaccagaagccaggccaggcaaggagggcaacagagaaaccaaacccacaaaacccaaaaagaggcggccaaaaaacaaagaagaaaacgaggacgaagaaacgggcaaaaaaggagaagaaccaaaagccccagcaccccaacccacaggcagcaacccaacgccacggcaaggaccagaccgggaccgcagggagaaaaaccgcaccggggagcaggagggacacaggcgggaagcaacaacaggaaccgagagagaacgaccgagagcgaagccagcggaacaaaacagaccacaaacagaggcaccacggaggcagacgccaaaaccgagggcagcagggcgagagggaagaggccccagcccaaaggcaccaaccccggcccaagccccccaccgaaaggagagaggccaccaaaccgacccggccagccagaccccgacgacccccccccgaaagagccaagagacgaaccaccggaaccacaaacccccaagacaaacaacacacgcaaacccgccagggaaggaagacacaggcagggaagcccggacacggagggacaacgcacaacaaccacgcaagggaaagaccccagcaccccaggagaagagcagaaggacaaaaaaaaaaaagaaaaaaaaaaaaaaaaaagcggcccaaaccaaaaccgaaaaaagcaaccaggccgccggcgggggcaaaccgcagcacaacccagagaaaacgaccacggaaaggagaacacaacccgcccacccccaaagcaaagagcaaaacaggaagaaacaagaccaaaccacgggcagggaagcagcaaacagaaacaaaagacaaacacagggacaagacaaagcaggccaccaaaagcaaaaccgagaacaaaaaacagaaacaaaaaaaagacaaacaacaaagagaaaacacacaaaaaaaacaaaggaaaaaaccaaggaaagaaaaaaaggaggaaaacaccccaaggcagcagggcaaaagaaacagaaccacaaaggaaaaaccaagggcaaaacaggaaaaacaacccaaagcagaaagggaagaaacaaaaaaaccgacaaagaaaaacacaaagaccaagcgggaagaggggaagccaggcccccgagcgaaagagcagaagggacaacacggggcccagacgaagaaaaagcacacacccagacccagaaacacacagacaagaaggaaaaacagaagacagcaaaaacgggcgcaaggacacaagcgcaaaaaacaacaggaaaagaacaaaagaaagaacaaagcgaaggaaagaggaacaaaacagcgaaaaagaaaacagcccaaaagagaaaccacaacaaaccgaaaacgcccacaaaaacaagggcaggaaccgcaacgcggccggaggacgaagaggcagaacaaaccaacaaaaacaaacaacaggaacacacaaaaaaagaaacaaacaagaagaaaaagggagagaagagcaaaagaaaagggaagaaggaaacacacaaaaaaacagaaccggacggagagaagagaaaacaggagacagcccaaacaccaaagaccaaacacaggaaaaaaagaaaaaacaaaaaagaagagaaaggcccgcaaaacacaaccccgcacagaggggcaccaaaggagacaggaccaaggaaccggaacggggaaaacagaacacaacccacaaagcagaagaaacaagagccagaaacaaacaaacagagaagaggagcaacgacagcaaacgagaggcaaacacaagagagacagcacgacaaagagaaaaaaaaacgggcagaaaaacccacacaacagaaacgcccacaggagcaaaaacagaaacacaggggaaaccgcccgaagccggcccagcccgcgcggcgaacccgacagggcggaagacacccgcccgccccaccccacgccccaaaccaccgcaaacaccaaggcgccaccgccacacgggacgccaccacgggaccacgggaccgccaaagcaaaacacgcaccgagaaccagagaaaaagccagacacgggaggagacaacaggccagagcaaaaaaacagagaaacaaagaacagccagaaagacaaggacagccagaccgaagacccaaaaaaggcaaggggagagggagggaggcaggcaacggagaaaacacacaggagcagagggaaggccgacaaaacacaagaagggagcaacaaggcccagggaaagccaggaaggaggggagaaggaaaccgcacccaacccaccagagaagacgccaagcagaacacgaggcgacacaacacgcaccccggcagacgaagcaagaggcacagagcacacccaggccacaaagggaggcaacacaacgcaggaagggacgacgaacagagagagagggacggccgaggagggggagccggggcagaggagagccgcaccaaggcaagaggaaagaacaccacagggcaaggcacagcacaccgcccaaacgccacagggacagggagaaccagaaaaggccgcgccaaacgggggcacagagaaaaaaccgaccagcaccgggacagaaaagaaaccaccagccacaggcacaacagaaaggccccccaaaggaagggcggaagcaagccgcccaggaaccccagccggcaaggcggcccccaaagcagaggcaaacggccggaagagcaggcaggcagcacagcgcagccgggaccagagccagaaaaggaagcagagggagggcgccaagccagaagcgcgcagcagaccaggaagaggagaagcggcgccaggcccccacaccaaaccgagcagaacaggcgcgggcggcaggggaggcagggacagaagggcccgagacgccgaccaaaccaaacaaaaggggagcacccagaaaagaaagcagggaccaagggcaaaaaccccacaaagggagcggccggcgcggaaaggggccgaacaagcccggcacccacgcccggcggggcacggcaggggcggcagaagggcccccgcagaaaacggcaaggacacagaagcggagggagcaggccaaagggagccggaggaccgaaagcggagaaaccgccaggaaggagccaccccggggcgacacccgcccgcagccgaggcagccgggcagcacccagcacccgagagaagacacccaggcagagaggccacgccccagaagaaggggggaaagaaagagaggagaccgagcgaaccagagaccgcaagccggccagcccaaaccagcccaacccaggaaaagcccacaggcaagaaggcacagcaaaacgagggacaagagaaggaaccaaggagggaggaagaacccaagacccacccagagcagaaacaccccaccagacacggaggggacgcaaaaggagcggcccaaaaagcagcccgaccacagggagcgaaacaaaggcccccagagaacagagccccgaagccacaacaagccccagaaaagacacagcccacggagggccgaggccagcagccgagcagcagacagaaggaagcaacaagggcccggcaagggacccaggaccggaccggggccacgcagcaccaggacacgccacccccacacaggccgcaaggacgccggggaggaaagacagccagggcaaaacccacccgagacgaaccaggcggagaccaggcaaaccggagcaaaaagcagaggcaggagaaaagcagaaagcaacaacgcgagcagggggagagagacacaaacagggcccccaacccccgggccacagaccgacggccaggccgagaaaccggccaacagcaggaaggagcagcagggagcaagcaacgccgagccgcagacagcagcagcaagaccaaggcagcaaacccgggaacagcaggagggacagggcagcccgagaacaaaaggccgagacgaggggaacagaccccaaaaccaccaaccccgacgggaaaaacgccccagaaacggcccgggccaaaaaagacgcgggccacgacagccaaaacagcaagaccaagacaacgcagccaaccacgcaacgccgaagagaacgggcacaaagcgcccggcaacgccaacaacccgaaaaccaacaccagccccagggaagacacaaggccgaacagagcccagaaaaaggaaagcgcacaggaagggcaaccaagaggggcacccaagcacaaaagcccccagagggcaagagccgggagaaacagaaccggcaggaagaacaaccccgagcaggaggggaaggccaccccccaagccgccacaacaaaaagagaaacaccaggccgggcacaggaccagccgaacccagcacgggagacgaggcaggaggacacgaggccaggaggagaccaaccggccaacaggccagccacaaaaaacaaaaaaagccaggcgggggcagggccgaaccagcaaccggaaggcaaggcaggagaaagcgaacccgggaggcagaggaaaaagacaaagacaaagacgaagacagaaaaaaaaaagcaccaaacaggaaaaaacagaacacacggacgagccgcaaaaaaaaacaacagaaggcccaacagcaccgcgaaacagccaaaacaccacacagggcgcaaagaaggaaggcaaaccccgaggaaaggagacaaccgaaaccgaccggacgaggcgggggcccaagaagcacaccggagcaccggccacagcgccccgacagcggcccgaacaacacggagaacgcacaggcacaggaaccagccggcacccagacagcaaaaccccgccccccccagccacaacgaagaagacagggagaaaagcagagaccaccacaaggaaagaaaaaccaacagcaacgcagcacgagaaggaacagaaacaccaagcaaaaaaagacaaaacgaaaggaagacccaacaacagggcaagagaaggaggagcaagagaacgggagagcgggaagaggggacagaagcagcacggcccgcccaggagagaaaagaaggggcaaacaaacaacacccagaaacacccgaccgcagggacacaagaaaacaacgacccaggagaaggagaagagaaggcaggacaacgcccacccaggaggagggagccaggggaacccccgcccagggaagcaggagaggagcgacccagggacccaggcccccaggaccaacccaggcacccaccagggcccagcgaacagagagcagagagcgcagagaaacaccaggcacaccaaacccaggggcagaacccacaccccagcaaaagcagcgcaaccggcaaaggggaggagacccacaaacccaggaaaggggcgaaccaggggcgagcaggagggacaggcccgcccacagaccgcccacagcacccacagaaagacccacggcggaacccagccagccgcaagagcaagacccccccgaaagggaacaccagagggaggggggcccaccaccgcgcacagaaccagaaccgggcccagagaaccgagggaaaggacggagcagacaaccagcacaggcagcagccacaagaggcgccagacgcccacacaggaccagacgcccacgggaaaaaccccaaccaaggacaaccacccgccaggcccagcgaagccaccagcacaaaagaacccgagacgggagaaaaggaaagcggaacgaccacagcgcagggaggggaaacccaggaaacacaacaggcagaaagggaagcaaacagccccacaggggcaggaaggagaggcgagcaaaaggagaaaagcccaaaaaccacagaccagagaacccgcacacaagaacagcaggaggaccacccccagacaaagccgccacgcccccagacacaggggagagaacaaacaagagagaggggaggacacagccaaaccaaaacccccacggcccccccaaaccagccacccaaaacaagcacccccaacagccccacacagccaccaacaaaccaaaaagccaagccaaagccaccgagacgaagcaagcccgaagagccgaaaacaaaagcaagagacccagaaaaggggggaacaggcaggaaaaaacccccaaagggagaaaggccaaaagaagggacacaggccccagcaagccggaaccagcagggcagcaaacaaagcgaaaggcccgacccagccacaccaggcagcgagcaaaagggggccccacagccggcagccccccaagcgcaggacagccccaccccagcgccagggcggcagagacgcagcccagggcagggcaagcgggcggacaccacggggcggagggcagggcccccacagcccacaggcaggccccagggagacgggggcgacccaaccccacacccccacacgcccagcagaggcccaggggcccaacccgcagcaaaccgcaggacaccaggcaccaacaaccgaaacaggggagcccgaacccaacgaccggcaccgcaggccaaaccggggaagcgcacacggggcgaaccccccagaaaagggccagcacacaggcgcacaccaaacagccgccacggcagagccaccgcaccacccaggcgaggcagggggaccagcaacccccaggcaaaggcaacaacggcccagcccccaagaagcagggaacaggcacggccaccacgccggcaagaagagagaccaggccaggaccaggcggcgaacccgacccaaggaccacccgcgggcccccaagggcgggaacaggcagagccacggcacagccagccgccacgaagcgcgccagaaaccgccagacccaaacaaaccaagcaaagccacacgccagggcagggacaaaagcaccagccgcaaacaaacaacagaccgcccagcccaacaagcccacccaccaggccaccagccggacagccaacacgcagcaggcaaagccacaacaagcccaggaaggaaacccacacccgccgagcccccaagcgaggaagccaagccccacacgcccgagcccccaaacgccaacccgcgacccagccaaaggcccacagagacaagcagcaccccacccgggacaacacaaagcggcacacgaaaagaacgcccaagagagagaaaaagaaaagaggaagacaaagcgcaggaggggaaacccaggaacacgcaggcagaaggggaaacaaacagccccacaggggcaggaaggagaaggcaagcaaaagggggagaagcccaaaaaaaacagagcaaagaacccccacacagagaaagcaggaggaagcccccagacaaaccccacgggcgcccccgacagggggaagggaagacaaacaagagagacgggagcgacacgccaaaccaacaccagcaacagcagccaaacccccgggaggagccccagagggaggggggacgccacgcggaaggcagccaggccgggcggagggcgaggaacgggggggagcagacccccggcaagcacagcgccacaggacagagcaagcaggccccgaccacccccacggggggacccaacggggccccagccaccccaccagggggcaggcaaggggcgaccccgggaggaggagcaggcgccacgcggagccaccacgaacccaggagggaaaagagggacaggaacggaggaacccccagcaacgcagcagccaggaacagggccagacggagcagcccggcccaaccacacgggcaggcccggccgggcccagcaaccccccgcgcaacaagagccaagagccggaccccgggacagagccccaggggaggggcagggcgcgagcccaggcccagagaaccagggaccaagggcggccagaccccagcacagagcacccacccacagaaaagggccagacccagcaggcccagcccaaccccacgggcagggcaccgacgggaacccagccaaccaccgcccacaccaccaacagaagcagcccagcagaaaagacaccacaggagagagaggaagaaccaaacaagaaggcaaccaaaggcggagagcagccgaaacagccagcggcccaacacgggcaaccaggcggaggcgaaagacagaaaagaaggaaaggaaggaagaagacacgagacaggagaaggcaaaacccaccaaggaaaaaagaacacaacaaaagaacagaggacagagaagggccagaaaaaaaaccaacgacaaagagcgaaaaaacacaaagacaaagcaaagcaagaaacggcagaaagaacaagcaaggaaagaaccagacgaagacggccaaaaagacagacaaaaaaaaaagaagaaaagaaacaaaaccgagaaaggggagaaagaggccaaaacgaacaggcacacgagaggaaaggggagaaagcaaacaagggaaaagaaggggaggccagaaaagccacaaccgcagaaagcaacaccaaacaggaaaacgagaaccacgcaagacacaaagaagaacaccaagacacaacaccaaccaaggcgaaaaaaagaaagagaaaggcagcagagagaaagggcaggaccacaaagggaacccaagacaacagcagagccagcagaaacccaagccagaagagagggggccaaacaacacaaagaaaaaaaccaaccaaaacaacagccaaacaagcccaaggaaggagaaaaagaacagaaagaaaagcgagggaacaaccaccagacgccaaagagacgaaaggagcacaaaaggaaagaaaagacgacgagccaaacaaacaccacacgaagacacagaccaggacaaaaaagcaaccacacaaacaagccagcaaaacccagcaaaaagcaaacagggcaaacaaaccacaacaacagaagaaggcaaagccccagaaagggacggagggcaagcggaaaaaaagaaagacccaaagagcgccaagagacccaccacagcaggacacccaaggccaaaaaaaagggagaggaaaacgccaagcaaaggaaacagaaaaaaagcaggggaaaccaacagacaagcagacaagccaacaagacaaaaaaagacaaagaaaggcaacaaaggaaaaggcaaaacaagaagaccgacacaaacaacagcaccaacacaggagcaccagacaaaagcaagcagagaccacaaagagacgagaccccacacagaaaggggagacaacacccacgacagaagacagacacaaggcagaaaaaacaaagagcagaccgaaccaacaggacaaaagacaaagacccacagaacccaccccaaagcagcagaaaacacccagcgagcacaacaaaaaccaccacacaagaacaaaaacaacccagcaaagcaaaaaacgaacaaccaaacacacccggaccgcaagcaaaaaaaagaaacaagacaaaaaaagccaaagcagaaacaaggaaaaagcagcgcccaagacgggaaaaagaaaaaggcagaaacaagaagcgaaacaaaagaacaaagaacaacaaccagaaccgggacacagcaaggcagggaaaagagaaaaagcacaaagcccacacaaaaagagaaagaccgaaaacaaccaacacacaacaaaagaacagaggagcaagagcaaaccaaccccgacagcagaagacaagaagaaccaaaacagagcgaacgaaggaaggagacagaaaacccaaaagagacaaacagaaagagaaaaaagagaggaggcacagcagaaaaaagaagaaaaagagaagaccaaaaaacacaacagaaagacaaagaggagaccacgaccacacaaaaacaaaaaccacacagacacagaagaccccagcacacaaacagaaaaggaaagaaaaaaaccggacacaacaccccccaagaggaaccaggaaaaagacccgaacagacaaaagagccaaaagaacagaaaaaagccaacaaaaaaaaaagcccaggaccagaggacagagccaacgaccagaggcaaagaagagcggaccaccacaaaacacaaaaaggaggaggaggacccccccaaccacggaggccagcacacccgaaccaaaaccggcagagacacaacaaaaaagaaaaccaggccagaacgagaacacaagcaaaaacccaacaaaaacgcaaaccaaaccagcaggcacaaaaagcaaccaccagaccaagaggccacccgggagcaaggggcaacaagaaaacaaaaaggacacacaaaacagaaccaaacacaaaaacacaaaaccaaagaacggaaaaagccaagaaacaacacgagaaaaaccaaaaacaggaacaaaggaacaacaaaaaagagagccacagacaaacccacagccaacacaaaaaaggcaaaagcggaagcaccccgaaaaccagcacaaggcaaggagccccccacaccgcaacagagaggaagccgccagagcaacaggcaagggaaagaaaaaacggcaaaaggaagaaaggaagcaaacacccccggcaagacagacaacagaaaaaccccaaggccaaaagccccagcgaaaacaaccagcaaagcaggaacaaaacaacaacaaaaaacagcaccaacaccgaaaagccaaaccaaaagccaaacagaaaggcaacccacacaagccaaaaaagaacaaaaaccaggaaacagcaaccagggagggaaagaccaacaagaggacacaaaacacccaaagaaacagagagacaaaggaaaaacacagccaggaaggaggaacaaacaaaaaagcaacagacaagcccgcaaacacaggacaccacaaaacagaaaaaacaaaaacaaggaaccacaaaacacccaaaagccaaggagccaagcaaacagaacaaagcggaggcacagacccgaccaaacaaacagggcaggagccaaaaggaggacggacaaaaacagacacaagaccaaggacagaaagagagcccagaaacaaggccacacaccacaaccacgacgacaaagcgacaaaaacaagcaaggggaaaggaccccacaaaaagggcgggaaacagaaccaagcagaagaaaagcggaccccccacaaaaaaggagcggaccccaacaaaaacaaccaagaggaaaagccaaaggaaacaaaaacccggaagacaacaaggcgaccacagacacagaacggcaaagacagaggaagacaccaaaagcaagcaacaaaagcaaaaagacaacgggaaaaaagaagagccgcacagcaaaagagagacacagcagagaaacagaccaccacagaagggagaaaaagcaaacagcaggacaaaggcaaacagcacaaagaacaaacaaaacaagagaaaaccaaacaaccccaaaaaaggggcaaaggacagaacaaagccaaaagaagacaacagcacaacaagaagaaacaaagcaacacgacaagagaaaacaaacaaaaccacaagagaacacccaaccagcagaaggcaaaaaaagaaaaaaaaacagagcggcaagggcggagaaaagggaacacaacacggggggaggcaaaagcaaccaggaaaagcaggaggaccgaggagcaaaaacagaacacggacccagcaacccaacgggaaacccaaaggaaagaaacaccaaaagacaaaacaagagcagcagcacacacaaaggaagacacggaacaacaaagcccaagcaggaaaaagaaaagggacaagcacaggaaacagcaccaaaaaaagaacaagaagcccgcaggaacagaaggaccggaggccacaccagcaaacaacgcaggaacagagaaccaaaacgcaagccacaaagggagcaaagaaacacaggacacaaagagaggaacaacagacacggggccaccaggggggaagggaggagaagggagaggagcaggaaaaaaacaacaaaaaaacagaaaaacaaaaacaaccagggaaaacaggcacaccggggagaaaaacgacaacaaaccccagagagaccaaaacaaaccgacggaccccgaaccaaaaaaaagaagaaaaagaacagggggacagacacccaaggaaaaaaaaaagacagagaccgacgggggggacaacccgacaagagaaaaacccaggaggggaacaggacagcaacaaaagccgaaggaccaagacaaaggagaagaacaccgggaccgggaaaacaaaagccaaagcaggaggaagcaaaaaacaggggggccaacccacaaacccaggccagcagcagccgccggcgcacgccgaaacgggacagcaaaccaggcccaagcccccccccacgccaacgcaccagccccgcgcagcaagaagaaagcaaagcgacaagagaaccgcccaaaaagcccacaaccgcaacaacccacaggggcagcccaaagccagagcaccaaggcggaaggcaagacacgcccaggcacacagagagaaccagacagagcgagacaaacccaggcgcagcccacaggagcagaaggccccaaccggggggggggacgggggggggagcaccagagagggagagaggcagaagccaaaggggcgaagacggggcaggcgccgccgcaaaaacgaagcccccaggcaaagcagcgaaacaagaagaccagagggggaaaaagcaagaaaaagcagaaaggaccgcggaccacgccaaccaacaagcacaaaaagaacacagaaccaccagccaagcaaaggacgccaagcgcagaagaaacccagcgaaacaccagcgcaccgcagcaaaaccgcaaggccacaggccaacaaagcacaggaggagacaaccgaagaccaacccgccagaagacgccgaaccccaagccaaggcaagaacacaaacaggcgagagggacgaagggggagagaggcaggagaagagggggaaggcgcgggaaaccccaagaccggaaagaaaagaagaccggagccccggaagcccggaagcccaacaaccgggcaaaagagagaacagggaagaaggaaagaagaggggaaagcccacggagcccaaaccagagaccaggcaagaaagaggaggacagcgggagagagcaggagaggaaacagggaaggaggacaagcaacagagggggggccaaggcaccgagaggcggacgagaagaaagaagcccagaacccaccgaaagaaggggaaaagcccgagcccagccccggggcaaggggcccggcaaaaaagccccagccgacccgggggccgccgcaggacaaggaggcacaggggagagagagccagggaagggagcccgggaacaccagcaggcaggcgacacacagggagccagggcaagaaaacagcacagaggccgacacagccacaaaagagagaagcccaaacaaaacacacagcccccacccccaccccaccacacaccggccaggcacccacccaccagacaacggcccgcccccacgcccaaccgccaacacccaaaaacgaacacaacaccgcacaaaaaccgccaaagccccacgccaaaaaacaaaaacaaaacacgagcccaggcccaccagccacgccgaaccgcgcacgccagccacacagccacccaaacagccaagaagacacccgcccccagcaggggaaggcccccagcacggcgcgcgcccaccccaggaagaccccgacaacccccaaaagcaacccccccaacacccaccagaacaagcacacaaggcagagcgaaaacgacaaccacagaaaaaaccagaaaaagcagcacaacccacaccaagaaaggccccggcgggcacgggacggccgaaccagcacgggaggccgaggcgggggacacgaggcaggagcaaaaccagccagccaacagggaaacccgccacaaaaaaaaaaaaaaaaaaaagcgaggggggcagcgccgaacccagcacgggaggcgaggcaggagaagcgaaccagggaggggagggcaggaccgagacacgccagcacccaccaaccggggacagagcgagacccaccaaaaaaaaaaaaaaaaaaaaaagagcccggacacaagaccaaaaaagaagaaagaaaaaagaggacagaaagcagagcccacaaaccccgaaaccccaaaggacaccgggcacccgaggagcaaccggaaaaccaagcaagcaagaacccccaggagcggagccgaggaggaggaagaggggaccgcaggggcaccagggaggcagggccggggcaccaaacacacaaacacgccagggcaccagccagcggagggggggagagccagggagacggcaaacagccgccccaaccccccccaccgccaggaaagagagggagggagaagcacaccacggggcggggaaggcggcagagagaaggaacgacaggacagacgggaggccgacccgcgaccaaggacgacgaaacaacacaggcaagggccaaggaagagcacagcagcaagaaggcgggaagacagaaacacagaaggagacagaacagaggaaacaaaccccggcccccaaccccacaccagggcgcgccaacaccagggagacagacccgagaggccccaaaccaaccccacaccaaaacaccggc

SEQ ID NO: 315 - RNA, 5639 nt, Homo sapiens
cagagagccagggaagcaaagaaagcaaaaggaagaaacacacccagagccaggaaaacaaaaggacccccagacccgcggggacggcccgccaggacccccaccccaccggcccgcaggacacagccccagcggcacagcaaagaggggccccagcccccagggcggcccacgccaagcgcccggccccgaaaacacagcccgccgcacccgagggccccccacagacagaccaccccgggggacgccaacccggaacgccgggcggaagaaagaggcagccaggacacccacgggcccgcgcagcacagaccccgccccaggccccccccccaggccgccacaccccgaaacgaaccccgagacgcagccaagaccagaagccaggaaaaacccaaaaacaaaccaacgcccgaagaggacgacaaaggcacaggcaagccaagcggggccccaggaagggaaagcgccacgacaacagagagccaacccccgaggccccccgcccccccccccccaagaccccgcagagccagacaaggaaaagcccaaacaaagccaaacgacccccgaagaacaggcgcagaggggggaagacggggggggcaggggaagagggggcccgggggcggacagggcagaacacaggaaaacccgaaccaaaaacgcaaaggggcaggaagaagaaaaacacgaaggcagacaagagcagaaagaaccaaccgcacagggaaagaaacaaccccaccgccccacaaggagaacaaagacagcagcaaacaacccaagaaagacccgagccccacagacccacccaccacccccgagccaaaaagacaggggaccgagcaggcaggaagcagcaggcagaaaaacgcaaaagccaggaggcacccacaacccacaaaagaaaaaagaaagacagggcacgcgccagcccggaagcacgcaacagacaccaccaaaaaccaagcgccggggcaaagcaaaaacaccccaagcgcagagcacagacagaaagaacacggggggcagcaaggaaaaccagcaaaaccaccagagaccgccaccggccccgcagaaggaccgcggccacgaccaaccaagcaccggggccaagagggacccacccggacagcgggcacaaacccggcaccaccccccaccggcacccccgccccgagacgcacaccgacaagagagccaaacaccaaagcaggggggccgaagcgcccagaagcggagaaagaaacagccaggaaaaacagaaacccaggacaggagcaggccacggcaccaaacacgcaacggcaccacgccacagagaaggaaaagaaaagacaaaaagaaaaccaggaaaagccacgcccaaaccacccaacaaaacccggccggaacaaccagaagccccaagcccaaacacagaacccagagggaaaaacaaacaacgccaaacggaacgagaccacacacccaggagggaaggcacccaaccacacagccgcgccgaacaccacaccagagacagaccggagacgcgaagagggccagccgacccaccacaagcggacagggacccagacgcgggagacgaagcggaacaccagccacccccggcacaaaaaaaggagggacagcgccccaccccagcagagaagacagaagaaaaagccacacgcccagcaaaccaaggggagcaccggcccaggcggaggcaggggggaaccgccacgcaaccccgcccccaggcaaggaccccacccagcccccaagagcgggaccacacgcagcgccaccacgcccagcaagacagagaggggggcaccggggcaggcggccgaacccgacccaaggacggcccacccagcccccaaaagcgggaacaggcggagccacggcggcccaaccaacaagcacaaaaggagaaaacgaaaaaaggaaaaggcacgcaaaaaagaggaggaagggggaagcccgcaggaaaggccagaaagcacagccccagcgcgcccgccagcaccagcaccgacagaccgcacgcagggacagaccacacccagccagaaaagggccccgccgccagaaaacgcgcaggagaagacaaagcaaaacccacagccccgacgaccaacgaaacaggccaagaaacaaggccagaaacagcaggaaccaaggcaaaagacaaaccaccaaacagagcaggcaccaaaaacgcaggccaagaaccaagagacaaaggggagggggaaaagaaagaggacagaagggagagccaagaaccacgaaaggccagcaaagagaaggacacagcagagaccaaagcggggcaccaaagcagccaggggaaaccgaccccgccaacaaaaagaagaaagaacccaacggagcaaaaggccaccaccagaaaaccgacgcagcacaaaggccggagccaggaagcgaaggcccaccggacacagaaagacaacgggaagggaaggggcaacggcgagaggcaacccacacggccaaacagcggacaagccaaaaacaccagagcaacaaccgaaaccgaagggacaagccacaggagccagcaaagagaaagaaagcccgacgaagagacaaaaaaaaaaaaaaaccgagaacggagagggccccagcaggaggcgaacagcccgggagcgccaaaggaccacccgcgcccgcccaccaaccagcacagagccagccagggcccccagccaaacaaacaaagcagagaacccaggagagacaagaaacagagggcgcagccacaaggcagcagggggcaggggaagagcgagccgagcccacgaccgcacaagaaccagaaaacagagcacccccaggaacgagagacacgcgggcaaaaaagccaggaggacaaagagggcaaggaaaacagaagagagaagacacccacacgacccccaacaggaacccccgcgcccccccccaaaaacaaaggaccacaaaaacaaaaaagcccagcaggcaggcaggaacacagcagagaaaccgagagaggagaaagcccgaaccgggggagagacaaacagacggaaaagagaaaaagaaaccacacaaaggcccaaaaaccagcaggaagcacaagaaacaaggaaaagaacaggagcagagaagccccacccagagcagggcgggggggcgggggacggagccgccaacaggccggaggcaggggcaaccggccaagcaacccgcccccaggcaagcaacccgcccagcccccaggagcgggaacagggcagccacagccggcaagaagagagacgaggcaccaggccaggcggcccaacccaaccaaggacacccaccggcccccaaaggcgggaacaggcagagccacacaccggccaaagcccgcccgagggccaggggaaaccagagacaggagcagggggcgccccagcgaaaggggggcccagagcaagcagcaaagccgcagcgcgccacccccggcggcccccaggggcccgagaagagggggagcaaacgcagacaccaaagcagcccccccgcaccccagcagaaagccaccagaaaacaggcgacagccagagcaggggagggcagaaaacgggcggggcaaggcgaaggcaaaggagggggcagggccgcaggggggcagagcagaaagagggaggcaggaccccaccccccgagagccccagccagcccaccagcccacccccagggcaggcccaccaccacccgccccccggcgacaacccaacagcaggacaaaagcaaggccaagcccggggcacgggagaaaggcccaccagccggggaggcacagaggaggagaagggaagaacaggaaggggcagggggagggaacgcaaggcgcggcggcacagccccggcagggcggaccaagccaggccggcccgaaggagggcacagcggaggaacagagcagcccacccagagcagaagcgagagccagcggacccgaaagaccaggagccaccgggcgagacaggcagggaggagaggaccccagcgcagaagaccccacgggcgaaggcagggccccagcaggcgaagcgaaagcgagagccacccgccacagcacagcccccagaccaagaggcccaggacaggagcagaaagcagcaacccgcagaccagacgggcaaccaagcgggaacaccccagcagcagggggcaaagccaaaacagcggggccggggaggacaggcagccgccacaggggcggagcacaaagcaggagagcggaaagcgaaccggcaccgaacgagaaaccagaacgagagcaggagaaacaagcaacaaaaaaaaaaagaagaaaaaagcaaaagcaaaggcaacaaagcaaagccacaccacaacacaaccaacggcccagaggaagagccaagcgaggagaaaacgaacaggaacacacacacacccccaaggacagagaggagacagcaagggggaaaccaggaaagcaacaaagccaggaaagcaacaaagccagcaaacagacccccaaccccaagacaggaaacagccagcaaccaccacaaagcccaaagaagcggcccccacgcaagacacaggccacacacagagacaggaagggcagcagccccaagccaaggaaggggaaagacagcaagccaacccaggacacaaagggccgcagagaccagaaaggacccagacagagaaccacgacaggggcacccagaaagaagacagaaaaggcacagcagcaaacaaaagaaacaggaaggcaaaggccccccgcgcccacgagcaccaagaaggaaaccccgccgaacaccaggccaccagaagaacgacaaaggccaaccacccgcgcagaaagcacgaacagccagcagcagaagaaaaaagaaagcaaaacaccagcaccagcagagacccaccgaccaggaacaagaacagacaagcgacacagaacacaaaaacagaagaagagcccagggaacccagaacaagcaaacgacaccacgcaaagagacggcaaggccgcgggggggagggcgccacccgaagcggaagacccgcagaagccagaccccagacgaaacgggcgcaggaaacgcaggggagcacaagacagcggccgggaaccacccgagccccggcgaccaagccaaaaggaccaaagggacaaaacccgagacagccagcgaccggaaagggcagcccaggggaggccggacagcaaaacacaaacggaaggaacaaagccagaaacaacacagaacagcgcaaagaaaggaacagaaaaaaagagcagcccaaacaaaacagagcgggacggcccccaagcagaagaccccaaaaaagagcacaagccaggaagagaaaaccgcccaacaggagaagcggggcgggcagggagaggggacacggagaccaacgagccaggaccaggggaagaaagcggggggaggggcaaagcagagcggcgcccagagaggaaagcaaacagaaagcaaaaaccacgaggagagcgcggaacagggaagaacaagagaaaaaggcaacagggaacacaggaggcagaaacagacaaagccacaagcaccccaaaagagcccggacgcaaacagaagacacaagccaca

SEQ ID NO: 316 - RNA, 2784 nt, Homo sapiens
agcccagggaagaggaccggggggcgggagaaagagggcaacccgcccaacccagaggggcgaaagcagggagggaggagcacacgacagaaaggaaagggggccaagaaacaaaacagaaaagaaaggagcagggaaccccgggaaagcccgccgcggggagaccccccaaaccgcagcacacaacagccagcccgcagcgcgggagaggaaacgagcgccaccacacggagaagcacggcgagacccccccgcagcaagggaaggacacccagccaccaagcggcccgacaccccagaaacacgccccgcaagcaacgcaagcaccccagcaggccgcccggggagcccgagaggccgggggagcgagagccaaagaaccggggggagggggagggggcacgggggagaaaaagacagcggacaaaacaaaagcacagaagagcacaggaaaagcagaagcaaaacccacccacccccccacccagcggcagcgagggaccccaaaacaaaaacagaaacggccccccgagaggagccgccgcacccaggcggaggcagggcacaaccggccacgcaaccccacccccaggcaagcaacccgcccagcccccgagagcgggacacaggcaaggccaccagcccggcaacgaagagagaggggacaccagggccaggaaggccaaaccaggcccagggaccgcccaccggccccgaaaggggggacagacgagccacgcggggcaagagacacagcgccggcgaggcggaggcaggggcgacggccacgcaaccccaccccaagcaagcgacgacccagcccccaagaagcgggaaagggcgagcaccacgccgggcaagaagagagacagggcaccaggcccaggcggcgaacccggcccaaggccccggcccaacccgcccgcccagcccccaaaggcgggaacaggcagagccaccgcgcccagcccagccacaccaaacaaacaacggaaggcgaaccagccgacacgggcacgcgcaaaggcgccccgaaaccaagaggcagagaggaaggaagggcgggagggaagagaagcagagcaggaagcaggcggcaaggcgggcaggagaccccacgcaggaaccgcccgcacagaggccgggcgccacccgacggagccgccacccaaacgcccaccgacgggcagcaacacggcgcgggaagagggccaaaggcgggagggaagaagcaaaaggggagagggcccagagcaacccccccaccacaagagaggagcgggagcagagccccggaccaggagagcaccagagcccccgggccccacgacgaaacgaacagagaaggagaagaccaggccaggaagaccgcaaagaccaagcccgaacaccacaggcggaaccgcccccaaggcgacaggaagggcccgcaggggccagggcagcaagaaggaggagcaggaggggcaccacacacaccccaacccagaagggggaggggagaccagaggcacagaaggcaaaagagcgaaaaggcagacaagagggcggcaggggacaacaggcgccaccagcacacgcagcccacggccgaggggcccgggggggaccggggaggggccgaaagaaagagcgggaacaggccaggggcccggccccgccaggcggagcagcaacaggccagcagcgcccagcccccgcagccccccccaggccccgcgggcacagggcaggacagacagaggcagggaagagagggaaagggcgagcgggcagaggaaggcagggaaaggcgacccaccgcaaaaaagacacacaggagccggaaggaaccaagggggccaagagacagaaagcgggccagaaaaaggaagagggcaggccccaaaaagaaaaggcacccaacgcaaaaggaagcaagcaggaaacaaaagacaggccaccgcgcccaggcggagacggggcggaccggccacgcaaccccgccccgggccaagcgacccccaccgagcccccaagaggaggacaaggcacacaccaccacccggcaagggagacacaaggcaccaggcccaggcagccgaaccaagaggacaacggacaaacacggccccgggaaagacaagaaagccccccccggcacacccaccccccaccaagaaaaggcacggaacagcgaagcacaaaacaaacacaaaacccaccgcccccaagcagggaagccaggcaccaggaaagccaggcaagaggcacccccacaccacccaccagcacaccaccggggccaggcgacaaccacacgcagccgacaaagaaaagcgaaaacaccaaaaaacaaaaaagaaagcaaaaaacaccgagaagaaaacaaccgaacgccgggcacgggccacgccgaacccagcacgggaggccgagggggggacaccgaggcaggagagagaccagccggccaacagggaaaccgcacaaaaaacaaaaaagcggggggggcgggccgaacccgcaccgggaggcgagaggaggggaggcaggagccaagacggccacgacccagccggggacagagcgagaccgcccaaaaaaaaaaaaaacaaaaaaaaaaaacaaccgaaaaacaaaaacgccaacaaacccccaccccgcccccgcaaacccacaccagagacagggccgccgcacccaggaggaggcaggggcacaagccacgcagcccaaacccgagccaagcaacccccacccagcccgaaagcgggacaacagggccgccaccacaccagcaaa

SEQ ID NO: 317 - RNA, 4492 nt, Homo sapiens
aaaaaaacaccgacaaccagagcaaaaagaggaaaaaaaagcacaaaacaccagagaaaggaacaaggaaagaaaaaaggagcaacccagaggaaagaaaaaaacagggaggagaagggcacccacacgccaccagccccaaaacagacccgggccgagagccagggacgcgcagacagggacaaaccaacccagcggaggcccacagagggcgccgacccgaagggaaggcccaccgccccccccccccccccgccagcaggcacccgcgagccccgggcgggcccgccccaggggaagccgcccccgccaaggccagcccgcccagccagccccacaccccggccagcgcccagccgcggggggggacaggaggaagggaaccacagcggcccgaggaagccacccacagcccccaccccaccggaaaagaaaagcaccgccaccccacaaacaacccgcaacccaaaccccgcaggggggaaggcacaccaccccaccgcacgaggaagcccaaccccaacccagaaggacgcagaagacagggccaaagaggaagaagaaaagaggccagagaggggcccaaaccaaggaacgggagaaaggggaacggacacacacaagagaaccagggagcggagcacagaggaaaagccgggaggccacagcaagaaggcggcgcgagagccaaggagagaggcccaggagaagccaaaccgccaaggcgacgggacacagccccagaacgaagaaagacacgcgcaagccaccaggggagaggcagcccagcacaaaacacccccaaggcccgccccaccgaaagggcaggacaccacaacaaggcaaccggggaggggagggcgggggccgggcggcaccggggaggagcagacaacagcaggccagcgagggcagagaggcagaaggggggccagcgcagagggaggggcaagcaggacccaggaggccgaagcggagggagcaagagcaagaaccccaccagggagccaaggcaaagggacccaagaggaacagacagacggaacccaagaagcaacaaagacagccaggggggagacccaaggaaagcaccaacaaggcaccacgccggggaagcagacccccaccccagagcaaggagaggaaaccccaggaaaaaagaagcaacccgaaggagggggaaagggggggaacagacaccagggcgaggccaaggcccccccgcccgaccaagcacagaacccggaaaaagcacggggcgcagagcaaccaggaaaccccagcccaaaaccacgcgacagcaccagcccaccggaccacaagggacccggccgcccccgcagcaaggcggaagcggccaagccgagcaaggacccccaaccgggccgggacggccagggaagaccagaccgaggagggccagacagcccgggcccagccacagggccacaaacaacccaaaccacagacccaagccacagaaccacacgagacacaccccaaaggcaccggccaagagaaacaggcccgggcccaaagccacagagaccaaggaacaggaaggaccacggaagacaaaacaacagggacggccccaggagaaaagggaaaaacgccgccaacgagcacagccgccacacccccaaagccaggggcccagcccaaggcaaggccaagggggagacagacacagccaggagacaacgaacagcaagaaggaaacagcaccaaggagaaccacagaaacaccaacccacccagaaaagccagaagaggccaaccaaaaagaccacgaaacggcagagccacaaacaaaaacgacgacaagacaagaacaagcagcagacggagcagaggcccgaccaaaggaccacggccacaaggcccgaacacaggcaccagaagacccaccgcgccagggcgcgcaggaacgggccaaacagggccaccaggaccaccaaagaccacagcagacaacacaccccgcccagaaagacacagcgagcaccaaagcggcggaaccagaaacaaaagaccacagcaaacacccccaaagggaagcaggggggggggggagggggcgccacgcgaccacgacgagcagcagccaagccgggaccaaagggcaaagcaccagcgccgacgccgaggggaccccacacaaacacagggggccaccccccaaaaaggaccaggaaaaacggcccgaaaaacgggcccaaacccagccccaaggggcaaaggcacggaacaacagcaaaggacacgccgagacgaccaaccaaagaacgcaaaaaaaaaaaaaaacaaagaaaaaaagaagagaacggaacaccaacaacccaggacgagacaaaaaaaaaaaacaaaaaaagaaagaaggcacacaaagaagcacgaacaaaacagaaaaccaccaaagcaagagccaggagagaccaaacaaaggaggcgagaccacacggacaaagccacaggggaaaaaccacgggcacaacagaggggcacaagccagaacaggggcacagaagggagggcaagggagccaccaacaggggccaccagaagggggaacacgaaagcagaaaaccggcagaagcccagcccccacccccccccacaccagcccccaacacccccagccgcaaggcagaggcaggggaaaagcgcagccgagaccacaaggccgcacgggcaggagaaccaggagcagaaagcccggacccgccccgcaaaagccccgacccaccgcgggaaaggaaacgcgggaagacaagcagaggggcgagaggccggccaacacaggcagcaacaaggcacggagaggacacccaagggaacaggaagaggacagggacacagagaaacaggcaacagggggccacgcggaacggcaaccacaggccacaaaaaaaaaacccgccaccccccccccccgccccacccccgccaggcaacagcacggacccagccaggcaggccgccacaccagagacaacagggcgggaaaagaccccgggggcagccgagacccgcgcagggcacaaggggcagggaaggaaaggcggccaaaggagggccaggaagaaagaagccccccccgggaagagggcagagaccgagcaccagcggagcgcaaaggaaggcgggcgcccggcccaacgggccagagacaaacccaaagaccacgcaggcaggaacccggggccgccccaccgcgcaagacacaggcgcgagacgccgcagggggcccccgcgggcccccgcccccggggcggaacgggggggcgccaaccgaccaacagaggcaggcggggccgggccggcccaccgcccgagggccccggcccgcgggcaaggacgggggcgccgggcagggcgagggagaccgggagggcggggacgaagggcaacagggacaagccgcgccccgagcgaagcccgcccagggacggagcgacccagggcccccagagccagccggcccgcggcacacgcgccggggccaccgccgggcagaaccgaaaccggggccaagcggaagaggacgggaacgcgggcgacggccagacgcgcacaccaagagggggcgggggcggacacaaccccggcggcccccggggcgaggccgcaaccccacggaccccggggcccgacacaaccccggcgacccgcagggcggggaaggccccaccgcccagccccggaccgacgcccacccgcgacccagcggccccaggaacgccgcaaccccggagggccacaaacaaaggcggcacgacaacaacgcgcggggcaaggagcacccaaaggagcagcgaggaacggcacggcgaagggaaaacaccaggaccaaagagccgaagaagaacagccaaaaggagcagaaaagaaaagaaagggaaaagaaaaacagagggggccaacccacaacccccacaaacagggcacaaaaaggccaaaaacacggagaacaccaccccaacggccccacccagcccaaccaaaagagggggcaaagcacgggaacgaaacgaagaacaaaagcacaacaggccgcagggcacagagaaaagaggaacacacacggggacggccaacgacgcaccagcgggcggcaccacccgcccagccacaaagccagaaacagccccccgaggaccagccgggaccagcaggaaccgggggcccaacacaaacgaggaagcagggggcgggacaaaaacagaaagaaaacaacagcgaaggcagacaccaagccacaaaaaaagagagcaaaacaggagggaggaggagagcagggggggggggggaggaggacagaaagaaggaccaccgaacagaaaggagaacagaaagaaaacggggggaggagaagagacaaagagaaaagaacaagagggcaagagaaacagcccaaccacgcgaacagccagcaaaaaggagagagagaaagggcacggccaaaccggaaacggggggaaaaaaaaac

SEQ ID NO: 318 - RNA, 1552 nt, Homo sapiens
aagcgaggccagcgggaggcccccgccagcccgcgacacccgggacgcccaagcagcaagggcagggagggcgccccccacgagaggcccccagcccagccgcccgcggggccaggagacccagcgggccccaccccgacccccaaacacccagacgcacgaagggcacaccaggccggcgcacagcacaagccggacagcagaagggcaccacgaccggcacagagggaagaaagacaggcaagaccccagggggaccgggaagccacagcgaagcccgcagccgcccgaaagcaaaacccagacagcggggaccaccaggccaggcaagcaccacgacccaggagcacgaagcagagccgggggcccagcccccccggcccacaccaggacgcgcccaagaagccacacaaacagaagccccagcaccagggcccggccgcagagagccccaacagcccccggcgagggccagcacagagaggaggaacaaaggccagggaccacggcccaacagagaccgccaggcccgcgccccccgaaggcaggcccccagacagggcgggccgccgggaccccccgccagcgccaggaggccaggccccgcaccggccgacagcaacagcagcccagcaggcggccaacggcgggcggacagagcgaagcccacggggccggccgggaggcccacacggaggcgcgccacccgcccgacaagggcgggcgccccccggcagaggagggccggggagagacagcacagagggacgcccccaggccagccacagacccgagacccaaggcaagcagcagggccccaagcaggaagccacgcccgggcaccaagggccagccagggggcaggccacaggaagcggcacagaaaaaaacgcaggccgccccccaggccggaagaccaaaacagcccaaagggcccgcccagcacaaagcagacggcccgcgacccccccacccagagaaggagaaggggcgggaagccacccgacccggggcgggggggcccgcgcaccacaggcaccaggaacagaagcaggccgagggcaggcggggcaggcagaagcccgaagcgggggcagaccacaccagcgaacccagcacgggcgggcaggcccacccaccccacccaaacgcgcccaggggcacgaccggccccgcggacacccaggcaaggcagaccccagccggagccacgcccccccaggggaccaccggccccccaaggcgcccgcaaccgaacccagacgaacccagcaccgcccccggcccccaaacgcacgcgcggcacaccccaaccacacaacagaaaagcccccaaggagcaagcaaacggcccaaacccagcacaacccacgagagcagagcgaccccccccccgccccacagcaaccgagagaacaaagggaagagacgcgggagcagcaggcaggacaagaaacgacaaccagccaccgggcgccagccccagccaccgcggaggaagaccacgggcacacaagaggccgagccagggccgccacagcccagccgcaca

SEQ ID NO: 319 - RNA, 20200 nt, Homo sapiens
agcgccgggaccgcccccgagaaagaaacaagcccaaaacaaccaaaggcccaaaggggggaccccaacacaggggaaagagaaaaaagaaaaaacacagacagccaacgacaacaagccagaggagggaaaagggaggagccaaaggaaaacaacacaacacaaaaaaaagcacaaaaagaaaaggaaagggacaacaggaggaaaacaagaggaaagaaccacaggaggcaaaaacgacacccaagaaacagccagagcacaaaaaaccagcaagccagaagaacaaaagccacagccccgccgcacaagccccccagacgacacccgcaaacacacggaccagacacacccccaccaccgcacgaaacaaccagacgcaaaaggaggcgaggagccgacccagccacgagcacaagcccggccgagcagcacaaggcaagagccaaaagggacacagagggaaaaaaaggagacagagaagaacaggcagcaagcacaaaacacacaggaaaaggggaccacccccaagaacggacaaacaaccaaggaaccagaaaagacaacaaaaacgacaagcacccgcgcacaaaacaggcacacccacgaccgaaccacccacacccccaaagagccaaaaggcgaaaaaccacacaccacaaggacacaggcgccaaggcaggaaacgagcaagaacagggaggaagaaccagagccgacaccgagaaacccaggagaggaagcggacaaggagcaaagagaaccaagccaaaagcggcgaaacaccaccaagaggagagggcccccacgcccacaacacgaccaaggcgaaaaccaccgaaggggagggaacccagagcaccccggggagcaccacaggagccaagccgaaaaacagcaggcccgaccaaaaacagacgagaggagagccaaaaggaaaacacacaaaaaaaaaacagacccacccccaaaaagaaaaagacacaacaccagcaaaaagaaaaagaaagcacaaccaagaaaaaaagaaaagaagcagaagcggagaaaaagaggcgaaccacgaaagagaaagcacaaggacaacaaaaaaaaaaaaaaaggacacaaaaaaaagacgaagaaacaaaaagcaacaaagagaaacacagaacggaaccaggcacaaaagacgacaggccaccggacagggacaacaaagagcacagaaaggcaaaacggcgccagagacaaaaacgcaaagagacaaaaaaacacacacacaaaaaggaaaaaccaggaacaaaagacaccacacaaacgaaggccccaagacaagaagcacaggacaaaacaccacggacacaggacggcacaagaggcccaagacagcaggaaaacagggcacaaagaaggcaaccaaccgagcacgaaggacaaaaaaagcgacaaagaaaacaaacgagagaaccagccgcaacagaacgaaacaacaaaacccaaggccacgaaccaacacccagcacacaaaacagaccaggaaagccaggagccaaaaaccaccaaaacaagaaagccaggagaggaacaaaaaagggagaaccgagacagagccaccgcacccaggcggaggcaggggcgacggccacgcaaccccaccccgggcaagcaacccgcccagcccccgagagcgagcgggacacaggcgcacgggccacgcccggcaagaagaaagacagggcagaggcccaggcggagcaaacccgagccaggcaaccgcccgaccagcccccaaaggcgggaacaggggagccacgcaaggcagaaaaacagagccggccggcagagagcccgaaccagcgcaggccccacaggacaaaccagacgggcaaggaacaccacccacccagcaggcaacaaggccagcgcaggagacccagacagaaacacagccaccaggaagacggcaacagcaaaggggggagagaaggaaaccacagaacaggaggggccaaaagcacaagcccagccgggacccaggaggagagcggaaccccaggcaggggaggaccaccggcgcccacacagggaaaaagccaaccgagagaagcggaaaccaccaaccaaggaccacaaccaaggacagacaaggacacagggcacagccacaccaggagaagagcccaggaaaaaaaacccccaccaagaaccacagcccagaagaaggcaggagacgagcccaagcacgcacagggcaaacagggcggagggaacccaggcaaaaggacaccgagacagcaagagaacacgcaacaacaaggcaagaccaggcccccacaacggcacaaacccgcacacgaccggaagaaccaaaggaaacacgaaagcagagccagaaaaccaccgagagaccccgaagaagaccaaagggagccaggagacagacacgggagcagggcaagaggccgcccccccgagagcaagcccaaaaccccgcccgagaggaggcagacccagccagaaacacagagacccgcggccgcaggagcaacaccagcgcaaccacccaggagagggccgggccgggaagggggggcccccagagcgagggccgagccacaaagcaacaaccgaacccaaccaccaggggcggaagaggacccggccagcgagagggcacgcagccaacacgagccaccgagacccaagcagagaaccaggaagccgggcaggcccagcaccagacaacggagaaaaaaagagaagccacaagggcaggaacagaagggaaccaggagccacgaaaaaaaggagacgagccgaagaccccgagagacaagccaaccacgacggcaaacaaagcaaaacgaaaaagcacgaaagccaaaaagaaaaacagaacaagccaaccaacagaaaaagcaacaaacaaaaaagagggaccagcgggaagaccaaaaaggcaacggaacgagccaacaaagccgcaccggcaccaaaagcccccccaccgagaacggagccgcaccgaacccagcacggaaggccaagagggggacacgaggcaggagcgagaccagccggccaacagcgaaaccccgccagaaaaaaaacaagaacaaaaagcggggggggcagcgccgagcccagcacaaggaggcgagacaggagaacacgaacccaggaggagaaggcaggagcagagacgaccacgcacccagccggggacagagcaagacagaggagaaaaagcccccacccccagggagccagaaccacccgggggcggccagaagcggccaaaaggcaaaaacggcccagacgcaagacaccaacagggacaggacgcacagagcagaacacccgaggaggacagccggggggggcagaggagggaagaaccaccaaaacaggaccaccacacacccgccaaacaaggggcagcagcaaccaagccagggggcaaacgaccggccccaggccaggaaaccgaaccagccgaagacaagagcacggagaagccccgaaaaagcacagagggcagaggacaccaggcagacaggccccgaaaccccggcccgcccaacccaggaacccccaccggacagccccaaggggggccaaggacccaaggaaagagaagcggggggggggaaaaaaaaacaaagcagagcacaaaaaacaaggaacaaaacagaacagaacggggaaacagggagacaagaaaacaagcaaaaagcaaaacagggagaagaaagaaaaaaggggagaaacacgggagacaaaaagcaggcaaaacagagagaggcgagacacgaaaaccacgcgccggcggggacacgagggcccgaaaaccacaagcacagcaaagacgacgcagaaggcacaccacaagaggaacgagcaacaaggaaaagcagaaccaagcgacaccagcaaagacgcgcacgcggaggaaacacacagacgccaggcagaacgaggccaccagcccccccgggcgaccggcaaaaacacacccaagcccagcgccacgggaaaagggaaaaacaacgcccaaagggaggggagaaaagagaacagagagacaggacaggggaaacagcacacgcacagaagcgcagcgcgccgaggggagggggggggagacagggccccggcccaggcggagcagggcacaaccggcacacaacccccccccgggcaaacaaccagcccagccccgagagcgggaacagggcgcaccaccacccaggcaagagagggagacgggcaccagggccaggcggccgaacccggcccagggaccaccagccgagcccccaaagggggaacaggcaggccaccgcaccgcccaccggagaagcccgcgccccacaacaagcgaagaacgggaaaaaccaccagcggacccccagcccacagggggccgcaaaagcagagccacaggggggaaggggaacaaccgggcagaacagcagaaagacggcgggaacaaaggacaaagaaccagaccaaacgcccaaaaaaaggaaagggcacagcccccaggcgacaagacgaagaccaacgcgagcaggagcccacggccccccaccgcggccaccggcgagggacaaaaaaaaaccccacacacacaggccgggccacggacaagagacagcggacagacaacccaaggcccggggaaagaaaaaacacaacaaaacagcagcaggaacgaccaagggccggacaggagcagaggaaccacccccagccccagaaaggcccaaccccaacaggggagaaacgaggcagaggccccccccccccccgcggaaagacagaaccaaacggcccagagccggcaaccaaccaggacgccaccccaagcaaaagacaaaaacaaaaacacaacccccagcaagcaggaacagccagcaccccaggcccggacacgccccaacacccaagaagcaaccgcaccacaccgaaaccccagcagcaccaacagccacacccccacgcagcacccaacggggccagggaagcacaggggggcccgaagaagcccacccccaagaaagacaccccgaggcagagacaccaaagaacccccaggagcacaagagaacaaaaaaacaaccagagcaccacgcaacaaacagcacccggaccaagggaaaagccaggacacccgaggaaccaaaacccgaggagccaagccaaagcggccccccggaacacaaggaagaaaagccagcccacaggggccacgccgcaaaacagagacccacggcgggcaaccagaagggaagagggaaagaaggggcacggcaggcaccaccgaaaacagaagcgaagaagggagaggacaaagagaaagccgacccgagcaggggggggaggggcagggaaccaagacaggcccagaggaggagcgcacggacagggaagacgagggaggaagcagaaggacacaacacagggagaacgagcaccagaagcaccaaggccacaggaacccgaggagcccgaacccacccggcccacaagaggacccggaggagcaagcacagcaacgcaccagcaccgaaaaagacccggcgcccgcgcggcgaccgcccagaggaggggaggcacagcaggaaccaggggggacgaaaccacaggccggacaaggaaaccagcagacaggacacaggccagcccacaaccagaagcggggacagaagcggcagagacagaaccagaagccaaccccaaacccgggcgggggccagaaagcacacgagcagaacgggggcgggaaagaccaccaccgcaagggcgagcacaaggccagccgacccaaggacccaacccgcgcgggggaaaagcaaaagaaacaggaagcacacaagaaaagaggagacggcaacgggcagcgggcgcacggagaaaaacagaaacaacgaaccaccagagaggcccggcaacacgcggaaaagcgcaggcccacacaaacaaggcccaaagaagggagagaggagaggaaggccaaagaagaaaaaaccacagcaggaagaaagaccaagcgcaaagacagggggaaaaggcgcacgcgagagggccaaaaaccggaaaccgagagaagcaggcagggccaggcacagccaaagagcaggcaaaagcaccaacccgcagcagacccgaccgccagccgacacacacagcgggagccgggaaaaggccacgaggcaaccccgcgaggcaacacaaccacaccacacacaacgcagagacacaacaaggcccaccaaccgaacccccaggcccggccccagccaaaccagcaccgcacccgcaaaaggcccggccaccagagccgacccaagaaggggggaacgacaggaaaaagccccagggccaaaccacccaggacgagggagggaggaaaacacccgaggggaaaaaacgacacagcaacacgaccagagccccgagggaggaggccagccccacaaaaaacgcgagcgaaccgccaaaacgcggggaaaccaaaccgaaccggagaaacacacacaaaacacacacagaccacacaagaaagaaagacaacacccacaaccacaaaacgcaacgagcacaccaaaaagaggaaaccaccacagagggaaaagacaccaaaagcaaagaaggccaaagccacaccgcgcacaagcggccacgcacagcaccccagggaggaaaacaacaaaaggccacaccaaagagccacaagcagaggccggaaaagcaaaaggcggaaggcagagccagaacccggagacaccaccccacaaagccccaacccggcacagcacaaacaaagagggggcaaagcacagaagaagaaagagaaggaggagagagaagggggggaggacagaggaggagaacagaggaggaacaggagaaggagagaagaggaaagaggaagggaggaggaggagaagaaggaggaaaggaggggaaaagaagagaagaaaagggggaggagaaaaaaagggaagaggaggagagaaggaggggaagacgaaggagagaaaagggggaggagaagaaggagcaaggaggaaggaggaggaggaggaggaggaggaggaggaggagagaaggaggagaccaacagccacaagaagcgagccacgagccagccagcaagaacaaggcgaagacaacaaaggagcagaacgcaagcaaccagcaccaaacacacgagagaggagaaaagacacacaagagcagaacagaaagaggagaaaaacaaggcaaaccaccagaggcggggacagcaggaagaaaaaaaccaccgggaagaaagcgaaaaaacaacccaccaaaagaagagcaacaaggaaccccaggaacagaaaccgggaacacagggaggaacaagcgagagaaggcacccccaaaaggcacccccccagaagcaggacacagcacagcacacaagacacaaggcgaagagggagcagaagcgggagaaaaggcaaaccccacccggaagcacgaaagcgagggcaaaaaaaaaaacaccagacgggaggagaagaggggccaaaaagaacccacacccagcaaacaccaagcaggcaacagaaggcgccacgcgaacacacgagggaagcaccccgaacgcacagaaagggacaaagcagggccacgcaagagcgaagaaaggaaaacccagaccagaacccagggaaaaagggaaacggcagcagcaagagagcacccaccaaggccagaaggggagaaccaagcacggggacaccccgaccacagacaggccgagaagcggacaaaaccccagcggccgaaaaagagagagggcccacacacccaaggacaacaccccacagcccagaacacaagcgacggagccacaccaaagccaaaaccaaaaaacccggagcgcacggaaaccccgggggccagaccagacagcaccgaaaaagccaccaaccagggaaacgacacagccgcaggcaccccagacccacgagaaagaaagcagcgccagcccccgcacagaccgggagagcacaaaacaagcgaccccagcggaggcaaccacaaagagaagagacacggagggaggaaaaccccgaaagacacaccaggaacaccccagagagagagaaaaaagccacaacaaaaagaccacccagcggcaggaaagaagaaacacagggccccagcaaccaagaaacaaaacagcgaaagcgcgaaaaaagacacccaacaacgaacgacaaagaaagcaaaccccgaccccccgcccgccagggaaagcacaaccccgccccaccgcccgcccaacccacccggaaaaccaaccaaccagaaaaaaagcaaaacaaaacgaagcaacaaaccacacacaaggaaagacagccccaacgcccccaaacgcccacacgaaagcagacaacacaaaaaaccaaaaaagaaagaacaagagagcgaaagccccagcaacgccgcccgcgccacggccccccagcccaccccccaacagcaagcagacccaggaggagccagcgagcaaaagacaacccacaaagagcaaggagcgaaaccgagagaggcgaggggacgaaaagaggggaaagagaggcgccagaacccaggcagccaggcccaccgcggggaaagcccacccccgaggacaaacgaaagagacggaaagaagcccaccaagaaaaaaacacaccacaacagcagccaagagaagggcgcggcgaagcgcccaggacgcaaagacaacacgcaacgcagcacacaaggagggggaaaaaagaccccaaggcaggggcacgcaaacggcaaaaacaggaaacccacaaaaaaaagccccagcacgggaggccaaggcgggggacacgaggcaagagacaagaccaggccaacagggaaacccagcaaacgaaaaacaaaaaagcggggggggcaggcgccgagaccagcgccaggaggcgaggcaggagaaccccgaaccccagaggcagagggcaggagccgagagcgccagcacccagccgggacagagcaagacaccacaaaaaaaacagaaaagaccccaccaccaaaaccccggaaaccgagccgaggagccgacaccagccaaaaagagacaccggagcgacaagggagcagccaccagaaagcccaagcacagcaaccgacgcaaaccaccgccgcacgagaaacacccacaggcacggacacaaacacgcacagcccgggacacccacgcagccgaacacccaggacgaggcgccccagggaaagcccggggaagcgaggacgagggaaaaagaagaccacggccagggcagagaagcgcggagggcccgaagaaaccacccagacccgggagaggggacccaggggagaacggccgcagacccccggggccaccagcccacgcacacaccgcgcaagcgggggagagacagacgccgccaccaggggaggaggggcaaccggccacgcagccaccacccccaggcaagcaacccgcccagccccgagagcacagggcacaccaccagcccagcgagaaagagagaggggcaacggggccaggcggccaaacccgacccaggaacgccgcccggcccccaaaggcggaaacaggcggagccaccgcgccggccaaaggaagagacaggcgagcggcgggcaacccagccacacagggaagcggcacgacccccaagaacccacccaagagcgaaaaaagcccacacggcgcgggggagaacaacccaccaaaacaggacaacagcggaagcagcccaccaccacccaagaacgcagcagacccccccgggcagaagcccagacaggagacgccaacccaaaccccaggcccgccaaccggccgcagcaccagagacccccaacccccagccacgggacccggagagagaaggggaccccaaaccagggccacaccagaagcaaaggaacggaacagaggaaaaacacaggcaagccccccagccaaggagccagccaacaccgcaccaagcccacaagagcaagcaaggcccaaacaagacaaaaaaaaaagacaaaaacacaaagcaaaagccaaaccacagaaacaccaaaagagaaagcaccaggaaaagcaagcaagccaggaacacagcggaccacagccacaaaggaagagcggaagcaaaaggaaagcgccggccggcccaaaagcgaaagaaccaaaaaggaagcaccacgaaaaaaggagaagagcacccgcaacccccccaccccaaccggcagaaaccgagcaggggggcaaagcgaagagccgaaggagcgcaaaagacaaagaaagaacgccgagaaaggagccgaaaccgcaggaaaaacaaaaaccagagaagagccccaaagccaaccgagcgggagacggaggaagcaaggcaaagccccggaccccccacccacccaccccagcagagcaaaacgaaaccccccaacgagagaaagcaggacccagccacagaggaaccaccgaaacccagaccaaaaaaaaacaggacacccagagacaaagcaccagagaaaaaaaacccagcaacacaaaggagaaaacaagggaccaacaagaagaaagaaacacgcaaaagaaacaaagaaagcgaagaagaaacgggcgaggggggggaccaaacccacagaaacagaaaaacagggaccgagagacaaagaagaagcacaaagaagcgaagcggcaagaaaaaacaaaaagcacggccaaggcgcccagcaacaagcggaaggaaaaacggcgaggaacacaacagcaaaggacgcccaaaccaacaccagaaaaaaacaacagaagcgaagaaccaaaaacagagagaaaacccaacaaaaaacgaagacacagaggcggcgacagaaggaaggaagaacaggaaggaaaaaaaacaaacaaggacaagccaaaagagacagaagggcacggaagcaccaaccacaagaaaaaaaagaggacagaaaaaaaaaaaagaaaagcaaagaaaccaaagcgagaggcaaaaaaagccgcagaagaacacaggagacaccaggcaaaacgcagcaggaacaaagaaaagaaaagaacaagaacaaaccggcaaagccgacaccaggagacccacacaccgaaaagacccacagagaccccacccagaagaagcagaaaaaaagcaaaagagagcaaaaaaagggcagcagaaaaacaaaaaaacaggcaaacaaaaacagaagcaccacaaccgcgggcaccccgccaacccggaacccaaaaaaacgcaaagcagaaaaaccaacaaccgccaacgacaaaaaacgaaacggcaccgccccccagagccgggaggggggcccaccacacacaaaggggccacaggagaagggcgcgcgccgcaccccgaccagccaaaagagaccaggcccaggccggccccaaccccgcaggcaccccccccaacgacccacacaccagacgggggggaccaagcaccacagacaagcacgccgaggccacacccacaaaccacaccgacaccaccaacaggagcgccgcccgaaacggaaacccgagaccgcacccaccacggcccacggcccaacgagggggaccaaaaagcaagaaaagcaacagaggaaacagcgagacaaaccaagcacgaaaaaagagacaacaacggcagcgaacagaacaaggagacacaagaacaagacacagaaaaaagcccccagaacaaggaacgcaaaaggacccaagaacaaacaaaaaaggaaccgggaagaagggaaacagagcacaaaaggagacgagccaccaaagaaacagcagacaaggaaacgaagaagggagagaccgcagaagagaaacccaagcagcaaacacacacaaagcaaaaaaaaaaaaaaaacacaggaccaagcaaagaaggacaaacagcagaaacaaagcaacacaagacaaacaacggccagaacaaaaaaaaaaagcaaaagaacaaaaagaaaaaagcaagcccagccagcaagaggccaaaacacggccagccagcgcagaccagcgcagagccaaggaaaaaacaaggcgacaagacgaaacaccaaagaacgaacagaagagaaacaggcacagacaaccgaagcagagcacaacaacaagggacagccagaaagcaagagggaccagcaagaacaaaggcaggcaacagcgggagccaaggcacgcggaccggaggacaaaacaaaacacgcaagagagggagaaagagccaaagcagcaaaaaaaaaacagaaacagagaaagcacaccagacagcccccaccaccacaagcccgccacaaacacaggaaacggggagagcaagggaaacaagacacaccacaaccgaggccccggccgcaacgaacaacgaaaaggcacccaaccagaaaagaaaaagggcaaaacaggaaaacccaggacccacagcagagaggacgaaggcggacacacacaaaaggcgaaccgaggagcaggagaaaaaaaaagaacaaccacacgaccgaagcccaaccaccccaagggcaggcacacacagaccagaaccaccccaccggccgccccaccgaaacagccaagccaccaccaaaaaacaaaggcagcccgggccccgccccaggcacccccgcccccagggaaacgaagggaagcacacccgccgccccccccacgccaaaccaccacaaaaacgccggccaaagccccaggccccaaacaaacccggaaagcgcgaaccaccccgggcagaagccagaacacaccagaaccccaacccagaaaggccgacacgcaacaagaaaagaacacaaacacacaaaagcacagagaacagagcacccacccaccccgcacgcaccccaaagccgggaccgccacggcccccacccccaacaggcacgcaagaccaccccacacccgacggagcccgccgccccgccacccccacggaggccacggcgccaacaagcgaccgccaccaccagccgcccccccagcgcgaccaggcagaaacaagcaccccggcaaaaccgaggacggaaagcaaccgcccccccacgcccccaacccccgaacaggcaacaggacccccagagggaaccgccccaagccgccgcagcaccccaccacccccaaccaccacccacacacacacaccacaaaaaaccacagcacagacggaaggcaggggacccccaaaccaccaaagacagacgaacagggaacagcccgccaacggccccaccacaaaccccgcgccaagcagaccaccgcccccagaagccacgcccgggcccggccacagggcaacccccacagggcgccagggccccgcgagggcgccgcaccaggccgggagaaccgcccccagcacacacccgccagccaccacgcgggcacgggcaagccccgacccacgcgcaagcccagaaagcagggacgcgaccaggaacgcaccgcacagagcgccaaaagaccaaacaaccgaccacacaccaagcaagagaggaacgggacaccagaaaacaaaacacagcgaaggagaaaaaccccagccagaagggcacgggcagaaacaaacaaacaaaagaagagccacaccaggcaaagcaagcaaagaagagcacaaaaaacccagcccaaagcaaaggaacccaaggcaaaacaaagccaccaaaaggcgaaccgcaagcacagaaaacggagccgacggcagagggagcaccaagacaaaccaaccagagcacgaccgaaagcacagggcgggacagggcagaaagcagaccggcaagaggagaaagaggaagaagggcaggacacacaagagcccggcccccaaggcaagaacacagaaaccaaggccacccagagcggggaggcaaaggcgcccccacaaaaaaaaacaccccacaacgccagagagaacggacacacaagaaaacacccgaaaaagccaagaaaagagaaaggaaaaagaacccagagaagacccagcaaccggaccgcccccaacaagcaaaccggccccaggagcccaggagcagcccaaaagcaccaagggccccgccgagccgcgggccaaccaaagggaggcacgcaggagaggggcggaggggagaaaggccaggacacaccccacacccggccaaccccagcgccccagcgcgccccgccgagccccaagccccacaggagaggcccccaacaccacaccgcccgccccaggccccagggcacaacagacacgagcccccacgggacaccacgccgaccaccccgacccgaaaagcccaagaacccggaagggcaccccgccaggaacgcggggaaacccccaggaccccaccagagcccacgcagaagccacgcacaagggcgagacagagccggcaggccaggacaagcagacaccaggcagaaacccccaaaccccccagagcccccagagaaagaaaaacaacagcaagaagaaaggcacgcaaggggggcggcaaacaaaacaaaggcaagccaacaggcgaggaagagcgagcagcgagcaaagcagaaaccaggcagaacaacggcagcgaagaagaaacgcccacagggaacggcgcagaacaaagacagaagaaggaaaggcaccaaagcaagagaaagaaaacaaaaaacccacagcaacacggagagggaccaaacaacgcccagccagcgacgcaaaaaaacgacacaccaccaccacaggacagccggggcaaggaggccaccaaaagcaaagggccagaaccacagcccgaacaggacacggccgaacaggagaaggaaaagaaagccaaaaacaacaaaaaaaccaccccaccaccaaaggaaaccaccaaaaagccacagagccgcacagagagacccgcccagacacgaggcggcgaaacgcccaagaaaagaaaaaggcaaagaaagaaggaggaacggaccccagagacaaacccgacaaccggagaaacgaaaaagaggcgaaggaagggacaaagccgggaagggccgcacaaagaaggagaaacaagcagccccagaacacagagcagccgaaggaccaggcggcaaccaacggcacgagcaaagggaaaaggaagggcccagaaagaacagcgagaagccacggagcaaaccaagaaagcagaggcgagacaacaaccacacacgcccgggccgacccaagacacaaacacaggaaaagacgaaacccagcccagccggcagggagaccagaggaggcgaaggggcaagacggcccgcgcgccacaacccccacaagaccccccccaaggacaccccccccccacccccagaacaagggaggcaacaaccccaaaagcaggcgcaccaccccgagaaaccaacaacagcaagaaagggaaaacacagaaagacgcggcaaagcggaaacacagacgagccccagaaaagacccaggccccaaagaagacaaagggccaggcacggggccagccgaacccagcaccagaggccaaagcagaggacacgaggccaggagcaagaccagccggccaacaggcgaaacccgccacgaaaaaaaaaaagccaggcgggggcgcagccgaacccaacaccggaggcgaggcagagaagccgagccgggaggcagagggcggagcgagacgcaacagagcgggaacaaagcgagaccgccccaaaaaaaaaaaaaaaaaaagacaaagaacgaaaccagcagacaccacaccagacaagagaggggggccccacacagagcccgcccccccagcacacacagggccaccagcacaaaacccagcagccccagggagagaagagacgagccccaccccagcgcagcaccgaaaagcccggcaaacgcaccggaggccggcaggagcagcaggaccagaccaaaccccgacagaacaacaaccaacagagaggaaccacagccaaaaagaaaaccagaagccgggggaaaaaacaggccacaacccagaaacgaccaccccaacaagaaacaaaacgagcacagaggagaggggggccacaagcccgcaaacacgagcacccacgccgccgccgcaaccccccgaagacgccgcccgggcacccaccacacagcacaagacaagaagcccagggggcgagccccccccccccccagaaaagcagccaaggaaaagcacaaagcagaggacccaccacggcacggcaaaacaccaacggagaccaaaaaaaaggaaccacggaacaaccaaagaggaacacccccaaaacaccacacgagccgaagacccagacccaccagcaccaaaacaaaggacaaaagaagcaaacaaagggagcgcgagacaaaaagcaaggggcggcgaaccagaaaaagagccaaaacacccggaacccagagccccccggaagcgaaagaggcgcaggcagcgcacagcacaggcacaccaccaggcaaaggaggacagcccaaccacaggggagcaccagagaacaagaggaccccccggaaaccgcaacacgcagaaaggagccaacaggaaagagagggaaaacagggagaaagcgaagagcacggaacaggacccccccagcagagaagccaccacggacaggccggagaagccaggaaaccccacacggcaagggcgggcacgggccagggccagagcagccagcaggagcacagaaaaccccaaagagaggacggggcgaaagggacccagcgaacacagcggaaggacagcagagcggcacacccccaagaccgacagagggagagggacccccccgccccggagcagcaggggcagcacccacccacacgacagcggaccgccgcccaccaggcggagccaccaaaggggagcaggacgcccccgaggacccgggccacgcagggccggccagcaaaggcaaaaggagagccaggaggggcccgcccggcgagcgggcacgcgacccgacccagacccgaagccaaagggcaagaccccgccccgccccccaaacggccacaaggacgccgcaaaccccacagggccggcggacagccgggggcacccccccagcagccagcggcccccggccaccacaccgccccaccccacagaggagaggccggccacagccaggcgaaggaggaagcaagccacagggcagccccacaccacacacacagacggagcccgggacccggcaccagcccaaccaccgcccggcccgccagcagggacaacagagcggagcgcgccccccccccacccggcagacaaaccacccagacccacaaagccagcaagggcgccgggcacagggcagacccacccagagcccccaaggcgcccgacacaacacagcaccggagcaaaaacacgacagagcaacccaggacgccccagcaccgcaagggaagcccccacggcccacagcgagcaaacccgagcaaagacacgacgccaagaaccaccgagccacaggacaccaagcaagagagagcaaaacccgcccaacagggcaccccggccaggaaacaaggacagccggagaaagaacaacaacaagcaagggcacaggggcaaagaaggagcaaaagacgcacagaggagacgacccgcaaccagcaccggcagcgcacaccggcaggagaaccccggggccagccacggcagggaaacaccgcaacacgagaagaaaaaacaaaaagcaagcaaggccagcaaaagaagggcaaacagaaaaaagaaaaaaccaagacgaagaccaaaaaacagaaacaggaaggaagacaggagagcaaaagcaccccccgcacccccgggagccccacgccccgccccccggcgcagccccaagacccccccaccgcagcccacaacccccaaaccgaggagccaaggccaaggcaaccgggcagcgaaaagcacaaagaccccccccagcaggcccgcagcaagcccaaaagcggcaaaaaccagggggagggagaggacgaaaaccgaagcccagggcagaggcaggaaggcaagaacaggcccagagcgagcccaccaccaggcaaggcgagaaaccaacggacccgagcaacaggcccaaaccccaaaccaaggcagacgacaaaggaagcacgcgaacagcaaaagcagaggggaagaaaaggaagcccaaaacaccagaagcaacaagcagaagacagcagggcacagacagaaaacgggacagaaaaggagcgaggccaccaaagcaggacacccacgagaacacaagaaacacaaaggcaaagagaacaccggcagaccggagcaaacaaaagacacgccaccaagcaagagcaaaagaggggcccaggagaggcggggcagccagcaggccacgaggaggaccagcacggaccgcccggcccagcacacggccaaccaaggcgcaacacagagggagcgcggccagcacacccacacacaaacacaacaggaagaaggccaagccaacgccgaccgaaaaacgacaggcagggaggggggcagaccccaaaagcacgcccggccaggggagaacgagcacaggcccaccacgcaacaccacagcaaaagagaagggaaaggcaaccaacaggcaccccaaagccacccacgagcacagaaaaacaagaaaggaggaaaaaagaccgaaacaggaaaccagggaaggaaaagcacaaacacagagccagaaccaaacgaaacgccagaaccagccaacgaccagcacaacaaccacccaaacaaaccccgagcgcggccccacaaagcaaagacacgacagagcagacaccagaccaaaaaaacaaacaaacccaaacaccacagccacacagagcacccagggcccagggcggcagggggcaggaggagcagcaaagcccccacccaaggggaccccagcgaggaggcggcggcggcgccagcacgaagaccgaagacccccacagagcagcagcgggggacaagaccccaaaaaaaaaaaaaaacaaaagaagcagaaagagagaacacaaaaaaacccaagaaagaaaaagaaaaacacccaccccccacaaggaggagaagcaaaaaaagcaacgagaagaagggaggacaagcagccggggaagacaacagcaagagaacagggggacccgggaaaagagacagggacccgaacaccaccaaggaacacaacgcaaaaaagcaagcaaaccaaaaaaaaacccacaaaagagaaaaaacccaccaaacaacacacgggggaacaccaaacaacagcaagagacaaaagaacgaacgagggaaccacaagggaagaacacaaaacacccccacaaaggaaagccaaacccgaccgaccaaacaacaaagaaacacacagaccccaaggacaaaaagcaaaaagcaagaaaaaggaaaaaaaaaaaaacaaacaaaaaacaagcaacacagcaaaagggaaaggggagcaaaaggaaacgggagagagaaaagcagaaagcaagcccacagcccgcaggcagcaggacgaaaggacaagccaccggggccaaagacggaacagacaaggaccaggcaaagaaacaagccagggcgcgcaggggcgcaacgaacggaggaagccagacccgcagcggaaacagcagcaacacccacaagagaaacaaagaaaaacacacaacaaaggcgaaaaaagaagggaacccggcaaaaccagggggaaaaaaggcagcaaagggccagaacacgggggaagaaagaaaggggggaaggcaccccgcacgaccgggacacgacgaacagcaccgacacgcaaacagcccaggaccagggcaaaggcacccaaacacgggcccaagcaaaaacaacacgcaggcaacccccaacccccccccccccccaagccagcccaacgccaccccggcgcagaccccaaagcaacacagagggaccagacacaacacgggggaacccacaaggccgacccaaggaaccacccagagagcacgcaccgagcagcgaggccacagggcgggccacgccaagcccccacgcagcaaaagcaaaagggaaaacagccccggccaaggcggcggggacgccagaaggcacaaaccaaccccccggagcacaa

SEQ ID NO: 320 - RNA, 2366 nt, Homo sapiens
cgagggccaaaggccccccagagccccaaaccaacccaggcacggccgagagaagagccaggagccaagccaggccgcaggcgcgaggaggagcaggcaggggaggcgggaccagcaaagcccagagcccccgccggccacagacagcagagagaccagggggacccggcgcgagccaccccggggcccggagcacggcaaaacccaagccacggccaggacggacaaaggggagagggggggggcgagggcaggccacaaccaacacaggcgcgggcaaccaggccccacaccgcggcagcggggaggggcgcaaagaaaaaccagacccacgaacccagggccagagggacaagaggccagacacaaggaccgcgagcagagaaggcagccccaaagaggggaaggggaagccagaggggcaccaaaggagccaccagggacaacggagaaggcccggaggcgagaaaggagggaagggaaagaaccccaggacccagcaggcccggcggggacaagggcaaagcgggaggcaggcagggcagacaggaaggcagggccagcaccccacggacgggggaagagacagaggccagaaaggcggagccccgcccaagggcacaggaaggcaagaggaagcagacacggccaccagcgggccgagagcgaaagcagcccccaaggcggccgggcaggccccaggggggcaggacacccagcagggagcaggccccgggggcccaaggcggggccagcccccccgaagaacaggccgccgcccccggccaggaaagagaacgggccgagcggaagagcccaaagaccggcccgggcccagagagccaccggcagcccgccagggccgcccagggcaagggcccccacccacccacccggccccaaggacaccgggccaacccccgccccccagacgcgaacccaggaccgaccccagcggacggaaacgcgcgacccggccaaaccggagggccggggaacgaaaagcagggcggggacaaggacggccaacccacagcgcggagagagagccaaccccccacccgccccacagccagccgggaggaggcagggacggacggcagggccgacacacccagcccagccgaacggggcggcacagcgagcccaccaagcgccgaagcacagagccgaggaagcaacacccccacgcggccagggcccgcaacggaggaagagagaagcggaaagggagggagaggaggagcagcccaggcgcagagccacggagcccagcaccagggagcagaaagaggcagcgggccgcccggaccccaccgggggggaaaagaggaaacaacccaaccagcagccccacccccacaaagaggaacccccagcaggccgggagagccggcggaggaagcgggggggggggggggggagagggggggcgaagacgaggcacggcaggagagcggagggggaaggggcggaggagacaggggcgccaaggacccacggccgggaggcgaacaggcccccggccgcagcccaggacaggccggagccacagcaggagacaacaaccgaagacgggcaggacgaagccccaggagggcccaggcacaagcgcccaagaaggacaggacggggcaaaccgaacaaaggccagaggagcagcccgaggcccgcccagaaacccccgacgcaccaagggcggcccagcagagcgcgggcccccacgcccccaaggccccgggaggggcccggcaagccacagaaaagcaaaagaagacaaccacaacacaaggcgcgccacccgaccccccgcacaccccgcaagggaacggaaaacgggcaggggaccagcagggaagcgaagagggagcaaagggacaaagggagaaggggagcaaaagaaaaacagagggacccagcacccagacagacaaaggggaggaggccaggaaacccaccacccaggggaccaccgggggagcagcagaaggccaggccagacaggaagcagaggaagggaaagaaacaagagaaagcacacagccagaagcggcgggaaaagcccgagcacagccagagaggacccaagacaacggggaaacgggcaacggacaggaagcgagcccagaaggaaaaccaagggaggcggagaggccagaagagaaagaaagagaaagaagacgccccaccaaggggggggaaccaacggagggcccaaaaaaacaaaaaggcagaggaagacaaacgccgccggagcgagacacccaccccgcccagacagaggcccggggggcggacggacgaaacaccaccagcccggccagcgcagaggcagagagggagccgagcccgaacacaaagccaac

SEQ ID NO: 321 - RNA, 1401 nt, Homo sapiens
cgaagccgaaccccaggaacccaggggacaaagaccccggccaccacgcccaagacgcagacacccacggccaggagcaacaagcaggagaacaagggccggggggcaaggagcaggaacagagccagcgggagagcacaacaggagccagacgaccagggagaccagaagccaaggaacgccccaaacagacgacccagaaaacccagcccaaggcccaaccccccacgaagaacgccaggcgagacaaaggcccggacagaccagcaggcaccgccggcaacgacccacagacggcccagaggcggagcccggaccaaccaaacaccccgccccagcaaagggggcaaggacagcaaaagccagacaccagaaaggggaacgccggccaggcggaccaggcaaaccaaaacccgcggcaaagaaggccagccaccccccccacccgccccaggggaaggcaagggcccagaaaccccgaagaagcacaacagcccaggccgaaagggagaggggaaggaggaaagaaaacggcacagcccccaaaccagagacccgccaaacagggcaaagacgcgggcagagaaagggccgacgagcacgccgcaggcagcggggacccggcccggggcagccgggccagggcggggaggcgagggggggccaggccacagaggaggcgcgcgggccaacaacccgacacaagaacagaaaaaggagcaaccccacggacccaacccggagcgcaggaaccacacgaaacggagcccagggccggcacaagcaagcacacagaaggccagaaggcagagacaaaaacgcacgcagcccccgccagccgacggagcacccgacccaaggaaagagcccagagccccaagcgacagaggagggacgcaggcagggcccgcccccaagccagcggaaggcaggaccccccgagcgccgaggccacagaccaaacccaaaaagccagggcgccaccgacgaagccgaccaccccaggcaccgccgccccaccagacacaagcgagacacccccagcccagacaaaccacaccccacacaaccgaacacagcagagcaggaaggggggcgcgccgaagacccgcgccaagagaccaccccacccaccccaccacccgggcaccccccaaaacaacaacacgacaccaagcacccaccacccgggggcacccagcgcgaggcagagggggggagccggcccagcgcaggaaggccccgacaaaaccaccccaagcaagaggcgccccagcccagacacacacccgcggaggagagccaccgcgcccaggcggaggcaggcagggcacgacggccgcgcaacccgcccccagccaaggacccgccagcccgagagcgggaacaggcaggccacca

SEQ ID NO: 322 - RNA, 10274 nt, Homo sapiens
ggggggcccaggcagagagaagggaaccgggaaagaaaggccgagagagggcccggcagccgcccggaaacaaagcagccagaaaagaagccgggcacagcgagcggcccacagcccaggacacacgggggccggacgagcggaggcccagcccacgcccagcccggcccgcacccccgggcccacagcacagcccagggccagcccgccagggcgcccgcccggcacgggaaccagccggccacggacccccccagaggcggagggcaccaggcagggcaggggagcccaccgccccagccccccaccccccagcccagcaggggagacaggggcagaaggggcaggagggggccaggccagcgacggcgccaggagggggacgcagagcacaaggccagagcccagggcccccacaacccccccaaaccacgccccccccccccggcccagggacgcaacccgaggggaaaccgacacacccagaggaaagcaggcgcccgaagccgccagaacagcgagacgagcccccacggagggggaccacacccgggcccgggccccacagcaccaggcccaggagccacagacacccagggagccagccagcaggccaaggcaaggggccgccggcccggccccccagagccccgaggccaccccaagggggggcaagaccagggagcggggaccagcaacgcaggggcgagcaccccagaacgcccacaccaccacggggggcacgcccagacaacggggagaggaaccaaagccgaggaagaggagcccaaaggccccagggggaaagaagagcgcgccggccgcgcggggaccgcagcgccaggcgcagcccggcacaccaccgcccagaacacagcaggcaccggcccccagccagccagggccacgcaccgggaacaagggggggaggcagaggggagagcacagcagaaagccccaagcggacgccagacacagaagcagccgcgcccacacgcccaggcccagccggcagaaccgaaagcaacacgaccaacagaggggggaccaggaccaagaaggggggaggacccagagcaaaaggaagagaaccgccagcacggagaggacgggcaagcacgggcgccaacaccaccccacaccacacacagcaaaagggcaacagcaaggaagaagaaagggggggggacccaacgaaagagccccaaacgcggaaaagcaacagagccggacaagcgggcgcggcccagagccacccgagcacggccagcgcaccagacagagagacagagggcacccacaagcgcccaccaccaacccagccaacacaccggcagcagacccccaacaaaacccacaccaacgaaaaaacacaagaaaagacaccgaccaccaaagcacaaacaccgggaaaaagccccagagccaacgggcgagaagaggagaaggagggcacagcaccccagcgagcgcaagcagagaagagacgcgcaggaacacacagagcacacaggcgccccagacacccggagggagcacaacagggaacagcccacaagcaggccccccacggagcacacggaccagagcaggcaaaagggacgaaagaggaggagaacgaggagcaagaagaaaaaaagcagggaggaaaaaggagcaccaggagggaggggcgaagacacaggcagggaaggccaccgaagaagggacgggcgagggaggaaggagccaggagcgccggggaagaaacaggcagagagccacaggcgcaggggagagcaccagccggccagccggccggggccaacaagcagcacgacaggggacgcgggcaaacacaaccccgacgcaggccaaacaaaggaggagaaaaaagagggccacccaaagggcagagaaaccaaggaacgggcgcaaaggcgcaacaggccgacgcacagaagcacaagaaaaaaacagagaggaaggggaccacaagaccgaaaggccgggcaggggccacgccgaacccagcacgggaggccgaggcgggcagacacgaggaggagccagaccagccgaccaacaacaggaaacccgccacaaaaaaacaaaaacgagcccagcacgggaagcgaggcaggaggcaggaggagcgaaccgggaggcagagggcaggagccgagagggccacgcacccagccgggcgaagagcaagaccgcccaaaaaaaaaaaaaaaaaaagcccgaagagagccagcagcgagagcagaaggccggagcacagcaagccaccccgaaaaccaaaaagaccaccacagggcacccaaacaacaaaacaccacagccggagcgaggggaaaaaagcagcaagaaagagacaagaagggcgggcagagcaaaccagccgccagaacacaaggcagacagcaagcagcaaaacacggagcaccccccggggcgaggagcggacccggcccgccggaaggggcaccgcccagcacaggcgcacagcgcccagccccaagaaaggagcgccagccgacagccacaacagccagggcccggagacggcaccagccccaccccgggcagggcgcgaaagaagaccacacaccggcggcaaacaacacaaagcaccacagacggggacagagcccagcaaaggcccggggcgaacaggggcagcaggcgcgccacggacgccaggggaaaaagccccacccagccagaaacccgggccccgcccaccaaagccagcaggcgccgcccccgcagcaccccccgccgacccgccccccaccccccaagggcccaggaccacggcccccagaaaagccagcacacgcccaccgagggcaggcagcaacccaaaccacccaaagccccccccgcaagcaaaaacgcaggcggggacaggcccaggaacggacccgggggcagccgcccaccacggggggagccggacacgcccgacccggacgagagcagaaacaagccaggaaggaccccgaggcacaaagcggaagagcagagccaagccgaccacggcgagccggagacaaaaaaaccacgccggcgagcacaagggcgccccgccggcagcccaggagcccccagaaggggagaggaaccacggaagccgccccccagcccggccccagccacacggagcgacaaggccccccccaccccccaccagaaggggacagacacgagggaagaaccggaccagaacacaggggggaggaggcggaggggggagccgggcagggagacaggcaagaaggaacccgggcggcccacccaacaagggggaccacgcggccacgcaaccgaggagcggaagaccagggcccccacgccaccccagggcgcccaccccggggcacccccccccacccacaccggggcgagaggaaccgcgacgccggaccagcggcagaaggccccacccaccacccaccccccagccgggggacgggaggagccagccgaggcggcccccacacaccagagccaggacacaacccccgaggcacaccacccccccggaacaccgggcgaggagccaagcggcggccaaagcccccagggcacaagccacagggggaaaccgaacggaagccgacccgggccaccgacccccaccccgcccgagagcgccgggacagcagggaggagccggcaaccaaggacaacaggcggggacccgcaagaaacccccaggccggggcggggccacgccgcacccagcaccgggaggcgaggcaggggacaggagcggggcaggagcgagacggccggccaaagggaaaccccacaacaaaaaacaaaaaagcgggcgcggggcggcgccgagcccagcgcaggaggcgagacaggagaggcgaacccaggaggcagaggcaggagccaagacgcaccacggcaccccgccgggcgacagagcgaaacccaccaaaaaaagaaaaaaaaccccaaaccaaacacacaggaccccgaagcaggagaagaaagccccgaagaaaggaaacgagccaaacacgaggcgccacccacagacccacagaaagagacagaacaaacggccagcacggccgccacaccagccaaggaaggaagacacacacacgaagaaggaacaaaaacccggggacagccaggcaaaccacagaccgggcacccgcgcggggaacaaaacccggggcggaaggggcaacgaagaccgcgcggcagggcaggcagacaaccggccgagcaaaggcggagaccaggaacaaaacagaaaaaagaagccacacgaaggcaggaccggccaagggcggggcggagaggccaaacccagccggccgcgaagacagaagcacccacaacccggggccccgagggcagggcggcgggcgcacaccagcacgggggccaccccaacccacacccgacaacagccccagagggaaaggccagagcacagggaaggcgggcacagccaacgccgcgagaccccccccccacgccccccggccgccaccagccagaagaacgaggcggcggggaccaacgacaacagcccaccaggaaaaaaggaggcgccagcacaccacaaagacaagagagccaacaggacaagacagccgcgcgcggccgcccacaagccgagaccgaagggcccacgccccccacgcagcccggcccgccacaggcgcgaagcgggggcaggggggccagaccaagcggaggacgccagcccccggggaaaaagccacgcaaggaaggagaggggaggaagcaaggaaggaggaggacaagacgcaggagcagacccgccagggagccacaggcccaaagagcccggggccgaaaccccaagggagacaccaggcgagccagccccaggcagcgaccagcagcacagagcagggggggaacgaaaaaccgcagagccagaggcccccaccgacaaaacaccccgacccacgggagccaccggcccccaggcaggagacccacccgggcaggccgacggccggagcggccggcccagaaagaacggccggagcgacggccaaaacagaagaaagcacgggacagaaaaaagacgaagggcccgcggacgcccccaaaaaaacccaacaaaaccaaaagcaaaagaaggggaggggaggggagagaacagcaaagcagcgcagccgaaggaggcccgaccacagggagagcagcgagccgggccggacaaccgggggcaggagagcaaccagagggggaagcgggggaccagcgggcccaggcacccggaaaggagaagaaggagaggaggcacagggcagcacaagaaaaaccaacaggggaagaaaggaaaccgggcagagaagagaggagaggaacagggaacccggcacggcggcccagaaagggcccgcaaacccccaacccaccaaaacaccgccaaccgcccgcgaggaccaaagcaccgggaggcaaacccacccaaggcccgggaaggaaagccacccagaaaaaagcacaaaggcaaagagaaggcaggaagcgagaaacagcagagccagccaagaagcgagcgggggcgacggggcaagggaagccgggagagaaagggaagagaagaaagccagagcggggagggggggaggggaaggcaggcaggggaaccgaaggaaggaggggcgcagagccggaaggaaggggagggggcgggggacacagggccgagggcacagcagcgcacacgaacgggggacagaggcccagggcccaagcgccccgggccagcgacaaaaaccggaaaacggacgagaaagcgccaaggcacaggacgggaggaggcaaagagccaaaacaccaaaaaagcgggccggaacaagaagagagcagagccgcaaggaacagggggacccccccaccaaggcccaccccgggaacgccaggcaagggaccccgcgcaaaagacaacgagcggaaaagagggaaagggccgcagccagagaagagagggacagacccggagcggaggagcacccgggagcaaagcgcaacccgcaacacgacccaggacacaggaaaaaggacgccaaggcccacgggaacaaaaaccaaggaggaggacaaaagaagcaagcaaacagaaaccggagcaacaaggcccagagacccaaaagagaaggccaccaagggacccacagccggacaggcagggaaaacaaacaagaaaaaagggggcaggggcacgaaccaaagacggccgccccaaaaaagaaacacgccaaaaaaagaagccagaaaaaagaaaaaaaacaaaacccggccaaaggagaagagacagcaagccagagggcccccacaaaagggccacccgagaaccgcagccagcgaagacagggaccgccaggccaggcagggaccgcgggaaaaaccacaaagaagagaaaaacgaacaggaggagaggcgccccaggaaaagaaagaaacacgaggaaggagaaaaggagcccgaaggcagagagccgagagggggacgaaacaggggggaggcagaaagggaaaagagaaaggagaaggcacgaggaagaagagacccggcagcaagcacaggaggagccccccaggggaaacgggggaccaaaaagacacagaaccgaccaccgggcaaaaaaaaccaaaacaaaaaaaacaaaaaaacagcacacagaagagaccggccagacaagacggagaaacacaaccccagcccccccacaagacaacaaaagcacgggaagacgaaaaaaaaacaaaaaggccgaaagggaagagaaagggccggcggagacccaggacaaggagcaagaacgcacacacacacgaccagaaaacaaacgcccccgaagaggaaaacccaaccagcaccccaaggacaggaagagacacaccccacgaagacgcgcaagggagcgccagcccggaagagagaaaaacaaaggagggagggcaggacggcacagcaaacaggacacaacccaaaaaaaagagccccagacaaacccacagccaacaaacgaagagcaaaagcggaagcccccccaggaccagaacaacacaagagcccccacacccacaacaagacagaagcagccagagcaacaggcaagaaaaagaaagaaaggcaccaaaaagaagagaagagcaaacaccccgcaaagaaggcaaccggaaaaccccaagccgcccaaagcccagagcgaaagcaaccagcaaagcgggaacaaaacaagacaaaaaggacaaaacaccagacaacacacaagcgagagccaaacaaaaagcaacccacacaaaccgccaaaagaaaaaaacaggaaacagacaacagggagggaaagaccacaaaagaaacaaaacaacgaaagaaacgagacaagaaaacaaagaaagacaccagccaggaaggaagaacaaacaaaaaggccaacacccaaaacaaacagacaaacacccacaaacaccaagacaacacagaaagaaaaaaaaaaaacaagaaaccagaaaagagcccaagagccaaggcaaccaagcaaaaagaacaaagcggaggcacagcaccaaccaaacaacacagggcaggaaccaaaacagcagggcgaacaaaaacgacacaagaccaagaaaaggagagaacccagaaaaaagcgacaccacaaccacgaccacaaagcaacaaaacaagcaaggggaaaggaccccgaaaaggggggaaacggcagccaagcagaagagaaacggaccccccaccacaacgaaacaagcgagggaaaaagacaaaaaaaacccaaaacggaaaacacaaaagaaagcacacacaaaccaccacgacaaggccagcaaagacagaggaagcccaaaagcaagcaacaaaaaaaacgggcccaaaaacaaagagcacgcacagcaaggaaacaaacagagaaacagacaaccacacaagggagaaaaagcaaacagcacgacaaaggcaaacacaaaaaggaacaaacaaccaacaagcaaaaacaaacaacccaaaaaaagggcagaggggccgggagcggggcacgcccaacccagcacggggacgccaagaccggcggacacgaggcaggagacaagaccaccggcaacacgggaaaccccgccacgaaaaacaaaaaaagccgggcggggggggaccgagcccagcaccggggggcgaggcaggagaacggcggaacccaggaggcggagcgcaggagcccagacgcgccacgcaccaagccggggacagagcgagaccgccaaaaggcagaggacagaacagacacccaaaagaagacaacagcagccaacaagcaagaaaaaaaaaaaagccaaacacaaaagagaaagcaaacaaagccacaagagaacacccaaccagcagaaggcgaaaagcagaaaaaacaaaggggagggcagagaaaagagaagccacaccgggggaagaaaaagcagccacgaaaaagcagcgagaccagagaacaaaacacaacaccaaaacccagcaaccaaacggacagaccgaaaggaaaaaaacaccaagaagacacagcagcaagcgcacagcgcacacagagcaaagacagggacaaacacagcccgagggaacggaaaagaaaggaacacgacacgggaaacacgaagccaaaaaaaaaacaaaacaaccgcagcaacggagcagcagaggccaacaaggaaaggcaggaacagaaaaccaaaacgcagccacaaagggaacaaaggaaacacaggacacaaagaggggaacaaagacaccaggaccacaaaggagagggagaagagggaagaaggagacacccacagaaccgcacaccggggaaaacagacaccaaaccccagggcagcaaaccacaaacaaacgccagacccagaacgaaaaaaaaggaaaaagaaaaaagaaaacgggacaggaggagggacaaaaaaaaaaaaagaacaccaagaccagcaaccccaccgggaacgccaaaagaaaggaaacagaacgaagagacacgcacgcaaaggagcacacacaaagccaagaggaaccaaccaagccacgaaggagaagaaaagaaaaaggcagaacacgacggaaaacagccaaaaaaagaaaccgccacaacagcagaagaacggaggacaacaaagaaaaaagccaggacagaaagacaacaaccacaaaaggaagcaaaaaaaaaccaggagaaaagaagaggaccagaggcggggaggaaagcaggggggacccagaaggagcacgaaaacacagagagaagaaaaagcggaggagcacaaaaaggaaagacaacaaggaacaaaaaacggaagagggaagaaacgcaaacaaagaaagaaaacgcgaggggaggaaccccaaacccgaaaacgcacagagccaacaaaacggacccaaaacaacaaaacaagacccaaaaaaaaaaaaaaaaaagaaaaccgggccaacccagccagcaccaagaaccccagcaagccccccccgcaggccagccgggaaggggacggaaggagggggcaggaagagacgggggcaggcagggacggcagaagccaacaaaaggaaacagcgagcacagaccaggaccaccggaagggcacacacgaaaagcgggcgaaaaaaaggaagcccccggccgcaagaacacaaaggagacccagcagcccgcaacaccacagcccacccccgcccccagagccccagaaagagccccagaaagaccccaaaacaagcccaccacccggccgcacccggcgcagaggagggccaccaaggccccccccccccaccagccgccaccacagcaccccacccccaacgccacaccccacaaccccagagccaaccggcagccacagcccccgggagcagggagggggggggcagccagagggggaggcgaggaacccagaagagcggcccagcccagagggcagcagaaccggaccccgcgagcggccgcccacaggggacagggggggcccggcgcaccccagagccgggagaagggaccagggggcacaaagcggggaaagagcgggagagaagaacaccccagggaaacacccggggaacacaacccggacgagaaaggacccagcagagggcaggccccaagcagagaaaaggaggaccgcaaacagaaaccagggcccccagccgggagcccagagccaggcagccccagaccggcccgccgccccgcccagggcagagcagacgaaaaaaa

SEQ ID NO: 323 - RNA, 51800 nt, Homo sapiens
ccaagagcgccacgcaccagccggaagaagagccagaccgcaaaaaaaaaaaaaaaaaaaaaaaaaaaaggaagacaacaacaaggcaacgcagcaagaaagcaaaaagggaacacgaaaccggagaccacacaacagagacacacaacacaaaaagacagaaccaggagaaagaaagccaagagaagagcacacaaagcaccggaagcaaggagaaaaagaaaaacacaagcgccggaaaaagaaacacaggaaaaaaaaccagaagacaagaaacacaccacaaaagggagggaaaacagacagaaggaagagaaggcaggaacccgcaaaacccacgaaaggaaacaacacagaagggggggcaggggcaaagaacaacaggaacaaagacaacacgaaaaacaccagggaaaaaaaaaagaaccaaagcacaacacgagagaagcagggagggaagcaacgaaacgaagggagaacgggaaaagagcaggcgagcggaaaggcagaaccagggaagaagggagacaaagaggaggggggggggaaggcaaaaaagaaaccgggaggggagaagaaagacagaaacgcagaacagacagaagacaagccgggggagggagcaccggggagccagccacccaaaaagggccggaggcagaccccccagaacaagaaaacacaggcaagaggcaaaaccaccccagaaagaaagagaggccgagaaaggcgaccgcgcggaacagggagcacgagggcgaaaacggaaccagaaagcaagaaagggaaacaaaaaagggagcaacaaaagggagccagcaaaggggaccaacccaagcggacaacgagcaaaaagaaaaacaaaggccgagaggggccagccgaacccagcacgggaggcgagggggcagacacaaggcaggagcgagaccagccggccaaaggggaaaccccgccacaaaaaaacaaaaaagcgggaggggaagcgccgaacccagcacaggaggcgaggcaggaaaacacgaaaccagaaggggagggaaggagccaagaggccaggcacgagccgggggaaaaaagaaacccccaaaaaaaaaaagcaaaaagaaaaagaagaaacccaggaaaaaggaacaaacaacaaaaagggaagaagggagagaggaagagaggcaaagaggagagaaggagagaggggagagaagaaagaggaaagggagagagagagagaggaaaggggagggagagagacacaagaacaaaagaacaccaccaaaaagggagagaggggaaacagaaacaacagacagccaaagcaaacgaaagagcaagaacaagaggaagaaaagggagaggagagaaagcagggcaaaggccaacaagcacaggcaagggagaaaaagaaacaaggaagaaaagaacaagaggacagggacaaaaaaaaagaagaagaggagcagaggaaagccgggaaccgaggaggacacagaagagaggggccagggaggaaacacagcaaacccaaaggagaaacaccaaaaacacggcgccagaaaggcaaaggaaagacaaggaacgacaggaaaagagacaaagaaacagacaacaaagaaccaggccgacggccggacggaaagggaaaaaagaagaggacaacgagaaaggaaaaaaaacaaaaacagcacaaaggccgaagaaacgacaggagaagagaagccaggcgggcacagggccacgccgaacccagcacggaggccgagggggggacagaggcaagagcaagaccagccgaccaacagggaaaccccaccacaaaaaacaaaaaacgggcgggggcacacaccgaacccagcaccaggaggcgaggcaggagaagcgaaccgggagacgagggcaagagccaagacacagcacgacccagccagggacagaggaaacgccaaaaaaaaaaaaaaaaagaaaaagaagccagcaggcaaaaagaaaaaaagaggaaaagaaaggaaaaggcacccccaaagacaaaaaaaaaaagagacagacagggcaaacagaaaaacaagaaaagggaaaagaaaaaagaaacgggaaaggaaagaaaagagaaaaaaagaaggaaaagcaagaagcaaacaagaaaaagaaaaaaacgacgcccacccaaaagagaaaagaagaaaggccaagagacccgggagccggaaaacaaagaacccaccagccagaggaacacacgccagaaacacgcccggacaggagacgacacaaaagaaggagaggagaagaaaagcagaagccgcacaagcagaagaaacaggacaaaccaacggagcaacaagggcaagcaagggggaaaccaggcaacaacccacagacaagggcagaaagaccagaaacaagaccagaacgacccagggagaaacacagcaaacaagacgcaaccaggacggaaggagaccagcaacaaaaccaacaacaaaaacacaaaccacgcacagcacccaaaaggagacagaccaagcgcccaggacacaaaggaaacaaaaagaaagcagaagagacaagaccaagaaaaggaaagaaaaccgcaaagaagacaaaaaacagagccaacccaccgaacagccggaagaagcaaccaaaagcacagcaaccaagaaaagagacaaagaccaaaggcaacccgcaaaaagagcagcagaaagagaaaccagaaacggggcgagcaccggggaccaagcaccggccccggaaaaacagcacacaaggaaaaaagaaagcacacggagcaacagcaaaaaggaaacaagcagccgaggagagaagagcaaaaaaccggccaggggggggggggagcgagacagggccacccagcacccaaggaggcagggcgcaacacggccacgcagccgaccccggcccaaggacgccacccagcccccaagagcgggagacagagcagccaacggccggcaaagagacagggccacgcccagcggccaaacgcggggcaaggaccacccaccggacccaaagccaggaacaggggagccaaagcccagcccaggccagggggaaaagaaagccacaagaagggcaagcaaaacaggagggcagaaaccaagacagagaaggaccagaacggagagagcaagagacgagggggaggcagacagcgccccagggagaaggagaagaggagacggaaggccaagagcaggagaagcggaggggaagcgccagcaaagggaggagaaaaaagaaaagcagagaaccaacaagagcggcacaaggagggaacgcaggggcacagggagccaaaggagaccagaaaggaaagcaaaagcagcacagcaagaacgaaccagaaaccaaaacacccaacaaaagaacaagcaggaacaggcacaaggcagggacaagaacaggccagcgggcgcacccaacgcaacaaggacccaagcacccccccccccccgaccccagacaggccccggggagccccgcccgccaaggccagcaacccaccagaggagaacagcggaagcgccggaaggccagagaaggccagccaccagcccacaaaggacacgaaccaccaggcgcaagaccagggaaggccacacaaccagcacagaggaaagggggccaaggcggaaaggccacaaaaacaagggcaggcaaaaaagaaaaccgggaaacccagaagggacgcgggcaaaggacagcagaccgaggaagccacacgcccacaagggaacagacagccacaacaggaaaaggccacccacacccccagcaccggccgccaagacgccacaacggggagaggaccaggggacgcaccgaggccaggagagagcacaggcgggcgcaaaacgccgaaaaggccgccaccgccacgagggggggacgaaagaagcgagacggaaagcccagcagagggagagcaacaaccccacgagggccgcaccgaggagcgcggcagaagccagaaagacaggaggcggccagcgggcagcagaagccgcccagccagccgaaggaaccaggcagggagaaggcaacagaagcaaccacgaaaagaaagggaaggaagggaccagcagccacaagacagccagcccagcaccaacaaaagggaaccccccacgccggcaaagacagagggagagggggacgaggccgcgccaggcaaccgggaccagagcaggcgcccaaacacccaacaagaagggaccacaaggccaagagaaagcggaagaaaaaagcaagcgaccaacagcgggacggaaagccccagaccacgagaagccgcaagcagaccccaaaccgacgaacagcaagcaaggggagaaacgggaaagccagcaagaaagcagcacagaaacagcaacgaaagacaaaagaaccagcaccaggagcaacaacaaaagaagcggaaaacacgaccgagggcaacaggcgccaccaggggacaaaacgcagcggaaaaccaaccccacgaaaagacccaaacacaggcagccaggcaaaagccaagaaaccaagccaacaacaagggaacgaacgcgagcagacaaccacaaaggcaaagcagagggcacacacagcggcgagcaggagaaaagaaagaggaagggcaaaaaggaacacgagggccgggagaaaccacaagcaacagcggagagaaggagggaggggaaaaagcacacaggaagaaaagaaccaccggaggaggacagggaagaagaaaagaaaagaaggagcagaaaagacaaggcggggggggacccccaacaaccaagggagaaacaagaaaagaggggcaagaaccaagaggagaaagacagccagacccaggaagcaacaaaaaggccggaaaaccccaagccccagacccccgcccccgagccaccgcagcgccccgacaagacaccggcaggggaagaacagcaaacagcaccgcagagaggaaccaaaaacggaggacaggaaacgagccaggcaacaaaagacgcaaagaaacgacgcaaaagaaaaaaacaagacagcacaccaagcaccgaagaccaaagacgcaccacccccgccgacgagcaagggagacagcacggcagcgaacaagagggaagacccagaaaaaaacgcccacgagcaggaaccccacaaaaggaaggcgagaacaaggcaagcagacaggacgaccacaccaagcacaacagagagaggcaaaagccagcgacgggaaaccacgaacagcagaggagggaaagcaaagaggagggggaggaaaaggccaagaaaaaacaaagcacaaagagaaagaaaaagaggggacaaacccaaccaacaaggccaagcaaaaaggaagccaaaccgaacagagcagccacacccccccccacccacccaaaccagggagaagaacaagcacaaaggcaggaggaggacgaaaaaaaggaaaaggaaagggccaaaggagaggcaggaagaaacaaaaacaaagagggagagacagaggaaaaagcgacgggcaagcaagaggaacgaaaggaaagagcaggaaaggagggaggaaccacaggcaaccaagagaagccaaacccaaaggcaacagaagcaacaagaccaagacaacaaggagagaaaaaaaagcaccaaaggagcaaaaaaggaggaccccaacccaagaagggaagaaaaaaacggagaccagccagggcaaagaacccaaggcaagaaccgccccccaacaaggagccaacagcagaagaggagaggaaacacagcgcaaagcagcagacgagcacaaaaaaaaacaaagagccaaaaccacagggccggcccaagacaaagaaagagcccacgccacccccaggccaaacgcaagccgcaacgcaacccacccgcccggccagccccaacgcacgccggagggcacccagaacgaacacccggaggacagcaaccgaggcaaagagaggcgaaccgcgccagacccaaagcagccaaaagacagaaggagcagcccagccgaccagagaaaaaaaacccaaagaccaagcacggacagaacaggaagccaccgaaacaaccagaaaaccagaaccaaaacagcgggacaggagcaagccgaacccacacagacaccagcagcagccacgcgagcaacggagcagacagaaagccagccagcaacaaaaacagaaagaaaagggcagacagaggaaaaccagcagaccccgcggagacaggccagagcagcacccagaaggcccaccagacaaagaacagagaaacacaccccaaaacccagcccaaggaacaaaagacaacgcgccgcagccacacggcaccaaagaaaacccacagacaaaggagagagcccagcaggcgacaggaacaagcagacccacgcgggaacggcgcgagagccagacggggagacacccccccgaaaacaaggaggagccaaacaccggagccggccaccacgcacacaaagcagccggacccgacaaacccaggaagccaagagaccaagagaaaaccaagggaggagaagaaaacagagggacaaacaggcaggcaaagaaccagagaaggcaaggaagcaaacaggaaagaagagaagccccgccccagagacaccaccagcccggaggaggcgccccaccaaaggaggaaaagccagacgaacacacgacgaaaggaaaaacagagggcgagggacccaagaggcagaagcaagcggcaccacagcaaagaaaagaaaaacacacaaaccacaccagggaccacgaaaccagcacaggacgggaaaaaaagaaggaggggaaaagcgcagggaaagaaaacgcagggggggacagaacacacccagcaaaggagacacagcacccgcgaacaacccaaacccccaccaccagcaccacaagccgccacaacagcaccaggccggagaacccacagcaaacccaaagagccaccccgggcgcaaaacgagcgaaccgagagccaagagcaccgccggccaccagcaccaggcgggaggagagacaagacccaaacacaaagcccaaaggaaacaggacacacagcaacgaacccgaaagcccccaggcagaaagcgacacccagaagacaagcaccaagaccaaggaagcaaggggaggaagaggccggaccgagcagggcgccaaaccgcaccgcaaaacagcgaggaccaaggccagacaagccgaggcaggggaaaacgagcaccccacacagcagagagaaaaaacagggagaacgcgggggacacgaagggaggggccaggaagggaccccccgacccccccccagcaccaaccgccacgcaaaaacaggaaaaaccccccagaggccgggaggcagcacagccaggaagaaaaacacagccagggaagaaaaaccgcagcaagaaaaacccccacacgccacacagccccgcgcgcaacaggcaagaccagcaaccccacggcagaggacacaaaccaaaaaaagaaaaacagaacacagccacaaacgcagagccaccaaaacacagaacacacccaagagaccacggagagagagaaaaaggagagccaaaacaggagcccccagaaccacagacccacaggagaccgcagcagaccaccaagaaagacaagagacccaagagaggacagaaaaagcaaacccaaacaaaagaggagaacaccgaccaaaaaacacaggcgcacaagaacaccgggaacgccggccaaaagccagaggcccccacgaccccacccccgagcaagcagaccagaagaaccccggggcgggagacaacaaaggcaaaaacacaaacaccagaggcagcaccagcccgagacaggcccaggaggcagaagccacgaaacaaggaaaaaaggcaaaaggaaggacagggaggcaaggcacaggggagacaaaggcaagcggagggaggcccagccccacgggaacagggggaacagacaaaggccagggaaagggcaggaacccccaccgccgagccaaggggaccagaacagagggagcagaagaaagcacagcacccacacaaggaacaggaagaacgaagggaaaggcaggaaaaagcagcaccggggggaaaaagcgagaaacaaccgcccaagaaaagaaggcaaaggggaagccggaacaaagagaagacaccaggccacccagcgaagaccagaccccaaaccgaaaagccacccagagcaaccgcacccggcaggcaaaaagggagaaggcgcaggaaagaggaagaaaagggaagaaaaaacaggaaacaacccccgaaaggaacagaaaaaccaggaaagcagagcgacacagagcaacccccaaggagacagaacacaacaagagcagcagagcaggcaagagaggaggcagcaaacacccaggggcacaacgggaaggaggaaggaagcaagaccaggaaagcaaagcaagaaaagaagaaacacaaaaaaacaacacaggaggcccaaagagcagaagggaggggaggggagaagacagaaagcgcacagccacagccaggccacccagaaggaacccaagcggcagcggcccgaaagaaaacgcaaaccccaacagaagggcacccacgccaacaagcaaggagaagaaccggccagaggggcagaggacgcgcccgacgcccaccaggaagaccacggccaccagagcccaggcagcacgcccacacgcacaggaaaacaggaccaagccaagccccagaacaggcacagaagaagaaagcagaaaggcaaaaaaaaaaggaacaagagcaaccacaggacccaggccccccaccacgggcccagagccgacaaccacccccagacccagccacacaacccaagggacaaccccaggaagaaaacaagcaacccgcacaaggcacaaggggggacaggcaacgacggggagcccagaagcagaaaacaaggggggcggaggggcagaagagacagcaaacagagacaaaaaagaagaccacccaccaggaggcacaaccaaccaaggagcccaagaaaacaaaaaaagggaggaagggagaaagccgccccgagccacaccccgccggacagaagcgcggccaggcccagacgaacaaaaaaccacggcccgaccaggcagacagcagaggggacccagcccaagggaccaaccaaaaaaccaggcgccacagaacccaagccccaacgacccaggcgagccagaaagaccagaagcgaggaaggcgaggagggcccccaaggaagaaccccagacacaccaaaaagaagaaacacccccagcccccaaagagaccagggggggggggagaggagccaccgcgccaggcggaggcagggggaccggccaggcaacccgccccgagcaagcaccccgcccagcccccaagagcgggacacagggggccaccacaccagcaagaagagagagaggaagaccaggaaccagaaaaggcaccagagaaaggaaaaaacagacaagggacacagaacacgggagcaaggccgccacaccacagaaacaccccaagagacagcggccgcccgggccggcaaaggaagcagaacacagcccccaggacccaaaagacaggggaagggaaacccccaggggcagaaccaggcagacaccggggacgcaggagaagaagaaaggccaaggagaacaacaacagggccgaacagaggggggaggacagggacagaagaaacagaggaaaagggacaaagaaaggagagaaacaagaacgaaggcaaaaaaaaaaaaaggcccaacaaagccaccaaaggggacccagcggggaggaaaaaacaagcaggagacgcgggaacagcagcccagccagccacccagcgcccaagggcgcagaaaaagggccccggggcagggaggagaagcagggcagcaacacagcccaccaccaaggcaaaccaggcacggccacgcgagagcccaaaaccagcaacagagagacacgaccccgcaggcaccacccggggagacagccagcaccgggcagggacagaggacagcccacgggaagggacaaggaccacacggaagaagccccacagcaagccgccaaaacaccacaggaccacagaagcacccgcaagaccacacagcagcccaccaaaaccaccacagcaaagaaggcagcaagggcccagccaggaacacaaccaccaacccacaccgaacagcagcccgacaggaagaaaaagacaaaccagacagcaccagcaggggcaaaccgcaggcggggcacagccagaaggcgaagccaaacagcaccaaaaggacgcccaagccaggacacaggccaggaaaaggggggaaagggagggcacacaccaacccccaggacacacagaaaaggcccgcccagaccagccgcggccaagaggcagccaggggaggaaaaccaccagagacaaacaagaccagaacggaagaagacgccacaggccacgggcccagccgggcaacaggccaaggagggagaaggggcgcaggcgacgacacaaggggaaaggacacgccaacaaggaggaagaaaagagcgaaaacaagagacccagaggccagaaccagccggaaaagcaaggaaaacacagcaacaaccaggcagaacacaagccagagcaaggaaaagggggcaccgccaggaaaaaaccaaaccaggagggcgcgaaggcaaagggcaacagaaaggagagaagaaagagacaaaccaccacaagggaccagaagaaacaagaacagaaagagaccaagaaaagcgggcagaacaacacaggaaaacaagccccacccagagaacaaaaggagacaaccaggaaagaaaaaaaacagaaagaagaaaacaggagagaaacaccaagagcgccccagggaagggagggaacagcaaggacagaggggaaagaccgcgcaaagaaagagagaaaaagagggggggccagaagcaaggggggacggagggaacaagacggcaagggagccagaagcggaaaacaccgaagcggaggggcagaaagaaggcaaaagaaacgcagacgaaacgccccaccaagggcaggcaacagccaacagagggccgaaagaacagaggaagagagaaccaccgagagcgggacaccaccccgccaagacaggagcgacccaacagggacgaacgaaaagcacggcccggccagcacagacagcggcggaacacgcccaaacacagagcaacccaaaaacccgacaacaaaacaggccagaaccgcaaacaaagggaggaacagggcgaaacaaaggcggagaaccgcggcccacaccacagcgacccaagcagcaaaaaggggcaaaaggcggggaggaaaagagcaacacaaggagagccggagaggccggcacaaacgccaaacacagcaaacacacaacaacacagcaagaaccaagaaccccgaggcccagaggcaacacaggcaccacagggaggaaaggcggaccgaaaacgagcaaggcgcagcagaaccccaagcagaagggcaacccgaaaaaaacagcagaaccaaaacgcaagaaaaaaaaaaaaaaagaaaaaaacacgagaagagaaagcagaaaacccccaaagccagaaacccaacgacgcacaagagggccggcaacaaaacaagaaaaaagaaagaaaagaggaagaaaaaaaaacggaaggagccggccccccccccgacccaaggcaaagcacgagcagaaccaccccccggagaagacgggggccgccgggagaggggggaggagagcagggagaggggaaaggcaggggggggcgggagagaagagccaccgagggggaaagagggcacgagaagagaggcacgcagagcaggagaggggcacaaaggaaagggaagcgaagagagcggggagagaccccacagaggaaaaaaccccacgaaaaaaggaaagaaccaaaaaaggcaggcggacgcaaccgcagcaccagaaaagaaaggccaaccaaggcaaaggacagaaaaccgaacgaaaaccaaaggaagcacagaccccagcccaaaaacagagcaggaaaaggcaccaccggaagcccaccacaggccagagcgccgccccaccagcccccagcacccccaaagcagccgcccagcagagcccacaagacacaaacgagcaacaccgccgcaccacggccccccagcagcaccagcagccaaagaccggccccacagccccccccaaaaaaacccaccccacgggagcccagaacacacagcagacccccaaacaagccgcgcggcacacccaagcccacaaaggcgcgcgaaacggccgcccacccccgccacagaacacgaggaccccgaaaaccccggcgccaccggcgcccacccgccaaagagaggaaagcccaggcccgccaggaaaccgaagcgcagcaaagcccagcaggcgcagcaaaggacggaacgccgcagcagacaccagggggagggagaaaagaagaaggccacaccggggcaggggcgcaaggacaccggagcacaagaccaacccaggaacccaaagaagcaaaagagcccacaggaacaaccggaccacgaaaacagcccaagcgaagcagagacacgaacaccaaccaaagaagaccaaagcagaagccaaacccacgggagaccccggacacgagccacagaagccacaaaaaacacacgggaacaggggccgacaggagacagacaaaaggaacgaaccaacgcgaagacaaaaagggcagagaaaggaaagcaccgcccaggaagaaacccaaaccgcggaagaagacaccccccgcgagcgggcacgagcacagcggaggaaagccccaggaagggccccagaccgggcgggcacacaggcccccccacccgaaccaaggagcgcgaccacccaaaccaccacccacccaagagaaaacagaagccagagaaaacagaaaccgccacaaaacgaaaaaagaagccaacaacaagaaaaccaaccagcgacgaaagaagcaaacagccacaccaacaagggagcagggccggagggcagcagccaggaggcaagggcccagggccaccccgacagcagcgcgacaggcacacaccccagcagcaaccagggaagaaaaagcccagaaacaaccaagccccaagcaaaccccaaccacgaccagaacagacgacgcccaccccaaacaaccccggcaagaggaaaccagagcccagaaaaccaagcacaagcccaagaggcgaaaacgaaaaggaggaggacacccccaaaccacccccccaacagcaccacgcccccgcacagggcagagcagaaaagggaggaaaggaagcggcccgcggcccgccacaaccagccagaaaaacgaagaaccggacccgccgcgcaaaaggagggaagaagcaaggccaacacacggcccacccacgacccaggaaggaacaaaaggcccaaccaggaggcccagccgcccagagagggcggacccgggaaagcagcaagacagcggagacaagagggagagcaccgcaaagcccagcaggcagcaggcagaagcgcagcccaaaccagcagcagccaaggcagcaaacaaggcaacccaggaagcgccggcccgccaccgcccagggaaacgcaggccgccacccaggggaggcaggagagacaccaaagccagcacagcaggagagccggaccccaggaaccacggaagaaacagccagacccaggcagaaaccagcggaaccgagcgccaaagcccagggacccaaagagacaaacaaaagagccaagaacaccaccaaaaaacaccccgaacagaaaaagacggaagaaagaaaaacaacgaaaaaacgaagaaaggcagcaaacaaacccagcgaaccaaaacgagaaacacaagccacaaagccacccagccagccggcaggggccacgccgcaacccagcacgggaggcgaggcggggacaccgagacgggaggagagcagccgaccaacaggagaaacccggccacaaaaaacaaaaagcggacgggggcacagccgaaccagcaccgggaggcgaggcaggagaacacgaaccgggaggcggagggcaggagcgagacgcgccagcacccagccgggcaacaagagcaaaacgcacaaaaaaaaaaaaaaaaagagaaacaacgaaggggggaagaaaacaaacccccccagccaaaggccggccaccagcacggcccaagcaggggaccagaaagaagccacaggaagccgggacaaaaacgagacaacggggagagacgagggcaagcgacgccagacccggacacaggccaggaaccacaccccccccacccgaggagggaggccacaaacgaagccaacagaaaagagcacagaggcaggaggacggagaaccggcgaccgggcgaacaggaccagcgccgcccggggcaagacccaacacgcgagcacgcccacaaaaagaggagagaaccacggggaggagaagaaaaaagagaaagcacgaaaagccaaacagaccccacaaagcgcaaaacgagcccccccccgcagcgcgccggaggcaaacgcagggagccaggagaccacgaaacaccaagaagagccagagaaagacagcacggccagggcagcacagaaggcccaccggagagaacagggccccagacaacagacaccaggaaggagaaacaaagcagcacaggagaggaaaagaaaaggagacaacccggcccccgaaaagccagaccgagacacccggcaccccaaaaccccgggcccagaagggcggggcagcgagaggccccaggcggaaggaaccaccggccaggccaccaaccccaacacagcgggcaggcaaggagggaggcgcaacacaccagagaggacacagaagcccgaaaaggaaagggaacgagaggggcaaacggaacgaggacagggggaccaagcgagaagccagaaggccccaccaggaacaagaggaggaggacaaggacacaaaacagcagcagcagccccacccaaaacaaaagcgccagacgaaccccaggcagagagcaagaaaagagaaaaccgaacgcaaaggaagccacagccagaaagaacaagggaggcccagaagcccaccccaaccacccaaccagaacaccaaggaccggccagaccagaacagccaccgggaccagagaggccccgcggggcagggccaagccgaacccaccacgagaagcgagggggaggagcgaagccaggagcaagaccagccgggcaacaagcaagaccccaccacaaaagaaaaaaagagagagagaggagagaggccccacaggaacagccaagccaacaacaagagagaaagggagaaacagcaggaaggagggagaccagaagaccccaagacgcaggggcgcagcagggaaaccacccagggcccacgggcacccacaggcggcaccagcgcccaggaaccagaacaccaggcggaagaagaccacaggaccagagaaaaaagggaagggggaagcaaggaacaaaaaaaagcaaagaaacccccaaaacccaaaacacggagcacccaaagggacaaaaaccaaaaaggagaagggagaagggccaagccaggaaaaggaagcagcaaacaacacacagaaaaagcaaagacacagccaggagaaaaacacacaaaagaacagagaaaggaggcagaaaccagacccgagcaacaccccaggcaaaggaaacccgacagaccaaaggaaagaagaaggacaagcagcccaccgagcccaccgagaagggaaaacgagccacaacaaaccacaccccacaacaaaacaaaagcccgacccagcagcccagaaacaacccccaggaaggaaagcgagacaacaaaacccagaacccacaacggggagcccagaaacgccaaaggaggcaccaacaacgacccgcacagaacacaacaaaaaaacaagaacaaggaaaaacgaaacagagaaaaagacaaacaagaagggaaaagcaggcagcgagagagcagacccaacaaccacacaaggaccgggacagggagagggaggagcggcagcgagggcacaacgagcgcagggaaagagaagccagcaccccccccacagccaaaaccacaagaaaaaaaaaaacaggaacgaagaagggacaggggagggcaggagaaggagacaggggccagagcaaggacacacaaaagagagccaaccagacaagcgcgacggccccagagacaagcagcggaaacacgaacacacggaaggaggcagacacagagagagaagccagagggcgcaaacacccagagaacacagcacccaaaacacagggcagcccccacaagaagaaaccagcccaaaagcaaggggaaggaaaaaccgcaggagaaacgagaggacagagacaagagcaagagaacagacgcggggaaaacaaggaaagggaacgaggcagagaagaggaaaggaggaggacaccaccaaaacggacacccccaccacgaggcagaacagccaagaagacagaagacagcaccaggccgggccggccgagagcagaagcagggaggggagaaaagcagagggacacgccccccacaggcaaccaggaaaacgcggggaagaggcaagaccacacgaagagaaggaagagagcaaggacggagggccaagcgcagacccagagcaaagcagggagcaaagggacgcccccaagagggcaaaccaacccggacccccagccagagcagcgcccgagaacagggccacaccagcggggggcacacaaaaacccgaccaaggccgagacaaaaacccagggaaaggagcccaagggaacccaagaaaaagggcccgaaggccgggcccaaagcacaagacaaccaacaaagagaaaccaacgccaggcgccagcagggagaaaacaaggaagcagaaacagacaagccccagccagcacagagccaggagaaaagaagaagcaaacacacgcaagacaagcgaaagcagccgaaggcagagggagacaggggcgcgagcagggggaacggggcagccccggaaaaggggccaggaaggccaacaagggggaacggcaaaaagacggaaacacgaagggccaaggagggaggcagggcagaccccgacaggacgagagaaggcaagccccccgaaacaacccaacgccaaccagggaggccaacaaaccagaccaggccaaaagcgggcacccaccgccccacgccacaagaagaaccacaaagcagcagaagagagcagaacggccaccacaacccacaaccccaggcaagccaccagcacccccccggcgcccagcagccccaacgacccgacccgccgccccagcacgaaaaagcagcagcaaacgccccacagcacgccccacagcacgaaaaagcagcagcaaacaaaagaagcagacacagcggcaaaacccaagaccccagcaccaagagaaaagccaaagcccccaaaacccacaaggcaacacaaccacccccgaacagcaggccccaccaccccgccccagcacacggacccaaccagacacccccccaggccgcagggcgcgccccccgccggaggcccccccccaggccacaggccccgccagaacacaagccgccagagccaccccagaagggcccgacaccaaccaaaaacaaccacccccgcacacaccccacgccacccgcagcgccaagcacaacacccaccccaaaacagacaagacagaccccccaagaagagccagaggcagagaagcgcgcacgaaagagcaccagagaggcggcaaacagacacagcaagaagaagaagaagaagaagaagaagaagagaagaagaaaaggagagaagaagagaagaaaagaagagagaagagagaagaagaagaagacagaagaaaaggagagaagaagagaagaaaagaagagagaagagagaagaagaagaagacagaagaaaaggagagaagaagagaagaaaagaagagagaagaagaagaaaagaagaagaaaaaaccaggcacaccagcagagaaaaaaaaaaaaaacacaagacaaaggaacacagagagcagcagcaaaaaaaacacaaaaagccgaacgaacgcgccacgcccaggcggaggaggggcgacacagcacgcagccgaccccgggcaagccaccccgccaacccgagagcgggacaaaagggcaccaccacacccagcaggagagaggggaggacggcacaaccaaacccgggccaagcaaccccaccggcccccaaagggggaacaggcgagccacgcccagccagacaaaaaagaacaaagagaagagccagaacagcaaagagcaagcaaccgacaaaagcaaccaagaacagaaaacgcacgaagagacaacaagaggcaaagagggaggggaaaaggcaaaggagaacaagcaaacaccggggcaaaacaaaaagagccgcaaccggcggaggccgagggcgccccacgggccgacaaaaaaccaggacaaagaaagcacacacccaagcggggggccccaggggggggcgcccaaaagcccggccaaaaacaccacccacaagacagccccaaggcggccaaaaaaagccagggcggcagaaagcaggaagccgaagccccccaccagcgaccagcgcccagcacgaagcagccggccccaaggcacggcaacccacgcaaaccggccaggcacgggggacgagacagggcccccaaaacgcaccccaccaaccccgaacgagccgggcgaacggagaagagagggcaacccagccccgaagaaaaaacccacgacaaacaacagagggcagaaaagggagcgcgacaacggacaagccaggaggccggccaccgccaagccggaggagaggcagcacccgccagccagccacgaaagagacaacacagggcaaaggcaaagcacaaaagagcaacaaaaagcaagccccaaaccaaacgccacaaaaccggcgccaccagggagaggggaaagccacacgggaccggcgaagccaggccaggaaaccggacaggccacgcacagacccagcagccccacgcacagggggcgcgcaggcaaggcgggagggggccgggcccacgcggcgcagagaaacaaaaacggccccccgccgccccaacggcgaggcaaaaagcggacgccaaagaaaacggacggccgcgggccacccgacccgagacgcacggggagggagaaggcaaggcagaaacccccgagagcaaaagacaaacacaagaacccccgaggccaaccagcacgcagggaccacgaccagcccgcaccagagccccgcagggcaccccccaggaagccagcagcccccggggcacgggcacccgggcggcaggccgaaagggagccagaccgccgccaaccccggagacagcgccaaccgaaaacaagccagcaaagcagaacagcacccgagccaacacacagaccccaacgagagcaccccagaccagagacacaaccccccccaccagcagacaacacgggagcggaacaccaccagcaaaagcacaccaggcaggcagccggggcaagcaaccggggaaggcacggcaaacaggcagaggggcacgagaacgaaaaggccagggacacacggaggacaacccggagacaaagggcaggagaacaggcgccgacccccggcgagagaaggcacccggggaggccaaaccccaaaagccgggacgcgggccagcaagcagccaaaccgccacagcagcaaacgagcagaaggggcgcgagcgagacgacccaagccagcaaggaccgaagccacgagaccgcaaagaacaaaccgccccaccaacgcgacagccgacagcgaacagacagggcacacacgcgcagcccgcacacgggcgcacagagagaacaaaacccagggggccggccccgaaagaaagcaccagcccagaaccgcccccaaagagggccggaaaccaccagaggcaggaccgcacagcagaggaaaagccaacaacacccacccaagccggagccagaaacggaccaaccagccgaagggcaaacccccccaaacgggccagaacaccaggcgaacgagggggacagccaccaaggaacaggaagcccaggggacacaggccgccaaaaaacgccacaaccccgcgacaaaggcgccccacaccacgaaggggaaaccagcccaagcccagcccccccaaagaaaagaagaggcggggcagggccacgccgaacccaacacgggaggcgcggcaggaggacgcgagccaggagcgaggccagccgggcaaaaaagcgagacgcacaaaaaaacaaaaaacaaccgggagggaggcgaggcgggaggacacgaacccaggaagcaaggcgcaagagcagacaccccgcgcacccaggcacaaaagaacagggacaaaaggaagggggccgagcggccccgcaaaaaaaacccagagaacagcaagggagcaagaacaacaggccaaaacagagagggcacgggaagcacccgcaaaaaacaaggaaccgggcagcccagaagcaacggcaagacgaaggagagaacagggcgaaaccccgacaagcagacagcccccccccaaaccacccaaagggaagggcggcgggcagaagagacggggggaaccccgccccggcacacagacaaagcaagggaaagagggcacccaccacagacccacgaaacaagaccgggaaaaaaaggagaacaggaacaggaacaagccccccaaaacaaaaaaaacaggggaaaaaagcgcagacaaccaaagaggcagcacgggacaccgcccaaagcagccaccccgcccggcgaagcacgacaaccggcccaggacgacgccgggcacagagagcaagaggggcaaaaaacgggccccgccccgcccgagggacccaaaccacaacaccaacgacgcgggcggaccggaaaaacagcaaggaaacaaaaacaaaacaaaacaaaacaaaacaaaaacccaccggagccgcaaaggagaacaagacaggcacacaggcaaagcaaacaaagaagagagcgagaagagcaaaaaacaaagagaacaaggaagcgaagacacgcaccaaacacggagccaacaaaagacccgagccagacgacgaccccgcagccccagccaaaaaccgacggaaagaaaagccagcagaacgcaagagcagaaaacagaacagcagaccacagaaaaacacaaaaaaaacaaacaaaaagacccagcaacaaaaaaacagaaaggaaaccaaaaccaggacccagcccacaagaacggccaagcacaagcaaagagcaggaaaaccaaagaggcaaacacccagagaaagaaagaaagaaagaacagacagaagcacacagcgcaggggaaagaaaacgcacacagggccaaagaaaacgcaaagccacaggagaacagcacgccaaccgacccacagcccaacaccaacaagccccaccacaaaacacaaagggcaaaagaacggggggagggcaccaagcacaagcacaaaaccccaacacgcaacaaaaggagaacggaacacacgcaaccaacaccaagacaacccaacggcgcaccccaaagcaacaaggaaaggagccgagcagggaaaaaagcccggaaacaagggcacggaaaaaacaagcaaaggggcgggaggagaacaagaggaagcaagccaggaaaacaaaggaaaaagggaacaggagagaacaaaaagaaaaaacaaaaaaaggaaaggacaggcgggaagaagaaaaggccaggacgaaaccccaaaacaaagaagccagccccaaggacaaggagacaggcaggaggagaaggaaacgagggcaaagggggggcccaaccgagacggggccagaccaaggaaggaagaggcccccccccccccccccgggaacggcaccaaagaaaggcaggaccaggcaagacgacaaagggcaagccagaaagacagcccaccagggaaccgaaagccagcaccgagaccccagccccagaacggagaaaagacggaagccacccaggcacgacgacagcagccgagcagacaacgcgaaggcaggccggaggccagggcccccagggggcaaccagggaagaagcccgcagagaaggaagcacaaaccaggggaaacgagcaaagacagcccacagggccgaagccggggcaaccgaacaggaacacaaaacaaagcaggagacaagagaaacaggacggagcaaggggccaaagaacagcacggagagcaagaaagaaaaggagcaaccagaagaaggggacccagaacagaagagcacaagcaccccacacccagggccgggaagagagacacagcagggcagggaccaagcagggccaacaccccaccgcccaagcaccccgcagacaacaaaaagaaagcccaggcagaaccacaaaaaaagacacacaggacagggaagaaaacaaagaaaacggcaggcacagaggagaaaaaagaagagaaaaggagaggcagaaggccaaaagcaggagaggagaaacaacgcaaagaagaaacaacgaaaaaggaaaccagaagaaggaagacagagcagcagagagacaggagaaagacaaggggcaacgaacacacaggaagaggaaggaagggcagcgccaggaaccgagacaaacacgaaaaggagacaccgaacagagcaggcaccaggaaaacgaccgaggaccgcccccaaaaaccaaaagaacgcgccagcaggaaggcaagcaccagccacgcccaggcggagcccaaccgccaccgcgagacccagcgaaaagcaagcaggccgggcaccgggccacgccgaacccagcacgggaggccgagggggcagacaccgaggcaggagccgagaccagccggccaacagggaaacccgccacaaaaaacaaaaaaagcgggcaggggggggccgaacccagcacgggaggcgaggcaggagaagcgaacccgggaggaagaagcaggagcgagacgcaccacgcccagccgggggacagggagacccgccaaaaaaaaaaaaaaaagaaccaggcggccaggacgccaggaaaggcgggggagagaaagaaacagacacgaacagccggagggacccagggccggggggcagaaccacccccaccccagcaggaagagcaaaaaaaccaggaccacacccagacggaccccggaagaggccaggggaccagaggcgccagagcaagaaaaaaccacgacaggaaaaaaaaaaaaagaacagccccaaaaaaagcaggaagagagaaaggaggggagagggccaaaaacgagccagggaaggcgagagaaggccagagcaaacacgaaggagggcggaagaaagaagagcacgaggaagacaccagacaagggaaccacaaagcagaggccagccagaggccggccagcccagcaacaggaaggaggccagagaccacgggaggagcagggggcaggaacaaagcgaagcacacgggaccgcccaggccaaggcaggaaaacgggcaccaagaggccacggacaggaaagggcaaaaaaggacagcggcgcgaaccagaagggaaagagaaagagggaggcaaagagacacgcaagagccaggcaaagggaccagaccagacaaaaggagcagaaaggggaagaggagagaccggagcgaaaggaagccacgggagcaggaggaggggggagaaacaaagggaggagcaagagcaccaaggagggcagcagcggaaagaggagagccacaaagcaggagggagaaagggagaagagacaacagaagaaggaacgaaacaaaaacaccaaaccacaaggaaagagacaagcaagaacaagccaagccaggccaccaagccagcaggcgcccaagccggagaagagaccagggaaaagggagcgagagaggagcagcaacgcgccaggggcaaaggcacagaagaaaaggcagcggccgaggggcggaccaggcgggagaagggcaggaccagaagaaaggaacaggaaggacgaacaacaaaggagggaaaacagagggaaagcacaaacgaaagcgcacaggaacaagggcaacgcagcaaacaaagacaggagagcaaccaagcagaggggaaacaagcacggcaaaagcaaaagcagcgcaaagaggggcgcagcccccggagaaggaggcacgccagggcgcggacagcaccagaggagcaagaggcggacagggacagagaaagaagcggaagaggaagggcaaaggccgccgggaagagccgcggcacgccacgcacaagaagcaaaagagaggagaaaccccccccccgccccagcccccacggccggggcagaacccaacgggagcgacaggagaaaagggaacagagccagcccagcacagaaaagagaaacagcagcggagcgacagacacagggacaaccacaaagcagaaaaaggcaaaaaaccgccaaagccagaagaaggaaaaaacaaagcgcgagaaaacaacaagacaaaggcaggaaggagggcgggagaggacaaacgagaaggagggacagcgcagccacaacgacaacgaagcaaaaagaaaaagacaaccgaacccaggaaaaggcaaacgcgaagagcgaaacaggggaaagagccaagccgacgagacagcggagagccccccccccgacagagggcaacgacggaaaaaccagccggccgggaaaggagcaccagacgccgccaacagggagccgaaagaagcggaaggagagggcacagagcggaacacgccagggaaaaaccacgggggggaggagacacgaaaagacccgagaagccacaagcccaaacacaaaccacaggcgggcacagaaacaaaccgaaacagaggaccccaaaacgcccgaaagacaacaagaagacgccaaagggacccacgacagagaccaggacagaaagaacaacacaaaaaaagagggcaccaggccgaccaacgcaagggacaaccagaaaggagccgcccaggaggaaacagagaaagagaaaaaaacacaagagaagaaaaaacacacaaacacaaaggcccagaggaaggaccggaacgggagaagagcaaggaacgaaagcaaaagagagagacccaaaaaaaaaaaggaagcaaccaaggacagcaagcccgagggaagggggcggcagaagaaggagaggagaagacacaaagggcagcagaggcgagagcaggaaaggcccgggaggcagagaacagccagaccccccgcagcaacaaggcaacaggaagccgggggacaaaaaaggagggacaaccacgacggggagaaggagagggcagaagggaggaggagaagaggagcgcagggccaaacaggcacccggcgcccaggggggacacacaagagagagaaaacaggcagacgggggaagagggaaagaacagaaagagacccaggaaacgacgcaagacggagagcacaaaggaggaaccgggccgcgagcaaggaggaggaaaaagagcggagaaaggacggacaagagaaaaagaaggaaaaagagccaaaaaggagcaggaagaacggccacaaccaacaaaaggcacacaaaaaagaaagcacccaaaaaaaggaccaacacaaaagggaacagaccgaccgggaagacagaaaccaaaaaacgaaacgagcaacaacaaagagggccacagccacaaacacgggaacacaccaaaaaagaagcccggcagaaagggaaaaaaccaggaacaaaaaacaaacaaggcaaaaaaggaaccgggcaagccaacacaaagcaagaacacggagaaaaagagccgagagagacggagaagacaagacagaaaaggcagagcaaaggaaccaggggaaaaaagaggaaacgaagaacaggacagagacagaaaccggagacaaaacaccaccagcaaaacccaccggcgcagcccccagagcagaaaacgccagcaaaagggaaggcaaagcgaaaaacccaaaaaagacaaaagacaaaacaggacccaacagcacgagaccagaaagacagagaaaaaccagaaacaacgccaaaacaaaacaaaacccaagacaaagaacccaggaacagaagaccaaaccaaaccaaagggaaaggcaaacaagaaacgcaccacgaaccgaccaagaaaagggccaacaaaacaaccggcaacaaggagcacagaaaacccagcgagagccgcagagaaaaaggggagagagggccgacaagcaaagccgaggagacacgcaaggcagagcgcagaccagggcaacacggagaaccaacgcccccaccaccaccaaacaccagagaccacaaggacacaacagcgcacggccacaggaagaaaaacacccaacccaggggaggaaggagacaaggcagagggagacggcccccagaagacaacaccggggacggaagagggggggggagcccaaaaccaaccacaggaagaggggacgaacgagcaaagcggcggaaaccaaaccaccggggaagaaccaaccaaaacaaagaaaagccccacccaaaaaagagaggaccgacgacaaacagcgagaagaacacacgagagcacccaaggaagaagagcggaaaagcagaaagaggcaaaagaaaagaacagacagcaagcagagcccggcaagccaggaagagagcaaaaacaaaaagagcaggccaaagagcaagcacggagagggaacaaacagaagaaaagaaccaagcgggggaggcaggaagaaacaaaaaaagcccagccaaagccaaaacaagcggagacagccccaaacaagccccaggaagccagaaacagagacccccggggccgaggcagaggaggacaggagagcaggcaagaagaggcgaggcgcgaaccaccaagggggcagggggggcaccaggcggccggaaagaggaaaaacagggaacagacacgaaggagcaacacaaagagagaggagcccccaaaacgacacaccccacgaaagcccaagccaggacaaaaccacagccagcaaagcaaaagacgaagacgccgccagcaaggagggggccacgcaagaaaagacacaacaacagggcccaacaggccaagccagaaaccccaacaccagggccaaaaagcacacgaaggaggggaggggggccgagacgcacaacaagccccagggagcgacgcggcaaggcaaacggaaagcaagagcaaaaagaccaaaagaggagcgccccacaaacaagaaaccgaaaggcacacgacagaagacaacaagcagccgggaggcagacagggagagcaaaagccccaaaggccaaacagccaacaagcgaaaaaagaggaacacagccgccccgagagccaggcaccgcacaaaagggagcggacagagaccaacacccacaaagcccaaaagacccaccggcccagaaaaaggcgacccccagcagacacaagcccgacgggcacccccccaaaccaggaggaccgaacaaggaagagagggaggagggagccagcgcaacggacccccaccacaccgccaccgggagaccaccgcagccaggcaaccacgggcagccccaaaggcacagccacgggccagaaaagccagggggaggacaagagacagaaggccaaacaaaaaaggcgagacgcgggcaggaacaggggacgaaacagagggggcccaggccaagcaaagcaggacaaaagcaggggggggcagggcagccggggagaaaagcaagggcagaggagcagaacgagaaacgggcagaagccaaagcgagacgacagaaaaccacagaccaggggcacaaccacagaaaaaacaagcggaggcagaagcagacaagagcggaaaacaccagcaaggccccgcgacgagaggccgccccggagagcagagagaaagagaggccacccccaaaggacaccagccacaaaagggccccaccaaaccaggaaccacaaaccccaaaaagccggcccaacacagcacaggggagggcaaacacgaacggggggggggacaaacagcaaacagcgcggagggaaaaagagcaaggagacaagggaccacacagaagaagagacgagaaacaagcccgacagaaaagggccaagaaggaaaggaaggaaggggacaagacagagacgaaaaaaaaaacagaggcggaacaaagaacaaacaaagaggaggcgacagcggaaagccaggagagggaaggagcacaaaacagaaaaagaagacggggaaacaagaaagcgggcaaagaggggggacaagcgagggaggaccagggaggaggacaaaaccccgaagaaaacaccaacacaccacaggaagagaaagaacaaaagcagcaccccccgagacccagaaacagaagaagaagcaggccaaccaccccacccacaacaggaagccaacccacgagagggggagaaacaccagacagacacaaggaaccaaagaaaagagggagacacacacagcacaagcaaaaaaaagaaaaaagcgggcacagggagcaagcaagaaaagagaaaaacagagccccaacaaagggaggggacccaaaggggacagccagccggcccgagccgggaacccgacagccccccccggcccaggcaaagagaggcacacccggccagagcaaggagcccacaccgagggggaagcaaggcaagcccggaaaggggagggcaaccccagcaggcagggacagggccaggaaaccagcagccgccagagccccccaacaggaaaacccaaggccgcggaggggcgacgacagccaacgcccgcgaaggggcaagaagggcggcaggaaaccgggagggggcccgagcacaaccggagcagggcagcaggccggccaggggccaggagacagcaggacgcacggggcccagaagaagagagacagcgacggaagagacaaacaacaaaggggaaagacacagggagaaagaggccgcaggcaggggaacggcaggaaaaaacggcagaaccgacaggaaaaggccggccagaaaaaaaggccacgaggggcacaagccaaggaaagggggaagggaagaaccaggagcgcaagaaaaaccccagggagccaccgaggagaggaaacagcccggaggccgcacaccgagacggggcggcccaggggggaacccaacaggggcacaaagcacaaggagggccgccgggccggcaaaccacggcggcaccaccccccccgagcccccagcaggaagacgccacccaggcgacagccaaaaaacccaaggcccgaggaagggccggaagaggaaccccccaagcgcggggcaggaggacaggaagcaacagagcaaaaaaccccccccaacaggcccgaggagggcaagcgccagcgagcacagcccggaggaggggaaccaagacccaacacgagcacgcaaccccgcgaagcccacaaaggaacccacagaacaaggaggcagaacagcaagggaacccagaaggcagagaaggagggagcaacaccagacagagcacccagcggaagaaagggcgggaagaggcacaagggcagcacagcacggccccaaaaagagccgaaaagcgaacgggcgacagccacaagcccagcaggagagccgcacacagagagccacacagaagacccccgacgaacaccagaaacaagacgcacgcgccacacccgaaacaagaggccaacagccacacacaaccaccaggagccacggggcaagcggcccggaccggaaggaccagagcaccgcggacaaaaagaaaagcgccccgggcaaacaacacggggcgggagggccgcagggccggaaagcgcgccaggaccacacaaagggaggccgagccaaaggaaaaggccggcagccgaccgggaaccaaggcagaagccgagccaaggaaccccgaagcagggggaagaggaaagccagaagcggaacacccacgagggcccgggccggaaaagccaaagaaaccgcgaagcagagcgagccggggaaaccaagccacaagggcaaggaagaaaagcgcgggggcgaggcacaagacgaacgggcagcagaagaaaaccacgacgaaggacaagaggccaggagagaaggccaagcgggcaagccggccaaaagagggggcaccgaacccggggaaaacagccagggaggagacaggagaaggaccaaaggcaaacaagaacgagagcaggagcacagcgagcagaaaaaggcagccaaagccaggacgaaaccaccacccggagggaaagcagagaaagggaggacagcgggaggaggacaacggcccacgaaaccgagacgcacaaccccacgcgagggcgacccaaaggagagcaggggcagcagcacaggccgggcaggccaaaaacggagcagggggccgggcaagggggacgcgagggaaaggaggcggaaccagaacgaacaggagggcacgccgccaagcccggcccagaccaggaaacccccaagcaggggacagcaaagggcccccagcaggggaaaggccccgcgcagaagcccccaacaagggagggggccaggcaaaagaaaagcaggaaaagagaaagccccagcacaacagggcgggagaagacaggacgccgccaggacccccagaaggacagacggaggacaggcgggaaggagagaagacgagaaggcggccagcgccaggagacagaaccccggccccaaggcaagcaacgggacacggaggggagggcggcggccccggggaaccccagccgcgcggacacggagggccgaccagaagaccgccccggggcaggggccccaggacccgacaaaagggcaggaagagggggcggcacacggacaacccgagacggagccgccgcgcccaggcggaggcagggcgggaccggccacgaagcccgcccccgggcacgccacccgcccagcccccaagagcgggacacaggcgcccgccacacgcccggcaagaagacagacggggcaccgagccgagaggccgacccgacccggaccgcccgcccggcccccaaaggcgggaacaggcggagccaccacgcccggccggacaaccaaaggccgagaccgcacggaagcaagcccaaggcagagcgggcacagggaaaagggcaaaaagggcgaacagcaacagaaaggagcaaagcgaaaaggcaccaccagaagccaccaagcaacgcaggaaaaaagagacagcacgagaaggacagagggccaccacgaacacgaaggaggcgaagagcggacaacccaccaagcgggaggacgacagcccgcccacgagaagcggcaagacagcacagagaaagggccgaagaggggcacaaacacagcacaaacacaaaccgagcaaagcacaggaaaaccaaaccacacaccaacaagaaccaccccagcggccaagcaaggaacacagccggaaaaagaacaagcagaagaaagaaccaggaccccagcgcccagaacacacaggagccgccaaaaacaaccagcagaaccaaacacaaaggaacccgcggggaaaagaccacagccaccgccggggcacacccagcagcccgccagaaagaacccacccagggccgacagccacgaacaacaaagcgccacgggcaggggaccaggccagggcagagaaacaaagagaagagacggacccgcccaaaacaaaccagcaagggggggaaaccggaccagacagaccggggggaaccggcccaccaccagcgggcaagaacaccaaacccccccccccacaacgggcagaaacacccaaggcgccagaggaaaaaaaaaaaggcaggccacaagaagcaaaaaagccccaaccaacaaccaggggaagaggagggaccccgaaccccccccccacaacccaacgcacagaacccgcaagagaagagggaaagccacgagaagacgagaggaaaaaccgacgcagaggacggagacaaaggaaaagcaacccaaaccacgggccggcacccacgaccgagaaacaggagaaaaggacaaaaacagaacgcgcgagaagccaggcacaccaaaaaaacgagcggggccaggcccgacaggcagaaacagagggggacaggcagccacagcccaacccaggaacacaagcccagcagaggcaagcacggcccaagggaaagaggaaagccggagggaaggggggagcgccaaccacaggcacaccagacccacaagggaagcccaggcagggagcaccggcaggggcaaccagcccaaacggaaaccaggggaaaaaacagcgaaagagcagacaacaagggaaaaagagaaagaagccagaacacgaaaagaaaaagaaacaaaagaaggggaagagaggaaacccccaagcaaccgcagaaagaacacaaaaaaaaaaaacgaaaggaggaaacgcgaaccggccccccaacccaggagacacggaaagaaacagaaggacaaaaaagggaggggagagcacaaccacaacggaacaaggcggagagccgaacagagcagggccagcggcccagaaaaggagccaggcacaggcacaggacagaaaaagcacccagccagccacggcaaggacgagcgcccgagacaggaagagaggaaaccacagcgaacaggcggagagagagggggacgaggccggaacacccacccaaaggaagagccgggcgggcaggcccaggacaccagagagcaggcaggcggcagcgagcgacagccacgagaggaaaccgcaccacacagaagaacagggaccgagccacccccccaggcaaggaacggcaggcaccgcgggggccacagggacaccagcaaaacagcacgcgggccaaaaccaccgccagcccgacagagggggggcaaaagaccgcccccagccgaccaacccaaaagaggggggggacgagcgaggaagaggacagaaagagagagaaaccgcccccggcccagacaccaaccagaaaccaggcagcagggagagcccacccgcccccccaacaccccaaacccaccccccccccaagccccccagcaggcgccggccaccggaaaacagacccaggccaccacccccccgcgcgccccacaccgcacgccccacgccaccagaaaaggagaagcacgccccgcacaccaggcaagcacagcaaggaaaagccccccaaaaggaggagaaaacaggagagggagaaaaaaacccggcaagaccaaaagaaggcgaaggagcgcaccgcagcaaaagcaaaaagaagaggcacggcaggacggagaggaagagagagaacagccgacacgaaccacccaggagcaagacgggcgaagagggccagagaaacagagccaacaggaagacagagaaggagaagggaaaaggaacggcaagggggaaggcaagcaaaagcggagacagcaggcagagaccagagaagaacgaggcagcagcgaagacagaccggaggcagaggccccccccaggggacccagaccaaggcccaacgaagcgaaacccaccacaaggagacaacgcgcagcgcgagaacaagcaacaaaaaaacccacagccacagacgcaggccaacacgagcaccaagccagccaaggacacacaaaaacgcacacagagagaaacacaagccgcagcacgcaaagaaacagaccagagaagccaacacggcaccaaagcaacaggaacgcccgaaagccagcaccacaggggcacaaagcaggcccacccacaacaacggaggggagcgccacaaggaaagaggccaagaacagcagaggccacgcgaaggagggagcgagagagccaagcccgcacacccaagcaaaacgcgacacagaacaaacaaacaaagcgaagcagcccaaaagaagcaccagccaggaaacgagacacagagaacaggaacacccccccaccaagccccaccacacacaacacacaaggaggaacaggccccagccaccaggcagaagcgggagaggaccagaggccacaacagggcaagacaaaagagaaaagggagccccaaaacacaagacgaggcacacacacaaaaaaccccaacccaagccagacacagaccacaagccgcagcccaaagacaagacagaagggcacaggaccgaacacgccaaaaaaagaaaccaaacgccaaaaaaaaggaaagaacgcaaagaaaaaacagccgggagccaacaacaggaaagcaaagacacagaagaaacagaaacagaaaaaaagccacaggcgccaaacaagcgcccccaaggaaacaaaagagagaaaaaccaacccaaggagcacggaaggggaaaaagagaagaaggaaagagggccaaggcggaaccaaaccaacaacccagagaagaagcacacccaacagaggggaaaagcgcgaaaggaggacgccgagacacacaacggaaaacgaaacaaaccagaccccaaaccagagccagaaccccacgacacacgcagagaagaaaaacaaaaaaaaccacaagcagcaggacaaaacaccaagaaggggcaagaaaggaggaacggagagcaggaaaggcagaaagaacagaggacaggcagagagagaaagagcacaaaggagaggaaagagcggagcgagacggagggagaagagaaggggggaggaaagagggaaaagcaggcaaaaagcaggagaccccagaaggggaacaaaagaagagagagcagaggaagaaaggagacggggggagaccgcaaggcagagagcaccgcaggaaggaaggaaagacagagagagagacacagaagaggagagggaccgaacgaagaggaccaagagcagacgagcagaagaagaaaccaaagcaggcggagagggaccagaaaaagcagcagagaggccagaagagaaagcaaagcagaaagagggaaggagggagccagaaaaggaagggaccgaaggccgccgaaagggagcgacgagggaccaagcaaagggggccccggggagggcgagacagagccaccaaaggaagacaccagaagaacgaacggaagcaccaggaaacggcgggaaaaggaaaggagcagggccgcagagacgaaaccagaaagaaggagaaaaaagccagaaagaagaacgggcagagaagggcagaaagcaaaagacacaaacagaaaaaaaaggcacaaaaggagagcaaccgcaacaaggaggaccaggaaaaaaaaaaaagagagccaccccccaggggaaaagacaaaggcaacaaagggagcacaagcagcaaggaagcaagagaggcaacgggcacagaaacagaaagcccaccccacacccaccgccggacccaccagccgcaaaacccaggaagagagaaggacaaaggagcaaaccccaggagcaacacaacacacaggaacaggcaggcagaaggacacccgcccacgaccggcgcaagagaacgggcaaaggagcagaaggcaagaagacagcagcccggggaaaaccgacagcagagaaagagaaaagcgccagcaggcacgagcgcaccagccccagacaggcacagaggcaacgggcagcaaggcccagggccaacacaggggcaagccggaacccacccaccgaaagcagacgcggagcacggcggaggcagagccagggcagcagcagaggcgaccacgcacaaaccaagggaaaagaagagccgggacgacccaaacaacagaggccgccgcagggaaccagaaagggccaaaacaaggaggcaagcaaagaaagaagggagcgcagcaaagggaagcggggaaaacagcccgggcggcaacgacagagcggcggcgacaaaaaccaggaagcaacggggaggcaggagcaacgcccgccccagagcagcagcacggaaaggccgccgcacccaggcagaggcagggcaaaaccagcacgcaacccacccccaggccagaaacagcccagccccgagagcgggaccacagggggccaccaacccagcaagcaagaaagaggggggccaggccaggcagccgaacccggccgaagcaccacccagccagcccccaaaggcgggaacaggcggagccaccagccggcccggaaaggcgggcgagagaccggcacccaaaacaacaggaaccaagaggccgcacccccagggagcaaacaaaagagcaaaaggaggcccacaggccggcacggcagcaaaacaaccaaaagcccacaaaaaccagaaggaggcacaccaccagagggaagagcaagccccaggagcaggagaacacacacgcaggcggaggagaagaaccacgcaccacaccagcggccccagggccccaggcgacaccacaagcaacaagacaggaaccgaaggcccagcaggccggcaaccgaaggcgcaacccgcggggcgacaaaacacagcccacaaaaacagaaaacaacaggacaggcagaagcaagacaaccacaaaagcaaaaagggagaacaaaagacagcaggcaaaaagaaaccaagaccaggaagaaaaaccaaccacagcagaaacgggaaccaggaacaaacccacaccaagccaaagccagcgggccagaggggcaacgaaccagagcaccaggaagaaaaaacaccagggcccaggcagaccaaaaacgaaacggggggagccagccaccggggaacaagcccccagggacaggggcacgccaagcggcaggccaggccccagccgggcggcgcacccaccacccagcgaccccgcaagaagaaaagagaaaaaaggaacggcaacagaacgacgaaggcaacacaggaccaagaagccgaggggggagaaaaaaaagacaccagcccaaagaggaggaaaaagcccagaaccaaccacagggaacgcaaggggacaacccaaaaagggagcaccacaaaaaaaaaccaacaacacccagaaaacaacaccacaaacacaaaggcaaagagggggggagacaggaccgccgacacacaggggaggcaagggggcagggccagcaacccaaccccgggcaagcacccccgcccagccccaagagcgggacacagggggcaaccaaaccggcaaagagagacagagccgcagcccaggcggcgaaccgcagcaagcaccccccgcggcccccaaaagcgggaacgggcagggccaccgaccggcaggagagaaggacgccgaacaaaaaaagaaaaaccaagaacgaaaaaaagcaaaacaaaaaaccagaaagcaaagacaaggaaacggggggggggacccaagcaaaagccacaaaacagagaaaaacacaaaaaaaaacaagggagaaaggcgcacagaacaaggaacggcaaagcaaaggcccgggaccagcacggccgccaacgcaccggggaccagagcaagcacacaccccacggacagcacgaaaaaggaacaaacgaacccaccaaagaggccgagaaaaagagccacaagaaaaaacaaaacacaggacccgcaagaaggaccaaagacgagcaaaggaaggacaaaaggccaggcaagagacagagccagggacagaacaagaaagcaggaaacgccccgacccaaggccacccaccaacaaagcgcgggaaagagcacggaacaacccgaaacaaaaccggcagggcgcgcggcaccagaagacagagacaagaaccacaagaaagacacaacaggacgcaaaaagaaaaaaaaaacacgcaacaaaaaagagcagaggaaaaccccaacaacaagaagcagagaaaaaaagagaacagcaagagacacccacacgccagaacccacaaagaaacaccgccgggccaggaacggaagggaggaagggaagggccacaaaaaggaacaaaagacggaacggcgaagaaaccgagcagaaaacaaaaaaacacaaggcagaaccgcacaagaggacagagccggagcgccggacaccaaaaaagacgcagcaggccagaaaagccacaggccaccgccacagaggggagggcaccagcaaaacacacacccagaacacaacggaggagaggagacaaacagaagcagaggacggcaagagaaaagcaaagcagaaaagacaagaaaaagaggcaaggggaggagagggagaagaaggggcaaagaaggcccgagaaggcaacgccgagcaggaaagaaacaagagcgaacaagcaggggaaagcaacaacacaaaaaaaagagggagcacagcaaggccacaacgagaggagcccacccggcaacaggagagagcggaaacagcgacaaaaccgccagaaccaggaacggaagccaagaagcaccaaagacacacacacacacacacaacacacacacacacagacacaaaacaaaagaaaaagaaccggcacagacggacgcaagcaaacaaacaaacaaacaaacaaaaaacagggcaaggagagacaagaaaaggagaacacaccaaccaaggacccgcaagagaaaaaaggggcggggaacacagaaaagaaaaacagcacagaaagaaacaaggcgggcacggggcacaccgaacccagcacgggaggccaaggccggcagacaccgaggcaggagcgagaccagccggccaagagggaaacccgccacaaaacacaaaaaagccaggcgggacggccgagcccagcaccggaggcgaggcaagagaagcgaacccaggaagcggaaggcaggagcgagacacaccacgcacccagccgggcgacagaggaggagacccagcaaaaaaaaaaaaaaaaaaaaaaagaaaagaaaagaaagaaaaagaagaaaaagaagggaagaaagcaagcaagcaagcaaagagcgagcaagaaaggaagaaagaaagagaaagaagacaaacaaaaaacaaacagggggaggaggagcagggacccaaaggagggggcaaggaaggcaaagcgaaagagacaaaaccaccgggcacgccaacgccccaccagcaagcgagggggaaagcacagaaagaaccagcaaccgacacgagaggagcgccgcaccgaggcggaggcagggcacgaccggccacggaaaccgcccccaggacacgccacccgcccagcccccgagagcgggacacaggcgcccacacccgcccggcaagaagagagacggggcaccggagccaggaggccgacccgacccagaccgcccgccggcccccaaaggcggaacaggcagagccacggcccggccgacaccaaacagcaaccaccgacccacagggcacccaaccagggcccccaaaggcagaagaaggaacacaaaaggagccccgcaaagcgccacacaaagcccccacacgcaccacaacaacccagacaccaaacaacacaccagaaaaaccaggcacagacaagccaaggcaaccaaaccaggcaacaaggaccggaacagggagaaaccacaaagagcaagcagaacccaggccccgaaaaaaacgaaaggcaaaacccagacacacaaaagggagagaggacaagaagaaagagaggcccaacaaggagaccacgcaaaaaagcaggcaacagagacagcagcaaacagcagcccagggccgcaaaaaaccacaaaagcagaccccggggggcaccaaaggcacccacccaacgaggaacaagacggaagaaccaaagcgggaagaggagaaacacagaggaaagagaaagggagggggaccgaaccgcagcacacagggaaaagccaagccaccaccccaaaaacaagcagaaagccgcaaaacaagcagacgggagcaaacggacaaggaacgaagccaagagagcaaaaaagacaaaaagcgaaagcaaaaggaaaggcacagaagcccacgagccaaaccccccgcgagaaggcacgcggcacaagggaacacggggaaaacgggagacagaaaggacagggaacggcacaggcaaaacaggaaccaccgcccccacacccccggccagggcaggagaggaacaaacgggaagaaacaaaagaagacgccccccccagccccccacccccggagggacaccccccaggggaaaaaaggccggggccacggcggagagagaagagccccccacagcccacaaacgcagcaaacggagagaacacaggaaacagacaaaacaacaaaaaaggcccggcgcagggcgcaccgaaccagcacgaaaggccgaggcaccaccaccacagcaaacaaaaaaagcccagagcacaaagccacaaaaaccacccacaagaagggggaggacaagaggaagaaccaccacacagaacccgagcaaccccacggaagcaagagcagaaaaggacaaaagggaaaaagcgaggacaccaaaaaaacaagccaacacacaacaaagcaacagccacaacaacaaagccaagcgaaaaggagcgcagcaccacacaaccgggacccggcaaaaaagaccagggaccaggcaagccccggacgcccggcagcccagaaacaagcccaagcagcaaggccaacaaaagagagcgagcacaagaagaaccccagccaagagaaacaaaagcccggaacccgaagacacgcaaacaccacacacacgaaccgaagcccaggcgcggaaaggcgcagaggccaagccaaaagaacgcccggaccaggagccaaaccagaggacaaaaggaaacccgcacgggaaggccagagaaagcagaaaaacgagggcggggcgggagaggaaggagccagccggggaggagggaaacagccacaaaagccaaaccaagcagcaagacaccaggcaaaacaaagaacaaccaccgagcagaagacacagcccagcggacagacgggcacgacaaggagcaaaaggcaggagcagccgacaccaaacagaacagaagggggaccaggaccggagagggggaagaggcagaaagagagaaggaccacagaaaacagaaaagcaagccagccacgaagcccgagagagagcaaaccacacaggaaaacaaaccagcgcgagcaggcaggggacagccgggcaaccgggagacaacaggcagggcaggggaagagcagagcaaggggaaacgcacgcacaggagggaggcaagaacagacccacggaggcgccgccccgagccagggagccccagccacgcagggccgggagagccaaacgaacgcggccaaaccagagccccaacaacacagaccccagggcaggacaaggagaggcaagagaggcagcgagacaagaaaaccagcccaccgcaccgccgagcaagaccaagccagaccgacccccagaaggcccaacaggaggaggaagggccaacgacaggcaggcagcacacaaaagagaaagggaacagggaggagccggcgacccaaggacccgaccaaaaaccggaaacaaagagagggcagaggaacaaaacagagaaggagaaagcaagagaccaggcaacgagacaagcaaaacaaaggggagaaaaaggagagagacaaggccccacacacacacggaggaagcaggaaagccgaagcaccacaagagcaacaaaacaggcacagaaaaaaaaagcacaaaaaacagagaaaaacaggcagagccaaaagcaaggaccaaggcccaaccagaacaaggggggaaaaagaaaaaacccgcccccaggccccacccccagcaaaaagcaccagaccccccgccagaaaacagacaaaaaaagccccgagaaaaaacagaaggcaaaacggggcaaccggaaacaccagagcccgcaagaacacagacaagaaacacaaagacaaacaaaacaagccccgggcccgaagagagaagccaacaacaacaaacagagcaaaaccacaaaaaccaacaaaaaaacaggcaacacaacggagagaacacaaaacaacaagaaaaacaaaccaagcccaaccagccaaaaaaaaggcagaacaaaacggaccaggcccaaagccccagccaccacaaaaaaaaaccgagggaaagaggaagaaaaaaggggaaaaagaacaaggcaggagcgagacacccacagacaccaggcccaaaagcagggcagacacaaaggaaaggaaagaacaaacagcacaaaaaacagacgaaggagcaagaggagcacccagaaagagcacacccgcaacgcaacggccaagagccaaaaacacaaaagcgagggcaagcccggagagagaagccccagcgggccaggcagaggcacgccaggagcgagcgccagcgacgcaggagaagaaaagccccagcagcacagaaaggggcccccaggacacacacagcaacagacaaacgccaaaggcgagcaaaaaccacccaccaaaggaaagacaaaaccgaagcacggaaaacaccgcagacacaaaccagaaaaagggaccacaagaagacaggagaaaaaacgcaaacccaaccaaacaagagaaaccccagcagaaccggaaacaaaaaaccacaaacagaaaaagaaaacagaggcacacccaaagagaaaaaagccaccacacaaacgacagaacccacaaaaaggaaaggcgagacaaacccagggaaagaaacgagaccagaagggagggcacgcaacggacaccacgagagcagagcgggagcaccaggggccaaacagccagcccaaaacaggcgaaccagagaggccaggcacaagaccaagccaaaaaaaaaaaaaagaacaggaacagacaagcccggcagggaaaagaaccgcagaagcacaccgaaaagagaccggaaacgcaaggcgcaaggaggaccaggcagaggagagaaaacgaaggaacaaaccagcagcgggccccagccagccccccacccccaccgccggccaggaggcgacccaaaagaacccccacccgggggccagccaggaagcgcaggggccagcgaggggagaggagggggggacgggccccccccggccgcggccaagagggcagcacgcacccccagagacagcaagccacccagcgcccgccgccccgcccccccccccgccccagagcccacaccccacccccgccaaagaagagccgagacaaaggcggggcagggacagggaaccagcagagaagaggaagaggggcaagaagaggaacaacagggaggcaaagccgacaaggagaaacgagggccagcggcaaggggccacccagaacccgggaacagaaaacacccagacagcgcagggaggaagacaaggaaggcaccaggccccgcccccacaagagaagcgcaaccccacgacacccacaccagggcacagccagaaggccaggcagggcccaaggcaaggcacccagcacagggagggccagggcaggaccgaaggcaccaggagcaggccaggcagcagcccgacggacagccgacaaggggaagggcagcaggaggggaaaaggagcccgccacgacggggaaggccacgccccaggcgacacaaccgacaccaggaaacagcccaaacccccgagccccacgagggaacaggaaaccgccgcacagcacgaccaacacccaagacccccccccaaccaccccaaacaaaacacccaggagcccccaccgggggggaagccccgagaacagcccaggaccagaagacagaaaaagagagcagagcaacagaagagaggcacggagaggagagccaaaaaaacaaccaggccaaagaagagaagacacacagagacagagacacacaggaaaacagcgggaagacaaaggcagagacggagagcggcccacaaccaaggaaaaccaaagagccagcaacccagaagcaaccccagaggcagaacaaaggcaagaacagacccaaaagccagaaggaaccaacccccacacgacagaccggcccagaacagaaagaaaaagcggaagccacccaggcggcagagacagccgggaaccacgacaccccccacaaggcccccccaagccacgggagccgacaaagacccagcacccagccacaaaacacgcggggacccagagcacagccgccagggacagggggaaagacgccgcaagcaagcagcaacgagacagcaacacaaaacccccccaaaaacgaaccaagaaaacaacaagacaagaccccagaaaccgcaaggaggccaagaacgcaagcccaggaaggagaggagggcagccccagagcacacccgcaggccaccgcgccacacagcgaagaggggccagccagggggagcggcggaaacaaagccgccaccgagaacccagcaggaacacacgggaaccaggacgcgcaagcaacccaggagagagaaacccagacagcagcccggggggaaacagaaaccacacggacgggaacgcccgaaggcaacacccgcaggcacggacaccccaccgcccccaccccgaaccgcgccacagacaccacccaaggaaaaaaagcaagagcaaaaaagcagcgcggggccaaaggccagagagacacaggcaacagaggcacagcaggggggcaacgcgcaaaggcagagagggagcgaccagcacccccgcagacgccgccaccaccaagcaggacggagagagcagcccaggcgaccagccccacaacgagacccagagcaaggaagagcgccaaagccgcccacccaagaacgggaaaagaagcccacaaggagggaggcaaacacagacgacacggccccagcagagggcaggaaagaaaagaagacccccagaagaccacaagcaaaaccacgccggcacaacccaagggccagccggggcacaaggcacaaccaaaacaaagacggccccaaaaagcgggaccacaggaacaccaccagccggcagcggagagaggcaccaggcccagacggccaaacccgggccaagcaaccaccggccccaggcgggaacagaggagccacggcccagacgaaaaaaaaagaacacagagcccacgggcagacaccagcaagcaccacaccaacccgacaacaacaaacgagaggaaaacccaaggaaccaaagggaaaccacagacaacaggagggcagaaccagaacacaagaagcgccaacagcacagcccaaacagagagcaggcacaagaggaaccaaagaacaaaaaaaaaaaaaaaaggcggacacagggccacgccgaacccaacacgggaacgaggcaggcagacaccgaggcaggagcgagaccagccaggccaacagggaaaccccaccacaaaaaacaaaaaaaaaaaaaagcggggggggcgcaccaaacccagcacgggaggcgaagcaggaaaagcgaacccaggaggggagggcaggagccaagaagcgcaacgcaccagccgggccaaaaaaaaaaaaaaagaaaaagaggggaggggggccgcaggcccaggcggcgaacccggccaaggacccgcccggcccccaaaagcgggagaaggcagagccaccagccggccagaacaagaacaaaaaaaaacagaccgacacagaaccaaagaagacaaaaagcacaagacaaagcagaaaaagacagacaaaacaaacgaccagaaaaagaacccaaaaccccagaggcacccgcccccacgaaacgaacaaaaaacaagaccaccaagacaacagggcaccgcaggagcccccggcccgcagagccagaggggcacaagcccgaacccacacccagaacaccaggcccgggccccaccaccagacagcccgcggcccccccaggccgaaggaggcccggagcaacccggccccgacacaccacccacgaagaccaccagcgcgcccaaaacaagggaaaaaaaaaaaaaaaaaaaaaaaaaaccggccagcaaaaacacacggaacaaccaaaggcagcaaaaaaggaggggcacaacacaaaaagcagcaacggccgggcaggggccccaccgaacccagcacgggaagccggggcaggcaaacacgagccagaagcaagaccagccgggcaacagggaaaccgaacaaaaaaaaaaagcagaaaaagccggggggggcagccccggagcccaacaccaggaggcgaggggcagaacaccgagccgggagcgaagcacaggagcggacgagcacgcacccagccggggaaggagagagacaccaaaaaaaaaaaagaaagaaagaaaggagaaaccgaaaaaagaaggcacagcaacaaaaaggaaaaaagaaaaaacacagaaaccaagcaccgacaaagaccggaaagcgggaaggagcagcagagaggaaagggggaaggaaggcgaaacagggggaagacaccaacagacagaaagggagccgaacaggggaaccgaggagcggggaggaggggcgggaaaagagcaacagggcaccgaggcagaagcgcacagacccagaacaaagcacaagcaaagcaaaagcaacgaaagagaaaaacgaaggccaaagacgcgaaaaagcacacacaggaacggacaagaaacacggggagacacaaccaaacacaaaaagccccacacagaagcccaccaagccacaaggacaaccagacagcacccacagaagaaagaccgcccaccccaggcacacacacacacacacacacacaacgaaagcacaaaacacggggcgacagaagacacgacaccaagaaaagaaaaaagcagcagacccaccagaagacccacgaaggaccgcagaaaaacaccaccagaaaaggaaaaaagccacaagaaggaggaaaagagcccgagaagaagaaaaagcaggaaggaacagcacaggagcgagagcgggaagacagccaaaaaccacgaaggcaccagcaccagcaggccccccgcccccacaaaaccacagggcagaacgaaccccacccacgccacacaccagacgaccgggaaaggcaagggccagcacagaagaggaagggcaggaagcaagggccaaggcaaagaacacgaccaccacgcaccgcagagaaagggagggccgcaccagccgcgcaggcgggccggggacccccccccgcagccccgcaagagggcgaaaggagaaaaccgcaggggagcagggccagcccgccccagggcccaccgcccccgagggcaggccagccaaggcccgaggccaccgcaaaagggaaaagacccccagccagcccgccccaaccacggaaaccaaagaaaacaaccggccccaacgccagaagcagggagacaaccccccaagcaaggaaaagagcaagcaagagagaaggccccgcaacacaacagcaaagagaaccaaaccagcccgagccgggagcccaaagcaaagacccaccacacaaagcaaaggcaggcccgcaccaaaaaacgggagagaaaacacagaaaacacaagcaaagaaccaagcccaacggaaaacagccaagggaccccacaaccggcacccagcaaccccccaacacagccccccaccccacaagccacaccacagaaagagaaacgagccgacccggagaacaaaagaacaaccaccccagacaaaaccaccccacagcaaccaaaacagccggagaagagaccaaaggggccaccaaaacacgacagaaggcgcaaaacgaaacggaaggcgagaacaaaacaaaaaaaaaaaagaaaccaggccaaaaaaaggggcgaaaacagaaaacaaaacaggccagaacaggaaacagggaaaggaaaagaacagagacaggaaagacccgagacaaagcgcaagaggcgacaacggacccccccacgcccccggccacaagcaccaaaccaaacacagagcgaacaccagcccgacagaaagagaagcagaaggggcaacccagagcgcagcaagccggaagcggcgcggggggaacagagaagaaggggcccaaagcgccgcgacgcaccacaacggaaagccccccagggaagcaaacaaaaacaaagggcgcaggaacagaaccgacacaaaacgaaaggaacaaaagcaagacccaaggaaaaacaagagagagaaaagaaaccaagcaggaaacaaaggcagaaaaaaaaaagaaaaaggaaggacaagagggggggaaacaaaaaaggggagaccaaaacggcaacgccagaccagccgcaagccaacaaacggcgaagacgcgaccaagagaggccaaaacaaaaaacaagcaaaaagaaaaaaagaacaagcaacaaaaaaacagaacccgcagcagaccacacgcgccgggagaagcacaaaacgaaggaaaaagcaaacagcgcaagaacagagaagcaaaacaagagagaaagaaaaggcacccacaacaggaagcgggaggcggagggcagaccagaaggcagggccaagccgaacccgggcggcccccaaaccagaagcgcgaagcccaagacaggcggccacaaaagggaagagagccaagagaaagcaaggccgggcacggggccacgccgaacccagcaccgggaggccgagggagggacagaggcaggagacgagaccacccggcaacacgggaaaccccgcgacaaaaaacaagaaaaaaagccaggcgggggcgggcgccgagcccagcaccaggaggcgacgcaggagaaggggaaccgggaggcggagcgcaagagggagacagccacgcacccagccgggcgacagagcaagacccaccaaaaaaaaaaaaaaaaagagaaagcaaagcaaaaaccccaacagaacccaccaggaagagcgcaaagccacccaaggaaggaggacaagagaggaaaggagaagaaggaaaaaggcgaacagccaaccaaagcgcagaggggacacgacacagaaaaaaaaaccgggaaaaaagagacgagcaccaaccaaaaacaggacccagcagaacgaagagagaaaaaaaaaaaaaaggcggggcagacggaaaaaggacccccaaagccacaccaacccaaaacccagacgagaagagaggggagagaccggagagaagagacccaaagcagcaagcagaagagggaagcaggagacaaagcacagagggaaagcagacaaaagcgaggccaaagagagagaaaaagagaagacacacacgcggcgaagaggagaaaggagccaggaaccaaggacgcgcagcccagaagcagaacagaaggaggggagcccccagaaccccaaaggaaagagcccgcacaccgacaggaccgaccccagaacgaagaaaaaagggcacaacacagaaggacgacgaccagaggaaacaaacagagcccagacagaagaagaaagcaaagccgaaaagaaaaaaaggcagagacgggcacaagccccacaaaacccgggcagcaaaacagcaagaaagcaacagagaaaaacagccggaaaaaccagcaggggcaaaccaccacaaaacccagaggacaacaaagacacccaccagcacagagaaagacacaaggagacagggacagaggacggggggggggggggcgggcacaggacagccgcacaccagggcagcagggcggcagggggcagaggggaaggagacggaggggcacaggccaccggccggagcagcggcacacaccaggaccgggaacccaagagagggagacacaaagagcacagagcaccccacgggaggacacggaaagaaccgacaagggcggaagcacgaaccaccaaggagaagaacggcagagagcgggccgcacggagagacaaggcgaacacagaggcaagaagcgaaaagacaacccaaaagcccaagagaggaaaggccaagcaacagaagacaaagaccagccccaaaaggaggaaccgaaagaaacaaacagaaaagcaacagcagcccgcgcacaccgaacaaagagcagaacacagcacggcaaagcaaaggcgccgacaaccaaaggagcaaaagaagcagaaaaaccgcaaggacaaagcaaaaaacaacagcacgcgaaacgaacaaagaaagacaagacacgaaaaaaacaaaaagaaaagcaaccaaaacaagaaaagcaagccaaaacccaacacaaaacggaggaaaaaggccaaaacacgggaaaagaagaaaaaagggggcaaacggaaagaaagcaaagaacaccaaaaccaaacggcaaacaaagcacaagggaaagaaagaacaggcgcaaacagaaggaacagaccaaagggacaaagaagagccgccacgaggggaaaaaaggaaaaaagcaaaccaaacaaaaaaaccccccaaagcccccccgcgaagaggaaagaaccaccaaaagggagccagcaaaaaaaaaaaggccaaaaaaccacgggcccgagggaagaaccaagcacaagcgaaggaccgaggcggaaaaagaaagggccgcccgggaaaaaaaggagaacacaagcaaggaaagcagagagcggaggcaaaaaaaaacagagagggcagcaggcgcccagacagggaggagagaccgacagaccacacacccgccaaaagagacagccggcgacccgagacgaagggagcgaaaggaagaggcaaaccgccccacccccgcccccgccaaaacaggcaggaccagcccaggacccgcgcacgggggccacagacggcacaagggagacagaaaaaagcccacgacaggcgcaccaaccgcacccgggggcccaaggcgaggagcacggaaacaccccccgcccacagaaacgcagggagccccgggagaaaagcacaagaaaggcacaagaaagaaaaaggccaaacaaaaccaacacacagaaggaaccacgcaaccaccaacacgccaacaggccgggcccaaaaacgccaccaccgcagcccaacaagagcacgggaggaaacggacgccccgacgggcccgaagagcacaagcacgggcaaccaggaacagcaaaaacgaagacaaaaccaacgagaccaccacagccagaaccgcccaccaaaaccacaaagagacaggccagaaaaacaacaaaaaagagccgggcggggggcacacacaccaacccagacaggaggcgggaggacccgagcccaggacgaggggcaggagcgggaggccacgacccagccgggcgagagaggagaacgcaaaaaaggaaaaaaaaaaaaaaaaaggagccaccaaaaaggaaaagaacaaggaagcacaccggaaggagccagcacaccgccccacccgggagacaaaggacgaaccaggccccagccaccacccaaagccaaaggaggcagagggagaaagccaaagcaagcccgcacgag

SEQ ID NO: 324 - RNA, 8496 nt, Homo sapiens
ccccgcaggcagggcaaggcccaaggacccaacccacaaacaaccccaccaggagggaaacaccaccaaacagaggggaaacaggcgagagaaaggacccagcagacaaagcccaaacacgggccagccccacagcccgcccaggggcacaccgggagagccagcggccacggccacccgaagaccaaggcacaggagagagacgaccagcggcaaaggaccgcaccaagaacagagggcccggccccacaacagggccccccgggccgaccagagcccaaaccaggaaggagcaggaggggcagacaagacaaggaagagagccaggagggaaaccgcccaaggcacgcagggaggagaggacagaaggaaacaaggacccacaccccccccgggcgagcaggagaacggccagacgcccagcggaagccccaggacacacgagacgagaagagcgcaagcgccagggagaagggaagacgcgggacacgggaaagggccccccagaggcagcagaggcagaccgccggggcccggcccccgacggaggccccgggccaggccaagaccccccggcagcgaggcccagccacaccaacgcccgaagggacaccgcacccgcccggcggccccacccggaaggccggccccgccgcagccacccgaggaggccccggccacgcccccagggccacgcccccgaaccaccgcgcccaagcaggagcacgccggcccccacagggcgccccccacagggggcccgggaacggccccggggcccacaagcggaagggcaggaggcgcaccaccccgggccccccccagcgccggcgggagcccaggcgcagggaacagacccccgccaagcgaacacagcggcccgccgggggagcccggcaaagaggaggggcccccgagggcgaagggggcgcgcagagggcacccgacggagacacacgggcacacgccagggagaggcgagacgcaaagagccgcgagcgggcgcgggagccgcgcaccccgccgcagccacccccgcacgcacggggcacccaggccaacaggaaggcgccaccaaccgccggagcagggggagggaagagagacgagaggaccagggcgggaaaagaagcacccccccccgcggaggacaaccccaccccccggggggcaccgcaccggggccggagccgaacccgggagccaaggggccccagccagggacggaagcgagcgacagcgggcgccccagacacggggaaaggcacgagcccgagcccccagccgccagcggggcgagcggaggggccccgaccgaccagcggccccggggcagggggcgggcccggcggcgcgcgccccccccccccggcggcccgcacggcgcccgcgccgcgcccccacgggacgcgcgggcccgcagcgccgcggccgagccgggcgcccggcccgcggacacagcgccggccgccgcacccggcggggccgcggcgcgagcgcgcggaagaggaagcgcggcggcgaggggagggcccgggcgcgggcgcgcgggggggcggcggcgcgccgagcgggcccggcgcgggcgagcgggcgcagccggcggcggcgccagcaggacggcccgcacccgccgccgccccggcggccgggggcgagccggagcccggcgcgagcaaagcggcgcggcccccggcccggaggcggcgagacgcgcgccgcgcgagccgggggaccggcgacggggcggggacgggacgacgcaccccccggcccgccgcgccccgcgcgccccgccccgaccggagcagcgaccgggaggcggccgagagggcgcgcggggccgagccggcgcggggcaggcgagcagggaccgccagcggcgcaccccaaaggcggggggcagggcgcgcgccggccacccgccgccgggcggcagcaggggcaacgcaagggcgcggcgggggcggccggcgcggagggggccaggacgcggcccgcgggcggcgcggcgcgcggggcagccggcggccgggagcgcgaaagccggcgagccggcgggggcggggaggggcggagaaaggggaacaagcgaggagcaaccaggaagcaggaaagaaagcgggaagagcccgcggccaagagcaggacaccaacaaggacgcgcggcccgcgcccggggcgggacgcggcaagcccccgggccccgcgcggcgcacccagccgggcgggacgccggccgcggcgaggcgggcaagccggcagggcagagggagccccggcccgagggcccgcacccgaggacagcggccccaaagcgcgacgcacaaaccacggaggcaaagaacaaaggaaaacggggaacgggaaaaaaaaaaaaaaacacagaaagaaaagcggaaggggagacccgggcgccaggccgcccccgaggacaggagagagcaccgcaagcgcggccgcacggccagcagggcaggaccaggccgacagggacaccgagcagccccgcgcaccaggagaggagcagccccaaccaaaaaagagaccacaaacccacggaagcagccaaaagcgggaaagagccaagagccgggagccaacaaaaagagagacgagcgaacaacgcaagagaggaaacccggcgaaaagagccgcgaccgcagggacgccaagcaccaaaccccaggaaaacccagaaaaaggcacaggacgcggaagaaagaaaaagcaagcacgcgcgagccaaggaacccggagggcgcccaaggaggcacaagaccgaaaaccgagcgaccaagggcgaccaggcacagccaaagcagcccccccagggacgcagcccacccagacgaacaagcgggcgcgcaggacccaccacaacccacgcgccgcaggcagaacagcgagaaccgaaaaccagacaaaaggggaggaaagcccacagcccacaaccgaaaagaggaaaaaggaagaaaaacgcgagaaaaaccaagacacaaagcaaggccaggcaaggagagcgagggggggggggacccacaagaaagccgggcccgagacggaagaggcaagagagaccacaaggaaaaaaagaacaacagaaaaagaaggcagaaaccggacaaacagacagggcaggcaaaagacacgaggcaaaacagacaagaagacacccacgcggcacgaaaagcagaacaagaaagaaaaaggacacaacaaaaagagcacaaaaaaacacacacgcgaggaagacgaccaacaccagaacaacaacaacagaaaaaaaacggaccaagccacagcaacagagcgggaccagaacaagaacaaaggcagcccccgcacgggagaggaaggaaggagagaaaccccagacgaacacaggcaaagagggacccggaaaacacacaccccccaagcagaaacacaagcaaaacacccacccagggcccaggagaccacaagggcgcagaaaaagcggaggagggaccccgaagagacacaggcccaaagagaagacagcgggccggagccaccgcgaaaaacaagacgcaggaagaagccaagaggcaaagcccggacgcaggccacgcccggacagagacggaggagaacagggcggggaacagcgaggaggggcagcgggaaaagcaacaaaaaagcaaaaagaaaaggaaagaacccaaaaagacaacacacaccaagaagcaaaacagaacagaaaaaaccaggcaagcacaagcacacagagcggcacacacacagcagcacacagcgggaggagaggcaggggcaggggaagagaacacaaacagaccgaaagagaaaaggcccccaaaacacaaaacaagaggacccagaaaagggaaaggcaaaaaacggagggcaaagacgaaagaagaacgggaacgaagaacacaaggaacacggggcacccccaacggacggaaaaacacagaaaaaagggcgcaacaagggagagagaagggcccacccagcacagaaggaaaccacgaccgcgccgaaaacgcgcccgagcccgcaagacgacaagcaccgggggcacggacgccgccagcggcagaggcgcagcccgccggcggaacagccccgggccagcaaacacagagaccagccaccacaaggcgaaaacaccaagggagaaaacacaagagaaaagcaacaaggacccaccgaagcacaagaagagaaacaaacacacgcgaaaacagacagagccaaaaagggcacagacagacaggcagaaacgagagcagaggacagcaaacacacgcacacacacacacacaaaacagagaggaacaagaaggaagagggagggacgcagagcaccaaaaccaaaggaacgacagaacaaagcgacgaggcgacgaacaccagcgggccagggaccaggccgacgcagaaaaagaccaaccaggaccccacacccggaaaagagccaaagcaggcgcacagagcaggagaaagggaaaccaacaaaaaagacaagaaaccagaaggccaaaacaaggagaaaaacagcaagcaaaagaagggcagaaggaagggcgaaggcgggccgcccagggcccggggacccgagaagggccggaggaagagcaacgaggccaacacaggcaacgccaaagcaggacgcccccaggacaaaaaaaggaggccagggagcccagccaaccaccggaaaaacgaaaaagggcaaacccaggcacaggggggggccagcgccgaacaggccggccaacccccaggccacgccggggaaccacaaccggacaaaagagcacccccaccacaagccgacaaacagacgccacaaacgaaccgggaggacaggaagcacaggccccccgcggccaagagaaaacggccccccgcaaggcaagggccaccccgcacccggggagggaaggcagcagaggaaccggaggaggaagaggacacagaggcccgagccaggcaccaagaccccccaggggcgggcgaggggaacccgagcagcccaggcccaaagcggaggggaaaaggcagcccacggccggcgaggcccgggggggaggccacacggcgggcgcaggaggaaagccaggcccgccccgcgggccacaggggggccgagcccagagcagcccccaacccggcaggccaccgccggggaggagagcacaagcccgcgaacgccgccggaggccccagcccaccccgaagccgggcgcggggccacggcaacgaaggcgaaaagggccaaagggaaaaggcccaaccaccgagggcaggacaccgcaacagccacgcaaagaaacgaccccccgccagcacaccaaaagaaccaagggaggaggaggggagagagcaagcagaaaaagaggggaccaagggcgcgcggcccccgcccccgcccgcaccccccccagccgccccgcccccccccccccccccaaagggggggggcacagacgccaaaacacaagaacggaaagggaaggccacacaagaagagaagcccagagacacacacaaaacaaccaaagcacgaggaaacagaaaagaacaagggagaagagccgcgaagcaggagccacagaaagaacaggacaaaggaaccagacacggcaaaccagagcaaaaaaaccacaaagaaccccagaccaagggaaaaagaaagagcaggagaaagagaagaggaagaccgaagcaccgaggcaccgaagggccaggcaaggaaacagagagagccagcaacccccagggagccccacaaccggaaaaaggaccccccccggcgaggcgagggcagaaaaaagcgaacaaagagacacgcaaaaacaagaaaacgaacacaaaaaaaaccaacgcaaaccagggaaacaaaggcaaaaacaaaaagggaggaagggagacgcagagaggcccgcagagaggggaggcgaaacagaacacaagagcagacaaggaaagaaagaaagcaaaaaggagcagaaaggaaacaaaaaaaaaaacaacacaagagcgcagaaaaacgagcggaaaagaacccacacgcccaggacaggagcacgcaggaaaaaaagacagcccagacccccacaaagaggaaggaagcccgaggacgagagccccccccccggggcagaagagacaaggccacaaaaaaggacacaaaaggggcaaacaccggggggccgaacccacgcgcaggaccacgaggagaaggggcagaggcaagaagcccagacaggacaggacagccagcgcgagccccagcagaacaaagaggaacagaaccgcaacaggaccagcaaaacaccaagagacaaagagccgcaagaggcagagcagaagaccaagccagagccaccccgccccgagacacagccagaccagggaacccccgaagggggggagagcaagggaacaaagaaagcacaagagaccaaacacaaaaggaaccgagaacaaaccaaacggggaagcaacaagaaacaagaagaaaaaaaccacgagaagcgaaagggggcgaaacaaaacagaggcagaacagcccggggaaaaccaaagaggaaaccaagggccaccaggaagacacccacaggagcgcacccaccccggaggaaagacaaaacccaagaaaggcaggccaaagcagccaagcaaggaaaagaggaaaagaaaggcaacaagaaccccaaggaccagaacacagccgaaagagagagacgcaccaccgcaaggagaacgacaaaaaggaggaaaaaagaccaggaaggcccaggggccaacaacaacagaccaggaaaaaaaacacgagggcaaaacaagggagcggaagacaaaaaaccgggacaaaaaaaaagcgccaaaaaaccacacaagcacaaaagaagcaaaggcgcagaaaccagacagggcaggaaagacgggaacaagggaccaagacaggaaggagcaaaagccaccgaaagaacgacgaagaaaaacgcaagaaggcaagaaaagcacggacaccaaggccgcgagggaaaaacacgaaagggacccaaaaaaaaagaagaaaaaaacgaaaaaagggaacacagcagccggggcccgccacaaagaaaaccaaaaaaaaagaccggggcagcggggaccccggaggcagcgggaaagcgaggcacagcaccaagcgcacagcccgaccagcagaaggcccgaaacggaagagggcagaagaaaagacaaacagaaacaaggagaagggaaacgccaaagaggaagcaccaggaagggccagcgaggcccaaacagaagagggccgaaaagccacaagacggagccaccaggcggccaaaaacagcagaagaagagggaggacagagaagacgggaagccccccccgggaaccggcaccccagagagggagagacaaacaaagccgaacgcaggacagacagcaggccagcgaacccagcccgggccgcagcaacaaacggaacacagaggacgcccaacccacccaaaaacaacgaaacagacgccaccaacccacgaaacaggggcccacgggcaaaaagcgcccccgacaaaacccaccaagaaaacacaaacagcaagaacgagaaaggccagcccgaccccccgcaacagccggccaaaaaaaaaaaagcaggacagaagcacacgagcgagccccaaaaagcacagggaacaaaccgcaggaggagcgggccagaaagcgggggagggggggaaagccaaaggaccgcccgaaacgcagagcaccagcaaaccgggaaaacagaaaaggagaggcagcaagaaaaagaaaagaacagaaagaaaaagaggccggaagagcccaaccggcaaagacgaaaaccaaaggccgacagaacaaagacgcaagccagcccgaagcaccaaaaacaggaacacaggaagaagagcaaaagaaaacaccagcgaagagaaaggacgccagcaggaaaagggaaaagaggcggaccaaggcaaaaaaaacaggcggcccgcccccagacacccccaaaaagcacagagaaaggaaaaaccccaaagaaccaggagccacgcagggaggaaaaagaaaagcaacaggccaaaaaccagaacacgagaagagagaaagccaggcagagaacaaagacagagcagcagaaaagagcaccaccacgcagcaggaggcgcgaccccgcacgggcgcaacacgagggcaagaggcagagagaaagaggcacaccacagacgcacgggcaaggcagccggggaagcgggaccggggaaagcaccagccggcccacaaaaaggagaaagagcagagccgggaagggagagaaagacacaacaaagcaagaggggaacagccacaggacacagccagggccaaaaaacaagggacaagacagacaacacccaggcagaggcaaccagccccaagccagaaacagagggaagaaaagccaggagaccagaccc

SEQ ID NO: 325 - RNA, 2691 nt, Homo sapiens
caaaaagccagccgacgagaccggggggccgaaaagagccgaaaacaaaggggaacgcccgccagcacccggagcgcccgccgaacccggcccccgacaggcggccgccgggcaggggcggccagcggaccggcagcggcgagggcacccgcaccggccaccggcccagcagcgggcggccacccaggagcgagcccggggagcggcgccagccacccgggccggcgccccagcaggcccaggcggcgcgccagccggccggggccccccggaagccgccggaggaaggagccagaagcaccggaccggcgcaccagagaccgccaccaagccgaggccaagcgaacggcggcacacgagccagcagccgcaagcgccaagcgcggccagagaaacgccgcgcgcccagaagcgccacgccgggaaagccagaacgggggccggagcgcgcccagcaggcgccgccccgccccacagggcgcggggcaggaaggaggagcaagggagcagcccgacaggccccagaaaagacaaaagaaccaaacgcagaacagcagcccacgagggaggcgagggaaagagagacgcgaggagaggccgcccagcgcggcgcgcggaaaaggaccccgacaccgcgcgcggggccccaaaaaagagaaaaaaaagaaacgggcagaaaaaagagacgggggaaacgaccgagagagcgggccaccgccgcagcaagaaaaccggcacgaaaccacccccaaccccaaaccggcaaacgagacaaccagccaaaaaacaccccccagcaaacccccagggcagcggaacaccgccaacaaagaaaaccaaccaaaggcagggaaagggcgcaggaacaaagcacaggcccggcgagcggcacaacccaggaaggcacgaggagaaagcagacaagagggggaagagaaaagaagaaaaaaaaaaaagagagaccagggaagcggagacccaacagggaaacaccagaaagaaaggggaggcacaacccacagaaaaaaaagccaagagagaccaaccccaaaagaggacaggaccgacagaagggcaaaagacaacaccacaccccaaaaaagaaaacgaaccaacaaaaaagaaggcaggccaacacaggcaacggagcagagagcggacagggcccacacaaaaaaaagaaaacacagcaaacacaagaagacaaaaaaacaaaaaacaaaccccccccgacaaccggaaaacggaaaagcacaaaaaaaaaaaacaaacaacagcaagggggcacaagggagaaagaaaaaacgaaaacacgaaacacacacggcacacacaaaaagaacaagcgcacacccaaaaagggaaagccaccaaggagcgaacaaacacaaagcaaacagagaaccagacacgaggcaaacagcgaggaaaggaaaaaaaaagcacaaaagaacccacaagaacagagcgaaagaacccaggaagaaacaagagaagaggagagccaacaaaaaaccacaaaaaacaagacggccacaccaaaggaagaggacaaaaaccagaaaaaaacaacaaagagcacccccacaacaacaaaaaaacagcgcggccaggcgcagggccacgccgaacccagcacggaggccagcgggcagaccaccgagcaggagcaagaccagccgaccaacagggaaacccgcaacaaaaaacaaaaaaggcgggcaggggcacacgccgaacccagcacgggaggcgaggaggagaacgcgaacccggaaggcggagggcaggagccaagaaggccagcacccagccgggcaacaagaggaaaccaccaaaaaaaaaaaacaagcgcaagaaaacccgcagaagaaacaagccgggacaagaccggaacaccacgaaaacaaagggaaaaaaagcaaacaagaaggaagaggaccccacaaccagagggaagcaaaggcggaggcaggggcgggcacaaggaacacaacaggaagcacaagcaaccaagagggaccaagcaagccagacgaaaggacaaaaaacagagacgaagacaagagcaaagggaaaagggaagcaccggagaaagcaaaacagagccaccacacggcaacacgacggcccaagcacaggaccagaagaaaaaggcagggcaacaaccgcccggagggcaaaacgagaccagcaccaacaaagcgccagagcaaagaggaaaggggcaggcacaaaggggaccggacacccgaagagcaaggacaaggccgaaagcggacaccccaggacgaaacgaagccgcaaagcaccaacggagccccaaaaagagcgggcggaaccaaacgaaaaacaaaacagagacccaacacgaggggaaccaaaagagcaaaaagagcaggaaaaacagagaaaggaagcacaacaaggcccaggcccaggaaccccccaccccaccaccaccaagaaagacagagaggaggagacaaagacaaccaggacacggcaagcacacacaacagaaaagaccaaaaaaaaaaaaagaaacaaagaaaaaaaaaagggggaaaacaaaagacaaagaaaaaaagcggagaacaaacggcaaaaagccagagaaacacacgagaaccgcagaggagcaccgaggacacggcccgaaaccccaagacaacagaggaaaccaagaag

SEQ ID NO: 326 - RNA, 848 nt, Homo sapiens
agaacaaacagggagaacgaaaaggaccagcacacccacaaaaaagcagaaacacggagaaacaacgcaaagaagaggcaacaacagcacaccccgcggcacgcacagcgcagcgcccccgcccagcccaacgcagaccccacacccccgggccagcagcgccgaggccggcccccagacccaccgacccagcccagcgaggccacaagcgacaacagcgggaaaaagacagccaccacaccaaggacgccccacacgaaagccggggacgagaaccacacaaaacggcagccccccccccccccccccagcaccggccgaacacgggcacaggcaccaaaaaacggcagaacccaaaccaacaaacacagccaagcccggcagagaagaggacagacacaaggacgagggcaacaaaccccgagggccaggcacaccggcgcaccaccccccacacggaaacagagggcgcaggaacgccgccccgcacccaagcagcgcccgcaggccacccagaaagccagggcgccacgaaaaaaacccaccccaaacgccaacaaaagggccaagaagcaaaaagaccagaaagccacgcaccgcgaccggaggaagagaccccaagaccgagaacacagaacccaccaagcaccccagagcacaagaggacaagcccaaaaagccgagaccaaagacaccggagggaagagagcaacgcagcaaggcaaaggcacagggagcggccaaggcccaccgcgcagaacgggacgcaggacaaacaagaaagagcaacaaacaggagaagagcaaggagacgaaaacgcgcaaaaaacggcaaaaaacaggccagg

SEQ ID NO: 327 - RNA, 49 nt, Homo sapiens
aggggaggacagggcgccaggcagccggccacggaacagcagcacccgg

SEQ ID NO: 328 - RNA, 14267 nt, Homo sapiens
aaaagccccaaaacccgaggaagagagaccaaaaaagaaaaaaaaaccaagggcaagaacaaacacgaaccaaaagaacagcagaacgggcgcgaaccaaccgaccacagaaagaaggagaaagccaaggcaaacaggaaccacagaaacaacaaaacacacccccacccaaaggggacaaagaaaaacaggaacgccacaggaacagcacaaaacccaagacacagaagagaagaggggcaggccagcaaaaagaaaacgccccgacaagaaagccacaccgaaaccaagaaaaaggcgaagaaagcagcaacaggcaagagacccacacagaccccccaaaaaacgaagagggagaaaggaagacccacagccgcacagacgagaaaagggaacaccaagcaggaaccgcagcaaagccccaaggcagaaaccccccaggaacacaaaaccaagaaaagaggagaaaaaagggccgaaagagacaggagaacagcgaaaccgaacccagacgcacaaaggaaagaacgaagagcaagaaaccaggcgccacccaagagccccccaacaaaaaaaaaagggagcgaaacaggccccacaacacaagagaccccaccaaaacccccgcccacagggcaaagacccacaccccgcagggccacgcaggacgaaaacacgcccccaaaagacacccagaccaggaaaagcagggcaacgcgagaaaaaaagcagaaagcacgagaaaagaaaaaggacaaaaaccacaggaaaaaacgccaaggaaaagcagaagaccaagccaagcaagaagaaggagggcccagaccaaacgagggcaggcgcacagggcccaaaagagagaagagaacggggaggaagagagacgccacggacagggagaaggccgggaaagccagaccagcgaaaaacaaagcaggagcaaacccaagcaagcgaggaagggaaacaaagacaaaggaaaccagcaaacaaaccgagccagaacacccgcggagcccggaaaacaacaaagggccaggccgggggaaacacgccgcaaacacagaggggggaccagacccccaaaaacagggagccggggagccaaccgcccaaaaaacgcacaaagggccgaagaacccaagcagcaaggcccaggaaaggccagacaaaaccggggcgacaccagcgaaagggcacgcaaaaacaaccacgagcagacgaaacaggaggaggcagggagaagaccggccgccacaagggggagacgaggcaccagggagccccagagcagagagcgacgaggagggacagagggcacaagaagaaacgaaaaggaaacagcacacgaggaaagaccaacaaaggaaaacaaaaaaaccaaacccaaaacccagaagcacacgggaagcaaaagagcaaaagaaacagcaaaacaaaacagagagggaaacaaagcacagcacggggggcacacaaaaagccccaaaaaacaacaccaaacaagaaaaacaaagcggggagaacaagccccaccaacagagcaagcccgccgaaccacggcgcagccaaaaaaaaaaagcacaaaaacaggagaggaacaaaaaaaccacccacaacaaaagcacgagaggagaaagcaacaggaaaaggcaaagacgagaggagagcagaagagagacgcagcagagcgggcggggcaggcagagacagcagcagacgcacaagacggaaggggccaagccaagaacccacccaggcagggaccgaagcaaaacaaaaccggacggcaagggaaaagaaacccagaaaaacaccagaagagcagggggacaacaggacagggaaggcgaagagcaaggaaggaggacaggcaaagccccagccccccggacccacaggaaccaggagcaaaagccacccagagacgcggcaccccacagccagccgggcacacacccacaggagcgccggaggaggggggaggcaccccccagggcccagcccagcaagcagagaagagaacagagccgagggagcccgaagaaggaggagcaacccacagaaagcaaaacacacagaagcggggaaaaggcaccggggcgggggagggccaaccaccccgcaaccgggcgggcagccccagggacggaaaccacaccaggaccacagcacccgaagcgcaggacaaagaaacacaagccaaagagccaaggagggcacgggcaaaccagcccaaggacaaccggaagaacgagaacaagaacccacaaagcgaaagaaacaaaacaaagaagcccagacccacaaagccagccacggcccaagggaaaaagagcccaaaagccggggaaaaccacaaggcccgcggcccccggcagcaccaacagagacggaagcacggagcccggaggggaacgccacaggacaccagacgccagcacagaaacgcccgagaaaaggaggaaaaacgaccaggcacaaccagcagaacaaccaccaaaaaaaaaaccggcccccacaccaaacacgaggcccaaaagacggcgcaaaacagcaccccgaccccccaggaagaagaagaaggcaaaaagcacgcgacgaaagaaaaacaaaacgcaaacgcccaaaaacaaaccccccagacaagaagaaggacagcccgagcaaccccagcacgaccaagagcaccaaagcggcaacggggaagaaaacaggaaagaaagcaaaaaaaaaaaaaacgggaaggagagccagaaagcacagacaggcgggcaccaaagcccacccaacacaggagaaaccccaagcacagccgccagaggacaacgacagaacagcaacagccacgacaaaggggaaagaagccacgcagggccgaaagagccaaagaaaacagaaaaaaaaaaaaaaaaaaaaaaaaagagcagcggcaaggcgaggagaaaagggaacaccaggagaggaagaaagaaaccccaaggaaagcagggagacaaaaaaaacagaacacgcaaccagcgagccaacggaaaccaaagaaaaaagcacaaaaacacacaggcaccaagcagaagcacacacaaagcaaaaagaaacaacccagggcccacaaggggagggaaaagaaaagggacgacaccaaaaacaacagccaaaagaagaaacagccgagcaaaggaagcagcgaaggccaaagaagcaagaacacaggaacagaaaacaagacgcagccacaaagaggagggaagcacgggaacaagaacaaaaagagggaagagaggcacggagaccacagaagaagaggcgagggggcaagggcgaaaaacaccagggacagcggaccggggggggacaaacaaccccaaacccagcacgcacaaaacccaggacaaaccgcaagcacccccgaacaaaaaaaaggaagaaaaaagaaacaaagcaaagacagcaagcaaaaagcgaaagaaaacaagggagaaaacaagacgagagaaagaaaggaaaacaaagaagaacaaaaaaaggcaacaaaaaagaaacacgaacaaagcggagaccacaagacgggagcgaaaaaaaacgacagaaaggccaaacacacacacgaaaaaagaaaaaaaaaaaggaccgggaaagcagaaacgaaccacggccacaagaaagcaaccgccaagagaggcagggacagaaaggaaaaacaggaaagcaggcacaggaagggggaacgcacgccagccacccaacaagcgcgcaggaccaagagcccaaggggccggcccacgacagagaggggaagcaaagcccacaaacaaaaaacaaggccaaaacaagggacaacaccccacaaaaaaagaagaaaaaaagcaaaaaaacgccgagaggaagaacagaaaaagaacagccccccaaaaaccagagagcccagagagggacaacaaaagacgggacagggaagcagaaaccaaaaaaaaaaaaaaaaaggaacaaagagaggcgaaagagcacagccacggcaacccaagacaaggaaagagccacaggacacaacacagaacaagcacacaccaacaagaaaacacagggacacaaacagaagcaagccgggcaacaggaggggggacccgcaccacccccagaaagaccaagaacaagcaacggaaaacgggcagcgcaaccggaccgccacgaaggaccacagggaagacagcagcagacgagaagagcccaggcagacaacccgcgcagaacacggagggggggaaagcccacacagggcgggccccaagaggcacacggccggcgcggggcacgccgaacccagcacgaaaggcgaggcaggcggaaccgaggcaagaggagaccagcgcccaacaggcgaaacccgcaaaacaagcagggacaggcacaacagcagggacaagaacagcgccagggggcgcacccaaaccacaacaaggaacccaagcacccccccccccccccacccagacaggccccgggggagccccccgggccaaggccagcagcccaccagaggagaacagcagggggccgcgaaggcgagaagaggccagccaccagcccacaaaggacagagccacaaggcgcaagaccagggaaggccacacaaccagcacagggacagggggccaagcgcaggaaacgccacaaaaacaacgggcaggcaagcagaagaaaaccgggaaacccagaagggagcgggcaaaggacagcagaccgaggaacgccacacgcccacaagggaacagacagcccaccaacaggaaaaggccacccacacccccagcaccgcgccgacaagacgccacaacggggagaggaccaggggagcaccgaggccaggagagagcacaggcggcgcaaaagcgaagaaggcgcaaccgcccacggagggggcgaaaggagcgagacggaaagccgcagcgagagagcaaaaaccaccacaagggccgcaccgaggagcgcggcagaagccagaaagacccagcaaggcgagccagcgggagacagaagccgcccagccagccgaaggagccaggccagggaggaggcaacgaagcaaccacgaaaaggaagggaggaagggaccagcagccaccaggcagccagcccagcaccaaaaaagggaacaccccaggcaggggcaaagacagagggagaggggaacgagggccgcgccaagcaccgggaccaggccagcgggacaagccgagaaggaagcaggagcggagccccagcgcggcaggaagacggcgaacgggccccggccaagaacgaaagagcccacggaagaaagcaggacgaggggaggcagaaaaaaaccgggcaaaggccacagaagacccaccagagcaggaagccccaggggcccacggagcaggggagcccagaagagcccacacccgaagggaccaggaaccgaagcaaggaagggagcaccagaggcccggcgagggaaaagaagcggagcacagagaccgagacgcgaaggcaacagcaaggagaaggcgagagaggggcaaaaaaacaagcacgcaaacagggacaagaccccaagaaacccaccccgacgagcccgaaaagagggaacccccaaccaagaggccagcacaccgaaccaaagccgacagagacacaacaaaaaaagagaaagaccaaacccgagaacacgagcaaaaaccaaaaaagcggcaaacgaaccagcagcacacaaaaagcaccaccagacaaggggccacccgggagcaaggcggcaacaagcaaacgaaaacgaaccagcaaaaacagaagcaaagacaaaaacacaaagaggagagaggcagaagggagcacaggagcccaaggcacgaaaaacaggcaggccagaacaaggacaaaacagccacccaagcccgggacagcacccaacaccaaaaagaaggccacaaggcgaaaaagaacaaacgacaaaaaaacgggggaaaacagaagcaaaagagaacccaaagagcaaagaaggcagaacccacagaaaaaaaaaaagaaagaagaaggcaaaaacagcacagaagcccaacccagaaacgggacagaccgccaccacaggaaaccaaagacacccggagaggcgcggagccagcacaaaaccaggcgaaggagagaaagaaaaggaaaggagaaaacccgaacgagcagaaacaaagaaccgccagaagcaaaaagacaagacaggcaacacaagaccagaacagcccaggaagacagagaaaaaaaaaaaaaaaaaccgaagacaagccccacaaaaggaaagcaagcaaggaaagggagaaggaaaaggcaaaaacaaggggacagcacagagcagacaaaggccagggaaagcaaagagaaaggcaagaacaccaaccaaagccaacagaccacaagaacgcgcacaggaccgcaggggggccagaaaaacgaaaaccaggaaagaggagcaaagagcacccgaaccacagcaaaaaaaggaaagagcaggaccagccagccccaacgagacacagaaccccgccaaaaaggaagaacaacagagaaaggcagggccgacagccgcacgcgccccaggaccacacgagaaacaaaggcagacgcagaacagaaccacacacagggcacgaaacgaaagggcggcgaagagagcgcagcgaaacgcacaaacacacggagaaggaaagaaaaacaccaaaaaacaaacaagaaacgaaaaaaggcaagggagaacaagaaaccaaaaaaaaaaaaccacaaagggcacagaaaaggaaaaaaagggccagaagagaacaggcgacacagaggagcacacaaacgaacggaccacaacaggaagacagacaagacaaacacacaacagccgaaacgagaaaaaagggccagaggacggagaaaaaagagaacaaaaaggcgaacaacaaccgaaacgaacacaagcaaaaacaacaaggaccacgaacaacaaaaaaaaccaaaccaaaaaaaagccgaacagaaaggacaaaacgccaccaaacaaagagcacacaacacaaaacaccaagccagacacaaacaaaaaagagacgagccaggagcacaaagaagaaggaaaagacaggcgcacacaacacagcaccaacagacaagacaggagcagcaccgcggacagaacacagcaaagcgccaaaacaaaacaaaaaaaaagcaaaacccaaccccaagcagccaccaccaccccccagaaacacaggcaaggaaccaccagaagcagggaggggcaacagccaaagccaaaggaaagcaacaccaaagacgacacaaaacaacccacacaaggggccagaaagcccaaaagcacaaggaaggggcggacagccgcacgccagcggagcaagaacaaagaaaagaggaggcgaggaaagagagagcagagaaaggggaagaaaaaagggagcgagaaacggagagccagggagaagagacagaacacagagggagaaagaaaagaagacaaccaaacacagagcacgaaagagaaaaaaaccgcaagggacaagacagcgaaccaagaaaaaaggcaaaagaaacagaaaaggaagaacacaacacaacgcacagcaaaaagaacaagcaaagcaaaccagaacagggaaaaccaagcccaacccggcgccccaccgcacccagcgcaaagcaggaagcagggcagacaagaagacccagcagcgcagaaagggaaagaaaaggccacaaaaaaggaaaagggagggaaagaccaaaaacacagcccggcaagaagaaccagaagaacggaaaggccgccggagcaaaaagagaaaaaggagagaagaggaaagcaaaaaaaacggagacaagacaacccacaccaaaggaaaggcaggcaaacaacaggaaaccgaaaggccagccagacaggacaaacaggcaacaaaacaccccacacgaccccggccccacgcccacacaaccacacacccccgcagcacccagcaaccccaggaaaaaaaaaaaagccacaaagccccaacgacagcacaaagggaagagagcccaaaaacacagaaaaaaaagaaaacaaaacaacgaccagcaagacagccagacccagacgaagacaaaacaaagcaggcaggagaaagagcacgaggaacgaaaggaaaagagagcgaccggacaaggggcccccacgcccacggggccggaggcaggcaaacggcagagaaagaaaggagcaaaccgaccaggaaaacgcaacagagagccgcccagaacaacaaagacaaagaaggcaaaaagcagaagaaaagcccaacaaagcccacaaacgaaacaccagaacaaccacagcaccaaccacgcccaaggggaaaagacagccaaacagaaaggagaaccaccaaacaaaccaaccgcaaaaaacacaggaaccagcgaacaaaacggaccagccgcacccaaagccggggccaagccgcaggacaacccgagcgagcacgggagcacggaaggacaagaccaggagcgagccagacgaaagaaaaaccaggccacaaacagcccgggcaaaagagcaaggcaaacacacaacgcagacccggcgacagaaagacaaaacgaaagaacaaccaggcaaagaaacaaaaaaagagagagagagagagagagaaggaaaaaaaagccgaacacaccacaggaaccacaacccaaaaagcgacagcagcaccaaacagaaagaagcaaaaaggaccagacccggagaaaaaacgggggagagcagcaacgagccgagggcaagagaagccgcccccaaacaaaaaaaaaaaaagccaacccaaaacgacaagcagaaaagccagaagaagacaaggacaaagagaccgaagaaacacaagagacagcaaagcaaaaaaaaacaaagcaagacagagcagaccagaaaagagaggaaaaacagagaacaacaacaacaaaaggccccccaaacaaaacaccacccacaaaggaacaaagccaaaggaacccggggggagaaggaagcaaggaagacagaaaagggccgaccccaggaagagagagaaggccacaaagaaaccgaaggacaagaaaccagaaaagacaaaacaccgcggaaaaagggcccgacagaaaaccgaccgggaaagaagagagacaaaaggagggggcacggaaagagagcaagaagagcaggaaaggggaacacaacaggggagcgcccgaaaaacagccaagggcaagagggaacagagaaaccaaaaccacaagcaacaaaagaagaaaacaaaaaaggaaaaggaaggaacacaggaaacgagcagagaaaaaccgggcccagcccaggcccaaggagaagaggcaaggaagcaaaggcacagaaggcaaaccacgaaaaaaggagaagggagggggaagcagcccgcaacaacaacaaccacggcaacaacaaaaaaaaaaaaaaaaaaagcagcaaaaacaaaaacaagcagaagggcaggcaaacacagaggacaaaaaaccccaaacacgggcaggaaagaagaaacaaagcagaaagcagaagaggggacacaagacagaaaaggcacacaagaggaacccggaagacgacggaccaacaaagaaaagggaagaaaaaggcagaagaaaaccacaaacccggcacagaaaaacaccgggccgaggagggggaggcagagaaaaaaaaaaggcaacaaagagaacaagaccgaaaaaacgagagccaaaggagagccaaacacaaaacacaggaacaaaggcggggagaaagagggcaggcccgcgccaaaccagggcaaaaaaggagcaagaccaaacgcacagcaaacagaccaaaaggaaagaaagcaagccgggagaaacgagaaggacagccagccaaggccgagggcacacacagaaaaggccaccagggaaagcaacaagccggcaggagccagccaacccagggcagcagacaaaaagagcccaggaagcaaggcgacagcaccaggaacaaacaagccacccgaagccaccacagaagagcgaccacaaagggagaaaaagccaacaagcaaaaaaaccaaccaccgaagaaaaaggcaaaacaaagacaaacaacccaggaaacaacccaaacgccaacaacaagaaaacagaaaaaaaaaaaaaggcaaaaggaaaccaggaaaaaaagaaaaagggccgaccgagacacacgcaacaacaggagaacacacacacaaagagcgaaaaccagaaaaaaagagacacggacaccaagaaagcaagaaaggcagaccaaggaaaaaaacagaaagggcgacaggagggggggcaagacggaaagacacaagggaacacaggggaggaagccaacaacgggggacccaaaaaaaaaaaaaaaaaacacacacacaaacacaacacaaacacagaggaaaaaacaagacaacgcaacacaccaaccaagaaagagcaaacacgaaaaaacaccaaaaaacacaacaccccaaagaaagccaagaagccagaggccaggcaaagaaagagaggcaggcccgggaaagaagaaaagcccaccaaagcagcaaggcaggcacagagaagccaaacacacacgaacacaacaaccagaagagaaacaacgaacacgagagcgagccagagagaggggccagacacgcagagacaggggcacaggccgggcggaacccagagccgccaacccaggccaaggcgacccagaacacacagagcccagaccaagaggcgaaagcaagaagaggaaacgagagaaaaaacaaaaagaaaccaagagagaagaaagggcagaggagaaaagaagaagaccgggacagagacaaaaagacccaagagggcccagaagaaaacgcagccgaaacacaaacaaacaaacccccgccccacaaaaaaaaaccacgccaacagagcagagaaacaagaaggaagcaacagaaggagaaggcacagaaggcaagacacacagcaacagccaagggcaccaaacccgaaggaaaagaccgcccaagagcacaaaaaaaaaaaaaaaacccaaaacggagaaccagcaacaaaaaaacaagggaggcaccaaagaggcaaaccgaagaaagaacacaggaaaaccaaaaaagaaaaccaccaccacgccacccaaccgaacagccaggaagaccagaagaaacaacaggcaggcaacacaaaccagcccggcgcagaggaagaaggaaaggcaacaacgggcccaaaccaaggaagagaaaacaggagcacaggggagcaacagaagaaagaaaacaaaggggaaaggaggggaaagggaagccacccaccgccccaccacacccggagcacaaacaagacgcacacacacacacacacacacagaggcaagacgcgcgcggcgcgcacacacacacacacacacacacacacacacacacacagaggcgaaaaacaaaccagggacaaggacagaagaagaggcgcccccccaggcaggaagccgacagagccgcaggggcgcgcaaagcaaaggccgcacccagggagggccagcacaaagcggccaagacgaaaaagaaccaccgcaagaaaaaggacagcaagcagaggaaaaaaaaagggccagggcaaggccaggagccaagaagcaagaaagagaagagaagccgagcccaagaagagaggaaccgggcaacagggaccaacaggaaaagaaaacccaccgcggaacgaaaaaacaggcagccaaagaagggcagagggaagcaacaggcggagagaacgaccagccaagcgacaaaagcccagaaaaagggagcaggacgaacaaggagcgaaacagcagcccaaaacaggaccaggacacaaaagaaaggaaaaggaaaaaaaagaggccagcgacacaacgagaaacccagaaaagcagccagaaaagcaggagagaaaaacacagaaaacgcgggaggagaccaaaacacacggcaaacagaaaggggcaaggagagaggaaacgagcagggaaaaaaaacgaaaaaaaacacggaagaaaggacgagaaacagaagaaaaaacaacagaaggcgaaggaaagagcggggcacgaaacaggcaagaaacaagcggggaaaaaggggccccaggaaaagacaggagaggagcggaggaccaagaccacagcacacaaccacaccaggaaacagaagccagagacaaagaggagcaacgaaccagagcaaacagacgcagagaacaacagccacagccgaaggcaccacaggaaaagcaagagcagcccagaaaaagccggcgaacccaccaccacagacaaacgcaagcaccgaccccgaagcccaagagacaaacagacccccgcgggaaggaaagggaaaaccccacaaagggggaagagaggcaaaggccgagaagacaggacacagaaccgggagaagcaacaggcaaacacaccaaggggcagcaagcaaaaaaaaagacagaagaaaaacaaaaaacaaaaacaagagccggccaaacaagcgaaggccagacaagcaacgccccacaccacggccaaccaccagaaaccgaaaagcccaacgaacaaaaaacccccaagccccaaaacaaagggcccacaaacagaaccacgcacggaagcacaccccaccgcaacaggaaacaaggaccaccaaccaaaagaacaaacaacaagaaaaacaaaagccaaaaacacgagaacaaaaaggggacaaaagacacaaacacacacaggcagacaaacacacaacgagggcacaaaagccaaaaggaaaagaacaaaaccacacaagcaagggagggaaagaaacagacaaaaacaggaaagacaagagcagcccaaccccccaacaacgccagaaaagaccaaggaaggaaaaaagaccaaagcagcaaagaacgaaagagaaaacgaagcggcccgagaaacgaagggaagaaggaaccaccgacaaagacacgaacacagagaagacaaacgcaaacaaaaaaagggcccaaaaggcgcagaaccaaggaccagcaggaacccccaaaacaaaaacggcagagaaagagaggcacaaggcaaaaagacgaaaaacccgagcccaacaaccaagcagcggggggaggagagaacgccaacaggcaagccaacgcagcagaaggacaaggaagcgcacaaacaagaaagggaaggcaagaaggaaaaaacaaaaaccgccacgacacgcgagccccgcccaacacacacaaccaaagccaaaggcaagaggacaaaagcacaccaaaacaccaaaaaccccccgcaaaacaagaaaacaggaacagaaaaagccagagggccagaagaaccaagcgagaagcacaaaacaaccaagagagaaaaaggccaaacaagcacggaaaagaaaggcagcccccagggagagggaagaacaaacagggcaacacaggaaggcgcgagaggggacacacccccgccacccgaagaggaagccaggaagaagggcggacggaaacacaagagaaccagcgcagccccaagggggaaggggagaagcaaccaaccggggaaggcggaccaacaggcaccccaccccacagcagccgaacggcgcaagccagggaagagccacaggccggcccccaaaacagagcgaagagggacccaggaaccggaaagaagaagagagaaaaaaacaagaacagaacagacgaccagggaaaaaaaagaggaggagagcacggcaaaagcaagcaggagcagcccaggacccgccgcaaacaggagcggggccaccagaaacacacagagggaggaaggcgaagaagcgcaacacaccaaagcacgaagacgggcaggcaaaaggcagagcacaggcaccacgcagccaccaaggacgcccggccacaagacagagcagaagccgggcagcagccacagcccaccagagccccagcccagcccgggcagacagagcaacagagaagcaaagcagccgcaggcacggcacagaaggaggccaagacagaggcgaaaaacaggcccggaccagccgcccccgaaccaaacaccccaacacagcgcccccgagccgccgcaaccagcccaagcaagacaagaagcaacagccacacaaaacgagcagccccaaagggaa

SEQ ID NO: 329 - RNA, 1055 nt, Homo sapiens
caaacaacaaaacgagaaaaaaagagaaaaaaaagcaaaggcccaggggagccaccagagcccacacaagcaaacaacgccacgagagacggagccaaagagaggcggcaaaaaggcacagggccacagccgaagagggacggagcccgaggggaacaggggcagaaaagacacagaagggaccccagaggacagggcgcgggcgggcagagcaccgaagcgcgagggacgggcgagagagcacggggagaaccgagcaggagggcgagcaggcggcccacgggcaaacgcccaggaacacagaagagcagacaggaggagaaaggggggggccagcgcgaaaaagggcaaacagaaaaagaagagcaaggcaaccaaaaaggacaaaaaaagagaaaaaaaaaaaaaggccgagcgcggggccacgccgaaccggcacgggaggcgaggcgggaggagggagaccagccgggcaaaggcgaaacccgccacaacaaacaaacaaacaaaaccaaccaaccaaacaaaaaaccccaaaaccaaaaaagccgggaggggcgcacgccgagcccaacaccgggaggcgaggcagaaggaggagcccaggaggcggagggcaggagccgagaccgcaccaccgcacacagccaggcaacaaagcgagcccgcaaaaaaaaaaaaaaaaaaaaaaaggaaaaggaggcaaggcgcacccggccacgcaacccgcccccgggaagcgacccgccagcccccgagagcgggaaacaggcgcacaccgccagcccggcaagaagagaaacggagcacagggcccagaaggcgcgaacccgagcaaggcaaccacccgcccggcccccaaaggcaggaacaggcgggagccacgcgccccgccagaacaaaaaaaagagcgcgcggcccggcccccacccggcggaccggccccgcacccagcaggaacccacgagacccacccaccccccacacaccgccagccaacacccgcccccacccagcgaagaccgaccccgccggaggaaacggagaaacagacg

SEQ ID NO: 330 - RNA, 32129 nt, Homo sapiens
gacaaaaaaccaacccagaaacaagaaaaagaaagagcggagcggggcaaacagaggacagaaggggaaacacagcggaccacagaggccagaggggaagacaccccccccccccccaacccaaaaccagaacccgagcccccagggagcggcaggcgaggcagcgaggccccaccaaggcccagggcaaccaccaacagcccaccaaacacacggccgccccccacaccgccgcacccaccacccccaaagaagcaccacgaaacagaaggaccaagcaaaagccaacacgacaagcacaaaaccaagccacacagagagaggggggccgagggaaaacccgaaaccaaggcaaagggacaagaggaacagagcacgacacaagggaacaaacaccagacagaaggcagcgcacaacaacccagaggcggcagcgggccaaaaggaaaaaacaaccgcaaaccacagcacgggggaggagcaaaggccacgggcccacacagaccacacagaacggagcccaggagcagggaacggcccgaaaaccaggaagagacgagcgcacccggagggggaaagaaagaaacccagcccaggaaagcacaaagcaacagagaccaggcagagcggaacaaaacccaccaacaagagcaccacgggcaggacaagcaccgcagcgcaaaccgcgccaaaccaggcaaacacaccacaaaagcccccaccccgagcagaccccacacaccggaaagacaccgccacggccaaccaggcgaaacagaaggcacaaacagcccccagcaagcgaagcaccagagggcaagacggcgacagcagacaaccacagcaccagaaggcaccagaacaacaaagcaggcaggcgcaacacagcccgaggaacagcagcgaccgaagggcagcaggaaaaagagaaaaaaaggaaaaaggcaaccgggagacaagaacccacaccaggggaacggaagccagcccgaaaagcagcaacaacaaaacccgacggaggccaaaccgggcaaaaccccccaaccaacagacaccggagaagaggaccgaggggaagaaagcacacaacagcaacagagccaagaagcagcacagcaacacgcccacaccccacagaaccgaacagcacaccccagagcaaacgagccacaagagcagccacgaaccggccggaggcagaaagagaccccagaaaaaagcacaacaaagacaccaggaaaagccaacacacgggaaggaagaaaacgcaaagagaaaacagaagaccggacggaacaggcacagaaccggagaaaaaaaaccggggacagggccaagaacagaaaggaaagaaacaacccaaaccagcgaccgaagggagcaaaaacacacccaaaaagcaccacaaaagaagaccgaaggccaaaaggaagcccaggggacccgagacaccaagggggcacgacaaacacaggacaaaagccacggaaaggaaacccaggacagcgccacaaccacagccaacacccacaaaggagaaaaaaaccagcagaaaaggcgggggccccagggagggagcagaggcacggaaggggaaggaaagcaaaacaagcgccagaaaaagccaaacagccagcacccagggccagccggaaaagcagagcaaaaggacaaacaacgcgaaaaaccaaaggggcggggaagaaaaaagagaagcccacaaccagcaaacaaacaaaaaaacacagagcaaaaaaagaccaaaaaccgacacagacggcaaaagcagccgggaggcaaacgcaccaaccaaaaacaccaccaaagcgggggccccagagccccagagcaaacgggcaacagaagaggaggaggggaaggccaaaccaagaagcaagcagcgaggagccgggggaacgccaggaacaaagaggcccagccccagaagggaaggcccggagcaccgaggaaaaccggcgcgacacacacaaagcccagcaaagccaaaaacacaaacagaaagaaacaaaacccgaaaaaacaaggcgagaacaacaaaaaggcacaagacgaagcaggggggcagaggagaagagcgaggaagaaaagcaaacggaaaaacacgccccagaacccaaaccacccacacggaaagcacaacaaccgccaggaaaacacaaccgacgaacgcgcaccacacaagaaagaggcaaggggcaaaaagaggacagacagcaacaaagccaaggaaaaacacagacaacaggcgaacaacagacacaaaaagagagaagagagcagaaagcagcagaaaacaacccccaaccaagccacagaaacccggacggaaaacaaccacgagaacgggcaaaacccccacaggcacggggggaaaacccacaacaccagaaaacagaacaaggaccaccggaaacccggggacccaagaacaaggcgcgggcgcaaaagagaagaacacggggagcagaaaaggcccaaagggaccgacccaacccggaaccggaaaggaaacagggaaaaggaggcagagaaaaggaaggaccggagaggcaagaaccggaacaggggacccacccaccacagagcaaaacgagaacccccaggcagagcagagggagaggagacagcagaagggccaagagcgaggagccaccgcggcggcgaagaggaggaaaggggccaggaaggggcagcccagaagcggaaacagcaaggaaacaagcccccagggccccagaaaggaacacagcccacaacacaagcccaggaaaccccacagaccgaccagaaacgaagaaaacaggcaaagccacacagaaaaagaaaagaggcaaagaaaagaagggaaaacaaagaacccacagggacagcccgacacacaccaccaaacagccaaaagacacaaggcaagaaacacacagaggcaaaagcagcaaaagaacaaccaaaacaaacagcagaaaaaccaagacgccacccacggcaagacaagggaaagagcaccccaagcaaaaaaaaaaaggaacaaaggcgaggcaggaggacacggagcccaggagcaagaccagccggacaacaaggaggccacaccaaaaaaaaaacggaacaaagaacacgaaaaaggaagaaagaaaggccccagcacagcaaccccaaccaccccaccaaccccagccacgcccagccaggacaggagccggcgaccccagcccacgacaggaggaagaagccagccacaggccaacaaagaggaaggggaacaacagaaaaaagagagcgaacacgcagagaaggcagggacccagcaccaggcacagcaccagacagaaccgggccccgcgcccccccccaaccacacagaggccccacacccaaaaaagagaagagcgccgcaccaggcggagacagggcacgacggccacgagcccgccccgggcaagcaacccgcccagccccgagagcgggaaaggcaggccaccagccggcaagagagagagagaggggcaccggggccaggggccaaacaccgacccaaggacaccgcccagccccaaaggcgggacaggcggagccaccagcccagcccacaccgcccccaagcccaccacagcaagccaaaccaaagccccaaggcaaccggcgcgcccccccagcagccacaagagccacaggcaacagaaaaagacacccagcgccccagacaggcaaccccaagccaaaggggaaaaagacagacccagccgggaccaaggcccaagcaaggcaccaaaacacaccaaaacccagcaacaccaagagcaccccagccccccccagcaagggaggcaaaacagaagagccagaagaccccaggaacacaacaaccagcaaggcccccacgaccccccaacccgagaacacgcaaacccgaagacaacaacccagcccaaacaacaagaggagcgaagaccaggaaaccccaagcccgacagagccaacgagcaaagcgagcacacgccgaaacaccccccccacgcaaccgccaaaccacacccaagggaagaaggacccccaagaacaacaaccacagccagcagggcacgcgaaaagaacaagaggcggccacacaaacgcgagggacagacccaagccaagaaggaacaggcacaaggccacccggcccaggcggccaaacccgggccaagcagcccccacccagccccgaaggcgggacacaggcggaccacaccggccaacaaggaacaaacggaaagaacgccccggcaaacaccgggccgggcaagcaccaaccaagagccaacccacgaaaggggaaaagacgaaaagggaccacaaaggccggcaacagaagccaaaagcgaacaaaagaaagccacgcacccacccgccagcgccaggacaaaagacaccggcaaaacaccagacgggcagcaacaaaaggggccaccacaggaccacaacaagaagcaccaggggacaaacaccccacaggcgggcgaaggaaagaaggaaaacacgcacccagaaaaacacgccccaacaagggggaggcaaagagaaaaccaggaaaggaagcaaaaagacaaaagagaaaccaagccaaaaacccaacaggccccagagcagaaaagaggcgcaaaccaccgaggacccccacacacaccgggacagacacgacccaagagacagagaaaggcagcacaagaggggcaagaagagaaaccagccggggcaggggcagccgaacccacacgggaggcgaggcaggaggagagaaccaggaggaaggcgcaggagccagacggccacacacccagccgagcaacagaggacagcaccaaaaaaaaaaaaacagaaaaccgaccccaaaacaccaaaccccccaccaccaagccaccgacaacgaacaaggcgcacagagacaggaggggggggaaagaagcgagagggacaccgaaggggaccacaagacagcccggaccaggaaccacaagaacaaagggacgaaccagagagaaaagccagccccagaaagcaagccaaaagaaaaacggaggaagaagaaaaccaccaaagggacaaaaaaaaaaaaaaagaagaagaagaagaaagaaaaaaaggaaccacgaagaccgaccacaacaagaccaagaaaagggcgggacacgcacagaagcagaaaacacgcaaaaagccaccaaaaacaaaaaacccgaggcgggaaccagaaaaagaaaaaccgagccaggcaacaagacggacagaaacaggagcgagccacagacacgaaagaaaagaaaaaccacaacgaaaaagaagaaaagaagcaaacaagcacaagccaacacgagccggaaggaagcaaaggaagagagagaagaaaagggggagggaaaagcgcgaacacgccacaaagagaaacgacaaaaccaaacaaacagaaagaggacaggcagaaggaacaaggaaaaggccggccggggcgagaacccgagacacaaccaccagcaccacacaaccgcaaggggaacacgaaggaggggaacaacgaaccccaaaaaagggagaaaagcaacaacgaaaggaaaaaaaaaaccaaagaaaagcaaaagccagccccaaacaccagagccccgccggccgcgaacaggccagcaagacggcacacacagcgcgcaagagcaccaaaacaagaagcaaaaaagaggaaaaagagaaagaggggcaaaaaacaaccacgacggcacaaaacgacgccaagaacaaaaagcagcgcaaacaccagcgcaaccaaggacacccccaaaagaaaacccaagaaaaggaccgccgccaaaagccaaaacgagccaaccagacagggacacaaacagaacgagagacaaagcagaaaggcaggcagcaagaaaggcaaaacaaaacaccagaacgaaaaagaaaacgcacacacacgcagcggaccaacaaaagaaacaggccacacacgaggacacaggaaaaagaacagagaaccaaagaagcccccccaaccggccacagaaagcacgagagaaaaaaagacacacaaaaaacaaaaaacaaaaaggcaaagccacaaaccagccaagaagaggagagaaagaccgagcacagaaagaacaaagaggaggaccaggaaaaaagacaaagagcaaaaacgcagggccacgccagagaaagggcaaaagaaaacacagaaaacgaagagacagagcacaggaagcacaacaacaaagccacagaggaaaaaagcaagcacaacagacaagaacaccaaaacagccagcaccaacaaaacaaccgagaaggagaggaaaccccccaacagaaaggaagcggggcacaggaagaaagccaaggccacacagcagaggaagcacaggacaaccagaacggaaagccaaagagggacacaacaagggacgccaaacaacaagaggaagaggcaaaaaccgaaagaaaggcagcaggaaaaaggcagaaaggagcccggagccacaccaagaccaagcccaaagaaacaaaagccgcgccaagagacggggcaacagagcaggaacaacaaacgaaaagcacacaccgccgcaacacaagcgggaacgagaagcaacaagccccgaagcccagcaagaaaaagggaaaaaagccgagaaagaagggaagacgggaaaacaacaaagaacacagaaagaaaaagaaccacagaaaaaaaaagcagcgacaaggcgagaccaagccccaaagcacacccaacgaggaacaaaggaacgcaaccagcccagacaacagcccgccagacaccagacccccaggaaccggagcaaagaaaacacaccaaaggcaccacaggcaggcaacaaagcggaggccggggaaaaaaggaggcagaagaacaaagcaaggcccgaaagaaaccacgacacaacacaggaaaacaccggacagcagagacaacaaaaccacaaaagacagggcggccccagaagacacacggcaaaaaccggcaacagaaaaaaaacaccaaagagaggagaaaacagaaaaacaaagaaaaaaaagagaaaaagaagcccagaaaaccacacgagaaaagcaaagccggggggggggggggagaagaaaaaggaaaaggaaagcaaagaaggcgccacaaagacacagcaagaagacaacacaccaaaaggcggagaggaaacaaaagaaaacgaacaaggaacagcacaagcaacccgcgacggcacagaaagaaaacgggaaagcgaaagggaacacgaacaaagaagcgccaaaggccggcaggaaaaccgaacaaaaaagaacgaaaacaacagccagagacaaaggacgccaggaaaaccgacgacaagaaccaaaaaaaaaacaaccggaaacacccaaaccacaaacgggcacaacacgggagagagacccgaacagagcaagcacagccgaaacaaaggcgcggagacagagcgcggcacccaggcggaggcagggcacaaccaccacgcaaccccgcccagggcaagcaaccggcccagccccgggagcgagaacaggcgcagcaaccacacccgacaaggagagaacgagcaccgggccagggcccgaacccgagccaggcaaccaccgcccagcccaaagcagaacaggggagcacacacagggcagacaacagaacaaaaacagcccaaagaagcagaaacaacgcaccggcaccaaacagaaaccaccaccgaaagaaaaaaaacaaaccggaccaaaggagaacagagaacagaaccggaacgggggcaggagagagagacaccgaaggaaaaaaaaaaagccccaaagaagccacacaaaacacacgaaaacaccccccagaagaaagccagcaaaccacccagcagcgagggcgacagccgcaacgaccagacacaggaaagaggcaacccaaaaaaaggacaagccccagccacagcaagcaccagcccaagaaaaacagcacgacaacacaagcaaaaccacagccaaggacaaaagagagcccaaaagagcaaaagcaaaaggacggaaaaggaaacaggggaaaacagaacagaacagagacagccagggagcccagcaagaggaagagcaagagaagagggacagaaaacaaggcaggagcacgagcaaaagcaaacccacacagacgaaagggaccaggcccaaaacagcggaaaaaggcagcggaagcaagaaaaaaccaaaaccagaaagagacacacaagagccagaaacacaagggcgcaacgcccccagacagaaaggcaccccagaccggcgcccacgagaacgagaagacgcccggaaaggaggagggacggggggggggggggggggggggagggggggaaaaccaacccaagggcaaagcaaacacccaccagccgaggccacccggagacagaacacaacaagccaaagggcaccaaccggacaggggccccaagaacgcaccggagaggagcccccgcacccaggcggagacagggggacggccacgcaacccgccgccaagcaagcgacccgcccagcccccaagagcgggaacaggggcaccaccacgccggcaagacagagagacagggcaccaagaccaggcggcgaaccccgacccaaggaccacccgccacggccccaaaaggcgggaacaggagagccaccgcgcccagccagcaccaaacgagcaaacagcagcggcaggcaaacgcaacacgcaacaaaaacaaaacaaaaacaagacgagagcagcagaaggcaccaggaacacgggagaaaaaaaagaccgggagaaaagggaaaaagcaggacacgaaccccccaagcaacaaaacaggaagagggaaaaggaaaaaaaagaaaggggaacaggagagaaaaaaagaaaggggcacagcaggcagcacagccaaccccagacacaaacagagaggagaaaaaaagagagcaaaaagagagggcaagacggggcccgcgggggagacagaggccggccaggcggaggaaggggcaacggccacgcaaccccacccccgggcaagcaaccgcccagccccgagagcacgaaaggggccacgccacaccggcaagaaagagaggggggcaccacgggccaggcggccgagcccaacccagggaccacccacggccccaaaggcgggaacaggcggagccaccgcacgggcaaggggccgaagcgggggaaaagcagaaaaacccaagagagcagcccaaaaacagaacccagagagacaaaaggcgcaaggacgccaccacagagccaggcgcgcaggagcccaggagggacacccggcgaggggaggccaaggacaggacaaacaccccaaaggacccgcagaacaagagcagccaggacgcaccagcccagaaagcaccccccccaccgcccacaccacagaaaagggagaaagaagaaacacccaaacaagccaaagggaaagaacaaaagccagaggaagaaaaagagagggagaacaagccacacaaaagaaagcagaagaacaagcaacaaccagaaacagaaaacaagaggaaaagacaaaaccaaaccggagacggcgccacggcaccaggcggaggcagggcacgaccagccacgaaacccgcccccaggcaagcgacccgcccagcccccaagagcggacacaggcacggccaccacacccagcaagaagagcgacggggcaccagggccaggcggccgaaaggacagcgggcaaagacacaagcagccagacaaaccaccagaaccacagagcccaaaagaaaccgaccaaaacagaacccccagacccccgcagcccaaaccacacgccaggagcggcagaccccaaaaaggaacacacagcccgcacggcacacagcacaagcaaagcgccaggagcagaaaacaagaggaaaacacgagaacacagaccaagaccagcagaacaggacaccgaaccgaaagggacaaaacgcagccgccaacgggaagacagaagggaagcgggcaaggaacaaaagagaaagcacaccaccaaagcagcgcacccacaccaaagcaagcacaagggcaacccacccccaacacacaaaaaaacaagagcacaaaggggagaaaccaggggagcaacgggaagcagagagccccaagagccgaacccagaaaagcacaagccgccagaagagggggaggaggagcaaacggagaaccaagagaagagcaaagccgcagggaggcccaccgcgagacagagcacaacaaaacgagaaaccaaacacagacgacaggcgacaaaaaacgccaaacaacgcagaagcccccagagcacaagaaaagagccggagaccaccagagaagaagagaaaggaaagccccaccacacgcaaaagaaaacaaaaaagaacacagcagaacccgacagaagcaccgggagaaaggcacgaggaccaaggcccagagaccaccagacgaggacccagagcgccaaggggcggcccaggccccccccacacccgaagccgcgagacgcaaagagcggccccccccaaacaacagaggcaccgcgaagggggcagcgcagagaacacccaacacagacacgagaggaaaaagcgcgagcacagcccccgcaaaaaccacaagccaaaacccacaagggggacaaaccaaaacaaaacagaagacacggaacagacgcaaccccaaagggaaaaagagaaggcaaaaaacagcaaagccacagacaggaaacacaaagaccggcagcccccaaaacagccagagaagacaaaaaaagccacagcagcaaagggcacagccacaaaaacagaacaacaggcgacagagacaaaagacggcagcaccacaggcggcgagaggagcaccagcccaagcggaggcaaggcgcaaccagccacgcaaccccaccccgggcaggacccgcccagcccccgagagcgggaacgggacacaccaccacccccgcaagaccagagagacggggggcaccagggccagacggacgagcccgacccagaaccccccgcccaacccccaaaggcgggaacagggggagccaccccgcccgccacacagccagagcacaacgacccgaacaaaacaaacaaaacaaagcaacaagaacacacacacacaaaacaaagcaaggcaagaaaggccagaaaaacaaaaacacgccaagggcgcacgagacaggaaagagcaccaacaaagagacggggaagacccgagaacaggagccagccaagcacccacaaaccaaacaacccgaacaagcgacccaaacgcaggagaaacacggaagaacaggcgcacgaacggaggcccagacaaaaaaaagggggccccgcaaaaaacaagaacaagaggcaacagcagagcaaaggcaaacacagggcacgagcggcggcggcagcgcacaggcacacccagaagcggcagggcgcggcagccacaggaccaacgcagaacgaccagagcgccaaggagcacacaccaagacaccccccaacacaccggaagccaaagcaaccaacgcccccgagggaagcgccccccgcgccagccaacccgcacggaaacagcccaacgcccccaccagccacacagaccagaacgcagaaacacaacaaaacaaaaacaagccccaaacagaccgagaaagaagagaggaaaacgagaagaaaaaccagcaggggagggggaaagagcagggaaagaaggcagccaacacagggaaaggacagcaccaaagccagaacaacccccccccgcccaccccacccccagaagagcaaggcagcgagaagcacaaagagagaacagagagggcgccgggaggagggaaaccgaagggagcaagaaaggagaaggcaaacacagaaagcgccggagcggagagcagaacaggcaggaagggccagagcacacgaagacagaaccaaggaaccaggaggaagacagcacgcaggaaaccacgcccaggaacaagggggaaaggccaagacaaaaaccaagccagaagcaaacggcgggggagacaaagaaaacaaacaaagcaaaagaggaagacaaaaaaagaaagcggagggaaagagaggagggggaagaaggaaaccagagaaagcgggcggggaaagaccgaaaggaacagagcagagaacgagaaggagggagaaaccagaagacggggacagggagaccagagagaagagaagcgaaggccccagaaagaggcccagcagagaaaagagaaggaggcaagacggcagaaagggagaaagaaaaaaaggcagcgggaagcagaaagggagcaggagaccgagggcgagaccacaaaagaacgggaaaagggaaaagcaagaagaagaaagaaagggaggcgagcagagaagcaagacggaggccagcaaaagggagccaagcgccaccaaaacaccaaaaaagaaagcaaacacagacacccaccacaccaacagagaaagcccagaggagaaccggcccccgcacgccacgggacaagcgcgggggaggagaacgggaggagccaagaagaagacaggcagaagagaaacaaagacgaacaagggccaacccaagacaccacccacccccaccgaaccaccaaagaacacacaagcccacacagaagggacacaagcgacagacagaagaacaagaaaaaagaacccaaaacggaaaggcagaacgggcagggaaaaaaaaaaagaccaaaagacaaaaagcacaaacaaagcagcagaaaacacaggaaaccaaacaacacacaggggaacggcccgggaggcaagaccaaggccagggacaccagggaaagacccgcaggaggggacacggccggaaaagggggcgaggaacaggagacagaggaggcccccagcagaaggacgagaagcaagacacccaacaaccgccaggaagaacaagaagcaccaccaggagagcacaccgaaaacgaaacagggcagagggaaaaaagaaaaaaccgaccaaccaccacggagaagagagcagagaagaaaggggaccgagacggaccgccgcaccgacaaaagcaggaaagcagaggagcaccacacccggaaaagagcacccaggacaagacaaagggcaggccacgcaaacacgggcccggggcagcagcgggaaggggaaaggagaagccccagaaagccaggcacgccacgagggagccggcagcgcccggcgggacaacaacaggaagccagcggacccacggggccacccaggcagagaagggagaagggggaggagggaaaaggagcagcaggagggaggagaccgcagacaagcaggagcagaggaagaagaggggcagcacccagaggcaaaagcaggggaagagaaaaaccccgccggaaaacaaggaggagacggaaccaccgcagcaggcgaggaagggcggaccggccacgcaaccccgccccgggcaaggacccgcccaaccccaagagcgggaacaggcacccacaccacagggcaagaagagagacaagcaccagggccagacggccgaacccgaccaggcaaccgcccacccagccccgaaaagcgggaacagaaggagccaccgcaccggcccaaggaccaggagaaacaaggcgcaggaaagacagccaacaagcaccaagaaagaaggacaagagcccccccaaaaccccgcacaaaagggaggcacaagcacagaaaaaaaaacaaagaaccccacaacacagccgcaaacgaaaccagggaacccgggcaacagcaaccggacagaaagcagccaacaagcagccaagaagaccaagaagaccaaacgaagacaccgagacgcaagcaaaccgagaaacgaagaaacacacaagggaaagcccaccgcaggaacacccgcaagaacagcacaagggaagagaaaggagagagaagacaagaaaaaccagacagcgagagagagaacacgaaaaaaaaaagccagcagaaacacaaacacacgaacaaaaggggaagacaccgggagggggggggggggggaggccgcacccaggcggaggcagggggaccggccacgcaaccccaccccgggcaagcgacccgcccagccccaagagcgggaacagggcccaccaccagcgggaagaagagagacagggcaccagggcaggcggcgaacccgacccagggaccacccaccggcccccaaaggcgggaacaggcggaaccaccgcgcccgccgggaagacacgaaacgccgacaagcagggcaaggacaacacacaaacagacaacagaaccacacacagaaaaaagagaacacacacgagaaaggcccgcccccaacaagcagaaaaaaaaggaacaacagagaaaaagagggaaaaaaaaagacgaagaccccaacaaacaaaaaaccccagaaaggccgacgcacaagaacacaagaaaagaccaaaagcaaaaaacacacaaaacagaaacaaaaacagagcaaaaaagcaaaaaaagcagcagaaaagggcagaaaaaccacccaaaagcacaaagcacgcccaggcggaacacaacgggaaaaagaaaagagagggaaaaaagccggcccccgaaaaagggcggcacgagagaaagaaaagaggaaagggagcggacaaacccaccagcggaggaaccagcacaagcccaaacacaaacccaaaacaaaccccccagaaaaaccaacaacaagaagggaacggaccaaaccagccaccaagcccaacaaacaagaaagcagcccaagaagcaaggccaggaggacccccacaaacgagcaaacccggaaaaaccggaggaacgaaaaaccaaaacagaaaaagagagcaaaacaacaaaaaaaaaaacaaaccagccccacaagaacaggcaccacagaagccgacaaccaagaaaaggaggaagggaaaaaaaaaaaacaagaccacaggcacgaaaggggccccagcaacggaaagagcacagagaacgacggccaccaaggacccaagaaagcacagagaaacgaagggaccacccgaacggcacacccccccaaacaaaaccccagagacaggaccagacaaaaggggaggcaaaaaccgagaggaaccgaacaccaaaaggagcgcacggcggaaagccaggcaaagacacagagcgagaccagaaagacaacggagaaaaaaacaagaggcaaagccacgagggaaacgacccaaagaggaaacggcaccccacagacaagcgggaaaacaaggacaggaggcagcgaagaagcgaggggagagaacaaaagccacacgcgcaccagccaggagcagagagggccagagacgagcgcagaacgagaacagcgcgcgcgccaccggcgaggagaagccacagcagaaaaaggcgggggagggggcaggaaaaggagcaagaccacccagagcacgcaagcacacgccaggacccgcgacgaagaaggcgcggccgcgaaccgacacgcgaccccgcaaccagaaagaaagaacaggaaggcggcccagcaacgacacacgacaacaacagggggggaacaacaagagcaaaacgcacggggggagaggagccaccgcacccaggcgcaggcagggcgcgacggccacgcaaccccaccccaggccaagcgacccgcccagcccccagagcaggaacaggggcgccaccagcccagcaaggaagagagacggggaccagggccaggcgaccaaacccgaccaaggaccacccacacagcccccaaaggcgggaacaggcgaagccaccacaccggcgcaaacgcacaagcgaagacgcagcggaaaaaccacacacgagggggcaagcacgaaaccaaaaaaagaaaaacaaaaaagccccaacaggggaaaagaggggcaaaaaaagggggggaaagggaaagaaggaaaaaacaaaggacacaaaaaacaaggaccacacaggcaacaaaagacacagaacaagaagaaaagaaaaagaagaaaaaaacacacaacaaaaagcccaaaccaagccaaaacggaagccaagaaaaaaaaaaaaaaaaaaaagacgacaagagacgcaaaaaaggaaaaagcaacaggcaaaagacaccacaaacaacgacagacaaagacaaagagaaaagcagaaacgagcagaagcaaaccaaaagccccccaaccacccaaacaaaagccgcagaaagagaagaaaaaaaaaaaaccgaaagaaaaacagcacagaaaagaaaaacagaggcccaacaagaaaaaaagccaaccgaaacaagagaaacacacaaaaacacacaagaaacagcgccgacagagcaaagccaccagcaaggggggagaagccacagggaggggcaaagcagagcaaccaccaaaagggcaaggccagaaaagaaacgcaagcgcacccaccgcaggccacaaaacacggccgaaaaaacgaacaaggcgccacacaaaaaagaaaaaaaaaagggacaggcagaacagaagagaacgcaaaccagaagcaagcagacaaggaaaagcaggcaacaaaagcaaggaggaagcccaaggggaaagaccagaaacaggaagggaaaaaggcaagggaggagaaggaagagcacccgacggaaaacaacagaaggaaaaaccaccacagcaggacccaaaggggcggggccagaggcaaaacacagaaaaaaaagcaggcgggcacagggccagccgaacccagcacgggaggccgaggcgggggacaccgagggaggaggagaccagccgaccaacagggaaaccccaccgcaaaaaacaaaaagccaggcggggcgcagcgaaccagcacgggaggcgagacaggagaacgcgaaccgggaggggagggcaggagccaagaggccagcacccagccgggcagcgagagaaaacccgccaaaaaaaagaaagagccagacaggcaaaaagaacaaacggaggcacagaccgaccaaacaacaaaggcgcaccaccaaaaagcaggacagaaaaaaaggcacacagaccaaggaacagaagagaacccagaaaaaagccaaaacacagccacgaccgacaaagcaaacacaaaaaagggggaaaggacacgcacaacaaagggcgggaaaggcaagccacagagaagaaacggaccaccaccaccaaaacaaccaagaggacaaagacaaacaagaccagaaaccaaaaacagaagaaacaggaaaaaccccagcggcaggcaaagcgcagacccagaacccaaaagcaaagcaaaaaaacaaagaaaaagagggacgagaaacaaaaggccgcacagcaaaagaaaaacagcagagaacagacaacccacagaggggagaaaaccacaacaacacgacaaaagacaaaccagaacacaaagaaccaaagaaacagcaagaaaaaaaagaacaacccacaagaaggggccaaggacagaaagacaaccaaaagaagaaacaaagaccaacaagcaaggaaaagccaacacgcaagacagggaaagcaaacaaaaccacaaggagccacccacccgcaaaagggcaaacaaaaaacaaaaaagagaagggcaggaggggaaaagggaacaccacacggggggaagaaacagacaaccacaggaaaacaggggagaaaagaacaaaaaagacacggaccagcaacccacacaggacacccagaggaagagaagcaaacaaaaaaaaccccacagcacagcagacagcagcacaacgcaagcaaaaaaagaaccaaccaaggcccacaacaacaggggaaaagaaaaggaaaaaaaaaggaaagacagccaaaaaaggaacaaaaaagacacacagcaaccggaggaaggagacaacaaggaggaccaggaaggaaaaccgaaacgagccaccgaggggagcaagcagaggaacaaaagcaaagaagaacacggacggggagggggaaaggaggggggcaagggaaaaagacaacagggacaggaacgcagggaggggcacgaaaaccagaaacaccacaaagaacacagaaccaaacaccaccgccccaaaaccagaaaaaaaaaaaaaaaaaaaggggagccaacgccaaaaaaaaacaacaggaaaaaaccaggaaaaaggcagccgggcgacaaaaacgggacacccgccgcacacgccggccaacaggcaaggccagccggaagaaagagaggcacgccaggcaagcaagaaaacagaccacaaccacgcgaaccgccccaaaagaaaacaaaaagaaaaagaggacacaaaaaaaaaaccccagaagcagccaaaaagcacaaaaaaacccccagacgaagggcaaaagaaagcagaaaccaggagcagacaaaaaacaaaaacaaagggcaaacaaggacaagaagaagacacaaaaaggagggcagcaagaggagggaccagagcggcacaagggaaccgaagagaggaaaagccaccacacagacaccaaaagcagggcagcgaaaaagcccgggaaaacgaaccgggcccagggcacgcacggcgcgccggagcggcggcacaaacaacccacaccggaccaagacaagaagcacagccgaggagaagaggaaacgagccacaagggacaacacgacgggcccaacccgagaaaacagaccacaacagcggacagccccccccccagaaaagaagcaagcaaagaaggaagaaaaaagggcgcacggcccgacagccccgaaaaaaggggccacaccgggcgccaggcccccaagagaggccaggccaggcgagcccacccacacagaccgcagccacagcgccaagaccaccaagaagaagagacacgcagaacaccgagaagcccccgccacaccaccaaacccaccgaaacagcccaagaaacgaaacacgcaaaccagaaaagaggcagggaaaaaggggagaaaaaaaaaacaacagaagagaaagcacaaacagaagaaaacagcaccaaggaaaaaaacagagccacaaaaaaaagacaaagcacacaaaaacacaaaagcaaggccacaagggaccccgcaaacgggaggaaaaagacacaaggacccagaggacacagaaaacacccagaaaaaaacacgagccagcaccaccacagcccccgggagcaaaaagaggagcaaagacagagaaaagaagggacgccacaaggaaggggaaggcagcaggacggaaaaccgaccaagaggaagcgaagacacggcacggggagggacaaccagagagcgaacacccacagaaaaggcaaaaaagagaaccaaaagaacaaaaacaagaaaaaaaaaaaccacagggaaaaggaaaaccagcagaaccgcccaccagacaaccgaaaccacacaacgccacgcccagagaaccccagcaaagcccaaaacccggagggacagaagggcaacccaagccccaaggcccaccacagaagcgaaggagagagggccacaaaagcaacaaggaggaaagaaaacaggagaaggaagcaccacccggaagaagaaagcgagagggaacacaaacacgaagccaacggaaccgcaaacaaggcaagccacggcgaagacagccagcacaaaaaaaaagagcagaaaacagcaagacaagaacacaagaaaacaaaagaaaaaaaaaacagaagagagaaagaggcccagaagaaaagaaaaagcacaagaccacgcacccgcggaacaaggaaccgcacagcacaggcccccacaaaaggaccggaaagagcacagacaagaccgagacgaaaaagcacaccagaagccaacaaagaaagacagaaggagaagaaggcaagaaagcagcacggcaagacgggaagcgaaaacggccacacccagaacgcaccaaaagaggcagcgacgacaggaaaggaagccaaaccgcaccggcggccccaggggcccaggagcacacacaggcagagaggccaggaccaagggaagacaggggcccgccacacgggggaaggaaagaccgcgaaaagaacaaagccggggaagccaaagaccagacagacaaccccgggaccggaagccaacacgccagccgccccgaaaagcccccacgaagaaagacaggcggccaaaacaaaagaccccgcccagcacccaccccacaggcagaagaaacaaaaacggaaagggcacaagcaggccaccaacgacagcaagggcaggaggaaggaggcgggggaggggaggaaaccaggacccagacacacaaaaagaaaacagcacgggcaacaccaggaaacacagacagaaaaacaagaggcaagaaacaaggaggaaaggaacggaaccaccaaggcacagaggaccagggcaacggcaaaggaaggcaggcaacacggcaagcccaaagcccgcaacgcacgaacggacaacacaagaaaaccccagagaaacccccagaggaagcagagcaagggaagcaccaagacgagccagcacagcagcaagcgcccaaaaacccccgagcccgaggcaagaagacagacccgagcacgaggcaagcaagcagaaccaaaaggaaaccaaagcaaaacccagggacccgagcaccggccaccgaaagaaaacccaagcccgaaacggcccacgcgcagcaacaacgaaaccaacagcagcgaaagggcaaaccccagaaagagcggaaccaagggccgggacaaggaagcccaacaccaacaaacaaacaggacaggaccgggagaccgaaaaagaaacaccccaggaaacagaacacaagagggcccccagagaaaggcacacgaaaaaaaccgagccaaagggagaacggaagacagaagagggagccaaacagcgcacccaccacaccacgcaacaagaaccacaagccggacaaagggagcagcaaaagggccccaagaacacacacaaggaaacaggagaaaccaaacgcccaacacaagggggaacaaccgcacaaagacaaacccaccaagaagaaaaacgcgcaccacgcaggcaaagcccccgccacggccgcccccaccccgcccaccacaaagcccacggcccgaaacccaccacccccccaaccacaaccccacccaagccaccccccccaacgaaccgcccaccccccccccagccccccgcccccacgccccacaaagcccccaaggccaaccagcccaacgcacgccggacagggaaagggccacaccccccacgccggccgccggggcgcaccaccggaccacgaacggcacggaaagaaccccaagagaggagggaaggcgcccagccccgccagggaaacaccggcagcaacaggagacagaggacgccacaaccaaacgcaaacaggagagagaagaaaaaggaaacacgcaggggggagcaacagacaagggaaagcaccgccccacaaccggacaacgaccaaccggagccgaccccaccaggaaacagggacaccaggcaccccaaaggaaaggaaaaaaaaaaacagccaaggggccagcacaaacaaccaagagcaaagagaagagcgcaaaaagcaagcagaagaaggggaaaaaaacgcaagccggagaacagggaagaggaacaccgcaagccaagcacgggggcacagaggcacaaaagacaccagaccaaggaaaccaccagggagcaccaaaggccagcggagcagcggacaggcacgcgaaaagagacgccacaaaggagaggacacaaaaaaacaaaccacacggcaacgcaaaagaaacagggaaaaaaccgaaaagaaaacaagcaaaacaaaggcaaagaaaacaagacaacgaacgaacaacaaaaaaagaaagaccgcggaggggaagcagaaagacagaagaaggaaacagcaggacggagacaaaaaagcaaagaccaacaaggacaaccccacacaacaacagggggccgaggcagagcgccgccccaggcggaggcagggcacgaccggccagcaacccgcccccgggcaaggacccgcagccccgagagcgggaaagggcccgcaccacgcccagcaagacgagagagaggggcaccagggccaggcggccaaacccgacccagggacgcccgcccggcccccaaaggcgggaacaggcgggccacggcccggcccaacaaccaggaacaggcagaaggcaaggacaagaaaagcgccagggggcgcaccccaacccaacacaggaagcccgcagcaaggagccaaccaacaacagccgaaacacgcaaagggcacaagaaagcagacccaggaccaaagggcaggggccaggaaacacaacaacccccaaaaacaccggggaaagacaaacaacaggcgaaaagccagaccaaacagggcaaagcgaacaaaaaggagaaccgaacacagggaaagaggacacgacagagccaagaaacaacggagcagaggggccagaaaaaccaaaaaaagccgcaggaagcacaaaaaaaaccagaagaaggggagagaaagaaacaaggccccagacagagaaaagaaaccaaggaaaaaaggaaaggaaaaaagaaaaggcgcaccaacagaggagcgaacacggaagaaaaaaaaaaaaaaacgaaccacagcccaggagacaacacgaccagcaaaggcagggaaggaggagcggagagaggccagccccccgaagcagggggcaggccagagggccacagaggacaaagaagaagcaggacacagaagggcagaagggacaaggagcagagcagcacgcaaacccacaccagagcggagaggagcaaaggaagaaagaaaaaagaacaaaagagcaaagcaaaaggggaggccaggaacaagacgaaaggacagggaaccaagagccaagaacaggggaacgaaccagggaaacagggcaagcagcaaggacaggaagagaccgaacagagcagccccggcacagaagggaggaacaagcgccaagaaccagaggaaaaaaaaagaagaaacagaggaaagggcaaggaaaggaaggagggaagaaggagaaaagaaagaaaaaggagaagacaaagaaggaaaaggaaacagacagaggaaggaaaaccagagaaaggacaagggcgggaagggggaaggaaagaaaccaagaaaggaggaacgacacccacggcaacagaacacaacagacaagcagcacacgaacccagggccagccaggcacgaggggagcggcacagaaaggccagccagaagaagccgaaaaaaagagggagcaaaaccacaaaccgaagaggaaacaaagaaaaggaaaagaaaaaaggaaaaagcgccgaggcaacaacaagacaacccagcaaggaaagaggggacccccagagcaaaaccgggacggaaagacgacgcaaaaaaaaaaaggcagggacaaagaaaaagaggggccacaccacaaagaaggaaacacaggggcacagcgagggacaagaaaagacacaaaaaccacaaaaggagcggagacaaagcaaaaaagccacaccacacagacaaacccagaccaacccacgagcgaagcaccagaagaaacacggaggaaaaaacacacacaacagagaggaagaagaccaacagggccggaaaaaaaggcggaaggacaagagaaaaagaaggaaagacccaaaagaacccaggaaagggggacacaggcccaaaaacagccgggccacgaaaaacggaaaccaccgaaaagaaagaggaccaagacagaaaaaagaaaaaaaaaagaaacgaaagcaggcaggggagcggaagcacgcaaaaagcaaagccaaccgagaacaaccaagggcagacgaaccccccccagggaacagagccagacacaggaaaacaaaacaagaccaaacacaaccagagcaaaaaaggaacagcaagacggaaaaacgagaaaagagaaacccaaacgaaaaagcccaagaaaggaaaaacagaaagcaaaaagaagacaaaggaaagaaaaaacaagcaagacacaaaaccagggacacagcacacgaccaggagaccaaccaaagcaaaccacacggggaacacggaccagagcggcgaaagggccggaaagagcaggcaggcacccagccaacgcgggaaacacgggagaaacaggagcccgagcaaaaccccccagccgcggcacccccgaaaaggggcagacgggccagggcagggccacacgaacccagcacgggaggccgaggcaggggacacgaggcaggagcaagaccagccgaccaaaagggaagccccgccacaaaaaagaaaaaagcggggggggcggccaaacccagcaccaggaggcgggacgggagaagccgaaccgggaggggagggcaggagccgagacacaccagcacccagccggagacagaggagacccaccaaaaaacaaaaaacaaacaaaacaagaggcaaacaaagccacaacgcacaacggagaacaaagagacagagcaaaagaaccaaaccaccacaaaacaagcagagcaaacagaggagaaaggaaaacagccaaagggaaaagagaaccagcaaggggcacgaaaagagaaacacacgaacagaaacaagggccgagagcacaagagcgaagaggaagaaggaacaaagccagacgccggccaaaccaaacccacacacaccagcaacaaccaagcaaccccaggccaaagaagggaaaaaaaaacacaaggggaagaaaaagaacccaagaaagcaagaaaaagagcacagaaacaaaaaagagcaagaagaacaaaacagaaaggcaagacaaaccgaaaccccaaccgaacagaccaaaggcacaaaaagcaagccaaacaaacaaacacacaacaccaccgagcgcagaggcacacaaaacaacaaaacaacaaaaaccagcgggacaggggaggagaaggaccaaacagaagccaaaaaagcggacaccaaaaaaaaaacagagggggcagaaaagagcacaggacgacgagagacaaagaaaagggcgagaagaaacggaggggggccaaagaccaaagacccgacccaacagggggcaacacaagcacccgcacccacccagaaaccgggagccagcagcccaaaccggaggcgagaacccaaagacgcaggcaacaccgaagaacgccccccgaaaccaggagcaggcccaccccacacccagaccaccacacacgccgcccgcggcgggcaggcccagccgcgccggacccaaacaaacaaaacaacaaaccaaaaaacgaccacacaccaaccacaaccacacagaaaaggccacgcacaaggcagagacaaacaaggagcaaacacagaaggcaaaacaagaagacccgcaggacagacaaaacaaaacccacaaacaaggagaagacaacggaaacacaagccggcccaagaacaggagaacacagccacccaagagaagaggaaaaaagaacgaagaaggaccacagagggagcgaaacaacgcccgaaacaaaagcagcagcggccagaggaagcgacagagaaagacaagaagcaggggggaggaaagggagaagagccaaagaggaaagaaccccaaaagagaaaaagaggcagagaaaacaagacaaacccaaccaggaggggaaggaggaagaggagcacaggaagagacaaaaagaaaaagacggcgcaaaaaaccagggcacgaggagcaaaagaaggagagcccaccgcaggggcccacacagccggccaaacagacggggaaagacacaaaccaggagagagacccgcaaagacaaaaaaccacgagaccaagaaggaaaaaagaaacacaaaaagcaggacccagcggcaccaaggccagcagaacgaccaaccaggcagagaaagaggccagcaaacacgaaagcagaaaagaacaaaaaaaaaaaagcaacaccgagagcccaggccaaaaagaggccagcaagagaacccaagacgccaaaaaacaagaaacacaaaaaaagagaaacaacagagaaacagagaacaaccaaacaaaaaaggccgaaaaaaaagaaccggcaacacaccagcacaaaccacgacacagaaagccaaagacaacacaaccccacccaacaccaaaagcaaacggcaacccagagaagaggaggaccaacacaggccaggcaacccacagacccgcagccaagaaaaacgcccagaccaaacaagcaaggaagacgaacccaagaaagaacacaaggccaaagaaaagggacgcaagaaggaaggcagacccacacccccccccaaccccagggcacagggagcacagagcgagagaaaaggacaaagcaaaaaaaacaaggaagagaaaagacggagcaccagaggggcagggaaaaaggggaaacggggagaacagagacaggaggaacaaagagaaacaaaaccgcccacacgaaggacaggagcaaaagaagcaggcccaacccagcggagcacagaccaaacaagcagaaagcagggacgggcccacaaccaccaacgcagcaaagggcccacaggagggggaaagaccaccaggagaaccacaggggggccggaagcacgcaaagggaaccagacaggggccagggcacaggagagacagccaaacaaagaccccaccacggagcgccgaaggaggagacgcacaggggcaccccaaggccgggccaaccagacgcgggaccacagcaagacacaagaaggaggcagcgcgcgcgaaagccacaagacagcgaaaaaccgaagacaaaagacaaagccgggagccaggcccgcccacaccgggacacccgaggacccacggccaagagggcaagaaacccccacacgcggcgggcgaggaaaggccacccgacggaggccaacaaaccaagccaaagcaaccaaaacagaacaacccgcccaaagaaggagaaaacaacagcaaccacgccgcaacaccggcaaccagaggccgagccaccacagacaaccacgcagcaaacagcacaagaaaaccagcacacaaacaaaacacaccaaggaccccagagacaccacccccgcgacccacagagcagggcggaccacagcgggagacgaagacagacacacacaggaccgcagacacccagcaccagccgaaggccagaggcacgggggcaggcccaggagggcaaaacaacacgcagcggccaggaagcccacccaggagaagggggaggggaccaaaagggacacaggggacaaaagaacgagcagcagcgcgagccagaccgcgaaacagccaccaaagagaaggaaccagaaaagaacggaaagagaaacaaggcaaacaccaccaaaagacacacagccccaacaaggaccaaaccaagaagaaaccgaagcagaaaagaacagaaggcgaaaagcaccaagaacacagagaaagggaaaaccaacaaagaaaaggccagggcggggcacgccaacccagcacgggaggcgagggggcaaacaccgaggcaggaggagaccagccgaccaacaggagaaacaccgaccacaaaaaacaaaaagcgggcgagggcgcagcgaaccagcacgggaggcgaggcaggagaacacgaacccaggaggcagagggcgggaacgagacagccgcacaccagcccgggcaacaagagcagaacccccaaaaaaaaaaaaaaaaaaaaaaaaaaaaaggcagcagcaaccggaggaggaagaccaacaaggaagaaccagaaaggcaaaccaaacacaagccaccaaggggagcaagcagaggacaaggcaaagaagaagaaggacagggacggggggaaggagggagaggggaggggaaaaagacacacagggacaggccacgccagggaggggcaccaaaaccagaaacaccacaaagaacaccagaaccaaacaccaccgcccccaaaaagaaaaaaaaaaaaaaaaaaaaaagaacgaggcaacagacagacgaggcgcaggaagccaaggaacaaccaagagaggacggaaaagaagggcagcgaccaaccaacagaaggcggaagggacaaaaagaaagcagagaaaaagaaaaaaaaagccgaaagaacccaaaaaaagaggggaaaaggaaaaagacaaaacacacaacacacaaaaagaaccgagccggagaacagcagggaccaaagagggagaaaccaccaggaacaaaccggaacaaagaacgagcgagagcccagggggcaggggggggacaacacagcagaggagggaggcaagagagagaagggaaagaaaaaagaaaaagcacaagaagggcgacccaaacacgccagcacaaaacaaagccaagaccaaagcaaccaagaaagagaagaaaaagaaacaggaagagaaagacaccacaccgaacaagccaggacagaagggaaaggggggacaaaaggcagaggagggaagccaaaggagacaagccagggggcggaacgccaggcgcagagggagaggagccgcaggccccgaccgcccccgaaaaaaagcccacggggacaaaagagagcaaaaaacagggaagagaagggaagaaggaaacagcaccagcgagaacaaggaaagacacccacaggaaggcccgagaagggacagaggagcccaaagaccaaaaaaaaaaaaaaaaaagaagaagaccaaggacaggaggagacagagagaccaggcagagccaaaaacaaaagccccaaacacaacaaaaaaacgcgagggagcagcaacagcagggagaaacagaagaaccaggcccaacaaacagccagagccgggcggaagccacagcgccgagccgcgagcaaagaggaaggagccaccagagggcggacgacagagaccacggaccgcacacggcgacggccgggagacggccagcagcgcccagagggccagcaagcagccacaggggggagccaacccaaggcacgaccagaaagaaaggagacaggaaggagccgacagagaaagcgcccccccgagggccgcagagcaacagccggagcagcggagaccaaggacaggaagacgggccagcagcgcaagcaccccgagccccccccccgcacaccccccccgccccgggagcaccccaaaaaaaaaacacagaagcgccaggcagccaaggaaccacaaagacacagcaaacacacccacagaaagccagaggcaggacccggggagacagagccaagcccacacggcgcccaggcggaggaaggcgcaaccacccacgcaaccccaccccaggcacacgacccgcccagccccgagagcgggaacaggcaaaaacaccaccaacccagcaagaaagagacagggcacagggccagaggccaaacccgacccagaccacccgcccagcccccaaaggcgggaacaggcagaacgagacaggaccaaaccccagaaagggaaagaaacagcacaacagggcaacacccagagccgcaaggcaaggggccagcgaacgcaaacccagggacagcccaagcccaagacacagagaccaggccacccacagaaggggcacacaagaggccgcagagcgaccgaaagagccagaccagggaggcgcccgccgcccaccgggagaaaggcagaagaaagagacccggcccacacgcggaccggcaggaagggaccggccgcaaaggcgaaccacagggaccaaacccaacaaacacacggggagacgcaggcaagcacaacaacagagaggccagaacaccccgagagagggaaacagcaaaacagaaaaacaggcagggcaggcacaaaagcggcaccaaaaagggggggggggcaaaaaaacaaagcaccagggaaaaaacaagaaaaagaaacgaaaacacacaaaaaacagagaacaaaaaaaaaaaagcaggaagacagacaggcccccaaaccaaggagccgaggcaaaaagaaaacagaggacccacccccccagcccgcccgaggaaggaacaaaacaagagcaagccacggccccagggccacaccaacccagaaagaacaagacccaaaaccagaaaaccacggagcaaagcacaaaaggacaaaccaccacccagcagaacccccacagccacgggggcaaaaaaaacagaagaaaaacaaaaccacaaaaagggaaaaccacacacgaaaaaacgagaaaaagaagaggaacagggacgaaaagcaagacagaaacgaaagaggaaacgaaaaagaaaaagcacagcaacaaccaagaaaggaaacaaaaacaagcaaaaaaagaaacccaaacaaagaaaaaaaaaaacagaacaagaaaaagaaaaagcaagccagaggggcacagcaagcccagcaccggaggccaagggggaggacacgagcccaggagggcaggagcagagggccacacacccaccgcagacagggaagaccgaccgaaaaaaggccggggcagggccagcgaacccagcagaggaggcgagggggcggacaccgaggcaggaggagaccagccggccagcagggaaaccccgccaacaaaaaacaaaaaagccgggcaggggcggcacgaacccagcaccgggaggcgaggcaggagaagcgaacccaggaggcgaggcgcagaagcgaagaccaccacgcacccagcgggcaacagaggagacccaaccagaaaaaaaaaaaaaaaaaagagacaggggccaggcaggcggcgaagccaggccaggcagccccacccagcccccaaaggcgggaacacgcagagccacgcacggacaaaaaaaaaaaaaaaaaaaaaaaaaaaaaaaaaaaaaaaaaaaaagcaaaaacaaaacagggggaaacaaacaaaagaagaaaaaacaaagcaagcagagcaagagaaacagagagaaaagccggcgaaaccggggagaaaaaaaagacggagaaaagccccgaaggacaacaaaacacaaaaacagccaggccggacagcaaagggggcagccaggaaaaggcaagcaaggccacagagcggaagcagcaggggaagcaaggagaaaggagggaaacccacccggaggacaagagggaaaccagagaaacaggaaacggcaaaacaaccccccaaacagccgaaacaccaaaacaaaaaaaaagagcaacaacaacaaaaaaccccccccacagcgaacaacaggaaaggagacgcaaaccgaccccagcaggcaggcgaacgaaaccgcgcacgggacaaacgaggggaggcaagacccccccagccaccagcccggagccagaaaaagccacaggggcccacaccgagccacggcacggaagcggccaaccccaaagccacagaggaaggagcgaggaccaaaaagaaaacccccggggggggaaaaggccaagaacacaaaagaggagcaggagacaaaggcccgggcaaaaaagggcaacaaaagcagagcacaaaaaaaaaaacgagcgaggcagcaagccgaagaagagcaggaacaccaacagccaggcacacacaacgcaaaaaaaacagcacacagagcaagaaaaccccaaaccacagagcaacacgaacaaggcacagccagaagaacaggaaaaacgaacaaaaccggagcacagacccgacagcaacacaaggccagagaaaaacaggagcaaaaagcacgccgcacaggccgaaacagaaagaaaaaaaaaaaccaccaaaaaaccaacaagagaagaaaagccagccagaacaagaaagccccagccagcccagcagccacagaaaccggaacacgagccaaacacaacaggggagggcaggaagagcaacaggaagcaaaaagcgcccagaaaagccaaaaaacaacaaac

SEQ ID NO: 331 - RNA, 16381 nt, Homo sapiens
ccccccaagaagaacgaaaaaaagagggaagagaccaagagccacacaaaaaccagcgccaagaagaagcaaaagagcagaagggaggaaaagggcgccccacggacggccaccaaacgggaaaacgagagcaagaagggaggaagagggaagaaaccaaggcaggcgccgccccaagaagaagaccgaggcccagacaaaaagcagaaaaaacaagaggggcagacaaagaggaccacggacaaacagggaacgcccaaaaccacccccaagaggaagagagagcagcgaacagaccaggcccaaaagaagcggcggaaaaggggagagagacaggcaaaaggggacccagagcagagacaccacacgcccggaggaaggaagggaaggcagagggacgaagaccaagaggggaaaaagcaaaaagagacagggaggcgccgggacaggaccaccaggccggggaacgaagacagggggagggggagaggggggaagcaaagggcagcacggaagagcccacgcacaggagcgggaaagggggcagagcaagacaggcacccccgccccccacaccccacccccaacacaggaagccccgaacccagaaagagaaacagcgagcagagcagacaaacaagcacgcgaacaagcaaagaaaaacaaaggaaggcaaagcacccccaaacccagaacacgagccccggggaggcgcgacacggggaaacacccaaccaggggggaggggagggaccaagcagaaaaaaaaagacgcagcagaaaagaacagagagccacacggagcaaggggaacccaaccgggaaccaagcgggaaccaagcaggaccccacagcccaaaaacgaagaccacaggaaccgaacgcaaagcaaagggcgaagcggagaaagcaaaacgaccaacacgaagggaaacgacgcgggagagagccggaaccagacaccagaccaaacaccacaggagaagaaggcgggaagagaaccaaaacaaagggcagaagggcacagcagaagaaaaccaccagaagggcaaggaccaagagagaaggaagacaggggaccaggaggaagcagggggcgcagccaaggcaacagaaagaacgacacgaagagagcccagaaaacacaaaaagggaaaggagggagagaaggagaaacagaggccaagagaagacagacaaaaagaacagagaccaacccccccgcgcaacaaggacccagagagaccccacaccggagcccacaacacgaaagaaaccacaaagcgcaccaacgaaaccaaggaggaaaaacgggccaaaacgccggagagaagggccacccacgaacagaggacgaagaggaacaggaaagagagcacgaaccgacagcccccccccacccccaaccaggggcacaggcagaaaggccacgcaaggcagaaacaaaaagggaaaaagacaccacccgccagcagcgcgacacagacaccgaggaggggagaagaggagacaaaaccaaaccaacccaaaagggagaaaaagaagaccagagaagggggaaacaagccagaacaaaaacgaggagaaggagacgggccaagggggccaccaccagaaaacagcacaccgcagcacggcacagcggcaaccgcaggcacccccagagcgggaggggcacaacccccaaggcagagagcagagggaagcgcccggacaggcggcccaaaagagcccccaacccgacagaaagcagcccgcaggaggggaggggagcggggccagaggcaccagcacaagaaaaggaggcccccaagagagaggccggaaagggagaagagggggcagacgaagggaaaaaggcaacacgagggaggcagaaggcagcagcacacgaaaacggcacaccaagagagagaacagaccaaacaaccagagcaccaccaaaccgggagcagaaagaaagcacgaggagggcaaagggcagcaaagcaggaagcaaaaagggcgaaagccagccagccgaccacggaagaagacgaacaaagaaacagacaaagaaagggaaaagacaaagaaaaaaagaaaaaaaagaccaccaccaaagaacacgaacaagagcaaaaaaaaaacccgaaagacaacacccacaaaaaccgacaaaggagaaccaccccaagcgaaaaccagcacaaaagaaaaaaaaaagggcacgagcacaaagcgccagaagggaccaaccacacaaagaacaagaaaagcccgaaacagagagaggaggggagaggaacacaaagcagggggcggaaagaacaaaaacacagaaaaaaaaaaaaaaacccacccgagagcacgccagcagagaaagaccaaccagcgacaagcaccaaggaagccggcggaaaaccgaaaaaagaggccgcgagccagcaaaccacgcaaggccggagcaagcgcccagaaagcgaccaaagccaccgagcaggagagggcagaccgccaaggcgggagcccaggagaccagcagcgaagggagagggaggaaccagagcccacgcagagggaccagaccccccagagacgccaggagaaagaacaccaaagaaagagccaacacaaaacgaaaggggaaaaaaaaaccgaagagaaaaagaccaagccaaaagcaaccaaaaagcccgacccacccacggagcacgcaaaagacagaacacgagagcagagaaaaggcaaggaacagaaagggaccgaaaacacgaagcaggagccaaagagcgagcccggccagcacaacaaccggaccgaagagaccccggcggaaccacgcgagaacaacggagccaaaggagacaacgcagcccaacagagccgaaggcacaaggcaagaaaaacaagccaaaggaaaagggaaagggagaagccaaggaaccgccaagaccgaccaaccggccgcaaccccccccggggggggaccgcaacgccaaccaaagaaaggcagagggggcgcacccaggagcacccgaaacccacccaagcagccgggagaagcgaagcagggagcccagcgagcagcccggacccccgcccacagaagggagagaaaaaagaaagcagcaagggggaggcacacgcaaagaaaacggacaaaggcccacaaggccgccgccgccccagcccaggcaaagcgggccgcggccccccgagcccgcagcccccgccgggcccagaagccgacccgggaagcacaccggcccgacccggccagcacgaaagagggaaaaccccccgccagggaggggaaagacacccccaccaagggcacgccccggaggcggcgccggggcccagccccggcccgacccccagccccgagagggcaggagagcccggcagccgagagcaccccggcacccaccgccaaagaggaaagcaccaaaaccaaaaaaggcaaggacacgggcgggaccgaaaaaaaggcaagaccaaaaaaccaggggccccacagcgcccagccagaagaccacccccagcccggcccaacaccagccagaggccaacagcagcccccaaaacgcagcaacagacaaccgggaacgagagagcaaaccaggcccagcccacaccacgaacagaaaccgaggcgaacccagcaacggaacaaaccccagggacgaggcaccgaaggagaaccacaaaagaggcacaaccccaagccagcaaaccagaccggcccgacaccacagccgccgccacgagacgcaaacaaggagacaaaggacccagcaccagagccagcaagcgcgcagaaaacaccaccaccgggccaaccacagggagcaaaaacaaaaagagagaaaaaccagggcccaaacacagaaagagaaggcgcccacacaaaagaaaacgcaaggagcggaaggagagggccgggcaaaacggggaaaacaagcagggaacacacaaccaaccaaaccacaaaggcagaacaaaaaaagacaaacaagcacaaaaaaccagagcggggaaggacccaaagccacaaaaacaaaaaaaaacacagccaaaccacaacaggcagaaccacacgaacgccacaaccacaccacacccacaaaacacccaacaaaaacggcagcaacaggccggacaggaaagcaacaacagcaggacaaaggagaacgaaaccaaaacgagccaacaggaaagacagccccacgcaaccaagacaaagcggacgaagaggcgccgaaagaccgggcacaaacacagaaggaaagggagcaggaggagcagaggcagacagaaacaaacacaacaaggagcccagccccggcagaggggaggggggacgagagcagaggcaaggagaccgcacaagggacgcaggacaggcagagaaagggcggagccagcaggcagccccacaagggagggacagccagaaagaaggagagcggaacgcggcagagggcgggggcagagagagaagaaaaagcaagaggccggcaagaggagggggcgaggagaggggaaaacgcagagaagaagggcgagcaggggacaagaagcaggaacacccaaagaacaaagcaggagcgagaacacaggcacaagaacaaaaccgaaggcgagagggggagacaaagagcacccagggcccaccggagcgaggcagggccgcacccaggggaagaccggcggccgaccagaaccgccgccgccgcccgacacagagagcgaaacacagacggcaggcccggcggggcggcgggggcgcaggaggcccgcaagagacagagggggaggaaggggaaagccaagaaccccccaaccccgcagcgacagcggggccgagcacccgggcaccaccccacggcaggccgcggcggacccccccagcccgggcccaggaaacccccccgaaccccgacaagggacccagccacgcaggcaacggggccaccacccggacccaggaggcagagggcacaggggccccacagacaagacccgagcaaaacaaagagaggccgaggcaaagggcaaaacaagggaacggggcccaacgccagcggacacaccacggggagacaggcgggggcaaaacaaccagcagacacacaggagcaaaaggggaagaaagaagaaaacccagagcggacccgcgccaccccacggaaccaagagaaacacaaaccaaaggccagaccagagcgcaaaaagaaaacgagggacaaccaaccaaacggccgaaagaagaaaaagcaaagaggcaagacaccagaggcgagacagagagaacacacgggccaaaaggcacacaggaagacacagcagagagaacacgaggcaagcaaacacaggcggaacaacgggaagggacaacccgcccaaaccacagcccaaaaacagaggaaaaggaaaggagaaagggaaaaaggcaggaagcacgcaaaaaaaaaaaaaaaagcaccaggaaggcaggacaaaagacagacaagggcggcacaccagacaccaggaccaaggacacggaaaaaaagacaggggccaacaaccacagggaaccacaacccaaaagcaagaaaagaagacaagaaaaggaggaaaccaccaaaaccggcagcaagaaacacacaaaaaaccaaaaacaaacagaaaggcaacaggaaggagaagacaaaaagaaagaagaagaaaggagagaaaaaacgggaaagaaaaacacacagaaaagagccaccccagaacaaaacaaagaacagaaacacacacccaaaggaagaaaaggcgcaaaaaaaaaaaaaaaaaaaaacgcagaaacccacgagaaagcagccaaaacagacaacggcaagcaaaaggaacgggcaacgaaaagcaaaggcaaccaccgaacacccaagggcagggagcaccaaaggccaagagcagacagaacaaagccccccccccccccccacccggggcagggccagaaggcaggacaagaaaggcagagacggaaaagcaacagcaagagaaaaacccacaaccacgagcaaaaaaaaaagaacaagacacaaccacacaaaacaaacaacaaaaacaagaagaaagaggaagcaagagagggaggaaacagggagagaacagacagaccaaaggcaggaacgccaaagaaagcgcaagcccagagacaggagggaaagagcagcgaaagagcgccggagggcagcaacacaacaaaaacgggaggcaaaaacaaagcgacgaaaaccacaacgcaaaaccaaaaaaacacaaaacagagaccaccaaagcgggagaccaagccaggcggcaagcaaagacgggggaaagccaagcacgaggcagcaaaacgagggcaaaacacaaacccgaagcggggcggggagaaacgaacaggcgggcgaccaaccaaccaagagcgcagccgggcaggggggaggcagcaggaggcaggcgggagaacacggccgggcccccccagcagcggaggcacagggaggccgggccaagagagagaagcaggaaaccgaggccggaacaaacggaacaaccacgacccacaggcaaacacaccggaaagagggagaaaggcccagaagggggaaaaaccaaccccacgaaaaggagaaaaaaaaggggccggaccacacacagacaaccaagaagccagccacaggaaacaccaaggggggagagaaaaaaaaaacaagggaaagaagcccgacccaaagaaacaacggaaaaaagaaacaccccccgcaaaaaccagccacaccaggacccacaaacgagaggagaaagcacaacccaagcggaacggccagcacgaaacacgagagaggcaaaccggaaaacacccaaggaggacaaagaagcgaccaagcagagcacagaacgggaaaaaagagaacacaccaaagaaaaccaggaggaggccccgggacagaagcgggcggggccaggaacagggacacaagacagacacacccgccacagagcacaccacggggcaaggacaagaagaagcaaacaagacgaggaaagccaagaaggagaacagggcaggagggaggagagggagagcccaaacagaagccacccgacaagagagagaaggggggaaaagaacagaggccacaagaaaaagaagcaccggcaaaggaccaggggaagagagcacaggagaacgacgagaggcccagacaccccaggaggaggacagaagcccaggagcaggcacgcaggccgcccaaccccagaaagcacggacccccccagggcagcacgcagccgggagagcgcccagaggccagaacacgccgcaaaccgagagagaagccggaagaaccccagggaagcccccccaagacgaggggggaggacaaacccaccccgccccaggagggcacccccagagaccgggaagagcgaagagcccgggacgcgacaccagggccccccggccaccccgccccagcggaagcccacaaaagaccacagaagcacggaaagacgggaaccaaacccgggcagaaaacacaggagcaaggagcaaagaaggaggcaggagaagccagagcagacagacaggcaagggcagccccagggcaagcacagaaagacagaccaaccaaaaaagacggccagggcgagacaccccgaacccagcacgggaggccaggagggcagacaccgaggcaggagcaagaccagccggccaacaggcaaaaaccccaccacaaaaaaacaaaaaagccaggcgggggcaggcaccgaaccagcaccaggaggcgaggcagggagaagcgaaccgggagggaaggaggagccaagacacgccacgcacccagccgggggagcacggggaaaaaaaaaaaaaacaaaaaggaaaaaaaaaaacagggccagagggcaaaacggagagagaaggggagacaggccagaccccggcgacaccaccaacaccaagagaaaagacaccggcagccaaagaggggaaggaaaacaagaccaaaaccagagcccggaaaagaaagcccaaaaaagcgagaaagagaaaaaaaagaaaaaagcaagcaacaaaccagcacggagaacaacaaaggaaaaaaggaaaaagacagaacaacgcaggccgccacagcgcccgaggaagaaccaaaaagcgagcaaaaggccccaaccggccccggagacagagagggcgaaaaaggcagaggaaagcaacacggccggaaggaggagaaaggaagcacgaaaaagcaacaacaacaacaaacgagaaaggagaaaaacgggaaaaaaggcaacagaaaaacaacgcccacaaacccaacagggcaaaaagagggccgggggagggcagcagcagcagcggagacacgccacgaaacccaacccaagaggaaaggacagaggacagcaaggcgagaagcagacacaacggccagcagggagagggggcagccagcacacaccagaacaaaggcggcggaagagaaacaagcaagggaagagagagaacagaaaagaaaagacaccggcaaaaggcacagggaagccacacaacgcgaacaagagaacacaaaagcaagcacagacaggccaagacaagcaacgagcacaaaaccaagcgaaaaaaggaaaagaggcgggagagcccacccaaaacccgaaaccaccaggcgaaccacacaaaaggaaaccagaagcagagaaaagagacccgaagcagaagaacaaaaggcagcgccgaaaagacacaacccccaggcgcagggccacgcagaacccagcaggaggcgaggggggcggacaccgaggcaggagagagaccagccggcaacagggaaacacgccacaaaacagaaaaagccagggggcggcacggccgaacccagccacccagaggcgaggcaggagaacacacaggaaccggacgcagagggccggaggcgagagcaccacgcacccagccgggacacagccagacccgccaaaaaaaaaaaaaaaaaagaacaacccaggagaccagcaagcaaagaggcggggaaaaacgggaaaggcacaccgcaacgaacgccgaggcaaaaacagcgacaaaagagcaaaaacccaacaggcagcagaccaccagagaggaagaaagcacgcgcagcccagagaaaggcagacgcccaaaccccccacaccccgcagaagaagggggcaaaggacagaaaggcagacgccgaggcaccacggcccccaaggggggaaaggcaaagaagagaaagggggcaaggacgcagaggcaacaggcaccagagcagaacagacccagcccagcggcgccagcaccggcccgccccagaccccagagggggcaccagcaacacccaagcgacacacaaaggggggacacccaaagagaaaaaaaaacacaaaaagccacgagaaaaacagagaaagaaggcaaaaaagggaagaagaagaagaaaaaacaagaaaaaaaacaaaagaagaagaaaaaggacagcgaaaccacccaggagcaaaccagcaccagaccccagaacgcaaaaaaggaaaagagacaggcacggacagcgccccagagaacacccacaacgagggggacacagggccacgcacccaggcaggaggcaggggcaaacacggccacgcaacccagccccgggccaagcaacccgcccagccccccaagagcaggacaagcacggccaccacaccggcaagacgagagacagggcgccagagccaggcggcggagcccgaaccaaggaccaccgcccagcccccaaaggcggggaacaggcaaagccaccgcacccgcccaaaagaagcagcacaacaaaggcacaaaaaccaaagaaaaccaaaacaagccaaaacagacaaaacaagcacggacacaggaccagcccgaaaaaaaggaaaaaacaccgaggaagcacacaaagagaggaaaacccagaaagaagaagggccacaaaaggaaaaccagacaaacaccagggaagagcccgccgacccaagggaccggcacggaaccgaacaaaacaccagagagcaggcccagaggaccggacgacagcagaaacaaagaacgaaccgagaagaaagccccaggccagcccagaacgaacccggcaacaagaaacaaaaaacaggaaaaccccagaccgaaccaaagaagacaacaacaggccagggagcaaacaaagccaagcaaaacagccgaaggccaggacaagaagacaccaaagaaaaggaaaagggacaaaagagaaaaacgaaggaaaaaaaaaacaacagagcaaaaaaagaggaaacagccagccaaagcacagcagcacaaaaggcacaggaagagggaccaaaagcgcaaaaacaaaaacacgggcccacaggaaaagcgcgaacccgacagacaagcaacccaagccaagaagcaaacccagaaaaagaaacgcaagagcacaaaagcaccagagagcgcaaaaagcacccagggaggagagaccacaacgcgagaccgcacgcccaagggagaaaacaacagcaaacccggcccaccaagagcaggcaaggggcacgaagcagacaacccaagcacagagacagaaccaagccgagggcagcggcaggggcgaggagagaagaggccccaaacgcaaagggggcagcgcacagccacccagcaacaaaaaaggggggaggccggcaggccccgcaaacaggagagagacaaagccaccggcacccagaagcaggcacagagacacgccaggcccccaagccaagacaaaaaaaagagaggcagaaaaaaagcgggggggggcacaaggacagcaagaacccaaggaggagaggcacagaccacagaacccccgccagcacaaaagaagaggaagaagaaccggagagccagaaaaccagcaaggagaagagaacaaaggagacacaaaaggcaaagcaaaggagaggacccccggggcacggcgaacaacaaaaaaggacaagaagcacgcaggcagcagaagcaaaaacgaaggcagaccggggggccaaaaaaggcccgaaaggacaaaaagcaagacacagcaaaccccaagccggcaaaacagcaggagcaagacaagcaggcccacgaacacagaggggagacacgcagacgaacgggagcaagggcagacaaccgaagagggagggcgaggagacgaccacagaaagggaaacagaagaggaaaacgaggagggggggcgggaaggccggaccggacaaaaaggagaggaggaaacaacacggcaccaaacagcaagggagacaaaccagcaagggagaaaaaacacgccacccaaacagcaaggaggcaaggggcaaaaaaagggagaagacagaacaagcaacggcacacccaaaaacccaccggcacaaggagaagaacaggaagcaggcaaccaaaaagcaggagcaagccccacaagaaaccaacacaaaaaccaaaccaccaccaagccagagaaggcaccccaaaaggacagggaaacaacaacaccagcgaacagcaagacaacaaagcagaaagcaaaggaaccaaaagggcccaaaggaaccggcagaacaggcggggagaggaaaagagacggcccaagggaagcagggggagcaagaacgaaaaaaagagagggccaggagcaaagcaagagcgaaaagcaggcccaaaagccacagcaccccccgagcacggccagaagagggggacaaagcggagaaacgcaccaaagggccacagagccagaaaaccaagagaggaagagaggcaaggaggcaagagacaggggcagagggcaaaaggggcaggcagcggcaaagccagcaccacagccccccgacacaggggggcacacacaggcgaacgagcaaaaaacccacacaaaaaagcgccgggagacccggcaaagaaaggcaagaaaaaagcaagaacgagaagaagacccacaaccgacaccgcaaaaaccaagcgaagaaaaaggagacaaaaggggacaaagagacaacggggggagcccaaacaagcaggagaaagaacagccgagacacacgagaggcaggagcacagaaaagccagaagaaaaggggaacaaaaaaaggacaagagaacacaggcccacgaaggacgacacacagacaaaaccggcaagagaaaggagcgggacagcggcccgacaaagcacggcagggcacggggccgcagaccacaaggcggaaacaaccgagcaaagaaccaaggcccaccaaagcgaaacagaaaagaaaaaccacgccacacaacggggggaaaaaaaacacaaaagggacggcagagaacaacgagaagaccaaagcacgaccaaacaaaccaaggacgaggagaaccacaaagcccaacgaagggagagggagaaggcccgaaaaagccaaacagacgaaaagcaaagacgagaaaaggacgaaaaaaagaaaacaaacagcaccccagggaaaccaaaaagcagcaaggaaaaaccaaaagcagcacaggaagcgaaggcagaaagaaagagacaaacaggggcccggcaaggcagcagaaggcaaagggagaaggcgacaagggcaaaggggaggggacaggcggaggacaggccgggcaagagcgcgaacacaccaagccacaccacacccgcgagcccaccccaggacaaaacaaaccacagggaaggggaagagcaaggaagacgaaggaaaaaacacagaacagggggaacaaaaccagaaagcaacagcgaaccaaacacacagagacaggcaaagcgggagaagcagcaagaagaagaaggggaaaaaccccaagccgaaaggcagaggggaaacacagggcaagaggaaacaagaaaaacaaagagaaaaacccaggcagagagcaaaacagaacgacaacggaaaaccgcaggcgagaaacaaaacgaagcagaggaaaggagacagaacgaagcagacacacccaacgggggcaaaaaaaaaaaaaaaacaacagacacaaaaacaaaaagagcggcaagacaaacaacaaaacccagccccaagcaaaaaacaaacaaaacaaaagaagcaagccggagagccggggcccaaagggcacgacaagaaaaaccaaaaagcgcgccacaggaagacaccggagcgaaggaacccaaacacccccacgaaccgaaccccagccagccacaaaaaggaggcaagaagaagcacccccccaagcccgaaaacccaccccacagaagcagcaggaagcaggcggcgggaccagggcccgggcacaccccagccacaacgcaagacaaaccgaaaagcccagccagaaaaggagccaccacaggccacaagcacggaaggggagaaaaaaaacagaaggcgaggaaggcagcgggaggggaacaaaaaaacggccagaggaaaaccaagaaaagaaaaccacacgagagcaaaaaccagagaaggggaccccagagaacagaaccaacagaaaacacacaaaaaaaacaaaaaaagaaaaaaaaaaggagcaacgcgaacagccacgccccgaaaagcaaacaccccaccagaacagcaagacaaaagcccgacccacagagaaccccgaggagcgggccccacggagaggaccgaggcgaggacgcagcaccaaaagcgacccacgcgccgccaggacaagaaccaccaccaccagcccagggaaggcacccgcaggggggcaggccccccggagccacagaacaacccccagaaggcagaaccgccgggaacgcccccccaccacaccacccccagcaagggcaccgaaagggcgagccgggaagagcggggaagagagaaaaaaagcgagggcagcaggcagcaggcagagaagaacagacagaaaccacaaccagacaaaccggggcagcaacaagaaccaccaagcaccacagcaagccagccacgccaaagggggaaaaggggacacccacccacggaggggaaaaaacacggaaaacaagcacagaccgcaaagaaggcaaaaaacgcgcaggacagacaccaggaaaagacagcaagaagaggagccgaacaaaggacagcccagcacaacacggacagcacacacacacacaagaagggagcacgcaaagcaagacgaaggaaagcagaaaaaaggaaaggaaaaggacaaggagaaggcaagagaaaacaagcaaaacgagaccagcgggccgagagacaaggagagaaagggacagagcagaaaaaccacggacaggcggggaagagcaggggagagggcacgagaaacggccaaaaggaccagagcaggaggaggcgcaggaacacaaggagagcccagagacacgggagaaggaaggaaaggagagaggagagacaagagacggagggacgaggaaaagaggggagcccaagacagcaaaagcaaaggaaaggacaaagggaggcaaagacgcagcagaagacgaaaaaaaacaaaagaaccagaggaaggaagaacaggagaaggacaaggaaaaggccaagaaccgaacacacggggcggcaggagaaagaagggggaaacaagaagacaaaggaaaaagacccccccagcacccacccacgagcccaaaacaccacaagaagccggaagaacgacaccacccaccggaagaaaccagagagaagagagacgcccagaaaaccagacgaagggcagagaaaaagacaggcaggaaacacaagcacggagcaaggagcaaaggagacgacaaagcaaagaaacgggacaagcagggaaaaagagacagcaaagcacaccaccaacaaaaagaagggagagaagccagcagaccagaaaagccagaccgacacggagcacggagccccaggccaccaccacccggaagggcggggaagaaacccgagcaaccacgacaaggggaaaacacagacaaggaaaacgagaagggcaaacccggacaggggggcacacaaggaacaaaaagaagcggaaccagcagggcacgcccaacgggaggggcaggagacaagccaaggaaaacagaagccacggacaacaagcgggcaaaagcacaccggacggagcacaggccaaaacagggaagaaagcagcccaaacacagaaaccgaagggaccacaaaacaaagaaaaacacaagaaacagacggccgcaagcccaagaaaaagcccgaggggaggggagggaggggaagaaagaagaccgaagcccagaaggaaaacgaaagaagggaaacagcccccgaaaaaaaaaggcagaaaaacggcaaaaaaaaagacgagcaaaacaagagagcgaaaaaaacaggcagaaacaggacgcgaacagaccaaaagggcagagcggcaagacagcaggaaaacaaaaaaacagccaaaacgagaaaaaaaaaagcaaacaaccaggaacacacaaaaagaaaggaacaaacaaagaacaaagggagcacgccaggaacgcaagcgcaaaagagaaaccaaaaacagggaaagaaacggaaccaagcaaaggaggaaacccaaaaggaacggagaaaaacaaacgcagaaagaagcccagagacaaaagggaccaggccacacagccggaggcagaacggacagaaccaagcgaccaaccggacccccccaccaggggggccgggaaaggggcaaagccaaaaggggacacaaaaagcaggcaaagaccacaaacccagagacccaggacgcaaccaacagggcaccaaccaacaagcccggacaaccaggacaggcccagaagggccaccaacagagaaccacacaccgggcaagcaggaaccgagcacagaccccccaggaaccaacgcaaaagggccccccagaacccggaacccaccccccacccaccccccaccagaagaagccaccacacccaccagcaaacgcgcagccccacaacccccccccgcccccacccccccagacacacaaggcgaggaggaaccaaaacaaacagcagcaggccaaacgacccacgccgaagaaaaaaaaacccccacgaaagacaagagcgcaaaaacggccccgaacccccagcccaaccacccccaacggcgccacgccaagagccaaccacaaacgacccagagagaagcccagccacccgccggaacccccgaccaccggaacaaacaggccgaagaaacccgaacaacccgagacccagcacacaccggaggaacccccgccaaggaagggagcacaaagcacacacacgaagcaaggaccaagccaagcccaagagaagaaaagcc

SEQ ID NO: 332 - RNA, 2867 nt, Homo sapiens
ggaggccggagccccaccgggccagacccagcaggcgacaggaggagaccaggccgagaagccccgcggggaaacagaggccccacgaagaacagcagcccgcggagccacccggacgaccacaggagagcccgccggcccaggagggaaagcgggccgaagaacgggcggagggaaaaggaccaacgcagaccccacccgcacagaaagaggcgggggggggacaccgaggggacaaaagggcaaagaacgcccagacagagagaaaagcacaagcagaaaagccaccagaaggccaggcaggcagcagccagcacgcgggcggcggggcgcgccagacagcacccccggcggcccccacaaaaaaagcaagccccggaacggcgaaggaaagccagcgagcagagggccaggggaggagaagccacacagagaggaaaccaaccagaaaggaggagggcgccaaagcagacagccagaaaagcgagcgggaccagacaagcgaacgaacccgagcccacccccgaaaacaaaccaaaaggcccaaaccaaaaacccccaacaggaagccgggggaaaggccaggcagggcgcagggcgggcggaaagaaggccccagggcccgcccccgaaagccccaggacggcccccccgccgaaacaaggcccccccaggccggggcacgcaacaaccagcccagccccagagacaaagccaggggccgggagccccacagccaccgccacccacacagcaggggaaaaagagacagacgccgaaccaggcggaggcagggcagaccggccacgcaacccgccccgggcaagcgacccgcccagcccccaagagcgggaacaggcgcccaccaccacaaggaagaagcagagacagggcacgccacggcaggcggccgaacccgccaggagccgcccagacccccaaaggcgggaacaggggagccaccacacccggcccacacagccaaagggggaccggcgagggagagacaggcccagggggcccagggccgcccggcacaggcagaacaaagcacgaacgaaccaagaccccacaacacccggggagagaccaagggggaacaggcagagagagcacagaacaggcaaggacccggggagacagaggggccaaagcagcccgaacagcaggccagcgagaaagaggagcagaggggaagcgcaaacggcggcaggggagaccagcggacggggagggggggagggcagaagaggcacgggggaagcagagcagaggaaggcagccgagagcccgcgggggcagaaagggggggggagaggagaacgcaggaaaggcaggaggaggacccagcagccagaaggaacagcccgagagcggaagggcagaacagcccagcaggccaacgacaagaaaggaagaccagagccaagggagaacacaaagccgaaagccggcacaaacagggcgaaaaacggagaaaaagggagaaccgcgaagccagggcgggaggcccccggggacaaggccgaaaagacccggaaaaccacaaggggccccagggagacccaagcagagggaccggaaaacccggcacaagcaaaaacccagggagccggggcagagccacgccgaacccagcacgggagcgaggcgggcgaacacgaggcaggaggagacaagacggccaacacaggaaaccccgccacaaaaaacaaaaaagccggacagggggcggccgaaccagcaccgggaggcgaggcaggaaacacgaacccaggaggcagagaggggagccaagagcaccacgcacccagccgggcgacagagcgagacccaccaaaaaaaaaaaaaaaaaaaaaaaaaccaagcccagagaacacaacccccgagcccagaccacgaaggggagaaagaacccacgccacaggcaagaaagacacaggccagaaccagaacccagaaccagggaaccacagaacacgcggaccgaacgaggaggaaggagcagaaagccaaacagaaggcagggaaaccacgcccacccacccccgggagggaggagccaagaaagaggggaaaaacagaacgaaagcccaaagaaagaaaggaggccgccacccagaaacaaagggcacccgcagcccgcagcagagcagaagacggcacagaaaacaccccaggcaccgggccccccagcccacaggccccaggcgcacgaacgagccaggggacagcaggcagaagccaacgccggcagaagccacacagccaaagccccagggccagagcaccggggggcccaccaaggcggggaggaacagggacggccaggggggggggcaggggaggacacgcagccgcgccggcagccccccccgagggcccgggccggacacaagcacccacgggcgccgacagggggccagcccgggcggacgacgggggaacaacagccagccccaggagccccaccccgccccacccggccgggcaaaccccacacgagcgggccagcccgcaggaaccaacaagccgccagagggcccggccgggcgggcccacgaccaccggaccccgccccaggcaggcggcacggggccaacccagcacggaagaccaccccagcgagacccgaagggaccagcgaggcccaggacgaggggccggcagaggagccccaggcaaaaaaggaaagccgggcaaacggaaccaccgaaaagaggaaggccccaggcggggggcagaagaggcaaggccgaccaggcccaggagcacgaagcccgccacccaacagaacaacagcacacaaaccaacaaaagccaaagccaaggagagcccaaaggccagcacgcaccaggccgacaca

SEQ ID NO: 333 - RNA, 2414 nt, Homo sapiens
cgagcaaacacggaaacgcagacagcaaacaaacccgcaaagagcggagaaaccgggccggaggcaaggagacaacaccccaggcaggcgccagacgaccgcccccccgagaggagagagccacccccccacgcacaggcgccagcccgcggagggggggccaagacaaggcaggcaccacgggagagagaggacagggagcgggggcggagagacccagacaccccgagccaccagacaagacgcccaagggccagagaccagccgccaccaccagccaccagacacagagagaacaacccaaaaacaacaggagaagcccccaggagaccacacggagacagaagaagaccagggaacgaagcaacgggacacaaaaaaaaaaaaaaaaagaaaaaaaagcacaagcccgcacaaaaaaaaaaaagcaaaaaaagcccagccccgcccccaggaacacagggccccacaaacacggccaggacagccaccaccaggcccgggccagaagagaaaggggggccgccaggagccagacacgagagaggagcaaaaccacgaaccacacagcacgaacgggagaacgggaggagacacaaggggggcaacggggggaaggggggaaggcccaagaagggcaagagcggggaagggaaaaaagaggaagagaaggccggaggcaagacacagaagacgggaccaagcaggggcaggacggacaggaagggaaggggcacacgaggaagaaacaggggagggggagggaaagggaggagggggaaaccaagccacacgaccccagacaggaagcccacggagaagcaacaaacacgcacacacacacgacacccacacagggaaggcgaccaaagggagcgccacaccccacccagccagaccgcggcggcagcccccaggcccaagaacccgagccaggacgcagccccgagagcccgaaaacccagccccgccccagcccgacacggccagaaaacgccaggcagcagcgcaaagaggagggaccccaggggcgaacgccaggagcaccaggcaccgcgccacggacaaaacaccgacgcagagggaaggacgcaaccaaacacaaagccacaccccaccgagaagccacaccccaaaggcaaggccgcacaaggggcgaccgcccagacgcccccgcccagggcccaggcccagggggccaagacaaacacagaaaccaaagccccccccacggccccccccccacgccgcccggcccaccccaccacacaccacggcacgggggagcacaaaggagcaccgaggccgccccacccccagcggggcaacccccaaggcggggcaaacccccccaggaggcccagagggaccagggcacggacgaaggaaaagaacaagaagaccgcgccacaccagggcgccaggcggacaagaaaggaaggaagcaaagagaggaccaccggagacaaagagcagggaggccaggacaggggaagaggcccaagaaccgcgccggacccaagaccccggacgggccaggcagcagaggcggggcagcccacccagacccccaacccggacccgcccacccccgacgcgggagagaacgaggaccagggaccccgggggcacaggaagggaacaggaggacagcacaagacagcaacacaccaagcgaggcacaaaacagacaagccaggagaccccgagacaaaccagcgaacacacagacacaaagaaaggaaaaagaggcaacacaggacacacgcgaaccgggggcccagagcaggaaaggaccggagagaaggcggggggagcagagaacgccccggagccaggccgccagggcccaggcgggccccagaacggggaacacccagggaccccccacgcaccaagagcaggcacccacgcgaagccgcagaagccccacgccacccccaccccccccccgcccagccagcggccaggacaccaccaaccagacccaaggcaagagcaacagcagaaacaaaagaaggcgcacagggcagaagcagggaaccgcaacgggagagaacaggcaggaagcgggcggacacacaccccacggagggaagaaagaccaacagcggggggggcacgcccaaacacccggaacaacgaggcaggccgagagacccaaaaagaacaaggaagagaggccaagacagaaaaacaagaaaaaaaaagaagacaaaaaacaaaaaacgaaaaacccccccccgcccgcgccccgcaaaaaaaaccccccggggagcaggaggggaggaggagccccccccccagccccccccccccgcccgcccccccggacccccgcccaccgaccccacgccacccccccccacgcccaacccgcaaacccccaaagggagacccaccaagcacacccc

SEQ ID NO: 334 - RNA, 699 nt, Homo sapiens
ggccgcccgacagaccggcggggcacagggagaagacagcggcgccgggccgcgaccagcgccgggggcaccgccacgccacagggcccccccgagaagcagcaggccaggggagcaggcaacaaggacccacacagggaagccacccgcccccaccacccccccccaagaggaaaagcggggcgacccgaggaacccaacaccgaaaccaggaacaggacccaggcccaaacgggcacgagcaccaaagaaaaacagaaccccagagacccacaacaaagagggacgcagaaaaaaaagggcccaggagaacgcacaaccaagagcaaaacagcccaacagaagagggaagcaggcccacaaacaaaccaggagcaagaggagaagcgcagcgccacggcagaagcgccaaccgaggcagaggaaaacagcaggcgggaggacacgggaagacgcaagaggaaaggaagaaagaacgccggacacaaacggcagaacagagcggaaaggaacaagagcacagaaaaggggcagagcaccgcacaacaggaaaaggagacaagccaaggcagggaccaaagcgggcaaagaagaccagcacagccagagaaagacacccaagagagagccagaaacaggacgacaaaggaaacaggcagggcaaaaccgagccccacgaagagaagaacccaaaaagaa

SEQ ID NO: 335 - RNA, 157 nt, Homo sapiens
cggagaaccgaccaagcacaggcaacaaagaaaagccccaaaagcccacaccaggagcagacggaaaaacagagggcaagaacccaaggaaggagaaaacaccaacccacaagaaaaccaacaaagaagcgaggccagaagaccagggggaggccca

SEQ ID NO: 336 - RNA, 1293 nt, Homo sapiens
cgggcaggaaacgagagggacccccacagcaagacaaaggaaagagaacagacaaacccccagcacggcaacagcggcacgggccagcgaaaagggagcccaggaacccaaacccagcaacacaaagcgagccccaaccgacaaggcgccgagcacagaacagacaacgcaccccacagcagcagaaagccagagaggagcaccgacgaaccaaaccaaacacaggacacaaaagagacagaaaggaacaggagcacccgggaaggaaaagacaaaaaagacaaaccaagcacaaacagaagaaagcgaggccccggaaacaaacgggaagaaaagacagaaagaggcaccacccacgacgggacgagcagaaacgggaaccggcgcaagaaaacgcagcaagcagagaccgacacagcgcaccggaggagcagagagcccagccacccacccacaccaaaaagggagaaaaccccaccaaagccaggggaaggcccagagaacgacaaagacagaaacaggagaaaagaaggcgaacacaacacaggagccagagaaaaaccaccaaagccgagaaaagggcaaacaaaaaacaaagggagaggggagggccaaaagaaggaggaaggcggagggagcaaagcaaggacaccgccccggcagcgaaaccaggaaaccccccagagggggaaggcagcagacgggaggcccgcagcaggaaggcagcgagaaacaccgaccagccaaagccaccaaaaacagccagcccagggagaagaaccccacaagaccaagacaaacaccaagaaccaaaaaggaaaacccggcccagggcaaagagaggacaaacagacagcgagagccaggaaggccaggaagccgggacagagacacacgccaaacaaagcacgggggacggaaaggccgcccaggagacacaccgggcccaccagacgaagcggaccggcccagaggaggacgcgaaccgaggccaagaacaaagccgcacacccagaaaacagcacaaacaagaggaagcaacaggccgacgcccaccacacaaacaggaaaaaggagaccgaagggcacaaagacaaacccaaacacgacccagggaaagaccagggaaaacagacgaaaagggaaacaaaggcaacaagaggcagacaaagaaagaacggcagcaaaggaaaacagcccgcagaaagcacacaacccaggaagcgccaaaagaagaacagcaccaaaaaaagggaccaggcacacaaacagcgaacacaaacacaagagaaa

SEQ ID NO: 337 - RNA, 66 nt, Homo sapiens
cagaaccccgggcgggggaccaggcccgccaggacaaggggccggcgcaaccaccaaggggccggg

SEQ ID NO: 338 - RNA, 3506 nt, Homo sapiens
aacaaaaacaaaaaaagccgggcgggggcgggcgccgacccagcaccgggaaacgaggcaggagaaggcggaacccgggaggcagagcgcaggagccgagaagcgccacgcacccagccgggccacagagcgagacccgccaaaaaaaaaaaaacaaaggacccaaagaggaagccaccggagagaagacgcacacacaaggagcggcagggcaggggcagaacacgcagaaacaagaagccgaacggaagcaaggaaagccagcagacgacgcgcggcagaccggaccgaaaggaaagcaaccacagcaacagaaaaaacaccaccaaaagaaaggcgcaagagggcacacgcgagcaggaaggggagaaggcaaaggaggaacgcacagaagacccaggcggagaaacggaaaaagaaaagcaccgccaaaagccgccaacggggggcgaaagggaaaaaccgccggccggaggagagcacccgggagacgagagccaaggaaagagggggggggccaagcacagcggcaggaacagaaacagaacgcacggaacaggaacagaaaccagaccaccccacccccagggcaaagccaggaagccaaccgagcaccagcaaacaaaaaaaaaagcaaaagaggcgcaaagagcaccacgacacaagagaaaaggagcaaaaagggagaaaaaaccacgccgacgcgcggacggggccccaccaggccagacccaacacacccgggccccacgacagcagacaaaaaggggaagaaggacggaaggggcgcagaacaggacagggcgagagggccccccaaccccccacaggccaaggacggaagaacgagagcgaacaaaaaacaaaaaaagagacagaaagaaagaccaaaaaagaagaaaaacaaagccaaaacacccagaggccaaaacaaagaaaaggccccaaaaaaaaaaacagggagcaacaagagcacaaaaaacccagagaaaaaaaaaggaaacaacacagaagggggaagaagcaagaagacaagcaaaggaaagaccacaccacaaaaaagaaaaaagaggacaagaagaaggaggcaaaagcgaggaaaaggaagaaaacccaaaaaagaaaaccaagagcaaaaaagcaggaagcgacaaaaggaaagacacaaaaacaaagagagaggagggggacacccgccagaaaacagaaaaagccaaacaagaaaggcaaacgagaagaaaacggaacagaagaaggcaagaggcagagaagggcccaagagcaaggcaaagagagcaagccagggaagagaagagaacacagacccagggcagcaaaaaaaacaccacaccccaacaccagcaggcaccaagcaaaagacaggcacaagccccgaaggcaaaacacgagcaccaacagaccaagacggcaacacagcccggaggggggggaacagcggagaaacagcacgggcccgaaagacaaacggaccgcaaaccgaaggcggcgcgagcgcagaaacaacaccagaagaaccacgagaggacggaccacgaggcacagaacacccacaaagccccagacaccaagacaacacagccagagcggcccaagccggcccccccaagccaagagaaccgaccaggggagacagcagggaggcaaggcccacagaaacccgacacgggagacgacaggaaaaaccgcccacgcgagaaaaaacagaaaggcgaagggcgaaggaaaggcacagcaggcacgaaacggaagaaccaaaccaggacacagaaaagccaggagggggaaagggggaaccacagagaccgccggcccccaaacgagaaaggggccgccaaacaaacagggggccgcccccaggggaggcagggaaaaccacgggcgggcaggcacgcaaagcgccgcaaaaagggcaaacaaaaagggcagcagcaaggcaaaccccaaggacgggaagcaggccccagcgggagagcccaggccagagggagcaacccaggagccaaaaacgaggagagcaacaagagaaacaaaggaacacaggcgacagagaggaaagcacaaaaagacggaacaaaaaacaagcccagaagaggcagccccaccaaccacgggcgggagaaggggcaccggggaaacaagcggaagggacagaaaaggacagaacacaaccggcgagaaagacaaggcacccccacagcagccccaacaacagcccgcacccgcccaaccaccacaagaaagagcacccacgcacgaccacggggagagggcgacagcccggcggggagggcagggagacggggagaaaggacagaaacagaaaagaacaaagcagggaccaggagaggccaaggcaccccaagccaagagaccaggaccccaagcaaggaaaagcgggggggaaagaacaggggggagggagggggagaggaagaggccacagccccgaggcccaaaggaggaaaccaaaagcaaaagcgaaaaccacggggaaagcaaacagggaaaaccacaggagccaccaaggcaggaaaggcaccaggaaaggcccaaaagcccaacagcaccccgcccgccaaaacagcaaaaaacaaaccgccggcggggcacgacacgcgcgaagccaccccacaaaagagcacagaaaagaagggcccaagggaaggacagcccccccgccagaacagaaagcagaggagaagggaggaggaggggaggggcagggaaaaaccgcagcccacccgcgcagacgaagacaaaccccacccgcccgccccccacccaccgacaacaccccccccaccccaccccacccaagacgaagggagaggccccaccccaggcccagcgagagggccccccggcaccaggcagacacccaagccccaggccccagacccaccagaccccagccaaggaagagaccacacgggggacacgaagggcaccgcaggaaccccccaacccaacgcagaaggggagaccagacacgggcaaggacgaccaaaggccagggccaaagagcaaccgcccagacggaccaccacccccccccgcagccaccacccaggggaacacaccagccagcacaaccaaacccagaagaaaagagcaacacggcgagaaccacgcagacgaccccagcagccaaaaaagaacaaacaaccagcccaagaggcgaaccaccccaccagcccaccacacacaccacacaaaggaccaccaccgggaaacgcagcggaggagaggacggcaagcaccagcacggagaccaaggcagcccggccagaggaaagagaggccccccacgaacgacagccggagccccgggggcaagacgccccggacccccaaagggggacagagccaggcacagagacacccagcacagaacaacgggaggagcaaccaaagaacaacaccaaaaacaaaaaagcaaaccccccacaggcgccccacaaggcgccgccacccccagaggcaag

SEQ ID NO: 339 - RNA, 50 nt, Homo sapiens
ggaaaagcgccaggccccccacaccgagcggggccgaggccggggcagcg

SEQ ID NO: 340 - RNA, 4994 nt, Homo sapiens
gggcaggaaggaaaggccgaaggagcaagacaccaaaaggcaggcagggaaggacacccagacagaagagagaagaaagacaaacgcacagacaagaggagcaaggcacagggaagagaaaccgcagagccaagaagcagggaacccagaaaggcaggccccaacaccggaccaagcaccccccccgcacagagccggaggacaggcaagagagcgcagcaccccccacccaacagaagcccccaggggcagacacgcgcccaccacaggcaccccagggcccagcacaggccggcaccgcaagccccacaaaaggacaaagaacaccaccaaagaggggggcagccggagaaaacagagcacaagaagggccaaaggagaggaacggagagaaccgagagaagaaccagcggcgggggaggagagccaggagggaggcagagcccagggcgggcaggcagggcagaaccagacagcacacggggagaagagaacggaaggacgaagcacagagaagaccagacagacgggacaaagaaggaaagagaggaggaggaggaggaaaggcagaagaccgggcagcgcacaagagaaggaggggagccaacgagacagaagcaggcgcacaggaagggggaagaagagaggggccccacccacagagggcacccaggcacgaggagcaaaggcgaaccagaaagaaaaacagcacccgacccacgcacacacccagccccagcccagagccaagagacaacgaaaacaggaggaaggcaggggaggggaaggacaggaagagcagaacgcagccgaagcaacacagaaaaacaccagggccggcgagcaaaaagcacacgagcccggggggacgggggcaacaaacaacgaggccgcagggcccagcaaccagcccacaacccagccggaggaaacaggcacccagcagagagaaaaaaggggcagagagaaaacagccgagacagcagcagaagggcaaggggacaagcagggcgcagaccacacaccccccggcaccaaaaagaggaggccagcaggcgggagggacggcaaagcgcaaaaaagaacacgggacagaggagaggggaaggcggaggggacccagagcccaagcccagaaacagggaccagaaaaaccaccgcccagcaccagagcacgagagccaagccacaggaagacaccccaaagacccagcaaccccagaaaaggaaccgcagaaccaccggaaccaccgcacgcgcaagcagagggagcacccccccaaaaaccacccagaaagccggacccagcgaggaccaagccaacccaagaccccggaagcaaaggacaacggcgccaagcgagcccgagacgaaggaggagggagcagcaaagacaaggaccccagagcaccccaaggcacaggaggagggggaagcccaaacaaggggaaacaacacaggaagacaagaggaacagcaagcacaccagcagagccacgaaaaggagagaagcacgcaaccaaaaacaagagccaagaaccaccccagaccaaacccggccacaccaaacccagccacacccgagcacagacccacaaccagcagccacggacccccccaaacccagcccccggccaccaggaaggagcccgcgcaacaccaaaccaaggccaagccaaacacccccaaggcccaaaccccaccaggcacagccagccagaacccaaagcgcaaaaccggacccgccccgccccgccaaccaccacagcaccccacagaagcacccaaagcacaaagggacaaaacaccacggcccccacaccaggagaagcacacccccaaaaaggcaacaaggcccgggacggcccgcacccagcaccacccccccccacacacacaacacacgaaccaaagccccaaaaacaggcgcaccgccagggcggcagcacccgcggaaagcaccccaccagcaacaccaggacaggggcaaaacacccaaaaagcaccccagacgagaggaccacccccggcgaccacacaccccagaaacacacagccccaacgcaaacgcaacccccacggagacacagcccaacaccaaccagcacacgggaccaaacagagaacgaggagaacaagaccccacaaagaagggaaaacagccaggcgggggccacgccgaacccaacacggggaggcgaggcaggggacaccgaggaggaggagaccagccggccaacaggcgaaaccccgccacaaaaaacaaaaaaagccagggggggcggcgccgaaccagcacgggaggcgaggcaggagaacgcgaacccgggagacggagggcaggagccaagaggccagcacccagccgggcgacagagcaagaccgcaaaaaaaacaaaaaaaaaaaacaaaaaagggaaaacgagccagacgcaacaaaccgcaagggaggacaaagcagggagaaacaaccccggcccaaaaacaagccaagcacgaaaccaccaagccgcccccaaggaccaaaggggcgaaacacccaaacccagcccgcgggacccggacggaagcagggaaaaacaggaacgacccaacaaaggcggaaccccaaagcagaggggggaggggaggcagcacgacgagagcaaaacaaccgcccagaacaccgagaccaggaggcggacaagggaggaggaaaaaaaaacaacaccaccagacccccggccccagacacccaggaaagcccaggcagcaggcacagagagcagcacggcagcaagagcgccaccagacacggcagacaggcacagcaacacgccaggccccgcaaacccaagccccacaggaaccccaacagggaggaagcgaggccagagcccaggccaggggaaaacaaagaaacagcagaacagcacagcccaaccgcacgcaggagcacaccaagcccaagcaagcagagaccgggacagaacaggcgaaggggacccaaaagggccaaacaagcccagcgacgaggcagaagaccagccacgggaaacaaggcgcagaagcagccggcccagaaaacagagcaaaaaaggaccagacacgaaaagaaagccgggaggcggagcaggagaagaagaaaacgcaaaacccggagaacaagacaagcaaaaaggacgaaaagcgggcaaaaacacagcaacaagagaccaaaacagaacacagaaccccaaaacaaacaaaaacccccaagaccagcaaaggaaggacaggaagcaacgcagcacacccaacccagcccgcacggcccccccacccccaaggagcaaaagagaagccaagccggcaggcccaccccacacacgggacgggaagccacaacccggggccccagcagaaaggggaaaaaccgcagccgaagggaccagaaggaaaggaggccaaacacggaacccgcacaagacgcaccccggaaggacgacacggccggacaaaccaggagcacggaaaaccaagacgcccacacgaggacacccaaaaacgggacgcagccccggggccacccccgaaaagagggccagaggacccccgggcacggccagaagcacaaaaacaaaagcaaagggcaacacagacacccacagaccaaacgccgaagcacaccccgaccccacaacagcagaggcagaccaacggcccaacaggcggaaacggaccagaaaggcaaaacagcgccaagggccacaacaaggggagagcaagaagaaccacccgacaccaaaggcaccaacacccacacacccaacaaagaacggccacagaacaccgcgcggaccgacgaacaagaacgcggggaagaggcacgaagaagcccgggcgacccggcccgcgccaacgccgggaccaggaagcggcccggggcaccacacgcgaaaggcggggaacaagcagggcaaaccagccacgggcgccgcacaaccagagccgagaccgagcagggggggggccggaagccggaaccgacgccccaaagagacggcggaaccagaaccaaaccccggcaggcgagcccccgcccaaggcccccagagggccgggaggcgggagcccaggccagcgccagccggaccgggggccaaggccccaaacccgaggagcgacgcaagggggcgcgacacgacccgcgaaggcggcccagacggagcagggcgcgaccgacggccccggccacagcgcaaggcccgcgaagcgaacccacggggaagggcgcggagaaagcggggagaaagagcagggggacgcgggccgcgccggcaccgccgcaccggacgcgggcccccacacaccaccgccggaaggaagcggccagggacgacgcacaccaggcaaggggggggcccgcccaaacccgcccccgccggcggggcgggcccgcacgaggacgccgcgccgcaacggggcgcggccgacggaaggacgagggggcgggggcggagccacccgagagaccaggggagcaaggagaggagcccggaagcggcggcgaccagcgcaagccccccgaggggaggggccgaagaggggcagggggaaaaggagaagccgggggggggcgcggagccagaaaccggcaaagggacgcagaaggacgaagcggagagcccgagccgcagagagccgcgggaaaggagacgaggggcggggccaggcgggcccgacaacggggaaccgaccgacccccggagggagaggcgaggcggaaaccccaagcaaggacgggaccagagacccgaggggaacagacgggcggagaaaaaaaccccagacaagagggaggaaaagaaacaggcccccaaaaggggaaacgagggcagagaggcaggccgcccagccacaggggcgccagaaccggggcaaggagccagccagcagggaggcaggcggccccacgaggcaaaccgggaccgaggaccagcaccagacgccaccagggccgcacacagggcaga

SEQ ID NO: 341 - RNA, 2238 nt, Homo sapiens
cccccggaaccccgaaaggaagaccagaaggacagaacgcaagccccgaaggcccaacgcaaacccccccgcggggcggacggccaaggagaaacccagcaggggcgggagcagaggacacccaacaccggggcagggaacccaggggagcaggcgcagaggcgaggggaggaggcgggcagaagagcaccagaggcgggggggcgaggcgcgggagagagccagacaaagcaaggagcccggcccaggcggaggcaaggcacgaccagccacgcaacccgacccgggcaagcaacccgcccagcccccaagcagcgggaacaggcacggccaccacgcccggcaagaagagagacgggacaccagggcaggccgcgaacccgaccaggagacaccgccggcccgaaaggcgggaacaggcggaccggccgccagacggcccagaggcggcagcgcgagcagagacccaggcccaggccccaccgcacaaaggccggacaggcaaaccaacggggcaaagccaagcccgcgcaaagggggacaagccaccacgagacgaaggcccggcacgaggaggggcaagaagggcaagcagggaccaaaaaacccggaaaaaacccgaagaaagcaaccccgaaaggacaaacacacaggcccccgagccagcaaagaacacaacacaccaggcgcccgccagcaaaagcggagacagacgcaaaaacagagccacagaccaaacaccacaccccgaacacaaaagggaaaaaaaaagaaccgaggacagacgaacccgaaaccacaggaggcagagcaaaaaaaaaggaagaagaacggccccgagaaggaaaggaaagggaaacaaagcaaaccgacgggaaggagagacgagccgggaggggacagggcacccccaggccaggccggaaaggagcggccaacaggagggggggcgcagagggcacaaaaaagccacacagccagaggggaaaaagaaagcaaaagcaaggagagagaagggagacggagggagggaggaaggaagggggcaggaccagcccccagcagccggggagcgcggacccaacccggcacacaaccgccggcaaacgcgaccagcggcaccgacagccccagccagcccacacaagacacccgccaagaaccaagggagaggaaggggaaaggggggcacggggcagggaaccagccaaaagcagccacacggggaggcgggaggaggggaggaccgagcccacaacggcgagcacaacacgagcaccccccaggccgccgcccccggcccccagcccccccccgcacacagagcaaggcgcagggcaaaagccgcaagaccacggggacaggaggaggggaaaaggggccccccagccaaacgccggcagggggcaggaggggcagggaagaggcaagagggcaaaaagagaaagggagccaaaccgcccaggccccacaccccagagccccaggagggcaaaagggccaaagggaagagaaagcgggacacgcaggccggccgcagcgagagcaaacagaacaacagaggccgacagaggagggccgccgcaggagaggccgggaggccaaaacagccccaagggggaaaagaacaaaaaaacagacccccaagccaaagccaacgcaggccaaaagcagaccccaagcaggcagcccccagaaacgcccgcgaacacggaagaaaaaacaagcaaggcagagccacagcagccggagaagggggacgaccaaacgggcccgaagggagagcggggagccagagaagccagggaggaggcgcagagagcagcagccgaggaaaaaaacccccaccggcaagccacaggcgccacagcaaccggggcacccacggcggcgaagaccagcagacgcgaagcggcagcccagccgcgcaccagccagaagcagcgggagagggccaggggcgcagcggcccccagcgccacacgcccgagggcgggaagggccacccccaggagagaaggcagcggcccccagggacccaccagcacggacagccacaccgaaaaccccgagccaggcaccagaacagagaacaggagccgggcaagccggccgccccaggaagcgaggacgaggcagggaaacaagccggcaacgaggggcaggagaaagcgcacccccaacaacaacagaggacggacacgcgcagagaggcagaggagcccagcagcgggggac

SEQ ID NO: 342 - RNA, 3363 nt, Homo sapiens
ggcgagcgcacgcacacccaacacgcgccacccggcacccccgcggccccgggccccaggagaggggagggggagcaagagaaaaaaggggagacggaaggggaaaagccccaccccccacgggggacaaagccccaccacgggcgacacgggggggggggaccagggagccaggcccccaccggacaggcccccccggcccagggcccggccggcagacgcccagcaaaaagcgacagccaagcggggaccaacccaggcgcggggccccacagcacacgccgagggggcaaaaaggggcgggacccaaccccccacccccgccgcacagaaacacccagaaagcaaaagaagcagagagccaaaaaaaccgggcccagggggggaaaacggcccacaacaggaggggggccagccacggacaacgacccgcaggccagcacccgacccaagccgcgcccccaagagcgaaggaaagaggcacggcagaccaaagaaccgcagaacagaagggcaccaccagccacacaccccgaagagacggagcccgcgcccaggcggaggcagggcgcgacggccacgcaacccgcccccaggcaagcgacccgcccgcccccccccgcccccgaaagcgggacgacaggcgcacgcccccacgcccggcaaggagggagagggacaccggacccaggcggccgaacccgagccaagcaaccgcccgcccggccccaaaggcaggaacaggcggagccaccgcgcccagacacacacccgacggcggacgaaccggacaaagacccaaaaagagagaggcaacagcagggagaaagcaacgccgcaagcgccggcagacccacccaccacaagcggaacacaggcaaaaacccccacccagggaccagacagagagggaaaagagcaaccagaaaagggaagaaaaagccaagcagagcagacaggcagcgaaaaacccaaaccagaccagggccaagggcggcgcaaagaaccccaggccccaggccagcaagccaaaggagggagcagggaagccgcaaaaggggagacacgggccaagacaggaagccagcaagcccacccggcccagccaaccccaccgacccccccccaggaaacaggcccaccggccccaaaacagcccagcccaggacgggaggcggggccccaacaccagaagaggagaccccgccaggcagggcaggcccaaaagaccagggaggcagggggagcccacgccccccccaaggacagagaagaacagagcccggccaggcgaggcgggcagagcaggagggaaaggccaacccccccaagggggaacccccccacgggcccaaggccccaggccagcggagaaaccgagcacaggggaccggcgccgacgcaggaaagcagaaggagacgaagagaccaaggcgcggaaaagaccaggacaggccgggaacagccgcagaccccgggcccagacacacacacacacaaaagaaaggggcaggggcagccaagcccccaggagaccaagagagcgggccagccaccccagcgaggccccaagccgaagaaccccggcccagccacgaaggagccacaaaaacaaccaacccgagaacaaacgcccagggccgacccagaaacccccccccaacaccaaccagcggggagcccccgccaaccacagccaaccaaccaagccgaggaggcgccagggcagaggcgagacccccagcggaaggggccaacaaaggaagaggaaggaagggagcaccggggagggaaagggccaggagcaggagggaaaagggaaaggagggaagagccagggggagagcagggcggaccccgaagagcgccaaacccagagaacagagaggaaagacagacacacaaggggaagaaagaaaagagaaaacaaagggagagcaaaagaacaaacacagggccaacccaggaagggaaaaagggcagggaaaaggggaagagagaaaaaggacccgaaaggaccacgaacccggccccgacccaccagaaccccgggaggaaaaccgagcgagcagagcccggccacccccccaccggcacccaccacccagagaaaagaccaacaggccaaagcgcaaaaaccaggaacaaacacacagccagaagcaaaaggggaaaccccccaccaacacgaagaaggcaaagggacaagacaacccgcacccccccaagcaaccaaccaacaagaaaagccccacccagccccaagggccgccgccgccgcccaagccccgggaagccaacgcgcccagcccaacgcggcagcggggcccccccacccccacagccacggacaacccagcccccagccaccacccacccccaagcgaaacccccagcaagacccggcagccccacgccaccgcggagaggaaaggccacagcaggaacagcagcggaacagccggggacgggaacgcaccgcggaggcaccaccggacgcccccgacacaccccaccagaccgggccccgagggcagcaacaaccacgagccagggccgcaggaccggcaagaagcgccagcaaaggaacacgaacgaggggcggggggcagcagcacgagcagaaaaaaacgagaacaccagccagaaacggcagccgaggaggggcgggcggccgcccaccaccccgcacaagcccaccaggccagaagaggggaaagggcagagcaggcagagagggcaggcgaaccggcagagggccccaagccagggccaggggccggggccaggccggggcaaagggcagacggcccacccggagcgaagcgggcagggaggggggccaaagccgggcccggcaggcacacccccacagaagccccgcccccggcgggcaggagggggcagcgcaggagaggggcaggagggggggggggcagcgaaacacagccgacagcgcccccaccagcccccccccccgccccccccacaccgccccccccggcacggccccagccagggcaccgacggacacccccccgcggaaggacaaagcacgcaaaccagcgccgccgaccagcgaccacgcccgccccaaacccaggacagaaaggccgaaacgcacaaagcccgacgcaacgagggagggccccaaagcaaaaaccgccccccgcccccccacccccacccaaccgccccggcccagacccaccagcgccagacgcacgcggcgcagcgcgccagcccaaccagacggcacaggggggaagaaggcagacaaagggccagacgccgcggccgccaggggcagagacggcgggaggaacgaaagggagggggaaagcggagcagaaaggaagcagg

SEQ ID NO: 343 - RNA, 6061 nt, Homo sapiens
aagcagcaaacaagggagaaccaaaccaaggaaaccgccgagcaaaccagacaaaaagaccgaccggacagaaagaaagcaaccccaaccaagccggggaagcaagcccccaagaccagggccccagcgggcccaaaccaaaaaccagacccagaggaaacaacagccccaaagaaaagccaaaaaagaaggcccccgaggcaaggggggggggcaccagggaaagagggaagggggggccagcaagcccccagccccgggcaccagggcgaccagcccagacagaaggcaagcccgaaagaggccagcacagcacgaaaccaccacccccgcaacgacaggaagaaaaccacaggaaagcccggaagagggcccgcacccccaagagaaacccaagccaacgaaggccacagcgcagccagaagagacggaacgaagccaacagagaaccaagcaagacaaacgccggcaggacacacaaaaaggaggagaagagaaggccaaagagagagaaaaggagacagagacagaagacaaagaaaaaaaaaggaagaagcaaaacagaagacaacaggcccccagcagaaacgagaacaacaaccggggcaaaacgaagcaacaagaggcgaaagcacccagaaaaagccaaaagagaggccaccacaaaaaaagaagcagaagaaaagaagacaagaaaccccgcacgagagaaacggccacccccaaaaggcagcgacaccaacagagagacgcaggaagggcagggaacagaggaggagaagaaaggaagaacagagcacccagaaacaaaaagccgagagacaccccaaagccgggccacacacggacgcgagcccggacaccccacagaaccagccgaaaccacgcagaacccaacccagaccaaccacccccaacggaccgcccaaacacaaacacaaacccacccaacaagaaggcaccagcccccagacagaggcagaacacgagcagaccaccgaaacaccccgccacccaagacaacaccacagcagcccccccgaacggacagcacaggcaagagggagagaagccaggcggcccccgagcagagaaaccggcagcacagggcgggaagacaaaggagccgcccgaggcaagacaccgcgcaagccggagcgaaaggacgcagcagaacacgcccccaaaaaagggcaaaaaacacaaggaaagcaaaaacgaggcagcccaagcaaaaagcccgaccccgaaaagagaaaacgaggcgagcacgacgcaggaggcacggggacaggacagagaaacaaaaaagccaccgaagaacaccaaggccccacaacacacaccgaccagaaggaaaagagcagacaaacagagaaaagaaagaaaacccggcagagccggaaaccacagaaaaagaaggcagaagaaaagaaaggggaaaaagcaaaaacagagacaggccacaggggagaaacaagaagggagcgcaaaagacaaacacaaccgcgcggcaaccgcaccaaggcaagaaaaaacaagcaaaagcagggaaaaaggagaaagaaggacaaacacacgacaggagaaaggcaagaaaaaagagcccaaagcagaacaagggccagaagagaggcagccaacacccaccacgcgaccgcgcacacacccccgaccgcacaggcccaccccagcaggacagggggcaccaaaaaacacaggagggaaaaaagccaccacagccgcaaaggaggcacagccacaagcagagcacgaaaaggcggggaacaaggcaaaaaaaaaaacaaccaaaagccacaggcaggacaaccaaaacaaaaagaaaaagaccccaagggcagaggcaaccgaacccagcaagccaagaagaaccacgagaccagcgcaggacacccaggcaaccagcgcaaagaagcggaaagaaaacagacagccagggcaacccagaggagaaagggaaccaaccagaaaaggaagcggaagcacccaaaacccaaaagaccgccccaaaaccccacccgaaacaacacccacacacaggcaaaagagaaggacgcagcaaaaagaaacaccccgaacagggagaacacaaaaacacacgccaaaaggcaaagaaaacaacaggaagacagaaacagaaacaaacggaggcaagccccgaaaagaaaacaaaagaacacgcggaaaggaccagaaacaaggaagcagggaagagcccacaagcgggcaaagacccgggaggagccccgccccagggaggcaacccagggggagaagggaggcaaggaacgaggccaaagccgggaagcggccccgagaggcacgaggccgacccgccacgccacccacgccgaccagaggccgagccaaagacggcagacacgacgccagcccaagcgccggcccaccgcagcccgaccaaaaacagcccaaccaccgccagacgacagcaaggccgaaccagccgcaagaccccgagggcccggcaagagccaggccggcagaggagagccagcaaaaccagaaaacacccccgcaacaagacaagagcacgaacccaacaagacaaagcacaagagaccaaaagcagaaaaaaacagaggaaaacagcaagaagacgcaccgcaaaagaaaaaacaaaaccaaaaaaggccagaggaagcgcaacaggaaaggcacaccaaaagagaggcgagaccacggacgccaacggaaggcacaacacgggagagcacagaggcaaagagaggaaagcggggaaaaaagaaagcaacagagccggaggacacaaggggaaacggacaaaacaccaaaaaaaaagccaaaaagccaaaagggaaaaacaacacggccccaaaaaagaggaaacacgaacagcacggagagggcagaagagacaaaagccacgcagagaaaaaaaaggaaaaagaaacagacagcgacaaaacaaacagagccaggaggggaaggggcagaagacaggagggaaaggaggagagagggaaaggcaccagcagggacaaacagccagaaagaggacaacacagaacaggagcccaagacaagagggaccgggccaccccccacacaccaagaagccaggaaaaaccggggacgggcaccaccagccaaggaagagagagcgcaagcccccgccaagcaggggcgaaagaagggcaggagaccacaaagagcacagaagccaagagaccgcacaggacccgaagacagcaaggacgaaggagccggcagaagcgagggcgggaacacagggaaagcccccccgggcgccccaggacgggaagcaagagcccagaaagcagcagcggaaacacagaagccccccaggaacgcagaaaggaccagccacgaagaccaccgcagacccgcacacaccccaacaagacagagaaaggaggcaaccaggcaggaggcacacaggagcgagacagggccggaacccccagcgaggaaaaggaacaaccccccagaaacagggagagccagcaagacaacaaggacaccaccccaaacaacgaaaaccaaccacagacggcagagaaaggaggaggaaacggacaagaacgagaagccaggcccacggaaagcaagcgggagaaaaaggcaagggaagcaccgcagccccacccagaaaaagacgaaagggccaaggccggaaaagacaaaagaggcaaaccccacacacaggagaaggacaggaccaaaaaagcacaggagcccagcccgggggggggggggggggggggcccaaagggcccaagcaggaaacaacaagagacaaaaaagcagacaagaaagaagcgcgagcacagaccgcaaaaaccccagccacacccaaaccccccccaccaccagggcggaggcaaagcaacacaggagaacagaagaccccagagagagcacagagcgcggaacgccagaaccgccaaccgagcccccaacacagaccagccggcccgccaggagcaacgcccagcccacagcagaagagaggcccaggggcaccggacggccccccggcaggaggaggccaaagagggcaaagccggaaagaaaaaaggacagagggaccaagaaaaagaacggcaggaacaagacaccagccaccacacaccaggccccccacccagacaacaaagaagggaaaaaaaggcagcccagaaaggcgagagaaagaaaaaaccaacaccaaacaagaaaaaaaacacggcaggaaaggccaagaggaaaagaagaggaaaccacaccaagaaccccacgcaacaaaaaaaaagagagaaaccaaaaacgacaaaaaaagacacaccacagaaagaaggaggaaggaaaggacacaaacacgccaaggaaaaaagcaaaaggagaacaaaaaaaaacaagaacagagaaagacacagggggcaaaacacagaagacagagagagagaaaagggaggaagaaaaaacaagagcaaaaaaacggaaggaaaagcaaaacaaagaagaagacaaccaaagagcaaaaaggaaaaaaaacacaacacacaacccacagacaaaaggcccagggccggagggcaggcaagaagacgaggaaagaaggacaaacacaccgcccaagagcaacagggacaagaaaaaggcaagggcaaaaaagacaaaaaaacagggggacacgcaaaaaacaggaacagaaagggaagccagggcagagggccaagacaagcccggagcagaaaaacagagacaaagaaaagaaagaaccgaaacggggaagaacacaaaacaccaggaagagggaacaaacagcaaaggggcggggaaaggcagcaaggacaacggaggaggagaggaggagaaagaaagagagaaccaagaagcaagaggggaccgcaggcaggaaagaccggcaacgaagagagagaaccacgggggaacaaaggaaacaaacgggccgaaaagagcgggaggagcagacaagcaaagaaaaacaggagaccagcagaagcccacagggagaaagacagagagaggagagaagccaggacgccacgagcagcaacaggacccgagagaggacaggaaagggagaaagagagaggcccgaggaccaagaacaagacgaagaaaccaacacgaccgaagaaaaacaacaaggcacaggaaagagagaaacggcgagaagagaagcaggggaagagcggagagggaagaggacaacgagaacaggaagagggagagagacagaaaccaggaaagaaaggaaacaccaagaaaagaaaaagagaagacaagaggcgaagccggggcaccaccacgcaagagaggaggaacaaggaagaaccagcaaaggacagggagagcacagagagcagcaggaaggaccaaaagggcaggaagggaaggccaaaacgcgaggccaagaaagggaggacgaagccgcaccggaagcaaggggggcagcgggaagaaggacagaagcagaggacgcaagaagaaaaagaagagagaaaggacagaagaagaaaaccaaagaagggagcgaaaggggcggcgcaaagggcaggccagaacgaggcacaccaaaaggaaggaaaaaaaggacagacaaagggaacagagagagagaacccacaaaggaaggcacaccggggccacaacagagccggacccagaccagagaggagggagggagccaggcggaaccggagacagaagggagaggagcggggacagaacccggcaggaccgcgagccagagaggaacaaccagccaaggcagagcccaggggagagagcagcaccccaaccacgccccccaccccaacgcacagcagggcaaacccaaacaaaagcaagagggccagggaggaagaagcagcagaccacccgagacacagaagcagcccaagaaggggcgaagagaaaggaagaaccagcacaaagaagacagaaacagaccaggagggaggaaagaacagagaagagagcaagaagaggagcagaaaccacgcagaacaccaaggaaaaaagaacaaaa

SEQ ID NO: 344 - RNA, 3473 nt, Homo sapiens
ggcagacacacaacagggggagggggaggggagcaccggagcagccagggaggcaaaacaccaaagcacaggagcccccacccacccacagcggcccaaaagcaaagggagggaaaaaccgagcaaaaaaacagaagccgagccccgccacagcccggcccggaagaagcaggcagcaggcggacaccagcaagaaaggacagagggagcccgcaaggggagagcgagcgcacgggccccagccagcaaaacacacacagagccgaacgacagcccccccccagacaaacagcagcgaaagccccaaaacaaaaacgccgacaaacaagggaggacagcaagggagccgcgcgcggaggcaaaggcaaggaccagcagaggcagcaaggggggcagcccagaggaagggcagcccagaggaagaggcaagaagggcaagggggcacggcagagaaagcaggaaagacaaccaccaaggggaggagggaacaaaacggcagggaaccgggccaccgcaaagcaggcaagagacaggcgcaagaacagagcaaagagcgggagcaaaccacaacgcgcaaaaaagcagcccagaggaaaggaacacaaggcagggcgcagacacccaaggcaaggcagagggccagaaggcaccagggagggggggaggcagacacaccgggaacccagcgaaaacccaccaggaggcagaaaacaaccgagaccacccacgagagcaggagaaaaaaagagcacagcagggcgccgagaagcaaagggggaacggaaccagcgcggaagggggcggcacaaaaagcggaacaagagccaagcgcccccgccccccccccccgcacaggcccggggccggcgacagaggaacgccggggcgagccgcgacccaaagaggcaaagagaaacacgacaaccaccaacgaagccagagagcaagccaccaaacaagcaacaaccagagcccagaaaacacgaaaacaagaaccggggcccagaagaagaaccagaagaagaaaagaaaccaggcccaccacccgcccgcagggaggccaagccagggccccagcagccagcaaggcaccacgaaaaccgcaaggaagagaggccagacacgcccccaccgacccaggccacacccccgggggcggaaggccagggcaggggaccagcaaaagaacccaagagagcaccagggggaagaaacgaacagcaacccgagacagggacgccacaccggacgaaggcagggggacagggccacgcagccagaccccgggggcaagcaaccccgccagccccaagagcgggacaaggcacaaccaccacacccaaaaggagagagacgggggccaggcccaggcggccaaacccgggcaacaacgcccaaccagcccaaaggcgggaacaggacgagccacgcccgggagcagcaccgaagccaagcacgcagaaaaggcggggaaccacgccgacagcggcaggagcgaaaggccagaccaagcacaacagaaggcagccccagagcaagggggggaaacaagaggaaaagggccacaagagcggggcaaagcccaacacaaacgacaagaggacacaaacggacacggcaagagaaagccacccaggaacaaagaggccacaagaaacgccccaaaaggggaagaaaggaagagaagagcagaaaagcaaaaggaacaaaccaagaggaaaaccccccaaaacaaagccaggaccacgaaaccagacaccccggccacagccaagcgagacggggcccaccgcacccaggcagaggcagggcgcaaccagccacgcaacccgccacccggggagcaaacgcccagcccccgagagcaggaacaggcacacaccaccagcccagaaagaagagagaggggccaccagggccaggcggccgaacccgaccagccccaaaggcgagaacaggcgaagcgaagagggaggaggagaaaaagagaagagggagaaaaccaaacccaacaaaggaaaaaaacaggacacaggaaacgagggccgaaaagagcgaaagaaaaggagagaaccgacaaccaaagacaaggcgcgcgcgcagggggaaagcaccggcaggaaaaaaacacgccagagaaaaaaaaaaaaaaaaggcgcaaccgaaagccacgacacccccccccagcagacaaacccacacacccacagcacccacacaaaaaacaaaccagcgacacgcagggaagcacaaagaacacaacaagagagaaaggaaagaacccaaacaaacggcgaacaaggaaacacaggaggcagagccgcagcgcaccacagaaaaacaaagaagccacacggaggcagaacaaaaagccagacggaccccaagccacaggccccacccccgccccccccaaacccacgacccagaagcaaacaaaggaagagaaaacggccacaaacagccgaacagcccccacccaagggcaggacccagagccaagcagcccgcccccccccgccccagaccgagcgcggagcgcagcccagcacccccaggggaaaaggcggcacgcgggcaagggaaagcgggagaagagcgaaaggagggaggggggccccccggaaagcacaacaagaagacacccacccccacacaaagccccgcagccgggaaaaaacgagcggcaagccaggacccggagaagcaggcaagagccagcggccgcgcgggccaggaccggacacggacggagccggcggggacgagaaaagaagacaagcaagcagaaaagccggggacgcggcaacggaccccaggcgggacacaacgcaccgacagcccgcccagaggcccaggcgaaggaaaacaaacacgaaaccaaaggaaagccacccccggaaaggcgagaccggaaaaagagaagccagcccaaacccgagccccggacagaaggagaacacgcccagcacacaaagagaaaaaaaaacaaaccagccccaaaaaagaaggagacgagagaaaaaaacaccagccccaaaaaagaaggagagagagaaaaaaacagaccagccccaaaaaagaaggagagagagaaaaaaacagaccagccccaaaaaagaaggagagagagaaaaaaacagaccagccccaaaaaagaaggagacgaccacaccccccccccaaaaagccaagaagccacaccaaaagaaacacaaaaagacgaaaaaaaaaaggcacgcagcgacccagacacaacaaaagaaaagccacaacccgaaaagagacacagaaggacacgagggagaagagcggagccccaggaggagagcggcaaaaagcaaaaagcagaaccccaggagggcccacgaccaagaagggacacaccagcagaaacccccaccccaagcgaagaagcccgcaaagcccgcccaaggggagaccaacacagaggcaagacagggaggaacaa

SEQ ID NO: 345 - RNA, 3161 nt, Homo sapiens
ggaggggaaaagcaaagcggccggaaggagacggcccccaggaaaggaggcaggacaacacaacaccggacagggaccggcggacaacgcggaaaagggacccacaagcagcggcccgagaagggacaccagaccggggcccgggcgggggccaggcaagagggccaaggccagacacccgcccaggcccagacccgggaaagggaacaacgacccagggccgggcgcccacccgggccaggggcgccacccaaggggcgcgaccaaacaggacgcaccggggcggggccggcaagacacgcgcggaagcccagaggggcgggccagcccggagccggcgggggggcgggggccccgggagggccccaccccgggcccccgagggcgggagaccgcgccccgcaggcgaaacgagcagagcggggcggcggggccggaggcacacaccaaagaagccggcgccccgcccaccccgggcgaagccgggccccccaccccgcaccccgccagccccaccccaccccaccccacccccgacccgcggcggagcagcgaccgaccgcgcccccggcccaccccccacccccggggcgggcgggggggggagagggggggcccaccccccgacccaccccggcggggggggccgcccccagaacccccgaaagacagaagagaaacgcggggaggggcgggccgaagagggacagggagaaaacgagaccacgcaacgagggcccccgacccccaaaagagcggagacgagaggagaagcgaggggaaagaaacgcgccccccgagaccccccagaacccacaggggagcgaacaggaagcaagggaggcccccccccaccaacgcccccaggggggggacccaggggcaccccgggcacaacaggggagaggagcgagacgcggaagccgaggggcagaggcccaagcgcccccaccccccgccggaggcgcacgcggccccaaggcgcggggcagggggcggggagggaaggaacgaaagaacgaagagaagacagagaagagaacacgagccgccaccggcaagggggcgcgcggggagcggacgcgcacccccgcgcaggaaccccacagaccgccgagggaagcggcgcccggagacccgccccggcccggccacacccccaggaagccggaccaggggcgggacccgggggagccgagccgagcccggagccagccccgaaccccgaaccccagccaggggcgccccgggagcagccagcccggggcgagccgcccgcccgccgagcagccagagggagccggaccgccccccgacccgccccgcccgggcgggcccgcgccccgccgccccccccccccagcagcccgggcggaaggggacagaccgggagcccggagagcgaaccccggacgcgccccagaaccgcgacaccccacgacgacccccaagccggggggggggcgggaggcccgggagccccaagagggggcgccggaggaccccgaagaagacagaggacccaaagggcagcgacccccgcagggagccaggagaggcagggccagacccccccccccccccagaccagccgaggccgggaaggaggggggaccgagggaacccgggacggaagagagacgagaccagacccgggggcaggcccccgacgggcggaaaaagcccccaaggggaccgcgcccaaaccgggggaccaaccccggagggggcacaggcccgggaggaggcggggaaccgaccagggaccggacgcagccccagagcgggggaccccccccccccgcgcccgcacacaacgcaacggccggccaggaccgagcgggcgccggagcagagggcggcccccgccccggccaaagggcggcccggccccccaccgcgcggcccggagagggagggggcgcggcagcgggggaagggggccgcccgaccaccgcgagacagcgggggggggcgggcaccaagcgcgaggccggcgccccccaccacggcccccccccgccaccgcccccaccacccggagccggggggaggagggggagcggaaagccaaggcaagcccccccagggacccaggccccagaaaccagcaccccaggaaaaccgggggggcggcccaagggacccagggaggcggccggggcccccccgaacccgggccaccgagggcggggccagggggcaggggggcccaaccaccccccaccccccccggccccccaaacccccaggggccagagccgacaaacacccccccaccccgggacccgccccaaagcccccagccgagcagggaggccccggggacggggggaaaccccggggcccacacccccgcaccgaaccccgcccgacacggagggcgggcaccagaccacagagaaccccccccgcggcccgaggaaaggcaggcggaaaaggagcaaggaggacacccacagaaccccaagacccgccaccgcccccaaagcaacacccccaagccgcccggagaggggcagagggagcgcgccccccgccccccccgggaccccccccgccccccagccccgccccccaccccccccgcgccggcccaggccggggaaggcggaggcggagccgagaggcgcccaccacgcaaccgaaaagggcaggagcgggcgggccggcccccgccccccaccaccaccaccaccaccagcaccagcccggaagcccggccccccacaaggcccacccgcgggggggccaagcacccgcgggggggcgggggggggcgggcagaaagaccagagccgcccaccaaaaggccaccccaccccagggggcccccgcaggggcacacccgacccgggcggccccccaaggacagccagaacaaaacccagccccaacccagcggggaaacgaggccaaagagaaaaagacaggccaagaccccagaaaccaggcaacgggaggggggaggagccaggacccgacggcggggcggggacagccgggggcagggaagagaggagaagaggaaaaacaagaaagcccccaggacaaaaggaggggcggccgggacggagcgggggcgggaagacagagaagcgaggcagaggcagaaccagggcagaagggacggggagaacggggccacccccaaaaagcaa

SEQ ID NO: 346 - RNA, 2022 nt, Homo sapiens
gagaaggaaaaaagacgaagaacaaggaaaaaggcacaaaccacagagaggaaacgaaggccccaggccgcccaagcaagaagagaaacagagcaggaaaagccagaaccacacaaaagggccacaaaaaaaaaagcaacagagagagaaaacgccacgaaagcaagcaaaaaaccagaagcaacgacaaaaaacgagaagagagagacagcaaagcagagaaagaagcaaaggagccaaagaaccagcgcagaaaacaaacgcaacagcaagcgccacaagccacagaaaagaaaagaacagacacccaggcccccacacccgaacaaagacaccggaaaccaggaaaaaagacacaagaaggcagccaacagggcagccaaaacgccccgagcccacccaaggagcaagcggaaaaaggagcaggccccaaaggaccaggaaaaacaggaaaaaaagaaaggcaacccaagaaagccagcaaagggcaaaggcaaaagaaagaacaacccagaacccgaccaagagaaaacagcaacaacaaagaagaaccccaggaaggaaaccgaagcccaggaccaggaagaaaagaggccccggccagaacaagaaacccgaagaaaccgggacagggaaacccaggcaagccgaacagcaaggccacccgagaagaacgcacaagccaaaagcccaaaacaccaagggaggggagaaagacaggcaaaaaaaaacgaaaccgcgagggagaggaagaccgaaggccaaaacgagaccaaacaaaaaaaaaaaacacaacccccgcggggcccagagccaaaagcccagaggggcagaacaagccagagggaaaggaaagcacacaacagaccgaaacacggaagggaaaaaccccagggggaggaccgaaggggcgaaacagaaaacccagagaaaagcaagggggcaaagacacagcggggaaaagggaaagggaaaacggcgagggcacaacacggaagaaaagccacaaaaaacacgaaaaaagaaaagaaaagaaaaaacaaaaaaaagccacagcaaaaaagaagacaaaaacagaacgacaccaaaagggaaaaaaggaagaaaaagccaaaaagcgcaaaaaaaaaacccaaagaaaccagaaaacagcaaaaccagaaggaggaaaagaggcccagagagggaaggaacccaggaggcgcagaacagaaaaaaaccagggccaggcgcggggcccgccgaacccaggacgggaggcgaggagggcagacaccgaagcgggagcgagaccagccgacaacaggagaaacccgcacaaaaaacaaaaagccagggggggcacagccgaacccagcaccaggaggcgaggcaggagaacgcgaacccaggaggccaagggagggagccgagacagccagacccagccgggcaacaagaggaaaccgccaaaacaaagaacaaacaaaaaacaaaaaagaaaacacaaaaaagaaaacgccacaaaaggaaaagaaaagccaacaagcacaaaaacgagacagagcgcgcacccggcggaggcaagccagacggccacgcaacccgcccccaggaaagacggcccagccccaagagcgggaacaggcaggccaccacaccagcaacgaagagagaggggccagaggggcggccaaaccccggccccaaacaacaacccacccggcccccaagaacgggaaaggcggagccacgccccagccaaaaacaaaaaaaaagaaaaagaaacaaagacgaggcagaaagaacaaaaaaacaagcgacagcccaaaaggcggagacaagaacccaagaccaagaagagaaacacagcccaggaagagaggaaaacagcgacacacccggggcccacaaaagaaccaggcgccagccgccagagaggacaagagccaaagagaccaaaaggccaacacaccccagaacaacacacacaacagccagaaacaaagaggcggaccaaggaagaggaaaaaaccccacaac

SEQ ID NO: 347 - RNA, 1950 nt, Homo sapiens
aaaggacaagacccaaacaaccggaaaagcaagaaacaaaaggaagagcaaaagccagaagaagcacacaacagccagcaacccgcaaagagaaggccaaaaagcggcaaacaaaagggaaaaacaaaaaaacacaacacaccccggaggccaaaagaagcaggccaggaacagaaacacaagggcagaaagaggcacgaagccgaaagagcaggcaggaacgccgccacacaacaaccaacaaaagaagaagagagccagcagcagacagagaccaccacagaaccacaccacaaaggagcagaaagagagaaccaaagacaagccaccaaaggaagcaggcacagcgaaagaaaacggaagcacaccacgacacacaggagcagaggaaacagagcaaacacaagcaaaggagaagagaaagccaaacaaaccaggccagggcccaagagcaccgggaccaaaagacagaggaacagagcaccaaaagaggccaaaaccaaaaaaaaaaaaaaaaaaaaaaacccaaaaaaagaacccaaaacccaaagcaaagagaggaggaacacacaagaaaaaaggcagacaccaaacaaagaaggcaacgcagacggagcaaaaccacaaacaaccacccccaacacagaaaaccccccccccccagaagggagcccacagacccaacaaggagaaaaaagcacaaagcagaccaaggccccaagaaggccacaaccaagcaacaaagagcacaacagccacagaaacccaagccaaacaaagccaaagaacagacaccacgggcaaaaacgcccccaagagcagcaggaccaaagcacccacaagaagcacccgcaggcccacccccagccgaaggcgagacccaggagaagccaccgcgagcgagaacacgccccaacggaaccagggccagcagaccgcaaagagggcgcgcggcaggaggaggcaaaccacaaaggggcaccaggagagagacaagggaaggaaagccaccccgccgccacaagccgcccgaccccacaaaggcccagccacaacagccccccgaccagcagagcccccaaggggggacaaacaaagaggaacgacgccacaccacaacagaacacggccgaaaagaccaaaacgaggcgggagcgagaccagccagaccaacaggagaaacccgccgcaaaaaaccaaaagccggggggggcaagccgaacacagcaccgggagggaggcaggagaaccgaacccaggaggcggagggggaagcgagacgcaccaagcacccaaccgggcaaaaagagcaaaaccgccaaaaaaaaaaagaaaaccaaaacgagaggaggggaaaaaacgcgacagcgagaagccgccaaccccccaaaaagagacggcgccggcccgggcagaggcaggggagacccgccacgcaaccccgccccaagcaaggacccgcccagcccccaagagcgggacacaggcaccgccaccaaacccggcaaaaagaggaagggaaccaacaagaagaaaagaacaagaaaaggcagggagacagagaccaaacaaaacaggcagacacgcaacccagcaaccacgaaaacccaaaggaaggaaaagaaaaagaaaagaggaaagaaggaggagcagacaaaagagaaggaggcgagacgagcaagcagggagggcaaaaaacggcaaaagcacgcagacagcgaaaaaccacaaaaacgccaggcacggccaaccgaaccacccgggaccccaaaggcagcgggccagaggcccggaccaaacaaaagcgaaaaaaacgaacaaaggagaggaaccgcagaaagggaccgaaacccagaggcacacggcgcaaaaaagaaggacaaaaaaaacaggaaaagaaaagaccccgcagcaccagcccacagaccaaaagccaggcacaaagaagaa

SEQ ID NO: 348 - RNA, 21206 nt, Homo sapiens
aaaccagcaaccagaaaacccccacccaacaacagacgccaaacagaccaacagacggaaaagacaaagcgcaaaagaggaccacaaaacgagcgcgcaggaaggaccccaaccgaagagccccgcacggggccgcgaaaagcagaggaagcgaaggaagaagggaaaaacaggagaaaaagggacaaaacaaccaacaaagcaagcaggccgcaggaccaggaacagaaaaaagacaaaagaaaaacgggaaccaaaaaaggggcagagcagaaccaagaacaggacaaaaacaggaaaagagaacgcaggcaaccgggcgaagggcaacgaaccgaacgcacacaaaacaacaacaaaaaacaagaaaagcagccaaagaaaggaaaagagcaacaggcaaagaacaaaaaaaagcaggcaaacagccaaaaacaggcccggcaccacccagcggccaccaagaacccaaagagaaagcacaagagagccacggaagaagaggaggcagcacgggggcacaaaggagagcagggcacagagggaggggcaggaccgaagagagaagggagaaaaaaaaagagacaaaaaagacaagccacagaccgaaaagccaggccgcggaacagaacccacagcaaaagccaaaaaggacgaacagcccgagcccgcaccccagacagcaaggagagaaaaggcaccaaaacaagagccccagaagcaacagaaaccaaacaaagaacacaaaacagagcacaaacacacaagacagcaagacaggaaaaaaagagagaaacaggcaagacaacagaacaaacaaacccacaaccagaaagaggaccgaaaccagacggagaggaaccaggcgggagagaaaacaggcgaaacaaaagcggaggcaggggccaggagaaccagcaggcaagcgagaaccaagaagccacacacaagagaccgcgccaagaacagcaaaaaagacaaaacaacaaggaaaacaagggggaaaaaggaaagcaaaaaagcgcagaaacaaaaaccaacaagcagacagcaaacggaaccaaggaagacaggagaaacaaaaggcacgaggccgggcaggggccagccgaacccagcacgggaggccaaggcaggggacaccgaggcggaagcaaggccagccgaccaacaggagaaacccgccacaagaagcaaaaagccagagggggcacagccgaaccccacacggggaggcgaggcaggagaacgcgaaccgggggggaagcaggagccaagacgcaccagcacccagccgggcaacaagaggaaaaacccgccaaaaaaaaaaacaaaaaaaaaaacgcacgacaaggggcagggcacacagaacccaagcacgggagacgaggcaagaggacgcgaagccaggagcaagaccagcacgggcaacaagcaaggcccgccacaaaaaaaaaaaaaaaaaaaaaaacgggaggcggcagcagcagccacagcccagcacgggaagcgaggcaggaggacacgagcccaggaggcgaggcgaggagccagacacaccaccacacccagccggggacagaacgagaacaaccaaaaaaaaaaaaaaaagaaaaggaaccacacaaaaggaacagagagaagcaagaaccaaagcaaagcgaaagaagaagccagaagcaaggcagaaggagacacagccaggagaccaaaccacgagacccagccgcacgacgagagacagagaaaagaccacgagcccagggacagcacgaaagaagcgggaaacaggcaaaccaggcaaaacaggcaaaagagccaaacaagcaaagaaaacagggcagaaccccaacagagagcggagggggggcagagaggaaaagacagggaggagggggaggcaaacaaaacaaggaaaaaaaaaaaacagcgggaaggggcaagcgcaggaagcaaagacgaaccagcgaaccagcaacaagaaaaaaagcacaaaaagaaccacaagacacaacaacggccaacaggccaggcagcacgaaggggacaaaaaaaaaagcaccaaacccacacaaaacaaaagcaaggcggagaaaacaacaacaaaaaaccaggacccgccccccccgacccgagacaaagaaacagacgaagcgacacagccccccccaaagaaccaccaccaaaacaaaaacagacaacacagaaaaggaacagggaggaacggaacagcacaaaaaacacaagaaggacacagcaccgcagcaagagacagaacaacgagggcacaccccccgagacaaggaggagccccaggaacacagcacaacaaccgcacaagcaaggccggaaaaacagggggaagccaggcaaagcaagaggcaacaggagaaaaaccaaaggggacagaaccacccaaaacaaaaagacaggcaaaccccccaacagaagcagacaggcagagaaggggaacagccaaagcaaccgaaggagagaacacgagaaaaagaaaaaagccaaggaaaaaaaccgggagcccaaaccgccaaaaaaacaagaaaagacaaaggccagcaaaccgaaaacaaaaaaggagcacagcagaggcgcggacaccagccccagcaagaaagacccagggaaacaaaacaaaggaggggcggccaaaaaagacaaaaacaaagggggaccagacggcaaggcgaggcgacagccagagccagagaccaggacgagacaggaagacaagaacagagcagcacacagcaacaacgggaagacagcacacagcagagagccggcccaggaaacacacaagcagaacaaaccgaggaaaagaaaacagaaaaaaacaacaggcgaagagcaagaaagaacaaaacccaaacacaaccaaacaacaaaaaacaaaccaaagcggcacgcaacagccagcaagagagacagcccaaagaagaggaaagagacagagaacaagaagcacaaggacagggaaaaaagcaaaacgggaggaaggagccggccccaaagcgaccgacgaagggcccagaccaggcagggaccagccgaacccaaccgggaggccgaggcgggggacacgagacaggaggagaccagccggcaacaggcgaaacccaccacaaaaaacaaaaaagccaggaggggcaggcgcgaaccagcaccaggaggccaaggcaggagaaggaaccgggagcggagggaggagcagagccacaccacgcacagccgggggacagaggagaccagacaaaaaaaaaaaagggccccaagggccacaagaagaggaacagggaaccgaccaacagacagcaacaacagagagaaaaaaaaagcccaacaccgcgcgcagcagaccaacaaaagcaaacgagaagaccggcacacacaaaaaaacggaaaaagaaggccaaagcacaagcagaagccagcaaaaaacacagaagcaggaaagcgggccccagggaccgccacgcacccgccacgccacccacgaccacaaaacacaaaggaagagaaccccaggaaaaagcaggcacaaaaaaacggccagagcgcggcagagacacaaaccaaccacacaccgaaacaaacccccagagcaaaaaaccggcaacagaccgaccaaaccaggacccagaaaggcacaccggagagcagaaagaagccccggagaacaaggcagagcaaaaacacgaaaggggccgcaaaaaggcccgagaagagacggccgaagagagacacaaaaaggcgccccaccaccccgcccgccccccccacccaccaaagcacaacaaaaacagacacaggcaaaaacagggcgacacacgcagcagaaccacaaaaaagagacagaagggcagcccaaggaaaaaacagaaaggaaagagaagaggaaaaacgagaagcccaaagccgcaccaaggacaccgggagcgaaaaaagcagaaggcaggccccacccagaccaacgaacacaacgcaagcaaagggcacgggcacagaaagcgagaagccgcaagcagagcacagcgaagcaggcagggaagacaaaggaagcagaggcgcccagaagggaaagaaaggaaagccaaggagcgagccgagcgggcacgaaagaggaagccagggagacaagaagaaaggagcacagaaagagagaaggaagcaagacgggcgcaagagaagccgaagcaacccagagagaagcacagggagcaaggagagcagaggaagcagagcccacaagaacgggacacacgggacaggagcggccaaccaccaggcagaagggggacacggaaccaggcagcggcacaaaaaaaccggaaaacgaaacagaacgggcccgcccagaaaccggaaggccgggagagaaagcccagggagcagagggcagaaggagagccacgaggcaagaaagccgacaggaagaggaaagagaggaccaaacacgggggccagagacgccaaaggagagaaagggaggagccagaggaaaccaaagggaccaggagggaccaacccaaccgggggacgacggaaccaaaaaggagagacaggccaggggcaagcggggaggaagcccaccgaagaacacccaaaaaacacacagcggaggaacacagagaaccagcacagccccggcaaaaacgcgaaggaaaaaagaaaggagaagaacaacaggcgaaagagggcaaggaagagagaaaggaaaaagacaacgccggggacaagaagcgccccacacaaaaaagggaccaaaagaggagggaaggggagggagagaggaaagcaaggaaagagggggcgaggacagcaagacgaacacaagacccacagcgagaaagggaggaaagaaaggaagcgaagagggggaagccagaagaagagggaaccgaaagaaccggaaagagcagaggagaaacacacaggggcgggagaagcccaccaaaggccgaaaagaaagcagggggaaaagcagcagagaggcaagaaaagaagccaaggagaagagagaggcacgcagggccacagccaaggaaaggagcgaaaaacccaaggaaaccaagacccaacacagagaggaaagaccagagaaaaaaccgaaccccaacaacccccacagccaacaaggagccagaaggaaaaacgagaggagggcaccccaagacagccgcacaagcaaaaaccacaaaccaaaaaggaacagagaacaaaacccacaacgcgcggaccggaaaacaagccgacaacgaagaacccagaaggcacggggaaagaaggaaaaaaacgggcaggcaagaaagaaaggcagagaagaggcacaagcccaaacacgggcaaggcagccagggcaaaaccgggggagagcgccggcgaccggccgacggcgagaacgagagggaaaaacaaagccagaagacagacaagccaggagaagggaaagaaaaggcaaagagaagagagaagggcccaggcaagggaagagaaagagaaaggcgcggagcgggggaagacaggcagcagcaaagggaggccccggccaacaagagagaaggccagacaagcggccagcccaagaaacgggaaaagggccaacaaaccgaaacaaagcaagcagaaaccaaggaaaaacaaaaaggacgcaacgaagagaccaagaaaaagcacaagacagcgggggcgcaaagagaagcaaaggacaagaccagaagcagggaaaccacaggaggcggcaaaggggccaaagaggaacggaaggggaagaagggaagaggccgagggaggccaaaaaaaaagaaaggaggagagacgaggaaaggaaggaggagccagaggagccaacacaacccaaggacacaaagaccaggaccggccaggaaaaccaagagaacaagaaaaggcacagaaaaacaccagcagggcacacagggcaagaggacagaaggagcaaggggacacccaggacaaaagaaaaccccagcagagaaagacgaaaaaagcacaaaagccaaaacagagccagaacaacgcagcaaacgacacaagaagaggggaaaaggcaaaaccgagacgggcgaaacgcaagaaaacccagaaaaaagaaggaagggacgcaaagcaacaaacagaaaagacaaaagaacgcagaagagggacgccaacaggaaggagcacaacaacacagaaacaaaaaaagaaaggagacagaaaacagcccgagaagagagcaaaggacgcaaaagacaccaaagccccagaagccagaggagcgcccgggaccccgcaaagggagcagaaaaaggcaaacaacgcagagaggcaccaggggaagaaaaaaccaaccacgccgacccaccacaaacaagaaccaccaacgcagaaagcgagacaccgggggcacgcagacaaaaacaagcccagcaccaaaacaaaaaacaacagcccacacccgccagccagacacaagaaggccccacacccccccgccgcgccacagcgcccccccaccccacccaccccgccaccccaccaccccggcaccgcgaaagcccacacaaaaagaaccaggggaagaagcggggggggaacaacaaaaagcacacagcaaaagcaagaaggcagcgccaggaaagcaaaagcacaggcacccacccagcagggagagaggggcagaaagaccgagagggacgcccaaaaaagggagagggagacagaaagagagcagcaacaaaacaagagggggcacagccaggccagaagaccaccgaagcaggccagaccaaacagacccagggaaggggcaggacaggcaaaaggccaggacaagggaggagccaagaaccaccagaagcaacaaaaagccacaaagaagagaagaaggcagcacaagaccccaaccaagaagacagggaaccagacacaaggaggagaaaacacacaaagcgaagacagcacaggagaaccaccacaagacagggagggggcaaaaaaaaacgcccccacaaagaacacaggaagaaagaaagagaagaggcaaccaaagaaaagagaaaaacagcaaagagccccccggccgccaacgacaaggaaaaaagaaacagccacacaaccgaaagaaaccaggacagagaaaccaggccagagagaaaggagcccggagcacacaggaaccggggggcgcgaacaaagccgcacgcgcccgaaacacaaaaccacagagggggagccaccgagagcgcacacgcaagaaggagagcaacaacacaaggcaagagaaggacaaaacacccgcaaaaacaacgccagagagaagaaaaaacaacaagcaaccaggagaccaagacaaacaacaaaaagccacaaaaaccaaggcaggacgagggagaaacaaggccccaaaacccaaagaaacaaacagaagagaagaagcgagaagaaaagacagaagaaacaaagaacagaacacacaaacacaaagcagagacagcaaagaaggcggaaaagccaacagggaggacggagagggacaggagggggaaagaaaaaaagcccagcaaaggaaacacgaccaaacacagagaaaaaagcaagcacggcacgaagaggacgcagaaccacccccaccaaaaaggaggacggcaaaaggggccaaagcggaaaaacccacacaaaaaaacagaaaaacaccacacacaagaggggaaacagaaaaaaaaaacacaaagaacaacccggggccaacagaacaccgccggaaaaaaaagaacaaagacaaacgggaaacacaaccaacaaccccaaaagcaaagaagcgaagaaaccaagcacagagacacaaaaaagcccccaaaaggaggggaccagggaaaacacaggccgcaagacaagggagaggagggagagaagggagaagaacaccaaaaccaagacggcacagaaagccagccccaccccaaagacaacaggaggggcccccgccaaagccgcaaacccaggggcccaagagaaaggaagcaaaagcaggcaagaagccgcccagaaacaggcaggacggagaaagaccaaaaacgacaagacgcccacaagaaaagggacagcgaaaaaggccaggagcacagaaggagggcagagagaaggagaggaaaacggcaggaacaaggcagcgggagaaccaagagacagaaagcccgaaaaccagcgggaaagaggaggacaaaaaaggggcacaaaaaaggggcacagaggggcgaggacacgaccacaaaggcacgcccgcagacacaagcagccggagaaccaaaccaccccgcgacacacccggacagaaaagcaggcaggaggaccagagcagaccaaagagaacccacccaggccagggggagaagaggggcccaacccaaacgaacgcgggaaaggaaaacggacagaaaaggccagcgcaggcgggccggcaaagaagagcacgaaaaccgcggaaccaccgcgccaagggcagagcgaacaaaagagaaagcagacgaacaaacaggaaaaggggcggccccaaaggacaaaacacacaagacgaagcacaaagagcccagaagagcaagaaccaaccagcaggagccaaaaaaacgggcaaagagaagggaaaaaaaggacccccccagacaagaaggaggagggagggcccggcaaggaaacaaaacaaacagaaccaaagcgacgggcggaggaagaagaggcaaagggagaggcagcaggggcccccagccggcaggccaggaacaagaaaagaaagggaagaaagaaaagaaaaaagccccaaaaggaagacgaaaacccaggggagaacacccacacgaaggagcaggcgcaggccgagaaaacagccggagcacaggaggagggaacaacgcccaacaaccggagacagagcagaggaccaagcaagagcccaaagcgcaagggagaccccagaagacgaaacacgcccaacaaacagccagaagaggcccacacagcaggcaaccaggagcagaaagcaggaaacccgaaaaaaaggggccagcagagggcgcaaggagaacaaaagccacagcccccccgccccgcgagcaggcgaaagagaacacacaccccagaaccacgcaccaggacggccccgagccacagcggcccaaaggcgggaagcccggggagacacccacaaaagaaaggaaaccccgagaggcacaacccaccccccccgggaacaaagacaagccaaggcagcagccaggcacaaaagcacaagcggggagagaagagaagagaggccccccgagcgccagagccacgaccaccggggcggggcagacaggagaggcaacaacccgaagaagccgaaaggggacgccgcagcgaagcaaccaacagcaggaccagcagggggccagcagagaccccgcagaacgcccggcagaccagagcaaacagacaaaccgcacccgaaagacaccacacagcaaacaagcagaagaggaagaaccggaggcaaacaacaaaaacacagcaagaccccaaccagggaaggacccaaagagccaggcaaccaaggccacgcagccaggaaaacaaaacggagcgaacaaaacgaaaacaaggagaagaaagaagagaagccaaaggaaaagaggagaaaaaagcgcaagggaaaacaggcaaagaaccacagaccaacaaaacaaaacaacagaaacaaaacccaaaacgacccaacgggaaaagaaggaaaacacgcagaagcagaaccaaaaaccgaaaagcgagaacaggacaacaaagaaggagccacagaaaacgcaaaaggaaaagaaaacaaacccaacaagccaaaacccaaaaaccaccagaagggggaagccacccacagaaacagcaagcaaaggcaagccaggccgggcaagcaaaggccaggcacaggccaggacaaaaagcagaaggcaagaaggggccaacggaaacgcaggacaaagagaggaaagcagcagaagggcgcaaacgaggaagaagccaaagaaaggaaagaaaaacgccagcgaagagaaagaaaagaacagacaagagagcaggaaacagagggagagcaaccagagcacaaaaacaacaaaagccagaccaacaggagggaggagaaaaaagcacagaagacaccggacaccagcaagaaagacaagagcccaggaaggaaggcaaaaaccaggacagcaagaaaaaaagccacggaagcaaaaagaagggcaccaaaacccaacagcaccacaacaaaaaacaaaaaggccagacaagaaaaagggaagacagaaaaagcccaagaacaacagaggaggacggggagaacaaaaaaaaaaccaaaaagcccaaccaagaacaagaaaccccagcagggacacaggagaaagaaagggaaagaaacacaccaagcgaaggcacagaaaagggcagaccacggcagagcagggcaacaaagcgaaaacggaggaagcccaggagacgcccacaccccaaaaagaaaaaaaacccaaaggagaccacaagagccacagaaaaagaacagccaaccaaaacgaaagaaagccaagaggaggacccagcaccacaaaggaaaaaaaaaaagaaacaaaaaaaaacagggcaaaagacagaaggagaaaacagaagacaaaaaaaagaccaggacccgaagagaaccggacaaaagccaaaaaggaccaaacggccagacaaaaacaaccacacccgaaccaaaaggcaagacggccccccaaaccacgaagaaacggggaggggcccagcaacggaacaaacagggacgggcgcacagaagaaccagacagcacaccagcagcggaggacggagccagccgcagaaggaaacgagacgcgaagacaaagaaaaaggaaggccacgccgcaggcgacaggaagcaggcacggcacgccgaaggccaggaagcccaaacaagcagaaggcaaaggggagccgggcacaggccagaggggagcaagaggaggaaacaggagcaaggaaacggagcaagaggggggaaggccagccaaaaacggacgcagaacagagcaagacccacgaaccagaggaggagaccaaccacagaggggccacgccagacccaaacacccccacaaggcacacccagaggggaacaacagaaaggagaggacaaacaccaaacccacgacgaccaagaaacaggaacggcaagaaaaggagggaaaaacacccccccagaagggagaagaaaaagaagcaacaaaaggaaagccaggaaaagcccagcaagagggcaagagagccaggaaaaccggaaagccaaagcaaaagccaagggcaaaggaacaggggaaagaaacggggggaaaaagccccgcacacaaaggagcaacacacacacccacaggagcccgagaggaggagcaggaaaagcccccacaaagaaaaaaaggacaccaccaagccggccggccagagcgggaagagccaaacaagaaaagaagccccacccagaaagacacaaccagaggcacaagcaagaaaaacagcaggagaagaggaaaaacagaccagcagacgaagagggaaaaaggaacgaacaaaccccagggaacaggcgcagaggcaggaaaaacaagagaaagcggacagagccaccaagaacaacacaacacaagcacaaaaggaagccagacagaacaggaggaagggagaaggggaccgccagaagggaccgagcggggcagacgcggggcagaaacaacagagacgccgcgagacacggaacagaaaagggaagaaccaggcccagggaagcagccaccacaaagcgcaaacacggaagaagggaaaagaaagcgggagcccaccccaacaaaagggaggaggaagcaagcagaccccacaaaacagaaagcacagcccaacacaacaaggaacaagaaagcaacagaccaggcccagaaagagaaaacagggacaggaaggcaaaaccaaaaaaaaagaaaagagaaaaagggcaaaaaaacaccccaaaaaacagagagaagaccccaagaaagacaccagcaggcaccgacaaacgagaaaaaaccggccccacccaagacccagggggcgaacaacaaacaccgaagccggggcgagagccaaagagaaaagacacaacggcccaaggagccaaccccggaagaaacaacacagcacaaaaaaagacacccagacggaaagaaggaccagagggagaacaccagacaaggggccaacgcagaaggggaaaaacacggggggaaggaaagaccacagagaggcaaggaggcaaaccgaaagaaaggagaggggaggaaagagcagaagaacacgggaagagcgaagaaggacacacagcaagaggcaaagggaaggaggagcccagcgagagccaaaggggcaaggcaggaagcagaagccaaagacggaaagagagaaagagccagaaggcaagccagggaggcacccccaagaaagcgaaaaggagagagagaaagcagaaaggaggcagaagaaagaaagagccagaaagaaaaaaagaagaaaccaggcaagacaagaacagagcaaagaaaagcagaaggccagacgaaaaccaaaacacaagacaagaggaaaaaacaaccaagacggaacagcggggacaaaggcaacaccaccagcacacagagcaggcaaaagaaaaacagagggcagaaggggcacaaacccagagcccagaagccaagcagcccaagaaaagaaggagacaacagacggaagggcagaggccaggcaaaacccacaaaacagagaaaagcaaggcagaaagaaaaaggaccaagacaaagaagagcaagcccagcaaaaccagagccacaaaaggacaagacgaacgccagagagggacacaaagcacccacaacaaggcgagccaggcccaccaaaagaacagccggaccaagaggcccagcggaaaagcagacaggacccgggagccaccggagaagacagaagagaggcagagaaaagccaaagaaaaaaggagggaagagaaaaaccaaagcaacagcacaaccaaaggaacaacagaaccagccgccgaaagacagcagcagagaggaaagagacagcagcaacaacgagcaggagaaaaggaggaaaacggaacaaacccccgaaaagacagggcaagcggccccaccacgaaagggagacaaagggaaaaaaagggaaaaaacaaagcagaggaacaagaaaaagaaaggccgagcagcacaagggcaaaaacagaaaaagggaaaaccaacaggagacaaacaaccaggcgaaaccagaacaaccaaaaagaaaacaacaagaccagggggacaggcaagacagggaaggagacacgaggggagacaaaggccccacacccaggaggaacacaggccaaaggaacagccccgcccacccacccacccagagccacagacggccgcacaccaggaccaagagcgccacggagaacaggaaggcgccgcaaagcaggaaaggccccagcgcacaggccagaggacagacacaaggcgccagaccagcaccacacaccaaccaccacgagggcaagggaccagcgcgagaaagggcacagaacaagagcagaggagaagaaccgggggagcagaggggagcgggcaaagggcgaagcgagaaaccccaaaccaaccacagggcgaacacacacccaccaacaggaaaacacaccccagcacgcagacaagaaagcacgacagggagaggaccaggggaggcacccagaaggagcgagcaagggccgcgagccgagaagacgcagcgcccacaagggagggcggaaaagccaagacgggaagaacgcagagcaagggaaaccccacgaggccgcagacccgaagccgcggcaggagcaaaaaaaggacccacgcaagggaagcgaggacaagcaaaacaccaaggcagagccagaaagaccaccacacaaagagacaaccgagaagaaaggaaagaagggccagcaccgcacaggcagccagcacccagacagcacgaaaggaagccccccagcacgccaaaaaagacaaaggcgagggcaggcaccaggcccaccgccacggcagggcggaccagaccagcgaaacgagccaacacaggaagaggagagggagcccggcgcgcaggagcggcaggccgcgaccaagaagagaacagcaccggaaaaaagacacaggaggacaggaaagggaaaggaagcgggagagccaaacaaggacccaaccagagcaggaaggggccacaggccagcaggaaacgaacaaccaccccggcagagaccagggggggcgggggggggcagaaagggacgagagaggccagcgaacaacggggcgaaaaacacacacggcgaagaccgaagcgcgaagcaacagcaggagccggggagcaggaccagaagagaacaaccagcaaagagaaaaggacccccaggagccacccagcgagcgggccaggaccagacagagaaaggcaaggagaggggcaccacgccaaccaagggaaagcccaggcgcagagagggcggggcaagaggccaacaggggcccaagcagcggagcgacagaagcgaaggaagaaagccggcagagagaccaacggacaagaggggaacacacagaggagagaccaaccgcaccaggaaaaagcccggacacaggaaaacgaggcgcggaggcgaggaggacacgcagccacaaggacagccagcgagggccaggggacagggaaacgacaacaagcagagaaggagcagcccgagcggagaaggcggaaccaccggcagggcggggaacgaaagcagaacgaaggcgccgggcaacccgaaagagaagaggggccaggaacaccaccccagacaggggcaagaaggcaaaagccgaggacgacggagacaggaagcaccgcacgacgacaggaccaaacagcagggcaccaccgaccaaaaaagcaagggaaagaggaaggccaacacgcgccgacaagcaaccgcagaaggaggcaaccacaggagaaagacaaacgaggccaacgaggagacaaggcaaaaaccccaacacgcgcgcacccagaaggaagagccgcaacaaagagcaacaacgccaacaggccaaaagcaaggaacaaggaacccgaacggggagagaaccgggacgcaagcacggccaaagaggcgagagaaaagagacgccaggccaaccagcgaccggagagcggcaagggggaccagacgcgaaccagggagcgggcacaaagcggagagccgggggggagggacaagacccacgaccacagcagcacaggaagaagggggagcagacgcgacaagggggcagggccgaaacaggagacgacaacagaacaaaaagaaaagaaaaggggaaagaccaagggagccccaccagcggcccaggcaacaccggccacagcgaaccaccaagcagggaacaaaaccccgagccaggcgacgaggggaaaaaaagccagaagacaaaaaagagaaaccagggaggaaaaagagggaaccacagccaaaacgaggcaccaccaagcaaaaacaggccccacaggaaaaccaagacccgaaaaagccgaaaagcaaaggaagagagacgccggaaaaaggaggagagaaacgggacacaaagaacgagagaaagagagaccacaagcaaccaaagaggcggaaaagagagaagcacgaaagccacagagcaaaaaaagaagagacggagaacgcagcaggacgaggagccgggaggggaagaaccaaccaacgccccggacacccggaacccaaagccaccacacaccaaaacaaagcagaacccaaaagccacccacagcaggaaaagacaccagaagcaacaagcagaaacggcagccccgcccgacaaccagaccaagacaaaaaaaccccaagccgaggaaacccaaaaccagcaaaggagaacaaagcaggacccaaggccgacagccggccaagcccacgccaccgcgaggccccaccagagcccaaccaacggccagcaccccaacaggcccacacagccacccggaaacgggaaggacgacagcaaacagagaaggccaaccagaacaaaagacagcacaaagagaagacaaaaaacgaaaagagagcaacagagaagggcaaaaaagcacgaaagacaaaacagcgaagccaaagcaccaaaaaaaggaacccgcagcacaaagggcagggggagaaagagcaaacacaaaacaaaaaggcaagccacaagcaaacaggcagaagggagcgcacaaaaaaaaccgggcaaagcgaagaaaacaggccacgggcacagccgaaccagaagaggaggaagaccagggaagacacaagacaaagcgagcaaagagccccagaaccggggccaacccaccaggagaccaaccgcaagggaaccaaccgaaaacagggaaaacccagacagaagagggagaggcgagacaccccaaaagagcagcacaaaaacaaaaaccaaaagcagaagaaaaagacaggagaagaaaaaacagaagcagaagaaaacaccagaaagccaaacgaagagaacaaaggaggacaccagcagccccaaaacacaagcaaaaacggcccgaccaaggcccaccaccaaccccacacccagacgcgaaaaagaccaagcaagccccgccagcggcaagaaagggaacaccccgagggaaagacccccggggacaagggaaaccgccaccaccacacagacccgacccaacccgcccaggcagccgaaggcaagacgaagcaaacaaaccagccaggcaggcaaggacgagggcagagccaggacccaagcagaaaaaggcagagacgcaaaacagcaagaaaaagcgaaacagggcccaaaacggggagccagaccgggaaagccccccagccagcaggcagagccgagaacacaggacggagaggaaaaaccggcggacagggaaccccgggccgaaaaacccccgagcccagaacagaacaggacgcacaaaaaggcaacacggaccaaaaaacccagaggccacacgccagcccaagagagcacgcggaaaacaccacgaaaaacggaaagggagagccaccacacccgcagcggcccaccaggcaagggaacaaacaacagcagggcgacacccgccgggcaggagcaaaacaaaaacggggaaaagaagccagcgcgaagcacccaccagccgcccggcaggaccaaaccggcacccgggaaaagggacaacgaagggggaaaagaaggcaaggagaaagcacacgagccccccgaaagccaaaagaagagaaagccagaaaaggagcaaagccggccaaggaagaagaaaacaaaagaacagacgaaagcaagcaaaaccccgccaagccaaaggaaccgggaaggccggccaagaagggcaacccaaaacaaaaaaaaaagcgaacaggaagcagaacaaaacaccggaggagagccggaaaacggcccagaaacaacagcaacgccaagccaagaccacaaacagacagccaaagccagaagcggaggaggaagaagaggagacccagggcagcgggcagagaggccccggagcggaaacaaacaagcaggagaaaaaagaaccagcaccaagccgagcgaaagcacaaaggacgcacggcaaaggcgccgaaaaccgccagcggccaaaccggccagccaagcagcacagcaaacaagaaaaaacgcagcccgagaccccccccaacccagcaggacaggcccagagaagcgagccaagcagagaaaccccgcagacagcagaggacaaacagcaacggcaacagcaaaaacacccaggccccaaaaagcaggccacaccccacccacaggaagggaagaaaaaaaagaaaaaagcaaaaaaaaacaaaaaacagacaaggaacgcgcacacacacacacacacacgcccaaaaacaacagaaaaaaaaaacagaaaagcccccccaagaggaggaaaaaaaaaggaaacaaggaaaaagggaaagacgggggccaggagggacaaaaggcggcccagggggagcaccagggagcggaggaccgccccacaggacgggggccccacccccccagggggaacaagccagccaggcagccccggaccagcgccgccccgcagagcagggaaggccggggcagccccgaggacagggaagaaaaacgaggcagggagaaggcagcaacaacaaaaaaagagagccgccgcacaaagcccagggagaaaagaccaggaggccaaagcagaaagacagggcgccggaaacaaaagccgcagacggcaggaccaacggaggaaaaagggaaaaaacaagcagagcccgcggggagagggagagggcccaacagcacccaaggaggagccaaacaccaacagaaaaaaccagacccagacccggcagagagagggaaagccaagaacaagggggacacaaaaggagaaaaaacaaagcacacaacagccaagaaagaacacaagacaaaccacaagacaagaagcagaccaaaggaaaggagccaaaaaagacaacgaacagaagagccaagcaaaacaagcgacacgcccaaaaacaacggccacacagcaaaaaaaggggggaggaaacaggaaagagaaggggcaaacaacaggcgaccaagccggcccagcaaccgcagggcggaagacaagagccaaaagaaaacaagaaaccaaaacaccgagcagcacagagaggacagaacaaacaaaggaacaagcaacaggagagccagaagcacaccggcgagaaagagaggcggggggaccagggggaagcacacgggggcacaccaacagagagcgaggccgccagcagagcagccaaaccccacggaaaagaggggcccccagcccgagaagaacaggaagaagagcaagagaacaaaaaacaaaaaggagcacacaagcaagaagacagcaacgaaccaaaagagcgccaggcaaagagaaggaagcaggacaccaaccagaaaccaaaccaacaaacggaagaaacagcacgagaggggccgccgcacccaagcgaaagcaggaacgacaagacgcagccaaaccggccaagggacccccacccagcccgaaagcacaacacaggcacacaccaccacaccggcaaacgacaagagagacaggggccaccgcccagacggcgaacgcggccaagcaacccccaccccagcccccaaagggggccgccggccaaacagacaaccgcagaccaacaacaacaggcacaaaaagggcaacagcagagcaagccagggggggggcagacacagcaagcagacagaggcgcacacacacacacacacacacacacacacacacaccaagcagacaccagcgcagcaaacaaaaggaacaccgcgaccaaagagcgaagaaaaaacaggccaacagcagaaaacccgcagagggagcccagaacaaacaagcagcggaaaacagcgaaacaaacgggaggacaaagaacagcgcgaagagcagagccagacgcgacgagaaagcgcgcccaacagcacaaagaagcagcggaaaaaaaaaaaaagagaaggagcgcccacaaagcagagcgcgacgccccgacagagggagaaaaaaaaagcaaagagcgagacagcccaggccggcacgcagaaaaaacagacgcgaagccgggccgccagacaacaaaaaaaggaaagaaaaagcgcaggccagagaaacgcgaggaacagcagccccagacagcaacgagaaaggcccaagcgggccgcggagcgaggccaaagcgaaggagcggaggcccgccaagcccagaggccgggacagaggaagacgcaagcaaggccaccagcgaaaacagggagcgaggaacggggaggcaacaaagcccagcacaaagaccacaaaaagccaaaaaaaaaaggaggccccggcaaccagaaggcccgcgaaacacaaaagcggaaagacgggaccccccccacacccccgaacaagaaggaaggaaaagaccaagcacgcgcccggcacagcagcaggcaaaggcaaaggaggcaaagaaagcggccaagaggaacagcccaaaaaaaagaagaagaaggcagacacagcagacagagcacgcaggcaggcagcaagggaaggagccccagacaaagcgcccgaggaaaggcagacaagccaaaaaagaaggggggggaacaggggaaggcaacccgacccaccaggccagaacgaaaacagccaaagcaaaagaagaaaagaaacacacaaacacacaaacacacaaagaggggcaggcaggggggcggggaggaacaaagagggcaagggaaggcacggacagcacccagggccaaagggaagaacgaacaagggcacaagggaagagggagaacggggagagggccagcaaagagaaagcagggcggccacaaagggaaagaaggggagggacgcacaaggaccagaggagacccacagcgagagccagacacggcaaggcaacgcccagagcagcaccaagagaccacagcccaggaagagcacaggagcagccagcgacaagggcaaggccggccaggagggcccagccggcaagagcaggcacagccccaaggccagaaaccccccgcacgacgccagcaacccgagcaaacacaacgcccaccaccgaaaaaggagaacaaaaacaagaacacaacaacaaaaggacaggggagaggagacaaaaagggagcaggcagcaggaaacggaggcaagacaccacaaccccacagaacaggcagggcgcagcccaaagaaagaaaaggaggcacagcacaacccaggcgcacagcagacacagaaacacaagacggccccaagccccccgaaaccgaacagaaacgaaaagcaccaccccagaacagcaggagaggcacagggacccagggacccagaaggcacacacccgaacgacgcgcaggacccgacacaccccaagcccggccc

SEQ ID NO: 349 - RNA, 18250 nt, Homo sapiens
aaggaagagaccacaaaagaaaaaaccaagaagggcagaaaagaagaggaaaaaaaagaggacaaaacaaccagcaaccccaagggagccacaccgaacaaggaccccaaaccagggcaggcagccgccccaacccggcgggagccagcccacaaccccaggaagacgggcccaccgcaaacgagggaagaccgggagggcagcaagcaggaggacagcaggagaaaagaagcagaaaagccaccaaggcaacgaagcccacagcacgaggcgaagacaccacgcaaaaaaacaaggaaagaagcagccgcgccgacaaccagcggcaaaaagcgcgaaaaagaacaagaaaaaacaaggaaagaaagaggaggaggggggggggagagggggcaggagggagagggagggggggaaaggagaggagagggggggggagaaagagaaggggggggggggggggggagagggggcaggagggagagggaggggaggaaaggagaggagggggggggaaagggaggggggggggagggcgagggggagggagagggggagggagaggggcaagggacgagagagggggagggagggggggggggggggggggggggggggggggggggggggggggggggggggggggggggggggggggggggggggggggggggggggggagggggggggggggggggaggggggggggagggggggagaggggggaagggagaggggcgagggggagggagggaaggagggagaggggggggaggagagagagaagaacaagaaggaggaggaggagaggggaaaaggaggagacaaggaagaggacgagagaccaaggaagaacaaacaccaccagcacacgagcacccgggccagggcaacacaacaccaggcagacaaccagaacaaaggaaggagccaacacccaacaaagaggaaaacaaaggcacaaggacagccaggacggaggaccaacgaaggcgcgaccccaaccaagaacacacccagccaccgcccgcagaaggggagcgccggaggaggcccgaggaacccgggcaggagcaggcacccaagccaccagcaggccgccaccaagaacagaggcccagcacccggagggacacgggggcgaacccagaaacccccaaccaacgcacaacagaaaaggcaaagagcacacagcaccaggccccagacacaaaccccaacacagaggcagaagcaaagagcaggaggaggcaacgcccaagggcacagagcggaaacagaaagcaaaccagccggccagccagagccaagcaccaaacccacaggcgcggaagaagccaaggagggcccaggcaaaagacaaaggcccgggcaggggaggccagcacccgggaggggagccaagcccagacacaccagaacccgaccagaaagagcccagcagcggaagaaagaagagggagagcccacccacccccaaaagcagaaccaccacgccagcagggaccccaacggaaagcccccagaggacagcccacacacacacaggacggcaacacggccacaaaagcagcagaacggggcagaagccagcaaccaaccacgcagccgagagagcaacagccaaagcccaaaaggggaaaggcagcccgcaagacaccagggaaagaggacaggaggcaaagacaaaaagaggaaaaggagcgcccggcaacacagagcacaaaaaaacaacaaaggaaagaccaaccacaaagaaaacaccgaaacgccgcggccacaaaacacagaggagaaagaaacacgggcaccccgaaggaagcaccacaacaggaggaaaggggggaagagagaggacagacagggagaagcaaacagcccacaggcacagaggacagaggggggcagcaggggggggggaaagcgggcagacccgcgggggcgaaaacagaagccccagggaaagggaaagacagaggggggcgggcagaggcagccgaaggcgcaggaaggcagagggaacaggagcgagacgggaaagaagggaccgagacaggggagacaggagagcacagggacccacgaagcgagcccaccgaagagacccaagccaacaaaacacaccccacaggggccagagagagccgcaggcaaaagggcacgcccccccacgggacacggacaaaaaaggggccccccagcccccaggcccccaaccggcccccacagcccgcccaccgccacccccaccaaacccaaaccagcaaccagcggccccccgaggcaggcggaaagccccagcccagccagcgcccccaccacccccagacagaggccgggagagagaaggagacgaccgaggcggccgaccccacacaggagaaccgccgcacaggggggcaggagggcagccaggcccaggaacgccccagcgcgagcccagggcgagcagggggcagaccgcaaaacaaaccacacgaagaaggccacccacaggacagccaagggacaaagcggggggccggccccagacagggcaggagggaggacaggcagggagaagaaacaacggccacacccagccccgagggaagaccagcagacgacccacccaggggcaaaaaaagaagcgacaaacaaggcgagcgggggaccagaaaacagggacaacaaccagaaaacacgagccgcaacagaaacacccacaacccagcgcagggacgcaaacacagaacagagcaccgaacgaaacaacacagagcgggccacacagcgaccaggggcggggggacgagaaggcacaacaagccagcaaagaagcaggccgagaacaaaagaaaccaacaggaaaggcaaaaaaagaagcagcaaaaagcaagcaaaacacggaaacagccaaaagccacacaggagaagaacaaaaaagagggagccaggacaaacagcagagaacaaaaaacgagcaaacaacaacaagagggcagaaaagcaacgaggaaaagccaagaacacaaagggacacaaaaagcaaaaggaacaaacagaaaaacaggcaagcacgaaaaacacaaaagacaagggaaagcagaagaaagcaggggcagcaaacaaacaaaaagacaaaaaaaaaagacagaaaagagaagcagaaaaaagcggcagccacaaaaaaccagaaaccacgacccggcagcaacgacgaggaaacccaagagaaacaaaaaggagccacacaaaaacgaacagagcacaccaacacagcacagccaaaaaccagaagcaacccaaagccaccaaaaagagggaaaaaaaaagcacccaaaaggaaaaggcaaaaaagaagaagcaggacccgcacaacaggagaaccgagaacaagcaaggacagaagccacaggacacagcacaaaggaccacacgggagacgcaagaaaggggccagccccaacaaacgccacaacagaaagcagcccgcccgaccagccgccccacgggccagcacccacaccaggaacccgcccagaacaccaacgcagcccaccaccccaaaccaacaaagacgagcacgggacggaggcacccggaaagccagagcccccccgccgccaccccaggcaggccaccagccaccaaggcgccgcagaccccacccccccgcccaccccgcgggcacccccaccccagccccccccccccacccgcccaccgacagaggacccaaaaggggcaaaggggcccaccagggccacccccccgaagcccaccaggcgcaccgcaaggagcagcacgcccacccacggggcgggccggaaagacgcaagccagcagagaggcagcgggaggacccccccccccaccccccaacagcagggagggcccgccccccaccggcacaaggcagacagccgaaccagcccaaaaacgcaaccccgaaagggccgaagagacaagaagggaacacaagccaggagagggaagggaacacaaagaaacagcacccagggacagcaaagagggaagcagaccagcaaggcagggccaagggggagaacccagaggagccaaggccggggccagggggggggcgcgggcgggggcacagcacaaccgcaaggcaaggagggaacagggaacaaacagcccaccccccccccccccaaaccgcagggcccaacagaagccagcggccagggaaccaagggacagcgcaggagcagcccgagcacagagggggcacagcagggggagaacggacggggcagggcagagaaaaaccgcgccaaccaggagagaggagggcaggggcaccaccagagaagggagcagacagcacaaaaacagagggccagaagggccccgcaaccgcagccacagcccgaacacacccaccgcagaaagcgcaccccccagggccggccgcccacaacaggaagcacccagccagggcggcccccccaaagcgccggcccccgaagccagcaggcggaacgaagggaccaggcaagccaaaggagcaaaaacagaaaaagaaaaacaacaggaccccaaaaaaagaaaaaaggaccgcagcagaaagccccccccccccaccaggcaaccggccacaggacgccacaacgaaggggcacaaccccaggcaccacagcagaagcaagaagccagcgcaccccccgccccccaccacaagcagccaacccggaagcccgaaccccacccagcccgacgcccgcccagcaggccccagcccggggcagaccccgccacaacccgcaggccacaccccgccacccccgggggagagcaaaggcaagacagcagaggcacagcaaaagagcagaaaaagcacccaaaccccgccacacaggcacagcccccccacaccaacacccccaccagcagggaaacaggagcaccgcagacacagcaccacaccagccaaggaaagggccaccggaacacaaagcaggcagcgggcacaggccacacgaacccagcaagggaggcgagggggcagacaccaagccggagcgagaccagccgggcgacggggaaaccgccaccaaaaaacaaaaaaaaaaaagcagaggggggcagccgagcccagcaccaggaagcgagggagaggaccgagcccaggaggagagggcaggagcgagacgcaccaggcacccagccccggagacagacgagccgccaaaaaagaaaaaaacacaaaaaaaaaaaagcaggcaccaacaccccgagagggcccaggaagccaccaggcagaagggaaggggagcgaaacacagacacagggagacaggaggcaagaaagagagaagggccaggccgcagaaaccgccagggaacaagaggaaaacccccaaccgcacagagggaccaccccagacccaaacacccccaaaggccacaccccaacacggggacaaacaacagagacgaggggccgaacaaaccacacacaaacccagcacaccagcaaacacacggaacagcacgcccaaaaacgcgccgccgccacgccaaccccggcaaccacgacaacgccaaggcccccagaagcaacagagaacacagaacagaagaacagaggccagaaagcaaagaacccagcccgggcgaagccagaggggaaaaaccagcgcagacaagaacacaccggacacgggcccaaaggagaaagaaaaaagcaaaacacgggggcaggggggagaagcaacccgggaaacaccagggagggaagaacgagaagagacgcgggaagaaacgccaaacgcccaaagagcgcaccagcaccaccagcaagaggagagcggccacacccaccagcaggggccagccagaggccacaaagggaagggcaccggaaggcacccaagagacgagcacagcacgccacgaacccagagagcacaagcgcagaagggaaaaaaaagaacaaaaaagcacggaacacaacaggaacaaaccaaagcagaaaaaaaaaaagaaagaaaagaagagggaaaaaccccgacgaccggcaaacaagagacggagccgccgcgcccaggcggaggcagggcgccacgcggccacgcaagcccgccccgggcacgccacccgccagcccccgagagcggaacacaggcacccaccacacacccggcaagaaagagagacggggcaccggagccaggaggccaacccgacccggaccacccgcccagcccccaaaggcgggaacaggcggagccacgcgcccggcagcaaaggaaaaaacccacggcccacaaaagcgagcccccacggccaggagaaagcgaccaaaggcaaggcccagacccagcacacccacccgagccccccaccacaaacacgagcgcccaccccgaacgggccagcgcgccaaggcccaaagcaccgggccgccagaacaccccgacccacccaccaccaccgaccaggcccagcagagaccccaggaagccccagacccggaccccacccgggcccaaagcccaagaccccagcaagccccccggcacggggcaggagcccccgagagggggaccaggccgcccaacgagggaggcgagggggcgccaaaggacaaaaggagccagcgggggggggcacacgagccgcaccaggaggcaaggcgagagaaacaagcccaggaggaggccaggagcagacggccaccgcacccagcgcaggcaacaggggaggccaaacaaaaccaaaacaaaaaacgcagcccccaaagagaaggaagagagggaagaaacggagggaagcccgaaggaaaggggcgaaaaggaggaaccaacaaagagcaagaacaggccaacaaacagcaggccaaaacagagaagggcacaccaggaaagagagacaaccagcaaggaggaaaagggcagacaaacaaaaaaccaaacaggaaaccccaggcaaagaaggcaacaaagggcgggccacaagaaccaagaagagaacaccccaggaaccgcacacacaaagaccaaaaaagaaaaagaaggcaaaggaaggaaagaaggccaacgaccccccaagacccagcagggagggaggggcaaaccacaaaaacaccaggcggcagggagccgggcagcggggagagggcagagggagagggcccggggaccaacaggacccggcgccgaacaggcggaggggcgagcccccaccagggagcggccagaagaaagaagggaggaacaggaaggccgggcagcgaaaaaggaacaacaagcccagcaaaacacgcaacacgggaagcagcacacgaaggaaccccgcgccgccgcggccggccagacagggaggaaagaagcaagagcgagccccaaaccggacccgcaagcacccccagcccaggcacgcaagaggggagcacagcacgcccaagagaacgcccgggagaacaaagaaagggcaaaaaagggccaaaaagagccgcagcccccagaccgcgcccccgccggccggggacccagaaagcgccgagaccccggccgggccgggagcacaggggagacaccagaacggaagaaggaggaggagggagaggccagggacaaccccagcccaccaaggagcacagccacaccaagcaaaaacaaccaaaagaaacacagcgaagcacaaagaaccacagcacccagcaaggcgcaccccccgaaggccacagcccaggaggcgcccccagcccgggaaccgcgcccccaccccaggcagagggaacccgacaacggggccaaccgcccacgccgaaaaagccaaaacacccaggacccagcccgcgggacccaaacacagggccggcacagacggcacaagaagaagcaaaagcagcgaacggcacaagaaacaaagacgagacacacaagaggaaggagagcaccccaggaacggacacaggaaacccgaaaggcggaagaaaagacacagcacaccaaagcggagcggccccccagaggcccaaaggccaaacaagaaaaaccagacaagcccgcgaggcacacgaggccaaggcagggcaggaaaagacggcgccagcaggaaccaggcagggacccaacaagcggcacgaccccccaccacgcacacagacgaaaaaaaaaaaaacacaaaagccaggcccgaagaagcccgggaaacagaagaggacccaaaagggcaagcaggcagaccgcgagacaaaggcaaggggcacaaggaaaagcagggcaagcggggaacggcagcagaggcaggggcagacacgacaagaagaaggagccgcacccaagaaaaacaaacagaaaaaagaaccccagaggaaaccagaggaaaacacacgcacagaaggcggcaaccccaaacaaagacaaagagacacgggaaaacgaagcacacgaacacagaccaaaaaaccagcacaccaaaccgcccccagccaaaaccacccagaggcaggaccaaagaacggcggaaggcggcacacagaggaccacaacaaagccacggaaaaagaaaaggagcaaagaaaaagaaaaacgccccaaacgcaaaccccggaaacgaacggcagcgccaaaacagccaggccaaagacaaaaagcaccaaaaagaaaaacacacccaaacaccaacgaaaaacagaagaaaaacaaccaaaacagacacacacgagaaaagaaagaaagagcacggccagacacacaaaaaaaaggaaaacgaaagccacaaaggcaaaaagcaacaagcaaacaaaaggcaaagcaaacgcgaaaaccacaaacaacaagcacggcgagagaaaggcccaacaaaggaaaccaaagccggaccaaggaagaaggggaaggaaaagagaaccagacccccaagggggggggaaacaaagcaaaacaaaaaccagacggccagcaaagccaacaaagaaagaaaaccagaaagagcagaaaaaaagagccaaggccggagggggaaagaacaaaacccaccagaacgaccagcgagaacaaaagggacagacacaaggcaggaccccaagaaggcaaaaacccggacagcagaaaaagaccacagcaggaaaaaagccaagacaagcaaggaaccaaaagaaggggccagaacaacgcacggaaacgaaggcccgccaaagaaaggcagaacaggcggggcaaacacccggcacccaaacggccgaggaaggggaacaaaagggaaggagacacaacagcaaagagcaaacagaaagcaaacaaagacacacaaaaagcaaaagaaagcccaacaagaacacccaaaggacacaggccaaaaggaacacccaagaaaaggacccaggcacaagcacacaaaaaacacaaaagaaaaaaagcgaagacacaagcacaagccaagacacacaaagaaccacagccacccgagcaaggcaaacaacccccaaaagagagaaagagaaaaagagcaaggaggcgaagaaaaaaggaaaaccccaggacagcagagcaacccacaaaacacccggagagaagcaaaggaaggaaggaaagaagaacaacaagaaagccaaacgacgggcggggggggacccagaagaaaacaacagccaccccaagaaagaacagcagagacagacaaaaagagcaaaaaagcaaccgcgcgcaagcagcagcgggacgcgaacagggggaggcaccagaaaggccccaaaaacgacacaaagggagggggagaaaagagaaccaggaaacaagagcagaagaacaacacaaaagcagggccagggaggagaacgcaacacaccacacccacaacagcaccaggaccacgccaagaaggcacaaggccaacaaaacccacacgcaacccaccccccccgcacccacccccgccccagcaacagcccacggcccaacaagaaccaaacagcccagaaccaccaaaacccacacaaaccccagaagacaggacagaaaaaaaaaacagaagaaagcggaaagcaacaaaagaacaaaagcaaaaaacgacggaccagaacaccggaaaacccaagaaaaaacaaaaaaaaagacagcacaaaaagcgagggaaaagaaagaaggaaagaccaacacaacaaaagaggaaacaggacaaaagaaaaaaagaggacaggagaaaaagggaaaaaacaggaagaaaagagaacaaaaaacaaagacaaaaagaaaacaaaagccgcggggagaagggacaggacacaggaccgagacagagccgccgcgccaggcggaggcagggggacggccacgcaagcccgcccccaggcacgccaccccgcccagcccccgagagcgggacacaggacccaccaccacaccggcaagaaaagagacggggcacagagccaggaggccgacccgacccagaccggccgcccagcccccaaaggcgggagcaggcggagccaccgcacccggccacaggacacgacccggccaacaaagacgggaaaggaaaaaaaacaagaaaccagaacaacaaacacaaacaccaccaaccagcccaaagagagaacagaaacgcaacgaaccccagaccagaaaacagcaaccagaccaaaaaacgcaaagaggggggagccaggaaggcagaaacgacccaggggaggcagcaacaagccaccagccgaacccgggccaacgaccccacccagcccccgagagcggaacacagggcagccaccccaccgaccaggacggaaacagagaagacaggaagcaggcagggagcaggagagggcaggacgacacaagaaagaccgacgcccagacagcaagacaggaagagggagaccaaagagaagcagccaccacagaaagggggaggggcagggagggcgagaagagcaggcggaggagggccccagcccaagggaacgcaaggcagcagccaagagggaaaacaggagggggcgagacgaaagcgaaaaccagacaaacaggggggagagacagcagaaagaccaggaagaggcaggcggagaagaaggggccgcagcagggagggagcaaagccacaggagggcagagcccgggaccccgacaaaacagcgcagaggccaagaaccagaaaggaaaccagcagcgggagccaccaagggaagagaagccgggcgaggcagcgggaaagggaaaccaaggagcagaggcccagaaggaaggaagagagacaaggcaaaacaaaacaacggacggcccagccaggagccaggagcagagaggaccaccgcagcccaagacagcaccgacgaagggaacagggacaccgggggagggaggcacagagccgggaagaggagaggagccgggcgcagcgacgggacccaggaaggcccggcagcccagcggggacaagaacagcaagagagaccacaaccgaaaacaacaaagcacacacacaaggaaacccaaggaaagccagaaaccacccccccaaacacaaaccagcccccgcacagccgaccaaacccccaaacagaggccgcaggacgagcccaaaccagagcccaacagaggggccacgcaaagagaaagcaagaggacgcgagcccaggaggcccagacccaggagccagacgcaccacgcacccagccgggcaacacaggagacccgccaaaaaaaaaaaaaaaaaaaaaaaaaaaaaaaaaaaaaaaaagagaaagcaacagcgaaaccacagccccaaaagggagcccaagcaaaagccagcccggagagggcacccaccagaagcagaaccaccccaaaaccgaaaagggggcaagacgaaaccaaaccaaccaccccgccacccacacagccacccgcccgcagcccccaccaccccaacaacacacccgccaccaccaccccaaggaacacaacacaaagcgagagcggacgccaagggggggagcaggggaaaacagcacagagcagaaagcaaaaaaccaggccagagaccaaaaaaaagaccgaccgcgcgggaacagggggcccccgggcacccccacccccaacgcaccccaagcgccccaacaccaaaaccccccccacccagagccacgcccccgacccccccacccccgggccgcccccacaggccccgcaagagccggccccggggaaacggccccccacagacagggacccagcaacccaaaagcacgcccccaccaccaagcagaaaagaacagcggcaggaacagcaggacagcaaacagcagcccgggcacgggcacagcgccaaccgcaaaaagccaaaaccacagaagccaacccgccaaaaagccaaggaaggaaaacaggccagagaccagaggagagaccgcaaaccaacgcagaacaacaccccccaaagcaccagaccccacaaggccccccccggaaggcgcacagcccaacaggagaagcaaaaaaaaaaccgaccagcacccgggaaggggagggggagggagggagggccgccaagggcacagcacccaagacacaaccaccagcccaagccacggcccgggaccaggcaagaagggcaaagcgcaccaaaacgcacccacccaggagacagcacaaaggcaagcaaagaggcggccgaacccaaagggccccggaaacaagacaacacacaccccgcgaaacccgcacagccccacggacagaaacccaaccgcgggcaccaagaccccaacccagcccacaacaaccggcgagccacgccacaccacaaaacccaggccgcaagcaaggcgaaagagaagagggggcggaaccagacccgaaaaaaaccagaaggcccaaaacacacacacacacgaaccccacacacccccacacaacaccccacgacacccccacacacaccccacacaacacagcccacacacacccccacacacacccccacacacaaccccacgcgcacacacacccacacacacaccccacacacagacccccacagacgccacacacagaccccacacacaccaacacacacacacaccccacacaacaccccacacccccacacacaacaccccacacacacccccacacacacacccaacacagacccccacacaccccacacaacaccccacacaccacacaccccacacaacaccccacacacaccgcacccacacaccccacacacaccccacacacacccacacacaccccacacacccccacacaaccccacacaaccccaccacccacacacaaccgcacagaccccacacacacaccccagacaccccaacaccccacacagcaccccacacacacccccacacacccccacaccgacacacaccccacacacccccacaccgacacacaccccacacccgcacagacccccacgcacacccccacacccccacccacacacacccgaacacaccccacacacacacccacacacaccacacacccccacaacacccacacacagcacgcccccacaccccagcaccccacacacccacaaccccacacacaacccccaacaaccacacgaaacacacaccccacacacacacccccacacaccccacacacacaaacccccacagcacaaacccccacacacacccccacacacaccccaacaaccccaacacacacccccacacacacacacacacaacacacaacacaaacggcagccaaacacagcagggcaccacccacccccccaagcaaagggacacggcgcagcgcggccacaccagaaacagggaggggaggaggcggcaaaaggcaaagagccagaagggcggccccaggaggcaaaggccagcccgaacccccccccaggcagaagaggggcccgaggcagccaagccagcccggccccccggccagaggccaggcacggccccaccacccaaggacaaaccgaggccacgcccagcccaacgggaggcagggccaggacagacagcacagaaagcagaaaacccacagccacgacggcaaaagccagaaaccaaaaagaagaagcaacaaggagacccaagaggcggaggggcaaaggaagcgaggagggagaccccagccgcagggccagcagagggaggaggccgggcagggaaccccccaggggcccagaaaaacgccgaccccgcgggggaccgcgcccggcccgcacagcagacggcaccaggaaaccggcagccccaaggcaccagagcccacaaagagaccggaaagacacggaacaggccagaccagccaaaccgcaaagagaaaaaacaggcccaaaagaggaaggacacccaaagccacaacagagcggcagaaaggacggaaagcacgggggaaacccgcccacccacccccgcccgccgagaacccggcacccaagccacagcggggggcacccccgggaagcccccagccccccccccagggagccgagaccccgcagagccgcagccagaccagaaacccgaggagcccaaacaggcggggccgagaccccgcagagccgcagccagaccagaaacccgaggagcccaaacaggcggggcaccggcccaccccacacaagggcaccgagaaggaagaagcggaccacccagcccgggcagagggcaggcaaaaaaacaaaaggcacacgacagcacgcaccacgacccccaccccgcaaacaacaagaaccccaaccacccagcaacaaacagccaaagcagcccaacagaccacaggagcggacacacgggcgaccccagaggccagcccagggccagcccggcgcaggggcacacggggcggccccacccccaacccaggcccaccccaggccacccccgggaggggacccaggcacggaaaaaccccaggggccagaagaaccaaagaagaaacacacagaaaaaaacgaaccagaaacagaacaaccaacggggcaaggaggcaaaagagagagacagagagagacacacacagcggacagagagaaacaagaaaaagacggcaaggagacggcccccggcacacgacagggccagagggggggaggcgcccggcccggaggggagcagcacccggcgacccacggggccaaaagcaagccccacacagggaaccaccaaaaagccagaagcaaagcccggggagagggggcaaacaccaggagagaacacgggagacagccacccaaaagacgcaggcacacaagaaaacaagaccacccaaacggacgaagccgaggacggacaggagaaggccgagagggacaggaggagggaggggccagcaaaggcgaggcaagaaggagacaggaaacaacaggaggcgaggcagaagaggagcaggggggcaagccaaaaagagagcaaaacaaaccagaaaaagccagaacagaaaagcaaagggaagcaagcagagggcgcaaggaaagggagggagaccacaaggggaaaaagcaaacagaggagaagccagaaggagcaggggaaggaccacacaaaacagggagggccagagcagccggcaacaacaggcaacaacgggcgcagcaacaaacccaccgcacccacacacaagcccagaggacaaagacgaccacagacagagcaaaagagccagggcagagcggcacagaaaagcagggggcagaggggagcaagagcgccccgagcaccgagcaggagccacgcgaggacccaaccagccccccagccccgccgggcccgaggaagagcgcagaaggccgcccaggcacagccaaaagcacagggggccagccagagcccccacccccaacccgccagccgccaacaggaccccccccaggcaccccccccacacagggcacagcgccccccaccccagccccccagccccccgccgccgccacccccacccggcccacccgcaccccagccccagggcccccccgcccacccgagggggacccagaccaacagggcccccccagccaaacccaacacccagacgacccccaacgaaaaacccaggccacagaacaagaaaaacccaagaacccacacaaaaaaaaaaaaaaaaagccacacacccaagagccgaagcacgcaaacaacgcaagcagccagcaccgcccaccacagacgagcagaaaccacagccccggcaccagcaggaccaggacaaaccagaggagacaccagcgagcaccaaggccaaaaagacgacacaaaaaaaaacaaaaaaaaaaaaagaaacagcaaagaaaccccaaagagaaagacgagcgcagaaaggaagaaacccccaaacacccagagaaacagggagacaaacccagcgaccccaaagcagcacccgcacggcaaacaacaaaagagccaaagaaaaacaaagcacgagagcaggaagaaggaaagcacgcagccccgagcccaacaggagacagggaaaacaggaaagcacggcccagagaaggggccaggagggagaccagccgacagacaggccccagacacaacgcgggcacgcacccccacgggggggcaaaagccaccaaagcagacaagcaacaggaggaaccaagccaggccgaagggccggggccagcaagcagggcagaacacaccacagagggagccggcagaaagacagacaggggaacagaccccacagggcagaagaaggccagagaccaaaacagagggagagacagagcagaacccccaggcagcggggcagagaccccgccggacagaccacagaccaaggagcggccagccgcccggggcccaagggaagaggcaggagaggggagcgggcaaagggaacagcccccagcaagcaggacagggggacacagcagccccccagacagaaccccaccaggcccaacaaagacccgcaaacagggagcgggcggcaccccaaaggagaaaagcaaggaaaagagagagcagcaccaccgaaaccaaccaaaccccaacagcagcccagcgggaccaacaccagcaaggaaggcacaaagacacacaaaacgccagagcaaagcaccacccgcaggccacggggaaccggggcggcaccgcgccgagacaggagcgggccgcccgcaaaacggggaggccggaaaagcgggaagggccaaggacaccaggccaggagcagagccaccaacagccaaggcaaaagagcaagcaaggaaaacagaaagccccggggaccgcccaaaggagcagcaccagagggccaggaaggaagaagcaacagaaccagagcaaaagcgcacaaccaaacaaacgagcaaggccaccgaaaggggaaaaagaaccagcacggcgggcagggccaggaagaacccacacacaaacaagaaagcaacggaagagcccaggaaaaagaagaaacgacacacaacccccaaagaagaagaaaaaggcgaaaacgcaaacaaaagaaacacaaaaaaaacaaagggaccaaaaaccaaaaaagcaagaagcgaagaacagcagagaaaggccaaaacaaaagaaaaaaaaaaacacaagaaaaaacggaagccaccaggaaaaaaagaaaagaaagagcagaaaacaaacacaaaaaaaaaaaaaaaaaacaaaagacaaacagcagcaagaaaaggcgggagcaggcccaccgagaagacagcagaaggaagagacagcacgagcacaggcaagccaccgccggcccgcccgcgaggaacccccagacgagcagccaacgaaggaagccagccaggcccgcgcgagcgacaacgggacacggagagcgaagacgaccgagcgagaagaccacgaaaaccccgaaccgaaacaccgaggaaggaaagcccgaaagaccagagcgaacgaaaaagcaacaggaacaccaaaacagacagaaagcaccagacagagggaggccggagcccaagcccgcagagaacagacaacacagacaggacacaaagcccacaccagcaagaccccaaaaccagaggaggcagggaaaagcaaggggcagagagggggaaaaacaacagcgacagagacagaaaaacagagcaaaccagccaacagcaagagccaggaaggacaccccgaaccagccccccgcaaaaggagaaagagcaccaccggggggcaaaaaggagaggggaaagcagacccaggcagcagacacacgccacccacacagaagaaaaggagacaaagaggaaacaagcaagcacacaaggagccaaggagagccacgccgccaaacc

SEQ ID NO: 350 - RNA, 270 nt, Homo sapiens
aaaagcccagcaggggaaggaaacccaaggaaacacccaggaagacacggaacagcagaacgaagaaagccaggacacccacgaaggggccaagaggaagagcaagacagaacagccacagaacagagcaaaacccacgaggcccagccccagggggaaagcacacacccagcaagaagaaaaagccaaaaagaaaagagaggaaaaagaacccccacagaccacagaaaaaacacccaaaaaacagaacgaaggaaacgcacgcgcaga

SEQ ID NO: 351 - RNA, 2162 nt, Homo sapiens
aggaacaaagaaaaacccagaacccgcagagcacaaagaggaaccgccgcagagaaaaaaacaccagaaaaaaacgaaaaaccacagagccaacaacagccaaaaagaaacacagagcaacaaaggaaacaaaagcgcagaagcaaaaaaaaaccagaccagaacacgcaaacgaaagagagagaccgcccaaacacaaagaaagcaaaaccaagcgaaaaaagcgccccggggcgaacacaggcagcgaccaacacacacaggaacgcccaccccaagagccaggcaccacacgggaccccgggaaagagcaaaaggacgcggagcggcacgagacaaagaggagagcaggggaagaacaaaaggggcaaacaaaagaaaggagagggacaagcccaaagcaagggcaagaaggagaagaagcggaaagaaagaggaaacacagacagggaaccacaggagcaaagggcccgacgggcacgggaggggaggcaaaagacagcacagaggagaggggaggagacagcaagaggacacgcgcacaccgcagagggaacacaaaaccacaccagaagaggagaacagcacaggcaagcgggcaacaccaggccacagagggagaaagaaggccgcagaagggaaacgacacaaggaaaacacagggacaaaaacacagaaaccggaaacaacccacagcaagacaagggggagcagaaagaggaccaaggggagcaaaggccaaagcggcaaagccaggccagcagaagcgagccaacacaaagcaaggcagaaagaaaaggggagacagccagggaaacgggggaccaaaccagaagagcaaggggggacacagggggacaaagagacagaaggccagcaggaaaggaaaaagaacaggggcagaagacggccaccacaagaggagagaaggaacaggccacgacagccagagaagaaagcagaagggagcgaccagacgggacgccaagccagggaacccaaaaggagaacaggccgaccaggcaccaggacaggccaagacaaagccggccaaaaacaaagcaaagaacagaggaaagaggaacccccacgcccaggggcggccgcccccaaccaagaaaaaaccccagaaaacagcaagcacacgaagaaagacccagacccaaaccgaacaacaccagaccagaacccaaacgcaaaacgcgcccaaagacgagccccgggcaagaaggcgcaaaaaagagaagagaaaagagcaacacagcagggaagaaagaaacgaaaaaacgggcacaggggaaaagagaaaaacaaacgacccagacagccagcgaaaaaaacaagaaaaacccgagaacgaaccacccaacagaaacgaaacgagacaaacaccaacaccaccagaacagcagagccaaggcaagaccacagccacacccaggcgacaccaggaacgccaaccacggagagccaagaacagaagaggcgggacggagcaaaggagaaagaaacggacacggaacgaagcccaacacgacccaccccaacaacgacgcgaaccagacacacaagagagacaaggcgagaccagaagccgagaggaggagccccaagaagaaagagaaagggagaggccaaccagccacccaggaaaagaggaaacgaagaacagagaaaagggggcacaaaacagagaggacccagggaagaaaaaacaaaaacaaaccaggcaagcaaaagcaaaaaacaaacagaagcaaagaaaaccaaaacacagagaccacgaacaacaacagagacaggaaaaaaccacaaaggagcagagaaaaggagcaaaagcacacaagaaggaaaggaggcgggaacagacccacgagcccagaccccaaaaaccaaaaacacagagcgaggcaaaaacagaaaacgcaagcaaaagaacaaaaaaccaaaaagaaaacaaaaaaaaaacaagaacaacaaaaaccaaaacacaagcaaaagagagcggaacccacaaaaagcacaaagaaaaaaagaaaaacaaaagcacaagagaagacaaaacaaaagagcaaaaggaaaacaagggaaaaacaaggaaaaaaggaagacaagggcgacaaaaaaggaggaagcaagcagcaaaaggaaagcaaaaaaga

SEQ ID NO: 352 - RNA, 491 nt, Homo sapiens
agcaagcaggaaaaaccgagagagcaaggaacagcaaagggaaaaaccacaacccacagggacaaaacaaacacaaacccgaaaccccggcccgccccaggaaaaagcaagaaaaagaccagcaaaagacaaacaaaaagcaagcgggccagacaacaggcaaggacgacgaaacaagacggagaaacagcaaccccaccacccaaaacggcaaaggaaaaaaagaaagcaaaaaaaaaaaaacccccgaaaaaaacaaaggccccagagaccagaaaagcacaaccccaaaaaaagcacccaacaaaaaaaccaaacgacaaaaagaaacccaaccaaaacggaaccacacacaccgaaaccacacagaagaaggaggggagaaggggagccaggaaggagagggcaagaagacaaagaaagaccagaaggcaaagaaaaagaaaaaaacaaagggaggaacaccaagaacagaacaacagcagcaaaaa

SEQ ID NO: 353 - RNA, 1948 nt, Homo sapiens
aaaaaaccaaaacaagacagacacaaggcaaaagaggaaaacacaccagaaacaaaacagacccggcaacgagaggaaccgaaagaaaaaacaaagccgaacaaacacacagaaaagagagaaaagagagcgaaagaagacaggagcagaaaacagaagaaaagaaaggagcagggggggcaagaagcagggggcggaacggcaagagaccgaaagcagagggcacacacaaaaggcgcaagcccaagagcaaacagcgcagacgagcagagcacgaaggaaaacggaggcccagagaaaaaaaccagggggcagggaggacgggcgggggcgggaaacgggagagaaaaaagacgagaaaaagaacggaaaagaagaccagaagacgagacaacaaaaacaaagaagaacagaagggaaaaggaggaagacaagaaagaggcgccgacagggaagaacgcagaaccaagaagcggaaccaaaggggagaaaaagaccaggaagaaggaaggaaggcgaagaacccacaaacaccacacaccaacagacaacgaaccaaagcagcccaaaacaaaacaacaaccaaaaaccccaacacccgaaaaaacgcacaaaacggccaaaacggcgagaaccacaggcccagggaaccagcagggaaaaagccagaggggcgcagaaaccaacgaaggaaacccaaaagagacagaaagacgggggggaaaaaagaaagaaaaaaaggcccgagcaggacggacccgagcccaaggcacagacaacgacccaggcacagggcaacaagcaaacgcccaacaaccagcgcaaccaagcccagcaccacaagaaggaaaggaagcccacccaggggaaagggaaaaagcaagcagaaggaacacgccagcagccaaaggcggaaacaaaacgcagcggaaccaagggcaaaggacaagaaaacaagaacacaccacaaggggcgggacgcggcgcgcccaagagcacccccccccccaaagcagaaacaggcccggaaaaaaccacaccccagcaccgagccagggcacaggacaagcggccaacaggaaaggccaggaagccccaaaggagaccaggcgccgaaagaaacgggagagaaacggaaggaagcaacagggaagcaacacagaggagcggacccgaggggaagccaacaccgaacgagcaccccagcccaaaggaaagaaaaaacacccaaaagccaaagaaggcaaacagaagcaaaccaaaacgacgaaaacaaaacaaccggaacggagggaccaaaacccacgaaacagaaaacagcaacggaaaaagaaaaaaaaaacccaaaaagacaacaaggcagggaaagaaaacagagaaaacacaccgaacaccacagcccgggcaaccaaacaggaaggaaagacgggagaaagaggaggaaaaaacacagcaaaaggccggcgaagaccccagaaagaaggggcaaaagaagcaaagcacagcaaaccgagagaacaaacaaccaacagaaccgaagcgcaggaccaggcaggcaaaaaggaaaaagagggcgcacaacccacacccaaacacagaaaacaccaccacaaacacgacaaggagggggccagcgaaaaaagcagacgcccagcccccaccaaaccacccaccccaccgccaaaacaaagggcagccgacacagcacacaaccgaaaccacagcaccggacaccccacgcacgaaagaaaccccccccgaccaaaaaaaaggacaagcgggagcagaaggaaaagaagcaaaagaagaagcccaacaggaaaacacaaaaaagagaaaaaacaaaaggaaacagaggccaaaaaacgcaagaggggcaggcagaaggccccgccgccccacccaccccgccaacacacaacaaaaaggccagcccaagcagacggac

SEQ ID NO: 354 - RNA, 4007 nt, Homo sapiens
accgccacagggcccaccaaagccccaggggcaccaggaccaagaggcgccacacagagcagccagagaaagggagaaagagacagcccccaccgccacccgccgacgcccccgaagcgacccccgggagagcagcccaaagcaccgcaccacgaccaggaagcaggccagagcagggaaaaaaaaggccacaagcaacgccagaaggccgaccaaacaggaacagaaacagaaagcacaaggaagggaaacacaaacaacgcagccacagggaaagacaacccccgccgccccccaaggaccgacaaagaaagaacaaggagaaagcagagagaacaaccaaagcaaaggagagggcaggaccaagggcccgaggagggacacaaaaagcgagcaagacacaccaccgaccacacccacacacgccaaccaacacaaaggggcacagcagacaaccccggggcacccaccacaaagcgcgaggagccacaagcaggcccccaggacagacccccagcgccagcaacccgcgaccaacgacaacacgacaaagaagaccagagcacgcccgaaacgaaacaaagcagacccgccccccacaacccccccacccccaggccacgcccgcagccggaaggacacaagaaagcgccaaacccacgccacaggggagagccgcgagaagcaggcaacggaggaagggaaacaagaggagagaagaagaaagaccaggagggcaagggcagccgagcacgaacgcaaaaaagagaccagaaaaaaaaaacagcacacaaccacagacaaaaaagaaaaaacggaaaagcagaaaaacaccggaacaaaaagacaccaacaacgaccaccaccgccacaacccggagcaaggaaaaccaaaaaggaacaccaaaaagaaaggccgacagaaagggcgaaaccaggcacgcgaccgacagaaaacaaccagaaaacaaagacaaggacaaccagaaaacaaagacaaacggcaacccaaagacaagccaaacaacaaaaagcaagaccacagcaagacaaaaaagcagaaaagaagccaggagaagcaaaaaaagcaggaagaaggaaaaagaaaaagacaaaaaaccaaaaaacaaaccggaaaaaaccggaagaagaaacacccgacggaaaaacacagcacaccagagccagaacgaaggggagaagacccaagaacacaaaacaaaaagagagggaaagaagaagaaggggccgaaagagccgaaggaggaggggggcaggggaacagaagagaaagcgggcccaaggagccaaaggagaagccggaaaaaaagacgcaacccagagaaagaggagccacggcagaccccggaacccaaagccggcggcaacaaccaccgacgcccccccccacaaccccaccgcacgcggccgaggcacgagaagaacaagaaagcagaagaaagaagaaaacgcaggaaacgaccggcagcaggcacacgagcggcagagcaccccgcccacggcccggagaacaaggaaacaaggaacccccagcagcaggaaacaaccaaggccaaccaagaaagcgcacggggaagccaaaagcaccaaaaaaaacccaggaaaaaggaggaaccgaggagccccaagaaccagcagaccagggaaccagaacaacagccgcaaaccccaggacaacaccagggaaccaaagcagcaggcacagccggggaccagccaacaaagggccggacagcggaacaacgaaaggagagagggccacgccaaccgagacccggcagagccaaagccaggcaagcagagcaccagaagaagcaaaagaaagaagaggacggccacagagcccagaaaacaaggcaaaggcagacccaccgcccaacgacaaacacgcaagacagcccaagaaggccacacgaagacgagcaaggaccagaaaaaaagaggaacaacaacccaagcaacaaagacaaacagcaccccaaccggaaggccaaagcagagggagcgcaacccccccagacaaccccagacaagccgccgcgaggccacacgggacccgccacagacccccgaccccacccccccaccgcccagacagcgcagcccgcccccccaacccagggagggggcagaggaagagggggaggggaagccgcggccacccggccacacagaaggggcccggaaagaggggcaaaaaacaccccgggcaacaagaaccacaggagccaaaacacaaaaacaaaaaaccaagaaaacgaccccaggggggacgcacagccccgagagcagcaaaaacaacaagcccggccaaggagaacagacgcaacaaaggaggagagagagggcagggcgggggcaacaaagccacacagcaaagcaaaacgagcaccagccccgccccccacaggacaccaccagcaccccccgccaccccacaacaaagggagcaagaaccaaggaaggagccaaaacaaggccgggcaccgcaagacgccgcccaggaaccaaagcaggaagaacaccagaaagagcagcacaacaaaagggagaaggacaagcacgaaggaaaaagcaccccagaagcggacagggccgccaagagagcagaaacaagcgaaaacgcgaaaaacaaggcagaaggggcagaaaacaaaaacagacacaaaaaagaaaaaccaaacaagaggggaaggcgagcaccgggaaggagggcgccccaccagggaacagcccaagagcaagcaagagaagagagacaccaaacccggcacaaagaaaacggcaacccaaagcgacgccccccccacacacacacagagcaaaaaagcaacaagcggaaccagaagcaaaaccacggcaaaagacgaaagaccaaaacaaaacaaaacaacaacaaaaacccagagcggccagaaaacggcacgaaaggaccaagaaaagcgcagaagagaggaaaacaaaggcgacacaaaccccgaaagaagcaacacagccccagagcccccccagaagcagagccacccagcaggaagcagcgacaacccaaagaacagcgcaacccaccaaaacaacccgcaaaccagcacacgcgccggcccccgccagcacggccggcacacaaaaaccccgcgaacgcggcgggagcagacgccagacgcagagagcaggaagcagaggaaaaaaaacagagaggagccgggggcaaagcgcagacgggacaagagggccaggaaaaaacaaacaggaaagagacgacggccgcccacccggccaagagaaagacaaacagaagacgccgacgggccgccaaacacccagccaccagggagcgcaaagcaccgcagacaaaaggaggaaaaaagccaaaaggaaaaacacaaaacaagacaaacaagagaggaaggagcaagaagaaaccaccaacaaggaaaaggcagagaaaagaggagcacgacagacagacacggaaagcagagcacagggcccaggcagggaaaacagacaacaccgcccgcacgcaagccccccccggcgcaaagccagcaagaaagaaccaaaccaacaacgcccaaaagacaagcaaagcaaccgaccaaagcaacagaaaacaaccaaagccggaaaccaaacggacccacaggaacgccccaaaacccaagggaacgcaaacccaccccaggaccaaaggccccccggccagcagggaggagaacagccgggcagaacccaagcaaaccgacccccagggagcaaggcgcaaacaacgagccagcgcgcaaaagaggagaaaaacacacccagagaacagaagaaacgggagaaagaaagccggaacaaggggaccgaggaagccaaaaccgcagaggcagaaagacaaaggaacaaccaagcaggaagaaaaaagcaaccgcagaaaaacaaaagaaacgaaaggcaggaccacagaacgcccaagggaacacaaagagggacaaaagaagaac

SEQ ID NO: 355 - RNA, 10096 nt, Homo sapiens
gaggccaggcccccaacccaggcaaaaagccaaggggaagaggagggacacgaggggcccggaccgcgaaggagaggggaagcgcaggaaaagcccaccggaagaggacagcgccgagcccacccagggaggccaggggcagccaaccagcccaacccgggcgccccacaaagggaccccagccagacagcagccccaggcaggaccggcgcccccaccggccccccagaaggaggagccccaccaggccaaagacccccccaccccccagggaaggggaggaagccaccgcacacgggaggggagcacccacggcggaggccaagccagcccaacccccgcccccagccccccggggggggaacgagggaaacacccaaaaacggacagcaacagcgccaccgggcaggaaccgcacggaagcgaggcacagcccgggccaagcccagcccagcaaccgggacggggggagcaccccccgaccccaagcaggcaaacgaagcaagcaccgaaccgggcaggggggcgaggagccacaacgaacaccccgaaacaaccgcccgggaacccaaggagagacgcaaaacaacaaaagaaagaaaaaaaaaccgaggcaagggagagcacagagagaaggggcgaggaggcgggcagaggcgcagaagcaggggcaggacgcccgagaacgaaaaggaggaaagggcggggggggccacaccgagcccagcacgggaggccaaggaagcagacaccgaggcaggaggagaccaccagccaacaggcgaaacccgccacaaaaaacaaaaaagcgggcggggggaagccgaacccagcaccgggaggcgaggcaggagaagcgaacccaggaggcggagagcagaagccaagacagcacgcacccagccgggccaaaaaaagaaagaaaaaagacaaagaaaaaaaaaaggggggaagaccggaggagggagagagggaggcgggcccagggcacagagccaggaagagagaacagcaagacaaaggccgaggcgccgggacgaggccaggagcagggaggaggccaggggcggaaggaagagccagaaaggcagagggggggacaccacacgggaagggacacgccaggaccgcgacgggggacagggagccagaggagggggagcagaggagagaggaccgacccgggagcaagacaagaggaagggggaggagcggaagccaggcaacaaccaagcacacacaccagccagggcggggcgcggaccggagggggaggaccggagcaggcgggagggaggggggggcagaggcagagaaagagaagagcaagaggacaccagggggccgagccccggaaggagagagggccaccagaggcaaagacgagcaggagaggaggaccgcggaggaggcgggcaccgggagccgagagccgaggcaagagcgagcggaacaagacgagcaaggcaggaaagaggagaggcagcggagaagaagagaccagcgcgaaggggagaaaacagcacgcgcaagggcggagccggggaggacgagagcagggcaggagcaaaggcaggaaagcagcccgacccacacccagccaccaacccagaggcgaagccacagcaaacagggagggaggcagagaggaaggacggccaaggcacaagccgaaaacagcgcagccaggaccaaggcgaacagagcgcggccacccgcgcccccccgcccccagcaccaggcccggacgaacgacagacgaggggccccaggggaagggagacaaccggagggaaagccccaggcagacaggaccgagccgccccacagggggcaaaagaaggggggccaggaggcagcacagccagggaagggaagcacggagccagaccaccgggccaaggccacccacagggggaccggagaggaccagaggcccagcgcgcggaaagggaaaacaggagggaggacgaagagggccagcaaaggcagaacaggaccagaaaccaaaggcgcccagccacccaccaaacgggcccccagggccggggccaccgccagcgggccacacgcccgccaaggcacacgccggcgcggagcagggggccacccaaccccgcaccacacccgaccccaaaggggaaccaacaccaggggaggacaacagcacaggccgcagaggacacggagaacggacaggcccaagggggccagggcacaaagcagacagcggaaacccagagccccgcagggaacgcaccagcacaaaaaggaacaaggcggaagcaacaagcaaacacgcaggcagggagaccaaaaagaacgcccgggaaaccagagaaacacaacaaacgggacagcaagcagacagggcccccggcgggccagggaggggagggaaagggaaagggaaccgagaaaggaagggggggacaggaacacagacaaacccgaagaccggcagagcagcacaacccacaaaaaaaaaagagacaaagccacggcgcccaggcggagggagggcacaaacagccacgcagccgacccccaggcaggcgacgcccacccagccccgagagcggaaacacagacgacacaccagcccagcaacacgagagaggggccacaggcccagggggccaaacccgggccaaggacccggccgcccccaaagcgggaacaggcggagccaccggcccggcccccaaaaaaaagcaacaaaaaaggcggcacacaaaagcaccgacgcaggcaccaaggcccccagccccccgaggccagcagagacccagagcaaggggggaccccacccggccacaaaggccgccacaaaggcagagagcggcacgagaaagagccccagacccaggccaaaccgaccggccgcccgccgcggcgccccgaggggcaaagcccagcccacgaaaggggcaaagggcgccccgcggagggggccaggacaggagacagagaaagaggggcagggccgggaaggaggccacagaaacaaaacagaacaaagcaaaaacccccaaaggaaaaaaaaacccaaaaccaaaaaaggcgaagcagcgggagagggggggggacgagcgcagcggccggcgccagaggccgggcacaggccgcccgggccacgccgcaccccggcccagcgcagaaagcaaggagaaccagcacccagcccacaggcgggagggcgagagcaccaggagacagagcaggcggggccgggcagcggcgaacgaggggggaaggggaggagcgcaccacccgggggaaccagagagcccagcccgaagcgccggcccaggccagggcccagcagggaagggggggcagccagcgccagcccgcagagcagccgcaggggcgggccaccaaggcccggggccgccgggccccacggcccgggcgggacagagcccccccccggggccaggaggcccagaaaccaccgagcagcaaggccggccacccacggggggaggaaggggcggggcccagggacagagagccgggcagacggcccgaggcagcacagcagggcgacggggcaagcacccggggccagagcggcccggcccggcccacacaagcaggcagagggagagggccaggggcgcggggcaaggcagcacgaccaggcgcgccccaccccaaaacacagccaggagagagcgcacggggggggccgggaagaggggcagggcggccagagggccggagggggggcgacgggcggacgggaggagggacgggcggcaggaagaagaaggaagggaggagcggcacaggggggggcacgggggcaagcagggaggagaggcacgggccggggggagccgggcagggggcagcggaggcgagggccagcacagcgagcagaccgggcgcggggggaagacaaaaaaggaaggaaacagaggggaggaggggggaggggagggaccgaggggagcagaggggaggggggagacagcgcgggaagagcgcaagaaccccccccaaaagagaggagcgccggcccaggcggagcacaggggcgaccggccacgcaacccgcacccggccaagcaacccgcccagcccccgggaagcgggaacacacgcgcaacaccacgccccgaaagaagagagacggggcaccagggccaggcggcgaacccgaaccagggaccacccgccgggcccccaaaggcgggaacaggggagccaccggcccagccaagaaaccccgcaacagagcgcccgcacgaaaagcagaacaggggggcagcggggaggaaaagacagaaaggccaaggagccagaaagggcagaggggagcgggaaccaaggacccgaccagcagaacagggcagcgcaaaacccaagccagcgagccagcccggcacccaaccgccccaccagcagcaccaagaaggcgaccgagcaccaggccaccccaaagcaaacaggaagggagcaaaaacaaagcaacaaaaaccagggccgcagacaaggcaaacacacacacacaccaaacacgagcaccacagccccaggcacagcgggcggggagcagccaagaacaagacggacaaaaaccgcggggcgcgggggaacaagcagacgacaaaaaaggaacagccgggagagggaaggggaaggcgagaaaaaaaaagcaggaacagagaccagaacgccaggggggcagaaaaagacggcagggggcccaagggaagcaggcgggggaagaccgaaggagggagggccaagccacaggaccagcggaaaagcaaagcaacccccaggcagaggccacggcaagcgcaaagggccggcgacagcacacacggccagcaaggaacagagaaggggccaggggaagagcaaaaacaagaaaaagcaaagggcgggaaccaccacacagaaaaacgaaacaagagaaagaaagccacagcgcgaaggggggggcaggggagaggacaaggaccggggcggggacagcacgaaacaaagcaaccggacaaggcaacgccaaaaagcgcagcgcaccaaacccccagccgcagcgaaacacccggcgacaccgaccccagcccgacccgagccaggcacgagaggcgccggcgccacacccccagccccgggccgagggggcgaggaaagagaggcaaaccccccaaggacagacgacaccccagaccccacaggccgccagccaggcccccagcggccccggaagacagcgcgccccccccgcagagcggaaggaggcgccgcggcacaagccccaagcaccccagagaaagcaggaaggccgccacgaaaacccacacaggccacgcggagccggccagcaacccagccgaccaccccaccggacaaaaccgcccccgccccgggacccaaggagagcacggcccaaaaacgacgcaaaaaaaaaacagaacggagaaggggggccacagcggccccaccgaaggccgaggccggagaagcccgggacggggccaaacccccccccagaagccccagaaaaccgccgcgagcagggcccagcaggacaggcagggacaccagccaagcccaggccccgcggacagacccacccgccccggcaggccgggagacgacggaggcaggcaaaccgggcaaaccagccgacacgacagcccacacacacacacccaggagacgcccgaggcggcccggcgggcagggggaaaacgagaacgaggcagacacagcgcgccccaagaacaacagaggcagagagggcacaaaacacaaacgaaaagggcaagaagaaaaaagacaggcggagggagaacagcagggcgcccggagacagcagggagaacccggcggaggggcaaagcaaagaccccagcagagaagagccggaccaggaagccagcccaagagggaggggccaggagggcccgcagcaggaagaaggaggcgcgcccagccagccacgcgcaggggcagagaggagagccccgaaagccacccggggaccacgccccaaccagccgggccgcgggaaggaaaggcacaagcaaagggcgcagcgaagcaaaggcccgcaggggagagccggcgccgggcagagagagccagggaagaggcaggcagggaggggacgggggaagcggagaggggggggcagaccacagagggcccgaaggccagcgaggaggaagggagaagccaggagggcagagcggcaacccgggggagggaagccggggaggagggaagaccaggggcacaggccggagaccgagagaggagagaagcaaggccaccagcaaaccacgggaaggggaaaaaacacaaccccccagagaaggaccaacagcacaggaaccgggcacccaggaagcgggccagccaggacggaacccaggcccgccccaggagacgcaacaggcaggggcggacggcagagacccagcgagccacccccggccaaacaggcccagcagcaggggcggaccgaaggcagcgggggcgacaacggcgaaggagccgggcgaaacaacccaaaaacaaaggacagcgggaaaaaaagaaaagaaaaaagcaagaagaaaaagaacgagagagaaagagggaggaaggagggaaggaaggaaggaaggaaggagggagggagggagggaggggagggagggaggaaggaaggaaggaaggacaaacaacacagacaccagagcaaaaaggacccagcagcaccgacaaacaaaagccccaaacaaggaaaccaagaaggggcccgagcgcagaaaaagagacaaccggcgagacgaaggaaaaagcagaacgcgacgagaaacaacagccaagagaaaagccagaaaaagagagaaaaacaggaaagaagcacaaaggggggggggcgggggggggggcggggcggggggggggccggggggcgggcggggggccgggcggggggcggggcaaggagagaggaggaaggaccagcggagagccaggccgaccgcgggaaaaaggcaagcagagagggaggaaggagaagccgccggcacggaaaggaaaacgggccggggccaggcggccgccggcaacaagcaaagaaaaacagagaccgaaaggcccgagaaacaggcggcgccgaaagcccccaaacccaggaccagcaagggccgaggccaggggcggggggagcgcaggcagccgacccccaccagagagcccacaaggggacaagaaaggcaggaaaaggggccgcgaaacgaaagaaaaacgacgaaaacccacaccgagaggagacaggaacccagaaaggagaaaaaaaggacgccagcacaggcgaccgggcagcagcggcgcggccggaagaaaccccgaaccggccccccagggagaaaaaccaccgaagggaagacacagaacaaaagggaagagacccgagccagcaaggacagaacgacgggcagaaacggcacaggaaacagggcccgccaccagcggggccaggaaggcaaaaggcccccccacaccaagcagaacaggcaaccaggagaagcagccacacaaaacccaggacccgggacacagcaacgcaaggggcagggaaaccaaccaaagacacaaaggaagggcccgacacagaaaacccagagaggcaggcggccgacaggcagcacagccgaggaacacagacccgaccccggcagcaaaagccccgcacaagaaaccagaggcaccagagcgagggggaccagggggcaccaggggcaggccccaggggggaggagacagagccaccacgcccaggcggagggcaaggggacggccacgcaacccgccccggccaagcaacccgcccagcccccgagaggagagacaggcgcccgccaccacgccggcaaggaggagagacggggccagggcgaggcggcgaacccgacccaaggacgcccgccagcccccaaaggcgggaacaggcagagccgccgcaccggcaccccaggcagccaccgaacagggccgcccaggggccaaagcagcagaccaccaccccagccagccacaacaggcggaagaggggacaagggcagagcagggccaccaggcccagaaagcccgggggccccacgggaaaaggccaacaggcagcggacacgggccaccggcgcaaggcagcaggggaggaggcggcggccagccacccaaaaagcagggcgcaacaaggaagaaaaggagcgagggcagggcaggcacgagcaggcgccccagagcaagaaggaacaaggcgaaagacacccaaaaccggcccggcacaccacccaggggggcccaccgagacgacccccagcaggagggggcccccgaaggcaggcgagccccccaaaaaaaaggccccaccagggaggagaggaaaagagcggggggcaggacaagcgcccacccacaccggaacccgccaccccagcagccacgcgacaccaccacagcgggacagcaccagccacaagaagcgccgagaaaccacccccaaccgaccgaaagggagggcgcaggggggaccggcggacccaaaaaccgcagcggagcgcgcggcgggcggccgccgcccacgggccccgcccccgggaccaagggccacgggcaggcgcgaaggggggcacaggcacaacagccacgggaaacagcaagagacccgagagcagccaccgcacccaggcggaggcagggcggaccaaccacgcaacccgccccgggcaagcaacccgcccagcccccgagagcgggaacagggggccacagccagcaaagccccccccccccccccccccccccccccccccccgagaggagcgccgcacccaggcggaggcaaggcgcggaccgccacgcagcccgccccgggcaagcgacccgcccagccccgagagcgggaacaggggcacaccacacccagcaagaagagagaggggcccacgggccaggcggccgaacccgacccgacgccgcccagcccccaaaggcgggaacagaggagccacgcgccccgcccaagaaagagagcggggcacagggccaggcggacaaacccgacggacccgcgcccagcccccaaaggcgggaacaggcagagccaccacgcccagccacacaagagacaaagcggccaaaagacacacgcaccaccagcaggcaaaagcaagcccaggccgaacgaagcaaggcgggcaaaacacccacccggggaggaaccacagcacagggcgacgcccacacacggcgagccccgacccgacgggccaaagggccccccccccaaacacgggggcccaagcgccagccagcccccgccaggggccgggccacccaaccaccagcagcaccacgggcacaaagacccccaaaccaaggggcccccgagccaggccaacgggcaggccaccgaacaccacagaaccccagaccccgcgacccagcaccccagcccagccccacccaaaccccccccacccaggcacacaacccccccagcagcgcccaacgggaaccggagcagcaagcccaccgcccaggccgcagcacagcgagcgacagaccacggcgagacccggcgccaaggacagggcaagcccacccaaacgaaaccgaaacacccgccccccccccccacccccgaggaggggggcacgaacaaggcgaccaaggcacagccccagggacaggggcccagaagcgcaggacccccaaaccaaggcgcaaccccaggaaaaaccaagaacccagcccagagaccgggcaaaccccggcgaagcggcaggccaagaccaacacacacaaaaggaaagagcgccacccaaagccagcagcccgggcgcggagaaacagagaggcccgggaacaggcccaacggcaagagagaaaaaaaaaacaacagcaggaggacgaacagaagaagacaaaaaggcaaggcgaggggagacagagaagggcacacaggagggaacagggcagccccgcaagaagggagcaagaagaagggggggcaaggcaaaggcacggggagaaaggggcggggccgccggcaagagggagaggggaagaggcacaa

SEQ ID NO: 356 - RNA, 2249 nt, Homo sapiens
gccaggggcacaaggcaggggaacggaacgcacagaagaaccccaccgaacgaggaagcggggcggaagggaaccccaccaaggccccggcgggaagaggaagaacagaaggaaccagggggaggacccccgcccacacgccacccgcacaccagggagcgagggaggcaccgacgagacagggggggccccggggagagaggccagaccacgggggaaacaccgggacaagagccccacccccccccccccccccccaacgagaggaaaaaaacaaacaaaagcagaccgaagggcacgcagaacaggagagcccaccgcagccgcaaggaccacaggccgcggcagcaaaccccaccgccccgcccgcaaagaaacaaaccagacaaggcacacaaaacagaagacacaaaaggcaccaaaaaagacacacacaccccccacacccacaaaccacagagggcgacggccaaaggcagaggcagggaagagcggcaacccgagaggaaggggcccagcaggggcgcagccgaccccccgccggagggacagggacccacacgaccggcacgggaaaagcagaacccccgcccagaaagcaaacccaggggggcaccaccacccccagcaaggaaaggacacagaacaaggaaagacaggaaccgggaggcgccaaccaaacaagaagcccgcccccaacccagcacagaacaccgcgcggcccgaccgggacgccgcgccaccagcccgcccgggcccgcggcaccggcgaggcagacccccaaaccaagagccccaggggcaggcagggagccagggacaagagggaaaaaaagccaccggcagaccagagagaaccaaccacacaaaacaagccagccaggcaaaaaaaaagagaagaaaacaaaccccaaacgggagaggaaaaacacagcccaggaagggcgaagaccgcacggagcaggccaacccaggaaacacggaaacgagcaaaaacggagcggcgccaacgccccgccacaagggggaggaacagcccaggcacgacaggaggaggaggggaaggaggagaaagaacggaggcgaccgagagaggggaccggggccaccgcccgagcgcaggggaacgggcaagaggcgagggaaagcaagaggcagggagggggaagggcgcaccaggagcacggggcaaggaaagccgccagcgccacacagggcgaaccaaaacacaacggccaggcggggacagccgaaccccagcacgggaggccaaggcgagggacaccgaggcaggagagagaccagccggccagcaggccaaaccccgccacaaaaaagcaaaaaagccgggcggaggcagggccgaacccagcacgggaggcgaggcggagaacacgaacccgggaggaggagggcgggagcgagagcgccacgcacccaaccggggacagagcgagagaaaacaaaaacaaaaacaaaaaaagcaacggcccgccacaccagaagagaggccaacggcaacccacacgagcacaaacaaagagaacagaggacaccagggacaaccaaaggaggcagggccgcaaagggacagcagaaaccaggacagccacgcaaacagaccacggcagacccgagcgaggggggaaaagcaggagaagagacaaaacggaaaaccaaaagcagaaagcccaacccacgacgggcaaaacacgaagaaaagagagacgccggcagagaagggagcgaacacgaccagagagaggcggagaaggggcagcgaggccgcccagaccgcccacccaggggcggggccgcgggggacccagagggacacagcagccccacagccgcgccagcgcgccaggggaaaccaggcacggggggggagaggaggaccaccgcccgacacacccccgaacacaccccacagcacaaaccgccgaaaagccaaaaacacgggcaaaagcaccggcgagggcagccggcaccaaccaaccgcaggcccgaggggccaggccccgggcccaggggggcacgaccacaaggagccgcccgccccccgaggagcccagcccaccacccgccccagggcagggccgaagccgaaggccacccgacagccccagaagacgccagcccgacacagccagcgccggaaccgagggacgcagcaaggccagccaaagaccccccaccggcaaaaacccccaggccaagaacccaaaaacagacaagcagcgggcggg

SEQ ID NO: 357 - RNA, 1678 nt, Homo sapiens
agagccaacaagggaggggcacggagcaccaaaaggcagagacgagacaaccacgaaacaaaaaaaaaaaaaagacagaaagccaccacaaaaagaacggcgaagaacaacaaaacaaaagcaagcaagaaggaaagaaccgcaaaaaagaggaagaaagcaaaaagggaggaaaaaacgagcaaggagacaaaaagcaacaggacaaagccaagggggaaagaccagggaacagacagaacaaagaagaagaaccagcagaccaaaagcaaaaaaagacagacgcagggaacgggcaggggagacgggccaccagagagacacccccgccccgcggcccccagcccagaagcagggccgaggcccagaagccagcgccacaccggaaggccaggagcagagaccccccccagcagcacgacagcagagacgcaacagaaccagagcagaaggaagcaaacaacgagacacagacagacagcccagaaagcagaacaccaaggcaacaaaacaacacagcgaagacgcaggaggaaggacaagccaaagcaaccaggcagaggccggacggaacaggaaaaaacgaaaagaggccggaccgaaaaagagcggagcagaacggcaaggagaagaagaaggaagaggcagggaggggaagaaacgccgagcggccaaaaaggaacggacgaacagcccaagggagaagcgccacagaaacagaagccacgggcggcaagaaacaaagaaaaaaagacaacgaaagcaaccccaccccacgggcggggagagcaggcaggacgacgcagcccccagccgaccaaaccagcacgccccaaacagccacacaccaaagaaacaaaaacgcaagaaaaccaagaaccaggagaaacccccccaaaaaaaagaaaaaaaagcagaaagagacaaaagaggggggcagcaaaaacgaccgcagaagggagaggggcccaaagaaacagccaagaaggaagacacccggacagccaccaccccacaaaaaaaaacaccgccagcgcgcagacggcaccccaaacaaaacgcccaggaagccccaaagccaagcaaagggacagacagacaaagaaggccgcaggagacgaggaacacagccaggccggcggaaagacaaagccacacgacacaaaggagcagccccaggaacgggaaagaaaaaagaagaaggcaaaaccggccacaaaaaaaacgcaccagacccagaccagaaacaacaagcccagagcagaccagccacgagaggaaaaaaaaaaacacagaacacagccgccagaaacacagcacacgcacaacaaagacaagaagacaaggcagaggaggcaaacaccgaaacgccaagagaagggcaaacccaaaacaccaagagggaaaaaagcaaaaggcacgaacaggcccagagggaagcaaaggaaaaacccaaggggaaaaaaagcacaaaaaaaaaaagcgacgaagcagcagacgccaccaaagaagaagacaaaaagggaccaacaaggaggggggaagagaggcaggagagagaggggaccgaaaccagaaaggaaaaagaaaagggagaaaaaaaaacgagaaaagcagagaaagggcgccagaccaggggcgaaggcaagaagaggccgaagcaaggcagggagaggaa

SEQ ID NO: 358 - RNA, 10210 nt, Homo sapiens
ggagcgcggacccccgcgcgcgaaaggggccaagagacaccgagcccacccgaaagacaaacaccagaacgggacagagcggcggagaggagccagaaaaaaaaaccccaaaggaacagccaaggaaaagacaagcaagcgggggggaacaaaggaccgggaagagggagaccgcaccaccaccaaagaccagcaagggccagaacgggggagaaaaccgagaaaccagaacccacggcaaagcagggaaaaaagcacacgccacaccaaggcacccaagccacccacgcaaagcccgacccacccacgcggacgcaacacccaccccccgggggcacccagagccgcaggcagggagcggcaccggaagccgaagggcagggccccggccgggacgggaaaaacgccaccacccacagcggaccacaaaaacagaacacgccccaacgccacaccaaagggagggggccagccaggaggaaggccaacccggagcagccagcccccccacccggcaagggggccaaagagcccgagaccaagacacgcccccacaggaaacacacacgagaaacaccaccaccaggggcacaaccccagaaccacccgggccccccacccccacaggcagggccagagagcccggaaccacgcaggggcaacccagacccagacccacccagaccacgagacagaaggacagagcaaggaggacagagagcgcccagaccacgggagaggggacccgggacaaacccggggacggcccaaggaagcaacccgacacaaggggggaaaacaagcaacagaacgcggccaaggaagaagacaggagagagagagagagagagagagagaaagaggggggggggggggcaggaagggcaaagagaagcagagagagggccaagaagggaggaaagcaaaacaccagaccgccccaaagcgaaccacaggacaagacacgcgagagcccaacagggcaccaacacagagccagcaccccccagcccaaggacacccaggaaaagccaacacgaaagaccaacccgaacccaaagcacggaaccgacaagcaaggacaagacgcgccccgagggaacagcccagacaagacagaggaggcagagcaccagcgcccaccccggggacccaggcaggcgaccggagcaggcggagaaacgaaacgggcggcgccccggccgccgccgccgagacagggaggacaaaggcgcacaccccccgcggcgggcacacgcgggcgggcccagaggaacggggaggggcacccagcagagaaggcccaagggccaagaccaggggccccagcgggaacgcgggggcccgagccccagggccaccaagaaagagacaagccaggagaagcagggccaggcgaacaaagcacagagggcaaggaccacgcgcacagaagaaacaagcaacagaaaaaaaaagccagccccgggcaggacaggaacaaagcaaggaaacaccacgcccacgagagacagcaaccccaggagccggggccagcgcagaggcaaaggaggaggcaaggcgagggcgccaacgaccagacaacaacgagagccccacagggagcagaaaccacagccccacacaacggagcccccacgcagacaagaaaccccggagcaaccccagcagccccccccacggaacacccgaaagcgggcacagcccaagcaggaggacaagaggcaagccggccccagagccgcagacagcaccagcacaaaacagaaacaaaaaaccagaccgcccaagagccccaggaagcgggggacaaacgccccacggccaggccgaaaaacaccacaaacgagaccaagaaagaccaggcaggaccagcagcgaaaacgcagaagaaaagacacggcaaacaccaacacaacagcacagagcacacaaacacacaaagcacagcacacacacacacacacacacacaagcacacgcaaacagcccaccgggaaacaaagcaacggggaagcacccagccgccacgaccacaacaagcacccaagcggaaggcaccacgcaaagggccaccacaacacacaaaggaaaaccacggggcgggaggaaggccaccaggagcaaaccggaggaagagcccgcaaacccgcacggcagacaccccaaaagagaagcaaaaggcaagcacaggcaaaacagacggggaggagcaagaaaaaaaagaagaacacaagagaagagacagggagagagcaggagggaggcggggagaaagccgcacccgagaggaggaagagcgcaccagcagagacaaagggaggagccgaggggacggcgagaccagccccagaggaaccaggaccaggggcaggcccaccacccccacacacacacacgaaaggaagcggagccaccccaaagggcaggaacaggagaagccgacagaaaacaaagccaaggccggacaccccagaaagcaggaaaagagaaaaagagcacaagcagacaaacaagcaggaaaaggcagcaaaacaaggaaaaacaaaacaacaacaaaaaaaaaaaccagaagagagagaaacaaaccaaaccacccagaaacccccacacggagagaagcgcaagcgcaaagaacaaccacaagaaaacccgaagggagggaccggcccagcccggaacaggaaccccggccggacccggcccccaccccaccccaccacccccaggagcagacccccccagggcgaagaaaagacaaagccaggccccgagcggagggaaccagccaccaaacgaaaaaagcaggaagaacccacgggacaccgaccacaaaccacccagcaacccgagcggaccgaacccccaaggccgcccggccaagccacggccagggaagggaggaaaccaagaggacggggccagagcgcgcaagcgggaacccgagccccccccagcagaccaagaagggagagggagggcagcggaaccggaccagaggccccaggccaccagaggagggagcccacagaagggccagcaaagggcaggcagcccccagacaggaggggggaccaggaggccagacaggacccgggcccaccagaggcacagaggcaggggcaaaggggaacagggcaaagccggacacggcacgaagcggggaaaaagacgccccaaagaacgggaagcgaacaacaaagcccaagcgccaaacaagaaaagggaaaaacagacgcccagaaccagagcagaccagaagcccaaaaggggaggaccggacaggcacgaaagccaaaacagagggaacagcaccgggagaggggccaggggcaagacccgccacaggaaggaaacaaagccacagagggagccgacaaagaaggagagagaggaaaaccacgaagagcagagagccaaccagggcaagcgaaggggagaaaaagaacagacggaaagagaagggaaacagcccccacaggcagaggaccaacccggaccccacggagcagagcagagaagcaaaccacaagaaagaacccaccccaaaagaacacagcccacgcaccccggaaaagagcacagcccaagaaaaaagaaaaacccagaccacagggcagaacaagacgggaacgaaaaaggaacagagagccgcacgaaacaacacaggagaacaggcagggaggagaccagagcgcccccaaagcagcaagggagagggcgagacaaagacaggcaccaaacgcacaacaacgccacacagaaaaaagacagagcaacaccaacacagaaaggcagcagcaaagcaaggaggcacagccagcgcccacacggccaaagagccacggcacggccgccacagcgaccaggacgaggccggccccccagggcagcgcacggcacccccaggggcgccccaaaggcaaaaacacaacaaacgcagggaaaaccagagccgagccagcaaaggaggcgagcaaagacggacaggcaaagcaccaccaaccccaccccccacccgacagcgacagggcacccagcccccccagcccaggaggggcgccaccacacacaagagccacagacgcacccaaaaaagaccggaggagcaacaccgcagcccaacccaaccagcaccccgaaaggcacgacccagccacacgacaagccgagcaagcaagcgcgccgcccaagaaagaagcgccccgccgagagaggggccccacgcgcccaccccgcccgggcagcaggggaaccagggacacccccgaccacccacacagggccacgcccggacccaccaccccgacccgagcccaccacccccaagacgccaaggggaaagacggccagagcaagccggggacacgacgagcagggcggcacaccaacgaagacagcaccggacaacaaaccggccgagaccgcacagcgggcgcaaaagagcaccacagacggggaaaaagaacaaaacaccacagggaggcgggagaccaacacaagaccaagggggcgaagggccggcccacccaagggggcccggggcacagggaaaggaaccggcccacagaccaagagcagaagagaagggcaaaccaccgcaaccgaagaagcaaaaaagagggcagagacccagaccaaacacccaaggcacacccccaacggaacaaggggaaagcaacagagggaggggacagaaaccccaaaccacagcaccggccaaaacggaagcaggcaccaaagacgacacagcggaccgacaagggcgagcagcaaccgggacacagaccccccgaaggcacgaaggagagaagaagcccgcggcacgcccaggagagagccccggaaaccccgccaagaaggaaaccggcagggcacaccgcgccaaagcccacgagagcaaacgcagccaccacaagcccgcacaccacgccacgcaggcgaaccgcaggaacggcgccagagcgcggcagagccaaagggggacgggccccaacgaagacagaaacaggcccccgggccaacccacaacagcaaagccaccacaggaaaagacaggacgccagaaacccacaaggaaaaccacccaagagcagccacacaggcggcacggggcgggagagcaacaaaccccagccccccgggcagcacacacagagagggcgccaggcaaaagaaacgaaaagagcaagaaacagagaccacaaggcggcaaaaaaaagccgggcgagccgaggcccaaagaaagaaccaaaacagccagaaaaggacaagaagcaggaggaccacacacagggcaacccccacccagagaagaaaccagaccagagagaagacacacgcagaggagcagccagggaaggacggggcgggaggggagagcaagcagaagcagaggccacacccaggccagaggggcggccgccccgcaccacaggggccagagggaaggggggagacccccggcgcaggcccagaacagggggaacgacgaccagcgagcgagcggagaagccaaaagacagaacaccagcaggagacgggcgggaggggaaccggggggggccaaaggcagagagccgaagggaggaggaggcaaggaggaaaacagcgccgcggccaacacggaaaagcaacagagacggggcagagacaagggggcgagggagaagaaaaagcgaggaacacagaggagagaccccggggccccgcagagaggcagaagcgagcacaaacaagaaagcacagggggggagggagagaagggaggggggagacgccccggaaaggggcaaaggggcgaaggagagggagacaagccgagggagagacagggccacccagcacaggacagggaacaaagacacagaaacagaaacgaggggaggagggcgggaacgcaccggggagcgcaaccccaccgccgccggcccgagcacaaagaaccaaacgccaccggaggacacagcgaaaccagccaagaagaaagaaaaaccgggagaagaagaaacacgaaaggcaggagaagaaggggaagcaccaaagaggaaccgcagaaggaaggaacccggcaagccccacccccagcccgccccccaagacaaccgaacaaaagggcagccaaagcaggccggcgaaccaagggacccaacgggaccccaaacagggggaagggaggaacaagccacaaaggaaggggcaggcaggcccaacgggcagcggcagcaagccaacaggcccagacaagcgaaaagggggaaaaaacccccccccagaggaaagcaaaggggagagaaagaaccaaaacggaaagcaacccagagggaagaccagccccccccaacccccccccaaccccaaccgacgccaggaaacagccgggaaggacaggagagaaaaaaaaaaaacaaccgcccaaagcagcacgcgcaaacgccagccgagaggcagaaacccagagaaaggaaacaagcgagaaacgagccggccggcgccccaggcaacagagccaagagcgaagcacgcgcccaccaccccacgcccccccagccaccccacacggggggggcagagcacccggacgagccagagcagccccaggcggaagggagccagagagcaaaaggcccgacccacagcagagccagggccgcgcaggcacacaacagagccaaccaggggaaaagagcgcccaggggaagagaaaaaaccaaggagaagagcaccccagcgcaagcgcaacacaacagcagagcagacaggccaccgcccacaggacgaaaacgcagggagggaggacagaagacaggaccccagccaaggagaacgcgccacacgaaaggaagagaccaccgcccaggagggagcagcaggacgggagcagcccaagaacaccggaggggcccaggaccagcaaagaacggggaaccggcaccggacaaggagaagaaccaccgaaagacagcaagacagcacccaacccggaaaagcaccaagaaaacaggaagcaacacacgcaggcccaaagcagcagacccaaggaaacggggcgaaacagacgaaccacccggccccggccacgcacagcagaaaaagacacacgaaaagagcaaagaaaaagaacaggcaagagaaggagacacaaaagaccgaaagaccaggggcaaggggaaaagcacccacgcacaaaagcaaacccgacgggaggacccaacaggccaagccacagcccccagggcccggagcagaagccacagaaacgagccggaaagcaaagaggccaggacccaggaccggaggaaaaaggagggggagagcaccggcacagggggccagagagccacaaccgcaccaccagcacccacggggcaccgcagacagggcagggccgggcgcccagggccaagcgcaagcaagcccagcaggcaacccagccaccacccaggcgccccaggcaccaggcacccgaaggcaagaccaaccccagcaccccggggccgcgaggcagggggggccgcaggaggacaccacgcaggcagcgaagaaggccccgcacaggacacccgcccacaccacccagaggaagacgacaacaacacgccgagacacaggcgccaccaaggaacccgggccaaccaaaaccgcaggaaagaagaaccgaggccgagagcaccgcgacagcaccaacgaaagcagcagcccaagccaggccagacggcacgggagcaaccgagcaaccgcggaggggcacagggccaggagccgagagcggcagcaacccgcccccccaaaccagccaggccgaggcggcgcccaggcaagccgggcaacaagccacaccaccgagaaagccaacgcagccacgcgggagcccagaccagcgcacccgcgaaccggggccccaggcacggcggccacgcggcgcagcagccacaacgccgccagagggggcagccaggcaagcagagggggagaacagcaggaaccgggccccgagaggaaaggacagggagagaacaggagcaaaaagccggggcaaggagaaaggccaaagaagcaaggaggcaaaagcaaagaaaggagagagggaggggcagaggggagaaagggaaagagagagagggacggagggagggaagggaaagaagggaagagagagaagaggggcagaggggagaaagggaaagagagagagggaggagggagggaagggaaagaagggagagagggggaggggaggagagaagaggaaagaccccacacgaacgcggcgaacaagagaagggaggaaagggccagacaaaaggaagaagagagggagggccagcagcagagacagccccaaacacccccgccacggccgggagcacagcacggggggagagggcccggacgcacaggggaagagacaggcaccggacccagccagggcccagcccgcaggcgccagcagcagcggaagggaacaggcaccacccaggacagacagacagccgcccgggacgaagaaacaaaaacccccaaagcacccgcgcgccacaaggggacgggccccccagccagaaaagggaggccaggcggggcgccccgggaagaggacacaaggccaccaaacagacccgaaagcggaaacccccccagcacaaccgggaagaagaagcaggggcgggcacccacgagcccgcccagcacaaagcaccaaagccgagcaaaaagccccaaaggcaggccaagcccgccgacccgaaaaagcagcaagagaaaaaccacagccgaaacaacaaacacgaaaaaaagggcggagcaggaaaccgaggcaaagaagaagcccccagaagccggaaacgcgcacgaaaaaacccagggagagaggacaagcagaaagcaggcagacagggggaaaacagagaagccgcacccaaaagagcgcacagagcagaacgcccgcaagcccagagccccgcgaggcacaaaggcaccagccaaagcacacaaccccgccaagggaaggcaggcacgaccaggggacccgggacgcggagcccaaagacaggaccccccacccgacagcccagccagaaacaggagccaccaagggggggggaaccaagaggaaggaccgcgcggagccgaaaaagggagagaccaggggcagacacccagggcacccacccacacaccaggccaaccccacgcagaaagaaaacaaacaaagaggaagcgcaggagcgcacaggcaaaacaaacaacaggggcagccagggagaaagacaggaagacacacagcagcgccgccaagggggagcagaaagcggagcaaaagacaaacaaaggaccgacacagaagaagggaggcaagaaaaacacaaaaagagaaacgaacaaaaacaagagcaaagaagccaaggaccccaaagcagaggcagaaaggagcagccgcagccgaaggggcacccgacagggcgcggcagcacaggaaacggcccaagagcacagccacagggacacacaaagaacaaaaaaaaagaaaaacccacccagcaacccacaacccaggcacaaagccccggggcaggggcgccacggacagcccagaaagggaagccacacgcgaaggccgcggacaggcacacgaagaccgcacccagaccaccaacggggcaaaaagcacgggccgccccacccccccacccaacaagcgcacccacaccacggggcccggacccccgcgcccccaagccggcccaggggcaaccaggaaacaggcggaaggccggaagggccggcccggcagcccaagacccagggagcaggcagcgccgccgcccgcggcaacaacaccacaggggaagaagggggcccagggggaggaggaaggagaccggaagggaggcacagcaggggagaagagcgccagggagccagacacggcccagacagagcaccgaacgacgacaccggagagaaaacaacgcaggagcagcggcagggaggaaggcccgcgagaaagggggcagaggccagacaccagccccgcggcaggcccagggcgaggaaggcgggggaggggaggaggcagcccgggccccccgcacagggacaggagcacggcgcccaccacagagcacccaagagagacgggagccggcacagaggagagaggcggagaaagaggggacaaaaaaacggcagaagaaaagggggcgagcag

SEQ ID NO: 359 - RNA, 29 nt, Homo sapiens
agggccccaaagcaggccgaaaccaccag

SEQ ID NO: 360 - RNA, 5384 nt, Homo sapiens
cacacacacacacacacacacacacaccacacacagcaacacacacacacacagacacacacacacacacacacacacacacacacacacccccccacacaccggagcccggaaagaacggcaacaagggaccagcagggaaaaaaaacaagcaaccacagagcgggaggcccagaacaagggacaacagaacaagggacaaggagggggaagaaaggacacagaccccgggaaaggaaagagcaaagaagaaacaccccggggccggcccccaaaccaccaacaaaaagaaagggcaaaaagggaaggaagagcaaacagggaaggccagacgaagagacaggagacaaaccaagaaacagaagccaagaacgaggcccagagaagcagacaaccggaggcggagggggggggggacagaagaaaccaggcaccagggacagcagcaccacacaaccggccgcgcgggggaacagggagaaaacaacgcaacaccagaggagaaaagcaacaaaggggaaaaaacaccgcgcaacaaaaaaagcacagacacagcaaccccggggaaccaaaaccaaaacaaagccaggagcgaaccagaagccacccacaaccaagacgcggacgcccaagggaaacggacaagcgagacaaaacgaaagcaaacgagggaaaaaaacaaaacacagcaagggccagaaacccaaaccagccgacgccaccagagggacccacaccaggcagacagagaaaccaaaaggaaaggccacaccaacccacccacccccccaaagcagacaaaaagagaccaccccacaccgaccgcccgaccgccacacaaaaaacaacgccggccaccaccagcaagcgagaacacagcaaaaagaaaacaggcaaaagagaaggagcaaaacaaacccacgaaaaacaggggaaacgagagaacaaccaaaccaccagcagaaagcacaaaagcaccgaaagggccggccagccggccccgccagcacaccacccaggccgggcacccagagcacaaaaaaggagcaaacaaaacacccacagcaaaaaaaaaaaacacgaacaagaccaaacccagccaagagcaaaaccaccaaaccagggaacaaaaaagaaaagccccagacaagggaagcaccacaaaacagagcagcacccgcaaaaaaaggacaaaaacacaaaaaaaaaaaaacagggaaaaagagcaaaacacaaaagagaacagaggaaaaaggcacaacaagccaaagaaaaaaagaaagagcaaagaagaacaagacacaagaaaaaccacaccaacaagcaaggggaccacacaacaaaccaccgaacagacaggaccaaggcacaccacggaaacccccaggacagagcgcaaccaaggccccaggcgaaggcgcacgaaaggaacagccagcagcccgaccccccacagagcaagacgcacacgcccgcaacagcggaccccgaggaaaaccacagggaagggaaagacggccagcaagacgagacaggcaacagaggaaaaagcagaaaagaaagaccaggagaaagaaagggggaagcacaaagaagccaagggcaagaaacaaccagagaaaaccccaccgacaacaggaggaagccaaggaaaggcagggagcaacggccagacagcgaggaaacccagcccgaaccagcgggacgggaaagacaaccccgaaccaccccgaaaaaggacaacagagccccgaggggaagaaaaaaacaaacgccgaaggaggaccacaaacaaacaaccacacacaagcgagggcgcaaggcacggggaacaaaaaaaaccaaaaccccccaagagaagacaagaaaggcaacacaaaacagagaaacacaaggagcagggagcagaaaccagcgcagagagggagcaaacaaagaaaagcagcacgcaaagaccaagggcgaacaacacaacgaggggagagggaccaccacaagcagggccccaaaaacaaagcccaacaaacaaggcaagagggccgccaaaggcacacccccggcccgccccaccgcaccccgcccgcccccgggagcaagcacgcccacccagggaagcacgggcgcccccgggagaacccgccacaagccacgcccacgcacgccaaaagcacccaaaaagccaacccgaccaaccacagaaacccccccgccacaaggcacagagacgaggacccccaaacaaagcccacaagggcaaagacagccccgagacacccaagggcaggacagagcagcacacaggggagaagaagaagaaggggcagaaggaagcagggcaggaaggagagaaaggcaaagccagagagaggacagagccagaaggggaaagagcagaacggaagaaaggaagccaaaagggagggcagccagacgccagaaagcaccaacaaaggacggaaggaaagaaaggcagaggcacaggaagaggcgcgcagcaagggagccagggagcaagacaaggaaggccagacggagcagcaggaaagaaaggaagggaaggggcaacgaggcacaaaggagaaacaggcaggacgaaacgacaaagggagggcagaaaaagagaagacgagcaggcccagggagaggagacgggagggaacaagaagacagaagccaaagggagaaggaggagagggagagagcccaaaaccaagcggcgcaggaaagagggaaggagcacagaagagaagagaccagagaaccagggaccaggaaaaaaaaaagggaaaacaaccacaaccaccaaaggcccaaaagcaggaaaaaaaacagcaaaaaaaacaacaacacagcaccagaagcaaaacaaaaagacggaaaaacacggacgcacggagacagcaaccccagagaaaaaaaacccccccaaaagagaccaggcggaaaagcaggggaaagaccaaccccagaaaagaaagggagaagaaggaaacaaaggccaaaaacaaaacaaagaggaaaaccaaaagaggaaagagggaagacacacgaccaaagagaagcaaagcaaagccccccccaacaaaccgaaaaaaaaaagcaggaagaaggacaaacaagcacaaaacacacacaggaggaagcaaacgaacaacaaaaaaacgagcaacgaccagcaggcaggcaacgcaacacaccggccaccccgaaggacaaaaacaaaaaacaacaacaacaaaaaaaaaaaacaaaaaacccagaagcaaaggagcaacgcaaaagcagggggagaaacagagaggagaaaacaaaccacccaaagaccaaaagcaacgcccgacgacagaggacacgaaggcaccgaggcaaaagagccgacggcacagggcgcggccagaaccagaagcaggcacggaaaaggcaacagaaaaaacacgaaaaagaagaacaaagaagggccaagccagaggacggaaggccaagggaacaaggacaggaagaagagcaggaccagccgcgaaagacgaaagggcggaggaaagcgaaaggacaggacagacaaggaccgcggcgggccaccagagcggcgcgcagcccccccgcaccgacgaacgagccagccagcccccacaggagagggagacggaagccacggaggcagcgaggccgccaggggagacaagccagcggggccccgcccgcacccaaaaacaccggagcaagccccagaaacaaacaccacgcagcgccggaggggaagccccacaccacggggagcggaggcccacaacgcagaacggggacgcgcgagccagggcccgcaaggggaaaacaccgcccgggcccgcccccgggagcgcggacccgaacagcccccgccgaccccccggccacacccccccagaaacgcaggagcccggacgcccgacggccaccaaaacaaacaaaacaaaaaacaaaagaaaacaaaacaaacaccaggggaagccccaggcagaaaggaaaggggacaacccggcgcgcagcaccgccgaggagcgccagggaggggcggggcccagggcacggcgcccggcacggacgcgcgccgcccaacccagcgggccccgccgcgcgcagagcgggccgggagccccccaagaaagcaagggcgaccaccaaacgccagggaaacaagcacccccccaccaggcccccgccgaaacccgagagcggacgcccagccgggagccggacacggcacaacaccgcaaccgcaccacaggaggcgggaaagagcgccaggcgggcccagagggcccaggaaagaagggcccagcccggggcggggagggagagagcgaagccccccccaaaaggaggggagggagccgaaaccgggcccaagacagaccaaggagcccgcgcgccacccccggggagagggggcccggagggcaagcccgcaaaacgggcagaagacgcacagcgacccccacaaacaaaaaacgcagccacggaacgaaagcaaaccagacaaaaaggaacgaagccaacgggaggccacaaagaccagggagagcggcaccggggaccccaaaaccaccacgaaacaaaagcagcccaaaccagaacaaaggagaacggaagccacccgggaggcaacccccaccccaaagcccccacccaaccgccccaggagggaacagagacgagagcgcgacgccccgggaaagcaggcacagaaggcgccaggcacaggccagcagggaagggccacggaagagcgggccgccgaagccaggagcgggcgagcgcgcggggccgcaggacgcaagaggaggggacgagaaggcaaaacgacgacaaggaaacagacaaagaacaagggaggggacaaaaacagggcaggaaggaagagggacacgcccagaagagggaagaaaagagggggaggggccgaacgcaacgaacccggcagggaagcccccggcaaaccagcaaaacggagagaaagggacgggagacaacgggggagaaagaacggcaccaacggaagggaaagaagcagagcggaacagcaagggggaagaagcggagcccaaagaaacggaacgggggaaggaagacgcaggaagggggcaggagcacgaccggacagcaccaaaagcgcgcccaaagaaaaagcgcggggacggggagagggaggcgaagagcccgcgcgcgggcgggccggggccgcgcggggacgccgcacacgagcggcgccgaagacgccgggaggcgaggggcgaggaagacgccgccaaagaggcccgggcccccccggggcggggaaaagcaaaccacgggaaccaccaagccagcgcgacacagcagcggccggaggacgcacgccaaagcga

SEQ ID NO: 361 - RNA, 4407 nt, Homo sapiens
ggcaaaacgggcaaccccaccccaagcacaaagcgcgcagacacgaacgaacacacaagaacaggcaagcaagcagcagacacaacagcacccacacagaaaaagaggccagaaaaggaaaaccacaccaagagaaacaacaccaaacacagcaagagcgcgaagaaaaaacccagcaacggcccaagaaacaacaagcagggcccaggcaaccacacaaggcccagacccacccgacgaaagcagcccagagccaaacaagaaagagccacgccaggaaagaaccacgcggaagagccaaggacgagaagggaaaggggaccagccaagcgcggaagggagaagcaaaaaacagccgaggcggcaaccggccccaggagaagagagaagcagcagccggcaggggcacaaggaagaacagagaacagagcccaacagaccagcaggcaaagaagagggcacgaaagcaagagaaaaacaaaaccaggcagccaaaggacagcaaggccccaggggcagaaccaacacgaagggcaccgcccccaaaaggcaaagacacaaacaggagacagcaggacccccaaacggaaaaaaagcaaacaaaagcaacgaagaagaaaaacagagcacaagagcggaaagaaagaaccaccacacggacgaaaaagcagaacaccccccaaggggcaaaaaccccaagacagccgcccaaggacccaggcacacggaacacggccagagcgcagccacgaccacagcacagaggcggcaaagaaggaggaagcgcccagaacacaagaaaaggcggagggccaggggaagcacaacaccgaagaacggaagaaaaaaggagaaggccacagacccgcaggggagcacacacaaagagcaccgcagagacaaaccccggggagaggagcgccgcacaggcggagacaggggcaaccggccacgcaaccccaccccaggcaagcaacccgcccagcccccaagagcgggacacagggcagccaccacgcccaacaacgaagagagaggggcaccagggccaggcgccgaccgacccagaccacccgcccggcccccagaggcgggaacaggcggagccacgcgcccagcgaaaaagccccaggcacggagacacgacacaggcaagaaaaagccgggcccaggggaacagcgaggcccaaccacaggaaccaggaaccaaagggaagccagacgacacagggcaagggacccccaagcggcgcagagagagccaagacaccccgcgggagaagggcaagacacgcccgggggcaaaaagaccgacaggacacggggcaaaaaagcccaacgggaaagggagcagcacaggagaccgaggccaccacaggaagacaagccggaaaaaaggcgcagacagcagcgggaccgaaacagaaccaggaacaccccacagcagggcgaaccaaagcaggaaaaaagagacgccaagaggcagagcaccagagaacagcgacaacacccgaaacagccagaacagaaagcagagcacgaaaaacgccccaagggacagaaaaacacacaacaaagggaggaggcaagcccacaaaagaaagccggcaggaaaggacgggagaaaaaaagcacgagaagaacacacccccacccacacggacagcccgcccagaccaggagcacgcgccgcaggcgaagcagggacgaacgacgacgacgcaaaccgcacagcggaaagaagcccccaacccccgcccgccccgccccccgccaccagcaagaagacgaggaaacggaaaagaggaaaagcaacacagcggaaaaaaagggaaccaaaaccaaggccagaacaaccagaaagaacccgccacagcaaacgcccacccgcccaagagcccagaacacaggaagaagagggagcccccccacagggggggaaggaaagcccccccaccaggcccaaacaccaggacccagggcccgaccccaagaagggagcgccgcgcccaggcggaggcagggggaccagccacgcaaccacccccaggcaagcgaccgccagccccgagagccaagacacaggcaccgccacagcccggaagaagagagagggccaccagggccaggcggcgaacccgacccagcgggggaagggcacgacacgcccgggcccacccgcccccaagggcgggaacaggcgaagccacggccggcccagggccgacaaaagcggccaccagccaagggccacaaaagagaaaagaaaacccacagggcaaaaggcaccaccagaaacaaaagcaccacgccaggggaacaccgaacaacaaacgccgggagacgaagacacccacacaagccacaggaagaaagaaaggcagcaccccagcggccaaagacacaaacccccacccagcaggggggggcaagagcaaggcgaggccaccggcccaggccgacagccacagaggcacacgacagagagaacagcccccaaagccgaccgaacaccgggcgaaaacaaaccccgacccaaccgaccacgaacgaaaccaggagagacgggaacgacgcggaaagccccagggaccaaacggcaaggggagacacgagcaaagggaacccagcaacaggcccacccgccaacacagcaacccagcagagacggcccagggaccgcccaagaccccaagacacgcccaaagggcacaaagcagaccaggccgccacacacggcaaagcgcgccccccagccaaaccaggagcaggcaggaaaaccacccgccgcggaaagccaggagaaagaagcagcgggcgggaaagacgcggaaggaccccccaccaccacacccccgaagaccacagcccacccgggaggcgcggccggcaaagccacaagggaagcgcaggccgcaagcaagacaaaaacacagcgcaaagcccaggaaggacacacaaccgccaaagacagaaacaagcccggaacgcaagaacagaacaaaacaagccacccggaaagacgcacaacgaacaaagaaaaaaagcaggaaaacccaagaaaaaggaaacagaaaacgccagaccgaaaaaaccacaaccgaaccgaagggcagcagagacaaaggcaaggggaggccagacacacccgagcggacggagcaagcgcaccccacgccaacccaacccccaaaaaagggacgagcacccaaccgccagaccgcaaaaaaacacaacgaacacacgagccccaacgaggaaaaaccaccaagccacggaacccagaagcagcaaaaacaggcgccgaaccaaacagaaaagacaaaaagaaccaaagaccagaaaccacgcacaccccccaagacaaccacaaaagggcaacaacgccgggaaagaaacgagccccgacccaccaccaaaaggagacagagacagaggcaaaggacaaccgacagccaacagcaaccgacgacccagggaccaaaggaaggagaacgagcaaacgcccaaagcgaaagggccagaagcccagggccggggggggcaagccgaaccagcacgggagggaggcggggacaccgaggcaggagcaagaccagccgaccaacaggcaaaacccgccaacaaaaaacaaaaaagccaggggggggcacaccaaacccagcaccaggaggcagggaaggagaacacgcacccagcaggggagggcaggagcgagacgcaacacgacccggccgagagggaggacacccaccaaaaaaaaaaaaaaaaaaaaaaaaaaaagaagccccaccaagaaaggagcgggggaaaaggccagcgacccaaggaaacaaaagaggccccaacgcagcaaccacccaaggcagccaccaacacagaagcccccaccaaaacaaagccaaaacacccaggggacacgggcaaccgggagaaaggacagcacgaccgaggccacccggccccagcgaggcgggagaggcccggcaccgaaaaaacacccgggaggggaggccgaaaacaggaaaagaagaaaaggggagaggaacaagaaacagcaggacaaaagaggcccggagggcacaaaaagaaagaacagaagcgaggagccacgacagccacaagggaagaacagcaaggaaaacaccaggcacaaaaggacagaccacaccacagagaaaaacaacaaggcaaacaagagacagaagaaggcgggggggagggggcagagggaagggaacaagcaaggcacagaggcccgggggagaaaaaaggaaaacacaggggaggggcacaacagccaaaaacgggccaagagaaaaggcacaaggaggagccacaaaaaaagaaggagagaacaggcacggcagaggaagaggggagaacaggcgggggagaccacggagg

SEQ ID NO: 362 - RNA, 3817 nt, Homo sapiens
acagggaaggaaaaggagaaaagaagaacgaagggagaggaagggcgcagcgggcaagacagccgaacagaacaggaaacgaaagggaggaagagagggccaggaagcgagacacgagaagcagcaacaggagacaaggcaggcaagaaacccaacccagcaaacaaagaggccaagaccacaaaccagagagaaagaggagcccaaggccagacaggacacggccaccaccaacagagccccagagcgcccaggcgaggggcgcaagccccaaaacacaacacaggcgggaagaagagaaaagggaggcccagaagcccaacacgcccgacaagaaaacaaaagccacagaagccccaccccaaaggcgcaagccaaaacaaagaccaccacaacagcaagaaaaacgggaagggcacggcacaagccaccagcacacagcagcagcacaagcgccagcagcagcccagcagcagcacgaggccagaagaaacaggcgaaaaggcagcaagagcagaaaggccgaccccgcacgaaaaaaaaaaaaacaagacgcgacaaagaagcagaaaagaccgcagcagagacacgccaggaggagggaaaaccagcacacccccaggccaagaacacaaaagaaaagggacgggagaaacaaaagacggagcagacagaggcgcccaccacagccaagccccaggccaaagagcggacccgacgacacccgagacaaagccaggaagagccccaaaaccagggagagaaaaacaaaaacaagcaccacaaacagaaagggaggaagagagcaacaaacggccaacagaggggaaagcgcgaggacccaggaaaaacccgaaaagagacaaaggagaaacgcccccaccaaagaaaaaaggaggagggccaggcagggggccagccggaacccagcacgggaggcgaggcaggcagacagaggcaggagacgagaccacggcaacagggaaacccgcacacaaaaaacaaaaaaagccaggcaggggcggcaccgagcccagcaccaggaggcgaggcaggagaaggggaaccgggaggcggagcgcaggagccgagacgcgccacgcgcacccagccgggcgacagaggagaccgccaaaagaaaaaaaaaaaaagaaaaaaggaggagaggagagaaccggagcaagcagccacgcaaccagaggggagaaaccaagaccaacagaagaaagcaaacacaaccgggccgaaaaggaaccacgaaaaccaaccgaaacgcccacccaggcaagggagaaaaaacccccaccagaagcagaggcgggcccaaacacccagacaggacaccaaagcaaccccaggcccaacaaaaaccaccagcagcagcacaaacccacaagccagcacgcaggaaaggcaggcgaaagccagaggcacccagcccagcgcccccagcccagcagaaccagaacgaagcacgggcagaaaacccaccagcaggacaaaaggccgaggcccaggcaccacgaaggccaccccagccacccacaaccgccacccgaagcgccacgacgaccaagagggggccgcaacacgcccgaacacacaagcaaagggggagagccgaaggagaaagccaggaaaaacaaaacaggcagagaaaaagagacaaagacaaagcaaaggggcacaaaggaagaaaacagcggcgcaaaaaggaaagagaaaaagcggaaacacaaaaaaaccagaagagacaaaaagaaaaaagcaggccaaagggacaaaagccaagagaagaaaaggggaaagcaaaagcaacgacacaagcagacccccaaaaacaaaggcagcacggcgcacgcgaggaagaaaagcaaaaaaaacagggccacccaggaccccaggcaaacgccaccgagcggggcaggagcgcaacgacccagacccgaaccacgggaccacaaagcaccccaacagaggacagacacaaaggggccaaaaaaacacaccggcaaagaaaaaaacgcaaacgcccaaggcaaccacagggccgcaagacagcacaaaaggaaggacgaccccaagaggaggccaacgacaaaccagaaaaaccagggccaagacaaagccccgagccaggcggaggcagggcaccacagccacgcaacccgcccccgggcaaccaacccgcccagccccgagagcgggacacagggcggccaccacgcccagcaggaagagagacggggcgccagggccaggcggccgaacccgacccaaggacaacgccagcccccaaaggcgggaacaggcggagccacagcccggcagaccaggaccgaaacaggacaacacgaaaacggcaaaccaaaaacggacacgaggcaaagaacagaacgaaaagagggaaaacaaaaaaaccagaaagaggaaaaaggaaagaagaggcaaagggacaaaaaccaagaaaagacaaagggacaggccaggaccaagagagcgaaggcccacgcaggccacccagaccacagggggcgaagcagagccaaaaaaaaaaacagagggaaaaaaaaaaaaaacgacggccagaacaagaacaacgcccgaacaaaaaaaaaaaaaaaagcaggagaggcaagagccgggagggacgcaaaacaccacagcggcacacaaaagaacaagacccaccagaaaggggcaggaaacggggaaagaacaccccaaggagcgcagcaaaacacggagaacccccaaacccagagccaagcacacagaaaccaggggagaccaaaaaaacaaggggaggggggaagaaaaggaaagaggggagaaagagccaacaacgaaggaaaacccaagaaaaagggcagaaaaaaggaggccacaccacacaccaaaaagaacagcaaagggaaaagaaaggcagcacaaagaaggcacaaaaaagacagaaaaagcaaaaagagaagaagcacccaggcccccgcaaaagacaagaaaacaaaaagcagagaacagagaaccaagcaggacaaaaaacagggagaaagacaaggaagacaaagccccaagacaagaaaaccaagacaaggaacagagagaaggaacagagggagaggaaaaaaggaaccagaaacaggcagaaaaacagaaggggaaaaagacccaaaaagaagcagaaaagagcaagccagaaaagggggaaaacagacaaagacgccgaaggaaaaacaagcacacagggaaaccaaaaacacccaagacaccgagcccacaacacaaaaaaaaaaaagacacagaaagaaggggcagaaagagaccaacagaaccacaaagcacagcaaagcacaaaaggaaaaagggaaacaccaagagcaggacagcacagcaaagcacacagcaggggaaccgcagacaagagggaaaagccaccagggcagaacagccaggaggaagaaaggggggaacagcaagcaaacggggagaggccacccgggcagcaaggcccagaaacacgaagacggggagagaggcaagagacaaacagaaaacaaaagaaaagaaaaagacgagaacaaccaccaccaaaaagaaaacgcaaaaacacaacacaagaaacacaaagaagaacaaacacaccaaagaaggaaaggaggaggaagcggcaaaggcacaaaaacaaaaaaaaaaacaacagcaaaaacacgaccacaaacaaagaagccaccagggcagaggaaccaaaaaaagcaaacagcaaccgagaacagaaggcagcccccccacacgggaggggccaggacccaccagagga

SEQ ID NO: 363 - RNA, 11509 nt, Homo sapiens
ccgggccagggaaccagcgagagagggcggacagaacagacagaagcacagggggaggaaaagggaaagacagcagaaaagccgagagcaaggagagccaagaacccaaggaacaggacagccaccggggcccggcagggcgggagagagaccaaaagaaacgccagcgaaagagccagcaaaaaaaaaagcaaaacgaaaccccgcaagcccggggcacagaaccggagagagccgccaaaagggcgccaaggaagcaggccgccagagaagcgaccgcagaagaagaaacagcacagcacagaaccagggaagagcacacgaagcaaagcaagccaagcccaggaggagccagggcagagaaacgcaacccaagcaaagcacaccgggaaccagcaggaaaagccaccccccaccccacaaacgaccacaaaccccccaggacacgccccgagcaacccagagagcaagcccaagccacgagagcgcccggccccacgacgcagggcacaagccaccccacccagccggccaggccaagccaccaggacagagggccaaacagccacagcaacccggcgccagggcagaaacaaaggaagggcgccaaacaagcccacagagcagaaacacggcaaaaccaacagaaaaacagacgggggaaaagaccagaaacgagccacaaaaaacaaaaagaaagagcacaaagagaagaaacgggcggcccagcaccaaaccagacacaaaaagaccccaccgacacgccccaccgcgaggcccagaaccaacaacccaccaaggcccgcccagaaacaacagcagggaaacaaaccaacagaaaccaaccaagccccggaacagccccgcgacacccccacccaaccaccccaaagcaacacacacaggaaaccgcaagcaaaggccccagccccgggccccggccgcacggcgcccccgccgggccccgccggccacggacacccagaagcagcagggagcacaagacacccgaccacagccggcgaaggcgcacccgccaagcccgccaggcgacgagaggcggacgagccacacaggagggagacgcgggcccaccgacccccaacccaggcccgacaccaggaccgcaggcacccaaacaggcgagcccaacaacaccccccccagccccacgccccagaggaccaaaacaccacccccacgcacaaacccagccccagccccaaccgggcaagcacaagaccgccaaccgagccaaacccagcccaccgcaggccaaaaccagccacagcaagagccccaaaggggccacaaaagccccacaggccagaggccccaaccgaaggcgaaccaagaagaccaggaaaagaccagaaaagcccagcccgagccagaacagccgaggggcggaacggccagcgccagcgcccggcagacgagcccagaccagaagcccagcgcccagcagaggggcagaagaggaaccgggccgagacgggggaaccagggagcgaagcagcaagccacacccccaacacacaacacacacacacacacacacacacacacacaccaggcacacgcaaacaggacacaacagccacagggcagagggcacgaaaggagggcggcagggcgcgggaccacgccaaaccccagcacggcaggccgaggcaggcagacacgaggcaggaggaaacagccgaccaacagggaaacccgccacaaaaaaccaaaaaaaaaaaaaaaaagccaggcagggggggcgccgaacccagcacccagaggcgaggaaggagaacgcgagcccgggaggcagagggcagaagccgagacgcgccaacacccagccggagacagaggagacgccaaaaaaaaaaaaagaaaaagaaaagaaagaaaagaaaaggagagaccgcgagcacgaccaggacccaccccgcaggacggacgccgaacccaccaaaggccagggcaccccgggccgacagcgcagaaccccacgaccccaagggaagaccaccagccacgcaggcagcccagaaacacccaaggaggaccacaacccgaagagggcacaaaaaacaggccaaaaccgcacgcccccaaccaacacacggacacagccaggcagcccagcagaggggaaggggagaggaacaaccccaacacagccccagacacgcccccagggccagcagagcaggcggaggacagggggcacccgaggagcgaacaccaggagcccgcgcagagagccacagcgggggccaagggagaagggggaggggagccagaacaggcgcaagggcagacagagaggaaagcaaaaaaaaccaaaaaaaggaacacagaaaagccagaacggcaagcccacaaagggcaacacaaaggcggaaaaacacccccgcaaagaggggaaacaaacaacggagagcaaaacagagccaaaagcaaagaacaccggaagcagccacagaaagcgaaggaaccccgagcaacgcccaaacacacagaccaccgcacagccagggcaccaggaaagccagaaaggacagagccaccaaggcagggccaccccgggacaaagcgccacaaagcagaaacaaagagaaaacaagagaaagaaaagaaaagaaccaggccaaacgccaccacgagccacgagagaaaaaaagagaggaaacagagcagcaccaaggaggaaaacagaaggagggaaaaagaacaaaaaaaacagaaaggacaccgggcaagaaacacaaggacaaccacacccgcagccaaaaccacacccaaagaagaccagcccaagcagcaccccgcacccccagggcaagacaaaagcacacagaaaaccaaaaagcaaaaaaaagagagagagagagagcgagacgggccggcccaggcggaggcaagggccaccagccacgcaacccgcccccaggccagagaccggcccagccccgagaacgggaacaggcgcccaacacgcccagcaacgaagagagacggggcaccagggccaggcggcgaacccgacccagggacgcccacccacaccccaaaggcgggaacaggggagccaccagcccagccaaaaaaggaaacaaagaaaacgaaacaccaacacaacaaacagaggaagccccgcaaaagcgaaagaaaaaaaacacaacaaaaacaccccggcaaacagaaagaagcaaaaaaacgaccccggacagaacaccaagaaacgaagaaaggaagagaagacgacaaaaacaacacgggcacaaacaagccagaacacacgaccaagcgcagaaagagcggcccggacacagcccagcgcgcgcagggggcacaaccgcgacccccaccagcagcaggggaggagaggaggaaaaaaccccccccgggcccagcgggggccgcaaagagacgacaaaaggcagcaaaaagcaagagaaaaacagagaaacaagcaagcacaaccacagaaaaaccaggagagcaagcaaagggaggagaggggggcaaaacaccaacgaagaacaaaaagagagaaggagagacaaaggaaaggaagccccaagggcaggcaagcccccaagacacggaaaagcagggccaggcaggggccagccgaacccagcacgagaggcgagggggaggacacgagcccaggagcaagaccagccaggcaacaagaagaccccaccaaaaaaaagcaggaggggagcaaggaggaaagcagaaagggccccagaaggaaagcgacacagagaggagagagaggggccgaaaaaaggaagggggccagacccgccgcaggaccacccaccccccaaccaggaagagccgacagagcagggccagcccggaccccagccccagaacagagccaaaaaacccacaaaagcaacgggccgaagcagcaggaaacagacaagacacaagggcagaaaacggggaagaaaaaagagggaaacaaagaaagcaggagcagaagggggaagacccccagcgcacgagcaaaaaaaaaaaaaaagcgggaaagcacgaaccaccaggcaaagggggggaaggagaggagagggggccacgcaagccagccaaaaaccacgccaaagacaaaagggggcaacgaccccacagagccaccagagcagcccaccaggagagacaagcccagcccccccgagcccaccaagggaagcccaggccagccacgcccccaagaaaaggggagacccccccaaaaaacggcggggcagggaaccagcacagcccgggggcacagcacagagggagcaagccccagcccaccagaagacaggagcccaaacaccccagagacaggcagcaaaaaaaaaacaaacgaaagagcaaaaacccaacaagaaacgaagacgccgccagaggcggaggacccaaccacccacgggcggcagacacccagcagcccagcaggagggagaaccgagccagggcacggggcccaagaggacaaaagaggaagagaaaagagaggcgagaagacacaaacacccaagagcccaagaggggaaaccaaacaggcaaaaaccaaccccaccgcaacaacagccgagaaccccccaaaaggaggcaaccacagacaggcgaaaagccagggggccccacgacaagccccaaagcccaaccaaggacaaaggccaaacaggcgaggggaaaaagagacaaacgcccccagcccacaacaagaacgcgagagaaccccacaaccaagcaacccagcagacaccagcggggcccaacagaacgacacgcaccgggaagacagacccacggaagggccagcccacaagaccccacccccaaccagagcccagacaagccccagaggaccggccgaccaccagcaaaaggggcccacaaccccccggggaagccagagggcaaacagaacagggaaacacacagaccaaaaaaggaacagaaggaacagagaacagccagaggaggagacacacagggcaaggagggggaggggcacaaagcccagccccgagcagcccccaggaccccacaggaaccaaaagccaccaagcccgccgcaggaggagcaaaggacaaacgaaaacaggccacgggacaccgaaccggcccccccaaccagacagggggcagagcgaaagcccaacccaacagccggcgggaccagcccacccaaagcacaggagccccagccaccagcaccacgcacaaaaagacacacccagagaccaaaggaggagccagggcaggaaccagcagcagagaccaaaagaaaaaccaaaacaaacagagccccaaaaaaaaccaagccccacaaaccggagaccccgccacaacccaaggaccgggagaacaagagaccagccccgaaagacacaagaagcaagccagacacccaaccggcccacgagcagcaggaaaacacccacacccgccagcaggcaccaagcccaaaccaggcaaagcggaaagccacagccaacagccgagagaaagcgaaagacacccacggggacaccagagcgaacagaacaccccgcacagacccaaacccccaaacgcacacccagcaacgcgagcacgcacagaaaccaagggaaccgacaccaagccgggcgcaccgaagcgaaggacaccccccagggcaaaccccgaacagacaccaccaggccgcgggagacccgagggggagaaggaccacaaccacccccgccaccacaccaaacaaacacccaccacccccaaaaacgggagccaaccggcagagaaacacaagaaagcagagcaccggaaccgcaccacccaccccacacaaaacaacgaggggcgcacgggggcaacccccacaccagaagcccgggaacaccaacaaaaaaaaaggaagccacaaagcagccagcacagaggccagcaaccccgagaccagagaagggcaccacaggagaacccaacaagaacaaacaacaagacaaaaaaaaacaacaggaaacgggagcacagaaaagaaggggaagacacaaaaagcagcacaagaccggcagcgaggggagagaaggagaagagagaaaagaaaacgaagcggagagggcccaagccgccaccaggccgcgaggggggcgggcaacaaaaacccaagcaaagaagaacgaggcagagggaacagccgccccgggggaaccaggggccgcaagcgaaggagaagcccccacggcaaggacgaggagaggccaaggaagcaggccagaagcccccccaaacccagcagggggaagaaaaagcagccaagcggcccaagcaccacaggcgcagagccaaaggaaccggaaaggggccgggacggaggccaggggagggcacaagggagagccagcgcagacaagaggacaagaggccaagcagcgagcaagccaaggaaggcagagaaagggagccagaaaccccccaccagcgccggggcgcaggcccccccgcacaggaacggacagcccagggagaagaggaccaggaggaggagaaagaccagaaagacagacaaggagcggagaaagcaaaagacgaagaaggcaggggaaaaaaagcacaaaccccgagaacgaacaggggaaaaacaaccacaacaacagcgcagacggacagagagaaaaaacggaggagggacagggaaaaaaaaagagaccaagaaggcaggaagaaagaggcaaggccgggcacagggccacacggacccagaacgggaggcgaggcaagaaaaggcgaacccaggaggcggaaagcaggagcgagaggccacgcacccagccggggacagagcgagaccgccaaaaaaaaaaaaaaaaaaaaagaaagaaagaaagaggcaaagaaaccaaaggcgcccaaaaaggaaaaggcagacaaagggacaaacaccaggcccacgcaaacaaacaaaacgaggggacggaaaaccccgagaccacagcccaccacagagcccagcgggaagcgaccacagaagggggagcaccaggggccaccccccagagaaagcagccacacaagaaggccagagcacagaggcggcgggccgcggccggagagcccgaccaaacagaaggcagcccccgggaggcaggcaccgcagcggcgggaagaccccggccaggggaagagaggggggcaaagagaggggcgcacggcccaggcggcaaacccggacccccaaagcagggaacaggcggagccaagcacccagccggggcaaaacccgaggacaaaagccaagaaaggagaacgccaagagcacccaagcggcaggaggagggaggcggacaaccccccgacccagcacaaacagacaagagaccccccccacccccaccagccagggaacccagaggagggaggcaggccaccccgaggagagccccccaaaccagcggcgggcacagcgccccgcgaggccaaggggacaccacgaaggcccgggagagccaggcagaccgccccaacccagcccgaagcggccagccacacaccccccgaaaggaggccaggaacgaccgccacagaggggccgcacaaagcggcccagggacgccaggccccggccaccggccgcgccggaccagggggacagaagccacagggccacagcacccagaaccaccgggaagggagacccagcccacccgggagccccccaggaccgaggcacacacagccgcccccagcaccagcagggaggaagcagggaccccaaaccgcgccagccacccgagaacagccacaagcaaggaggagaaaggcgaaaagaagaaaaaggggacacagaaaaaaaaaacaaacgcaccgaaacaggaacaagcaaccacccacaagcagacgcgggaccaagcacagggagacgcagggagacaggggcccacaaaaccaaaaaacgcggcccgccaaaagggggaccaaccccggcaggcgaacccccccgaagcggaagcaaagcacaggccccagaaggggggaaaagcagagagacaaccgccaccagcccagcagcgccagagagggacgggcacagcaggaccagacaacccgaggaaaaacagaacccaagcaaaagcccaaaccaaagaaacggaagaaaaggacacaccgaaaagacacaggaaaaagaagaagggaaaaacccaagcaggaagagccaaaccagcgaaagccaacagacaaagaaccacaaaccaggaaaaaacacgaagaggccagggcggggccacgccgaacccagcacgggaggcgagggggcggacacgaggcaggagacccaaaccaccaggcgacacgggaaaccccgcgacaaaaaacaaaaaaaagcgggcgggggcgggcaccgagcccagcgaggcaggagagggcggaacccgggagggagagccgcaggagccgagagcgccacgcacccagccgggcgacagaggagacccaccaaaaaacaaacaaacaaacaaacaaaaacacgaggacgccaaaaaaaaagagggggggggcggcggggggcgacagcaaaaaacggagagaaaggagagagggcccgaaggagagaacgacagagagaaaagcagccaccaaaccaggacaggaaaaggcggggggacgcaggaagagccacgcaacgagaaagccaaacgaagacacaacaaacagaaggagaacgcgccgcgccaaaaacgacaacacaacgagaaccacacacccaaagcaaaagaggcaaaaagcacaaagaaagccaccacgcgcacacagagagaaccagaaagggggggcgagaaggagcagaccagcaggagccaggagggagaaaacaggaacacaaggagggcccacagaaggaaggaagaggcaggaagggaaggcccacgcccgggacgaggagccaccggcccaggagacccagggccgggcaggagagggggccagccacggccagccagccccgagcgcccccggccgaaaccccccaccacacacagcgccaagcaaagcaaccggggccacaaccacgagcccaacaccacaaagcacccccaagccgccgacccggaaaccaaggagaaaggcgaacccagcagagcgcaggagagaaaaggcgaccaaccacgaggcgcgagggcaaccagaaccaacgccagggacggggcaacagggcaaagacccacagagcgcccgggcgcccagcaggcaggggaagacagacaagggaaaacgaccaggaaaaaaacaaaaaaagccagcagaaaacgagcaaaccgggccaacaaacgcccagaggggggaaagaaaaaaaccaaaccaggaggaagagcgggggaagccgcaacagggcgccccagggagccaggagggcaacacccaggggagaagcagccaggcagaccaaggggccggcagcagccacaggaaggcagaagaaaaagaaagaggagagaaacacgaagggggccaacagaacaggaaaaccgggagggaccgacgagaggcagaagccacacccgcagacaagagaaagacaggggggagagacagaggcggacgccggcccgggcagggagggagaggggcgcccaacaccgagcgcaggcaaccccccaacgccagccccacaggcaccgaaaggaaaggaaggcaaaggcccacgacggggcccagagaggggaagggcagacccaagagaccccccacccccggcccgcacgaacgcgcccgacgcgaagagaagacaaggacgaaagccgaggcagaaagggagcggaacaaagggcagggccgagagagggcccgccgcaggcaagcaggggagagcccgagagccaggagggaccaacgagggaagccagcgacaaggaagagcaaccaaagaggcaggacccaaggcgaagcggagaaaacaacaacccaagggaaacggagggcaagcagacaccaaaaaagaggccgcaagaacggcaagggggcagaggcaggggaggggacaacacgaacaaccgaggacaaacagcacaaaacacaaacgaccaggggcaaagacgagacccaccgcaacaggcaagaggcacagaagacagaaacagaggaggaggaggacagggcaaacacagacaacccagcgaccaacgagaacagaaacaaagggagggagggaggaaaccggcagagaacaaaagcggcacgaaccccccgggccgaaacaccacaagcaaggggggaagagaacccagaaggaaaaccccagacgccacagaggaggccacgggggaagccagcagagacgaacccccgagggggaagaacagcaaagaaaagagcccgcagggcaagcacccccacaaggagcagggcacagggcccacaccaaaagcgagcgcggcccagcaccagaaaaaacacaggggcaccccaaggcaacccacggagcaacagcagaagcggcaaaacaaaagaaaaaacaaagaaaaaaaaaaaggccaggaaaaaggacagcaaaacagaagcaaggagaaagggcacagaaccaagggcgagacaagggacggggaaagcaagggacagccaccacgaagcggggaagaggccagccccacgcacccaaaggcaaagaaaagacgaccgccggcagcggaacagacaacagaccgggcaaaaaacggcagaaacgcccgcaccaagaggccccagagaggggacaaagcacgaaaagcagagggcggaaagccaagcacagaaccagcgcagaacgaggaccacgaaaaagagggccagcagggcgagacgccaaaaaaaggaagagggagaggagagaggcaacagacccacaccggccaggcgggaaccaagagcagaaaagggacaagagccaggcagcaaaagccaccacaaagccacaaacccaagcaggcaggcccggaccacacgagggacagggcaagggcagaggcccccccccaaacagcacagaccaggagacaaggacaagcaagaaacgaccaggggagaaaggcagggaaagcagagaagcggggacacagagcaaacagaaacccaggggggagggacaaggccccggcgaaaaaaccaaggcagaacaccaacaccacggacaaagccgaaggccacgggggccgacccaacagaaacagccaaggacagaagccaggcaccccccacagcggggcacaggacaccggccccccaaccagaggacacgaggcaaaacacagcgcggggcagaacccagagaccaaagagaagaggcccagacgcccaagggcaagagcaacagagaaagcgaagaaaacgcaccgaacggggccagccccccccgacacacacaaagggggaaaaaccgaagacaaaaaccggagagaggagcaagcggaagcaaaaagagaaaaggagggaacccgacaaacccggaaaagcagcggcagagcaagaagaaggacaaaaagaaagc

SEQ ID NO: 364 - RNA, 289 nt, Homo sapiens
ccaggaacacaagccacaacccaagaaacaaggggacagcacagccaaggccagcagaaggacgcggaaggcaaaaaccagccaagccgggcccaagaccccagaaaccgaggggcgccaggagcacggcgcgggcgaagcacaagcccaaaagaacagcacgggcaaaacacccagaagaagagggccccggccagagacccgcaagcgcaaaaaggccggagacagccccagaaaacgccagaagcagccaagcaggcccgacaggccagaggcaggaagagcggaa

SEQ ID NO: 365 - RNA, 8333 nt, Homo sapiens
caagccgggcccccaaaccagaccagaggcagagaggccgcagaggcgaggggccacacccaaccgcaaggaggggaacaaaggaaggagaacagagggacagcagggaagcccagcagcaggagaaacaccagcacggaacacgcggaaaggcagagcagaggaggcggccggaggcccccgaagaacacagagaagaggaacagccaggggcggggggccacagagacacaaacagcaccacagcccccgagacgggccccaccaagggcccagccaccagcggacaaagcggaggggggggggccagaaacagcacagcaaaccacgagaggccggccacccaccagcagggagaggaggagcagcgaggaggcgcgggaggggggcgcggaaagaagccgccgggacgacgaggagacagcccagggcccagcacagagcccaccaaagcggcacgcgacaccagcgggggaggccgggaagccagccacaaggagcgaggaacgaaaggaagacaaaggaaacaaggcgggagcccagggacccccggcagaaaaggcgaacgagagaagaggaagaaggccaggaaaggcacagcaacgaaaaggcacaaaagcacaaaagaacaacccaacaacccagccccgcgaacaaggaaaaagacgcgagccccaaaggccacgcgaaaagcaggagggagacccagcggcccagccgacgaaagcaccagaccacaccgacaggcaagcaggcgacgggaaacagccgcagcgaaacccaggaaggacagaccccacgcagaagaggcagaaaaaggaaaaagaaggcccacagcaagacagcaaacccaaaccgcacacacacacacacacacacacacacacacacacacacacacgccaggggcagagaaaaccagacaaccgaaaacagagaaaccacacaaaccgggacccccaccacgagcaggagccggaaaggaaacccgaccggacgaaaaagaggaaaaaaagaccaaaccacagaggaaacacaaaggaaaaaaacaaaagcaagcacaggccggaaaccaaggccaaaaagagaaacaaacaaaacaaaaagaacccccgacagagagaccccagcccggcgccaaggaagcaggggacggggaccaaggacacagaggcagaagacaagaagacaagcaaaacaaaaagaaccggagcagagacaaagcagggcgaggaagggaccgcgaacccaccaaaaacaaggaaggaggcccagaaacccgaggcgaccaagccagcacacagagaagaccagaaacagacagagcggcgggagcacaccacacaggcaagccaagaagccagacagaaggggcaaagaaaagggcccaggaccggggcggggccacgccgaacccagcacgggaggccaaggcagcagacacaaagcgggaggagaccagccggccaacagggaaaccccaccacaaacacacaaaaaagcagagggaggggcacggaacagcacgggaggcgaggcaggagaacgcgaacccaggagacagaggggggagccgagacggccacggcacccaccaggcaacagagggagacccgcccaaaaaaaaaaaaaagaaagaaagaaagaaaagaaaaggagcccaggcgcgcagaggcaagaaggcgggagcaacacaaagggggagagggggagcagagagccagccccgcacgccaccccagaagcagccaaccaagcagcacaaaccaagagaagcaaagcagccgcaggggacagaaggacgaaccaaaaagccacacgagagccagcccggccccgcgagacccccccgccccaaagaaaacaggccccaaggcaaaacgcaaagcaagggaccgacgcaaacaaaaagaacccacagccaaacaccccccacaggagcacggaggaaagacagcaacccaagcgacaggaaccaagggaaaaaaccacaaagcacacacccacgcaaaaaaaaaaaaaaaaaaacaacaaaaaacagccgccagcagggccagaagggaaagagagggccccccaagcaacgaaagaaccaaagggaggggggccagaggagggcgggcagggggcagaccacagaaggcgggccaccccgggaaaggagccaagcagcagaggggaaaggcgacacccccccccgcccccccgccaggacagcccgcccccccacccgccagagaaaagccccgagacccaccagaagccaagcagagggggccagcgacagccgcagaaccaaagccaaaaagccccaaaagcccagccaggacaagaagcaaaagggacgaagagaaggcagagcacgcacaaaaaagcacgagagcgcccccaccaaacgaagcccaggcagggagccaaggcgcacgcgcacagccaggccagaacagcaccagacagagcagccaaaaaaagaaccaaaaagaacaacagaaccaagagaacagggaggcggaacgccagggagaaccaccgcgagcccaccgaaaaggcaaaaaggagcgaagaagggggaaagcaaagcaggcagaagaccagggcccaagagaggccagcccacagaggaggcagaagaacagcgagaacaaaaccgaaaaacaccaaaaacagagaaaagccgaaagaggccaggcacggggccagccgaacccagcacgggaggccaagggggggagccgaggcaggagcgaggccagccggcaacagggaaaccccaccacaaaaacaaaaaaagccagcaggcagcagcgccaagcccagcacgggaggcgaggcaggagaaccgaaccgggaggcagagggcaggagccgagacacgccacgccccagccagagcggaccacccaaaaaaaaaaaaaaaaaaagccgaaaggaggggggggcgggacgcaaaaggccagaggaaagggcggaacacggaagaaggcagaccaccggaaccaaaagagccacaaaggacaccccgggacccccacaagaaggaacagaacgccagacacccgagacgagacaagcccccggaagaaggccccaagaggccagggggagccaggccaaccccaggcgggaacacaccacccaaagccaaccggccacagaaaggccccaccagaccccccaaaagccagccaagaaaaacaaagacaaggcagcaacaaaaacgagcaaacaacaaaacaacaacagcaaaagggaaaccgcaaggacagaaacaacacagacaggacaccaagcaaaaaaggagaagggcacaagcccaaaaccaaagagaacagaaaaagcaaagaaccagcaaggaaccaccccccggagcacgaagaacgcacacccaccaaagccaaaaaaccaaacagagaaaacagcaccaacacgcgaacggcgggacagcagaaaaaaaaagcaaagagaagagcgcagaaaagcaggaggaacgaaagagaagcaaaccagccgcagacccaacaagacagaacgaacacaacgcgaaaaggggcaaggaagcaacccagcaagcggaaaaaaaggaacacgaagcccagagagcccaaaaagaacagaaaggagagagaaagcggcccccacaaaaagcacaccagcggccacagggccacaccgaacccagaacgagaggccaggagaagaagcgagcccagcagcaagaccagccgggaacacaggagacccccacaaaaagaaaaaaaagcggacggggagcaagccgcagcccagcaccaggaggcgagacagaaggacacgagcccaggaggcgagacgcaggggccagacagccacgcacccagccggggacagagcaagaacgcaaaaaaaaaaagaaacaaaacaaaacaaaacaaaaaccaggagaacgaacacgcccccccagaagaacacgaaaacacagggcaagaaaagcaaggcaacgggggaccagcagaaaagagcgagagacaacgcaaacccaacgaacacccagcaaaacagggcccggaacaagaccccccacccagaaacaccagggggacagagccagcggaaaaggcagcaggagcccgccaagcacggggccccggcagccggcggagaaagcagcaaaaccccgggggcaaagcccagacaaacccaggccgaccaggccagggggggaagaacagcagaagcccccccccaccccaaacccgccagaacccagaaacacagggcaggagcccagcaggccccaggggcccccacggggggagcagcggcgcccgcaggcccacccaggaccccccgaacgccggcccaacaagcaagggggaaagggggggaggggggggggagcccacaaaacgccaacaagacacgcgcgagacaacagaacccgccgggaggccggggcccaaaagagccgaacaccaaccccggccagccccaagccgaacccaaggagcaccaagccggagggaaaacaaggcagccccagcagagcaccacgcccagcccccaccgccacccaaccacaggggccaggggagcaaaagggcagacaaccaacagcaaagcaccacgagcccaggaccaagagccaacagcgccaggggagccggacaaaaaacaaaaaggccgggcgcggggccagccgaacccagcacgggaggccgagggggggacagaaggcaggagacgagaccaccggcaacacgggaaaccccacccacaaaaaaacaaaaaaaaaaaaaaaacgagcccaggccagaccaacagcagaggacaggagccagacaaccgagccaagcaaccacccccagcccaaagaaaggaaggagagagcaccacacaggcgggacagcaagagaggggcgggaagggcggacaggaagcaaacagacaacgaacaaaaaccagccaccgagcccccaagcacaccagcagccggggcgaggaacccgcaacccccaagaggcaagcagagaggaagaccaggccgggaggagccacgggccccagcgggaaggcgggagaggaggaaaagaaccaacaaacagggcaggcacgaggcacaagcacagagaggaaaaggcccaggcacacccaggcggcacaaggacagggagagaggagacacccgacagaaggcaaccaggggggaaccgggggcagagaagacagggaagggcaaggcacaacaaaggccccacagggggcccgacaagggccgaaaggggcacccagaggagaaaagaggaagggaagcaggcagagagaaaagcaaaggcacaaaaacagcaaagaaaagcccaggagaagaaaaaaaagcagggggaagggaagaaacacggaaaaaggacgagggacacacgcacaggacagggccaggccaccacgagacaccaaaagagacaacagccggccgcacccaccccaaggccccccacccccagccacgagggaggagaacaaaagcaacagaaagggcccagccgcggaaaacaaagccaaacaagaggagccgcccgcaggaggcggagcacagaggagacaagcgacgcaacccgcccgggcaaggaccccacccagccccaagagcgggacacagggcaaccaccagcccagcagggggacggggggggagggggggagagagagagaggagccaccaggccaaggccggcgagcccagcccaagcaacccgccggcccccaaacgcgggaacgggagccaccagccaacacaaagccaaaccagccacagaaaaaggggggaggccagaggaagaagcagcaaagccagccacacccacgaggaaaagggggcaagaaaaagcaggaacaaccccaagaagacagcaaagcaaccggaaacagccacacaggaaaaacacgaaaaaccccaccccaggcccaacgaccccgcgcccgccccaccgcagaggagagcacaaaccaacagcccaccgaccccaaggagggggcacacagcacagaaggaggaaacaaacacagggaaagacaagccccccagccaccccccaccgcccgacaaagaaaacagcaaaacagagggcccaggagagcgaagacaaaaaacgacccacaccagagggcgacacaagcccccacggccagaaagaaccaccacagcaggaaaacccggcgacgacacagcacggaaacacagccaggcccgaggccagccaggccagccacacaaacgccgaaaagaccacagagagccagggcaaagccacggaaagacaaccacccaccgaaggaaacgagccacagaaggaaggggacgccggacccagagaaacccacggaaaagaaaaaaacacaagccacaggccaagaccggaacgccccaaggcaaaccaggaagcagcacaaagagccgcgaagaaacggaggggcggggggaggaagagaaagacaggcaaacgaaaacaaaaagaaaagcacacagagagcaaaacccacgacccagggagggacagagccacaggaaaacaccccaccaagaaacaaaagaaacacacagagaaaggaaagccaagaagaaaagccaaaacccggaccaaaagagggccgaccccaaacccaaaaggccaaaagaggggcccagacgaagagcgccccgcaccaaaaaacacccaccgccgagaaccagcacacacaagacacagagcgaaaaggagcagccgcccagaaagggaaaaacaaaaaagacaacacacacgaaagaacaagggcaccgggcccccagaaaccgacgagcagcggcccagcccagaccacagaaaagcacaacccagaacggagagaggggggaaaaaaaaaaacaacccgagaccagcgggccaacgggggaaaacagggacgaaccacaggcagcccaaaggaacgcagcggagggcagagaacacaaaccccccagaagacacggagacagcaagagcaccaagaaaaaagacgagccaacggcaaggagaggaaacccccgggggaagggggagagaaaagacaggaaagaacaaaaccagacccaccccccaaagccaacgccccagagaaagacaacgaccacaggggccgggaaagaagacagaaggcaggggaaggaagaacccgcaggcaggaaccaaccgcgccccacaccacccgccccggaaccccaacaaagggcaagcaggacacagcccaccccacccgaagcagagcggacgaggcagacacggcgaccccaacgagggccaaccccacccagcgccacacagaggccgagaagggcacccgcagcaagcaagggagcaccaacagcaaaaaagcacacggaagaccccaggcagagcacgaagggggcagggaacgggagggccaacccagagacaccgcagaaaaccgagccccggccgcccgggaacagggccagcagggagaggccgcagggcaaggaaggaccaggggaggcagggggaggggaacgaaaagccaggaaccaagcggcaaggggcagccgcccagacgccaccacgggcggcagagcgccagccacgccacggaccccaaacggaaggggcccccccagccgcgccacggacccccccgaggagcccaacaaacccagccgcgcggccaggccccggcccgaaacgggcccccagaggaacaggggcagcacaacgcaagggcaggaccccacggaaaaagcagaagacccgggcagcccagaagaaccccgaggaaaaaggacaggggcggccgaccaccaccccgccccgcccaacagccacggccacagcgagacaacgagacagaagcaaagggcgccacccaaaggccagcccaaccaccagccagcccccaacacaggcccacaaagacagccagcagaaagaaaccaaacagaggcaggaggaaagagaaaaggcccggaccaggcaccgaagaacgagccagccagggccgccaacagcggggccgggcagcaaaacccgagccaccgccggaagcagccgggaaacgcgaagccccagcaaacaggcagacagaaagaaccacccaacccccaaaagcaccaacccaaaccccaggaacaagggcaacccggacccaggaggcagcaagggaccaaaccacacgcccaccgccgcggacaacaccccgaacagggaagcacacgcccacacgacaggcgaaggagagccaacagaaagaaagcacgggcggaggagcaccagagacaggaggcagaaccaccccaccacaagcaaggcgagcccaggccgaaaagggaaaca

SEQ ID NO: 366 - RNA, 3248 nt, Homo sapiens
acccagcgcgcacgcagagcgcccaaaggaccagcgcgcacgcgcaaggcgccccagcccccaccgggccggcgggggcccgccgcgcccacccgcgaccccaggcaagagcccggccagacaaagaccccgccgggcccccgccccgagagcggcacccccggagcgcgcccccgagcgcggcccgcgccccgaacggcggggggcccccacccggaggcccaggggcccccgcgccccccacggcggccggccccccccagcgccccccgcgcggcccagacggcggccgcacgggcgaaggggccgcggccgccgcggccgggccggagccgccgccccggcggcggccgggcaccggcggcggggggacgggcggcggacggcaaaggcgaggccggccgcggggcggacgcggccggcggggggcgcgcgcgccgcgggaagggcgccgccgcggccgccgagccaaaaaggcaaccggaacggcgcacgcgaggccccgcgccgccaccaccggccgccgcacaggcagcaaccccccccccccgcgaaaaaaaaaaagagcgagagcgagagaggaagaggaggagggagagggcgggccgccgggggcgggcccgggggcgggggcgcgcgccgggcccccgcgccccacgcgggcaggcccggcggccccgcaggccaggccgcccccggccgcccgcccgggccccccacccaccgcgggacaccagggggacaccgggcacgagcgcccagggggggggccagggcgcacggggccagggcccgggcgacgcccgcagaaggagccggagggcaggagggccaggcagcaccccccgccgaccagagcaacgcccgaaagcagggccgaggacccggcgggggccagcagcaaaggcggggggcacagggagagaccgggcgagaggagaggggggggggagcaggggcgcggccacagaagcgcaggaccacacccccaggacagggcaggggccagcggccagggcggaggggcccggagaaggcacaaaccacccagccgcagcccgggaaggaagggggccacagggcagggcaccacccggagcgccgcgagggaacagcacgcccagccaagacaaggccggggcgagggggaccaggcacgcggggcgggggggcgggcacacagccgggcgggcccaccgccggagcgcagcgcagccacagcgaacgccccccagaccacggaggccgcgggggaccggggaccaagacccaggccacagaggagggggcggggcgggcaggaaccaaagccagccgggaagacccgccgcaccccgccgggcgccacgagagcacacaagaccggggggcagggccgcgcccgggaacacagacgggacccagggggggcagcagcgacagggcggggaccacagaggggcacggccagccagaggaaccgcccccccccccccccggagggggacaagaagcggaacacaaaaaaggaagaggggagggggggcacccaggccgcggggccgcagcgcgagagggcacgaggggcgcaaaggcaaagagagccaaaaggacaggaaccgggccaggaaggaggcgcgccagcacggacaaggcggccagccaagggaccgccccccgaagggcagaggccacagccgggggaaagagaccaccacccagcacacagggcagacacaggcacagccagaagacgcgagccccccacaccaccccacgcaagggcaaacccccagccgaaccccgccccggggagggacgccgcccggccgaccagcgcaggcgcgccagcgcccaggaccgccaacgcacccggcggcggggggcgagggcggggggccccgcgccggagagggcggcgggggcgggaacggaacgggggaggcggggggggggggggcagggggagggaccggacgcagagcagggagagagggcagggggcggcccaggcagcaagggggggcagagcagaccgaccccaggcaggaccgggccacgggccccacagcggccaagagacaggagcccagccccaccccgccccgggcgcagcaccggccgccccggcgggccccgcgcagcggccacccaggccccagcaccccaagcccacccagaaagcccccggggaagcgagcccgcagccacgcccccccacccagaccaaggcgcagcggcaagaacgggcccagccaccaggcgcgagccccccagggcccgcacccccaccccccacacacccaccccagggccccgcggaagaggacgccggggcccaggggcaggggaggggccgagcagccgggggaggggcagggaggagcgaagagagaaagcaagcagcggagcaggaaaagaggaagagagggccggccagggggcgggccgagcaggggagaaggaacaggcccggcgggaacgcccgaagggagccggagcgcacggggcacgcacgcagcccccggagaaccccgggaaccagccaaggggacccaccgccggcgggacgccccccaagccgcgggacacccccacccgcaaggccccaggcaaccaaccacagcgcagacccagggaccacccggccccccgcaaaacaaccacccagccaccgcccgggcacgcagcgccccccaccgccaggagggaaccaaccccaaaacagaacaaggcgcggagcccaggcggaggcgacacagccacgcagcccgaccccgggccaaagcccacgagagcgggacaaggcacacacccaagccggcaaaaaacgagaggaggcccaccaggcccaggcggcccagcccggggggccaagcgacccccacccagcccccaaagccgggaacaggcagagccaccggcccgcccaagcccagagaggaaggaacgagacagagccccccaagacgagagccaggaggacagggacccgaacacggagggccaggagaggagaagaagaagagggggggcaacaccaggagacacacccccacacagacaggaaacgagcaggacgggaaggccaagccccaaagcgggggaaggaccagcccagggcccgaggcggcagcccgccccgcccacacgcccccccggaaagggccccggaagccccaaggccgagccaaaggcggaaagcggaaccgggcccaccccccccagaaacaccgaggcccagagaggacaccacagcccaggcacgg

SEQ ID NO: 367 - RNA, 2085 nt, Homo sapiens
aaaaaaacaaaaaaaaaaggaacggagaccagcacaagaagaagcgagagaggccccggcccaagagccaccagaaggaagggaaaggggcagagaccacccaaggcagggaccacaccaggcaaggaccagaagaccacaaagagacgggagggaccacccggaccaggcagagccagagaacaaggaaacaccccaaaggaagacaggccgggacgagcaaaagacacagcaccggaaaagcccagagggcagcaggggcagaagaaaaggcccaagagcagccagaaaaacagcagccagcgaaccgacacggcccagccacgaaaaacacccacgccacaaaggcaggaggagaaaggaggaaggggaaggaacgagcagccagacaggccaagccgagagcaacgaaggacgcgcaacgggcgccagcgggcacggaacgcccacggcagggggccaccaagagaacgcggaaaaagcccgaaaggagccaagagaaagaagagaaaaaacagccagaagagaaccaagcaggagcgagaaccaacaagaccaccagaccagggacagaaccaaccacaccaggcagggaccccaaaggacggagaaaacggggccagggcgccccagcgacacgggccccgaccaaacagaggacccacagagggcccaagacagcacacagaacagccacacccaaagggccgggagaccaccaaccaccagcgccgcaacgcacggacggaggcgccggaggcgaggaagggcgagacaagcggggaacccgggcgacgccagcccacccccgcaaaaaagccaaccgaaagcgcgaaccgcgagccaggagggggggaggggagggagagaaagcgggaaacagacaggcaggcccagccaagagcgagcaaagggcgcgccaaggcaaaacgggcagaggagcagaaaggcgccaacaaaggacaagagaaccaccacaacggcaagggaaggccagaggaagcaaaggggaagagcaacccgaacccccagggcaggccggccggaggcggcagggagcacaccgcccggggcggacaagcaccccagaggaggcacagcaagaagagccccgaaaacccccggcgcaaacgcgacccaggcaaaacacaagccaccgagagccccacagaaggacggggcagcaggcgcccagccagccgcagcagagaaaaaacagcagacaggcgaaagaaagggaaggcacacggcccgccacacccagcacccaggaaaccaccaccccacaccacccgggaccaaaagcacgacgggagcccgagcaggcccaaaccaaggaaggacagagagagaaggcaaggaagggagcaggcaacagccgagaagccacaaccaggaccgcagggaaaaaggacacacaaaaccaaaggaaggcaagacagaagccaccccccaagaccccccaacccacagggccaccgcacggaaggcgaagaggaagaaaaagcaaacaggaaacccgcaaggaagagagaaagagccaaagaccagaaggggagcaaagcagggggaagggagcaaagaacaccggcagaacaagagagacaaagagagaggcgagaaacacaccacaggaagcaggagcggagaacaaagcccgaaccagcaggcggaacaaaggcaagccaagcaaagcagggcagcgaaccacccacggccccgcgggaccaggcaaggagcagcacaggaaacacgggagacagaggaaaaagaaacaggaaaaccaccacggccaacgccggcaaaggacaagccccgcgaaccaggcaacacaagcaaggccacaccgagcagcaggacagacccgcaggagaacaccacagagaaggcccggaaaggcaagacaagaaacaacgcacacccaagaaaaaaaagcaggaaaagaacacaaaagaaagaaagaaaaaacaagggccggggagaggagcggaaaaagaaaaaaagaggaagcagcagcaaaaaagaaggacaagcaaaaaaaagaagaaaaagacagaacacaaaggacgcaaagccagaaaaagc

SEQ ID NO: 368 - RNA, 11339 nt, Homo sapiens
acaccaaaaggacgcgacccgcccccaagccaggggaggccccacccccccagccccccaccccaccacgaggcccagcacaaccagagagccagaaaagacaaggcagaaaggcagcgacggcggccgcaacaccaacccccacacagggaccgaggcccagacacggagagagggagaggaaaaagcaagagaaaaagcccagggcaaccgccagacacagaaaggcagcacaggccaggcagcggagagccaaaacaggcccagacaaaacaaaaacccagaaacaaggaagcaggccagagcacggcgaggaaaaggcaccaagaagcggggccaaagcccgccaacagaacccgagggaaggggaagccaccgacccccacaaggagccgagccacagggcagagcacaaagggcaagcaacaaggaacaaaaaaaaaagcaaaacgaggccaggcacggggccacaccgaaccagccagggaggcagcagcaggaagagcgcggccaggagcgagaccagcgggcagcaaagcaagacccgccgcagaaagcaaaagccaggcagggggcaagccgggcccagcaccgggagacgagacaggaggacacgagcccaggagaggacaggaacagacacaccagcaccagcgggggacagagaagaccgccaaaaaaaaaaagaaaaacagcagagcagaagaaaaaaagaaacaacagcagagcagaaaaaaaaagaaaaaagcagagcagaagaagggcagcaagagaaagagagcagcgacaaagggaaaaggaacacaacccaaaaaacaacccacccaccagccagcccgggcccagacgccaaccacgacgaagaccaaggcgcccccacaacacaagcaagccaaaagccaacaacggaaacgcggaacccaagcaaaacgaaaccccacacggacggaagaaacacacagagaagccacccggacagcgcagcaccccaccaagaggcacaacaaagggaaaaaacaacagcgcggggcagaccaaccaccacccccgaaccccccagccgcagcgaggcccaccaaccaggccgggaacgcaggccacgcccacaagcgccaaaccggaaagccgagcacaaaggaacagagccaaggggcccacaggaaaggaccggcccagccaccccacgcaacggaaggcagcagccccggaaaagggcaccccacacagcggcagaacgccccgcggcaggagggggcgccgccgagacgccgcagacaaacacggggccgcccccagcgaaccccaggggcggaagccagcagagaaacccccgggccgggaaccccccaccgcccccaaaaaaccggagccacagaacgcccacacacacccacagaaacccagaacaggcgggagagacggagccgccgcgcccaggcggaggcagggcgcgaccggccacgcaagcccgcccccgggcacgccacccgcccagcccccgagagcgggacacaggcgcccgcaccacgcccggcaagaagagagacggggcaccggagccaggaggccgacccgacccggaccgcccgcccggcccccaaaggcgggaacaggcggagccaccgcgcccggccggcgggaaaaggcaggcgggaggggggggagaaacgcggcccccggaagcccccgagccccacacagagaacagcacaagcgccaaaaacgaggcccaagacaggccgccacagcagccaccccccccgaacagcggcagcaacaccgagggccagggcccccgaaacagcgcaccccagacgccgcgcgcccgccgccgagagccccccccgccaccagagaacgcccccccaacacccaggccagcaggcaccgccgggagccccccccgccccggcgcagcgcccccccacagacggcaccgccccgagcagcccgccgccccgagggcacggagagggaggacagggcggcacgaacgccagaaccaacacaggcggggccaaaccaccaacaaagcccaggaagaaacgcgagaaagagcacgagggcgccgggcacccacacacacaccccaacaaaggcgaacgaccgaacccggcaggagaaagagggcaaaagaaaaagagaaggccaagcgccaggcagcgaaaccagcacgggaggccaaggcaggaggagacaaggccgccaaaaaaaaaaagggggggggagggccaagcacagcaccaagaggggagggggaggacgcgagcccagggggcaaggcacaggagcaggcagacacagcaccagccggggacagaggacacccgcaaaaaaaaaaagagagagagacaaagggagaaccaagaaaaccggccaaagccaaaagaaagcagcaaggaggagcaagggaggaaaggaagaaaaggaaacacacaggaaacaagagggccgccggggcccaaccgaaaagacaaccgaacgccgcgccccccagccaccagcggaccagcccccacccaccggaccgcagcagccccccagccacccccgcaggacgaagggcccccgaaaccacgagacggacgcacggcccaggcggaggcagggggaccggcacgcaagccgcccccgggcacgccacccgcccagcccccgagagcgggacacaggcgcccgccaccacacccggcaagacagagagaggggcaccggagccaggaggcgacccgaccggaccgcccgcccagcccccaaaggcgggaaacaggcggagccacgcaccggccggccccgaaaccaggaagcccaaccccaaggaggcacaggaggaggggccggaaggggagaagcagagaggcagaagggccaaagaagaaagagagaggccggccgggggccacaccgaacccagcacgggaggcaaggagggcggacacgaggcaggaggagaccagccggcaacaaggaagaaaccccacccacaaaaaaaaaaagcagggcgcggggggcgccgcagcccagcaccgggaggcgaggcaggagaacgcgaaccgggagcggagggcaggagccaagacggccacgcaccgccggggacaggagcaaaaccgccaaaagaagaagaagaaagagagaccagagcccccccaggacaaggaggccggagcacacagcagagacacgacgcaggccaggaagaaaaccccaccaagaaccaacgccaggcgggccggacccccaggcccagaacggagaaaaaagcgggaagacccccagggaggaggaccccaccagggcgaccgagacaaccccacacgccccccaggagccagagcagcacaaagcaaggagacaagccacgccaacccccagacccgaaaaacccacccccccagccacaaagaccccggacggccgcagccacagaacgcagcccgccgccaaaccaccacaacaccccagccacaagcaagaccagcaccagccaaagaaccgcagcccggagacggcccaaaagacacccccagaggccccgacggacaaagcacccacagccacccacagccaccagacccaagcaccaggacccaaacacccgcaaccacagcccaccccccaacaggcccgagaacaggaacccacggcgcacaccacccagcaccacaacagaaccggccagggggagaaagagggcgaggacagacgcgccggcacggcagacagcacaggcagaacaccacagccagaaaggcgagagaacgcgagaccaggggacaccggggggaacacaaaagcgaagaaaaggaacaggggaccaacccaagccacacaaaggaggagaagcaagggcagggaaaagcaaccaaaagggagggaggaagcgcacggaagggacgggggggggacaggccccgcgaggcgcaccagcacgccagcaaggcaaggagccaccaaaaccagggcaggccacgcccacccacaaagccgaaagacgaagaaacgaaacccgagcccagaagcaaagagcagaaggaaggggcaggaggcagcaaagggaacgaaagcggcgaaaagagcacggacggaacggagaccaggcagcccagacaggccaggcacgggacgggcaggcccaacccaccaacccccccgaaaaagaagcccccccccagaagggccaaaagcagaaaggagaccgcaggaaaggagaacaaaggcaccgaagagggacgaaaacaagacgcccggcgggcggggacccgccaaaccagaacgggaggcgaggcaggcagacaccgaggaggagcaagaccagccggccacagggaaacccccccacaaaaaacaaaaaagcgggcgggggcggcaccgaacccagcacgggaggcgagggaggaaacgcgaacccgggaggcagagggcaggagcagagagcacacgcacccagccggggacagagcaagacccgccaaaaaacaaaaacaaaccaacaaacaaaacaaacaaacaaaaaacaaaaaccagacgcccggaacaaaacagaaacaaaaaaaaagaaaccaaaccccgggaggaggaggaggggggggggggggggaaccgaaaaggcccgcggggcgcccaacgaggaagaagccaacaacggaaaagcaacaacagaagaaggaccaagagcgaaaaaagcgaggaggggaggggccgagagcaaaacccaaccagcccgcccgcgggcccccccaagccaccccagagggcaccagagaccaagccccaacaaaaggaagagcaagggaaagaggcagacggagccagagagggacaagacccaacagcgcccaacagacagacgaaaaaggaaaggccagccccccgaggggcaggaggaaaaagaaggcgaaacaaaagaagcaaaaaaaaacacaagcaaaaccagcaaaagcaaaaaaaagaacagcacccgcggcccaaaacaggcaacaaaggcccggccacgacggcacgcaacacagaagccacccaccaaagaggaaaagcccagcaaggcaagccccccgacccacagcagccgcgcccccccacgcaggcaaacagaagacgccgacacgcccaaggccaaccgccccaaagggaaggccccacgaacccacaagggcggcggacagcacccacagggaggggaccccccgaggacgaagccggaggcaaagagaaagacgcaacgcaaacaggccacccaaacaggaagaaagggaagcagggggcagaaaggcacacaaaaggagaggaacggccgaaggaagaacaggcaaaaaacacagccccccccccccccccccccccccccccccccccccccacggcccccgagccgagccgaggcggacggacgcgccaccggccacgcagcccccgccggcccgcccaacgccgaggaggagcgcccgcccggcagccacccgccgggagggagggggggggcagccccccgcccggccagccgccccaccgggaaggaggggcgcccgcccggccgccccacgggaaggaggagcccccgcccggccaccaccccgcgggagggacccaacagccagagaacgggccagagacaaggcgggagaaagaaaggggggaaaggggggaaaagagagaaacggagggccggcggagaaagaggagacagggagaccagcgacaagaaaaacccccgggaccggacgggaccacccccaacccggcccgaaacaggcgaccaccaggggaaggaaagggcgggcaagaggcgaaacagagcgaaggcagcagcccaagagcacaccaccccaaccaagacccagggacaaaacacgcggaaggccgcagggcccgccaggaaaaccagagaccgcacgacgcgacccccccacagccggacccgccaaacccccccgagaaacacccaagaagaccaaaaaaaaaaaaaaaaaaaaaaaaaaaaaaaaaaaaaaaaaaaaacacaaaggccgggcacagggccacgccgaacccagcacgggaggccaaggcaggcagacaccgaggcgggaagagaccagccgaccaacaggagaaaccagccagaaaaaacaaaaagcggggggggcgcagcccaaacccagcaccgggaggcgaggcagagaagcgaacccaggaagcggagagcaggagccgagacggccagcacccagccgggcaacaagagcaaaacccgcagaaaaaaaaaaaaaaaaagaacagaaagagaggcaggacaagagcacgcacagagcaaacaacgggcaaacccgagcgacaccgagccggacgggacaaaacaaccccgcccacccaaaaagggagaaaaaaacaaaaaacaaaaacaaacaagcaaacaaaaaaaaccccccgggacaggaagagcacagaacagcggcaccggcaccgaaggccaagaacaaagccaacacacacacacagaaagaagccaaagaagccagcaagacacagaaagggaagagcccccgcaccccggcaacacccccaagacagagccacacagggcaggaaaccccagaagagaaaaaaaaagaacaaaacagagcaaccacaaaccacaaagaaagccacgagggagcaggcgaggaacggccccccaacgcaccggccaaaagccagccgcaaggaacaccacggccacaaccaggccagaacagcacaaccccaaccaaccccccaagggggcgagagggaacccgcaagccaaaaggaagggcacacaaaacaaacaaacaaaacacaaaaacgagaaaaacccacaaaacaagagagagaagggccaaagggagccaaggccaaaaagggcaaaggcaggggaaggcggaagcagccggcaagggcagggcagaaagggacaggaaggagaagggggaaagggaaaagccaaaaacaggaaaacgccaagaaaacgcaaggagcacccccaccccaaacccgggccagacccggggccagaaaggcacaggccaacagacccacaagaggcccagggcagaaaacaaaacaagggaccaaaaaaagaggcaaacccggcagacccaggacaggcgaagaaccaccacccacaccaacccaaaggaggcacacaccccccccccccccccccccccccccccccccccccccccgagacagagcaccggcccaggcggaggcaaggagagacggccacggcaaccccgccccgggcaagcaacccgccagcccccgagagcgggaacaggcagcaccaccagccggcaagaagagagacggggcccagggcaggcggccgaaccccaacccgggacgcccgcccggcccccaaaggcggaacaggggagccacggcccggggcacacacagacaaagaggacaaaggcacaaaaaggaaacacgccaagaccgggaagaagccaggcaaagaccaaagaggaaaagcagggcaaggagaagaaagccaggacccccccccccaaccaaaccccagcaccaaaaccacaaaagccccaaaaaaaaccagcccaccagccccaaaagccagacaagcagagaaaagcacgcaagaaagccagggcccagcgccaaagacgaccgaagaccgacgaaaaacagccgcgcaccgggaggcccgcgcgcaacagcgacagcaccaaacccaagggcccaaccaaaacaaacaccagaaaaaccccagggcaccccccagaagggaaccgaaacacacacgacaacaccagacccgaaaagaaaccaccaggcgaaaggaacacaaaagggcggagacgggaccgcgcacaaaagccacgaggccaaggacacggaagaaaggccccggaagcagagaagggcacggggaagggcaaggaggaaaaacacggccaagacaaacaaagccagaaggaaccccagccacaccagggacagcccagaggacaagcagggacgacggccgcccccccggaaagccagcaggccacgcccccaggcccaccgggcccgggccacccaggcgcagaagaagaccccccaccaccccccaggaagagaaggggaggccccaggaggcaaccaaccagcagggaggaaagagaaaaggaagggaccaggacgagaggggacccagccagggcggcccaagcggcccaaagaaaccgaccacccaggcaaaaccccccacgggcaggggaccgaggagccagaccggaccaccagaggcaaaagagggaggggggagggcaggaggaggaaccccaggagagggggcgagacagagacaccccagaaagaaggggagaaaagccgcacacaccggccgggagcggggagggcaggagagaggggggagaaccaggaaaaccaagcaagacccaagacagggcaaggcaaggaggcagagacagaaagcaacacagagagaacacccaaaagaccacggacagccggggaaaagcaaagcaacaggaagagcaagagcaccgagaaggccagaggacaaaaaaggagagggggggagcagagcgaccagacgaggaaaacgagcggccagcccaagagaccagaaaccccaggcacaccgccacgacacaaaggccccacccccgggggcacaagcaccagagaagcaaagggaccgcaggaacagccaacgcaacaagccaggggaggcaaagacaggaccgcaaaggcaggaggaaaagccaacagcccccaggaagcccacggagccaaaggacaagacaaccaggcagccccgagcaccgggggcacaggccaggagggaacgcggccaggagcgggcgccagccccggagccagacgaccccgccccagccccacagcccccccacggaaccacaaccgaagccaggggaggacagaaggaaggccaccacaaaccgcccaggaacccgagcccaccaagaacaagcgaaacccaaagcaggaagccccggcgccacgaacaccccgaggcagcaggcagaagagcccaacgccaaagggcacagggaccgggcaagcaccaaggagagaaaggaaacagggggaaggaaagcaggcaacaaacaaggaggaaaaaccccacagaccacgagaggcgaaaggggccacgcgggaaacacccacacgggcggcccgcagacaccaaagaacacaggggacccaaggagagcagagggggcagaggcgggggccccacaaaacagcccagggggcaagaagcagggagccgggagcacagaacccagggccccaggacccacagggaggaaggagcggaacagccgccgcaaaacccacacaacacaagaaccacaggcagccaccagggcaggggggaggagcggagccaaacaagaggggcaggagcagacccggcagcaggacccggagaggaaaggaccgggaaaaccaggaccccacagggggaacaaaagcgcgccggccgagggagggaaaggagcagggcccacagcaacgcccagcgagcaagcccaacacgaagggacagagaggaaggcccgaggaaacgggagaaccagaagcccaggagaaaagagacccccaaaaagaacacgggggagagaaaaaagcacagacagacccgagcaaaggcgaaggcgaacgggaagggaaaaacaggcaaccacaagcccacagagcgagaaaggacagccgcggaccgaacccgccgaaacaagccaaggcagcggaaagggaacggaaggagacccgagcgaaggacagccgaggccacgccagaggacagcaaacacacacacacacacaaacacacaccacacacacacacacacacacacacacacacaccacacacacacacacacacacacaccgcacacacacaccacacacacacaccacacacacacacaccacacacacacacacacacacacacaccacacacacacacacacacacaccacacacacacacacacacaccgcacacacacacacacacacacaccacacacacacacacacacacacaccacacacacacacacacacacacagcacaccacacacacacacacagcaccgcacacacacacaaacacacacacaccacacacacacacacacaccacacacacacacacacacacacacacacaccacacacacaaacgggagcagcaagccccacagcccaaaaggcaccacaaaaggggaagagaagagaaagcaaaccgagacgggggcaagacaccaacccccgcccaaacaccccaaaaggaaagcaacgaaagagcaggcaaccaggaacgcacagggggagcggaaagccccaacggggagcggaacacgaaaaaggaacgaacaagccccgagagggacaggggaggacccaccgccaacagggaaacaagaggagagaggaaaaaaaaggagcccccccccggccagacagaacccgaaagaccggaaaacaggcagcgaacagccgggcccccagcgagaaaacagcacgagccaaaacaggaaccggggccacccaggaagggccaggcgacagcgccaaacagcaaacagaaagacgagaaaggaaaaacacacacagaaccacacaccccaaggaaaggaacccgcaggaaggaggaaggggggccgcccagcgcagcagggcgggacgcagccaggcgagggacacaggaagagggacggaagcacaggaaaacagagaaaagcaaacaaaacagcaccaaaaaaaaccaacagcaaacagacccgggcccccagcccagcaccccggacggcagaaacggacgcaccggaaccccagcgcgggaagcgcccacaaagaaaaggaggcaggcaaggagacaaaaacaaccccagagacgaccggccggccggagacgcgcccagcacggggagggcagagcccgaagccggggaagggcggcccccaggagcagaacaaaagcgaaagggcacacagccccacgaggcaggggggcggccccggcagccagagagagcgagaaaccaaccaaagggacacaagaaagacccacccacccccaagaacaggagggcggaggcccccaccccgcgccgcgcccccaccccccagggccagaagaagcgccacaggaaccggcgcccacccgaggccgcacagccggagggagaaaaccacggccaacagggagaaccacacaaacgaaagaagagggccagagaaaccagggagcagcggggaccacgccaccagcccggccggaaaccaagcgcccgcccggacaagaagggacaaaaaaaaaaaagaaa

SEQ ID NO: 369 - RNA, 57 nt, Homo sapiens
gacagggagagaaggagccagaagaaaccgacacggcaagacaacaagaggcgaaac

SEQ ID NO: 370 - RNA, 2375 nt, Homo sapiens
aagaccaccaaaacaacgagacaagcccaaagaaggaaggacggccaggcaaagcacacccccaaacgacacaacagccacagagacagcaaaacaaagaagcaccaggaaaaccaaacggaaaggaaaaagaggcagggagaggccccagccacagaacaacccacacaagcacccgcggacaagcgcgagggcagcaaagaaccacgcacgaggcagacacccaagcccccaaaaaggaaaaaggaagaagagagcaaagagaaaaaagcaagaaacacacacaaagcacaaaagaccaaaagaccaacgaaaaagacacaaaaaacaacagaaaagagggacagggcgagaaacacaaaaaccaaaaaaagaaaaaccaggaaggccaagcaacagaccagaaagaaaaagaaaggagggaagggggaaaagggaggggaagagagcaggagaaaagaggaagaagaggcaagaacaaagcgaaacaaaaacacagaagagagaagaagaacagaagcagaagacacacgaaaaggaccgagaaagaaaaaggaaagaggaccagaacacagggccgcacaagggaagaaggcaacgccaagaaaccaggggaaggaggaaaaaaggcgcagacagacaggggcaggaagaggaaggggagcccaaaacagaacggcgggcggggccagcacggcaaaccagcagaagccagaaggaagaggaggcaaaaagagaccgaaaaagcagaacccccaagggggggccagcaacagggaaggccaagagaaaagaggaggcccggaagaggaagggacgccccagacgcccaggccaagacgcaacacagcccaaccagaaccagaccccaaccgcccgcacagacgccagcccaaaggggagcaagaaaaaaaaaccagacaggagagagacagacgaaacacaaaaaacgagggcaggcaggggccagccgaacccaacacgggaggcgaggggggggacacgagccaggggaaaccagccgagcaacaaggagacccaccacaaaacaaaaaacaaccgggaggggcacacaccaagccagcagggaggcgaagcgagaagaggcgagcccaggaggcaaggcacaaggaaccagacagccaggcaccccagccaggcaacagagcgagaccacccaaaaaaaaaaaaaacacacacacacaggaaacacaaaggcgcggaaaaggagaaaagaagcaggaagcagggagaaagccgaccacacccggagaaaccggaggcacaccacgagagcgaggggcgcgagggagcaaggaaacggcaaacagcaagagggacaagcaggagggcaaccaaaaggcagaaacagagagcaaagagaacgacggccaggcggaacagcagaagaccacccggaggccccgccggagacgggggcgagacgagaaaacaagacgaggggagcaggggaaggacgcggagaacgaagagaaaaaagaggaaaaaacaccacaaagaacacgcaaacaaaaagaaacaggaggacccaaaaccaaaaccaagaccaccccaacaacaggcgaagccaaccacagaacagcagaagagacaagcaaaacagaagcccaagcccgcccccagaagcaagcaccagcaaaacccaggaagcaaagcaaaaaagacagccaaccagaaaaaaagagaaggaagagagaaaaaagcacacgacaacaagcccaccaacggaggacagaaacagaacggaaaagagaaaagaagaagaaagaaaacaaaacgaaaaaacacagagccaaacacaaaacacccaaaaagaacagaaacgagaaagaaaaagaacaaaagaccaacaaagaaacaacacacacacacacaacacacaaccaagaaaaacaaagagccaaaacaaacaacagccaagacaagcaacacgcaaccacaaacaaacacacaggcaggaaagcgcccaagaaaagcagaaagagacagggaggccgaggcgggggacacgaggcaggagacgagaccaccggcaacaagggaaaccccgccacaaaaaacaaaaaaagccgggcgcggggcaggcgccgagcccagcaccgggaggcgaggcaggagaaggcggaacccgggaagcagagcgcaggagccgagagcgccacgcagccgcagccggccgggcgacagagcgagacccgccaaaaaaaaaaaaaaaaaaaaaaaagagacacagaaagaaagacaaaagaagcaagaaaaaaacaggcaacggaagaaaaccaagccgcaaccacaaacaaagaaaagggcaacccagggggaccaaaaacacagcaaaacccagaagaacgaac

SEQ ID NO: 371 - RNA, 4008 nt, Homo sapiens
caaaaaaacgaaaagcacacagagcgaacgagcgacgaaacccgcacaacaacgaaaggggagaaaggagggcaaacgaccagaagccaagcaacgcaaaagagcacagcgcagggagggagcacaaaaccagaacaggccagggccaccgcccagagcaagcaaggaaacagccaccagcaggacagcccggcgcacggcgaagagggcgaggaacagaagcaaaccaccaaccacgcccagcaccggcccccaaagaaaaagcccaaccacagacacagcgcagaaaacgagcacggaaagaccacgagcggccagaagcggggcagcagaagaaaaacagacaaacgagcaacaagcgggacgaaaaaacacgagaaaggaaaaacgaaagagaggggacaaaaacgacaccggggggagagaggcaagcagagccaggaaccacagaggacgggaaaagcgcaggcccgcggacccgcgacgaaggggggaagagagcggacgccggcaaagggggcgcagagcacagggcggcggcagaggcgggccgggaggacgcccgagagaaaccccaggaaggcacagcacccccgcacagagaaagaggggagccccccacggcgggaaacaagaggcgaagaacaaaaaaaaacacagaagaacagaacagagaccccccggggagacagaacagaacgccgggcccaggcggaggcagggcacgacggccacgcaagccgcccccgggcagccacccgcccaacccccgagagcgggacacagggcccgccaccacacccggcaagcagagagagaggggaccagagccagaaggccgacccgacccagacgcccacccggcccccaaaggcgggaacaggcggagccaccggcccgacccagagaccccaggcgaaacccagccccacccagaagagccaaaaaagagaacgcgagcacccggaaacacaaggggaaaggaaaggggaaggacccgagacgaaccaagccaagagacacccccagcagggacagggagcacccaagaaagcgaaaccaaaacgaaacgcgagcaccaacagagccacaagggaaaaccacaaaaggccaacaaaaagaacaaaaaaaaaccagagcaggaaagcgaagaaacaaagaacagcagagggcccccccaagagccacaaaagcaaaaccaaaacaaaacgaaaaccgaccccaagcacagaaggaaaccgggacacaaagaagggcaccccgggggacaccgcaggcaggaggccaagcaagcagggagggagagagcgaggaggcagcaagacagacagcaaggccacgagagcgaacgggcagacaacgaccagacaaaaaggaaaggacgggaccaaagacaagggggcccggaaagaggcacaggcagaggaaaccgcggacccaacagagggaaacgaaaagaggggggggaaaaagaaaaggaaaaaaaacagcacagcgggaaaagaaacagacaaaacacagaacaaaaagaacagaccgacaaaaagaagacggaaaacagcagcaaaagcaaaaaaaaaacaacaaaccgaaaagaagccgaccagaacaccaacaaaagggaaaccaagcagggaaccagacaccacacgaagaccagaccagaggacacagaaggagagcagacgagaaaggggcagcacacaaacggacaggaggcacacagaacacacaacagagacacgcacaagaccgccgagaaacagggagaccaacacgacgacggagagcgcaacagcaaaaggagcacagcaacggggaggagggccaaaaggaggacagggccccacaaggacagagaccagaaagcgaaaagggaagcaaaaggcaccagaaaagagaccaccccgacaccaggcagaccaggaggagggggggaaccacaggagggcccccaccacaacagagagagcaaggaacaaagaaaaggaaagcagcaacaaacacgagaaggacgacagaccaaggggcagaaggcgacaaggaaaagaaaaaagggaccagaaggaaacgggaaagcggggaaagagggaaagcaagacgaggaagggcccgccgagggaaggaacaacagaaagggcgaaaagaagaacaccaggcgaccaaggagaagagggaggagagaggacagagaaggcgagaaggagccacccacgcccgggcggaagagggcgcaccggccacgcaacccgcccccgggcaagcaccccgcccagccccgagagcgggaacagggcccaccacagcccagcaagaagggagacggggcaccggggccaggcagccaaacccgacccagagcccacccggcccccaaaggcgggaacaggcggagccaccacgcccagccagagaaggcgcaggacaagacagagagacaagccaaaccaaggcagagagcagggcaaaggggaggaaagagggagcggaagacaaaggaagaagccgaggaagggaaaaggacaggaagggcccaggccagaaagagagagggaccaccacaaagaaggaacacaggaggaggaacaggcgcaggaaaagaaagcacaccgcggagcagcgccgggaacaccacccacagggagcagggagaggaagagccagacaaacagagaccggcccagaagaaagaggagcaccaggggagcagacggaagaggggaggaaaggagagggggagggagaagagagccagaaaaaaccgaggaacacacacagagagaacaaggaagagaaccccaggagaaggacacacaaacaacaggagaaagccaaaagaaacgcaagaacgaacagaaaggagagagaagaaacaaaaacacacaccagacagcacccggaaccgcaaggccagacaagcgccccaggcgaaggcccggcaaaccgagcagccaagccggaaccccccagccagcagcagagcggccagcaaggcggacccacagcaccccgcccccaagcaaaacccccggcccacgaggagaggaggaggaggcaagaagaagcaacgggccaggacgcgaaggcgaccagccagaaaagcgaggcggacaagaaagagggggcagcccgcagccaccgaagcagcagcgccgagaaggggaagaacagccgaagacaacgcgagcacggccccgaccagggcacaagaaaccagcacacagaaccccaaagggagggggggcccacccaggacccaaaaacgagcaacacaaaacagacaagaaaaccggggcgccagggacagaacagagcacggggaaaagcagacaccccccagaccacaaaaaaccccaagaagaccccagaaagagggagggagaaacgggagggggggagaggagaggagccaccgcgcccaggcggaggcagggcgcgacgcccccaggcacgccaccgcccagcccccgggagccccgggagcgggacacaggcgccgccaccacgcccagcaagaagagagacggggcaccagaccagcagaccgaccgacccagaccgccgcccggcccccaaagacgggaacaggcagagccacagcgcccagccggagaaacgaacccaccccccgaacaaccggaaagcgaggccagagaaacacacgaaagccgaaaaaacacaaggacaaagaaacggaaaagaaagaaaccccccagaaaaacagccaaggcaagacagaaaccaggagcaaggagaaaccacaaaagaaagaaaaaaagaaaacagaagagcgagacaaaccaacccaagaaggcacccaacccaccacgcgacaagcagcaaaaaggccaagcggcacacacacaaagggaaggccagcacaaaagacagagaaggaaaggggccaaaggaggaacacaaaaaagaggaaaaaagacacagaaaagagacccaggaaagaaggaaggggaaaaccaccaacgggacagaaacaaagcgcacagagag

SEQ ID NO: 372 - RNA, 14471 nt, Homo sapiens
caggccacggacgcagccaggaggaagggcaacgaggcgcaggaacaccaggcccagcacgcaacaggagggggggacggggggagaggacagggggcaccgcaggaacggagcggccaggaggggagagcacgcacccacccagccgccaaccccacaggaggggaccggacccagaaggagggaggacaccggaaaaacagcacaccccgaacaagccccggcagagaggaggagaggaagaggaaaccaccacagaagggcacgccaacccacggggacgagagaaaagccagaccccagaagcgacacagggaccccaaccccacgggccccccaggagcagaccggcccagcagaacggccaccaccgcagccgccagcgccgccacaacagagagaagcggggccccaaagacagcgggcaaaagcgcggagaagcagacgcggagcacggcgaggggagggaagggcggccaggcagcgggccaccccacacaggcagccaggccaggagcggaggcggggggggccacgggagcgcagccggaaacagggccagggcgagaggacgaagagacagagcaaaaaagcacacaagggaggaaggaaagccaccgggccggcaccgccccaggcgggaagagaaagaaaacccaaggaaagaaaccgcaaaaaacaaaagcaaagcaggggaggaaacccaaaaaaggcgcgggaaagaggcccccccgccccagggcgccagcggccccccgcccccccccccccaccgcggccccgaccccggacaacagaccggccccgccagccccccagcccggcgccccacccccaggagccaccccaccccaagggaaaaaggcgaggcgaaagggccaagacaggagccagccccaaggaaggcaccaggaaaccgccaggaaccaccgaccgagccagcaaaacaagagaaccagcccccgaaggcaacaggggaggcggcgcgggcggggggcagcaggaggacaagaagggcccgagcgggaaccggccccccgacagggaagccacggcacaccccgcggcgccaacccagcaagcccaccgaaacccggccccccggcggccccccccccgccgaagccacaagccccgcgcgacccacgcccgccgggcgacggcccggagcacggggggccggagcccagggggaggagacagcagcagggcccaggaggaggggaggaacaaagacgggccacacccgaacaaagaaaacccagggagggggggggggaaggagggggagacgaccgcagccaccccaccacccgcggacacgccaggccagcagagaaggcagaaaaagccccaacccccccaggcaccagcaggcccacacccgccgaacagcagaaaaagccacgagcagaagagaagggccaggggcggaccagccccggcaccaccccagcagcccgcaccccaagaacagacccgaaggcacacccagcagccaggccccacaccgcaaaaaaaggcccagggcccccacgcagcagggcgcaggaagccccaggccaagggccaaaacagcccagcagcaacgggcggcacagcgaccgacaaaagcagccccccagcccccggggggcccgccagccaggcaccagaggaaaagcagcaaccgggaaacaaaggccgggcaggcccccagcgaaaagcccaccacgagcaggaagcggcagccgaacgagacaaaaggccacggaccaggggccaaaccggggagcagagaggaaggggacgcacagagcagaaagcaaagaaaccgacgggggcccggagccccgcgcaccaccccaccagaaaggaggaaggacagagagcccccagcaagcagacagcggagcacaaaccacagggcagcacagggagcacgaccccccccagggccacgcaggccagccccggacgccagcaaaacaaaggaacgccaagaacagcccaaagaggaagaagaaaggagaaaacaaagacgcaaccaaggaaaagaggcaagaggacccaagcccagcgggagggaagagaaccaaacagcgccagggagcaaggcaaggacggagcacaacccgaagggcagcagaagcgagccggggggaggagcggaaagccgagaccagaaagcaaagagacccagggaaagacccaccaggccagcggaaccaaaggacaagggggcgcccgccaagagcaggaccacccccccaccaacccggcccaccccccccccaggccacagcccccgggcccggaagaccacagagccgagaccagagggcccaaaccaacgaaacagcaagcagcaaacacacacgcagaccgcaggcgagaagagcagagcgcgggcccggcgaaggaccaccggagaagaaagaggaaccgagcccacccccagagagagaaaggaggagcagggcaaaaagccccgggaaaacagccacaaagccgagagccccgagcggaggagggagaagaagagagcggggcgaaagacaagggagggacaagacaggcagacagcaccgggggcgcacgaaacaaaaaggagaaggcaagagggagaaggacacaaagagggagagaagagccggagaaagccacaaacggcaaggagggaagaggggcaggaagaagaacgaacgagacggcggccaggaacggcggaagacaacgaacaagccaaccacaggcaaagggcaacccacacagagaggaaacgagaccagaaaggaaaggaagccgagaaacagcagaggggagacaacgagggcccccacacgggcgcaaagagagacacgacgccgcgaacaccaaaggagcgccgggaacagcggaaaaccaaaccccggagcaaagggaggcagcacgccaaaaaagaccaccaagccaggacccggaacacagccaccgggagcaggacaccagggccccggcgccaggagaccaggcggagaaggcacaaaacccaaaccggcgcacaggaaaaacgccgccgaccagagccagcccaccagcaccagaaaccgagcaggccagacaacgaacgcaaaggggcaaggcagaccccacacagcgacaagaacaaacgcccaaaaccggcaaagagagggaagcaagaggagaaaaaacacaacaaaacaccccacaagaccaccccagaaaaaaaacagaaaagcccccccagagaacaaaacagacacgacaagagaaaagaagacaacacgggcaccagagggccccgggccaggccaggacagcgagcagccgccccaaggagcacggacccacaacggcccggccgaaagaaaacgggcagcccgcccaacacccaaccccaccaccgggcgagaagccaacccccgaccacaccaaaagaaagacccggggcaagcaccggccgcggaccccaggaccacccgagaccagaacaaaagacgaaaacacagccaccaaagcaaaaggccccaacacaacaaaaccagcaagaccaggaagcaacgaaaggaggccgcaggcaaagccccgaggagagaagacagcaagacagagcaggcgaaacaccgcaaaaaaaaaaacaaaacccagggccagaaacaaagggcaaaagaccaaacaccacaacccaaaaggaaaacaccaaagaagcgagacaagggaaacgcagcacagcagaagggcagagcggaacccaaggcacacgccagcccccaaagccagaccaaaaccaacgccccaaaacagcagagaaaaacacaaccacaacgcccaaaaacgacgacaagggagaagcccagaaggcaaccacgccacagcaaagaacacccacgccaaaagaaacccgagacagacacccccacacccccccccagccccaaccaacgccaaaagcccaaaaaagccaacgcgccccgcaaaaggcagaacgacaaaaaggggccccaggacgagaggaagaagccaaaaaagaccggccccccgaacccgggagccccccccgccaagagaccacgagaaggccccgaagagcaagggcgccccaggggaggggagggaggggggaggagagaaagggggggacccagaaaaccccagccggaccaagccgaccagaacagggaagagaccaccccagacacagcagccccccagagaagcccccaccccaagaggcaccggggaaagacgcccgaggaaggcgccagagggccggggcagcagacggcaaagagggcggcagagcacggcccccagaagcgacccgaaggacagaggcggagggggggaggaagggacacggggggggggggggagggcacgggaagggacacaagaaggggaaggggccacgaagggcgggcccgaacccacgccccagcaggaaaccagccaccccgagcaaccaggaaaccgaaaacacccagccagagacccccccccgccagggaacagacacggggggaaaacaccaaccccagcaggccggagaggcccccaagggggcaaacccgcgccggcaagcacgcacaggggcagagcagcccgcagggaaaagccaggcagagaaaagacacggaggggaggggcgagagcacaaaaggcaggccgggggaaggcagggggaagaccagagcacgcgacagccggcccccacgaaccccgcaggcagggcacccacacccccccacacacacacacacacacacacgcacacgcacacacacaggggaaggaaaggcgcagacagcaccccccaccccgggccccccgccccgccaggcaggggcccgcaggaagaagcaaaagaggaaggaaccagcagaaaggcagcccgccgaagcggagaacccaaaaagccggaagagcgaaaccccagaagagacccggggagggaggcccaggacagaagaagcagaagcccacccacccgcggggacacacaggaggcgggagacaaagcgagagagcggccgagcgcagccgaccagccccccgcacaggcccagaggccagcagcggagggcagccggaaggcgcagcccaagggcgagcgggaaggccgacaccccggcaacccgaaagcgagagcaccggggccccccaggaaggaaggaaccgcaggggcagcccaaggccagcaccagcagggcagaaaccacacaccaccacacacaacacaacacaacagacaggacagggaacagcagcagaaacacaaaaggaaagaaaccccaccgccagaggcaagagcacacagaacaaggagcagaacccggcgcacccccagcagccccagcccggcccagccggcacggaggacagcggcagccaggggcgaaacaccaaggagaggacacaggccgcaccaccacacccaaaccagcagccggcacaaggaggaaaaaacccggaagaaggaggaaggccgagaaaaggcaacgacaaaagcaccaagggggacagacacaagaagcaaggaggaaaaggggcacgggcagagaggagagagagcaaagacagggcccacaaacaagagaagaacagcccggacgacgaagccaacgcaccacacagacagccccagaccaaaaaaccaaaaaacggaaagcccccaccacagcccgagccccccccccccgcgccccagcccccccccacccacccgccccagaaagacaacaaggggaaaccccaaacaagccacaccacccgagggagaaggagggaacacaggagccacaacccggccagacaaacccaagaaagcccagccagggaggggagcagcagcggggccggccccaaacccggccccgaagagaggaccgccccgggagaagcccaggcgcagcagagcggaaggaggaggaacaagaggcccagggccagagagagcacgagaaacacagcagccgggaggcggcagggcaccgggaggaaagcagagcgaccaagaggagaggaaccccccccaggacgaccgagaagcgggaccccgcccaacccaggccaagccagaaccacccaccccaggaccagaaaaaagacccacgccccccggccgagacagggcgccgcacccaggcggagacaagggccccaagccacgcagcccaccccgggccaagcaaccccaccccagcccccaagaccgggacacagggacaccaccagcccagcagaaggagggggggccaggcccaggcggccgaacccgagccaggaccacccgcccagccccaaaacgggaacaggcggagccaccagccggccccccggccgcgaccccaccccaaacgcccaccccggcaccgccaccggacagcaaacaccccgaggcccagacgagacagagcccaaacaagccgagagaagccgcaccaaccaggcaggaggaagccaggagaccacaggggggcgccgcgaggaagaaaggcaaacgcgagacgcaccagagcccgcacaaggggcgaaagaacagggaccaaaaaggggggccaagggaagcgagagggagaagaaggcaagggaaaggcacacgaaaggaacaaaccagccaaacacggaagagggaaccgcagacacaggcaaaacgaggccagagagcccgcaagcagacggagcgagagcaacccaagggccaaccaaagccagggccggcacaggcgagggaaaccaagcaagcaaaaaaaaaagaacaagcaagagaaaacaaaccaccaagggagcaaggcgaggacggagacaagcaacccaagagaaagcgcgggacccccccggcccccgccccccgagccccccaccacccgccgcccggcgcccgcagcggaggccagacagaggccgcgagccgacagcacaaagcagaacacagcaagcaaagacccccgcagaggcccccacccaagcagaccagaacccaaggaaaggaccgaaccgcacccaaccccgcggaggggcagggagaggaaggacggagggcaccaccgcaggcccgaggggggggccccagagaagaagggccgaggggaccccaacacaggagagcagccccgaggccacagaaaagccgccaagacacccaagcaacgaaaccagaaaagccgcccgggagaaagagcaggaaggaagaaccgccgcgaacgagaggaacaaggcgcccagggccagacagaggcacagggggcggaggcgggggcacgaaaagaaagcacagcaaaccaggaggccaaggcaccccacgaggccgggagacacaaaaaccgggacccgcaccgacccgacgagccagaccacggccagggaagacacgagaccagaccaaaaggagcccaagaagaaccgagaagcccaagggaggagaaacagacccaagggaaaccagagcagggacacaaaaaccagggggccccaaaggcagacccagccgccagcaggggacaggacgagcaaggccaaaagcaaccacagggccaggagcggccaccagagcagggagcaaaacaaaaccacaccccgaaaagcagacgaagaagggaaaggaaggggcaggaggaggaagccaccaggacacccgcagcccgggcgagcccaccgcccgccccaccccgcacgggcccggggggaccgaaggaccacagcccaggggaaggccccgccccccagccggggcccggggaccgccgagcccccccggagcagccccaggacgcggcaggccgggggcgggaacaaaaagaacccggagagacaggccagcaagcaggacagaaaggcgcagagcggaaaaaacagaggcgaaaccaccgacccgcggcacaaaccacaagggaaaggccccaggcgcggaccagggaccgagcaggcaggggagaaacacgacccaaacacgggcacccgggaacagacaccaggccgcaacaccgcacggaccagaaacgagcaggggggccccacaagcggcaccacacagcacagacaagagaagaaagacaggcgagacgcggacccacaggcaaaggcagaaagcaagacacaggccgggcccaacagcgcagaagccgcccgacagcccaccggcaaaaaccacgccaggaaacacacggaccaggaaagagggaaaaagggcaacaaaaagaacaggccaggcaggggccacaccgaacccagcgcgggaggcagaggcggcagacacgaagcagaagcgagaccagccggccaacaggaaaacccgccacaaaaaacaaaaaagagacggggggggccgaaaaacccagcaccgggaggggaggcaggagaagcgaaccgggaggcagaggcacaggagccaagaggagccacgcacccagccggggacagaggagacccaccaaaaaaaaaaaaaaaaaaaagaagaacaaaacggaaggggaaagaaaggagcggcgcagccacaggacaccaaggcaggaaagagacccccagcagacccaaggccaccccccaggaagccccgacacgaaccagagaacacccagaaaagaccaaccgcccaaaaagaccgcagccccagccccaccagacggagacagagccaaaagcagccgccccggggaaccccagcccagcacacggcggcgcaagcaaacacgaaaaaaggacgagcaaaggaaaagccgcaaaaccgacgcggggaaaaacaagaaaaaaaaaaggcgggaaagaagggaccacagaggaggagagagaaggaaaaagaaaggcagggggagggaagaaaggagcagcgggaaaagaagacagaacgggagcggcagcacgagcagcaacccagacccaggagagccacagacggcccaaccacaacacccggaaggcgagccggcacccccacacagagaggagacgaagcgaggcgcaagcgccgaaacaaaagcccaggagaacgagcagacgaacgagggcgggccaaagcgggaggcgccccgcagcacagggacaaaacagaacccaaagggccacaccacaccaccgccagggacccccaccgcccacgaacagggcccgcagagggcgcgggcggcgggcgagcagggacagcggaaaaggagggacaaggccaacggcacccacaggagaagaaggagcacccagaaaagagggccaacgggagacgagaaggaggaaacacccccacaccgccggagcgaggaggagaaggggggcagcgcgccccacccgaccccccagccccaccacacccccccagaacgcccagaggagccagccaggcgggcgaggagcaggccaggaaggccaggggcccagagggggggcaccagcggggccgccagcaacacagccagagcggcaaccagggccagcagggccgccaagcgcagggcgcgagccagaggcgcccgggacgccaccgcaacccagccaggggggaagaaggccacagacaccccaacccaaggagaagggaggccaagcggccccgggacaagaggacagccccaccggccgaggggaccggggacccggccaagaacagaggcccaaagccagccaaccagccacggcaccagagcaaccaggaaaacaaaaagcagcaagagaaagaagccggggaaggcccagaaagaaaggcaaaccgccagaaagcacgagcacaaacgcaccgagcaacgggccgaaccccaagcgaacaacacgccagcagacggaccaggagggccaaggggaccaggggagagaagcgggggccgggacagagccccaacccaccggagccccaaccggaccgaccaggcgacagcaaaacgcgcgaccacaggaagaacgagggggacccaaccaagaggagacggacaagcccccggacccgccaacagacagccacccaccccaaagggaggagcaacaaagaaacgcaggccgaagagcaaacacacagcaaaagccccaacaggaaggcgacaggacgagggaacagcacccgggccggcaacggcagccagaaccaggcggccgggggggggggggccgaggcaggggacacgagcccaggagcggaacagccgagcaacaagcaagacccaccacaaaaaaaaaaaaaaaaaaagaaaagaaagaaaaagaaaaaaaaggacagcaccacaccaagaggaaaacgaagaaacacaccgcacaaagaaggaaccaggagaccagccggcccgaacccaggaccacagcaaaaccagcaaaagggaggaaggcacccgagcagccggccccgggacagagcagaggcggcggcagaaaacgccccagagaaggcaaaggcaaaggagggggagggagagagagaggaagggcgaagggggaacaagagccagagggcacagcccacaaccacacaagaaggccagcaaacaccaacccacgccccacaaggaaccagcacaaccagcccccagaggacaacacacgccaccccagaccaacaagaggaggcagggaagcaccgagcggaccacccggaacccagaacccgccacaggacggagaagcaggggcacagcgccagacaccgggccagaaccaaacaaaggccggccaaccaccaagcagggaggcccccggagccccgccgcagcaccgggggccacaaccagggacagccaggaagaccagcaaaggcccgccaggggagcccacagcgacaggggacagacgacccacaaccaagaacaagaccaaaaaaaaaagcaaggcgggggccagggcggggcaagccgaacccagcacgggaggcgaagcaggcaacaccggcccaggagcaagaccagccgggcaacacgggaaacccaccaccaaaaaacaaaaaaagccgggcgggggcggcgccgggcccagcacgggaggcgagagggaggacacgaaccgggaggcagaggcaggagcgagaggccacgcacccaaccggagacaaacgagaccccaccaaaaaaaaaaaaaaaaaaaaaaaaaaaaaaaaaaaaaaaaaggggacgaaaaggccgacgagcaagacacgacacgcacaaggcaacagaagacaggaaaaaaaaagacagggcagaggggggaggagggaggaaggggagcaagaggacagggcagaaagcccagaggagcagggaacagccacaccgccgaaccacagaagacaaaaccaggaggaacccaaagaaacggaacaaaacaagcacaacaggccaccccgaaccaacgaccacacaagcacgagcaaaacaggggggcggaggggagaaaagggaacaggaaccggaccccacgaaaccaagacgcaaaaaaaagcaaacaaagcaggagaagaaaaaagagaggggaaacacgggaagccgaaagggggagcaaaagagggggggggcagggaggaggaggaagaacagacgcagggagagcaaaaccacccaggaccgaagccccccccaaagcccaaacgccccggggcccagcgaggacccggaagacagagaccagaaaaagcagagggaaaagaagaggaagagaacaggagaaaccgccagggaacagaaccggccaggaggcgcaaaccacaaggcaaagcaaaaaaaaacccgaaaaaaaaagaccaagcgaggaggggagacaaagacgcagccccaagacaagaaaaacaaagcggagggcgagccgagcacagaaaaagacaggagcagagagcacgaaaaacaaaggcgccccccgccagaagaaaaaaccagaaagacgacacggaacaacaaaaccagggagcagaaggaacacaagagacgcaagcaccgccgcccccaagcagggcaggggcgggcacggagggggaggaggcggcagggggcagcgggggggcgccgggagacggcacacacaacgagccccccccccccaccgcccaaaccaagcaaacaccccccccccccacccccccgccgccacgccacccaccagggaccccggagcaggacagccgaggggcaaagcgagagacagggccccgagacggcgagagaaaacgcgcagaaggagaaaaagcagaagccaccccgccggaggagggagaagggagagaggggacaggccagggcaaagcgccccaagacccagaaagccagcaccagcccgcaccggcaaggagagaggagaaagacgggaggcgggacccaggcagcccacccagcccaaagaccaaaagcacgccgaacccagcccaccgagaagggcaccagggaggacagcggccggcggccccaacacccgcgcccaagccgagcacacagccaccagccaagagggagcgggcaccaccagcccccccacagaagaagcccgcccaacagaagagcccaaaccccccaggagagaaagccgcccccccaccccaggccccgccggcccagcccccgccccccacgccacacacaaaggaaccagaaggcgggcgcccagcgccaggcaggggccacccggccacgcccaccggccaggcccaccggcacccgccccccaccccgccccccccgccacccaaacacggcccccccagcagcccggccccccccccacgggcccccagggagcacagaaaaaacgcaaacccaacccgccgagcccagaagaaaacagcggcaggggacacacacaagaacacggcccaaaggagcccacccccacaaaccgccccccacacagggacggcaccccacccaaacagaaaccaagaggcccagaaccccccaaccaaccacggccacaaaacgacagcccaaaaagcccaggacccccgccacgacacgccccgagcagacacgggagccacgacacccccacgagccgcccagaggcggcacgggaaaggcagcaaaaacgaagaaaagccccaccaggccgccagccacagcagggcccccaaaaccagagaaaaacgcgcgaaaaccccaaacagccggacccaggaagcaccccagcgccaaacagggacacccccaacaccacccagcaggcacccaggcaaaccagcccggccaacaaaggccccaccagcggccgcagggcccggccggagcacacaccgccacggcaacccagaacaagaacacacgagacacacagaagaaaaccccaaacagggcaaaacaacaacaaaccaacaagcgggcgacgggccagaacgggcgcgcgggcccaaggcgcagcagacagggcgggcggagcacgaggacccaccacagcgccgggcaggggaccaccacacaaggcccagggcgggccccccaacaggggccaggagagcaagcaacgagagagaaagacagcagaagccgacccaaccaaccggaagccgagcacacgcgcacagcaccacaagggcacaagggccgcccaggcaaaggaaggggaacaccggagagggaaggcaaggcgaagagagcaggggaggaaaaggcagccacgagggaaaaaaacgccacaagacagccccccccaagaagccggagccccccccccaggcacccggcccgcagaccccaccaaggcgcaaagagcagagggcagggcacacacggccgcacaagggccaaagcgcaaaaccacgaggaaggagagacgagagaccgcaacccaagcaaggaagcccagagcaggaaggaccccaggaggccaccaccaggcaaggggcagaagcccggcgaagcaccccaacaaaacaaccggccccacgcgccacaggacgccccccagaagacgaccgcggcaggggcacagggaagcccgacccccaaaccacccacccgcccgaaaaccagcagggaagaaaggggcccagaaagagggaagagggggaaagggaggggggggaggcaaagggagaggaagcccccccccccccaccccaggccccggagccaggagcacagaaaacccccacccggcaccaccccagcgccggccaggagcgggccgggagcaaggcgagccacagcgggcagcccccagggcacacagccccacgccgacaggcgggcaaggggacaggccgaagacgaaagaaccagaaagggaaaaaggcaacaggggaggacgcaagcaaccccaggaagcggagcgagagaagcagcggcacccaaaaaaccgcagcacagagcaggggaaagggggggaggggaggaggcaggcgaaggcacaaaccgaacaccaaggcacacaccgcggccggaagaaagggagaggcgccgagccccccgcacagcgggggagcgacccccagccccccccgcccgcagccgggaaaggggcacggacacaaagacacccaagccccccggccccgcgcgacgcagcccccgcgagaccaaggccccacggcaccggaacaagcgcccaggcccacagagggaaag

SEQ ID NO: 373 - RNA, 15593 nt, Homo sapiens
acgccacccgcgcagccaagccccaaaagaaggcaaaaaggagcagcaacagcaacagcagaaccagcagagacacggcgggcacgacagaaccacaaccccacaaagccagagcaaaacaaacagaaaggacacaaacagagagagaaaacagcaccaagggcagaacagcaaaggccagggaagcgagcagaggagcccccggggaaccaaaggaccagaacacagcacagaacacggagacacaagcacgggccgaaggaaggggacgaagggcaggggacaaagaggcaggggcacgagaaaaccacaaagcagggagcccccacggaaccccacaaccacccacccaaggcacaaaacacagacgaaacgacggagaagagaggaaggggagaaaacacgaaaaagcaaggaaaaaaacacaagaacacgcaacaggagaaagcaaagaaaccccaaaacaagccacaaaggaacccaaaaaggcccccggaaaacgcaccgaccagaagcaacacggccacagccaacaacaacgaggaaaaggaaagaaaccaagcccgcaagaggcaaaaggggaccagcaaggcacagcagaaacagaaccaaacagaaggccccagcccagccaaaacaagcaagcgcaaaagcaccacacacagcaggccgggaaaaagacgggaacgaagcacaggaaacaaggaccagcaccaacgaggacaggaacaggcagccagcaaagcagcagggcaaagaggcggcaggcaggccgaaagacgcacgcaagcgaaagcaaccaaagccagcccaaagccggaggaaggcagaggacaagaaccaagacacgaagaggagacagaaaggcggggagggcacagcagaaccaagagcaagagcacccaagcccagggggcaggcgaggcagaaagcaagaacaaaacgcaaaaacgcacaaaccacaaaaacccacgcaagcaacaaagaaagcgagcccgagacaagcaaaagagaaaaaacccagaaaaaaaaaaagaagaagacaagagaaaaacagaaaagagaaacgcaagaaccaggccaaagcaaccaaggccgagggaaacaacgcaacccaaacccaagccacagaacgagccaacagaagccaagcccaccgccacacaaaaagagaccagacggagcagcccgcacagacgaccccggacacacacagaaaaagaaaaccaagacagcaccaagaaaacaggccgagagcaaaaaggagacgagcacaaaacaaccgaaaaaaccaaagccaccagaacaaaagagagagaagaaggcaaaaggcaccagcaccaaaagcacgcaaggagcagcagcaacgggaaaaggcaaagagcaggcaggggaggagggcgggcaaaagaaggagaaaaagaaaaaagaaacagagcaaccaggccaaagcaaacaagaacagaagacggaacgaacagcaacacaaaagaaagaagaaccaagcagagcaggcagggaccaggccagggcacacgcggcaggggccaggagcacacagaccgaaccaacagccagaggagcggcgccgagagaagagaagcacaggaaaggggcagcccagccgaggaacaaaaggcacgaacaaaaaacaagaaaacacaaacgacacaaagcaccacaaaccccaacacaaacaccagcaacccccagaaaaaagggggggggaaaaaaaaaaaagcaaccagggcaaacccggcacaggaaggcagcccacccccggaaccacacaacagccccagcaagaacccgagagcacgcagacggcacaccacagaaagccaacccagaaacaagcacagaggaacacgaggacgccaaaaagaccaacacaaaaccaaagaaaaaacagcggcgaggcacgcagacaacgcgcagagaaacaaaggaaccagaagaggccacaacagaaaaaaaaaagccaaacaaaaagaacaaccagggaaaaagaacacggggacaagaggaaaggggacagagaagaaaaggcaacaagccaaaacacacagggaaagaggaccacacccaaaaaccggacaaacaaccaaaaccaaaaaaaagacaaaaaaggacgcaacagcggcacaaaacagacaacacacaaaaagacccaaaccacccaccccacaccccgccaccacacccccaggcgaaaccacccaccacccagagacaagccaacccccacaaagagaacaacaaaggccgggggcacacaaaaagaccccagccaccaaggcagagacaggaccaccgggcgaaagacccagggagaccaacaccgaaggcgaggacacagaacaaccagggaaaaaaaaagaaacccaacacagaagaaaacagaacaagaaaaacaaagagaaaaaccacacaagaaaccggcagacaaccagcacacgaggaagccacagccaaggccaggcacagcccgggacagcacaggccagaagcagcagccccgggggcacacacaggacaaggacagcagagaacagcaagggagggagagaaaagaaaaaggagaaacgggggcagggccccaaagggaacaaaccacacgagagcccggacggacaaaaccccgcagaagcacagagcccaaaagccacaccacaaaagccaagggagaagacaagaggaaaagcaaaacaggagaaaacaaagaaacgaaaaaggaaacaaaggacgacacggcagcaacacgaaagagaagagacaccaacggcaaaggagagaaaaagcgagcaaacacacacaaaaaccaaaaccaaaaacaaaagcagagagcaggcgaacccacaacagggcacgggggaacccccgaacagggcacaagaaaagcaaaaacagcgcaaaaaacacaaacgcacacgaggaaagaaagaagccacggaaaacgcagcgaggagcgacgaccagccaggcgcagaacggcaaagaaccaaaacgaaaaccaagagaggcgcagaggcaccgaaacagagcacacaaggaacaaaagcaacaagcgcaagggaagagccagagaaccaggaacgccaacagaaggaacaccacaaagcaagacaacacccagaaagagagcaaccgaaaggccaaaagcaaccaaaagaacaacgaaggcaacggaaaggaacgaaagaagaacagcaaaccccaacccaagacaaaccagaaaaaacagccaccaccgacaaaaccagaagcacaacacagggcccgacgacgccccagcgcgcacacgaggaagggcagggccgagagaagacaaaccacccgaaccaaaaaccaaggaggcccaaaaacagccacccaaaaaagaaaggaaagagagacaaaagacaaaaggggaggaagggacagagaaaggacaaaacaaaaccagcgaacaacgggcaagaaacagggcaagaaacgggcaagaaacccagcacaaaccagggaggcacagggaggccacgaaccccagaaaaaaaaaaagcagaagagccacacaccccccccaaaaaacaaaaaaaaacgacaaacagcaacaaaggcgcaagagagcgaaaacgacacaacggaagagcaaacaagcaaaacaagcaaaccacaacggggagaacaaaaacacccagaaacgggaaaaagcagggaaaggcagggacaaggaaacggcagggggaaagccagaccaagaccgacccccccccacccccccccggagcccggcggccccccagaccagggccaaaggcacacaaaggaccacaaaaaggacaaacagcaagaagcaccaggacagagaccgaacacccgcaacgaaaaacccgaccaccaccccaacccccgcccacacccccggaaccccccaacgcccggaggacagaccacaagaaggagacaaacaccccgcaacacagccagccagaagaacaagagcaaaagggcacgaaagcgaccaaccccggaaaacaacaaacagaagacagcaaaagaaggccaaagcagcagaaaaccaaaacagggagaaagaaggaaaagcacagggacagagcacgaaccgggcggggacagaagcagcgagagaagaaaaaggcacaacggacaacaaccaaccccaaagacgaagcaaaaggaagaaaacagccaacaccaacgaagagaagggaggacccagaagaaggaacgccaggaagagccaagacaaaagggaaacagcagccggcgcgcccccagcaaaaacggaaggcaaagaaccagaagcaaccaacaaaaggggcgagaccaagaaaaagaaaaaaaaaagcaagaaaacagcgggggaacacagacaagcacaaaagaaacggaaggagaaaaaaagacaagcccaacaagaacaaacgagggggaagaggcacaagggaaaaaaaaacacagaggccagcagcccagagcagaaaccaagaaaacaaaagagaggcccagccccccccccaaagacgcaaaggaaaggggagcgaaaaagcgaaaagcagcccagacacgaagaccaagcacaagccagaagaacgaggaccacgaaaaaacaacccagagagaggccaccggcccaggcggagacacccggacacacacgcagccgacccccaggccaagcaaccccccagcccccagagagcgagacacaggcaggcaccacacacccacaaaaagagaaaggggccaccgagcacaggcgggcaaaccggaccaggcgacccccacccaccccccaaagcacaggaaagggaaaccacggccccacccgagccaaacacgaggaagacgcggaaaaaggaaagcacacagaaacccagaaacggaagccaagacagccccaagccacaaagagagagccaagaggagaaagcaagaaagggacccacagacacacaacaaaccgacacacaaaaaagacacagacaggacaaacgaaccaggcaacaaacaagccagaagccggagaacacaacagaggggagcggagagacaaaaaagaggaaaaaaccggaacaacaaaaaagacaaagacaaagacaaaaaagaaagaaaaaaagggaaaaaaacccaaagcagggaaacaaaacgaaaaagcaaacacaaagcggacacacgccagcaacaggcaacaggaaggggaggaaaagccaaaacaaccaagaaaaagacgggaaggaaaaccgaaaaggagcacgggaaaagcaagaaccaaagacgacaggaaaaaaacagaaaaaagaaagggcaacaagaacagggaaaaagaacggaaaaagagaaaacacacaaaagcgcaaggacaaacagggaaaaccacgcaacagacgcaagcacaacacagacaagacacagaggagaaacagacagagggaaggccacgacccacacaccggaaaaacaggccaaagaaaaagaccaacgcaaaaaaaaggcagagacagaacaggcaaacaaagagccacacgaaaaggagaccaacggaagaagcagagaacgaaacacacgggggcgacaaaagggcaaccagaagaaacacaggcaaacaaagacaaaggcaaaccagacccagaaaccacccgggaaacccaaccacggagcacaaaacacgcaacacacagacagacaaggaaaccaaaagcaaaggccaacaaaggccaaaacggaaacaacaccacaacacagaaaagaaagagcaacagggcaaacaacaaaagagaaaaagaagcacaaaacacagaagaacccaaaacacaaagacgaaaaaaaaagagaagaaacacaaaaaacaaaagagcaaacagcaggaagcagagggaccggggcaaggacggaaagaagaaaaaggggccccgggagcggaaagagaccagagggaagagaaaaggcaagcacccacggcacacacacccacaaaccaaaagaccgcagaggcaagggacaaaaagcaaagaaagagaaccccaaaccaacagaggaaggcaagacgcgagacaagcagaggcaaaacaaacaaaagccaaacacccaaaaacaggaaagcccccaccgaaaaaccccccggcaggggcagaccccaaggaggccagacacggagcaggaaaaaaaccgacgccgagagaccaccaagggggaaaagcagcgcaacaacagaaggcacaaagccgccgcacccacacaggaggacagagaacaaaaacgcccaaccaggagggcaggccacgaggaccccgaacaaccaccaaagcagaacaaccaagaaacgaggaaagaggagggaaaaaaagcccagaaccagaagaggagaaaacaaagagcgagaaagcacagcacgagacagggcaggaaccaagaacccacaaaaaaagccgcaggacaaccgaagaggcagaaggagggcgccccacaaagggccacccacagagaagacaacgcacaaaaaggacaaacaggacaaaaccccggagggaacacaaacgacaaacccacacaaacacgccaaggaaaagaaaaaccgaaaacaaggaagcagaaaccccccccagccagcagacccaaaaacaaaccgccaacaccaccaagcaacccaggggaaccacaaacaaaaaggcaagaagccaaaaagggacaaggacaagcaggaagcaaaggggcaccaaaacgggcagaaaagcgccagcagcccaagcaagaaaaagaacgaaaaaaaaaaaaccacagacagcaagggaggaggcagacacagacacaacaaacaaaacaaggccacaaggacaacacgcaccgaaacccacgcagacacgaaaaaaggagaagggaaacaagaaagaaagaagaaacgcccccccccacacccacccccgacccccacgaaaaaacaaagaagcaaaggaaacaccaagagacggagacgaaaacaagcagaagaggcaaaaaggccagaccggcagcgagcaggccagaacacaaagaccacagagaggaaggaagcgaacaagcaaaaaaacaacgaaaggcccggcccccaagcagaaccccaccagccaaaagaacgacgcccaccagaagaaacgagaaagcagagaccgcaccagccccacacacgacaaggagaaaagcaggaaacccaacagaaaaaaaaaacaaaaaaaacaaaaaacaaaaaaaaaacaaggaaaaagacaaaaccaaaccgaagaggcacagaaagggggcaacaacacgacaagaagaaacacgaagagacagcagaccgccaacccacaaggacccgcggaaagggcagggagagaaggcacagaaacagcaaaacacaaaaggccccccccccccaagagagcggggaacaaccaccgaaggaaaacacacgcgcagaagaacagcaaacaaaggggaagagacagccaacacaaagcacaaagccaccaaagcggaagggcacaacgccccgaacgccgcagaggcaacaaaacagaaaaaaccacacaaccaccccacaagccccaaaacacaaccagcaagaaaaaagagccaggccaggccagccgaacccagcacaggaggcgagggggaggaaacgaggccaagagagacaaacccgggcaaaacagaccaaaaaaaaagccaggaaggaggggcaccgagccagcacccaggaggcgggcggaggacccgagccaggaggaggcgcaagaggagacagccacgacccagccagagacagaggagacccgcccaaaaaagaaaaaaaaaacacagacaagaaagagcaaagacccgccaaggaccgccgacaaccgggcaaaacccagccacggaaaacagacacccccagacccggaaaaaaaaggcgcaaaaggaaagagaaaaaaaaggaagaggaggagggagagccaaggagaagggggaagacgggcaaagaacagaagaagcgaggccccagaacaaggagaccaaggaaaggaagaagaagccccgaagaagaccagccgcccagacagacaggcgaccagcgccagcaaggacgccaaaacacgagggggccaccaccagacaaggacaaaggcaccggaaaacaaaaacaacaagaaaaaaaagaaaaaaaacacaaaagcaaaaacaaccaacccacaaaaaggaagaacaaggaaaaccaaacacacgagacagaaaaccacagcagaaaaacccggcagggaggcccgcaccgagacacccggcaccacagccagagccggcggccgagccgcaggccaccaaaaaccaaaccaaagcagaggaaccgccggggccaggcgcagaaaacagaaaacaccaaacgacccccccaccgcagcacagaaagagcagacgaaggagaggggccccaagaaaaaaagcaaaagcacacaaaaaggacaaagggacccacaaaaacccagagcggagcaaggaagacgaagaaaagcgaacaaaacggaaagcccacagaaaccgccccaggcagcccaaaggccaacaccccgcgcaagaagggccgaacacacagcgccacgaaagcacgaaagaggcaagagaaggagggggggacaggaacaaagacacagaagcacacagagccagggcagccgaccaggccgcacaaggcagacccggggcccaaggccaagcccaagaagacaaagaggaacaaagaaccacaggcccagccaacccccccccagaagggcaaaaggaagcagagacccacacgccagaacggaacacagcaaaggcacacaaacacaaacgccaagcaccaaagaccacacaccccaggcacggccaacaaaggggaaaaaaggacaaaaagcgccagggagcacacaaaaaaagcgacaaagggcaggccaggcacacaggcaacacacaacccaaaacccaacaaagaggaaacgaggcacagaagaacgcccaaagccaagcaaaggaaaggaaaaggaacccagcagcaggggcgagagcagccagcgcaacaccgcacacacaccaagggagccggggaggcaaggcaaaggaaccaaaagccagccagacacggaccaagagggaccaagagaagacgaaaagacacaaaagaagccacaaaaggaaagaggaagacggaaaagcagaaagagggcaggagccgcacacgacagccacaacgcacaacgaccagaagagaaaacaagacaggaaaggccagagaggaggaaaccgcccaacaagaaagcagcagagggcacgaagcgggcgggccagagccaaagcccccaaccagcacccccacaaggcaagggagagagacagaaaaaggcaaacgcaaagccaacaaccacaagaaaacaaagaaaccagaaagcaagacagccagagaaaaaagacagacacaggaggaggaccccgagccagagaaccggccccgaacagcggccaaggagaaaggcagaaaaacaaccacagaccaagggccagagaaagagccagaggaagcccagaagcaaaagccaggagggggcagaagcagacaaaaaaaaacggacaccccaaaaaaaaacccagagcgcagcacaaaccaacacaaaggagaggacagagaaaaacaagaaaacgaacaagcccacaaacaaaacggggcgccagagaaaaacagagaagagaggaagaagacacgagaacaaaccccaaggaaccgggcgaaaaggacgggaggaagcggagggggagagggaccaggagccggcaacacagacccagaacacaccggcaggcaaacgccgccggcccagaagaaaaggaagcagaccacccccgaggcgggaggagacagcagagcaagcagagggagggaaggccgggcaagaaggccaaacaaacagccacgcacggaccaaccacaaaggggccagcccgaacccaaccccagaacaaacaccaccacacccaaagaaaaggagagagcgggcacacaaaaacaacagcgcacacgacacgaaaagcgaaaacaaaaaggcagcaacaggaggacggggagcagaaagacacccaggagacacggggcacaccccaagagggggagacagccaagggaaggcaggggggcaacacgaggcaccaccaggggagagcaaagagagcagagaccacaccccagacccgcaacagcacaacaaccagacaaaggagaggcacccaaaaaaggaggaaagggaacagaccggggcaaaagcaccaagcccagaaccagacgggacgacgcaaacccccacgcagcagcaacaaaaaaaccaagacccacacgaggacaagcagcacaagaaaaacaccgggcagccgcaaaagcgggaaggaaaagaggaaacaaggcaaaaagagaggagacgagaacacccagaccccaacaaaagggcaagaaaacagaagacaccgcggccgggaagcaggaaaaccgcccacacaaagaccgaggaccccaacaagaccaccccaaacgcacaaaaagccaacaccggagccggaagacagaacaccaagaagagaacaaaagccgaacacacgagaagcaaaaaaaaacacaaaacccaggccaggaggcagggccacaggcgcaaacgcccgaccaccccagacgccccaaggacagaaacaaccaaaaaaccccacagcgagcacacacccccccaaaacgggaggggcggccaaagaaagggaacaaacagggccagaaccaggcagaaaacagcaccgccccaaaaagaccacgaaggggcccaagcaacacgacccaacgaaaacaggggcaacccgggccacagagaaaaagaccccaagaaccccgcccccccccacccccccacggcccgccccccccccccgccccccccccccccccaaccccgcccaacaaacaaaagcaaaaaccaaaaaagaacccacaaagaaaaaaagcacagcgaaaaaccacacagagcagaaaacgcagagaccaagagcaacaccaaaagaagagcaacaacaaacagacacaagaacaacgacaccggcccagccgaaaaccaggcagcaaaagccagccaaggaaaaaaccagaaagcaaggacccccagagcagcaaaccacaaagccaaagaaaaagacacacaaaggcacagaagaacaagaaaaaaaagccaaaaaaaaaaaagggagaaacaagaagaaaggccaagccagccaggccaaaaggaacagaccaaagcccaaaggcaagaaagcaagaccaccgcgaaggagaaaaaaaaaagaaagcaaaaacaaggcggacaagagaaacagacacaaaagaacaccaaccaagaagcagcaaaaaacagcccagaagaaaaagcaaacggcggcaggccgggggggaaggcgaaaaagaggaccagggcagaggaaggagaaaaaaaagaagaagacccaagcagacagcgggcgaagcgaacccggaacagagggaccgcagaaagcaagagccagggccaacgccccacccccaacccccaccaacaacagaagaagacaacaagggcagccaaaaaacaacggggagccaaaaagaaagggaacagaaacacaaaaggcaacggcagcgagaaggaaaccaacccaaagaggcaggcaacggaaagaaaacagaaccccaaacaggaaagcagcacaaaaaaaaaaaacggggaaagaacaaaaagaggaagaaaggaaggacgagccccaagcccgaaggaaacgaccagaggaagagagcaccacccaaacgacaaagaaacgaaaaacagaggaggacaaaacagaaaaagcacagcgcaagcaaggaaagggcagaacgaccaaaggaaccgaaaaaaaaacaaagcaaagacaaaccaaacacccaaaaaaaaaacgccaaagagaaggcaaggaaaaagcaaacacacagaagagcaaaccgcacggagaccaaacaagcaacaagcagcacacagcagcggagaagaaaaggagcgacagacaggagaagagagccagaagccaccaagggaaaagcacagaagagcaaacagagaagcaaagacaaagcaacaaaagcagagaacacaaacaaaagcaaagcacaaggaagcaaaaaaaacaacaaaaagcgaacaaacaaacaaaaaacaaagaaaaaaaaaaaggagaaaccaaccagcggcaaaaaacccgccaaaggcagcagaacaaaaaaagaccgaaagcccaaaaaccaaggacaaccaggcaaagcaaaaaaaccaaaaaaacaaacgaagaagcaggcaaacagaacacaaacaggaaaaacacaaggcggcagcccagaggcgcaggcaaaaagaaagaccaaccaaaagcaaacaagcaccaacagaaaaagaacccaggcaagagaacaacaaaaacagaaaaggccaaacaaaaaaagaaaacaacccaaacaccagaaaccaaagaagaaggaaaccaaaaaggccccagaggaaaaaagcgaggaaaacagcagacagaggaagcagaggcaagaaaagacccagaaacaaaagaaaaaaaaggaacagacagaacgcgggcaagagaacacgaaacaccgaaacagcaagccacaggcaggcccgaaacacagaagaaaagagggggcaaacaagaaccccccaacaagaggacgaaagccaagacaagaaacacgcaggggcagaaagaagcgaaggccaaacccagaaagcaaagagcaaccccaaccgcacgaccacaaccccacaaggacacaccggccaaaaagcaaaacaagcaaggagagaaggcaacaagggcaaaggcagcaaggggccaaggcagaaacaacccagcacaaaaggaaaagagaaaccgaggacgagaaacgcaacgaggccgagaggccggcaccgggccccagaggacccaaacaaaagccaaaggacgagccaagaccccaggaaccacgagaagcagagcgggcggggccggggcccgaggccccgcacggagcaggaggcacgagcgaggagggcaccggcagggagcgcgacagagagaggcaggcggcgaggcagggcggaagggaggccaggacccgcgcagacacggccgcgacagaggccaccaggccaccaaaaacggagaaacacccccgaaaagaaaaagcccgaaaacagcaagcacagccacccgaaaagcacaacacacacacacgcagcacacacaacaaaaggggagaaggggaaaccaacagggaacaaaaaagaaacccacagggccgaaaaaaaaaaaaacagccagacgggcacgacaaagaacaaacacacagcaacgccaacaaaccacaacccaaaaagagaggaaaacagccaaccccacaggagaaacaggaaccgcgaaaaaccagcgccccaaaagcagggagaaaaaaaaacaggcagacaccagaacggcagcgccccaaggagagcgcgcaccagagaggaaacaagcagaccgacaacaaagacaaacgccacacccagaaacacaaccgaaaacgaaaacaacccaaaaaaaaagagaaagccaaaagaacccaaaagagccaggacagggaaagcacacaagaaagacccaaggagcaaaggacccaggccgcacggcccaccacgagggacaagaacaagcagcaaacacagcgaccaaacacgccccgcggggacccaacgaaaccaagggagagcgccacccaggaaagaagagaggccaaggcccaagaggaaaacccccgaacggacaaaagaccaagaggagccaggaacacaccaacgcaaagagacccaaagccaacgccgacaccaagggagcgaaacaaaacaaaaaagccaagacaaaacaagcgcacaacagcaccaggacaccaggggcaagaagcacaggcaacagcggagacgagaaagaaaaggacagcaccccacagacagagccaaagaaagggggaggagaacgcccgaacagcagcaaccggaggagcagagagcaaaaaaaacacaacacaccccgaacaacgcaaagaacgccacaaacgcgcgaagagaccaaacgcagagcaaaacaggagccacccgggccaaagaaggacgaaaagggcacacgagccaacgccccgggagaaagccaccaacaaaccaaacaaaccacggcagccaggaaagcacacaccggcagagagcacgagcgaacaacgggcaagaagccacgagacaaagccagacaggaagaaacgggacgcgaaagaggggaggagcccaacagcgggggggaggggcggggaaagggagggggagggaggccacaaagacaagcagaagagagaagggaggcggcaaagaggaccacccccaggcaacacaaagcccagccaggggaaagagggaaacagcacacgacaaaaaagcacagagaacgacggaagcagaaaaaacagacccaaacgaagcaagaaaacccacgacaggcaaagccagcagaacacacaaaaaaacgccgcacaaaaccaaagggaacaaaaaggaacaagaaagcacaaggacaacgaaaacagaagaacgcagggaagccaaccaaaaaggcaaggaaggagaacaacgccaacgcaaaaacacccccccccgcgaaaggcagcacagaacagaagcaagaaaaacaaggaacgaaaggaaaagaacaagaaaagaaaccgccaccagggaaacagacagacacaagaaggcgcaaaaaaacaaaaaacaccgcccccacccacacagacacaaacccaggaccaggccagaaggcaagaaaaagcacacgagaaacagagcaaaaaagccgacaaaagaaaacaaaggaagaacggcaaacacagacagagaaagacaggaaaaaaaagaaaaaaaaaagacaggagaacacagcaaaaacaacaagcgaaaaccagggacaaagagaaaaagaacaaagaagacacgaacacaaacgcaaaagcgaccagagaaagaaaagcagacaaagcaaggagagagccacccgagacaaaaagacaagggcacacaaaagccagggaaaaccagacggaaacaaacagcccaaccaagaccagaagccaaccccacaaagacagcaaaggcccgcccgccaaaacagccagcgcagagccaaaaaggcacggcccgaaacgggaggccaagaccagagacaaaggcaaagggcgggcgacacagaaaccagaaccaaggagaagcacagaaaaaaagaaaccccaaagagaggggaaagaaacgaaccacaaggcacaaacgcgcacaagccagaacaggcaacggaagagacgaggggagcgaaccagagaaaaagcagacacaggggggcgagggaaagacagccaggaaaccagagcaggcagaaggggcaggaaggcgagaaaagccggacagaccaaagccagcagaagaagggaagcaaaaacagacgaaccacaccgagaggggcgg

SEQ ID NO: 374 - RNA, 1595 nt, Homo sapiens
aaaaacaacggagaacgggcacccagcacggagcacagcagaaacaacccacacagaggcggaacgcacagaagacagaaaaacagaaagggcccgccaggggggccacagggccggaaccaggaaaaccagaagcacccaagccacgggggacccgggccgacccgggggccacgcacccccccgcagcacgccccccccgaccccgcacccgaccggaaaccaaagggcaggagcgacggccccggccccaaggcaggcaggcgcgcggcccgcggccgagacagaacaggccagcaaccacaggagcacggggaagaagaagaacaacaacaacaagaacagcagcaacaacaaaaggaggcagcgccgggacaagcaccacacacaaaaccgccagggacgggcaaaacccggggcccggcccacagagcacaacaagggcagggcagaaccacccccccaacaaaaagcacagagagaaaaaaaggcccggaccacagcggcaccccacccagcacggagccaagaccagagcgacccaggaagcccagagcgagcagccccgcgggccagaaacaacgggaggccaggcagagcgcccggccacaccacagcaaaaaggccagcagaaaccccaccacccacccacgggcgcgaaaggaggcgcgaaggcgggggagccgcgccccccacccgccgagccggccccaggcgggaggcagcccaacaccaaggcagcacgagacaggcccagacacccgaacaccacggcacaagccccccgaggcagggcccccgcgcccaggcggaggcagggcaacaccagccagcaaccgacccccaggccaagcaaccccacccagccccaagaccgggacacaggagcacaccacagccggcaacggaggcagagagcagcgccagcgaccaggcaaccgagcccgggccaagaaacggcgcccagcccccaaaagcgggaacaggcagagccaccacgccaagccagcaagccgcagcacagagagaacgccccaaggggacacggccaggaggccagaacccaccagcaccagagccaaaccccgaaagaaccccgaggaggacgcagcccacacagagaggaaacgacgcagaaggaaagacgccccagccacagaaaccagcaggggagcaaaaggaaccaaagcgacacaagcggccaacacacaggaacccggggaggacgacaagagcgagccggggcgcccgcacccgggaggaggcaccagcagggcaccccacagcgggcccccaccacaaacgcggcacaggaaacaagcggcaaaaagagccgacgaaagccggggaaggccaacggcaaaagaaggagggcgggaacaaaaaacagcaagacacacagcaaaagaggagagggcgggaacaaaaaaacacaaaacaaccaaccaacacagggggcaggcaaccgaaaacagacacgccgaaccccgaaggaagagaggaagagaacgaagcaaaaggcaccacaacggaagccccgaccaccagccccaggagaaaggcccgcccagcaagcgaggaaaggaggccagagg

SEQ ID NO: 375 - RNA, 13875 nt, Homo sapiens
ccaccagacagcccaccccaggacgggacacggggagccccgaccaccccccagaccagaaagggcccggccccccgacacccccaacaagcaccgcgccccggcaccacaggcgagcacgacggcccaaacccacggacaaaacacagagccaagagaaaacacaagccagggcaggagcggccaaaacagaaagggaagcaggaaggaggagaggaagaagaggggggaaaagaaagaagaagaaggacagacaacaaccaacgaaagaaagaaaggccaacagcacccaggaaagccaggagagacgccagaacggcaaagaagagaaaggaaaagaaagcgaaaccagggaagaaccgaaacacgaagaagaacagacgacaaaaaagcaaggaagcagaaacgaaaaagacaaaaggacccagccgaaaacaaggaacaaacaaagacccgaaacagaaaagagaccagacccggcaggccagagacaagcaggccacccgggaaaccccccggggacaccagggagaggcagggccagcacgcacccaaaagagcgcaggagaacagagaggggcaccggacgcgaaagggacccaaaccagaaacgacaaacacgcgagcgcggggcaagaggggaaacaagaaaaaacaaaacaccgacaaaaaaaaaacggcaaacacagaagggcaaaaagcagcccaaccaggccaaccaagaaacaggacagaaagcaaagcacggaaccacaggagcggcccggcacgacgcaaccaaccggaaggacaacacaccacaccgcgcagaagagaaaacgaggcccagaaggcaagggaggcacagcacaacaagccaccaagagaacagaagccaagcccaacacaaccccaccaagcaaaggagcagcaaaaagaaaaaaaagacagagacagaaagcaacaacgcacaggcggggccaaaaaggggaaaaagcagaaagacaagagaaaaaaaaaaaaaacaacacaacaacaaaaaaacagaacaggaagaaaaaaagagaggaccagcaggccgcagagcccccgaccgagaggcaaaacggagcaagcaaaaacaggcacccgcagagcagaaccacgccgaaacacaccaaacccgacaggaaaaggcgcaaaaaaaagccccagcagaaaaaagcacagcaagcaacaaaacaccaagcggcaaacaaccacacaaccacaaaccagggccaaaggaaaggcgaaacaggcagaagcgccaggacccacacggccgccaagagagacaagaggagaaggggagaagggagcggggggagggaaaccccagggaccacaaaacagcccaacacccaggcaggacacgggaagcaggcagcacaaaaaacaaccggcaggcgaaagccgccccaccccccgccagcagcacagagcagcgaaaccccgccaaacaaagggaacccgaaaagaaagacacacccaaagcggcacccggggaagggacagaggcccacccaccccacggaagcaaggaccggaacaacccaagaaagcggcgcagaaagcaaaaaagagcgcagaagacacaaagcgcacccgaacagcaggaccagagggaagggaggcagccccgaaaagacaggaggcccgcccagaacaagagggggaaggcggaaagagaagcccaggcggcaaggggccgaacaccacccacacccagagggcgccacaacggaaggaccgcccccaggcaacccggcagcgcggggcagagggacgcggggacccaccagaccccacagccggccccggcagcagggggcaccgccggacaagcccggcccggcccccggccaggcagcgaaagcagggcacccccaacaaaggcccggccccccccaacgacgagccgccggaccaacaccgagccccgccggccagaccgggcagcgccgccaagacgccagggacaacggggccccaaggccgcccgccagcccagcgggggcccaagaaaccacacacggagagcacagcgaaggccggccgcccccgggaaggaaccaagccaaaaaaaggcaacaagagaagcggagggggagaggggaccgcggcgcgcgggcacgccccaggggcaaacacccgcgggcaggcagcccgccccaggaaccagcccacacagcccccagaagcccgcccagccccgggccccacggaggaaccccacaggggcaggaagcagacgaagcggagaagcgggcaagaaacaagaaaagcaagcagggaaagaggagaagccggaagcacagggagagggagggcgccaccgcagacccccccaacacccacaggcagcaggcacacacagaacacacagggcagcaccaacacacagacccacacagacacaacaggcccacacacacccaagaagacacacacaccccaggacacagcagggcacacacccagcacacacaggcaacacaggacacacacagacacacacccccccacagccagacaaaggccgccacagaccgacccggccccggagaacaaaaaccgcaaagcagaaccccgcccccaaaaaccccaccacaaacaaagggggagaacagagcgggccgacacaaagcaccgacccggacgagccaccaaaaaggaaaaaaaaacccaccagcagcggcagggaaacgcacgagcaacaaggccagccgggagcagagggggcaacagaggaagcggacaaagcggccacaacgcaaaaaggggagaggaggagaaaggcgacagccaggaggggagagagaaagagcagccaggaaagaaaagggggggaggcaaccgaggcgcagcaccgcggggcggggagggcagaacggacaccccaacccagggccccacacgcggccccccgccccaaccccgcaggaagaaaggagggagagggaggagggaagcgaggaagggggggagggggccccgcaacagggggacaaggcggggagaggggggggaggagaggggggggaggagaggcagggaaggagaagacaggaagagcaagaaggggggggaagcgcaaaaggaaaaaaaacaagagcaacaccccccacgcggacaccgaaggaaacacgaacgaggagcagcagcgaaaagaaagcccaacagaagaccaccacggccgcagcagcaaaaagcgacaaagagcaagaccaacaaaagcggcaaaaggagaaggccgggggaaagcgagcgcagcggcagaagccaggcgcccccacgcccccccccccccccccccccccccccccccccgagcaaaggccaaacgaaaccccgccccacaaaacgcaaacaggaaggggagggacaccgccgagcagaaaaaaaaagacaacaaaaaaggcagcaacgaaacacggaaaccaaacagaaaggacaccagcaacgggcccacccgaaggcgaggcaaaccagggaaaaggggaacacagaacaccccaaacaaaccagcacaaaaggaaacacgaccaggagagcaggaggcggcgggaccggccagaaaaaggcaaccccgggcagccccaccgccccccgggcaaggacggacggcccacccgaagaggaaacccagccaagacacaagacgacacggagacacaaaaggcgcagagagcgagacagccagagcccaggacacgaaccacaaaaaaaaaacgcacgacgcaacggcaacaacagaaaagcagaaagacggcgggcagacaaacgccaggaggaaggagcgacaggacacaaccaggaggccagacacacagccagggaaaagaccgcccacccgagacaacccgggacaggcccccacggaaaaacaacagcagagcccaccgccggaaaaacccccagagggggcagagaagagcaagccagcggaaccccacggcggcccaacagggccaagacccccgccgggaggcccacccccggccccgggaacgcagagggaaagaccaagacagaacacgggaaggccccaacgcggaaacacaacaaagcccccccccaggaaccaaaggacagaaagcgggcggcagcggggcgggagcacgaacaaacccgccaggggagacaacgggggaagggagacccgggaccgaggccgccaggccacgagacaaggccaggccacggaccggccagcagacacaccaggaacgaccacaaaacccacacaacccccaaccaaaagaggagggggcgaaccaccagaaccccagcaaaacgcaaaccaacaggaaaaacacaccaccacaagagcacccgacgcagaagacaccggaaacagagcacaacggggagcaaaaaggaagaaccaaaggcacgggacaaaccccaaccaaagaaagaaaacgaaaggagagaaacacaagcaaaagggggaccacaggacgacgcaccgagagaaggaaacaccgccccagggcaggacagccgggcgacggagaccagacacgggggacgggcggggcgggcccagccccaaggcgaaaccacgcaccccaccgacaaaaagagaagcacagcgaaaagcacgcagaagaaagaagccaaagcagaaagaaaaccaccagcaccaaggagagagagaaaacagcgcacaaacgaagaaagcagcagagcgcacccaaaccgcagcaagcacccggccaagaaaaaaccaaaggaaaaaaagcgaaaaacgggacaaaggagaaaaagcacaaagaaggcagcagcggaaacaggaggccccgaagcagcaacgagcacccaagggacacggacaagccggacggaacggacgggcaagggaggcacaacgcagggacaaggaccagcaagacaggcagcaccgaacccgcagccaccgacagggccacgcccacgagggccaggagaggacgcgacacaacacaccggaaaacggggggaaagccaagacccagagagagccaagccaagaccaccacaagaaaccccccaaaaacacagagcacaaaaagcacaaaaaacaaaagaacaagcacaaaagaaagacacacacaccgggccacagaagcaaaaagaagacagccagcaggaccaacagccaaaagccagaggagagaccacgacaacagaggaaaggaagcagggggaaagagacgcaggacaacaggggaagacacaggacaagcacgcggagacaaaagcaggcacggccagccacgccagcacccgagcacccaccaaagcgcaagcccaccaggcagacagcaaagagggagagacccagcacaacgggcacacacccagaaagacagagcaccaaggcgggagcgagacagaggagaggcgccccagcaccaaaccaagccccaaccgcgcaaggaaaggagagcaccacaaccaagacgcgcgacaacaagggagagcagccacgaaacaacggagagcaaagggaccgcggaagagggaagggagcggccccgggaaaagccaaacgaaagcaaggaagaccaaaaaacaaaaggaggcccaccagagccagaccggcgggcgggaagcagggaaacacagaaggcaaagagcgcaacggggaaccacggaacggggagcagacaaacagcaagccacagcacaacagcagaagacagggcaggaaaaaaaaaagaaagcgggcaggcagaaaggggagcagcagcaaaaaacccgacaggaaggagacagccccagaagcgcgcaccccaggccaacagaaccaaaacccaaacgaggacaggaacacaaggaggaagcggaacaagaacccaggccaccagggacagacaccagaccggaccggagcccagaacgcagaacaaaccagcccaaagaacagagacagcaaagaagcccggacaaaaggccaagcgaccaggggccagaggaaccccgcacaccggaccgggaaaagaacaaagaggacaaccggggaaggggaacaaacaacaaaagggcaaaacaccagcccaggcggcacaacaggggccagccacccccaggcacaacacaaacaaccggaaaagaacacaggagaaagccagaaagaagcagcaagccaaaaggcgagaaaagaggagaaaaaaaacgaagccaggcaacgagagccgaaccagcacgggagggaagagggaggaccgacccaggagcaagaccagccgagaaacaagcaaaacccaccacaaaaaaagccaggcaggggcacagccgagcccagcaccaggggggaggggaggacacaagcccaggaggccaaggcgcaggagcccgaagacgacgcacccagccggggacagagcaagacccgcccaaaaacaaaagcaaaaacaaaaagaagaaagggaccgccaagagagaaaaaaaccaagccgaaaggcagagcccaaccaaggggggaaaaagcacaagagcgagagagaagaaaggaggacaaacccaaaaagcccaaggaggggcgaccccaggagggggacgggagacaggacacgagcagcggccaagcagaagaacgcgcacccggcacaaaaaccgacacgccgccaagaagcgccaagaagaaaacagcagaaaccgacacacacccagccacaaagcgaaagaaaaaaaaaaagaaacagaaaacaaggccaaagaggcacagcacaaaaaacaccagcaagggaggaaacccacacccccaagcaggccccccgcccccgcacacccaccacccgccggcaaggacacccaccgaaacacacaggggggcgggcaaaccaacccccccaaacaggcgccacgccccaccccaaccaccagacagggccaaaaaaagaaaaagaaccaaccacccagccacggggcagcaccgacagacgcaaagcacaggccacaagcggcagacaagaaaaggcaacaaaaaagagagagagaaaaaaaacagggagaaagaggaaagaaaggaaagagaaaaggcacaaccagcaacagcaaaaaagcaagcgagacccacgacaagcaaaaaggggggggaaccaccacggaagggcagagcaagaaaggccaaaggcagcagagcgcaaaagccaacaaaaaacagagaaggacaagacgaaaaagcaagagcaaaaagagaaaaaacaacgaaacaggaccaaaccccaaaacaacaccgaaagacagcaaaaagaccaaaaaccccccgaaaacgagcaaagaaaacgaaaggaagcaggaaagacaaccaggggcaaaaaagcaaccgcaagaaagaacaaaaagaacaccacacaaaagacgacgaggccacccccgccgagggaggggagcgaggcggggaggagaccacccagcgaagccaccaaagcccccaagccaaggacccagagaaggaccacgcagccagccaacccaaagacaaggagaaaccagaccacccccacggcgacaaaagaaaaagaggagacagaagccccaaaaacacagaggcagcaacagagaagacacagagaaacggacaagaacaaaggacccccccagagagggaggagggccacgggagcaggagacgagcagcgccaagacgggcaagccgagcacacgagaagagaaagggacagcaaaaacagagaaggaaaaaaaaaacaggggaccaccagacgaaacaagccagcaagcaagcaggacacggccaggccagaagccccgcaagggaaaaaaaacaaacacaaggagcccaggcacacacaccacacacaagacagggcgccgcaggaggagcaaccaggagcgcaaggaaagaagacaaagaagaaaaaaagagaccgggacagaccaacccacccacagcaccgcccggcgggcaaggcagacccagagacccagcgaagaaaaaggagaaggaagaacaagaggcaacagagaaacaagacgagacagagccaccgaccaggccggaggcagggcaggaccggccacgcaaccccacccccgggcaaggacccgcccagccccgaaagcgggacacagacacacaccaccacacccagcaaaagagagacggggcacaaggccagaaggccaacccgacccggaccacccacccggcccccaaaggcggaaacaggcagagccacggccagccaacgagcaaagaccaaaaaaaaccagcacacagagggcggaaagagggggagacgaagagacaagaggcaaggagaagaaggcagagaaccccaaaagaggccaggacaaaggaaagcagccagaagcgaaccagggaccgaaggcagagcaccacgccggccgcagcagagaaccacagaaaagaaagcacagaccaacggagccacggcccacacaccggcacggcccgaaggccagcacgcccccccccaagcaaaaccccaagagcagaacaaaacgcgcgaaagcacaagcacggcacggcaacacaaagcaaagagagaaaggcaaaagaaaaaagaacggaaggcaaaaaacacagaaaaaggcagaccaaaaaaaacagaaacagaaagggaggccaaccaaaggccacaccagccacgagaccggagaaaaccagccggggaaagagggaaaagaagagacacccagaaaaaacaacagcagaaaaggaaaggaaccacccgaccacggggagcaagcccggaggagagagagaggagagacagcacaagaaagcacaggcacaaccacgagacacaggagccaggaccggaagaacgggccacagacaagcaaacaaggaggaaacgaggcccagaaagagaaaccccccaggaaagcgggaacaaacaaaaaagcagagcccagagccaccgagcccccgaaggaccaaaaaaccggagcgaaaaccagaaacaagggaaaagggaaacacgaagccaaaacaaccaggacccaacaggccaacgggcaagaagagaggaccggaaaacaggaaaaacgggaaaaggacacacagccggaacgaccaccggccaccaggaccaaacaagcccagaaaacccgagaccagaaagacacaaaaggggaacgagggcaggggaccgcagggccagcaagagcaggacgaacgaaagcgcggggccgaggggaccaaagcagaaaggcgaaaaacaacgcagaagaggggaacaagcaacgaaaccacaaggacaagcagccaccgaaccagcagggagagaccaaacccagcccaaaccccaagagggcagcgcccaacacgacaaggccacaaggccacccaccacggcaggccccggacggggccgcgggagacaccgaggaggaggcagcacagaagggagagaaaggggggcgaaaaggaggacggagcaaaaacaacaaacaaaccgaaggggccagaaaaaaagcggaggaaagcagcaccacgccccggaggagcacggaaaaaaaaacagaagaaaaaagaaaaagagaagaaagagaaaagcaaaaggaggccaaaagcggaacagcaaccccgagagacgcgacagaacccaaaagcacaggcgagaggaggagagcacgacaaagggccagcggcagccaaaaacgggaaagaggaaaaaaaagacgaaaagcagagaaaaaaagccaggaacaaaaccccaaagaccaacaaggaaagcacaggaccacacagccgccccccccagcccccaaaagaaaaccgcagcccaagcccaggccacgcacccaaaagggacaagggccaagggccgcaaggcaagcaccgacaaagccaaggggaaaagcgcagagaaaacaagcaaaaggggcgccaccgaaacaagaacaaaggcagagcacacgaccgggcacaaaagggacacaggcgagaaccggagaacacgaagagaacaaaaacaaacgggcggaaaaacgccacagacaacgaaaaggcacgccaaaggagcggaggacaaggcaaagaagaaaaaccacagaagcccgcaagaaaagcgggcggcgcaccaccaagcaaaaaaaaaaggggaagaacagggccaggagcaggggaccgcaccgagcccaaaggaaacacagggccaaaacgccacaggagacagccaccagcacaagcaccagcagcggggccacggggagaccaggggaaccacaggcaaaagggacccaggaaaacacagaacgcaaagcagaaaggaggcaagcaagaaaaaaaaagcaaagaaacaacagaaaagaaagcagaaaggagggaaaaccccagacaaaaaccgggacgagcaaaaaaacccaaacaaccacaaaaaaaaaaaaacgaggaaacacccaagggagaaaaaaaggaaaaaaaaacaaagggagagcaggagggaagagacagaaagagaaaaagagagagagagacagaaaaccaagaccaaaaacaagacaaaaaaaagcgcggaccgcaaaaaaagaccagaagccaaacaaaaagacaaaacagcggaaaaaacagccacagaaaaaccagcaaacaaaaaggcagggagcccagaccacagagcaaacagaacaagcgacacccacagggcccaacccccaccaacaaggaggagcccagaaagacccaacccaggcaagcgacgaaccgcccaccagcacccacccagaaaggacacagacagagacaaaggcagagaaagcaggggcaaccagagagagggaaggagagaacgcaaaaagaaaacaggccgaaaagagacagcaaccagaagagcacagaagcgcggcacccaggcggggcgggggcgacggcccacgcaacccaccccggaccaagcgaccgagagcgggacacaggcgcgccaccagccggcaagaaagagaaagggcaccagggccaggcggagaaccgaccaagcacgcccacccagccccaaaggcgggaacaggcagagcaccggcccagcccaccaagcaacggcggggaacacgacagaaagcaacaaaaacacacacgccaagacaagaaaggaagagaggaggaaagaagacgacacaggacacaggggcagccaaaaaaaacaacaacgaaaaagcccagcaggaaagacacgagcgagaagaaagaccccaagcaaaaagcaagaaaaagagacagcacaacgacaaaccaaaaaacggaacaagcgaaaacaaaaccaagagacagaaaaaagaaaaaaagaccagcaaagcaaaacaaccgaagaaaagcacccaacaaaagacgcaggacagaaggaagggaggaaacacaaggacaggagcgaggcacaggccaaaagaagagcaaaccggaacaaaccaagcgaaccgaaagaaccaaagcaagcaaggccagaagagcccaaccggccagcagagcccaaaccaagagaaagcacaagagagacacagaacacaccagggcccgccaagcgacggggacgcagaaacaagagcaccaaaaagcagcaaaacaaagacccagccacacgacccacacccaagaccccagaacccggccggccggccacgccgaacccagcacgggagccgagagggggaacgaggcagggggaaaccagccggccaaaggcaaaaccgccacaaagacaaagagccgggcggggggcggccgaaccagcacgggaggcgaggcaggagaagcgaaccgggaggcggagggcaggagccaaaacggccagcacgcagccgggcaacaacaggaaacgcacaaaaaaaaaaaaaaaaaaaaaaagaaagaaacccgcacccaggaagacaaaaccaaagcacacccggcaaaagaacaggcacgacgcagcggcgaagagcggaacagaaacccaaagaccccagacagccagccaggaggcgaagcgcagccggccaaaggcccccccaaccagggaagaggacgcccgggcccaacgggacccaggaaaggaagagccccgccgcgaaaggcaggcagaacacgaaaagggagggcgaaacccacgcccaaaagccacaaaagaggaagacaaaacgccgggccaaagaaaacaacaacaacccaagcaaggaaagggaaaaacccagaacgcaaaagggagaggaagaaagagacaaagaacaaaagagacacaaagccccccacgacaaaaggaagggcaaaaaagaacgccaaccacagcaaagggccagagaaagcaaaacgagagcagacacggaaaggagaaaggcaaaaggaccaaaaggaaagacaaaagcacacccccccccacacacacacacacgcacacacccaaaggccaaaagagaagaaacgaccaaagaaagaagaaagcggccaaggaacaagaacaagacaggagaaaacaacagcgggacgcagacaaaacaaccaaacaccacagcccgcggcaaacggagaagcaaaagagcaaaggaagcaagagggaggggagccagagaggccaggaaagagcaagcaaggaaggcagccccgcacaaagaagaggcgaaagaagaacaccagaagggcaccaccaaggcaagcagcagaaccgagggagggacacagcaggcgccaaccaaacagcacacaaagaaaggacggacacgcaagaaacagcagagggagcaacggaaagagggacaaggccagaggccaccaaaaaacggaacacccgcgaggacaagccacggagacgccccagcccagaaagacacacaccacccaggggaaccagaggggagggaaaaagggggaacaacccagcaaggcaagggaccaacaccgcagaaaaccagaggacaagcaccacgaaaacgagaacacgaaacaacgacggcaaggaggaaaaaacagaaaaacggcggagcacaacgagaaggaaggacaaagcaacgaccgcaccagggcgaacaccccagggcagcccagagcccaacgcccagcacagcccagccaagagacaacaaaagggaaaccagcagaacaaaaaaaagacacgaagcgccaaaaggaaggagacgcagagcgaaaaaggaaccagagaaggaagcaggccaaccagaaagagaaagacaaaaaagggcaaaaaagaaaaaaaggacaaagaaccagggcggcacaggaaagggcacccaaagcagagagaacaaaaggaacacaaaaaaaggaagaaaaaaggggaaagagcaaagcccaccgcagagaaaaacaaacacaaaaaaaagacgaaggaaaaagcccagaggcagaaagggaaggacacccggaagcccaccagccgagaaacaccgacccagagcaaaaaagacaggcgcaccaaccacgaggaggcgagacaaggaaaaccccggaaaaagagagcccaaccaagggccccaacgcccgcggagagaggaaaaggaaaccgcagggaagggccagagaagaagaaaaggaggcggaaaagaaagcggaagacaggggggcaacagcgcaaagcacgcaaaacaaacccagaccagggcccccccccgccagcgggcaaggcaagcccccccaaggaaaagagagggaggagagcggaccacagcagccgccgggaggaccgacagcaggccacccaaagcacaacaaggccgagaaaaaacaacagcaaggccacagcacaggccgcaaaggcgcagcacgagcaacaaaacggccgaaacacacaagcaggggccgaaaaaaggcgcccgaagccagacacagagaccaggaggaggagggccccaacaaagccagcggaacggggcaagcgaaagggaacgagagagcaggaaaaaagaaagacg

SEQ ID NO: 376 - RNA, 2157 nt, Homo sapiens
aaaccgaaagggaccggcacccaaagaacaggcgaacacacagccgcagaagcgaaaccacaggccaaaaacaccggaaagcggaggacaagcagggaaaccaagccggaggaagcgaccgggaccagaaaaggaaacgaaaagcaaccccagagagggcgcaaaaacagcacaaaaggaaacacaaaaccccagaaagacccagcaggaacacacaaacaggcgccaggcgcgcggggccaaggaaacagaaacccagccggcgggacccgcccgcccccaacgccagaaaaaccacggggaggccacgcagaacccagccacgcagcaaccggccagccacaggacaccaaacggaagaagacacagagggaacaccagcacgcaaggcccaccaaccggggcagcgccccacacggagccaccgcacaggacaaaacgcccgagcccccggagccacagaggcaacccaagacccgcaaaagcaaaacaaagcaccacgccgcacaggggccccagaccccgacagccgaaccgcacgaggaagaaaacaaagaccaggacgcgcaggaaagggcggagaaaaaggccccaacgaccaaccccaaaccaacacccccacagcgccacaccaaccacaaccaagaccaacccaaacacaggccggaaaaacgccacacggcagaaaaccgagacccgagcagggacgagcaggcagccaggcggcagggccgcacgggcaagcgcacaccggccggagcggcgcaccacacacgccaagacaaacccccgaaaaacaggggacggaaaccaacagcgcccgggcagaaccgggccagccaaaaccgacaacacgcgccgcaggacgaacgaagcccgacgcaggcaggcgagaaaggaggaagagcgcccgagccacggcgcgcccccgggggagcgcaccggagcagggcgggcgagccccgcgcccggggaggcaggaaccccagccacaccagaccaaccggacgccccagaacggggacggccccggagccgcccccaaccggggagaaaacaccccgcccccgcgccgagcgccgaaacaaccagggcgcggccgcggaggcccggcggacgcgaggcgggacaagcacggggccggggcccggcggccgcccccgcccgcggacccggcagacgcagcccgcaggccggggccgggaggccaggccgaggcccggcggccgcccggggccggaaagaggcgagcccccgcgggccccgcggccccccggccacaagaaaggcgccccccggccccgccgcggccggccccgggcccaccccacccagcccgggccgccaacgcgccgcccgccgcgcgcgcgcgcggggcagcggccgcggccgggcccgccgcggccgggggccggggcgcgagcccggcgggcgggcggcggcgagccggggcggcggcggcggcggcggcggcggggcggcccccccccccccgcgcgcgcggcgacggcggccccggggcggcccgcggcgggcggcggcggcggcagggagacgcgcacgacgccgcgacgcccaaccggcgccgaggcgggcgggcggccggcgggccgggccgggcggcccgcgccgcgcggccgccgccgccgccgccgcggggcccgcccccgccgccggggccggggccggggcgcggggccgcgggccggccgggggcggagggcggccggcgggggccgcggagcagccccgcccgggccgggcgcggcggacgggaggccggccggccgcggcgggccgcgggcccggggccggcgggagcggcggagcgggcgggcgacgggccggccgcgccgagagccgcggccccgcccccggcgcgcgcggggcccggcagcggacgcggcgcccggcagccggccggccgcccaaaaggcggcggcggaaagcacaccgcaggggggccgcggagcgagcgagcgagcgaggagagcaagcgggcgggcgccgagccggagggcggagcgggagcgcagggcggagcacgggaggcggagcagggagcgacccgccgccgccgccgccgaggcccgccgccccgcagcgccgcgccccggcaccgccgcgccgcagccccgcggcggaccccggcgcccc

SEQ ID NO: 377 - RNA, 1798 nt, Homo sapiens
aacaaacaccggggaccgagagccaaggggagccacggaaaaggagagaaaaaaaaaagccaacggcccgaaaaagggggccccccaggcccggaaccaaccacagcaagagggccccccacccccaggggagggggcacccacagcagccaaggacggagaggggggcaccagcggccccccgcagcgcaagccaggcccagggaaacacgcgaaagcacccacaccccaaagcggaccaggggcaacggcggaggagcgacccaccagacaagaggcccggagccaaggaaaacacccacccaccccaccagcacagggccccccagaccgcccccagccaacaacgccgcccaaacagcacccccgacgggagagcgccgcacaggaacagccgcccgcacgccaccagggcgggcgggaggggcagggcggaccaccggcccagggacacccccgggccggaacagagcgccgggaaaacacgggggagggggaagggaagcggcagcggcccgcagacccaccccccgagaagacaggggggggccccgcccaggaacagcagagcgcagggagacgcaaagcagggaggcccaggaagagaggaaaggcacgaagagagaacagcccgccaaggacacaggacggacggggagagagggcgcagcccggaccgcgccacgacgaggaggaaaggcacgaaaaacaaaggaaaaacagacgaagggaagagaaagaggaaaggaaaaaaaaaaaaaccacccaaacgcgacacaaaacaccgggcagcgaaaaaacagaccaaaaccaccaagcaaaaaaaacggagccgggccccgggaaaaaagcaggccaaccagccagcggaagacccgggcgagcgggcggggaggggaagcaagaccaggagcaacacaacagaagcagcagggagggggagaaaggagggaaggagacacaacaggccaggaaaaaacccaaaagccaccccccaggcaggacggcccacggcgagccgccaaccggcccccgggccagcccgggaacccacccccgcccccccccccccaccaggggcccgcacccgggaagcgaggagcccccacagagcagcaggcccagaacgccagacacccgaagggccaccggaagaaagcccgagacggggacaaccgcggacgggggacccaggaacacaagggcccgaaagggagaggagcaggcagaagggaccgaggaggagcagaggaggggccgaagaggaggaaggagccacaagccgagaaacgagccagaaaaggcaagaaaacagaccggagccccagaaggaaccagcccgacgacacccacgagcccagcgagacgagggccggccccagaacgaagagaaaaggggaagcccccaggaaggggaccagacagccgcaggaacaaagcccccgacccaccgccacaccagcccggccccgccagggccccgggaccaaagcgccggcccgggcccccagagccgcccggcccccacaaaggaacccgggcgcaaacggacagcccacccacgggcccagccgagcccccagcccccccagcacccagccccacccaccccacccaacaggccagggcccagggccccgaaccccccacccgcccaccccaggaaacccagacaaggccagggccacacccaaaacgagggcccagccccagcaaacaggaaaaacccgccggaaaccaacaccgcaccccaagccccaccaaagcaccccccaggaagccccccacgcagccaagc

SEQ ID NO: 378 - RNA, 14385 nt, Homo sapiens
aaaagaaaaggaaaacaagaagagaaaggacagcacacaacccaccccagagaaacacagggaagacacagcaaaaaagaaaggagcagagcaaagaaaggacacaaaaaacgaaacaagcgaagagggagacccaaaaaaacccaacaacagaagcacagaaagggagcaagggcaaggcaacagccagaaaaggagacggaaggcacgaccggacaccgggccagccgcacaagcggcagcccaagacccaaggggaaaagacaaaacaaaaaaaacaggacccagcaggaaagaaaaacgggcaaacagaaagaaggaagaagccaaaaaaaaaaaaaaacagaacaaccagagggaagaggcaggagaaggagaaggagggggacaacagcaaagggaaaagcaagaaggaaaaaaaacccagcgcacagacaaggagcagcccacacaccacaagcacgcgaggagaagagaaaaagagaagacccgagacacggagcgaccggccagcaagcgaggagcaaggcagaaaacgagaaaagaaacgcagcagcagaaaagcaagaggacaagcagcaaaaccgaaagaaccaagggacaaagccaggccagcaaaaaaaaaagacaccgaaaccaaaaacacaccacacaggcaccagacaacccaccaaagcaaaacgcacagagaaccccaggccaaagcaggccaggcagggcgggggcagccccacaaagccccggaaccgcgcagccccagaggagaaggaagaacagccagggacaccaaccaaagggagagcagaaggaagaaaacccgacgcgcacacacagaaaaaacaaaaagcaggaggaaagcagccgacggccagggcaggaggcaggccagaagccgacaacccggaaacccagaacaaccagagggagccgcggagaaaccgacaaaagcagcccgcacgacaaaaaaccaaacaaaccaaaacaaaaaccgccaagaaaaaaaagcgcaaaacaaagcagagaacaaacagaacacggagaggaaaaaaacaaacgagccccacccagaccaaaaacaagaacgggggggagccgggccaggagaagagcccggggagaaggcagcaaagccaggaacaggcgccgacagaggcgagcacaagacccgacgcccgcccccacccaaccagcaggcaaaaaaaaaaaaaaaaaaggcagcaaagaaagaaggcaaagaacgagaaacaaagcgaaaggcaagaaacgaacaacgcgaaggaaaaaaccacaccgccaccagaacaacaaagcaaccaaaaggcaacagagaggcccacccccagaaagagacaaggcgggccaccgggagagccacaccaacaaaacgccacaaaaaaaaaagaaagaaagaaagaaaaagaaagacaaagagccaacaggaaaaggaagagccaaagcccgaagaacggagggggagggaaaagacaaaaaacagagagaaaaaaaccagagaccagaaaagaagaggagaaaagaacacacaaaaaaaagcaggaaggaaagagcaaaaggaccagggagcagcgaacgaaagaaagaggaaagagaacagggaagggcaaaccaaaaaagagcccagagcccgaaaggaacccccggggaaaggggaaggaagagggaaggacaacacggaggaaacggagccccgacgccaagggcagcaacagaaggggagaaagcccaggaaccagcccacacaaaagcacaccaccagaaacccagagcaccaaaaaacaaccaccaagaaaaacaaagaaaagcaaaaagacaaccacggcaccaacagaagagaaaaaagcagaggaagaggagccaacaagggaaaaccaaaaaaaaagaacggcgccacaagaaccgccgccgaccaaacacaccaagggaaccacccacaagaggaaagacaacaaacccaacaacggaccaacgagagagagacaaaagggagacaaagacccaaagaagagccacacccaaccacagcacaaagaacccgcaacccgggcggagagagaagacaccccaaggaagagccagcaagaccacagacaaagcccaagagaagcaagcaacgacccaaaccgcggaccggaaagccagagacccacaaagcccaggaagaggaggcaagagaacacacccccgcgggcaaaccagccgaacgagccaggaacaaaaccccacacaaagcagacccccaaacaagacgagacacggagccacagcagcgaagaaggggcgaaaagagaccaccaccgcagaggcagcaggcaagcagacccggagaaaagagaccccaagcccacaaccaggcccggcggagagagaagggagggagagggaggagacagggggccaaagcaagccagagccaggccagagcaggagacaggggaagcccagcaccccggcagaggcaccccaacgacccagccagcacaaacaagaaaagcaaggaaggcgggacagcgcgcagcaaagcagcaaggcgaacgaagcgagaagggaggggcgacaacccaacagacagacaacggcgagacccagacacaagcacgaaacacagggggaggggggaaagacgaaggcgcagccgagacggaaaacaagaacacaaacaagacgaagcaccccgcagacaaaaaaaaaaaaaaaaaaaaaagcaaacccaaaccaggccaggagacagagagagggggccggggagacagcgagccaaagcaagcagcacacaccagaagagacaaaaacaacagaaaaaacaaaaaacaaacaaacacacaagaaaaaaccaacccaagcacaaaagagccgacaaaaagaaacaaacgccagaaaggaaccagacacaaacacccaacaacccccacacaaaccacaccaccagccccgccccagaacacaccccgacggcaccagaacaaccacggagggaggccaagagccaacgaggcggggcccaccaccgcagacagggggccgagaggaaaaagagggacaacagaaccaccccccgagaagaagcaaaaaaaaaaaagaacaagaaagaaaggaagacacaacagggcccacaccgcaggcagcaaacagcaaagcaagaagcggcgaaagggcagccagccacaacccacccccagcacacagcggcacacacgagcccaagggcacacacaaaccaagccccagcagcccgggaaagcgagcccccaagccacaggccaacccagaccccccggaagcccaggaccccacgcggacccgaacacacgagcaaggacgaccacaaaacaacacaaaaacaacaaccccgacacggccccaagacaagaaccgacaaccgacaccaaaagcacgagaaagaagagaagaacaagacagcaaacggaaagaaaagccaaaaacccagacagaagggaaaggacacgagcaggcgcaagggaacaggggaaagggagcaaaaaagagggagcaaaaagaagaacacaagcagaaccgcgaagaacaaacagaaagcagacaaccccaaaacagaaggaaaaagaaaaagaagaagagaggaaggagaaggaggagaagagaaggagaagaaaagggagaagaagagaagacaacagaggaaaacggaaggaaacagagacagaggagagagaacacgagcaaaaccacaaagaagcgagcacaaaaggaaagcaacaggaagaaaaccaacccacaacagagaaagaggcaaagccaaagagaggaaggaaaaacaaaaacaaggagaaagaaccccaaaacccacaaagaagaagaggggaccaggggaaaggaacccaacacgaaggggacgcagggagaccagaagaacgaccaaagcaacaaagcaacagggaaaaccacggcacaaaaacagaagcaacaaaaaagaaggaacgggaacagggacgaagaggcaccgaaaagaaaaaagcagcacaaacaacaaaacgaaacccggcagaaacagccgggggaaagcagcacaccaagaggacacggcccaccagagcaccccagccaagcgaagaccgacaaagcagccacaggcaaagacccaaccaccaaaagaccgccccaagcgcaaaaaggaagaagaaagaggcaggagcacgaccagaaggacaaggccaaaaagaaagaaaggaaggaggcgcaagggacaggaggggagagagaagaccaaggacccaacgcggaaacacaacgagggggccaaaaaagcccacaaaaccggaaaaagaaaacagcacagaagaaagcacaacccaaggccaggagacaaaaccagagaaaaacagcccaaacacggcaaaccgaccagggccgagacggccccagcaccgaacacgccccaacccagcccccacccccaaaacccgcaaagcaaaaagacgagaaagcaagaggaagaacgaaaggcgggaggaagaaagagcccacaacacaaaccacagacacggcaaaccccgcaccagaaaaaaagaacgaagaacagcaaacgaaggcacagcaaaaaaaaaaaacggccgaccgccaccagggacaaagcccggaaaacgacaaaacaccaggacagaagacaaagaacaaggagaaagaagcaaagcaaacaaagcgaaaaccaccgcgccaaagcgagacaagagacgacgaagaagaagcaaaaaacacaaaaaagcagaaaagacaccaacaggcaccaaaacagagcgaaaagacggaaaaaaggaacagcagccaggacggaacgcaagaccaggacccggacgaccggcacaggggagaaggagaacagaccaaaacacagacccgggaccccaaaacacaagcgggaacaggagaacacgcagaggcaaggaacacagccggggcacgcacccacaaccgcacacaaggaccaagcacccccccagcccccaacccccaacaggccaggggagcccccccggccagccagcaaccccaaagacgagaaacggggggccgccggaggcgagaaaggccagacaccagccgcaaaggacagaaccaccaggcgcaaaaccaaagaaggccacacaccagcacagagggcagggggccaagcgcaggaacagggcaaaaacaggcagcaaggcagagaacggaaaccgggaaacccagaagggagcgggcaaaggccggcagaccaagaagacacacgcccacaaaggaacagacacgcccccaacaggaaaagcacacccacacccccagcacggccgacaagacgccacaacggcagagaggaccaggggagcacccaagaccaggagaagccgagcggccacaaaagccgagaaggcgcaaccgcccacgaggggggcgaaagaagcgagacggaagcccgcagaggaagagcaaaaaccgcacgagggccgcaccgagaagccgggcagaagccagaaaacccaggcaaggcggccagcggagcaggaagcgcccagccagccgaagggggccagggccagggaggaggcagaaacaaccagagaagaaagggaaggaaggggccagcagcgcaaggcagccagcccaacaccaaaaaggaaaccccccagcggcaggacaaagacagagggagacggggcacacgaggcccacgcaggcagagcgggaccagcaccagcgggacgagccgagaaggaagcaggagcagagccccagcgcgagaagcggcgacgggccggccaagaaaaaagagcaacagaagaaagcagggagcgaggggaagcagaacaaaaacggggcagaggccgcagaaaacccaccagagcaggaagccagggccccacgagcagggcgagcccgaagaggcccacacccgaggacaggaaccagagcaaggaacggagcaccagaggcccggcaggggaaggaagccggagcacacgagaccgagacgcgaaggcacagcaaggagaaggccaagacaaggggcaaacaacaaaacagcaaacagagacaacgacccgcccagaaacgcacccgccgagcccggccagaagcaaacaggaaacgacgggagacagggcaccgcggccgacaaagggaagcccaggcccgcagagaagccggggcaaaaagcaagagaagccacaaacagacgagagagcaaagggacagaagcaaaggcccgcacagagaaacagaagcaggcgaggaggaaggagagcaaggagccagccgcacccagggagaagcccgggaaaggggaaagcgaggcgcggacaggccagaagaggagcagagcacagggaaggccgaaacgggccgccaggggacaggagagcaggcccaaaaagagagagaggagcccccaaggaaagcagaaggaaggaccagcccgacccggagaaggcgggaaccgcggcccaggcggggaggcaaaacgcccaacagaagggagaccagggaccaccccggagcgggaggggaggccagaaaaccaccagacagagcaagagggaagacccgaggaggaggggacagaggaaccccacaaggcagacccccaaacggcagcagcacagaacccaagaaacaagcccggacacgagaagggcagccaccccagcgccgacagagccgcagcgaaggcccgcccagccaaggagaggggcgacagacccgccccggggcaaggcaaaacccaaacacgcagcggcccagagacggacgggcgccaggcaaagaacaacgccaacgagaccaagagcacaggagcagggcagccaggaggggggaggagcaaccgagcaagagcacgggccgagagacggaaacccacgcagcgaggaggacccaaaaaggcaaagaaaaggcaaggggccaaaaagaagaacggaagggggagagcgagagcaaggcgcggccacagcgagcaagccgaaaccgaacgccaagaccacaaagacacgggggaaagccccacaaagggggagcaagccgaggccaagaacgcagaacggggcccgaggggcaaaaaggaagagcccggcaaccaccaagaagcccgcgacgagaaagcggcagagacaggagcaacccgcaaccagcggaaaaccccacccagagccaaggcgaggagaggcccgaaacagcacaccaagggccgaccaccaagccagcgagcaagaggcaagcccaacaaaggaaagagggaagaccgcaagagcagcggagccgaggagcagccaaggcgaggcacaaggagacagggcggaccagcccaaagaccccaggagccgaaagcagcccagcagcgcgaaaggaaccccacagaacagggcggaagaaacggggaaaaccaagaagaaaaggccccaccccggcgcagggcgcagagagaccacgagcaagggccccggggaacccaacccccggcgccaacaccacaaccgggaacgagaaggcggggcccgaggagacggggccgaccgaagaagggccgccagaggggaagcccggaaaaccaaagaggccacggccacccccacaccaggacaccaacaaacgaggggccacaagcccaacggaggcgcaccacccaacgccacacacaaaggacccaccgaacccccacgacaaggcagaacggagccacgaaaccggcggcagcccacaggcaaacccaaacggacagagcgacccaacccaaggcgagccccgcagggagaacacacccagccagaggaggaacccacccgaagccaccgcaaacaaagcaccccgccaggccacggcaaggagggaccggaggagaaggggcacggggacgcccggcggccaaccaggacacacccgcgaagagacccagaggggccgggccaccggaggaggcaccccgggcccaaggcaggcaaagacccgcgcaggcgcggaggcggagaccaccagaccagccggggcaccagggaggcgcagaacagcaaagagcgccgcccccggaagcggcccagaggggcacccaccagagccacccagagccccgagagggcgcgaccccgcgggagagccccagcaggaggcacgggggcagggacccacgagaaggcagcgcccagaagagccaagcgcgcgcgggagacgcgccccagagccagaggcaggaaggcgaagcgcgcccacagccacccccccagggccgcccagggagagagagcacaaagcgccgacggggcgcgccccagggagcccgccagagaggaggaacagaggcagcggcacggggcgcggcgcgggggccgcccagccaaacccagggcgacacggaggggaaaacgccacaagcccagaaggggacacaccccccccaccaaacccaacaccaggcaacagacgcggcggcagcaagaacaagccagggaccagcgcgggcccaggggagggacccacgagcagaccacggccccggccagcccccccggggaggaacagcgcgcgggccagggccacggggagaaagaaaacccgcagccgggcgcccaaacgaggcccagcggcgaaacccagggccggggcaagggagcgagggaaccggcggggggaagaccagggaaaagcaagaccgggccagaagcacgccgcacagcccagccccacagccccggaggggaaagaggcccgaccccggccccagggaggcaagccccacccgccagccgccccggggcggccgcaaccagcccaagagagagcgggaccagggaaagcagaaacacccaccgcagaccacaggagcgcagacggaacgccacagccaccgccagcacccccacaccacacagaaagaaccacccccaagaagcaggcccaccaaacaacacaacgagcaggaaaaaggcgggagcaacgaggaacaacagccgaacacgggccaaaccaacaaggagcccagcacaaggaaagcaagacagaggcccagcccaggcggagggacgaccacgcaacccgcccccaggcaagcaaccagccccaagagcgggaacagggcgccaccagccggcaagaaagagacggggcaccagaggcaggcggcgaacccgacccaaggaccacccacccggcccccaaaggcgaaaacaggcagagccaccagccggcggaaacaaaaagacggggagagaaagaagcagagagcccaacacagcgcggacggccaaacaaccaacacaaccacaccaaaaggaagggaaaaaccaaaaaggacgaaagaaaggggaaggggcaagccggcaaccagagcaaaaaaaggacaaaaggaaagacaacaaagaaagacaacaaagacaaaggaaagggagaagaaaaaaaagaagaggagaggacccaaccaacccagaacagacagaaacaaccccaccaaccaggagcggggaagacagaagggacacgaaggacgagggagacagagagcaggacaagcggcagaaggacggcccccccacacaaaacgggcccaacaggccaggccccccaggcacaggagaacagcgggggaaacgagccccgcccccagaacagaggcaggggagacaaaaaaagaaaaaagccaaaaaaggaaacggaagagaaaaacagcaaggaagaggcagggaaggggagcggggagcaaaacgaggacaggaggacaacagcaaaaagaaagaaaaagaccaaaggggcaggggggggccagccgaacccagcacgggaggccaaggcaggggacacgagggaggaggagaccagccgaccaacagggaaaccccccaccacaaaaagcaaaaaagccggcaggggcacgcaccggagcccagcacgggaggcgaggcaggagaaccgcgaacccagaaggcagaaggcaggagcgagaacaccacgcgcccagccggggaggaaggagaccgccaaaaaacaaacaaacaaaaaagaccaaaggcggagggagcaaacacaggaagaggaaaaaaacaaaaacaccaggaaaaaaaaaaaaaaaacgagccaaggccgaagggggcaagcccagaagccaaacagccaagggccacgggaggaagcccgagcaaaaacaacagaaggaggacaaaaccagaggggcagcagcgggaacaacaaaccaaaggaaccaggacgagacagggcggccggccaggaggaagagggcacaacagcacgcaaccgagacccgggcacaagagaacccaccaacccgagaccgggacacagacgcaggcaccacgccaggaaaagagagaggggccaccggcacaggcggccaaaccgacccaagggaccccacccggccccaaagggggaaacgcaagaaccacggccggccaagccagacccaaagggaagccacaaaaacgggagaagagggggacaggccgaaccgaagaggacacgcgcgggagaaagacagcaagcgccagagaagaacagaaaagagggggagaaacggggcaaaacagagcaggagcaagagaggggggagggggcaacggaaagggagagccaaaagacaaggaagaagagagaaacaaggaaacccccaaagaaacgggcgaagaaggccacaacaagcaagaaaagacagaaggagcggagagagagaagggggaaaagaggaccaggaagcacgcagcggaagaagagagagaccaagcggcgggaggcgaggcaggaggaccgaggccaggagcaagccgcaggagcggacgcccacgacccagcggacaacagagcagacccgccaaaaaaaaaaaaaaaaagaaaagaaaagaaaacagaacaaagaaaagaagaaaaagccagaaggagcgaaagcaaggagggaaaacaccaaaacagacgacgagagagcagaggagagcaggggaaaagaacacagaaaggaaagcaagggaagaggccgcaagggaccagggcaagcagccaagcacagcacacggacaggaaacggccagggggcagggcggaaggcagagagcaacgcccccggccaccagggccccgagaccacacggcacacccgaccacccccacagcaagggacagccaaaacaacaaccaaaaaagaaaaacaaagggacaaaaaaaggaagaaagcagaaaggaaagacacccacaaggaaaaaaacagcaaagccaggggcgaggaacccaacacccaaggaaaaagcaggaccgagggggcacccagacaaaccagaccggacagggggaaacggggcgggggcgccggccggcgcagcccccccaccccaggaaccagggcccccccaccgacacacaccccgggaacccaacacccaaaaccaccacacgcgaggccccagccaccagcacaaagccagaaaacaagccaccagaccccggcacaggcaccagaagccacacacccaaaccacacccagacacccccaccagaacccccccacaagccaccacacagaagcccagagccaaaaaccaggaggacccagacccaccccccaccaaccagcaccagagacgaacacaaaaaaaccccccacgccacgcaaccgcaacgagaggagcccaccaggcggaggcagggcgcgacggccacgcaacccgcccccagacaaggacggcccagccccgagagcggggacaggacacaccaccacacccaacaaaagagagaggagggccagggccaggcagcggaacccgacccaaggaccaccgcccagccccccaaggcgggaacagagggaacaccagcccagcccccaaaccaaaccaaaccaaagaagcaaaacgagcggcaccgagacggaacgagggagaaggaacaggagagggaacaacaagccagacgcaggggagaccagggaaagagagggaagacacagggcgcagcaagaggcacgagaaggggcagaagaacagaaaaagccgcaaaggagggagagcccccagaagggagagccgcacaacgcagcagaggccgaaaaaccgaacggaagagaaacgaagccgaacgggggagaaaagacaacacagccgccccaggagcccagagggagagaagaggggagcacaaacggacaggagaaggacaaggaggcggccggaagaaaaaacaagagaagaaagaaaggccgcaggaagaaaccaagaggggccaaaaacggaaaaccagaaaaaggaagacaaaaaggaaaaaaacaggaagaagggcacaggacagcaagagcggccgaccaacagagaggccagcggggaagcaggacagaaagagggcaggaaaagacagaaaaaaggcagagcagaaggcaaaacgagagcagaaagcaaacggaaaaaagacccacccacaaaggcgaacggccagggaccaggccccacaagaagcaccaagaaggacagagcgcaaaagaaaggaagagagggcggccgagcagccaaggaaacacaccagcgaaaggaggggcaacacaaaaaggggccgccccaaggaccaaaggcgacaacaagagaaagacaacagaaaggacgaggggggaaccagaacagaacccacaggagaacacaagagcacaaaaggaacacagaaagaggcaaaggacagccaaagaaacacggagagggaaggaaacagaagaacagaaagaaaggacaagaaaggaaagaaaaagaggggagagcaacccccaagcgcccccagccaggaggcaaaaaaacacccaacagacaaaaaaaccacagaaaccagccagggcaaagcagaagagcaacaagaacacaaccaacaacgacagaggcgcaacagaacacaaaaggaagacaagaacgaaaccccaacagagcgcgggaggaacaacaaaaagaggccacaagcacaacccaagagaaagcccaaagcgcagaaagaacacaccaaacaagaagaccgaagggcaacagcaacgaaaccaaaagcagacagcagccgaaaaggaaagacacgaaacagaaagccaacaaaaaacgacagcgggaaaaacaaacagcggagggcaagcggaaggagacaagaacagaacaaaaaaggcgcaaaaaacaaaaacaccacggaaaagccagaccagcaaaaagaaaagacacccacaagagaaaaacggacgcaggaggcaaccaacgggagaaggcaaggacaaggggcccagcccagggccacggcagcagcaggagcggcagcacaagcccgggccccccggaagaggccagccaaagccagcgggagaaccccgccccagcgaacccgccccaacgcccccaggccagcacccacgaaccaacccccacgaagaaaagagccgaagccccagccaaaaaagaaaaaagaagaaaaggagagaaaaaccaaagagacaaaaaagaacaggcgggcaggcggccacgcggaacccagaaccaggaggcgagggggaagaacgagcccaggaggcgaggcgcagacagcagaacaccacgacccagcggggacaaaagagagcgccaaaaaaaaaaaaaaaaaaaaaaaaagaaagaaagaaaagacacagaaagaaaggcagcgagaaccagccagcccaaacagcagcgccccgaggcggcccgcagcagcacggagaacccaagccaaccaggaggcagcacccgacagcaagaaaaaacgcagacgccgccaggggaggcaaccgggccacagacaccaggcaaaggagccaaagaagaaaaagggccaggacgaaaagagaggggaccccagaaccagaaagacacacaggaaaccccccccagaaaaaacaaacagagaaagccagccaaggcaaaaaaaaaagcagacagaacgaccagaaggacggggagaggaaaagaaacgcaaccaaaacacacaaggcacggaaacaacaacacaaaaagcaaacgaacagaagcgacagcagaaaacacacgaaaaaaaaaaaaacaaacagagcccaacgagagcaaaaacaacgacaggccacaaacacaaggagaaaaggagaacagaaaaaggaacccagccacgaaggcagaaagggacacaaaaggcacaaaaagacacgaggaccccacgggccaacagaaccagaacaagacgcaggaaacccgccaaaaaacgaaaacgaaaacagaacaaaaagcccaaagcaccacagaccaaaaaacagaaaagagaggcacaggagcacgaagagaggagaacaaaaaaacgaaagaaaagaggagccgccggcccaggcggaggcagcggcggaccggccacgcaaacccacccccaggcaa

SEQ ID NO: 379 - RNA, 1573 nt, Homo sapiens
aacggggcggaagagccaaaacaccaggaaagaacacgaaaagaacacacgggcgaaccacagaaaaaccaagaccaaggccaggaggcgggggggggggcgcgaaagggagggaaaaagcaggaaggaagccgaaagagacgagaagaagggaaacggagaccaagacaaccgaccaaacaggggggaacaaccaaaagaagaacgcgaaccaaaagaccggagcgagcagaaggagaagcaaaagaaagggccagagcagcaacaccagagcagcccggggccaaggcgagcgcaacaggaaaggcagccccgcccaaaggagcgaaggagagacccagcaaggagccgccacgagagggcaaagcaagaacacaccggcaggggcccgggagagcaggggcgggcaggagcagaaggaaccaaggagggcgcacccgggcacccgccaccggagggggggcagcgcgcccccgaaggaaggaggggccccacgaaggagaaaaacacccaaggcacacagccggaagggggagccagaaccaaacccagacgggggggacaaaaaaacaaaaaaggaagggcgcgaagaacagcacaggaacagagggaccccaagccaccaaggccggagcccgaaacaggaccgggccaaaacaacaaaaagaccaaccacagccaggcagggcaagggaagagcaggggcaggcccagccccagaccaccacagggggggaccaagaagaagaaggaaaagacaccgaggcacgacgcgaccaagcaccaagagcggacgcgaaaaagggaagcacaccaaaaggagggaaagggacaagagagaggaagccccgcgagaaggagagcaccggaacgaggcggaagagcgggacaaaacccacccagcggccaggagaacgcgcgggggaaagcggcgcccgcagcagccccggcaccgcgacgcgagcacaacaaacagcgagaaaggaaaacgagagaaaaagggacacaccgcgggcaggaaggacagcacagcgagacggaagcgacggaaaaggaccagagaagagcggcgggggaaagcagccaagacagaaagaaaggcaaacgggccaaaaagcagacaaacagggacaggcggaggcccaggaccaagcaccaaccgcagacgcgaccggaagccgaaggaaggaaagcagccgcaggcccagcaggcccccccggcgggaagcgggccagccggagcggaggcgggggggggcccaccccacccgcagcgcagccaccaggagccaggaaggcaggacagccaagccggaaagaggaaggccagagaggaagcacacaggagccccagcggcccacgggccaagaagaaacgcccacgcagcaagcaaacaccagggagagcgccgaaagaccaggagagcccagccgggggagggagaacaaaccacgagaaacccacgggaagggaagcaaggaaaagaccacaagacccgagcaccaaggaaggccaccccaaaaaaaccaaaaaaacagcaagaagcaagcacagaaccaaacccaggccacc

SEQ ID NO: 380 - RNA, 593 nt, Homo sapiens
aacgcaaggacacaggccaggaggccccaggcccccccaaacacgccgcaccagcgccggaagccccaaccccccggcagcacgacaccccagacggccacaacaacaccccgacaggcaggggcggagcaaaggcaacaccgccgaaaaggaagcccgcgaagcgagcaaccagcaaaaacgcccccccccaggcacgccccagaagcgcaggcccgaggccggaagcggggggcggcgccgcgcgggggccacgggagaggggcggggccgggaccccagcagcgcgccggcccgagaaaggaaggggcccgcagcaccaagacgcaacgaacggcaaaagccgggaagaggacgaaaaaggggagccagagcgcgcggcgcccgaaaaagcaaaggaggaagcaaaaaaaagggggggggccccgccggcggagcgaccggagggagccaacaacccggagggaagggaacagcgggaagcaggccagacccagagggagaaagggcgggggggcagaggacaaaacagagaggagaaacacacccaaaaagcgaaaccgaaacaaagacgcggagaaaaccggaagggg

SEQ ID NO: 381 - RNA, 7569 nt, Homo sapiens
aggcagccaagcaagaagaaaacacagaagcaaaaagacaaacaagcagccagacaaaaaaaaaaaaaaaggaaagagacccaaaagaaaaagccaggaaaagaaagagcaaccaagagcacaagaggaaaccccaggagcaaggagcacaaaaagaacaaaagaagacaaccgaacagaaaagaagagggcaagaagcccccccccaaaaacacaagcaaagcaaaagcaaaagaagcggcccaagaaagccaaaagcgcgggaacacccaaaagagcgccaacgacacgaacagcaacgaaaaccaagagaaacaagaggcgaacccaccaaacagacggcagccaccacgcagggcaaaagccccaggaacggggggcaaacagggaccaaccaaaccccacccccccaagacagcccagcagcgcaaaggaagggagggaggaaagaggaaggaggggggcaggcagccggccgaaggccacgccgggcggcccccagccacagaggcggcagagcagccgaccgcgcccaagcagcgcaaaccccagaaagccaggggcgccggggggggggccgcaagcaaggccagcccagacagcacccagcgccgaagcaagcgacaggaaaacacaagggccacggcccagaaaaacccaacaaggggaagaaaaagaccgagcacaaaaggggagaaccgaagagcagcacgccgccggggcaacggcacaggagcagaagagccaccggcgccgcccagggccaggcggagcagcagcggggaagagggaacgcaacggcagccgcaccaacggccccgggggaaaaggaggacagagaagcgggaaaaaagaaaacaaagcccagggggccccaagcaaagccgccacccggagaggaacgagcaagcgcaccagaacaacagaggcacacccagcaacgcccgcccccaggaaacggagaacccagagaagagcgcccccaaacaagaagaacgacaccacccaggagccggggcagcgcgcaagcagaaccccaagcagaagggcgaaaccaagcccacccgagccgggaccaggcaaagcgggggagggggggcccagaaaaaaaaaaaaaaaccccgcgagaagaacacgacaggcaccacagaagaggcagaggaggacacaaacacagacgggacccaaggacagccagagaaagcaggcagagccacccagccagggggacagcagaggaccaaggggggcccgaggagccccccagccacaagaacggagccgagcccaagccacgaaaagaagagaaagagcaagcggggagaaagacgaaagagacaagagaaaaacagcgggggcccggaacccccgggcgggaggaggggcaggcacagagaacccacacaagcccaccccagcccgcagcggcagacaccagccaacccacggaggcaagaaccgccaggggcccggcgaccagaaggccagcaaaggaggacgagaggaagcggcggaggcacccaaccaaagggggacggacgggaaaagcaccgcccaccccaaggggaggccgagacagccaaaagagggggacacgagccacagaccccaggaaggcccaacacacagcaacacacagcccgaccagcgggccaccgccagaacacccaaaagaacaccgacagcccgacccaggccaggaaacccaggcaggacaggaagaagagaagccagacccgaccgaaggaggagcgaacacacacagcgcacgcacacagacacacacacgggccaggcaggcaggggaggaagggggagggccagccaaggccagacacccaacagcggggaccccaagggacagacaggccacaggccaaggacacaggccggcagaggcaaggcgaagcccaagccccagcagcagcaaccagcgacggggcggcacaggcgggccagcagagcccagaggaaagggcaccaagaccgccagcaaaaaaagggggggggcaccaaccaggcagcacacggggaagggaacgcagcagggaggcagccggggaggccaggcccacccccacaagcaccaaccagacaaagagcagcaccacgcaaaccagcccacagccccaacccaggcacaacagaacaccggagcaccaaaaggccaggagccccacccccccaaccccaccacgaaggcgaggggggcggacaccaaaagcccagcaacagcgcaaggaaaacgcgaacccaggccacccaccccgaccccagggaaaacaccccaagcaggagggaagcagagaagcggagaagaagcacacagccagagcgggagcaaggcaaagcaggcgacagcaggcccaacaaagaaagccaaaccaaaaagccaaggcagagggcccgagagaggaaagaggaccagaagcagcggaaacgaaagccaagccacaaaaaccagggaaaaaggaagaacaagacaaaggaaccaagaagacaggcggggcgcaaccacacggcgcaggggagaacacggggagccacgagccggcaacaccgaggacaggagaggacggaggacagagaggggaagacgggaagaaggagaaagcagaacggggagaaagaggagggacggagccccaggacgacgcaaaccaccaaacaaaaagaagcggaggagcaagcacaagagggaagagcacagccagagaaacacacccaacagagggacaagagaggaacccacccacccaggcggaggcaaggcacaacggccacgcaaccccgccccgggcaagcgacccgcccagcccccgagagcgggaacaggcacccaccaccagccggcaacaagagagaggggcgccagggccaggccacggaacccgacccagggaccgcccgccggcccccaagacaaaaaaaaagggagaagaaaagggcgggcccagcgcccacacagcacaaccgcaagcacaaaagagccaagacacacagaaagaagggcggagccaggacacacagaaacaggcagggggagggcggggcagaggcgaacccggcaggcacaaaagggagagaaaagcaaccgacccacgaacaaaaaccaagaaaggcagacagaaaccaaacagcccgggccgggagacacacggcacgggcagcccccaaaaggaggccagaaggcacgagacggccaggacagggccagccgaacccagcgcaggaggccaggggggaaccgagaccaggagcaagaccagcaggcaacaagcaagaccccccccagcaaaaaaaacaaaaaacagccaggggggcagcaccgaacccagcacgggaggcaagggggaggaagcgagccggaaagcaggcgcaggagccagaggccacgaccaaccggggaggaacaaaacccgcaaaaaaaaaaaaaagagacacgagacgaacagggcaagccacacaacaagcagaaggccagaagcacccaagccggaacaaagcccagacccaggcaaaccagcaagcaaggaaaaaccagccagagacacgaggcacgacaaccccagcggccgcccaaaggacaggcaaaaaaccaggcaagccacaaacaaaaagaccaggagagcaccacgaggcagacggcaccgaggcaaaacgggagacgaccggggacccacccccaaaaaaaaggcaacacgaagcacccacgccccagcgcccaagcagggcagcaagcaccccagaggcaacccaccaacagcagccgccaaagcaaagaacaccccccggcaggcaaaggccacgcggaaaagccaggaagccaacaacacgggcccagagcccaccacccgcaccacccccacaaacagcccaacagaaggccaacacaggcaccaaagaagaaacaaaggccccgcccaccccagaagcgccggccagggccggcagggcaaaaacgccaagcaaacccagcagccacaaggagagaagaccaccacagaagaagagggcaaggagcgcccccccagagagcgggacgcggccaaacccacccgggggggacacaagcccccccgagagggaggggggggacacccccgcaccccgggacaccagagaggaaggagaaaaaaaggaacagacagcagaaccaaggccaagccggggcaagaccgaaaacggaaggagcagagagaaaacacagagccgggcacagggccacgccgaaccagcacgggaggccagccggcagacaccgaggcaggagcgagaccagccggccaacaggagaaacccgccacaaaaaacaaaaaagccaggcgggggcaggcgccgaacccagcacgggaggcgaggaagaagaagcgaaccgggaggggaggacaggagcgagacggccgcgcacccagcggagacagaggaggcccccaaaaaaaaaacaaaacaaacagaaacgacggaaacaaggaacggcagcgggcaggacaaaagagaggcgaaagaggagcagcagacaggagcacgcagcaccggagacccggagcagagccggagccgacccccacacccgccaccccgcccaccacaggcacaccagccccaggccaccagcagcccgcaccgcaagggccagagcaagagcgccaggagaccgaaggaaaggaagaagccccccgagaagagccccagcaagagaaagagcaaccccagccccgccccaggaggccaacccaggcacaggccacacgcccagcaccagcggaaagcccagcccacacgggcggccaagggcgcacggcacccccccacccaccaggacccaaaccaaaaaaagaggcacgaaacgcagagacagccgaaaaacccaaacaaaaagcaccaaagagagaagaccggcaagagaagggaaaacagggggaaaaagacacaacacgcaggcaagccagaggcagggcaaggggagcaagcagcgggacaaagcaccaaagacgcccccaagagacaacaaaacaaagagcagggaagacagggcgacagggacaggaggagaaaggccaagcagccacaccgaagagaggagagagacaaaagcacaaaacagaaaaaagagaggaacaaagaaaaacaggaaggaaaacaaaaaaggggggacagcagaagcgaagggaagggacaaccggaagggggagagaagcccagcccgggccaccaccagacacaacaaagacggaccacacagaccagaaaagaaaaggacagaacgacagggagacaagcagaagagcagggaaaaacaaagagggaaaaccagcagaaaacacgaaaagaagaaaaaggagagacaagcaagccccacgaggcccgagaagaaagccagcaccggcaacaaggaaaaaagaacagcacagaaggacggagacaaacccgaaacaacgaacaacaaaaaccagacaaaagaggggcggacagagagcaacaccagggaaaagacaaagggaggagaagcagagccgaagcaagaagccaggcggggggggccacgccaacaaccgggaggccaagggggcagacagaggcaggaggagaccagccgaccaacagggaaacccaccacaaaaaacaaaaaagccaggcaggccgaacccagcaccaggaggcgaggcaggaaacacgaacccaggaggcagacagcaggagccaagaggccacgcacccagccgggggacagaggagaacgccaaaaaaaaaaaaaaaaaagccggcccgagggcagaggaggcaggaggggaggggaagggcacgcaaagccgagggcagagcggcggggccaaggaacagaaagaagccagggaggcaggcaggggagagaggaggggaaaagaaaagggccagagaagaggagaaggaaaaggagaaccaaccaaagaggagcaaaacaaagggggcaaagagacacagccaaaacaaagaaggaagaccagaagagcacaggacagaaaggagggcggagcaccaagggagggaacaacaggaaacgacgaaaaaagaaggaaaaaagaaagcaaagaaacaccggcagagggcagagaagggagagccaacaggaaggaaagacaagaagaaacacagcaaaaaaaacgaagaacgggagacaagagggacacgaaccaagcagaacacaaagaccgagaggagcggaacgagagaaagacaagagccaccaggagaggagggcaccaaaagacagacggccgaggacagccggcagcacacacccaagaggccgggcgagaacaccgccggagaaaaaacaggcgaagaaaaggagcagggaagaccccaggacacacaacacaagaggcgaggaaaagaggaggcgcacaagagagagggaaaaaaagcagaggaggaggaaaaccagaaaaacagggcacacagacaaaggaaacagcagaagacaagaaagcagcaaaggcggaagcaggcagcaaaggacaccagggaccgacacacgcggaagcaggccaggggagggaccagacccaaggacacagaacaaccgggccgcagaaacaggcaagcacacagagaaaaggacgggggggacaggaaaggccaggagacgagcagcacagaacaacgagacaaaaaacgagaaaaagaacaagccgcaacgacaggcgaacaagcagaaaacgagacaacagaaaaagagagccccaagggccggccccaaaagccacacgagcacacgacacccacacgccgcacacaccaaccccaggccaggcgccagcagagagcgccagcaaagccggcggaaaaaaggcaagggggaaagagaaggcaaacagaggacacagcaacccaagaaggccgcggacgacgcagagcaagcagcgcgacaaggaacgaagccagcgaagccagggggccacaacacccccgaaaggccaagaaaacgccaaagaccccggagagaagccccacgcccaggagcagagcgagagaaggcaaacccgggggagagcgaaccgacagcccaaacccccggcagcagaacaagagggagaaaccagcagaaaggaaaggcagggccggaacacagaccggcaaacagaacaaagaaggaacaaacaccagcaaccacgaaaagaaaagacacaagaaacgacgagggccgaacaaccaccaaaggccacccccacggaaaaacaacgaaggcagcaacaagagcacacgccgaaacaacgacccagcaccagccaccacccggacacgcagccggcagcaccccacgaccagaaagaaaaaagccccccccaaacaccccagaaaagcacacaaaacaccagcaggcgacaacccagaacccaagccagagacggagaaggcaggccaccgcccacgccacccacggagcccaaacacacacacaaaaccagaacgagccccaaaaaaccacacccaagcaccacaccagaaagacaccaaccaaccagaccccaaaaaagccaaggcaagaaacccgccgcccccaaaaaaacacgacccagaggacca

SEQ ID NO: 382 - RNA, 3861 nt, Homo sapiens
cgggcaccccccccaggacagacggaaaccccaaacaccaggcacccgaagcccccggcaggccccaacccccagccacccgcaccaacacacacaccacacacacacacgggcacacaccccaaaaaaaacaggagggaaagaagagccaaaaacaacaaagccggcacaagagaggcagccaaaaaaacagcaagaacagaaaggacccaaccaaaaacgcacgccccccacgaaagcagaagaaaaaaaagaaaggagagcacacagaagaaagcagagagcaaagcggaggcaggaaagagcgagccaacacagggagcacagccggcgcccaggagccacccacaccccaccagagccaaagaaagagaccacagggcaccggcaggccaaaacaagaaaaggaacaaaaaccaaaaaaaacgcacgcgaaaagaaacaacaaggaaagcagaaccagcaagacagcggccccaaagaaccaggacaaaaaacaaaaagacgaaaaacgcgcacgcaaaccaccccagagaaaagaaaagaaacgcacacaagagcaccgagcaaaaacgaaaaaaagagcgggaccagcgcacaaaccacgacaaccaccaaaagaaagaaaaagccagcaaaaaaaaagccaaagccaccaaaaagaggagaaaaagaccccagcagacaagccagaccaaacgaacaccgccccaggaaacagcaaaacgaagaaaaaagggcaacaccaccgcacacaagcggaaagccggcaccagagaaaggaccaggggaaaaaaaaccgcaaagggagcgcaaaagacacacagaccagaacagaaaagaagcaaacaggcacagacgaaacaagggcgcacacgaccagcaacgccaaaacgcagcgcaagacagaagcaaaaaaaagaaagcggaccggagggagggggacgccccagaaaaggaaaaggaagcccaaagaaacacgcgagcggaaaagagccaacaaaagacccccacaacagggacccgaggcgagagcagccaacacgcaggggcgaagacaacaggaaaaagacccaagcccaaaggaagcgaccaagcagacaaaaagcaccacgcccgccaggcgaacgggacggcaaggcagcaacggggccgggacaagacgcggacgcgagaagagacaagaacgggacaaagaggacaggggccacagccgcaccaacgaccaaaaagaacaaagcgcagagccgaggaacccaagaccccaaaccgaacaaagacagaaagcaggacaggcaccaggccaaaaggggacccaagggagaagagcagacgggggcagaaagcgcaaaaccgcaacaaaagacaagggcccgagaccaagccgggccaaaagaagcaaccccagagggcaggaacagcccgcacaagagaaggcacagcaccagggggccgggacagagaaccaaacagggagggaagagaaaagaaggacaggcgccacaagaaaaagccaccccaccccagacccaggacacccacgcagccgcccccgcaggaccacccagagagcgagacggggaaaaccagccacaaaaaaagagaaagccccacacaccaaaccagagaagccaaggaacgcgcaaaacagcagcccacaacaccacagccgagaaaaaagacacaaaaaagagaccaagacggcacaaaacaaaaaccccccaaaaccgcccgaagaaacgccagacccagaagggaaaaaaccgcaaacacccacgacagaggacacagcggcccacccacgcaggggcggggggggcagcacccaagcagagaagagaagcaccccccgcacaccgccgaagccaaaaccgaacagcaagcagaaaccagcccgcccaagcagagagggcaggcccaggacgcacaaaggcaaccgggggaccagacagagacagcccagcacgcagagagcagcagggggggcgggacaggggcagagaagaaaaaggcaccaagcccccaggagacccacacacaccagcggcacagaaacagacacaagacagagacacagacagccagaacagaccgccagccgaagaaaggcacaagaccccaacccccccgcccacccgaacccgcacccgaagccgggccacgggagaggccggcgcgaacaagaagaacagaaaagagacggaggacagaaaccggcgagaagaaaaaccagaaagggcacagagaaaggaccagcccgaaacacacagccacgacggagacacgccacacacagaaacagacgaacaacccaaagcgcgggccgacaaaggaaggggaggacagaaacagcacaacgggaagaaaagggagacacacaaaagaaaagccaggaaaggggcggcagagcacggaagaagcagaacagaggcgccacacccgggagccacccccacaggggggacgcagccccaaggccccgagcccaacccaaggagaaacagaaaggaccagacgaaccaaaccgagggccagacgggcacagcacaccagaacaaacacgggacaggcggcaggagagggggaggaacagaacagccacccaagccgggggaggagggcgaagaaaacaaaagacaagagggggaaacgcccaaaaaagggcacgcgcccagagggagagggagaggagggaaaacaacaaaaccgcaaacaccgcagaaaaaggagcaaaagaaaaaagaaagcacgaaccgaaaaaaagcaaagaaacaagagcaaacacccccagcgacaagggagaggaagggcacgcaacaaacaaggacggcagcgaggaaggggacgagacggaccgaaacaaagggaagagaacgcagcacgaggcccgcaacaaacagcagggcagaagaaacaagagggcaaaagacaacacccggccggcgcaaggacgggaagaagcaaagagaagcagccagacaaagagaagggaacaacagagcaaggcgagacacgagcccaaagcacagggggagggcagcagcacaagacgggaacacaaaaaagaggaaaaagcagaaaagcaaagaaaaacgaacaagcacaaagccaaccaggcaaacaggcggaaggaaagggggaaacacgcaagaggggagcagaagagaagccaggcaacaggcccccccacccagccaaaaaagaaagaaaacgaccaaagccacaaacagaacaaacaggcagcaaccccacgaggaaagaagagcacggagaggccgaacacgaaccggaaagagagagagagagagggaggaggaaggagaaggcagggagccaggaacggggagcacaagccacaagacaaagaagggcgccagacaggacagcacaagggaaaccaccaggaggacgggaggccaaaaagcaccgacagagccagcagagccgagaaacacagcggggccaagaaggaaccaagcccccgcccaagagggaagggagcaacacacacgaggcaccagcacagagacagccccagagaggggccagacccccgacccagacccagcacagacaaggcgccaagcaccgacccacgcacagcgcaggacagccccaaccaaagacaccccaaggggggaccccagggaaaaggaaaagagagaggaaggaaaggacaagaagccccacaggagaagggagagaaggggcaggcggccgaggcggcggggagccagccccagaagcacacagcagcaaaagaacaacacaacagggccgccacgccgggcaccaggagaaaaaaaaaaaaaaaaaaaaaaaaaaacagcgaacgaaaggcaaagacccgcccggaagcga

SEQ ID NO: 383 - RNA, 174 nt, Homo sapiens
gaacagcccaaagccccccggcaccagcccgccaccacggcccaggcgaacccgcggacggacccaaagcggggaggccacgggccgaaaagcaggagggaggaggcaggcgcccacaccccagcccccagggggaaacagaaagcacggccaacccgaggcaggagcagccac

SEQ ID NO: 384 - RNA, 10975 nt, Homo sapiens
ggaaaggagagggccgcaccccaacagacccggaagagacccgaagagaaacggaaaccgcaggcggccacacccgagcccgacgaggcggggcccaggggcaagaacgcagccagggggcgccggagacggccaaaggggcccagagaggccacacccccagcccccccaccgccgcccaagaaccccgcccccccccggaaccccggcccaacgccccgacccccgcccggcagggagcgagacccccaagagggagaggccaagcccccaccacccggacaaaggaaaccagggaaggcaaaagaaccaagcgccaagcaccagcggcaaccagaacaccagcggggcgcaggcgacggagcaccggggcacgagggcacaagggcacagcacccaccccagcccgaagcccaaggaggggcagcccagcaccagagggaccagagaggccaggaggagaagcgccaagccacaggcagccggccacaggaccacacgccccggaagacggagggcacggggccccccccaggccagccgcccccccccccgggcggcccgcccagccaggcccaccacagccccaacaagccagcagaccccccacggccccacccagcagcagacggcagcacacacgcgggccaggaacaggcccagaaagggccccacgcaccgcccacagggaggaaaccggggagaaacgagcagccccgaagcacaccacgacaacaaggagcagcacaaaagacccagcgacaaacgggagcaacaagaagccagccaaaaccgagaggggacccagagccggcccaccaaccccgaggcgaacccgcccggagccgagcagccgggggaaacaggaggggggccaaaggcacggccaaagagccagcgccgggcccccagcccccggggagcgaggcgacccagcccggcccagccccccgacacagaagggcaggagggacagggggacaggcaccccacccaccagagccccaagccaacacccacggaaggccgccgccggccccacacgggccagcgcgcagggaggcaggccgggacaagcaaggcgaccacagagccgcaccagagagagccagggaggggggcgagaaaaaccaagacccccacaacacagggccagcacaggcagcccggccagggacccggagcaccacccagcccccagcccacggagcccgcccccaaccccagcacccaacaagcacgcacccggaagcacccaaacaccggaccaccggaaccccagaggcggagacccaaaagcaaggaccagcccaccccacgaaaaggcggcggccgggcaggggccacgccgaacccagcacgggggccgaggcaggcagacacgaggcaggagacgagaccaccggccaacacgggaaaccccgccaccaaaaaaaaaaaacaaaaaaagccgggccggggcaggagccgagcccagcaccaggaggcgaggcaggaaaggcggaaccaggaggcggagcgcaggagcgagaggccacgcacccagccggggacacagcgagacccaccaacaacaacaacaacaaaaaaggcgcccagacacaggccccaaaacacacgaaaggaggaaggggggggcagcacaaacggagggacgaaaacacacagaggggaaaaaggaacagaggagggacggagggacggagcaaagagcaaaccacggcaagaagcagaggcaccggacggggaaggagcagaccagaacccggcggcgggcgcccgaggggccgccccgcggggacgccaccgcaggcaagcgacagcggcgccggcggcacggcgccagggaaaccaggggaccagcaccgacccgggaagcagccccacccaccagggcagagagccaacaggaggcaaaagacagaggccgcagaggaaaggcggcggagccagagcggaggcccgggccagggacacagccgggggagcacggagcggggaccagggaggaaagacacacggccaccagcccgcgggccaccacggggagcccaggcgccgacaccccaccaccaccccagcccaggccggcgcccaccagccgcagccaggcccgcaggcaggcaggccaggacgggagagcaagggcccagcacgagccaccagaggggcacccccggccaggcaccggaccaagcacaaccaaaacacaacgacagccccaccaggaggcagaccacgaccaaggagaagaaacagaggccagggcaccaaccgcaaagggagccgggacaaacccaaaacgagacccaaaagggcccccaacgccacccgccccccccacaccacaaggccacggacccggcccagagggacaggggagggggacaagccaggggagagggggaaagccaggaggcggggccccgccccagcaaggaaggaagcggcagccaccaagaaacacacacccccaccacacccccgccacaccccccgcccaccagaagcccccaccaacacgcagcaccggagccgccaagaacccagcgagagaagccggggacaagagcggcagcccaaaaagacaaacccggaaggcaggagaggcgaggcagcagggaggccagagaaagagcaaaagccaggagggcccagaaggcaaacggacaaacaggagaggcccgggagaggagacaggaggggacccggcacccaccagggcaccggacccccaccaggcacacaaccacacccagcagaccccaacaaggcacaaagcaagcaggagggaacccaagagagagcagaacgcaacaccccacagagccaggaaacgaggccagagaggcggagagcccaacgacaggggcagagaagaaccagacagaccaggagccagagggggggagggggggcggcaagagaggcgggggggggcagcaggcaagcaacccggaggccccaccccagagaagcaagggggaggcaaggggaaggggaaggaggacaggagcagagagggaggagggaagcaggggggcggcaggggccgagaaccccaggccgggaaccaggggccgcgaggcggcccaaggccggggcccacagcggcaggggcaccaagcgggccaggccggacagggcggcaccgaccagcaggggggagggccagcccacccgccagccggccgccagcggggaagccaagaacccagcccccaacccaccccgggaacaggacagcaaggccccaggccgcgccaggggagggggcgggcggcagccaggccaggcgggggagcgggacccaacaacccaggaagcagcccccccgcccgggggagggagcagcccacagggacccgaaaccccaagaaagaccacgccgcgcaccaccccccagggcccagggggcgggaggggacagacagacacaggcggggaagcgcaggaaagaggagaaaaccagaccgcaggagggggggggacaagaagcagagagagggcgagcggccagccaagcccacagccaggggaggagggggaggcagcgagggcagacgggcccggcccaaaacccagccgagcaagggccccagcaagacacccccccacccccagacccccagcccgcccggaaggcccaagaggaacagcaccccaaacccagggacgcacggccccaaaaccaccacccagaacaccccagaagccaggggaacagcagggaaaacagcccaccaacccccaaccgcaggggccaacgacggggcccagagccgaaggccccaccccaccccgacaaacacagaccaccccacacccaaaccgcccccaggaccgcgaagcaagcagaccaaagcaaggacagcaaaagcaccaagaggacagccaaaccccaaaccgcaaaagacagcaggaaaacccaagcaggagagaggcgcacaaccacgcggccccacccgacagacaccgagggaccggcaacaccccccccgcccgaaaaacccacacggcccacgcccagggccggaccaccacaacccgacccccgcaaacgaaccgaagaccgccgaggcaagggccccgccccagggccgggacggccagggagggcggaaagaaggaaagcgccacagaggaggaagagccggcaagggaagcacaaaggcaaacgcgacagaagaccgcgcggccaaccaggccgccgcagagaacaaaagcgcgaaaaaaaccaaggagcggggccaggcacggggaaggaagcaaaggaggccccgccgccagggaccggcaacgggccagcacagaaacccgaagaaacgaggcggggagggccgcccccacgcacccccagggacaaggacagagcgagaccccagcggccagacacaaagcccccaccgaagccccacccgcggggagggagaacggacgccacgggaagaaaaggaggagaaaaggcccgcaggaagagaaaacccaagggcaacaaaaagcaggaacaaaaccccccccgcaaacacggacccaggagagcccaacggcccaacaaagacagaaaacgagaaaaacaaaaaaccccacccgacaagcagagaagcacggagggggaggggaagccgaacccaggcccggaccagccgccgccaacagagcccagacgcacgagaggaagggggaggcgaggcacgcccccggcgccaagagccgcccccagggaggggcggggcgggaggcgacccgcaggcccagcaggagcacgcgagggcacagaaaggggagggagagcaggcccccacccgggcccggccaaggcgaggccgggccgggccgcagggggaaaagcgggaaccaaaaaacagcaggccagcccgagccgcagcgggcaccgcaaaccgagggcccacagccgcccacgcagagggagcgcagagccccaaagaccccagggaaagagaaagggagaacgcagcgcacacaaaaacaaagcagcaaacacacccacacacaccaggcagaagccagggggccagcaagccgcagggccacaagcgaaaacaaagggagcggcggcccacagaagccccagaagccgggaaagcacccgcaagccacggggggcggaaccacccgcaggcaggacgaggggcggcagccagggaccacagccccgaagcgcccccgagccccacaggccccccccaagcacaaagagacgaacccccccacaccacacggaccccccgcccccagccagagaaaaccccgccaaagggccgggacgaaggccccaccaaccacccggaccagagcaacgacaccaagagcgaaacccgccaaaacacagacagggcgagcacagcaggggcggaggaaaagggggccaaagaacgccacacgggaagcaaaaggcgcacccaaaggccagacaggcccaagagccaagagggcaacccagggagggccccccgccccaggagcgcaaaggaaaggggacacggaaggggggcgccgggccccgcccccccccccccccccccccgagccacccgggccagacggagagggagcccgccaggaccccaggacaacgccgcaccccccccagaccagccacccacacccccgcaagccccgggccgccccccaacccgggaccaccccccgggacacgacggcggcacaccgccgccccaccgccacggagccggcgccaccagcccccacgccgaacgcccccccacccagggacaccccaggccaccgccaggccccggaggcaaccaagagcgcgaccgcggaacccaacacccacccggggccaggagcaagcagacaccagcaaacacgcaggcgcaccacgacagggccacggcaaggcccccgccgccccaaaccgaggaacgcccgcgccgcccagcaaggacacccagcaccccccccagcccgagggcaggaccacaggagaggaagcagagggggccacaggaaaaaggccagcacgagcgcacgcccccgcccccaccccaccacacacggcacacaccacaggccgcgcccggccaacgcggggagggcaagagccaccacccaccagccaccccacaaccgggcccaaccagcggccccaggagacggcggccaaccgaacggaacgccgcgggaaacaggggcaaccggccacgcaacccccccccaggcaaggacccgcccagccccaagcagcgagaacaggcacccaccaacacaccagcaagaagagagacggggcaccgcggccagcgaccgaacccgacccagggacgcccgcccagccccaaaggcgggaacaggcggacccaccacgccggccaaccaccgcccgcaaggccagcccccccagagacccacccaccccggggagccagccgaggacaggggcgaagaacacaacccagcccgagagccgagagaaaaaagacacaaacccggaaggaagccgcgcccgcaaagcagaagaaacacgaaccaacagcgcagcacagagaaggaaaccgaggaacgcaggcccaggccaaaagcagggggagcaggacaggcccacagcccaaccggacaccccagcagcacccccccgccccccaggaagcgggcccgcagccaaggaggccgcggccgcaccaaacacccccggcccccaacacagccagacaccccggaagggggaggccccccccaccaccagcccccagagacagaggacacccaagcccagccaccgcccccaggagcaggaagcaccccaacagaccccaccggaaccagccccaggccaggcgggcaggccagccaacagcaagcaggaagaacagccaaagcgccagggcagacgggggagggggcaggacagagagcccagaggagcaagaggcccagaaggagaaccgaagacacccgcagaaggggagacagcgaacacaaccagggagaaaacacaccagaaaacacaccgcaaggcgggcgagaacacaacaaacacaccggagaaagagaacacgcaaaaccccagaagacccggacccccccagcaacacgccccccagagggaccggaggaaccccaccacaaaagcccgaacccagaaaggaacaccaacagcaggccagaccagcaccagcaccgcagagacaccacgagcagacacacaagaccccaggcacccccacacccagggcgaccaaggagcaggacgacacaaggccgacagaacccaccagaaaggaaggggaacagcagcagccacacagcaggacggagagacggaacaaacccaagagagaaccagaacagaccccaccaacaaacacagagaccgccccaaaccagagacacagccggaacccacaagggagaccgcagggggccgggaacccaacaggagcacccaacagccccaccgggggacagggcaaggcagaagaggagggggagcagcagggaggagggggagcagcaggaaggagggcgccaggaggcccagacccaggcagaaaaggcacaggaagagaagaagaggcacaagcagccaaaagaagccgcgaggcaggcgcgccaggcacacggacaccgagacaaaccaccaaaagcagggcaaaaggacaacaaacaaaccaaacaaagggcgagcagcccacgaccaccaagggacagcgcgcagccagaggcagcggaacgaagcacgggagcagacgggcggcgagcaagaggggcccacagcaggacccggaaagaaccggagggcgggcaggcgggacgggcagagggaccccccgcgccgagggccccccccagggcccccacacccccagcgcacccaagagggaccagaccacacacagcaagggccccagaagaaaaagggaagcaccaagccaaaagaggacggcaaggcggcaccacggacaagcgcaagggaaacaagccggaccagacagcacgggaaggaaccagaagggaagaaacaccagggccacggagagagcgaccacccccccaaaaagaaaacagccaacaacaaacacacgcaggcacaagcccaaaagagacacaaagaaacaccacggaccacacacaagaaccagccacgagaagccgaaagggaaaagcacagagagacgcaaccagacccgagccaggcacaaagcaaccaacccacgcccccgaagaggaaggccgcagacacagaaaagaggagagcgaaaacaaaccaccccaaacagggaaaacaacaaaacaaacacaggcggacagcgggaagcggcggggccagaagcgagcagacggacgaggaaggacagcaaggcccaccacaggcgggccgggcgggaggacacaaacaagcggaggcgcgaaagccagggccaggcacccacggggcccacagagccccaacaggcagccccaaaaagcggacgagacggaggccggcccaggcggaacgcaagacacgacggccacgcaacccgcccccagacaagcaaccgcccaacccccgagagcgggaacaggcgcccaccaccaggcggcaagaagagagaggggcccggggccaggcgggcaaacccgacccagggacccgcccaccgcccccaaaggcgaaaacaggcagagccaccgcgcccggcaagcggagacaggccaccagcaaccaaaggcaaaccagagagacagaagcgcgcacccgaccagaacggaagccagcaggcaccacccacagaaggcagaaaaaggccgcccaggacagcaggagggagaaacagccacgaaggaaagggcaacaacgagccaaaaaaccaccaagcacccggacaaaaaacacccacaacaaaaaaccaccgcaaagacccccaaaaccacaaggcacagaaggcagagaggcaggacccaaacaaccacaggaggaggaagcccagagaacccaggcacaccaagacacccacagagacggaacaaagagacaagacgcacggaccgcagcagggccacaccgaacccagcacgggaggccaaggcagggacaccgaggcaggagcaagaccagccagccaacagggaaacccccacaaaaaacaaaaaaagggcaggggcaggcaccaaacccagcaccagcaggcgagacagaagaacgcgaacccaggaggcggagggcagcaagccaagacacaccagcacccagccgggcaacaagaggaaacacggcaaaaaaaaaaaaaaaaaaaaagacgcgcacacacgaacaccaagagagaaggcaaggagccacaaaacaccacaagagaggggagaggaggcacagagccagacggccaagcaacgaaaccacaggccaagggccaacgaagggccagcacgccgggaagacgggcggccgccagacggccacccgaacacccccaaaaaaaggcgggaaggggcagcccacccaaaccacgaaccacggggggagggaccgggggaggaagaacagggggcaagccccggcgcggaaggaaaagaccacgagacgaggaaaaaaagaagcacaagccacccgccgccaccaccacgaaaaggacgccccggcccgccagaggaggcccccagccagggaacgaagccaaaaacccgaaagcccagccaggagcacagcagggaaaacagaccaaacaccgggccaacgagagcagcgcccccaagaagggggccaaaagcccacacacacgacccgcccaagcgggggccgacaaaaaacaaaaaacgggggcccagaaccaggggccaccgagcaaaagcaaaccaaacacacaagaaaacaccacaccaaggaggcgggaaaacgaacaagaacagaagcccggaagaagaggacggaggcacacccaaaagaaaagaaggccagaagcagcaccgcacaggggccagcaaccgagccaaagaacggcgcgaagcgagcacgaggcacaccgaaaacagagggccgcacaaaaaagaagccagaacgagaaacaaaggcaagcccaccgggacgccgaagccccaacgagaacgccacgggaggcgagaagaaaagcagaacaaaccagcaagccccggccgaagaaaagcgaaagaaagcccaaccacccgcacaaacagcaaaaaaccaacagcacaaccaacagcacaacagcgcaaaaagagcccaaaccaagcaaggcaaccaccgagacagagcaccgcacccaggcggagggcagggcacagccagccacgcaacccgccccgggccaagcgacgcagccggcccccgagagcgggaacaagcagagccaccaagcccagcaagaagagggacaggacccggggccaggcggccgaacccgacccaggacgcccacccggcccccaaaggcggggagaggggagccaccggcccagcccaaggcacacagccacaagccaaggacaagacaaccccaccacgaaaaggggccccccccgccaaaaaaaccacccaagccccaccagcaacccgagaacacagacccacaacaaacccaaagccacaaccacccaccccagccaaagccacagacaggcggaggcagcaccgcaggaagaaaagcgcacagcacagcagaaagaaaccaccccaaacagggcaagacaacaacaacaagccgaaagaggggacagagacaagcaggcagccaccaggggccagaggcagcaaggggcggggcgaggcagccaaagcggggcagacaggaggcacacgcggggcggaggcggaaccccaggaacccacaaagcagccccacaaggcagcccagggagcgagccacagcagcgaagcccccgacagaggcccaaaggaacacagaagcgcagggccaaccagccggaaacacacaggcacgccacacagcaggcaccccacaccacccaggcaaagggaggggacaaggcccac

SEQ ID NO: 385 - RNA, 4442 nt, Homo sapiens
cagcccacaagaaagaagaaaaccaaaggagaacaaaaaaccacacgagaaacggaaagaaacacccagcccaaagaggcagggacgaaccaaaggaaagaccgaaacagcagaagggagaaccagcccacccacgcaaaagccccaccacaccagagaagcaggcggggcagccagggaccggcaggagaaaggcggggagcgccggcagccaagcccgagggacacagaaaagggcgaaccagcagcgcagcgaaagcaaggggaaaaaggagagggggagggagacaaaccaggggcccagagggcgaaagaacggagaacaacaccacgaggagccagaaggccccagaaacaagggagggcaagaacagcacaagaaaagaaaagacggaagaggcaccaggagaaggagaaaggcagaggaacacacacgcacccccaaaaccccgaggaagagccagcacgacgacagggacagaaacgaaagcaaggaaccagagacagacaaaaaacccaaaaacaacaacccgaaaggaaggcccagggaagggagacaccaacgcagaaaaaagccaacccaagaccacagcagaaaacagagaaacgaaagaaacagaggggaacaaagcccagcccaccaaaggaagcaccaggacccccaccccacccacacaaacaagcccccacccagagaagcaccgaaaaaaaaaaaaaaccagggcagggggcgaagccgaacccagcagggaggccgagggggaggacacgaggcaggagcggaccagccggccaacaaggaaaccccgcacaaaaaacaaaaaagcagggcaggggggcaccaaacccagcacgggaggcgaggcaggagaacacgaacccaggaggcggagggcaggagcgaaaggccacgcacccagccagggacagaggagacccaccaaaaaacaaaaaaaaaacaaaaggcaaaaagccgaagaagagagccaagagaccgaaaggaagccaagaccaagcaccgaaaagagaccaaaccacaaaaagaaaaggcgagcaaaaggaaaaacacaacaacaaaaggaacacgaagcggccagccccgaacagacaaaaacgggcagcagacgaccgaccgaaaggcagaagggaagccaccaaaaaagcaggaacacaaacaagggacgaaacaaaacgaaacaccaaaaaaggaaaaaaaaagaaaagaaacaaagacaaaagccacagaagaccagaagacgagaaaaacacggcgcgccaggacaggaagaaaagcaacacgagagaaaagcaaaaaaagaaaaagacaaacaccaaaaaagcccaaaaacagccaaaagaagagaacaggagacagacagaaaaagaaaacccacgaaccgggacaagccgaaagaagaacacagaagggaggagagagcagacaaacaaccccaggggcggggggaggaaacaagcgagagcacaacagggaaaagggaccacccacaagcccacacagacacacagacgggccaaagagagaaaaaccaccagagcggagaaaggacaaaaggagggacaaagggaggcaccagacaacgaggaaaaaaacaaaaaaaaaaagcaaagcaaaaaaaaaacaaagacagaaaacgagaacgaaaaacacaaagccaacaagaggggaggaaaaacaaaacaaaaaaaacaggagcaaacgagcaaaccacaagaccacaggaaaaaaaagacccagggaacaaaccgcagaagaacaaaaaacaggaccacaaaacacaaaaagaaaagccaaaaagaaaaacaccagaaaagaaaagcaagaagccaaagaaaaacaaaaagaaaaaaaaagaaaagcacagaggaaagaacagaacagagaaagagaagcaccaaaacaaccgaccacaccaaaacccaaagcaaagccaaagaggcaagaaccaggagaacaggacaaaaaaaaaaagcgaaaagagacagagaaccagaaagaaaaggaaagacacccaagcggagccaggacaacacccagaaaacagacgaaaaacgcgcacagaaaagggagggcaaaggccacgaaagggggcgccccagaacacaaagcaggcgcaaaaccacagccaacgcaagaaagacgccgaacgcaacaaacgaaaagcaaaaaaaaagaacaaaacagaaaaaaaacaccgaagacccagaaggacccaagggaaaaacacagcgcgaaagaaacacaggccacggccaaaagaaggacacaaacggcaaaaaaacaaaacagaacagagcacacggcaaaccacccgcaggggacgcgcccaacaacgcaagagccagggaaaacgcaacagagggcacaaaacgacagacagagacagagacaagaaaaaacacaagaacaccaaggcgcacacagacaaggacccaacaacaggaaaaaggggggaccaggacagagagaaagagaccagaaaagaacagaaccaagccaaccaagaaggacacgacaaggcaaaagagaaagagggagagagccagaagaccaaaagacaaaaaaaaaaaacacaacaaaaagggagggaaaacccaaagggccaagacaaaaaacaaagaaaaaacaaacagaaccaaaacaaaacccacaacaaacgagacgagcgcggaaacaagcgcaacgcgaaaaaagagaacaagggggcacagaccgcccacacgaggaacccgaccacgccagcgggcagaaacaagacaaacgcgccaacaaaaagccgcaaaaagagacagagaaagggccaggcacagagcccacaccgaacagcagagaggccagggggggagcaagccaggagcaagaccagccggggaacagggaaacccaccacaaaaaaaacaaaaaagccagggggggccgcaccgagcccagcaccgggagacgagggggaggacggacccaggaagcagagggcaggagccaagacggccacgcacccagcccgggacagaggagacccgcccaaaaaaaaaaaaaaaaaaaaaaaaaaaaaaaaagaaaagaaaaagagaaagaaagaaaagaacagcaagaagaacgccagagagggacgaaaaacaaaagacacccagacccgccagcaagaggccacacagcacaccgagcaacaagccagaaacagccaagaagaccaccaccaccccacaaacgcgggaaccgcgcggcaacaaagcagagcaggcgcaaaccgccagaagcagaaagcaaacgaggacaccaaaaccacggacacaccagcaaagaagacgagacacagcagcacaagagaaaaaacaacaacaaaaaaagcacaaaaaaaaaacaaacggaccgacccgagaagacaaacaggaaacaaacaaggccagaaagagacggcgaaacaaaacaaaaaaaaacccaggaaagccaggaaacccaaccaaaaaggcgagaaaccagaacggccagcaaacagaagaggcgaagccaagaaacaacaaacacaggacagaacaaacacagagagaaccacaaaccagagacaaacaccaaaaggacggcaaagccagccagacaaaagcccacagccagccaaaggcacagaaacggagcggacgaaaagcacacaagaaacgacaaaacccacaaaaagaggaagaaggaaagcacaagccaggcagcacagcaaaacaccaccaaagaaagacgagagcaaaccaagcccaagaacacaggcagagcaaaaaccacgccggagacgaagcaaaggacacaaagaaaagccagagacggggaacccagccggggaaaaaacaggaagcagaaaaaaaaggaggacaaagaaacaaaaacaagagaaaagaacagggaaaagcaggcccccagggacggagggagccaaaaaaaggacaccccgagaagagccaggggaaaaacgcgccccgagcacgaggcgagaagcgcgggaggcccggggagaggcgaggacaaaccagggaagaacgccaaaaaaagccgggggaacggcagaacacagaagagaaaaagaaacgaagcaaaagagaacacaaggaagcaaaaaaacggggacaaaaacagggagccacgaagggcaaagaaaacagcaaaaaaaaaaacagagaggcaaggagggagccgcaggccccccgcagaaaaacaaagaaccaaacccaggaaaacgggacacgagcagaccgaggacgacacgcaacaggaccggcccgagggacaaagcaaacaacgaccggggccaaggggggggagacggagcgccgcccccaagcggaggcaggggcaaccggcacgcagccccgccccgagcaagcgaacccacccagcccccgagagcgggaaagaggggcaccaccacgcccggcaagag

SEQ ID NO: 386 - RNA, 24733 nt, Homo sapiens
caggacaaggcaacagagagagaaaaaaaaagagcaccaacgacaaaacgagaagaaggacggaacaagcacacaaaggaaaaagccacgccccccaaccgagcaaagaaggaaaaaccaggacagaaaagccccaagagaagagacacggcaaaggggaagggaaagcagagcccagcagaaaaagcaagacaagaagacaaggaaaaaccaccggacgaacacagcagaaaaaacggggaaacaacagacaagcaagcaaagcggagaaaaaacccacaacaacgaggggaacaacaaaacccaaaaggaaaaagagggaaacagaggcacagagcagcaacacgccaagccacacaacagaaggaaaaacagggggcggggccacacaccgaacaccagcgacggcaagaccaaaacacgacacaggcagaaacacaaagaagcacaagccagaagggagaagcacaaaaagcagagaaagaaaccacagcacacaaaaaccagaaagaacacccccaagcccaaacaaaaagacagaagacaagggaaacagcacacgaggaaaggaaaagagcgccacacacacaaagaagcccagcaaagacagcacagaaaaaagcggacaccaggaaccaagaaagagacagcggcaagagagccccccagcaaacgaaaagaggccagggaaaacagaaccccggagaaaaaagaagaaggaaaagcacaacagcccgagggaaaagaaggcgcgccagccgccagcccgccaagaaacaaccccaacagcaggaacgcccaagaggggggacagcaccacacacagccccacgcagggcaggccgagcaagcgccggagaagcacggggccaaaccacaggaagagggcggaaagcacgaacgccagcacagggcgaagagagcaacaaccaaagcaacaaaccccagagcacaaaaaccaggaggcaaaacaggaccaggggaggagcaaaaaagaccccgcaaaaagacccccagagcaaaacagaggccaaggccaaaggaaaaaaaaacacaaggagaaagggaaagaacaacaagaaaggccagccgccacaaccaaccaagccacaaagaaacaagagcaagccaagcaaacgcaaaaaaaggaaggaaaccgagggaaaaagcaaaccacgcaaggaaaagcacgaacggaccccagaaccggcgcccccagggcgcacaaacggacaagacccaggaacccacccacagccaacagggccagaaaaacgaaggcgagaacaggaacaaaaccccgagaaacaaccagcccgacaagagcggccaagcagaggagacaaagcaagagaaaaaaagaggaagggcgcacagcagagagaaaagagaaaccaggccacagacaaagagcccgaagccaggaaaaaaaaaaagaacagagcacaaaacccacagacaaaacaaagccaacgggacgaaaccaaaaaacaccaaaagggcaaggaaggggcagaagaacagcgagaacaagaaaacaggaaacaaaaaaagaaagaaaaggcagcagcaacgaacggacaaggcgagagcaacacaaccaaagcaaggaaaagaacggcacggacagaccccgccaaggagaagaccagcgaggagccagaaccacccaggcagaaaagcagcaaggagaaaaaagacagaacaaaaaacccaaaaagaagccaagaagaaagcagaagggagaaaccaacgggagcaccacgaccccaaccaccacaagagacagcacccaaggccaacccaaaagacacagaccaagggaagaccggaaaggcgggacacggcaggacaacacaaacacccccacaaaccacccaagcaagcaaaccagcccagggacgaccaaaacacgaaccacagagacagagaacaccgcagacaaccgcccagacccgcaaagaaaaaacagcacaccaccgaaaaagaggaacaaaagccaaaggagaagaaacaagggcaaagagaaagaacgccaagggggaggggcgaaacagagcgcccacacccaggccgggcaagcgacccgcccagccccgagagcgggaacagggcccaccaccacacccggcaagaaaagagacagggcaccaaggccagacggccaaacccgaccggacgcccaccccacccccaaaggcgggaacaggcgaagccaccagccccacccaagagggaaaagggacccccccccaaggccaaacgagcaaaggaaccccggggacacagagaggcgaacaaaacagaaaacaccaacagacccagaagaaaaacgcgaagggacacgccagacgaaaacaaggagaagaaggaaaagaagaggaagagaagaaaaaagagaagaggaagaaggaaggaaggaaggaaggaagggaaggaaaaaaaccacaacccgcacagaaaagaagcgaggcacacacacagagcaacaagacacgaacaaaaccgacaacacagggaaacagcaagggggcacaaagcacaaaccagggagagagggcggaccagccagggagagcgcgaggccacccaacggaagaagcagcagcaacggggcggaacggccccgggaacccgcaaacagagagggagcccaaaacgggcccaaaccgagaacccgcaaagacagcacagaacgcaaaaacccgacagacgcacaaaagcccgaagagaggcaacaaaaaggcacaaaaacaaaaaggaagaaagaaacaaaaagcagcaaagagaaaagaaagaaacaaaaaagaaacaaaaaggaaaggcaacagaaaggcaacaaaaccccaaaaaggcaaaaaaacagaaccagagcggggaagaaagggccgacagagggccgccaggcaccacaggagaacaacggggcccaaaggaaggcacgaaggcagcagggaaaggacccaaaccaggagggcagcacaaccgaaggcggggcggaggccacagggcaagacgaagccccagccacagcaggccccacaggaacggccaaagggcaaaacaagaaggcaacagaggcagcgcagcccgcgacccaacacaaaaggacccgcaccgcccaccaggaacaagaacagcaaggagaagaacacaaggacaaaaaccaaaagcagagaggaaaaggcaacaggcaggccacagacccagaaaggaaacaccagcagaggccccccccccacacacacacacaacacacacacagacaccagcacacccaaccgccagagaacccgaaaacaggggcacgaggccaaaagcccgcacaccaaaaggaaagaaagagaagggacaacgcccacccagaaaaacaaagaaggagccaaggcagcaggggccaaaaaacacggcaaccgagaagaggaaaaacgggcggagggaagacaacaagcaaggaaccaagccagaaggagaaccagccaaagccacagcgaaagacccaaggaaagggagaaagccggggccaaagaaagagaggaaaaccaggacaaaggagcagggagcaccccaggccccaaagggcaaggggcgggccccacccagccgagaccccaaggcaaagcggcaaccaagcagcacgaggcaggagcgccggcagaaaagaacaaaacaacagccagaggggaaacccgaccggcccaaggcgagccaaccaacgggacacaacaaggcaaaacagcgaacgcaaacccaaaacagagcgggaaaaaaggaccaggcacagacaaaagcgagagaaggaaaaaaaaaacgaaaaaaaaaaacaacccaacaaacgggcgggaaaacggcagccaagcagaaaacgaaacggaccccccaaccaacaaaaaaaccaagaggaaaagacaaaaaaacccaaaacaaaaaaaaacccagaagaaaacgaggcaaaccacaggacgaggacaggaaaagaacgagaaacaccaaaagcaagcaacaaaagcaaaagacaaagggacaaaaacaaagagccgcacagaaaaagaaacacacagaagaacaggcaacacagaagggagaaaagcaacaccaggacaaaggcagaccagaaacaaggaacaaacaaaccaagaaaaaaaaaaaacagccccacaaaaagaggcaaaggagagaacagaacccaaaagaagacaagcagccaacaaacagaagaaaggccaacacacgacaagagaaagcaaacaaaaccacaagagaaccaccacaccagcagagggaaaaaaagcaagaaaaaacagagcggcgaggagggagaaaagaaaggacacgaggggaaggaacagcaccacgggaagacagggggaacccaaggacggaaccagaaaaccagacccggaaaacaagacccaaacccgacgggaaacccaaaggaaaaaacacgaaaagaacaggacacacgaacagcacacacaaagcaaagacaggaaccaaccaaagccacaagaagacggaaaagaaaagggacaaacaccagaaaacagggccaaaagaggaagagacagccgcagggacaggggaagcggaagccaacccagcaaacaacacaggaacagaagaccaaacacacagccaccaaaggggaggaacaagagaacacaggacacagggaggggaacaacacacaccagggacgagggggcaagacgaggggagggaagcaaggacaaacaccaagagcggggcaaaacagagaggggaagggcgcaaaacaccagacacgcaaaccagaacaacccgcagccgcacagacccagaacaaaggaaaaaaaaaaaggaaaagaaaacccgaaaagaaagagggaaaaaaaccacaaaagagcgacagcgcacagggggaaacaaggcgaggcaaacacccacaaccagggcgaggcaagggagaaaaacgggcaagcgcacaacagaaaccggcccgccagaaaaacaaacagaaagaagcagagcaaaaaagcagaaaaaaacaccaagaaaggagaggacaaagcaaacaaggaacaaaaaaagaaccgcccgggggggggcagaaggaaaggcaagacaaacagcaccagccagggcaaagagggacaacaacagagccgcgcaaaccaagagacagaaaaaaaaaaccaagcagggacaggcacaacggaacaggccaggggcgcacccacagccacaacaggacccaagcaccccccccagcccccaccccacaacaggcccgggggagcccgcccggccaaggccagaacccaccagaggagaacagcaggggacgcaagagacaaaaacaacagccagaaaacagggcagagaaacaacacacccaaagacaccgcccagcgagagcagaaaaaaagaagcacacccaccaagccacggccagaacagaacaaagcacagaaaagggggaccaccacgcccccccacccaccccaaaaagacacccaacaacccccaaccccaccggacacggcagcacaaaccccaccccacgccaccgcacacacgggcagagagaccaaaaaacaggacacacgggaccagaacccagccagacccacgcacgcagcaagcacaaccaccccaggaaaggaggccaaaaccaaggaaaacggccaggcaggggccaagcgaaaccagcacaggaggcgaggcaggcggacacgaggaacaagacaggagagagaccaccggccaacagggaaacccgccaaaaaacaaaaaaagcgggcaggggcacgcaccgagcccagcaccgggaggcgaggcggggcgggggggggggaagcgaacccgggggggagcgcaggagccaagaccgccacgcacccagccgggcgacagagcgagaccgccaaaaaaacaaacaaaaaaaaggaaacgaacaagagaacaacacggcccaaaaagaaacaagccacacaaacaaacaacacaaccccaaggaagaggagaagaaacggacagcccgcgccacagcaacaagcccaaccaccgccaaaggcagccaccaagccaagggcagaggcaaagggcgaacaacaggaaggaaaaaaaaaaaaaaaaccaaagggagacgcgggacgagcacaaaccagaagcagcacgaacgaaaggccaacaaaaaacacacagacaaaggagagaaacaagcaacaaaaaccaaaaacgaacaggaaagaaaacagcaaggcaacaaagaaaaaaaaaccgcccaaaacagagacaacagaaaacaaaagggagcacgaacaaggacaggacgcgaagcagcaagaaaggccaagagggggggacggccaggaacccaacagcgcagagaagacgccagaaggcagcaaagaggacaaccccggaaccaaaaaaggagaaaacgcgggcacagcgacaacgaaaaaaaaaaggcaacaaacagacaggacccaagagcagagggggaaccaaccaaaagaccaaaagcggccggggccggcaacacaaaaaccagagacaaaagaagccacccgaaagccagccacccacgacacgcaaaggagccaggggagaggcacgggggggggggaggaggacaccaaagaaaggaaaagaccgggaggggagagggggacaagagacccccaacacccccaccacccggggcccgcaaaaaccagaagacaaaaaccacaaaacacccgcaaagcggaagcagaagaagacggcagaaacgaaccggaaaggaaaggggaggaaagggaggccacaccggagccagaaaggaaagagcaaaaccaccaaaaaacaaaaacaccacaaacacaacaaaaaaaaaccagaccaaagaagcgaaaacaaaaaacacagccacgcaggacagcaccaagaccaagccaccggggacaggagccagggcaggggagcaaaccggaaaacagaagaaaaaggggagacacagcagcacacgcccagcgaaaaacaaaaaaaaaagcaagccggcagaacaaacgggcgccaaggcagacagcccacgagaggaaaacagccccgagcgccaaccagcaaaccgccgccagagcaagagagacgccacaggaaggcaaaaacggaacaacaccgcacaggaaggaaaagagacgcaagacgaagcaacccaaggcaaagccaaggacagagcagaaagagaaccacaacgccaaaccaaagcgacaaaccgcgcacaggccccaaaaagaccagcgagaagaacccacgaccaaagcgacaaaaagaagaccacagcagaagaagaaaaaggaacaagccgacccacaaagcacaaaaaggccaagcaaaagagaacaaaagaagggaaaagacaaagcaccagcaaaagacagcaagcagaaacaggcgaccagagccccaaaggcagagaacaaacaagccgcaacggggcgaacagaaaccgagacgggaaaagcaaacaggaaacggccacagcggaagcgagaagccaagacagaggggccacaccggaggacccccggcacccaggcagaaagcaaaagggcaaaagagggcaaaacaaagaaaacaagagagggccaaacggcaaacaaacccaccgaacaaaccacccagaaacgacaaaccagaagaagagccagacaaacccaaaagcccaccgcaaagagcacggggaaaaccaacacagaacaggagagacaccaaaccaagcaccacccaacaaaacggagccagacaaaggagaacaaaaagaacagaacaagcagacaggcacaaaaaaacaaggaggacagccaggcaaagagcagcgcaacagccgcagcgcaccccgcagggccggccccaaacagccccaaaacgcaagggacaccaaccaaacaaaaagccaacaaaggccggacgagcaccaacaaccccgaaaggcaaaaaaacaaacaggcaacgagagagaaccaaaaacccccaaaaaaccccgcaagcccaccccaaaaacaagaacacacggacacccgagaaagagacagcacaggaaccccacagcaaagcaggaaccaaaggggaaaccagaagagaaaaaaaaacaaagggaagccaaaagccaaggaccccagacccaacagggcaacgacaaaagggcaagccccgaacaaaaggagcagggcagagagggagaacccccggaaaggacaaaacccggagaggacggaagcgagccaaacccaagccagagacaggggacagagacgaggaaccagccaaaggaaaaacggacgaagcggccgaaacccacacaagagggggaaggaaggccaaaccaggagaaaaagaaaaaaacaccaaaagcgagaaagaaaaaggaaagcccaaaccaaacggggaacaagaaagcaggacaaaaaccgaaaaaaaaaaaacacacaagcggaaaaacacggaaaaaaagaaaaaacgagggaagacaaacaacaacaaaaaggaaagaggggaacgaccagagccgaacaacaacaggagaacaaaaaaaagcgagaaaacagagaaagacagagcaagcaaaaacagacaccgccgcaaaaaagaaggaaaaaaagcgacagggccagaaaggggagcaaacaaagggagacaaaaaaaaaccaggcccagccacaacaaggggggaaaagcagaacaagcagcaagacagccccaggaaggaacccacacaaaggcaaaaaagccccccagcaacagcaacaccaacacagagacaaaaaaagggaaaggaagggaagagccacgcagaaaaaagaaagacgagacaaaaacgccaacagccaagcccaagccaaaaaaccaaaacgaaagcagaaaaagccaaagcacccaaagaacaaaaaggaaggaaggaagcgcaaaacaaaagaaggacccccaaagcacaaaagacgaggaccgggcaccccgaggggcaagaaacccaacacaaacccaaaagggagaaaaacaaaaaacagaacacaaccacaaaaaaaggcacgaaaaagacaaaggacaggaaaagggaaagaacaggaagggcacaaacgaagaaggaagcacgagagacaaggcggaagccaagccacaacaaaagaaaagaagaagaaaaaaggacccaacaacaggaggaggggcgacaccccagagccaaaacaaaacgaccccaaaaacacaaagcacagacggaagacacgaaacaaaaagcaacgaacacaggagaagaaaacggcacaagaagaagcagagaaaagaaaagaaaagaacagagcaagagaaaaacaaacagaagggaagggacacaaaaggcaccgcaccacagagaggcgaggaggacgaggaaaggagcaggggcgaaagaaaacggaaagggaccgcacagcgaacccaggcaaggggacgaaaagacagacaagcacaagagagaaagccagcacgaaacagggacaggacaagaaagcagagaaccaccagaaaaagaaacacagaacaagcagccaggaacacaccacaaagaggggaccaaaacaggaaacagaacagggagagcaaaacgaaagcagccaggaggcagaacagcacgagaaaaaacaaaacagaacgcaaaccgagaaacagggagcgaaaggccaggggagcaacacgggaaagacaaacgcaaaacaggcccccacaaccaccaccgagccagaaacacgacagaagacgaaagccaacaacacaaagaagccagacacgcccccgcaacccaaacagaaaagaaaaaaagcaaagggcgaggaggaacaaaacacaggcacacaaaaaggggcaaaaaagccaaaacaaaaaaagacaacaagaaagagaaaagcagaaacaaaggaaaaggaaaaccgagaacaggaagcgaaaaagacaaggcaagagacagaacaaaagagaaaaaaaaaccacccagcaagccaccaccacgaagagagggggcacccccaaaggggggaaggagaacagcacagacagcggagcggccgggaggccaaaagcaccaagagcccccgcaaacagagaagagcaaggaaaacagaaaaaaccaaaaggaccaaaacacccaccaaagacaaaaaccgggcaagggaaagagacagagcaaccaacaggaacaaacagaaagccaggaaaacacagccaggaaacaaccaccaaacagagccaagaaaaacaagagaagggcagaggcaggcacacaagagggaacccaagaggaggaagacaaagccaaaaaacaaaaaagccgagacaccaaaaacggggacagagagacagagccaaggaccacccccaaagaaaacagcgccacagcccaacgaaagagcagcaaggcagaggaggcgaagaagaggcagaaagaaagcccacgacgcccacaaaaggacaccaagaacaacacacacagaaaaacaacaccccaaagaacaaaacagggagcaccaagaccggaacacaaacacaaaagaggcacgaagagaagaaaaaacagcccgaacccgacgccacccccccaccgggcaccgcggccgggggagagcaccgggacggggaagggagaacacagccacggcggcagaacaggcgccgagagaagaaagaaaacccagaccaaaccagcgagcccagccaagagggagcaaaacgagcccggccagaagggaaccgacccaaggccaagggaggccgcaaaccgccgcccagggcgcagcaccggcccagaaacgaaaggcagcagaacacaaggacgcaacccagggccagggaacaagcccagagacagagacgagggggcagaacacacgagacaccggggggcagccaagggaggcaggcacacccgccccaacccaggcgcaacgaggcccaaaagagacccccccgcgaggagagacggaaggagggaggccgcgcacgagggaccagccagccaagcaaaagggcacgaaagagcagaggaccccccccgggcccagccccagagacacaggcaaccgggccagaaggaaaccgcgcccgaaggaaagggcagccggcagacaaccgcaaccgaagagcccgggcccgaaagccagcaggaacccaggacacacaagggccgggaaagcccgagacagggcagagagaccagcacaacagcgggggcacagaggaaaaccggagaaaagcagagggaaagcaaaggggacacgcacaggaccagcacagccacagggggagagcacgacgggccgaaccaccaggacgagcggaggcacggacagcccgggccagaggggagccaggcccgcagggaaacccaggccaggagcacacaaaaagcgacaagagaccgggccaagagagcacgggagcagcagacccgaccagggggaggcacagaggaggccccgcaaaaacggagagaagaggggaaggcggggggaggccagccagcgaaacaaaacaccaggagaccaagagaccaacccgacccggacgcaccggaccacccagggccgggggcccaggcccgaagggaagcacagaggcagacaggagccaccgcgacgagagccgagcgcgaggaacacaggcagagccagggagggacagcaggccgggcaagacccaggggcggccaggcgacccagcacagcacagcagggagccacagggggccaggcaccacccagccagaaccaaacacagagagagaccgaggggagaaagaaaaaagagaacaagagccgacggcaccagggagccccaacggcgaaaaccacaagaggacgagcgcaagaaccacaggcacgggcgggaaccccaaagcagaacagcagaacaaaacacaagcccaaaacggaaagcccccaagagggacagcacaaaaaccaagacaggaagacagaaaaaacaacccaagcccacacaccgaagaacacacagcacaacaccaccagaaaaacaggacccaccaacaaacaaaaaggcaccagggaccaaccggagaaagagaaggacccagaaagaaaagagggaggaaaccaaaagaaacaaaaaacacggaaaggaacagaacaccaaaaaaacaaaaaacgaaagaaaaaagaacaagcagaaaccggaacgaaaaagcaaggcacacgaagaagcacagagccaaagcagaagaaagcagaagaaagaaaggagccaaagacagcaaaaaacacagcagaggagacaaaagaaaaaagaacaaaaaacaacgagcgcaacacaggacagaaaagcccaaaagggcaaacaagagaggccaaagaggacgagaaaagagaagggaagaaagacaaaaggaaaaacagagaaccccaaaccagagaaagaacagagccaagacaagaaggaagaacaccaagcagaaacccaggaagacacccaaggaaaaacaaacccaacacaaggaaaagaaagaacaaaagccacaagagaaaagaaacaaaaacaacaagagcgccaagccggcaacagaccagggaaaccacaggccaggagagagagcagacaaaaaggcaaggaaaaaaaccccagaaaagacgggaaaaaccaaacaaaagaaaaaagaccccaggcaacaaaagcgagggacaagaacgccaggcagccaaagaaagcaaagggagaccaacagaaagaaaaggacagaagagcaaaaaaacaccgaaggacaaaaccacggaaagaagacacagacaaacagaaaaaacacgaacgggggaaaaaacaagaggaagaaaagaagaaccaagaaagaaaaacacaacagccaagacacgcagacaaaagacaaaaagaagcaagaaaagaaaaagcagggagacaaagaagaagagaaagcgcggggcaaaaggaaggcagcaggaaaaaagagcaaaagcaaacccaggaaaccaaaccaaaaaacaacaagaaaacaagaaaaaaagcaagaaacaaaccagcccagacaaagcacccacagacaaagacaggaaggagagaaagaaggaagaaagaccaaaaacaacccgaaaacaagaaaaaggcaagagaagccaaacaaaaaacagaagaaagaacaaaacccaacaaaagacaagacggcgcagaagaaaaaacaaacccacaacggccgcaagaaacacaccaacaaaaagcacaaaaggcagccagcccagcaccaaaaaagggaaccccccagcgccagggcaaagacagaaggagaagcgacaacgagggccgcgccagacaaccgggaccagaccagcgggacgcagccgagaaggaagcaggagggagccccagcgcggcaggagacggcaaggggccggcccagaacaaagagccaacggaagaaaggcaggagcgaggggaggcaaaacgaaaaccgggcagaggccacacgaagacccaaccagagcaggaagcccagggcccaccgagcagggagcccgaagaggcccacacccgaagggaccaggaaccgaagcaaggaagggagcaccagaggcccggcgggggaaagaagcggagacagagaccgagacgcgaaggcacagcaaggagagggcgagacaaggagcagaaacaacagcgcgcgaacagggacaagaccccccaagaaacccacccccgccaagcccggccagaacccaacacaggaaaggaggggagagagggcacccgcggccagcaaagggaagcccaggcccacagagaaggcgggggcaagaagccaagaaaacacccacaaaccaaagagagagcagaagggaaaacggcagccaagagaaagcgaaacggacccccacaccaccaaaaacaacaagaggaaaagacaaacgagaccaaaaccaaaaaacccagaagaaaaccaggcaaccacagaacaaggcagggcaaggaccagcaaaacaccaaaagcaaggcaacaaaagccaaaagacaaagggacaaaaacaaagagccgcacagcaaaagaaacaccacagagaaacaggcaaccaaaaaagggagaaaacacaaccaccacgacaaagggcaaaccagaacacaagaaccaaacaaaacaagaaaaaacaaacaaccccacaaaaaggggcaaaggaagaacagacacccaaaagaagacaagcagccaaaaaacacagaaaaaagccacacacggccacagagaaagcaaacaaaaccacaagagaaccaccacaccagagaaggcgacaaaaaagcaggaaacaacagggcggagaggagggagaaaaggaacacacacgggggggacgaaacagcaaccagggaagcagggggacccagggacagaacagaaaaccagacccagccacccaacgggaaacccaaaggacaaaacagcgcaaaagacacagcacacgagagcggcaacacaaagcaaagacggaaccaacccaaagcccaacaagaggacggaaagaaaagggcacaaacaccaggaaacagcagccaaaaaaaggagagcagccgagggacaggagaaaggaaacacagcagaaaaacacacaagaacaaaaaacccaacacagcaaccaccaagggggaagcacaagagacacaggacacaggaaggggaacacaaccggggacggggggggggggagggggggagggaagcagggagaaaccaagcagagacgagagggggcagcgcaccagcaggcacagaacaagaacaaccgcacaggcacagacccaaaacaaagaaacaaaaaagaaaaaaaaaaaaagagaaaaaaaaaaaaaaagcacaacagacggcggggcaggggcacacggacccagcacgaaaggccaaggggaggacaccgaggcacgagcagaccagcgaaaaaccggaaaccccagcacaaaaaacaaaaaagccaggggaggcacacaccgaacccagcaccaggaggcgaggaggagaaccgaacccaggaggcggacagcaggagccaagacaaccacgcacccaggcggggacggaggagacacgccaaaacacacacacacacacacacacacacacacacacacacacacacagaaagagagaaaagaagggaggaaaaagaacagccaagaaaaccaaaaaagaacagaagcacaaacaacagaaaaaagacaacacaaaacaaagaagagacaaagaaggcacaaagaaaagggacaacagcaagagaaaaacagaaaaaagcacccaacacggagaccaggcaaaaaggaaacaagagaaaagaggggaggaccaaaacaaaaagcagagacaacacccacagcagaaaagacccagacagaaaacaacaaagaaacacagacgaaccacaagagaaagacaaagaaacagaacacagccaaaagcgcagaaaccaccccagaaagggacaccaagaaacaacaagaaaacaaaaaagcaaaacaaaaaaggaaaaaacaagcacccaccacaaggaaaaaaccagaaacaaaagaaaggaaggaaacaacaacaggaaaaaacaaagcccgaggaccagggcaagaagagaaagaaggaaaggaaaacgaaagaaagaaacagaaacacaacaaccaaaaccagggaacaccaaaggcagacaagagggaagaagcaaaaagacacacaaaaaagagaaaacgcaaagaacaacccaacaagcaccaaggaacagaaaagaagagcaaaccaaaccccaaaagagaagaaacaaaaaaaaaggcagagccaaaaaagaaagaagaaaaaaaacaaaagaaagacaaaaaaggggaaaagaaacaaagaacaaacagacagacgaaaaaaagagaaaagcccaaaaaaaaaacagaaaagaaaaagagacacacaacgaaagcagaaaccaaagcacaagggcacagagcaacaaaccaaaaaaaaaacagaagaaaggagaaccagagcaacaaccaccaagagaaccaagaggaaaccaaaaccgaaaagaccaaaacaagacaagacaaagccagaaaaaagaaaccccacaaagaaaagcccagaaccgacagccaccgaacaccaaaccaaagaagaaaaaccaacaccaaacaccaaaaagggaggagaggggaagcccaaaccacagaggccaaaacggaaccaaaaccagacaaagacacacaaaaaaaaaagaagacacaggccaaacgagaaaaagcaaaaccccaacaaaaacaccaaacaaacaacaacaaaaagaaagacacacgccaaggagaacccagggagcaaagaagcaacaacaaacaacagagaacacaaccacagaagaagaaaaacaaaaaacaaaacaaaaaacaaaaaaagacacccagaaaaaaaaaccaaaaaaacgagcagaaggaacaacccaacaaaaaaagccaacaaagacccacagcagacaacgacggggaaaagagaaagcccccaagacggaaaaaccggccaccaggaccacaagacggaagccagcagagaaaagacaaggaaagaaacaggcaccaaaagaaagaagaagcaaaaaccggcagagaagaagaggaaaacccaaaaacccaggaaaacgagaacaaaaacaaaagcaacggcaggaacaacaacaaaaaaccagagcacagagaacaggcaacaaaaaaaaagaaaaaaaagaaccaacacagccacacaaaaaaaacccaaaggaaagaccaaaaaaagcaaagaagcgaaacaagaggaggacaaaaaaagaaaaaaagaaaaaagagcacagaagaaaaaaaaaggcaggagaaagacaagaaaagccacaccaaagcaaacacagacaagcaacccagaaaaaaccaggacaccacagaaaggaaaaaaaaccaaaaaagggaccacaaaagacacagaaagccaaagcaccaagcaaaaagaacaaaacggagaaacacaaccgaccaaaagacacagagcaagaaccaaacagaagggcggcaaaaacagacacacagaccaagaaaaaaagagaaccagaacaaacagcacacacaggaaccagacaaagagcaagaacacacacggggaaaagacagcccaaaaaaggcggaaaaacaaaacaaagcagaagaagaaaaggcccccacacaccaaagaaaaaaacaaaaggacaagacaaacaagaccaaacagaaacagaagaaaacaagggaaaaccaagacaggcgggaaaggacgagcaaccccacaacaaggcaaccaaagcaaaacgaacaaacgccgaggaaaagcccgcacagaaaaagaaaacaacaaaggaagaaacaacccacagaagggagaaaacagcacaaaccacgacggggaaaaaccagaacacacaggaaccaaacaaccaaggaaaaagcaaaacgacaaaaaagggcaaaagaagaaagacaccaaaagaggacaacaaaggcaaacaggcaggaaaaaggccaacgcaacacagagaaagcaaacaaaacacaagagagaccaccaagaaaaagccaaccaaaacacaggcacagaaagcgggaagagggagaaaaaggaacccacacgggcgggaaaaaaagacaaccacaggagaacagggaggccccaaaaacaaaaaagagcaacaagcccagcaaccacgcgggaaaccccaaggcagacgacaaagcaagaggacacaaccaaggcacaacagagaaggaaaagaaaaaggacaaacacaaggagaggcaacacaaaaaagaagaaaccagcagcaacaacaaaagaacggagagaaggaaggaaaaacagcacgaaagacaaacacgcagccacacgggaacaaaaacaaaacaagaacggacagagaagaaggaggaccagaggcaggaagagaaggcacgggaggaagcggggaggaagggacaaagcaaagaaagaagaaagagcacagaagcacaaaggggacagcaaaaaacaacgacaaaaaaaaaaggggaagggaagaaccaaaggaaaagcgcgggaaggaaccccacccagaggcacacagcagcgacaaacaccagacccaaaaaaaaccacagaccacaaaaaaaaaagaaagaagaaaaagcacaagggcaaagaacacagcaacacacacacacacacacagcaggaagcagaggaaaaaaaacaaggcagcgaaaagcaaaaaaacaagacagcaagaaaaaaaagagaacaaaaaaaaaaaaacaaccgagaaaaaagaaaaaagcagagggaaaaacaggaagaaaaccgagggaagcaaaaaacaaagacaaaaagaaaaagcagagacacacagaagcagcaaaagagagaggagacagaacacagcaagaaaagcaggaaaacaaaagaaaggaagaggagccgcaccagaacaggccaaagagcgccgcaagaaccccgccaaacacaacaaacacgggaaaaaaagaacaagaagcagaggccaaaaacgaaacagagggaaaccaacagaaaacaaagaggaggaaacaaagagacaaaagccccacccaaaacagacagcaggacagacaaacccgaggggagcagcaacgagcccacagaggcaaacccagaggaaaacagggccaggagcaaccacgcaaaaagagggcgaaaaaagccgccaacagcgcagggccgcacaagaagaagggccagagaagcaaaaaacaacacggccagcaaaacagaaagaaacaagcaccaaagcaggcagaagaaagcaaacgcggaaaagaccggaccaccaagaagcccggaaggggcacaggaagacagagagcccacagagaaaagcaaggcgaagaagccaggaaagaaagaaagaaagagagaaagagagagagaagaagaaaaagaggcacaaaagccaaagcacagaagagacaaagcgaggaagagagccaacgaagacaacagaaaaaaaccaaaccagagaaaaaaacaaaaacagaggagagaaaaagaaagaaaaaaacccaaagagcaaaaaaaagaaaaaagaaaaaagagaaaccaaaacagaaagaaacaaaaacaaaaaggaacaaagaacaaacaaagcgaaaagaaaacacagaaaaaaaaaacaaaaaaaaccagacccaaagagagaaagaaaagcgagcacaggggcagcaagaaggaaaaagaaaacagaacacacaggaaaaggagaagaaaaaaagagacaaaaacacaaagaaaccagaaaaagaaaagaggaaaccaaagcaagaaaacaacagacaaaggaaacaagaaaaccaaaaaaaacaacaaaacaaaagaccaaaaacacaaagaccaaaggaaaagaaagaagaagccaaagaacagaaaaaaaaaaggaagaaccaaaaaaaaggcagaaaaaaaagacccacgcaaaacagcaaagggaaaaggcaggacccaaccgagagagaaaaaaaaacccagaagacgaaaaaaaaaagagcaagaaaaagagaggaggcgaacaagcaccacgcaaaaggaagcaaagaaggagaaaacaaaagcaaggaaaggaaacaagaagacagaaaacgagaaaaccacagagacccagaaccaagacagcaaaaaaggaacaaaacaaaaggccaaacagcacaacaaacggagaaaaacacaaggcaccaaaacggagccaacaaaaaaacaaaaggaagcaagaacaagagaaaaacaaaaaagaaggcagaaagaagaaaaagagacaggggagaaaagaccagcaccaaagaagcaaccccaaaaagggaaaacaagcacagcaaaacccacaaaggacaaaagacaaagaaccaagaaagaaaaaagacgaagccaaaccaagaaggacaaaggggagcagggaccgaaaagaccacggcagcagaaaaaaaaaaggcaaaagaacaagaaaagaaagggaagaaagaaccaagggaaagaaaaagaaccaaaaaagacagaggcagcacaaaagaagaaaggcaggagaagagaacccagggacaaagacagaaagcaaaacaagagagccaacaagaaaaacacggcccaaagagcaagcaaaagcccacagacgaaaaccaagaaaaagggagcagagggcagaaaaaggaacgcccccagaaagaagaccccacaagaagaccaaaaaaagcaacaccaaggaaaagaccggcagaagggagcaaagcgccagccaaaaaccccaacaaaagaacaaccccacacaaaaaaagagaacccaccagcaggacaggacacaaaaaaaacaccgccccagagaaaaggcaggacaaacccaaacaagaacccaaaaccagggacccaaagcaggcccaagcacaccacagccaggaaaaacagggagcaaagccggcaaaagcgacccccacccccaaaggaaacagcacagaggggcacaacacggggagaaccacacaaaagagaaccacaagaaggaaaaaaaacaccaagaaagaaagacccaacacacaaaagcaacgaagaaacaaaacgcaagacaacaaaagacagggcgaggccgcaagaaaagcgaacaagaaccaaggacaacaacagacagaaaagagacagcaagagccagagcaggaccgaggcaaccaagaaggcccccccaacacagaggaagacaacaagccaaaggaagccagcagcagcaacaaacgagcacgccacgcgaaccagcagaagaaacaagcaacgaaaaccacaaaagacagaaagcaacgcgggccacacgccaccagggaagaacaaaaaccacaaagccagacaacagaaaagagcacaaaccacaaacaccgaaagggacgccacagaaacggcacaaagcaaaggagagcggcagagaaaggacaagggcaacaagaaccgagacagcccccacaaccaaagcaacaagagccaagaaaaccccacggcaaaagccccgaggaacaacgagcagcaccaccacgcagaacaggcaaaggaaagaaaacaaacacagaacaggccacaccccaaagagagggaccccacgacacgaaaaaccaagaaagacaaagcccgcgaaacacagaaagaaaaaaagaaaccaaagcaggcagaggcacaagcaggagagaaaagacagaccagacaccgaaaccacgaccaccaggcaaggaaaaaaaagaaaaggaaaacgaagagagggcaacccgagaagcacacccaggacggaaacagaccgcaacagggggcaaccagaaaacaccccaggaagaaccaagccagcagaaaggaacaaccaaggaacaaagaagaaagaccgggagccaaagcaaagcaagcaacacaaagccgcaagcaaaagccaaacaaaagaagaaaaaccaaaaaacgcccagaacaaacaaaaacaacacaaaagaaaaaaagaaggcagaaccaaacgcgagagagggcaaggcaagaaagcaccccacgcggaggaaccgagagcaaggagaaacacacaaagaagagaaaaccaacaccgacacagaaaaaaaagagaacaaaagcgcaaaaaaggaacaccagcgaaagcagaaaagacagaccagccacccggcccgcgaaaaaagagcccgagccccgcccacagcgggccagccagggagaaacaaagaaaacccgccaaaccaggggacagagaccaacaaaaaaaggcggaacaaacaaccaaaaagaagaacgcgagcaaacagagagaagagacaccacgacggaaacagacaaaggggcaagaagccaaaaccgcaggaaaagcaggaaacaacacaggcaaaccggagaaaaaaccaggaaaagaacaccccaaaagggaggcaagggccaccaaccccaccccaccacccaacaaaacaaaacggacgcacagacaagaaagagaaaacacaaaaggcaagaagcaaaggcaaaacaaaagaccacaaccaaagaaacagcagaacaaagacccacaggggcaacgcaccaccagaacccagaaccacacccaaccaaaccccaacccaaaacacaacccccaccccgcccccagccccggaaacagcccaccgcccaaagacaccacagccgaagggaacaaagccacggggcgacacccacagcaaacccaagggcaccagcaaagcaggccacagcccaaagacaaaaaaccggaaacacagcaccacgggaaaacacggaagcaccgacaggaaaagacgcagaacaagagacaaacggagcccgccaacgggaaaccagaaggggaggagaaccagaaagaggaaacaccaagccacgacgcgcaacaccaccacagacacaaaggccaacgcacccgcggcccgacgggcagaaagggcacccgaaggaaaggaccagggagcagccaggaaggagagggcacagaagccaggacccggaaagaaccagcccgccaaaaaggccagccggggccagaacgagacccaccaaaaaaaaaaaaagccaggggaggaagagggccacaacggaaccccagaaggagcaaaaaccccacaagagcacaccgcaaaggccgagcacagaagacaagaaaaccaaaacacggaccggcgggcaaaaaacagccaaaccaagcaggagacccaagccaaaacaacaccgggacgcaagaaacgaagcgaagaagggccaacaggcaggaaccagccaacaccaggaaaggcgacccccagaaggcgacagagcgacagaccacaaaagaaggacgggccccacagcaggcacagcgcagccagacacacgaaacggcgccgaacaaggaaaaagacgcaagccacccaaaaaaaaaaacaaccaaaaagcggggaaagaaaagaggccagaagaaaagaacgccaaggcaaaacagaaaaggaaacggaacagccagggaacagccaaaagcaaaacaacacggaaacgaggagaacagccgcgccagaaaccacgacaaggccgaaaccagcagaaaacacagcaaaacaaggaggacaaggcacgaagcgaaacaagcaaagcacaaagcgaaagaaaaaaaaacaaaaacaaagaaaagaaaagaaaacaacagaggaaaagaggaaaggaaaaaacaaaagcacaccacaaagggaagaacacaaaacacccagcagcacagacaaaagaaaacaacagcgccaggacaaagaccccgaacacccaacaaaaggacgaccacgcccccaaaccccgaacccccagagccgaacacacgccgcgcagaacgacagaccgcaaggggaacagcaggacccgccgcacacaacgaaaccccaaaccacgaggcacaaaaacaggacccaaaaaacaaagacacggaaaaccacaccagcaacccacacggcaaacaaaggaaagaagcgagagagagaagaccccagcagcagcaacccaggccaagaaggaacaacaaggcccacaacagagaaaaaaaagaaaagacgcaaaaaaccacaccggccggacaagaagaacaaccaaaaccaagaaaaagaacaaaggaaggacaagccccgacaaagcaacaccggagaacaggacccgcaaaggacagaagaagccaggcaggaaagacacagacgagaggaacaagaaggaagcacgaaagaacaggcaggagacaagcacgaaggagagggcagcaagacagcagagacgcaagcccgccccccagagaagaggcgcagaagcaagcgaaacccacacaggccgaacacggaaacagacacacagcaccaagcaagcagcccccgggcaccccacaggcccccaagagcccagaccccaaggcacacgcaacccaagagacgaaggaaaagaaaagagaacaaaaaaaaacaaaagcaaaacaaagaaacaggacgagccaaacaaggagcaaaaacaaaagaaaaaaaagagaaaaaacacaaaccaaaagagacaaaaaccaagcccccacaaacaacaaacaagaagcaaaagaccaagccgacccccccagcaaagaaaagcaagccagcacagacacccacacacacaccaaacacacaggcaacagaagccacaaaacaaaaaagccgaaccaaaaccccgcacccccacagaaaggaggcgcccaaccgaagcggcgagacagacaacgaaacggacaggcagaaaacacgcgcaggaaacaccccacacaagaagaaaaaaaaaagagcaagggccagggagagacaacgaacaggaaaaaaaaacaaacagaacaaccacacccgaaacacaaagggaaaacaacaacaacccagcaaaaaaacaaaacaaaaacaaacacagcgacaaaggcccagaacaacaaagcagaagccagcaagaaagccggccaccccggaacccagcgcaggaggagcccaagcagcagaaagagacccacagaaggagaacgagagcccgggcgcccaccgcgcagagacagggcaccagggccacccgggaagaggcacgaaagaagccccagagagccaccagcgaagcagaggaaccccaccccaaccccgagagcccgaccaaagaaaaaggagaaaaaaagag

SEQ ID NO: 387 - RNA, 2108 nt, Homo sapiens
gaccaggacccccagaccagaaaaacggagaggcagccaggggagaggggggcaggaagggccagagcagggagaagggagaggagccacacccgcccccgcagaggcccaggcccccccccggcgggccggccaggcccagagcccccgaccaaggcagggccaaacccgaccggaggagcgacagaggcccccccagccccggcgcccaacgccaggccgccgcccgcacagcccccaccccagcaacagagccagacaaaagagaagcacagccagcaagcagggcccggcccaccacccaccccccacgaccaccccccacccccccgccgacgcgcggcgcacagggccacagccagcccccccgcccccaaagacgcagggcagcagaggagcgcgggccccccagcgccggaaccaggaagggcaggaaagccaggaggcccaggcacgggcagggagggaggggccgaagggccaccgcacacgaggccccgagcgccgaggaagaggggcgggcagcgggcggcagcagggcggacccgaagcccacagacaccaccaaaagaggaaacacacacccccaggcgagaggccacaggggacgcacgcgcgccgcggcggacccaggcgcccaggccccgacccgcccaagagccccccagcccccgggcccaagaccccccaacccgccagggccccccgagggcccgcccgggccggggcgggaccagcaggcgccagacgcccccaccccccccccacccccagccccccccccccaaaggcccaccccaccccccagcagagacaccaggagagacagggcccggaggcccacccagcggaaccccggcggccgcccagccacgcagccacccccagcgccaaagaggcagccacagcccccgccaaggcggcccagccaccccaaccggaggccgacgcccagagcccagccccaccccagccccccaccagcccaagaccgaccccccagggccaagccccagccccccaacagcccagggccgaccccccagggcccaggcccggccccccaccagcccaaggcgaacacaccagggcccaacccagccccccaccagccaaggccgaccccccagagcccagcccagccccaagcagcccaaggccgaccccccagggcccagccccagccacccaccagccccaaagccgacccccagagccgaccggccccccaccagcccaaagccgacccccacgcccgcgccccggcaggagcccaaggcacccaacaaaaaggggccaggggcggaggaagaggcggcgccccgagacacggcccacccagcccgcgaccccgccaccccgccaccccagcccccccggacacccccccgccggggcccggagccaacccccacagagagggcaaggcgcgcccgagccccgcaggggcgcacccaagccccgacacccccaacgcgccccacccagaccagcagcccaagccccagaggccccgagcgaggagccccagggggcagcaggaaggccggaccaccgaggcgcagggcggaggagagccgcccggcccaggcccgaagggggccccagggagggcagggcaaaccccgaggccacggggccagaccagggcgcccaacggccagagcgcgccccgcccccgcccgcaggggagagcgcccccccccccccccggggaggacagacgacaggaaacagaaggggggggcccgcgggagggcggggaccccccagcccgggcaggggcccggccccagcgcccccccccgggcaccagcccaagggaggccaagagccgggacgaccagggcagaggggaccccagaagaccagggccccgacagggccccgggaggcccaaaacggggagccagaaccagcacaagaaaaggacccccgagccccaccgcgcgacccagcccagaaaaccccccccccaacaccaggccaggcccggccccgcgggccccgagggccaggagggcgagcagaagggcgccaggagacggcccagcaccccacaaagccaccccccgcagcccagccgcagggcacaggcgggggacacc

SEQ ID NO: 388 - RNA, 3482 nt, Homo sapiens
aggccccagcaacgagaagcaaagaacaaacaaaaaaggcagaaacaaccgccccccccccagacagcagagagcacaagaccgcacaaaacagacaacccgccgccaaacacagcccccggaacacagccccccgagcagggcgcccccgggaaccgcaccacggcagcacaagccgagcagcggcaaccccccagacggaccaccgagaccccgggaggcaaccgcggcaagggccacgccaacgggcaccggccgggaccacacggcaacaccggaaggcaaaggcaacaagcagcgaagacggcaacaacaccccaagccggccggccgacgaacggggcacaagaacgacgaccacacacagaacgagggccagggaacggccggacccggcgccagacacgagccagcaagcccgagaaccggcacagcgacagaacccacacgaggccgccacgaccgagccaaacgaacaacaaagagagccggggagacggcggcgggcacccgccgggcccgccacgcggcaaacgggaaagagaacggccccgggagaggccacagcccaggagcccaccaacggcacagccacgcgcaagccgcaccaagacaaacggaggacaaaggaaacgaaaagcgaccaaagagcgcggccgcaagcccgggacagaggcagagacagaaaacgccaccccacgggcagccgaagcgcagcagacgaaccaacagcaaagcagaaacgcccaacaggaggaagaggccgcgccaccggcacaaccaagagcggaaacccagcccgagcagaggaccaagaccacagcagcaggacagggaacaacaagagcgcgcccccggagaacccgccccccgacgaggaggacaggcccgagacgagagccacacccacggccaagcccgggcacagcaccacccaacccaccaagaccccacggacaaccgcagggccgaggaggagcggggaggggacggagaggaaagccgacaagcgcaggcccagaagagcgggacgaggaggcagccaaaaagccccaagccccaccagcagagcagccgggacacagcaagaccgacgcaaccccaggggaagagcacggccaccacccgcccaaggaagccaccggccaagagggccgaagaccagaagcagacacaagcggaaaaggagcccggcaaggagaagaaagcggcccagaccccaggcgacgcgcccacacacggaccccaacaacacaggcgggaacaccggacagcgcaacccaaaaccggaacgggcacggcggcacacaacagcaccggaaccccgggcagccggcaacaaaacacagaaccaccaagagcgcgcggccagggacaaaaaaaagaggcgcaagcagcagaccagcagagacagcggcacacaagcgcgcacccgagcaggccgagaagagggacaaagcaggacaaaacgcacacacaacccacagaccaggaggaggaaggcgagggcgggggaccgggagaaaaaaggacacccagaggaaagaagcgccgacgaccagaaaaacccaaaagaaaaagcaaaccaacagcaaaaagaaaaaaaaaacaacacgaaaaaagaaaacgaaaagacacggcaaagaggagaaaaaagcgacggcaaaaacccaaaggagccgggccaacccaagcggaaccagagagcaagcgacccagcccacaccccaaggacccaaaaggggaaccagaccccaagggaacacgcaggcacgaacgggccaaaaacaacggcaaagcgaaccgcccaaagagcccgccgggggaaaccagggacgacgacgcaaagacgggcagcaagcgacaaaaaaaaacaagaaaaagggagcgcacgcacacacaaggaaaaacagggaaacacgaacggcaaaaccgcaacaacgccagacggaacgaagccaggaccaagcaacaaacggaaaaagcccaggaaggaaaccagggcgccacagagagcagccaggcccccagcaggcggcagagcggacaggccggagcagcgagcgccgggccgccagacgggaagcaaccccggagccaacagagcaaacggggcccccgagccaaagaagaaccacaccacacggaaaacacaaacgaagcagaacaaaacgcacaaacgcgaaaccaaaaaggcacggaagcaacacagcaaaaaaaggaaaaaaaggcaaagcaaaaaaaaaaacaggaagagagaagaaggagaacagggacgcgaaggcaccccaaagaaaaagggcgcaccgaacagcgggccaggccgggcaggaacccacccaggaaagggaggaggaagacagcccgaagaaagaaacaccgaaaagaagccaaagaccaccgggaaaaaaaaaaaaggcaccccgaagaccaaaagaacgcaggggaggggagggggcgccacagcggggcgcgagcgggggcccggccggggcgggggagagggaggggagggagggggagggccgcggagaaccccgacagggcacggggaacccagagcgggagaagcgcgacagggagggggacagacgacgacaacagagaaggaccaggggcggacgaacaaacggagaagcagaaaaaggaacacaccaaggaaaggaaaaagacccagcgcagccagggcccaaaggacaaggccacgagcaagaaagagaaggagcccgggcaagaagaagaaacagcaccgggcacaccaagcaccaacccaggaaaaaaagcaacggcaccaacgaaagaaaaccaccagaaacgagggaacgaacaaagcccaccaggcgaaacaacacagggaaaaaaaaaaacaacagcaaagaagaagagggcccacacaaccaaagaacaagaaagaaacagacgacaaagacacagcaaacacagaagcaaaccaccggaaacacagaagcaagcacaaaccaagggccggcacaaaaaaggaaagcacaaggcccagaccagcaccccaccggaaacccacgccccccccaaaagggcgcaaaaaaaaaaaaagaaaagaaaaagagaaaaggagaaacccgaaaaacagaacgagagcacccaacccaaacagaacccaccgccggagcaaaaagcagaaaaggaacaaaccaagaccaggccccgacggaaagaagaagcccaggagaaagcgcaaaaacacacgaaagaaaggagccacgggcaccagagaaagaaaacaagcaaaaaggcgaaagaaaaaaaagcaaagaagagaggagaaaaggaccagacacggcaccaaagggcgcaacaggagaacagcacaccaagacaaaagccacccaaagggaacgaaacagccaagcagagggcagacacaagaagccacgcgaaagaagaaaagacaaaccaaaaaaacacacaggagaaccccccccgcccccccccccccccccccc

SEQ ID NO: 389 - RNA, 968 nt, Homo sapiens
agagggaagggaaggaccaggggaaagacgccggacccaaagaagacaagggaacgacgacgcgccagaaacccaaggaaggcagggcccgacagacacagggaaaagggacccgcaaagaaggagacacaagaagccacacagcacaggagcacaacaaaggaagagcgaaagcagagagacacggacgagagacccgagcccggcagcaagaaagcaggagcaccagggccgggaccggcacaggaccaccgcggagcacaacaacacacaaggacagacaccaagacaccagaaacgaaaaaaaaacagacaagaaaacaggaaaaggagaggccaccaaagaacacaaaaaccaggagacaaacgaacggaagaagccaccacaaggacagcacagcaaaagcacaggagagagacagaaccagaagggcacaaaagacccagagcacaagagcgagaagcacgagcgagaccaaaacaacgacaggaagaaaggcagggaggagaacgcacagagagacaacaagcacagaggcagggggcgagagaaccaaacagggcccacaaaacacccaacacccaacaagagagccagcagagagagaaagaaagaggccaagaggccaaggagcaggagggccagaggagggacgcccggagccaggcaaggcaagccccagcgagaccacacaggaccaggagccacgaagcagaaaaacgcccagcaagccgcccaaaccggcccacaacggaggaaaaaaagcgggaagccacaagggggagagcaccacaaaaaaaccaaacaccccaaacaggcaaggaaaggacaagaaaacacagccggaccgaccccacgggcaaacaaaaaaagacaggcgggagaaccgcccaggagaacaacaaccacaaaagccaaaagcagggaaccgcacaaaaaagaaggaaaaaccaccagccgaaagggg

SEQ ID NO: 390 - RNA, 35 nt, Homo sapiens
caaaacaacaaaccccagggggggggggggagggg

SEQ ID NO: 391 - RNA, 1619 nt, Homo sapiens
ccgccagaaagagcccagccagccgggacaggccaagcaaaaaaaaacagaacgcagaaaccagaaaagacaaccaacagagaaaaacaaaacaaaaaagacaagaacacgcgagcacgggaggagggggaagccaggaaggaaaccaccccgacaccagacccgagccacaacgcaacagccacccggccccacccgccccgaaagaccaaaaggcagacagcagaaacaacaagagaaagggcaccaaaaggcagcaagagcacaaacgcgagcaggcaggcagcgggagacagggagccacacagaaaacagagaggagccccccccccagcagcaccccgagggcgcccccgaggaacaaaccggacaaggcaggccgagaagaaaaccaaacccccaccacagaaagaagggccaggaaaaaggaacaacagagaaaacagaacccagggccagaggccagaaaaccgggaggcacaacgccacaaaaagggaagaccccgggccaccccacggcaaccagaggaggccgacagcaggccccacccagcaccacaggcacgagccacaaccgcagacaaagaaccgagacccagaaagaaggggacggccaccaggcccaggccccaagaaacacaacaggcgccgccccgacagcagcagacacaccgcaaagaaacaacgaagagacagcccacaccaaaacagaggaacaaacaaacaagccccggaaaacaaaaacaaacaaggaacgcaaggaaccccaagagaggcagcgaaaaagagagaaaaaaaaaggaggacaacgggaaacgaaacacagacagcagagccgcagacagcaaaaccacccagggaaggaagaaggggccaggcccaaaagagggccagaaacgaagaaaggcaccccgggaacgacacagccaaccaccggccaagaaaaaagaccacaacaaacaacccaggaacagcaggcaccaaggagaggaaaaggagcagggaaggacaacaggcagacaggccggaggaaagccgcagaggagacaacgagcagcgaccaaaagacaccccaccacaaacacgcaggaagggagaaaaaagaggaagaaccagagggaaagcagccagggaacacaaggagaaagggcgaaaggccccacgaaacaggaggaagagaggcaacaccagccacacagagcccagaaagaaaagaacccccggaaggcagccaacagcaaacagcgagaggcagaaggggcgacaccacccccacccagccacacccgaccagggaacaaaggcacagcacccaggcggaggaagagaggcacaaggaccgaaggggcagaccagaagaggagcaaaaagagcaagacccaggaacccacccgcaaaaggaagggcaggggaaacaccacgcaaagaggaaccacggagccaagcggagagagacaaccgcaccccagggcggccggcgagagccaggcagaagaagcacacaggacaacgcccaaagaaagcaaggacacaacagacacgcaaaacggggccaacgagcaccgacggcgccgacgccaccccacgcgccccaggccgaaaaaaacggaaggacggaa

SEQ ID NO: 392 - RNA, 2323 nt, Homo sapiens
aaaaagccaacgggaaaggacaacagggaacaccccaaagggaggaaacgaggcccagagaagaaagaacgcccgaaccagaagggcaggcgaaacacaccaggcgcgccagagcgcagccaacccgaaagagaaagcaaacgagagaaaggggaaggccggcacaggcgggcccacaggaacccaagaagggcgcagacaacacaaccacagcagcagagccaccgcacgcgagaagaagcagggcagggacccgccccggccaaaccagcagcaagagccgagaaaaagggccaacgccaccccaaaggggggcccgcagccaaggaagcgcacgggccgccaaggggggagcccccgccagggggaaacaggagaggccccaagagcagcagagcagggaccgccagcccaggcagcggcccaagaggccaggaaccacgggcccgcccccgagagaccacccacaaaagggaagcggagggcccaaaaccaaaaagccaagagagcggaacagaagcccaccagagacaaagaccccgggacaggaaaggcgggcacaggagacaggaaaacacaaacacaaagaaagcagggcagcaaaggaggcagacaagacagaagaggagaaaagcagaaagaaggaaaggggacccgcccaggccaccccaacggccccaaaccccagacccccacccaccagccgggccccggggccaaggcccgcccccagccccacgagagagagccagccccaggccccacgcgcggccccaggggccgggagggagggagacggagcgccgcacccaggcggagacaggggccacggccaccgcaaccccacccccgggcaagcaaccccgcccagcccccgagagcggacacaggcggcaccaccagccggcaagaagagagaggggcaccagggccaggcggaccgaacccgaccggaccgcccacccagccccaaaggcgggaacaggcggagccaccggcccagacgagggagacacgcggccgaccagacaggcaacccccccccccagccaaggccaaccgccgcagggcacagggagcgcccccagaaggaggagagcgagggggacacccaaaggccccgccggcgggccacacagcgcgaggaagcgcggcccacagagacaccaaaaggggccaaaccaacgaacccagcaaaacgacaacgaaaaaaggagaggaggcacgacagacaccgagcaagagacacagaaaaccaccgaagcagcagaaaaaagccacggaagcccccaagcccagccgcccaccccacaagagcagacaagagcacccagcacgaggaagaaagcaaaacggaaggccaagcgcaacacaagaaaggacaggaagccccagccagggcgagcaggaacacagcagccccagaagaacacaggcaacaggaaacagaacaccgggagccaagcccagcggggggacagacacaaaaccaaaacacagccccaagcgcaacacccaagcccccacacagaccaggcaccccagcaaacagcgcccaagacaccgccagaggggccagcggcagcacccagcgcacacacgggaccgagcaaaaggaaaaccccgaggcagcacgaaaagaaaaaaacaccccggggcagaaaaaagaaaagcaagacccaagagcggcaacaaaaaaacaagaaagaccagacaaaaaaaaaccagagaaggcacagaaagggagagggagggaaaccccggagagaggaggagaggaaacgggagaagggggggggcgagcccaaaggaggggggacaacaaggaagggcgaagaggaacagcaaaagagaaaaagaagacagaaggcaaaaaaaaacaaaaaagaacaaaccaaagacgggccaaaaaaggacagcagccaagcaagaagcaagcaggcggaggaggggcacgggaaacacccagcagcaagagaagggggccgaagcccaggggcgggcaaccgaggggaaggaacccaaacccggccagggaggaaagggaacgaaggggggcaaaagaaaaaagcccgaaaagcacagggcccacggaaagggaagggggaggagcggggcggcacgggccagggggcacgccggggagccagacagagaacacggaaggcagggacggcagcccggggcgggcgacccacaccccgcaggcgcagccccgcccgcgcacccgcgacaggcacacccacccccgccaacgggggggcggagacggggccaaaccccagccgccaccacgcgggaagggcaagcacccaccccggcc

SEQ ID NO: 393 - RNA, 4946 nt, Homo sapiens
aaagagaaaagggccacaaaaagaaagagcggagacagcagcaggacccgccagggcacgacggggggagagggggaagaaggaagaacggagacaaaacaagcacagaagacggggccccaggaaaaccaggggcagcaacagaaaaagcagaccaccaacaaccgcacgcacacccaaccacgagaacaaaccggacgcagccacaagagaggaagaaagaaaaaacagccaacgagggaggagcgagagggcaggcagagcaaaaggaaggaggggaaaaaaggcaaagaagaaaacggcccccagcacagcccagaacaaaagacaggcacaacccaagaagcccccgaagaaaggccaaggggccaccaagagccaccagaaagagaacagcaaccccaggagccacagacaaccggccaccaagccaaaaacacccgacaccacgcgcccgaacaccaggaaagcagaacagggcgcaacaaaggcccaaacaagccacacccggaaacagaagaaacagccgaggaagagaaaagaaagggaaacccaccagcaaaaaggaccacagcagaaaacgaggaagagacggaaagacaccaacaccccaaacagaagagcccaacaaagagcagcgagacccccaaggaaaagaaaaaaagaaaaacacccaaagcagaggaccaaggacaagcccaaccagcaggggaacccacacagcaccagaaaacccgagggcaaagagacaaaaggccaccaaaaggggccagaaacaccaaagacacaagaaccgcccagagacaaagcccgcagagaggcgaaaacagagagacaaggggagaaaacaaaacacaacccaaaagagaagaaaggaaacagcccacccagcgagggaaaaggaaaggacaacacgcggacacagcccaaccaggaaaaaaggggcgaggcccaagccaaaacagagagaaagccagcaaggcaggcgagaagaacgggaagaaaaaaaaacagagagccaaagcaaacaaaaaacaaaccaaaaacaggcgaaacaaaacgaacagaacagaggaaagagaagcggaaaaaaaacaggcacacccagagaagcaagggccagacaccacaaaaagcaaaacgcagaaagcaagcacacaaaggccaggcaaaaaagagacacaaccaagcaaagcgcaaagcaagcaaaaaaaccaccaaaaaagaccaacaaaaaagcaacaacacgaacccagcaagcgaacgcggggagggcgccccggaggcgcgacgacaggggggggcgaaggcggggggagggcaacaaaagaagacaacaagaagcgaaacaaaaccccgcacaaaaaccggcagcaacgcggagcaaccacagagaacccaaaaggagcagccccaaaccgcgcgacaacagacggaaagcaaaagggcacaacaagcaagcaccaccaagagagaccaccaagaaaccaccggccaccaaacaaacaaccccaccacaggacagagagcagcaacgcacaccaggccccagcgggaccaccacacgggagcagacgcgcaaaagaagggccaaaaagaaggacaaaacccacaaaccacgaccaaaccccacgaaacggacccccaaagcaccagagggaaaaacaaccccaaacccgaagaaagaccacccagaacagaaacaaggcaccagagagaaccccagaagggacgccagacacagaggaaaacgaggcaaccaaagacaaaagagcaaaaagcgagacggagccgccgcgcccaggccggacgcggacgcagggcgcaaccggccacgcaagcccgcccccgggcacgccacccgcccagcccccgagagcgggacacaggcgcccgccaccacgcccggcaagaagagagacggggcaccgagccaggaggccgacccgacccagaccacccgcccggcccccaaaggcgggaacaggggagccaccgcgcccggccaaaaaaagcgaaaggaaaacccgaccagggcgcagaaggagggaacaaagaaaacaacacacccgacacccacagaaccaagacagaggaacaagagcagaaagaaagaaaccgagcagaggccaaccagagcaaaaacagaaacagcgaaacaaggacgcacaggcggccaacaaagcagaggcagagagaaacaaacaaggcccaggaggaaggaaagagcacggccaacaaaagcaccagcgacagccaacagagagcaccgccgcaccgaaacagagcggcgccccacaggaaagccagaggcacccgccaaagaaggcggcacagaaaacggagagagcccccacaagacagcacacccaacaacgcgcagccaacagcaccgccgccgcacacagaagagaggccccaaagccagaaccaacccgcagcgaaacccgcagccaacccccagcccacagaagaagagaggggccgccagaagcagcaggaaggggcgggaccaccagaccacaaaaaccccaaacagcaaaaggcggcccacagacacggagagcacaaacccaagaacaccaagcacaaaacggcaaaggcacaaaagccagcggcgccagccaacaacccccacaagcaacacccaccaaagaagagaccggagcccgcaccaaacacagagaccacgagggaaggggcaacaaaggggccagggaaagagagggggggagaggaaaagagaagaagaaggcggcggggagagcagaacacaacaacaaaagagcccgcaagggcacagcaggcaccccaaaacaaacagagcacacaaagacagggcacagacaccaaacagaaaaaaaagagaaaaaggaaaagagagaagccacaaggacaagagacacaaaggagcacagcgggaaaaaggcaccaaagacgcggacacaggggccacaaacccaagaaaaaaaaaaaagaaaaagcagacacaaaggcaaaaagcaaagaacaaaaaacaaggagccgcaccagaaccccaacaggacacaagagccacaaagaggaaaccagaacgacacacggaacagacccaggccaaagaaaacagcccagccaggaaagccacacacagccagaagagcggccacacacgaaagcaagcacaagaagccaccccgccggaaaagcgcaggcaccacgacagagacaagccaaagagacagcggaaagacacgaccagcgacggccccgccaaacagcccagcccacgccaaaaaaaacaaccaaaaaaaaaacacgaagcccccacagaaaagaagggcacccaaacacaaggacaccaaacaggaggaaaaaaaggaagaggcccgaggaaaaggcgagagccggccacagaaacgaccagaacggcaaaggagaagggggccgggaaagcacggcaacgggaggaccccaaggagaagaggaagacaggcaaagccaagaaaccgaccaaaggggaaagcacaaacccaaaagggcgaggagcacacacaaagggagagcagcccgagaggaaacccacacccacggggagaacacgagggccccacaaaaaacagagcacaccgacacccaaagaaaccccccaccccacaacccccaccagacaagacacacaagcccacaagaccgcaaccagagacacacacacacacaacgaaacaaaaaaaaaaaaaaaaaaagggagagcaggaaacgggggagccaaggcggaccacaacggccaacggcggggggcggagggaccacggaggaggggcccgcggcagcgccaaccggcgaacggcgcccaaaaggccgaggaacggggagccacacacaaccccccaccgagggaaaggccggcggaaggcacagccagccaaacaacgcaagcagaaaaagcacccaaggcagcaagcaagccagcacgaaagaaagccacgacaggaagacccagccagcaccgaaagagaagcccagaccccaccgacggaaccgaaaacaccgaccccccggaaccgccggggaaaacgaaaggcgccgggccagcccccccaaaacccagggcccgggacggaacaggaaacaccgcacggccgaccacgccccgccgaacgcgccgccgaagggagcccgcaaagcggggcccccaccccgccggccgcggggcgcgcagaccccggcccgagagcaggcgccgcagcgggaggcggcgggcagccgggcggcgaaaggcggccgggcacccgcaggagcggcgcgggccaggcgccccgccccgcccccaaggggcgccccgccccgccccgccccgccgccccaccggggaccggagcccccagggggccaggggacaccacgccagcggaccagccccccgcgccccggagaagggggcggcgacgcggaggcgggggggggccgaggggaggaaccgaggcgcgcgcgagaagagccgaggaagaagcagcccaaaagggggcggcggggggcccccagggaggcgggggcacgccaagggcgccgggggcacgaccggggcggcccccaggacaggcccgaggcgcgggcacaccggcaggccagcaccccagcccgaggcaggcgcggccagggagcggcaggaggacaccagcggggacggcacaccgcgggcgcaggcccgccgcccgcaccccacccaaggcccaacgcgcggacggcccgcggccgggggcgccggagaagcgccacagagggacccgggcgggggcccgcggcaaagggcccacgcacccccacaccgccccgggcggccgcaccggcaccccggccccggggccgcccggggggggggggagaccgggccaccgcgccgaccgcgacacgcgacgcagcgaacccggacccaagcgacccgccccgcccccaaaggcaggaac

SEQ ID NO: 394 - RNA, 1362 nt, Homo sapiens
gaaaaagagccccccaacgcacacacccaaaaggaaaaaaaccaacaccaaaagcaaaacacaccgaaagagaacgacccggggaggcgaaaccgcaaaagacaaaagcggcagacaagggccaaaaacaaaacagcccaaaaagaacccgcgggcccaccgaagcaagagaagcaaacccacacccggaaacaagaacgcccaaccacgacggcaagccgagggcggccaagaacaaacaaaaagaacgccacaggagagcaacacgcggggcgcacggacccaagcaaacggccaccgagggaaaaagacagaagagccagaaacggcgggacaagccaagagcgacgaccgaagcaacgagaccgcacaaccaacggggcccagagaagagacgaagggccaaaagacaaaacgaagaaagcggcgaagcaacagcgcaaaagaggggagccccgccaagcccaggggaaacccgaagcacgaaagaaagagagagcaaaagcgcagcggcccggaagccgggggcaagaagcgccaggccggacccccagaagagcccgcccccccggcccgcgagccaaagacgcacccaaccgccggcggcaggggaccgcccaaccagagaggacgaaacccggccgccggccggcgcgccggggagaggggggacaacagagacgagcagagccccgcgggggggccgaggcgagcgggaccgccagcccaggccaaggcgcgcgcggaccagggcggggcacgggaggggcagggccagagcgaaagggcaccacgcagcccggaggcgaagccgggagccagcccggcagaggcccagaggagccggaagggcccccggaacggcgcaaagagccgaaggagacccccgggcagcagcgccgggccgaggcggagggggccggggccaggaggaaaccagcccaccgcggcgggacgaacggcggccccgacccaacaccccagcccgcgcacaagcggcagagagcacccacaggacccagaaaaagcaaaacccgcccgcgccaggaagggcccagccaacaggccccccagccccagagcaagccaacagggacacgcccgggcccagcggaaacaagcgggggaaccgcaacggcgccggaacccggggaggaaacgccggcgcaccggcggccggggcggggcgccgcccaaaccaggcccggacagcgacgggcggcggaaagcggggcccggcagggcacgagcggcacggacagcgggccccaggccagcgcgggggaggagaacacgggggcgaagccgggggaggccgagcgacgacaggcaggcccgaaccaggcgggagggccagcgcgc

SEQ ID NO: 395 - RNA, 5233 nt, Homo sapiens
acccacagcgggcggcggcacaggaaagaaggggaaggcccagggagacgaaggaagggccggagccagccagaccccagagagagaggggaaccaaccccggaaagcaccccccccgggcggcccccagcccccagagcagccagacaacccagaaacccagcaaaccggggacagcagagacgcacggcccggagaccgagggacagaagaagaagaaaggggagacacacaccacaccaccaggcgccaaacacagccggggcacccggccccccccccgccacccccccccaggagaagcccagcggggcccaaaagccggagcagcaaaaccgcacggggacccaggagcaggggaggccaagcggcgggcacgccagccaagagaggccaagcagggcgggggagcagcgcaagcaccggggacgagacaggccaacggcccgggaagcacccgcccccgggaagccagaaaccggcggggcagccccacgagcacaaaggaggacaggagagggagaaaggaaaaggcccgggagcagagagaagaccgaagagacagcagcacacacgccgcaccaaaaagaaaggaaagaagcacgagcaaaagggccgcaggaccagaaaacccccacgccgaccgcccgagccaccgagcagccagggcggacgggaggggcccacaaaccgggaggagggcccacgggccccgaggccgccaaaaaaagaaaacaggccacacgaagcgacaggggcaagcagaaaaaacagccacgcagaggccacacagaagggaggaaaagagaacagagcagaaggacgcaaaaaaacaacagaaagagcagagcggaacagccccaacgcgccaaaaccaggcgccccagcagcaagcaaagaacagaagccaccggcaagggcgccaggagaaaggggccagaaagcaggacaggaaggaggccaacaagacggacccaaagcagcaacaaggccgaaaggcaaagagggccgggaaaccagaacagggagcgagcaggagcagacccagccccacgcccacagcccacaggccaccacaccgcccagcccacccgaggggcccccccccgggagcgggggggcggggagaagcggggaaacccagaggcgcaaacccagccaaacccggcaccacaggcccaaggcaccgcccgccgaagggcgaagggggccgggaccgggagcagggaggacccgggcagaccagccccgaaccccccagcggccgcgcccagccgggaggcccaaaggaagggcagcgggcccagggaacagaggagcacgcccgcaaaacaggaaggagacgaggcccagcaagcagcggggagccaaaacccacaaaaccgaagcacagcaaagcaagggaagaaaagaaccaccagggagcggaaaacgcgggaccgacccccccccccccaccgaacagaagaagaggaagaggaagaagggccggaaggggagaggaaaagagggagaagggaaaggggcccgcggcgccacgcgagccgaagcccggcagaagggccccggagaacacaaacgccccaccagggagggcccgaacccacccaagaacgcagggaaaccaggagacagaagcaaaaaaagagggagaggaagaaggaaagcaggaaggaggacacaaaagaaggaaacgaaaagagaggaaacaaaaagaaaaaggaccaccaacgaagggacaggaaaaagaaagaaggcgcaaagggagggagacggagaaggacgagaccgggcaaagcccagggccgagaaaccgcgagacagaggggcccggggcgcccaccccaggggcacaggagcgggccccgccgagccgcccgggagggacagacgagagcgcaaaaaacccgacgcggcccccccccgcccccacccccccccccccccccccccccccccccccccccgcccgcgcagggcccccgcggccggggcagcccgcagccgagcgcagccgggcgcgcgccaccgcccaccgcccggcccgccgcagcccgaaacggccacggccgggagcggaggggacagcggggacggagcccggcccgggcgagcggggcgcgccgcagagcggcaccgaaggacaggaggaaaggaccccggagggagacgcggggcgagcgggagcgggacgggcgccccccccgggcggcgccccgcccgagcaggagcacgcggccacgcgcgccaacagaagggcaaagccgcgccgacgccccgaccaacccgaaggacgcccggcccaccaggacacccggggggaggcggggggaaggaaagaccagagggagagaaaagggcccagaggcccgggaggcaggaacaaagcaaaaaaaaaaaaaaaaaaaaaaaaaaaaaaaagagggcagccaagggaaagggaaacggcagcaaaaacgcaagaaggcagaagccccaacgaagagagggagaaagagaaacagaacggcaacacgaggccagcacgccggggcggggcccccgccggagggcaagagagccaggccgccgaagccccggcgcgcaccccaaaccgaaagcccccacggcagcgaagacaacgaaaaacaagaccccggacacccgcccgaagcgggaggaggagcggccacacgcaggcgccagagggaggccccgcacccgccgcgagaggaggccggggacccgcgccaacccagcagaggagggggggaccccacaccccccgcacacgaggccccggccccgaaaagagaccgaagagcccaagcaacagaggaccggggcgagaagagcaaagaaagaaagggacccaccaacaaaaggaaacagggccacagacgggcaggcaacaggacacagaacccgcaccccccgcccaggccggccgggcccggggcacgagacagggccacgacccaggcggaggcagggcacaaccagccacgcaacccgcccccaggccaaaggacccccacccagcccccaagggcgggacaccagggaccaccagccggcagaaaagagagacaagccacaaacccagcggcgaacccgggccaaggacccaagccggcccccaaaggcggagcaggcagagccacaccacccggcccggggcaagcagaccggcgccggcaaagccagacccaaaggggcaaaaggccagagaagcagggagcaacaggcaccagcccagccaggccaaggaacagggaacacccaaggagacaagacgcaagaaccacggagcaaaggacccccacagaaacagcaaggccaggaagccggcagaagggcggcgggaggcacgcacacagcgaagccagcaggggggcacacaccacccaaagacacacaaacacaaaacaacagggcccgagcggccacgccagggcagaggagggaaaggcccaggcaacacccagccgggggggaagcccaagaaagagaagggccccccggaaggacaaacgccaggccccaggcgcagacacagagaggccgcaacccgaagaaaaggaggagaaagagaaaagcaaccagaccaagcagggcgcggagggccaaagcaaggcaacgcaggaaaacaaggagggcccccacagaggcagccccccccagagaggaaggaaaggaggcagaggcccgaaacacagcgagcaacccggggcggggggggaggggagcagaaaagagaaggccccccagagaggagaacagcaggaccaccaagaaccaaaacaccccggcaggggggagggacgcagggagggaaagccagccagccagaagccgacaaacacccgcgccacaccagaggcacaagccagccacaagcggggacagggcgcgaagcgccaaagccggaaaacaaaaaacaacaaaaagaaacaaacaaacaaaaaaacaacagcaacgcaggaagaaagaaagaggaaacaggggccagggaaggaccacagccaggaagaaaccagggaagcagaagcaggagggagggggcgaaaaccagagaaaaccccgagagggaaaccaggggacagaaagggcacgacggaaagaaaaagaaacccagacaggaaccaaaccagaccaaagagggaccaaacaccaaagccacgaaggaagcgagagacaaagcacgaccaacaacaacacaaccaccccaaaagcccgggaaaaacaaagaagagccacgacccgccaaaagccacaacccaaaaagggacaaccgcacaaaaaccaaagcaaaagccaggaaacgcgcagacagagcgcaggagcagacagaaggcagaagaagccggaagaaagaggggaaggggagaaggaaagggagggcacagggagaacagccagcgccagcggcgggaaggaaggaggaaagcagaacagaaaaaaagaaagaaaagaaaaccaaggcacgagaagagagcccagcaagggggaggggagcgaaaccaagcacggaggaaaaggacgcaacaaaacccgccaggagcccaaacgggggccaacagcagaggccacgcaaccgaaggccagaggaggcccggacgcccaggacagaggaaaccgagaggggaggcagcggcagcaggagagccgggagaacagcaaaaagccaccaggaggagcaagggaaccagggagaaagcacccagacaggaacgaccaggaacaaaagaaggagaagaggaaaagagaaagaccagcgcggaagggaagcagaaacaccaagcgcccagaagaggaagccagggccagggaaaaggcagaccaacacagcccaacaaagccgcaggcagaccaggcgagcccagaagagcacgggccggcaaagcaaaaccaaaaaaggcgaaaagaagcaaaaagggaacccccccccggcgagccaaacgcccacccggaaggccggaagcccccagaccacagcacccagagcacgcaagccacaagaacacaggcagaacggaacgcagcccccaacgcaccccggaaggcccgagggcaggggccagcaaaagagccaagggcaccaagaaaggcggcagagcaaaagaagagggaaggaagacagggaacaagcaggagaaggggagcaagcagaagccaccaccccaagaaaacaaaccgagaacaaaggaccccagaagagaaaaggaagcagggaaggaacccagaggacaga

SEQ ID NO: 396 - RNA, 159 nt, Homo sapiens
gaaaacaaaccaaggagcaacgagacaacacaggaaagcccgcccgagagacacgaaacccagagcgacccggaagaggcagaaagggcgccaaggccaaacacccaggagagcccacagccaaaaaccccgagagcagcccccaccaaccaaggcaaa

SEQ ID NO: 397 - RNA, 2644 nt, Homo sapiens
aaaaaaaaaaaaacaacgaccacaggaagccaccaacaacacacacacaaacacacacaaaagaggaagcagccaccaaagaaaaaaaaacacgagcaagagaaaagaaaggacccagacccaaaaaagaaaacagacaacaaaaaaaaaaaaacaaagaaaccgagcgaaaccgaaggcaaaaacaaaaaaacagaacagggccaaaccagaacgccaagggcagaagccacgcacagagcccacggcggccacaagagaaggaagagacccccagagaggacaccaggaagagggagaacacgaccaccccaccacaccacaaaagagcaccaagggaccaaaggaagggaagaggccgagagaaaagaaaaaaagcacccggagagagaaaaaaacacaccaaaacgacaaaggcaggaaagggcgcaacgccggaagcaaagccagaggacccaggacaggcagcccaacaagcaagaaaaccaggacaggaacaggcccacaggaggaagaccacaagggacaagcccaaaaggaccaccggcaaggcaagaacccaaaaggggggaaagccagaaacccaggagcgcaaagacagcaaaaacaccagccaggggcggcagacacagaggaacaacccagaggcccaagaggaaccgaagagagagcagcaacagcacaacagagggagcaggcaggggaacgcaccaggaccagacgcccagcccacagccccaaaaggcccaagggcagccaggaggggagaggaagcagggacaaagaggcagaccaacacccccgggcaaggaggcgcaagccgaaacaggcccaaccgaggaagaaaaaagaaccgacaggacaaaaccgaaagagacgcggacaaaagacacagcaaagccgagacaaccaagaccacaggcgaaaaaaaacaggggaagaggaaaaaggcccacgcacccacgaagcagaggagaacgaacagaaaaaaaaacaaaaaaaccacagggaaacgaaacagccacacacaacccgccacaaccagccaaacccggaagcagagcaggaagaacaacaggagaaacaaagcaggaaaagcgcaaaaaacaccaaaacagaaaccacaccaggaggacacagacgaagaaagaacaagaaagcagaaaaaaccccagacgagcagagggaccaaaacacacagagcacgcacacagagaaggaacaaccacccagaagccgccaggaagacgcacaagaacacacaggcagcaagcaacaaggggcaggccaaagaagagcagcaaccgccggcgagcccacagacaaggaagcaacaagccacaaagcgggcccaaacgaaagaggaagacccaggacaaaccaaagcggcagacaaaaaccgccaggcggacagaaccccccagggaaaaacagacacgcccaccgcaaagcgcgcagaggaacgaaaacaacgacggaaccacagaaccagagcaaagaaggcccaacaaaggaaagggggggcaagggaagccccagggcagggggacacagaacagaaacaagacacccccccgagagaaaaacaacagaggcacaaggaggaaccacagcccaaaacgagaccaggaacgccaaggaccggaaaaagggacggaccagaagcccgaagagagcacagcaagccgcagagaaaaacaacgcaacaccagcggcaaccacgacaacaccaccacacaaagaaaaagaaaccccacaagccaaccgacccccacccgacccccaccaaaggcaaaaaccagaaaacagaagaccacgaaaaacagaacagcaaagaaaaaaagaaaaaacaccccacaccagaaaccacaacagagaagcgccagcccaggcaaaaaacaagccacaaaaacaaacacaaccaaagcggaaacccaggcaaaggacagagagagccacagccagaaaacaaaggagaagaaaaagacaaacagaaggagggcagacaggggaagaccccagacaagagaccccaacagagaagccccccggcaacgcaaaaggacaaccaggccacaaaaagagaaaaggaaagcccaggaacagaggaaaagaagacgaaaaaagcaccgaaagaaaaaaaaaacagcgacacagaaaagagagcaaaggaagagcagagaggaaaaccagaaagcaaaaagcacaggcaaaaaaaaaaaaaacaccccacaaagagcgagcacaccacaaaacccagcacacacagcaccacgcgggaagccaagacgacagccaaccaggaagacacaaccacacgaaaagcaagccagagaggaaacccagcagacaaacgaaaggccaaaaaaagaacaagggaaaaaaacagaaaacagaaacaccacaacaaaccacaaacagaaagacgggcacacaagggccccccaccaccacaacccacagaaaagacggcacaccagccaccacgaaaggccaacacgggcacaacagacacaaggaaacggcaacaccagccgcagccgacccccgcccagggccaccaccgacagcaccacccgcagcaccgaaacggccaccccccagaacagggagaaaaacacaggcggccaaaacgcccacagaa

SEQ ID NO: 398 - RNA, 2643 nt, Homo sapiens
acgagagagggggacaggaagaacaccaaaacggacaccccgcaacaaaaaaaaaaaaaggacggaaaagcagcgggcgccccagaaccccgagcagggagcccggggaggcccggaacgcagcgaaagggcccggcggagagagcaagacgaggccgaggccccaggggcgaacccacacgccgccccgccccccaccccgggacgccccccacgcacacgacccaccggcccggcacccccccccccaagcccccagccccgcccagcgccccggaaccaagaaagggccgaaaacccaaaggcagccgcccggggaggggccgccacaggcagcgagacaagggcacaacaaaagcggggaagccgcccaacgcggcccggcggcggcgcggagccggcggccgcgccccaagcccgggcccagccacccagggggggccccggcggccgagcccccgcgcccgccgcgcaaaaacgggccacagggcccgggacaaaggcgcccacaccccgccgcccccccccggggaagacaaaaacgcagccagcgggccgcagagaaacgcagccggggagaagagcgcccggccgggccgcgaggagacgggagccgcccgcgccccgcgcgggaacagcggccagggagccgggggggcagggggcccagggccgaagcgcacgaccccagaaagcccggaccaggggcccggaggagggcgccaggaaaggaagcggggcagaagcggccgagggaaggagggggggcgccaggcgcccgggcgggcacgaccccggggggaggggccggggacggcccagggccaggcccggggcccccaccgaccaggccccccggacaccgggaaaaagcaccaggaaaaaggcccgagcgggccaaggagccgcagaagaggggcgggggaggggccccacagaacccagcccgcccaaggaccaccaggagagcgggaaagcaagccacacacgccgggcccaccaccgggaacaggccccaaccccaggcacgccaagccccaagcacccgaagcccaccaacagggaccaccagcacgcccgggaaggggcccaggcccacgcccacacaggcgggaaagggcccaaggagaaaacggacgccaagacacagaacagagcggaacggaccccggcagcgggaacaaaagcagaacagaagaagggagaggggcagaaaggggggccaggcccacccccgcaagcaccccggcagcgggggcacgaaccccccccggcccccgcaggagacggccgccggaaagccccagcggcgcgccggggagcggggggcccaccgcccacagaggcacggaggcaggcccagaggccccacggagccaggggggcccagaagagcccagccagggcacggagggagcagcacccgacccagggccaggcccaggcgcacccccaaagccaggccccccaggcccgggagaggcccaggcccaggcggcaggcggccaccgccacgaacccgaggaaacgagcacccgcacccccccaaagcgggagcagggaagagccgccaagaccaaaacccagcaccgaacgcccccagagcaagcagaggccccaaaacacccccccgagcccgcacgagacacgccccggcaaccggaaaagccccagccaagacgccagcccaagcaggaccacaggcccagagccagaccgcaccacagggccggcccccaggcaagcagggaaaggaagcgccgacagaggagcccaggcgccccaaggcccagagaggggcccagccaagccacgcgcaccacgccagcaagacacggaaagccaacacacacgacacacacggggggaagaaggcagaaaaccgagaacaaagagagggaaggagagcacagagcagccaagcccaaggggacagaccagcgccagaacaagcagaccaagcaagcgcggaagcaacagacccgggggacccggaccaggcagcccccaacagccaggccaccagcacagcacaagcagaaaaccaaccagcccccccaaaacagcacaagaaagaagacccaaacgcgaaaagaaagcccaaggccagcaagaggaagccagacacgaaaagaagccgaaaaaaacgaagaaagggaaaggggcaagaccaaaccaaagacaaaagaaaaagggaacggggaaagggaacaggaaccagcaaaaccgaagggcaaaaaaaacaaaacggcaggcagcagacagccaaaacagaagcacgaaccaaagccaacccaggaagggaccaacccgacccccccgcaacacacagcacaccacaccaaaaacggaaccgcacgcaagacggcacacccgaaccaaaacaaaaaaaaaaaaagaacggaaaagcagccaaagagcagcaccacgccgcaagcaaggaacccaagcaggcccagcgccaaggggaaagccagggacccgaaccacgcagcagcaagacgaaaggaggcaaaccaaaccagaaccaacagccaggaaggcagccaaggaggggaaggaggaagggaagggggagaagccaaaggaagaagaaaccaagaaagacggcagagccacaggaccagccaacacaccagcaga

SEQ ID NO: 399 - RNA, 1205 nt, Homo sapiens
aaagaaaaagaaacaaccgcgaaaaagcccaccacccccagaggaagaccgacgggaagaaagaaacaaaggaagaggccgaacaacaggagaaacaagcaggaagaaaaacagaagaaaaaccagccagaagggaacacaacaaacgacaccgggcaaggcgcagggaacccagcccgccccacaaaaggaaaaaggaggcccaaacacgagaccagcaccacccgaaggcacgagacgcaagacaaggcccaccggggacccggcaggacacgagcgcagcgcgagccaaaacaccccccccccaaccagaccaacgccccagccgaaacacgaggcgaacacacccacaaaaacccgaagggcaggcacccaaaaccgaaccagcgcccgagacgcgacccgcgacgcaagggaaaagaacccaacagagaggccccagacacagcagcccaagacaaggcgaccgagaacacgcgccagaccaggccaagcggagaggaccggggaagaacggcccgccccagaaaaacagcgaaccaagccagagcccaagaccacggaaagggagcaaagccaagccgaggggcggcagggccgggccacccggagaagcagccccgcccagacagcagcccagggaggggggcaacgcaggccaacaagcccagcgcggacagaggcccaggaccggaggcgagaaaccccgcccggcacccgacgcagcgcaggacccgccccgcgcggacgccagcgcaggccagccccggcagccgcggccgcccgcggccagcccgacaacaggaacccgagagcgggccgggccagcagcgcgccagacccggacggcaacaggccgccccagacgcccgccgccgcccgcccgcccagcgcccccagccccccgcgagggcgccccgggacggaaggaccaccagcgcggcgcccgccgccgggcgccgcgccgcgcgggggagcccgccgcgccgggccaggccaaacaccacgccccccggcccccggagggcccaagcgaacgcaccgcaggacaggaggagcacgcgccgggagggggcccgagccccgcaacaccgcggcccacgggacccccaggagggacccgcaggaacgcccacacccagccgggccagcccccacgcggccgggggcccaccacaacgcccgcccacgagaccgaggaggac

SEQ ID NO: 400 - RNA, 71 nt, Homo sapiens
aagaaagaaagaaaagcaaaaacagaagaaaaggacacacggggggggccagaacaaacaaaacaaaggaa

SEQ ID NO: 401 - RNA, 3406 nt, Homo sapiens
accgggacgagcccccaacccaccacgcccccgggcacgagggcgcccgaccggcagcagcaccagcagggcgggggcgcgaagcaagggccgcgacgcaccggcgcgaccacaagggccgcgacgcacggcgggaccggcacgggcgaacgcacaagcgaccgaaggggggacaggacggggggaccggcacagacgggacggaggggggaccggcaggccgggacgggcagggccgcgacggacagggggacggcacgggccaggaccgggaggccgggacggcagggcgccgaccgagacggcgcgagccaaggggcgacacccacagggccaaaggacagggccacccgagggcgcgaccccaacaggccggcgagggaccggccgcgagggcccaggcggaggcaggcaggggcggccagggccagaccgggcccagcgggcagagggaagcggcccgcagaaggggcaggggaaggccaggcgacgagaggcacccgggcagggaagggaagggggacagggccccaagggcccgcccaaacacaccccgaggccccccccccgacccacagcccaccccggcaccgcggaaggacgagcccgagagcggggaacccagccagcacccgagggacaccaccccgagggccgaaccaccccagcgcacagggagagcaggcgggggaaagggggcgcgacccgcagccaccgggccacgccagcccgagccccagaccagagcccccccgggccgcagggcacacacaccacagagcccccaacccgggacgcaggggaacaagccaccggcaggggccagcacaagacccgcaggagcccaccaacgcgacccccgaaccccggcacacagaacaaagccaggccacggaagcgccaggccaggcccacacgaggcaagagggaccagaggcagaggacaaacagggcagggcagggcggaagggagaccccagcagagccccaccaggcccgagggagccacaggaagccggagggccggccggcggccgcccccccccgcgcacggcggaccccgggcaaagcagagaggggccggccgggcacgcgccaccacggaccaccggcacccgcagcacacaacacagcaaggccggaagcggagcaccgccaccaccggcggcgcacaggcccacaggagcaccgcgcccaacacgagggcaccgggggcaggggcgcggccagcgaggacaagaacccaggacccgggcagccaaggcaaccccacccggaaggccgggaaccaggggccagcgggaccggagacaggacgcccagggcaaggccacccaccacgcgcccagaaccacggaagaccggcccgaccccacccaccgggggcagcagcaggaagcggacccccggcgccacccccgggaccaccgcggaccccgggagccgacggccccaacgcagaaaggaccgcaccgcagagcaagagacaacggaagccgacgggccccacggaacacggggaggcgcccggagcccgcccggcaggccccggcagggaagaggggccgccccggggcacggggaaaagcaaggagggggccgacaggggaggggcgccagccaaggcccccagaaacccaggagcacacaggaaggacagccgccgagaccccaccaacccagaccccccccaacacgcagccacaggacgcagcccacagggcgagccccacagcgcgaagagagccgaagggagcacccacccaggcgggagggggggccccgggagagggccgcgcaggaggaaggaggcggcaacaccccaggggccaaagccgagaggcgcggccacaagcgcccaggcccagcaggggggcacagcccacggggccccaacccccagcgacgagcaagccagccacccaggcaggacccggaacccccagacacagaggaaaacagccaagggggcacgaggaccccggcccaacggcacgcaccaagccccgcccggccggcgaacaccaccgagcccgcagacgcccaggcggcaggcgacccgccccccacccccggaccccagcccgccacagacccaccacaccaccagccaaacaagcgggaagcaccagcaggaaggcccaggagcggccagagagaacgcccgcgcccaaggcggggcccccgagggccggcgcgggaaccccaccgagagcggggagcagaggagaccgggcccagcccgggaaaagccacggaaggggggggacaggaagcaggggaggggaggggcaggggcccccccgaagccaaaacggaccgaggggagggaaggggcgcggccaggagggccagagagcgaggcagaggcaggacagcacgcccagccaagggggaggccaggccggggacaaagccggaagcccacgcaacgaaaggagacagggccggcagagcacccagcaccgagaccccggggccgggggcagggccgcgaggccccacccaacgaagccgggagaagaacagaaagggggccgaggccagggccagccgggaggcagagacgcgacggcgccccggagagaaggggccggccccccgagcccagcggggacacagagccccgcggggagagggggcccgccgcgcgcgcgcaggagacgccagcagcgggccgccgcgaggccgcggcccgggaccccggcccaggccggcgcgcggggagcgcggccagggacgcgcaccggggccagcccgccacccaccgcaccggggccgggagcgggcgcggggcgcgggcccggccggccgggcagggccgacgcgggcgcgggggggggggcgaaggcaggaaccaaaaggcgaccggagaaggaggaggcaggaagacggcgccggcgcggggcgcgggggccgggcgcggcggggggcgggggggcccgggcccggcccccccggccgcgcgcagggcgagaccggggcgcgggggcgccggggcgcggccagaagggccggggcgcggccgggcgcaccgcggcgcccagcggggcgcggccgggccgggccgggccggggcggggggcgcggggcgcggggcgcgggccgggcggcgcaggcgcgcgccgcgcgcgcacagcgcgccccgcccccccaccgacagacgcgggggggagggggcgaacccgcgacccgcggccgcccgcgacggggagggggcggggagggggcgggggcgggggcgggggcccggcgcggccgggcccccgcccgcggccgcccccgcggccgggcccgcagccagagagccggcgccgccggggcgggggacgggacagggggaaacgaggcccgaaggggcgcaggcacgcccggagccggcgcgcacggagaggcgaccgaccgc

SEQ ID NO: 402 - RNA, 440 nt, Homo sapiens
ccgcccacaaagcagaccccaacccagcaaagcacagaagccccacaaccacccaaaccggcgagaggaaggaagggacccgcagaacagaacaaagggccccaaacgccgggcacaaaggcgcaaacagaggaagaaacaggcacggcccaaagccagagcaggagcaagcaagcaccgaaacgccagcggagggggacggggagcggagggaggaaggaaaggccccaagccaccccaacaaaacagagaccaagagagaaaggccaacacaccacaaaccacgcagcaagcgagaagccagaaagggcacgcgaaagcagcaaaacccaacaaaaaagaaacaaaccagagaccaccaaacgaaggacagcagaaagagccagagaaggaaaaaaacacaaaaaacaagagcaaccaacaccaccagaaaagaaaaa

SEQ ID NO: 403 - RNA, 872 nt, Homo sapiens
acccccaaacaaaccaaaaaaacacaaaaacaaagaaaaacagccccaacaaccccacccaaacccaacaccaaaaaaccgcaacggcacacagcacgaaaaaaaaccaacagacaaagcgcagacccccaccaagccccaacagcagcaaagccaaaggcgcccagaagacccacaccagcaaaggcacgcaaaagccggaaagcccccagaagacgaacagaaagcccgccagacacaccaacaggcacgagaacagggacaaaagcaaccagaacacaagacaaaggcaaaagccacgacacgccgacacagggggacgaaaaaacaacacgcggaaggaccagaaaacggcccccacccacgaagcgagccgaacgacgacgagcgaaagccagccgaaaccccggaggggaagcacaaaacaccaacaccaacaaggcccagcggaaaacacagaacccacagaaggagccacagcgagcgcccgacaccgacaagacaagccccgcggacgcagcggaagcgcgacccagagcacaggccagaaacacggcagaaggaacacgggaaagacgcagaagggcacgggaagaacagccaaccagcagagaggagacacacggccaaggaagccaggagaacggcacccgagggacacacaaccaaagggaaagcaaagcgcaagaccaaccaaccagagaaaacaagaaggaaaaaacagcgggcacagggccacgcgaacccaacacgggaggcgaaggggcggacaccaagccaggaagagacagccggccaacaggcaaaaccgccaccaaaaaacaaaaaccagccaggcaggagccgcgccgagccccagcacagagaggcga

SEQ ID NO: 404 - RNA, 6211 nt, Homo sapiens
ggccagcgcacgccggaaaccccacacccccaacggcccgacaggccagcaaagcacccaagaggccccgaccacccaaacaaagcagccccacacaccacacccaacaaacaaccgagccaagacaccacagcaacacaaaccccccccacagaagaagcacagcgaaggggccgcggccaagcgcacccagcacccaccccagcgggcaggaggggccaacaacggggacagaagaaagaccgagacaggccccaagcaagcagcggagacagacaaaacggccaaaacagacccaaagggggggcaacacgcaggaagagaccaacgcaacgacagacaaagcggacaaggagcgcaaacaaagagaacaaaacaagaagccaaggggcccgccccgaaaacacgacaacaggaggggacgacgagcccccaaacagaaaggccccccccaacacacccgaaaagagcaccggccaggcggaggcaaggcagaccagccaccacaaccccgcccccaggcaagcacccgcccagccccaagagcgggaacaggagcgccaccagcccggcaagaagagagaggggcccagggcaggcggccaaacccgacccagggacgccgccggcccccaaagcacgggaacaggcggagccacgcgcccagccccccaacacacacaagcgccacccaacagagaaagcgagaagaaaacaagagaagccaacacaggggggagagggagccgccggcccaggcggaggcaagggcaaccggccacgcaaccccagcccgggcaaggacccgccagcccccaagagcgggacaacaggcagcacaccagcccagcaggaagagagacagggaccagggccaggaggccgaacccgacccagggaccaccgcccagcccccaaaagcaagaacaggggagccaccacaccggccacgggaaaacaacccaaacaaacggcacacaagagagaaggaaacacaaaacgagaacagaaaaaaaaaaaaaagccggccagaaagagaaaaacgccaacggagacgaggagggcacgaggggaggggcgcaccaaacgaaccaaaggaaaaagagcggccaggcgggggccagccgaacccagcacgggaggcgaggcggggacaccgagacaggagcaagaccaggcgccaacagggcaaaaaccaccacaaaaaacaaaaaaggccagggcggggccagccgaacccagcacgggagaccgagggaggggacaccgaggcaggaggagacagcccggccaacaggcgaaaccccgccacaaaaaaaaaaaaagacggcgcagggcggcgccgaacccagcacaggggcgaggcagaaaaagcgaaccgggaggcggagggcaggagccaagacacgccagcacccagccgggggacaagagcaagacccaccaaaaaaacaaacaaaaacaaagcggagggggcagagccaaacccagcacaggggggcgaggcaggagaacgcaccggaggcggagggcacgaagcgagaccgccacgcccccagccgggcaaccgagcgagaccgccagaaaaaaaaaaaaaaaaaggaagaagagcgcagccgggcgggggccacgccaaacacagcacgggaagccaagggggggacaccgaggggagcgagaccagccggccaacagggaaacaccaccacaaaaaacaaaaagagcggggggggcaggcaccaagcccagcaccaggaggcgaggcaggagaacgggacccgggaggcagagggcaggagccgagaggccacgcacccagccgggagacagaggagaccgccaaaaaaaagcgcgacagaaccaagaaaagagaggagagaaggcaagaagcgccaccagacacgcacaccaaggaagcaaaccacgacaaaaccagaaccagcaggcacgacaaagcagaaaaacacaccaaagcagaaccaggaagcaaggcacggcccaaaaaggccagcgggccgcaccgggggaaccggcaagaacaaacagaccggagccgaaaaggccgaaaggagagacagagcccagcgccagcagaggccagcaaaaaccaagagagagggaaaaagagaggaagagacggaagaaaaaccaaaaggcaacacgagaagcaaaagaaagaacgagggcccacacagagagccgggaacaagcagagacgaagcaaccacaggcacacggagaagcccacaggagaccagccaaagagggagcaaccccaccacacacaaaggaagaagcagccgcccgcccccgaggggagggcagaccaaaaccgaggggggggccaggggggaccgagggcaaaaagcaagcgaagcgaaggccagaaaggagcggggcaaggcgagaccgaaccaccggcagacagcaaacgcggggcacgagggcagggaaagaccgcacggggaggaagaaaggagcagcgggggcaacgggggcagacaacaaaagaggccggagaggaaaccggcaggagccaggcgggagacaaaggcgggggaccacaccaagccccggggaggcccggggacagccgaacaaagaggagaagacacccggccggcccgccacagcacagcacagcagcaacccaccgaacaaggcagaacaaaggaaggaaggaacccaccgggggcacaaacaaaaccaacccacaccccggccgggcacacagcacaccccccagcccccggaaggggccagaacggccagccaagaaaggagggaaagcgcggccacccagcccggcccccaaacccccgcacaacgaccccccccacgaccgaacagagacacgggaaacaacaggacacagccagaggggaaggagccggcccgaggacggccagccacaggggcacagcagaagacaggagggacccacgacaggacagcccgaaaaacacggaacgcaacgcaacgccgcccgaaagagccacaagcgcacgaggagcacggccgggagagggcccacacaccagagcgcccgcagagcggcacgcgggcggggggccacacgcccgcgcccaggcaggcgaagggagacacagccccacgggcaggggaagcacgcggccaaccgagggaggcggaagaagagaggacaagacccccacacccccacaccgaggcagcaggccggggcgggcgggaggggagaggagccgccggcccaggcggaggcagggcgcgacggccacgcaacccgccccggccaaggaccgcccagccccgagaagcgggaacaggcggggccaccaacccagcaagaagagagacaggggcaccagggccaggcagcgaacccgacccagagaccaccgccggcccccaaagagcgggaacaggcggagccacagccggccgcgggaaacggagagggggaaaacaaaaacagaaaagagaaccaggccccaacaacagaggccgaaaggacacacccacaaggggggggccaccgcagcccccccacggccccaacacaccagggcggcaaccccccccccgcccgaacagcggaccaccacagcaggagcgcagcaggcacccccagcgggggggcggcacgaaaaccagaggaccccacacccaccaaccccagcccaagggaaaagcccgagcacgagacagagccaccgcacccaggcggaggcagggcagacggccacgcaaccccgcccccggcaagcaacccgcccagcccccaagaacagagaacaggcacaagccacagcccagcaagaaagagagacagggcaccagagccaggcggccgaacccgaccggaccaccgcccggcccccaaagggggaacaggcggagccacggcccagccagagcacaagccaccccacgaagagccaggcaacagggagccaaagagagagaaaaggagaggacaagcggcgcaagaagaggggcgggccaaggaaacccaccaaggccaggacccagacaacaaaggggaaaggcagccccgccccccggacgaaccccagaaaagccagcgcgaacaggaacccagagcacgggccagagccgcacaagagaaaaaggccccgcccagcgacacagcccacgcgcagcccagcggcggagagggcaggcggacagccccggccccagccagcgcggcaggcacaaacccacaccggggggcccccccaccggcgcaaaacccccgaacggccagagacaaccagcccccagcccaccccggggagaggggaccagagggaagacacgcccaaggaacggggcgaccaagaaacgagacaaagcagcagaggaaagaccaggccaagaagcaacaaaaaacacaagcgggcgcagggccacgccgaacccagcacgggaggccggggcgggcagacacgagagggagcaagacagccgaccaacagaagaaaccgcacaaaaaacaaaaagccaggcaggggcgcagccgaacccagcacgggaggcgaggcaggagaacgcgaaccggggaggcggagagcaggagccgaggccggccacgcacccagccgggcagcaagaggaaaccgccaaaacaacaacaacaacaaaaacacaggggacaaacagcccacaaaaaacgggcgccaaagagaccccccaccccaagcggaacaacgggccaccaccccgccggcgcagagaccggccaccagacggccaaaagcacaagcagagcaagacggagacacgaaaccgaaccccaaaccaagggggcgaaagacgaaaaaaaaagggccgagcgaaacagacccggaagcagggcgccaaaacgaggcagcgaggaaggaggacagagcgcggccccccaaccacgggcacaaaaaaaacaagggacaaacagagcgaaccaacaccaacacgacccacgaagaaccccggaccacgcaagaggagaaggcgcccgaaagggcaaaacaacagcccccgcaagccacggggcagcggcaacgcgacagaaaagaaaaaccaccagcagccaaaaacaaagggaaaaagccaagagcgagcgccgcgcccccaccccacccccacgaagaacaaacccaaaagaacgaagcgcggaaagcaggcagcaccacgagcgggagcacgaaaacagagggcgcaccagcgggcccggaaggccacccgcccagaggacgaacggagacaccaaccgggggaccaagcacggcaagccagaggaaaaaaggcaaaggccagacgcagggccagccgaaccagaacgggaggccgagagggggaccaccgaggcaggagcaagacagccggccaacagggaaaccccaccacaaaaaacaaaaacagccggggggcgcgggcgccgaaccagcacgggaggcgaggcaggagaagcgggaggggaggacagagagccgagacgcgccaacacccaaccgggcaacaagagcaaaacccaccaaaaaaaaaaaaaaaaaaaaaacaaaaaaaaagaagaaggcccaagcgcccagggggcaaaagacacacgcagagccaggcccgcgaccagacaaagaagaggggcgcgccaggacaggaccagagaacagaggcaccggccacaggaaacgagaacagacccaaacccacaccaggagcacaacaggaagccgagaccggcagcaaaggagaaaggggcaggacacgcggagaggcgggcgggcgaggccagcacacaaagcccgacacagcacccgaccaagacaccggggcgccaggggggggaggaagccaagcggcagccccgacgggaacagcaccaacagaaccagcaaaccccacgaaaagcgcagagagacggacacggcgccaagcaacaaaaggggaacaaacgccaagggcccccccccaggcccaaggcggccagcccagcagaggcgcaacacaaagaaggcgcggaagacagggggacaagcaggagggacgcgggccagaacacacaccccgaagcggaggacaaagggccccaccaaccagaacaaggagacgcaaagcacccaccgggaagaccagaccggaacccccaggccagaacgcccaggcacgacacaggaagagacggggggggggaaagccaagacagcagagcgaacggcccccaaaaaaggaaacccaacaccaagagaaa

SEQ ID NO: 405 - RNA, 29982 nt, Homo sapiens
acacaagacacaccaggggcagcagcgcgggcacaagcgacgaaacagccgaacgagcccaaggagagcccaagcaaccaagacagcccaacggcaaaaaagagaaaacagcccggaccaaacccagaaaaccccggccagggaccaaacaaacaacgaaaggccccaagcaggagggcagaacgccagccgcacgccagaggaaaggcccacccccaaggccagcacgcaaaccgccgaagacggaccaagcagaggccgcaaagcaaggacagacacacaagcccaaccgccggagggagacgggcccaaaccacacgcaggagaagggcacaccaagcggcccggcacaggcacagcaaagaaaccaaggagcaaggagacagcacaggggaggacccagcccacacggaagaaggccgccaggcaaggaccgacaaaagaagggcccgcccagagggccgaggaagagaaggagaggcaaagcagaggaggcaaggggaccaacagggaggaagagaaagcaagaggggggggggggagggggggacaccacacgagacaggccaggcacggcaggcaacacacaccacacacccaaacacgaacacaagggaaaccgagcagaaaaggaccgacagcacagagcaaggaaggaaaaccaggaaaaaccaagaagagacagaggaaacaacagaacacaagccaaaaaaacaaaaccagaaacaacagcagcaaacaggaccaagcaggcgcacaaaaaaaaaccaaaaaaagaaacggacgcaaagccagacaaacaagagaaagcaaccacaaaaaagagaaacagaaggacacggaaaagacccagaaagcgggcagaggaagaaaccagagaaccagccaaagggaagaaaaaaaaaacaccaagggaagacaacggaccaaaaggaacagccggacaacgcagcaaacaaaaagcgaaaagcgccagagaaggaggagacacccgcgaaagccaacggcacccccacccacgagccgccccaaggaggcagaggcaaggccaaaaccagggacaagggggcaagccagcgcagaaacagagggaagacaacaaggcacaggccaagcaaggacccgccccaacaacaacaccacaggaaccgacagagccgagcaagcaaacaaaagccaaaaagaaaagggaaaaaaaaccacagagcaggaaaaacacaaacagagaaaacagagagaagccgcagacccgccaaaggcccaaaaagaaacaagaccagcgaaaaaaacccaaagcgcacaacaaaaaagacacaaggaccaaccaggaaggccaggagcagagccaaccgcccaggacgaggcgagacggcagggccgagaacaagccccgggaggcacgggccaagaggccaccaagagacggaaaccgggaggccaaacaagaccaaggcccgaaaacagagaagacaaaagcgccaagcaggagacgaaggcgggaggaggcgacgcagaccccacaggagacaagccagggcggcggggcagagcaaggcacgacagccagaggaaaccagagcccagaagccacaaagaagaaaccaggagagaggaaaagcagggggaaaggaaagaagagaggaaagaacagaaagaacacagaaagcagcacacaacggcagaaaggaagccacagaaaaaagaaggaagggagaagaaaggaaagccaaaaaaagagagaaagccgcggccaggggaggcagggcggaccagccacgcaacccgccccgggcaagcacccgcccagcccccgagaacgggagcagggggccaccagcccagcaacaagagagacgggacaccagggccaggcggcgaacgcgacccaaggaccaccgccggcccccaaaggccaggaacagacagagcagcaccagcccgaagaacggcaaaacacaagaaaaggccagggcagggccacaacgaaccaacaggggaggcgaggggaggaacaaggccaggaggagagagccgagcaacagagagacccacccacaaaaaaaaaaaaaaaaagccggaggggcacagccgaggcagcaccggaggccgaggcaggaggacggagcccaagagcaaggcgcaggagcacgacagccacgcacccaggcaccaggacacacaggagacccgccaaaacaaaaaaaaaaaaaaaaacgagaagaagaacgagaggaaaagagagagaaaccccagagcccacagaaaaaaagaaaagaggaccagacagagacccacgcagaaagcggcaaaaaggagcgcaacagcccagaagggggaagccaccagagggcacacaaaagaaaaaaaaaagagccgaaaccccgcacagaagggacacgcagaaagcacaagcacccccaccagaagagccgggggacacaaagccaaccccgaaaagcccagaacagagaaagacacagagacacccggggaaagaacaggaacagcagaaagacaaggaaaaaagagacaaaaaccaacagacacaaaaacacaaaggaacaacgagccccccgaacaaagaaaagaacaagaaagcagcgagaacacgaaaacaagcaccaaaaaaaaaacaagaacgggcaagaagacaagaggccaggcgcagggccacgccgaacccagcacgggaggcgaggggacacgcaagccaggaggaaacagccggcaacagagaaacccgccacaaaaaacaaaaagacggcagggggcgcaccgaacccagccgggaggccaggcaggagaacacgaaccgggaggcgagggcaggagccgagacgcacacgcacccagccggggaagagggagacccaccaaaaaaaaacaagaaaggaaaaaagccagggagaggacgggaacagaaaaaaaaggaaaacagaaaaggccggccgggcgcagggccacaccgaacccagcacgggaggccgaggcgggcggccacgaggcaggagagagaccaccggcaacacgggaaacccgccacaaaaaacaaaaaaagccaggcgcgggcggggccgagcccagcccgggaggcgaggcaggagaaggcggaaccaggaggcggagcgcagacgccgagacaagccacgcacccagccgggcgacagagcgagacccgccaaaaaaaaaaaaaaaagaaagaaaaggcccacaagcgggggaaacagccaggaaacggggccccccccagccccgcacgccggaacaacggacggccacggagaccccaggccacaggcccaaacaaggcgaggacaaaggagcaagggagggggccaaggccagaaaaaccagacaagcacaacgcagaaccaggagagacagcccgagcccccggagaggccagcaccaccgcaaacagaaagccccgaagcagggcgcgaggaacacacccagggaaaggaaggaaaccccgagaagaaaagcaacggaaacagagggagggagcagcaagcaccaaaagagcagaaggccaagcaggcgggccaaggaggaacaaccccagaaggagacaagagagcagacaaaggcaggaaaaaaccaggaaaacaaaaaaaaagaagaacgcggccacaagggcggcaccggaaaagaccaaggcacacgaacggagaccacagaccaaacagcacaaaagggaccgaaggagccgaaaacaagcaccgaagaccaagcacaccccagaaaccaaccaaagcaggaaaggggaaaacacagacgaccgccagagcgaacaaagaggagcaggcccgacacagaagagacgagaagacccacaaagacacaaagaaacagagcaacaccggccgcgcacgaggcaacgggggaggacgaggcaaacagcacggagcgacagacaaaaaaacgcccaaggggaagccaaacaaggcccggaaccgcacaacaaaagacggcacagccacaaaaacgggacaaccagaccgggcgccagaaacccaaaaaagagccaagaacgagcagggagcaccgaccaagggcccagggcaaaaaaggcaaagggcggggcggggccacacccgaacccagcaccgggaggccagggaggaggagccgagaccagaggagaccagggggcaacacagaagagccccccacccccaccacaaaaagaaaaaagcagagaaaacaccgacaaccaacaaacacggccacaaccaaagagaagaccaaagaaaagccagcgcaccagaaacacgaagaccaaaaagaaaagaaaaacgaagggaagagaaaaaagaacaaagaaaaaaacaaccacacaaaaaagaacaggaaaagccccccaccaagccagccagccaaccccaacgggaaaaaaacaacagagcccaaacccccccacccacgggcagacccggcagggaccggaagcccggggaccagcccaacagaaagaaccacgacgagggggcagaaccggacccagcgggggaacagaaagagcggggcggggaccacgagacagacagaaggagaacccaaggcacgaggggaaaagggggacgcaagaggcagaaaagcaagacaaaacaacacacaacaaaacaaacagacgggagaagaaaaacacagaagacaccaaaccggagacagccacacaggaaaacaggaggcgaagaaagaaaggaagaccgcaaacgaggaaaaggagagaccacccggacaacaacccaacacaccgggcaggaccaagccccgacaagcccaaaaaccaagggaagcgaccccacaggccaggggaggcggagagagggaaagccccaggaagggaagaccagccagaaaaaaagagcgacagagaggaagcgaaacagaggacagccccccccaccaaaggaacaagaaagcaccagaaccgacggacgggccacggaaacgggagggacagacgggccaccgaaggcagaggaacagacaaagaacccagacccaggcgagagaacgagcaccaacaagcgaagccccacaacggaccgaagagagccaaaaacagaaacaacgagcagcgacgaagcgaaaccacccagaaccgcaaagcaaaccccaccaaggcaacacccgccaggaccaagccggcaaaccgagcagagaccccaccacccgaaacaggacacaacgccaacaccccgccaccggcccacacaaaagcaagacgcggaagacggaaacaaagccgcacagaaggggaacacaggacaagggagaggaagcaagacagcagcacccaagaaacaaaggaaagaaaagaaaccaagccacccagcaaaagaaaggaccagaaccgagcaaaggacaagaaaagaacagcagaagaaaagcccaccggggaacgaaaggaacaggggaaggaagggagggagggaggggaaaaccaccagacaccagggcgcacgaaaccagaagcacaacaagcgcaaggaagaacacccacaggggggcaacgaagcaaaaaaaagccaaggccaccaaagggcagagccagaacaccaaggacgaagacccagagcaaaccacaacaaacccacagccgcccacccggcaagcgacgcagccccagggccacgagcaagggcaggcaggcgacggcccagcgggcgcgggcccaccgggagcgcccccccaggcccggaagccaggaaacgcccggcgccccccaggcaaccggaaaacaaggcacgaaaaaggcggcccacaaaacccgacgaccccaccaaccggggcgggcgccacaagaaaaagcccggaagcaccaaccggcgggacggcaagagaagcacaaaacccacacgagcgcaaccgccaagaaagccagccaggaaaccgccacaggcccaggaacacacaaaacccgacagcaagcaaagagagaacacccgagcaggcggggggcccagaaacccaaccacgacacagaacacgaaaaaggagagaaagggagggaagaagcagacaacaaggaaagaaagaagggagggagggagggaaacagacggaagggaaccaagaacgcgaacgaacaacaacaagacagggccaggagcaaacagaccgaaaaaaagagggaacaagaacgagacagacacaaccaaagaaaaagcagaacggaggccagggggcacggccacagaaaaaagcaagccgacacccccacacaccacccccagaggagggacaggggaaggaagagcacagacccacacgaagccaagcaggaagcagcggaacagacacacaaaaacgcaggaaggagggaaaaaacccggccaagaaagggaggcacaagaaagagaagcccaccagcaggaggacaagggagacggacccccgaccaggcccgaaggggcggccccacccaaaccacgacgagcgccaaaccccacagggggagggacagggggaggaagaacagggaggggcccagcgccagaagcgaaaaaccagagacgaggaaaagggacccccgcacaggcccgccgccgccacgaagacagccgcccccccacccgccagaggaggcccccagccaggaaacggaacaaaaccccaaaaaccagccaggagcaagcagcagagaacagacaacacaccccacggcagccaaaacacaacacgagaggaggaaaacccaagcggaggccagaagcaaaacaagggcagcagggccacgccccaacggcccagaagagaaccccgcaccagaggggcccggccgccgggcccgcagggcccccggccggcccacgcccccaagacaccaagcgaaggccaaccaaccagagagccacggcgagaggagccgccgcgcccaggcggaggcagggcagaccggccacgcaaggcccccggggacgagacagggccaccgccccaggcagaggcgggggacgggccacgcaagccgccccgggcacaccacccgcccagccccgagagcgggacacaggcccccacaccagccggcaagaagagagaggggcacggagccaggaggcgaccgacccggaccgcccaccggcccccaaaggcgggaacaggcggaggccaccaagcccagccaacacaaaacgcaaagacccccaaaagacacacgagacaggaggacaaggaggggaaaacacccaccacagaggaggcaggaaacgacgcaagcacagcagggcaagaacaaacacccgagaacaagcgaaaccaccagagacaacccggggaacacagagaagcggggcgcaggggccaaagagcaaaaagagaaaggagagcagaaaacagaacaaaaaagggccagagggccccccaccagcaaggggaggggaaagaaaaaacgcagaagacgggaaacaacaaagcgaagaaccagcaggggaccagggaaagggaaagaaggagacagacaagacggaggcaagaacaagcaaggcaaaaaggagaagccccaagagcacaggcagaaaaaaaacaagagagaagaaaagaaaggaacacaacacggaacaagcaaagaagacgaaaaaaaggaaacgcacggccagggagaacagcaaaacggcaaagcagagaaaaaacacggaaaagaacagagaaacagccgcgcgaagcacccccccaaacgggaagaaaaacagacagaaaaggagaaagaacaaagaaaggcagaaaaggggaggggaggagagggcacgaaccaacagcaagaaaaacacagacaagaaaagaaacaggaaacagaacaagggaaaagcaaaacaaaagcagcacagcacgcgaaacacgaccacaaaccccggaaaagcagcacaccaggaaggaagcacacaggggcaccacacgagcgaacaccaaacaacaaaagaacagggaggcgcgcaacaagcccgggagccaagggcccagagaaagaaaaggaaaaaccggcaaagggaacaaaaacaaagaagacgacggagaagaagcaaaaaacaacaaaacagcacagagagaccaagaaacaaaaaagaacaccaagaccagcaacccaccggagacaaccaaaagaaggaaacaaaagaggcaacacgcacaccaagcagagcaacacaaagccaggaaggaaagaccaggccacagggagaaggaaaggaaaagggaaacacacaagaaaacaccagccaaaaaaaaagggggggggaaccgcagcaacaacaggagaacagaggacaagcaaggaaaaagccaggcacagaaagacaaaacgagaccacaaggggaccaaaaaggaacaggaccagcggcggggggggaaaaggagggaaggaggaaagggaagaaaaagggacaaagcagagagacagggaagagggagacagcacagcaggggaccagaaaaaacaggagagaaacaacgccaccaaaaaaagaagggaaggagagaggaaggaacaggaaacagccagggacaaacaaaacacacagaccccaaaaggcacaaagaggaacaaaaaaaaacaaaaaaccaggacccagaaaggaccccaaagaagaagaaaggaaaaggcacagaggcaagagggaaaaggaaagccgccgaaacaaggagagaaaggccaccaaagaggacccaccaacagcacagagagaacagccccacaaaccagcccgagcggcaacacggagaacagacgaaagcccagagagaaggcacgaagcccgaacagaagcaaggaaaaaggagggcccccacagacaaacggcagaagaaaagaaagaaaacaaaagcaggaacacacaaaagaacacgcaacagagagcaagaggggcagggaacagaaaaaggaagcaacagaggcagcgcgcagagccaaacaggaaagcccaggacacgaaccgcaaaagcccgacacggcaaaagggaaaggaagcgcccccccgccacaggggaagcaaaagcacggaccacggaccacaccagagaggagaggaaggggagaaaaagagccccaaacaccgcccgggaggcacaaaccagcagaacgaggagcccaaacgcgcaagcacccacagagccggcaccaaaaaggacaggaaaagaccaaaaaaaccacaaacccccccccggaaggcggcaccggaaacgcgaggcgacaccggaacacccgaaggcgaccagcagaacaaacaggaaaaagacaacccaagagagagagcaaaacggaccaagcgggaggcaacaccgcagagacaaagaaaaggcaggaccaaagaaagagaagggaccaacacccaaaacaaggaaacccagccaagacaaaaagacacagaaaacaagacccgcgaacaggaacacgcccaaacacacacacacaaaaaaacagaggaacgaggagaggaccaaagcaaaccaacggaacgaagacaacacaaacaaaaaaaacacaaaaagaagagcggaacaaaaaaaacaccgacaaaaaaacgcaaaacagaaaacagagaaaggcaccccgcaccaagaaacaaaagaacagaaggggaacaacaaggcacaggcgcagcgcggagcaaaccgaaagcccggaaacgaaagagaaacccagaagggcaacagccagcacacagggagcaagggaacaaaacaggagaagaaagcgagcagacgccaaaccccaaagggcgcaaaaggcaagaaaaaaaagcaaaaccacagacacaaaggcgacgagaaagggagacaacagcacaccacaagcaacgggagagaaaacaacgcccagccacggggagagaaccacaaaaggccgacgcaaaagaagcagagacacaaaaccagaagaggggacaacccaaaacaggggaccaaagggcagcaagaccaccaccggcgaaaagagaggagcacaagagcgaaagaaaggagaaacaaaaggaggacgagaggaaaaaacgaagaccgcaggaggggccgcggaaacaggaagaagcgaacaaccccagaggaaagaacacacaaaaagcacaaaacacggaagcgaagacacagcacccacacaggaagcagagaagaaggggaaaacaccacaaagaaacccacacacagcgcaacggacccaccggcaaacagaaaccgaaacaggaaaaaaagaaaagaaacaaaaggaggccaagaagccaagacaggggcgcaccggcgagagcccgcgcaggacccacagagccccagggggcagggcacacagggaggcggcgagcagcagccaggccccccaaaagccaccagcccacccaggaaacccaaaccagaacccaaaccaacaagaaaccaaaggaggcagagcccaaacccaacaacaaaaccaccgcaaacgccacagggaaaaaccaggggagaggggaaaagcaaacccagcagaaaaaggacaagccgacagccaaggaggacccacagcgagaacagcgagggcaaagcagagagaacaagggccgaaaagcccagaacaccagaaggggcccacgaccaaaagagaaaaaaaaggggggaggggagggagaagaggaacgaaggccaccaggcggaagaagcacagacccacagcaaaaaacagaacaacgcagagacgggaaggggagagagagaggagaggcaagagaggaagagacaacaacaaccgaaaaaagaaagcaaacaacacggcaggcgaaagccaaccacaaaaggccaagagagcacaggagagagaccaagacaccgagaagacggaacaaaaaggagaagacaagacaggcaaaacaaaagaaagaaacacaaacaaaaaagcacccacaaaaacaaagcagcaaaagcacaaagaagaaaggaaaagagacagagccaccgcacccaggggaggcaaggcagacggccacgcaaccccgccccaggcaaggaaccgcccagccccgaaagcgggaacagggcggccaccacgccgggcacaaagagagagggcaccagggccaagcggcgaacccgacccggacgccaccggcgccaaaaggcgggaacaaggcagagccacgagccggccaaaaaaagaagagacagggggggcagaaaagaagaagcgaagagggacagcacacaaggacagcaaaaaaaaaggaccaaaagggaaaacgagaaaaccaaaaaccagacccgagacggagcgcgacggcccagcccccgagagcgggaacaggcgcccgccacacaccggcaacgaagagagaggggcccagggccaggcgcggaacccgacccagggacgcccacccagcccccaaaggcgggaacagggagccacgccgccaaggcccaaagaccagaaaggggcaaggggcaaccagagagggcacacggaccaaaccagaccccacgagagagaagaggccagaagccagcggggcagcggggcaaaccacaaaacaagaacacaccgggccaccgaaaaaaagaggggcaaagcgaccaccggaaaagcaagcaaagccgcagagaggaacaagccagacaccgggaagacacaaagagaaacccaaaaaaagcagacccaaaaacaaacacaaaccgagaaaaacaagacaacgaagccgacagagcgaagaacaaaaccagacagagaagaacagccaacagacaccaaaggaaaaagaaacagcaaacaagaagaacaacaaaaacccagacaaggaccaggaaacagaaaaggaaaagcagccggcaaaaaaaaagagaagcaaacacacccagaaaaggcgaagcgacagcagaaaaaaaaagcacaagagggaaaaccaccagaaaagccaaccagaaaaaacaaagaaggaccacgaaacaaaacccaaagcaccagagaggacaccggagggagcccgcccaacagagggaagagcccggcaggagagaagggcggccgaaccagcgcaagaacccaggggagaaacgagggcacacgagaccaggagcagccaacaggcaaggagccacgaacgaccaaggagggagcgagaaacacagcaccaaaaagaagcaagaaaaaaaaagagaaaacaaagaaaaaaaaacgaccacccaaaccagcgaggacccacagaaggagaagaaagaaaaagggacgccacccccaaccgggcaagacagccggagcgaaacgaccacaagagggaaacagcaacacaaaaaccgaacgcacccccacacgaaacacacccgccccaagggcgagcaaccagcacaaacagccaaaagcaagggacaaaaaaaacaaaacaagcaaaaccacacacacacacacacaaacccccaggaacaagcccagacgaacccccacccaacacgaaaagagaggaacaacacaaccaaagaaacaccacaccaccccaacaaacacagggagaaaggggcaagcagcgaaggggggggaggaagagaacaacaaccaacaaagaaacggagaaggaaagaacacgagcggacagaaggacggcaagaaacaaccagagaggaccaagaaccgcaggaacaggcagcgcaacaaaacgaacaggaaaacgggcagacgcaccgaaacagaccaggcgggaaaaagccaaagagccggaggaaggaaaagggcacccgaggacaggccacaaggaggcagaggacaggccacaagaaagccaagaagagagccagaaagcacaaaaaaccaaaaaaaaggcaaagaacacgcaggaggagaaaaggcgggggagacagagcgccggccaggcggaggcagggcgcaaccggccacgcaaccccaccccgggcaagcgagcccgcccagccccgagacgggacacaagcgcccaccaccagcccagaaaagagacggagcaccagggccaggaggccgaccgacccagacgcccacccagccgacgcccaacaaacacgcgccaaccagagacacgacagaaccggcaacaccaaaaaaccagcgccacacacccgccgacggccaaggccgcccaagccaagcgggcagaagaagcaggaaaaacgaccaaaaaaagaagagaggcagcacaagggggaaagaagcgagaagagaaaacaagacaaaccacagcagacaggaggcaaaaggcagaaaaacccaagagaaaaccaagaaagcggaaacaccggcaagcccaagcgaaacagcgaaaaacaacaaacaagacaaagaaaagaagccacacaaaaagccaagagaaaaagggaggacaaagacgaaaagcgacaacggaagagggaggaaaaagccacaagaagggaaaaaaaacccacagacacaacaaaccaaaagggaaaaagaagagcacaccggccgggcaggggccacaccgaaccccagcacgggaggccgaggaacaggacacaaggcaggagacgagaccaccggcaaacaggaaaccccaccagaaaaaacaaaaagagccaggcggggggggcgcggagcccagcaccggcaggcgaggcaggagaaggcagaacccgggaggcagagcggcaggagccgagacgcgccacgcaccagccgggaacagaggagacccaccaaaaaaaaaaaaagaaaaaaaagagaaaagcacccagggaagccgcaagaggaaaaaaaagaaagaaaaaaagacacagcaaacagaccacggaggaagggccaagaaaagcaaagcacccccccccaggggaaaccaacaggcgaaccaaagcggacaagagcgaagacacccggggaaaaaggaggaaacgaaggccccggagaaacccgggacaggagcaaacgggcagccccaaagagcccccagcaccaccccgggccacacggagccccccagaacacagcgccagcaggcaaaagaggcaaaaggagggagacgaaccaggaagaaggggggagaaaaaacagaaccaaaacgaacagaaaaaaaaaggggcccaaaagcaggcagcaacaacaccaaaaccgaaacaaaaacggggagagaggaaaccggcagcccaaaagggcaggcccaccccaaagcgagggaggacaccaaaagacgggaagacccaggggagaggagcgaggcccaccacagccagcagcgacgcgccaggagacggcaaccgggaccacgaggccagaaccagaacacaagccaccgggaaaccagggcaccagccggggccacagaacagaagaggcccccaggcccaaggcagacaccacaggccaggcacgaggcaggaaaagagaaaaggccgagcccacgccacaaagaagggaaaaaaggaccaccaagggcggggaagaaaagagaaagcagaaaggccggacaaagccaaggccagacacagggaagaagcccccaaaaagcgcaaagaacaccggaggcggaaaaccaaaccgaacgggcccaaccccgagagaaagaggcgggagggccagggagcgacacgcaagggacgagcccgcagcaagcccagacggaccagcggagaggccccacgaaaagaggggcggggcagacccagcccagcagagcgcaagagggaagcgaccaaccaagcaggcaagaagccgaacggcaaacaaacccaggcaagggagacagccagcaggaagcaaaaagagaaagaagcagcccgcaaacagagggagccgcaacacgccagcggcccgggcccgacagccggaaggcaaaaaacacagcgaagcccacgacccaggggggggaaaccagaaaaaccgagggacagacacaaaggggccccaaggcacaagaaagaaaagagaaccacaagcaccacaaaaccccccaggcacaaacaccccaaagaggaggagagaaaaaccccacgccagagcgaggccaaaaaacaaaaaagacaacaggagaaaaggaacacaggaacaacgcaaggggccacagaaaagaaagaaaacccaaagaggggagaccgggacaaaccaaacaaaggggaaaagggagaaagacaaacaaaggaaaaagggagggaccaagggaaaaggaaaggacaggaaagagaaagggaaaggagcagacggggccgggaaagaagccggaggccccccgagaaagaagggaacacacaaaggaaacagcccgcagacagaaagggggagggcagagagccccgcgcgccaagcccaacaaaaaaaccacgcaaagagcaagggagcaacgaccccagcagaccaaacaaccaacccccccccccccccccggcaaacagggccccgcacccaggcggaggcagagagacaggccacgagcagacccgagccaagcagacccacacagcccgagagcagggcacagggcagcagccacggcaaaaaagagaggggcaccagcgccaggcggagaacccgggccaaggagccccgccgggcccaaaggcgggacaggcagagccagagcggcaagacagcaacaaacaccgaaggaaaaacgaccgacagagacgggcggagccgacaccacacaagaagcccagggaccaacaaggaagggagcccaacagagcaacgaacagaaagcgggagagaggcagggccaggcaccaagaagacccgcacacaggaggggaggacacgccacacagagcgagcagagccaggacacccaccaccagagccagccgacacaccacaggacccaggacaaaggaacgccccaagcccacaggcaccaaaacaagcaaacacaacacaagggagccaagcacacacaaacgaaggaaagaaaagggaagcagcccaaaggaaaaagggacaaaccagaaacagaaggacaaaaaacgagaagcagccccacacggcccgcaaggccacaggaaccgagggccgcagcccaccgggaggagggccggccaccagacacgaccgaccagccaccaacaaagccccagaggcaagcaccaggaaacccaggcccaggcacaaagaaaaaaaaaagcacccaaacagaaaacccccaaaacccgaacaacagaccacaaaagacacacacagcaaaggcaagcaagaggaaagcgagccaaagccacaaaaagcgaaagagcacaaacaggcaacaaggcaggccaaggaacagagaaacaaacaaaccaaacccaaacccagcagaagaaagggaaaaccaagacagagcagaacaaagaaagaaacaaacaaacaaacaaaaaacaaagacaaagaaacaaaaaacgcgaaaaaaaaaaaaagaagaccaagcaagaaaccaaggaaagaagagagaagacaaaaagccagagaaagaaagagagaaacaacgaaccacagaaaacagacacaaggcacagaacaccacaaaaacagaaaaccagaggagaggaaaaccggaaagaacaaccccagcaaacagaaagaaagaagcccgaacagaccaaaacaagcagagagagaagagaaaaaaaaaccaacaacaacaacaaaaagccggaccagaggacacagcgaacaccagacacaaagaaggaccaacagacacaccacaagaagagaaagagggaacccccaaaaaagaagccagaccacccaaacacaaaccagggaaggacaaacaaaaaaagaaaacacagacaagccgagaacaagagcaaaaacccaacaaaaacagaacgaaccaacagcaacaaaaaggaacaccagacaaggggcaacagaagcagggagaaacagcacaagcaaaaaggaacaccacaaaacagaaagaaaaaaaacacaggcaccaaagaggcagaaaaagcagacaaagccagcacacagaaaaacccagcaaaacagcaacaaaggacaacccaagaaaaaagccacagacaaacccccacagccaacaaacacgaaggagaaaaggaaagcacccggaaaacggaacgagacaaggagccacccaccaccacaaaagacgaaaccagccagagcaacagacaagagaaagaaaggcacaaacagaaagagaaagcaaagcacggcagagaccagaaccagaaaacccaaagacccccagaaagcccggaagaaaagaacagcaaagcaggaaaaaaaagacacaaacacagccgcgcacaccaacagcaaccaagcgagaagaaacaagaaccaacccagaagcgcaaaaaaaaaaaaaaaacaggaaaacaaccaaggagggaaagaccgacgaggaaaacacaaaacacgcgaaagaaacaagagacacaaaggaaacacaccagccaggaggaagaacaaaggaaaagaccaacgccaaaagcaacacagacaagcaacccacaaaaaccaccacaccaccaaaaaaaaaaaaaaaaaaaaaaaaaaaaaaaacaaaacaaggaaccaaaaagagccgcaagcaaagcaagacaagcaaaaagggcggggcggggccacgccgaacccacacgggaggcgagggggcagacaccaaggcaggaggaaaccagccggccaacagagagccccggcacgaaaaacaaaaaagccaggcaggggcagggcgaacccagcacagagaggcgaggcaggagaacacgaaccccaggaggcggcaagagccgaaacacaccagcaccagccgggcgacaagagcaaaaccgccaaaaacacacaaacacacacacacacacaaacaaacaaaaaacaacaacaacaacaacaaaaacaagcaaaaagaacaaacggaggcacacaaccgaccaaacaacaaaggccagaccaaaacaggcggacggaaaaaaagccacaagcccaacggaacagaagagagaacacacaaaaaacccaaaacagagccaaagaccaacagagcaaacaaaaacaaaaggggggaagggacaccacaacaaggggcgagaaaggcagccacagaggagaagaaacggacccaccaccaaaaaaacaaccaagaggacaaggaccaaacaagaccgaaaccaaaaacagaagaaacacagaaaaaccccagacaggcaggcaaagaacggaccaggaacccaaaagcaaagcaacaaaagcaaagaaaaaggggacaaaaacaaagagcggcaggcaaaaggaacacagcagagaaacagacaacccaaaaggggagaagaccacaacaacacgacaaaggacaaaccagaacacaaggaaccaaacaaaagcaagaaaaaaacagcacaaaaaggggcaaggacagaaagacagccaaaagaagaaacaaaggccaacaaacacagaaaaaagccagcacacaagacagggaaaggaaacaaaaccacaagcaaaccaccacccgcaagaagggaaaaaaaaaaaaaagagggcgggaacaggaaaggggaaacgacacgcgggggaacgaaacagacaaccacaggaaaacaggggagaccaaagaacaaaagaaacaccagacccagcaacccacacgggacacccagaaaaaaagaggcaaaagaaaaagaaccacagcagaagcagcacaacgcagggaaaacgggaaccaacccaaagcccacaacaacaagggaacagaaacaggaaaaaaaaaagaaagaaagaaaaaaacaaaaaaccaacaacaaaaaaaaaacaaaacaagaaaacagaagaaacaccagccaaaaaggaagaaaaggcagagcaaccgaagggaagggagaacaggggaagaaccaggaaagaaaacaaacaaggcccaacaaaggggagcaagcagaggagcaaagggaagaagaacaagggccgaggggggccacacgacccagcacgggaagccaaggggaaggacaccgaggcaggaggagaccagccggccaacagaaaccccaccacaaaaaagagaaagcgggcaggggcacacaccgagccacacgggaagaaaggcaggagaacgcgaacccaggaggcagagggcaggagcgagaccggccacgacccagccagagacagagaccgccaaaaaaaaaaaaaaaaaaaaaacaaagacgggggaaaggggggaagggggagggaaaaagacacaaagggacaggacacgccggggaagggcaccaaaaccacaaaaccacaaagaacaccagaaccaaaaccaccaaaaccaaaaagcccccaaaaccaggaaaaaaaaaaaaaaaaaagaaaacaaaaaaaaaaaaacaaagagcaaaagaaagaccacccaagagggggaaacccaacacgaagagaaaaaaacgaagaagcccaccgaaaaggaggccagcaacacaccgacccacagccaaggcagacgagaagaccccgaacaaaaacagcccaggaaaacgccaagcagaacaaagaggaccaccgccggcccccaaaggccccccaaaagcagaagggggacaaagaccaacgacaaggaaagcaaccaaagggggagcagaggcaaaaaaggaaacaagcacaaaaagaaaacaacccaaaaccagacccaaacagaaaaggacgacaacggcgacagccacaaagagaaaaaaagaagaacaaaaagaaaaaagccagaggaagaagaaaaaacacagaaaccacaccaaagaggccacgcaccaggcacgccaggcacaacacaaacagcacacagaaaaacacaaaagaaaggagaaccaaaaagagaaaacagacaaaaaaaacaggaaaccacccaaaaaaagagccaggaaaaaggcaaaccaacacaacggaacacacacaccggcaaggaggacaaggaacaaaggccacaaaaacaaggcacaaacaccaggagccccagcaacacagcgcaaaaagaagccaaacgaccaagaagaaacaccaccacaccaaggaagagggggaaagaaaacgcaggaaacacgcagaagaaaaacaaagacacacagggaaacaaaaagcaccgagaaaaaaagagaaaaaaagaacgcagaaaagacgagaaagaagggcaacccaagaaacagaaaagaaagcaaagaagaaaaggaggacaggacaggaagaaaggccaggaagcaagccgaaaagaaggcaaggccagaagccagaagacaaagccacaagaagcgaaagaaaacacacggaaacaaaaaaagggcagacaccagacaaaaaaaacgaccaaagcaagagggccaaaccagggaccagagacaaacccaccagcgggcgcagaggagaaggacagcaggagaacccacagcccaagcaaacaacaagacggaagaaggagcaaagggcaaaaaagaggcccccgccaccgaggacagaagccaagaaaggcaccagagcaaccaaaaaaaaaaaaaccccaagccacagaacaaagacaacggaaaagaaaccgacaagaagagaaagaaacaaaaacaagagaaacaaaaaagccacacaaagagaagaggcgccaaaaaagcaaacaggccagaaaagcagaaacagaggacaaggaaaaaacagagaacgggagcaaagaacaagaaacccaaacgccgacgggccaccacggaccaaccaggaccaccagggccagacccaagcagaggggagcaacaaggaggccccaagaaaaagaaaaaaaacgcaaaaacaaaaaaggaccacaaaccaaacagggcccacgagccacaaaagggcagagaagccggagcaaagagagccgaagaaagccaacacggaaaccacccggacaagcaaaaaaacggaaagcacgagaaccccccaagaagaagggggcgggaaacagaacagcagacagaaaaagcacggggaaaaacaaagagaaaggaaagagcgcagcacaagcagggacgggaacacagggccaagacacaggaggacggcggacaaagagcgggacaaccaacaggaaaaaacaacaacaaaaaaaaacagaaggcaaaaaaaaccgacaggaccaaaagggcgacgcaaacagacgacacaaggaagaaagaaaaaccaggcagaaccaggcaaaacacagcagagaaaagccaaacacaaacacagagaaagaaaccgaaaccgagaacggagaagacccacggaaggggggagagacagaaagagaaggagaaacagcagaaaaccaaccggggcaacacgcgggggaaagaagagaagagcaccaaaaagcaggccggaaaggaacaggagccacaaagaaagagaaaggccaaaaaaagaaaagggcaaaaacaaacgaaagcgggcaagcaagccaaaggggccacccaacagcccacccaccgaagcagaaagaaaacaggccccacccagcccacggacgaaacggggaaggggcgagcgaacgagaagcccccagggagagccacggagaacgagccaaagaagaagcgcagacgaaaggagaaaggagcgaggaaaggggcaacgggagaggaagagaagagaggaggcaggaaagcaaaaacaaacacaacagcaaacaaaaacacaaccgcgcgaaccaaagcgcgcagggagcaccaggcacaacaaaggggcaaaaccaggagccgcaaaaaacaacaagaaagccaaacaggaaagcaaaagacagcagaacagaggaggaaacccacgcacaaaaaacaaaaaaaccagcaaccaaaaaacacagaagagggggaccaaggcagaagcaaaagagagcaacagagacccccccagacaaaagcaaaaaacaggcgaacgcagacaggggacgagagagggagggagaaaacggagagagaggacagagaagggacgaagagcgaagagagaggggggagcagaagaggacgagaagaaaagaaagaagaaaaagcagcaagagaaaaaaaggccaaaaacagaccacagccaggccagggaagagagagggaagccacgccagaagcacggaagagcaacagcagaaccgccaggcaaagaaccagccggcccagggcaaaaaagacgaagcgcggaggccgcccaaggcaaggaaacggcacaaccacaagaaaaccgcgggagaacccgcagcaaagacaggaaccccagggaaggaagacaaaggcacacaagagaaaacgcaagacagaagagacagggagaaagcggggggcaaaggaggggagaacaagccagggaaagccgagagcggccccagcggccgacgacaccgagcagggcaagagacaggccaccccaaccgcagagcggacggggggcagagggggcaagggagagacaggcccagcacacaaagagaggaaagaccaacagaaacccaagccacaggccacgggcagccccccaggaggagaaaaagagagccgcacaagaccaaaacgaaagaggggaacgcaggagcagcggcagggaagagggggaggccgggagagggaaagaaaggcagcgggggaaaggaggaccggaaaaggcccaaaagcaaggcaaggcaagggcccggcggagaagagacccagaacagagcacacccggagacggaaaacaaggcaggggaccaacccggaggggaaggagcgaggagggcgggaagggagaagacacagacccagggcacaaagccaggacagacagcacgacaaaacaaacacacaaaccccagaagagacaaaaccccaacagagagcaaacgaggcacaccaaggaagagaagcaggagggcaaaggcgagcagggcagcccggcaccacaggaaggaagagggggggaggagaagggagacagaaaaaagcccagacacaggaaccgggccaacagaaggcccgcacacccgaaggggcagccaagccagaaggaaagacaagagagcagccaccccccgaccagagaaagcggcgcggaacgaccacccaggccgaccgccacggagccgccaggccgggagacaggagaggggcccgcaccagggggagaggggccggagcaacaaaaccacagacacacaaaccggacccaacagaaaacgaagggaaaggcaaagagcagaaccaagcagcaccaaaccgggaagacccagacaaaaccggacagagagaaggggaaaaggcccccgacacacacacaacacacacacacacacacaaagcggagaaaagcaagaaaacccacgagaacaagggagacagcaaacgaccagaagagaaggcaggacaagaagaaaacacaaaagccaaagccacaagcacgggaacacagggaacgcccagaagaaaaaccgcaaagaccggagcacacaaaaccgaaaaacacaaggggccgggcaggggccacgccgaacccaggacgggaggccgaggcgggggacacgaggcaggagaagaccagccggccaagagggaaaccccgcacaaaaaaaaaaaaaaaaaaaaagggggggggggcgcgaacccagcaccgggaggcgaggcagaaaagcgaaccagggaggcagagggcaggagccgagaggccacgcacccggccgggcgacagaggagaccgccaaaaaaaaaaacaaacacaaggccaaagaacaagccccccacacgagcaaaaaaacagaaaaaaagaaagaaaaaaagacgcagacggaacggcccggaccacagaacaccaaagcgggagcaagccgagcgacggagccaaaaccaggaaagaacggaaggagacaaaaacaaaaaagagaggaacaaagaggaaacagagcacaaaaccacaagccacaaggggaagcgcagagagagcacccacgcagcaggcgcaccacagagaaagccaaaacaaagcccacaaaaaaaaacacagaccagaccacaaaaagcagaaaggccgggcgcagggcacgccgaacccagcacgggaggcgagacaggggacagaggcaggagacgagaccaccagccaacaggggaaacccgccacaaaaaacaaaaaaaaaaaaaaaaaaaaaaagcgggcgggggggggccgagcccagcaccgggaggcgaggcaggagaagacggaaccaggaggcggagggcaggagccgagagcgccacgcacccagccgggcgacagagcgagacgccaaaaaaaaaaaaaaaaagcaggaaaacaaaagaagaaagcaggacggagagaggcacacccagcaaacacaaagccaaaaggggaagcagcccaagagccaagaagaaaggaaaacacaggggaagacacacagggaaaaaggaaggaaacaacacacacacaacaagaggaccgaggacagagaaggaaaaagccagcagaaaggaacaagacccagggaggaccagagggcaaacaagacagaaagagaagggggccaggaacgaggaggaggggaaaggaagcagaaagacaagaagggggaagagaaaaagcggaaaaaaggggaaggcgcacaagaaaaaaaacaagcacggacggccaaaaaaggagggccgggcaggggcacgccgaaccagaacggaaagccgagggggggacaccgaggcaggagcgagaccagccggccaacagggaaaccccgccacaaaaacacaaacaagccagggggcgggcgcgaacccagcacgggaggcgaggcaggagaacgcgaacgggaggcagagggcaggagggagacaggccaccaccagccgggcgaaaagaggaaacccgccaaaaaaaaccagaaaagaaacaacgacaacaacaaaaaagcaggaggaaaagaggaaccgcaaagaaaaagacaaggaaaccaacgccagggaaaagacggcaaagccagaggccagcacaaaagaacaggagagcaaaaagcagaaaggagccagacaaacgccaaaaaaaagaaagacgaccgcaagagacagagaaaaacaggaaaggggaaaaggaggaagaaccaggacagacagcaagaaaaagaagaagggcggggccacagagcggagggccgaagcaggcaggacaaacagccaacaaccggaacaaagacgaggaaagaaagaaacaaggccacagcaaagcagagaaacaacaaaggccgggcaggggccacgccacaacccagcacgggaggcgagagggcggacacaaggcaggagacgagaccaccggcaacacgggaaacccagcacaaaaaacaaaaaaagccaggcagaggcgggcgcccgagcccagcaccgggaggcgaggcaggaaaaggcggaacccaggaggcggagcgcaggagccgagacaaaccacgcgcccagccgggacagagcgagacccgccaaaaaaaaaaaaaaagaaacaccaagaaagcggaggcaaacaaaagacagcccagaaagaaaacaaaaacggcgcaaccaaaaaagcagggaccgcagaccgacagaccacaaagaaggagaaagaaaacacgaacacaacgaccacaaaaaaaagaaaggcagacgcggggccgccgaacccagacggggccaaagggaagggcgagacaggaggagaaagccgggcaacagggaaacgaccccacaaaaacgcagaaacagcgggggaaggcaccgaggcccagcaccgggggcgagggggagaacacggagccggggagaagcgcaggagcggacacgcaacacacccaaccggggaaagagagaaaccgccaaaaaaaaaaaaaaaaaaaaaaaaaaaaaagaaacgcagcgggcacagggccaccgaacccagcacgggaggccaagggggggaaccgaggcaggagggagaccagccggccaacagggaaaccccacacaaaaaaaccaaaaaagcgagaggggggggccgaaaccagcaccgggaggcgcggcagaagaacgcgaacccaagaggagagggcaggagccgagacgcacacgccccagccgagcaacaagagcaagaccgccaaaaaaaaaaaaaaaaaaaaaaaaacgcagcaccaggggcagaagaaagcaaagacaaagggaaaaacaaaagaacaaagcggcagagcaccgaaggagacaagaaaaaaaaaacaaaaccaaagccaacaaaaccagccacgaggcaaagggaagccaaaccaaagagaacggacaacgaaaggcaaaggcaaaaccaacaacagcagccacagagcaaaacaacccagaagagaggggcccgcccaaacacaaacaaaacgacagcgaagcacaacagaaggccagagggaggcaaagcagaaaggacgagagagcagagcaagcgggccacacgacacaaaaaaacggacaggacgaaagagggccccgacgaaagaacagaggcaaaaaaaaaagaaagaacaaagcaccggaaccaaacaaaaaaggaaggagaaaacagaagaaaacaaaaaacaaagagcagggacaaagagaacgaaaggcaacagaaaaaaacagccacacaaaaaaagcaacaccccaggaagcaaggcagcgacgagacgccaggcggagcgccaacagagaggcaaccccccagccaaaggagacaagcaggccagcagcacccaacagggcgagaccaggagaccaaacaagacaagagaccagaaccacagcaccccaaggcaggagaaaagacaaggcgggccagaaacaacccccccacccccccaaaaaccccaggagagaagagagccccgcgaaaagcaccacaccccacccaccccccaccccccacaccccacaaacccaccccccagcacacgagcagaggggccacgagacaggggcacgcagaggggaaagacgggagggccagacaagcccaaggacaccaaccagcggggccccgcccgccccccccgccagaaggggcaaaagcacggagcagcacggggacccaaggagaggaaccacccaaggacagcgagagaaaagaaaagagccggacacaccgcgccggaaacaccgcacagccgaacagcaccccagaccggcacaaaaaaagacccaaaaagcccccagcccgacacaggcaagcacccaccacaggaaaagagcagaaaacagaaacaaaaacaccagagccaagaaggacccaggcaacgcaaagaggagagaaacacaaaagaagcgaaaaaggccgacagcacccaaacaaaagagagacagaaccagcagaggaagcgccggaaccgggaaggcacacgaaacgcggcggaaacagaggagcacgaaaggggacgccgagccgcgaagaggggacaaaacaccaaggacgaagaaaggaacacgaggaaaacaaaaaagcaaacaaaggcacacaacacaaaaaagcaccacccaacgagccgaggggagaaaagaggagacagagcaagcggaaacccaccgggcaggcccaggggcacagagaaacacgcgccagaggcagaaaaaacaaaaggagaacgcaacacaaagaacaaaaccccaagagaccagcagacccggcagcgagggagccgcagacgggggcagggagagaggggaggggcaaccccagggggacaccaagggcgagagcggagcagaccaaaggggggaaaagaggaaaaacgccgagagccggacagcccggcaaccaacaaagaagggggggcccgaaccacgagaagggagaggccaggcccagccgggggagaaagacgccccggcccgggcggcacccgcccgcccccccccgccacccggcgggcacaggagccaccaagccggaaagaaccgggccaaccgcacaccacacaccggcagaacacccaacaacgagaggggaagcagcgcagaaaaggaaccccaacagggcaaacaaaaaaagaaccgaagaaagaaacggaggagcgagcaaggacggcaggcccacgcccaccccaggagggcgcagcagcgacggcaggaaaagagaagaacaaagggcggggcgggggccagccgaaccggcacgggaggccaaggcagaggacacgaggcaagagacgagaccaccggccaacagggaaacccgccacaaaagacaaaaaagcgggcgggggcacacgccgagcccagcacggggaggcgaggcaggagaacacgaacccaggaggggagggcaggagccgagacgcaccacacacccaaccggagacagagcgagacccgccaaaaaaaaaaaaaaaaaaagaaaaaagggccaccccgcagagggaacgcgaaacacgacaacacggcaacaggccagaacccacaggcacacaaacaaagagggggcgaaaagaggggagcgggccaggaaaaaaaggggacgcacagagaaggggagaagacaaggaagcaacagcgcgcgccagcaagcacaaagaggggggagaaagcacgagcaacaacaggcgaacccgacaaagcaccgaaagcccccacccaagggaaggaagacagagagagaccagccaaggggacacccacgggggcgacaagagaaagggccaaacgccccaggccagcacaggaaagacagacaggaacaccgcccccgacagggacgcccgcccccccccccccccccccccccccccccccaccgcccccccccccccccccccccccccccccccccccccccccccgagacggagcggccgccccaggcggaggcagggggacggccacgaacccgccccgggcaagcaagccccacagagcgggaacaggcgcgcaccaccagcccagcaagaagagagacgaggcaccacgagccaggcggcgaacccgacccaagggccacgccggcccccaaaggcgggaacgggcagagccaccggcccggggcacgaagaacaggagcccaaggcagaccccggggacacacagagccggcagccagaaaagagccggcacagagaaggaaaaaaacggaaaccggaaagagaaaaaagcagaaccccagggcaaaagaagccagagggaaagggcaaacaagcacaggacaaggccaaaggcaggagacaccgcacccccaaacagccaaaacccaaagcacgccgccaggacccccagagacccacaaagacagagggcggacaccagacgaacgccaacaaacagaaaaaaaagcaagcaagaagggaaggacaggaacagaaaggcagagggaagggaacgagaagaagaaaacacaacaagaagaaaaaaagaagaaaccgacacaacaggaggacagggcaaaggggaagaaaaaacagacagcacccaaacaagaggcacaaaagaaaagccaaagccaagacgaaggcacacagcacaagaaagagaacaaacaacgccagcaaccacagacccaacagccaacacacgcaaaaacaaggaaaaaaaaccgacaacggaggagggcaaaaggagacaacaaggacacagcacaggaaacaaaaaagacaggagcaaaacaaaggggcaaaggacaagacgcacacaggcacaacggacgagaggggagccccgaaaaccacaggagagagccgaagcgaaggaacacagccgcaaagggaaaaggacgaaagaaagagagcaaaaacacaaaacacagcagcagaaaaaacaaaaaaacagggcaggggagaaagacaggccaaccagggaggggacacgaacaagagaaaagcagcaagacacacagaaaaaaacagagaaaaaagagcagaagcggcacaccacgaaaagggcgcacccacaccgccaaaaaacaaagaagccgaaaaaagcaaaagcagcgggccagcgaacccagcacgggaggcgaggggcagacacgagccagaacgagaccagccgggcaaggggaaacccgccacaaaaaaacaaaaagagcgggcaaggggggcgaccaagcaccgagaggcgagggggaggagcagccagggcagcagaag

SEQ ID NO: 406 - RNA, 1761 nt, Homo sapiens
gaaaagcgcaaagcaaaaccaaaccacaaggaacaagcacagcggccgagcacccccccacaagcccaccacgcccccaaaaggggaaggagcacacacgacccaaaaaaaacaaaaaacaagacaggacaaaaaaaaccaccgaccggcaggcccaacaacggcccaacgaggggacaggggacccccgcagcccagaggcaaccacaccccgacagaggagcgagagaacgacaacagaccgccccgcaccgaggccgagaccccagggaaacaacaagaaaaacaagcaagacccaggagacaaggcacagggaccacagccagaacagaacacagaggacccaaggggcccaggaaccaggaggaggggaaacgcgagaacaccagccgagcgcgggcccgggccagccccccacagagcagagaaaagggagcccgcgggaacaggggggcaagccccaggggccagggcccccaaagcaggcaaaaagacccgccaagcaaccagcggagcagaacagggggagggagcaccgaggccaggaggccccaacagccccccagcccggccaccaccaggggcccgggagacagccagaggccagaaacggccacccacgagacaagaaccacggaccagccagggccgaaaagcaaaagaacgaacggaaaaccaccgggggggaggcggacccgcaggacgcaacaacccgaggccgccccagggaggacaggcaaagaagcaaaggcggaaaacaagacagaacggggaaccggaccgggccagggaaccccccccaccggcgcccccgccccaaaacacagcaccaaacccaacgcccacgcggcgccgcgccaacagcccgcggggaggcagaacgagcagccccagacagaggagaaacaggccaaaagacaagagcccaccaaggccaacagagggaagagccgcagaaccaggggcggaagccaggcaccaccgcgcgggcgcacagagcggcagacccagggcgggcagggccaaggacgacccaggacccaggccggcagaggcccgaccgccgcggaagaaagaggaggaagcaaaccagcccccggggggcaggccaggcacggccggagaaggagggaaacaccacaagcaaagagcacccccacaaagcccccccggacaggaaggcacacggcggagcccagaaacccagaccagcagaaagacgaagggagaaggcagaaaagccaaaggcgccccaagaccaaacaccacgccccacaccaccccaacagaaaaggaaacgccgagaagagcaggacgccagagccccagcaaaaagccacaaagcacaggcaggcagccaaaaaagggccccggcaggccaccgggaccccagcagggccacgaggcaggcccgagcaggggggaaaacccccgaggggacaggcagacacaccggcccacccaaccccaggggcacagggccccacaccccccccacccacagccccaacacgaaacgaaccaggacaccccacccaagccccagggggccagggcaggcacgaacccagaacagcaggaaagccacggccgggcgggccgccggcagccccgccgagaccccccacagccagccaccccagaccaccccaccgacaccccccggggggagaaagaacccagcccccacaaaacccccccccaccgccaaggcccggacgccaccaaccagcccaggcccggcccgccccacgacccca

SEQ ID NO: 407 - RNA, 6858 nt, Homo sapiens
acccggcccgaacagagagacgaggagcaggcccaggcggccaaacccggcccaagcaacccccaccaaccccaaagcacgggaacaagcagagcaccacaccggccaacagcacaaggaggcgagcggaaaagcaaggggaaagagaaacgacgaccaaagcaaagagaggacaaaacagaagaggaagggaaaacagaaaccaccaggacaggcaggaaaagaacaaacaaggaagggagcaacaaaaccgaagggcagaaaggcaaggggaaagcaaggaaggaagcagggaaagccacaaaccaaagcgcagccagagacagaaggcagggacacaggaaacgcgggaggacacgcaacacgacggagacacagggagagcggggagccaaacaaaacggagcgaaacccacacagccccgcagagagcaagggccaccccgacccaaccagcagaagacggaaccgggcaaagagcggaaaagggccaggcaccagcccccaaaaaaaagggaagagggaacagagaagcgcagaacagcaaagaaagaacccaaaggcggaagggaaaaacgccaaaggaagaggaaaaaacaaccggcaagaccgaagaaaaacccccaccaagccgacgagcaacccaaggcgaacgggcgacaagggcagccgaacccagcacggagggcgaggcaggaggaccggagccaggagcaagagagccgggaaacgggaaaccccgccaaaaaaaaacaaaacaacagggcagggggaggccgagccagcacggaagcgaggcgggaggagcgagcccaggaaggaggcgcaggagcgagaccaccacgacccagccggagacagaggagaccgccaaaaaaaaaaaaaaaacgaaggggcgcccagcgggcagccagccgcagacagacacaaccgaccacagaagcacaaagggccacagaaagagagaaacgaaaaaggccagggaaaccaaacgaagaaagacggacagggaaacaaaccacacccaaaacagggcaaaacaaaaacccccaaacagggcaaggaacaggcagggcagcggcccgccaggaggaggcgggcaccgccagcaagcaggggggcagcgagcacaagacaaggaggacccacaccgggggccgggcccccacaggccgccaccagggcaacaggccggcacaaacaaccagacagcaggcccacaccggaacacacacacaaacacagacacggacaacgaaaggagcaagccaagcaaacgaacaaaaagaaagagaagacaagcaacaccacgggcaacacgacacccacagccacaccccagcgaaccccacccgaccccacccccacgagggacacggggagcacccacgacccccgcaccggacaaaagaaagaacggcgccacaccacagaggacaggaaaaaaacacagacagaccgagcaggagagcacagcgaggggaaagggagccagggggagacagggccaccgcacccaggcggagacaggggcgcaacaaggccacgagccgacaccgacacccaggccccacgcccagccccaaaagcgggaccacaggggcaccaccagccagcaacaagcagagagggcgcaggcccagacggccaaacccgggccaagcagcgcccaccggcccccagaggcgagagacaggcaagagccacgcacagccgccaaagcgccagcacacaagacccgacacgaagagaacagaaccacacacccacccaaaaaacagggaaaaacacgaagaacaggccacacgagggaaggaggaaacaaacaggaggcaggcaggcccacggcccacacggccccacagggacggcaaaagagggcaaaagcagacgaaggcggccaccaaacaaccagcacaagcccaggcaagcgaaagagaggcaaaacaaagaaacagagacacacagagagcgagacaaagccacggagcccaggcggagacaaggggaccggccaccaccccacccccaggcaagcgacccgcccagcccccgagcagcgggaacaagcgccgccaccacacccaggagaagagagacaaggaccgaggccaggcggccaaacccgacccaaggacgcccgcccagcccccaaaggcgggaacaggcagagccaccacaccggcccagagagcaaaaacaaaaaaagcaaacacacagaaaaacggaagaaaagaggcagaaaaaaaacgaccagcacaaaggcgaccagaaaaacaaaaaccaagcaaaaaacggcagggcggggaaacagaagggaaggacgaggcacaagccaggaggagggacaagaagcaggaccccacgcaggggccaggagccccaaacaggcccagagaaaagaagaaggagcccagccccaacagaccgaagccagggcaagccccaaggccaggcgccgcaggcccgaagcaggcagaagcaagggagaagcgaagggggcagaagaccgggaaccgcaggcagccagggccccccgggcaacggccagagaagcacacccaggggccgagcgagggccagggagggccccccccacagcaagaacccagcgccggcaccccagccaaacgggggacgaacaggcgacggacagccgggcacccagcagagaaagaagcacggaggcagcgcccagcgagaagcagaaacaggcgcaggggggggggggggggaagggaaccgggccgacggagccagcacaggcgcgcggacgaagacacccgcaaagcaaaagccgagcgggggccacaacgcccccaacagacaaacagggcgcaggggccggcccccgcgggaagcagcccggccacccacaggggcccagggccggccagcagggaagggagccgaggggcagccggggggcgccagaaggcacggggcacccagaagcagagaaaaaaaacagaaagcaagagcaagccgcagcagcacagaagagaaccgagacgagcgaagcgacccaagccaggccccccaagcccagccccccacgcgaaagaaaaggcacagcccgggccccaccacacccagacccccggacgggaaggggaggcgagaagccggaaaaccaaaagaaggaaacccccagaaccgacagaggagaagggcacacaacgaagccacaccacaagaacgacccagaagccccccagcccaccgccccccgaaaccgaaaagccgccaccgcagaagaaacacagacgcgcaggcggccccacccaccccgacccccagcacagagcccgccgagggagaggagcggaaaagacaccgcaggaaaaccaagaggaaacagagaggcaaacacaagcagaaaaaaccaagggaacaaaaaacacagccagccacacggccacagcccggaggaagacaggacaaccccacgacagagcaaaacgacccagagaaagaggcccaaaccaagaccagaaaggcagaagcgaacgaaaaccagaccgagcaggccccacacagagcgaaaaaggacaccggaggaaacagcaccaccgccacgccaggagagagggagaggaaagaagcggggagaagcaccagagaaaaccagaaccagaccgccgcagcaaaagcgccgcacagggacccagaaacccacacacaaaaccagagcccgcaacgaacaccgaaagcagcaagcagggggacaccaaacaagacagccggccaagaaaaaagccgcagacagggagaggagggcacccgcagagggcacacgggccaccccgccgacacaccagaccgagaaaggcagccgcacgacaagggacacaggaaggaacagagagaaacaagaaacgaaaaaacggaaagaaggaaaaaagagccaacaacaaacaagaaagggcaggccagcgacgcacaaacggagaaggggaggaacccgggagcaaaaaacaaaaagcgacgggggggcagcaaggccagggggaggccgggaaggccagaaaggagcagaagagacggaaaacaaaaacaaacgagaagcacagaaaaaacaaacaaaggccgagcaaaaacaagagaacgaaagaaggcagccaggagaaaaagcaggccaaaggaaaaagcacccacaaggaaaacccaaaggaccacacccaaaaagaacgacaccgagggggagcaagaccagccgaccaacaggagaaaccccgccaccaaaaaacaaaaaaccaggggggaggcaccgaacccagcaccaggaggcgaggcaggagaagcgaacccaggaggggagggaggagccaagacagccacccagcagggcaccaagagcaaaaccccccaaaaaacaaaacaaaacaaaagaacgaggaacggaacagggcagaaacagcggggcagagggggggaggagagaggcacagaaaagcgaaaaccaagaggccagcagagcccgaacgaaggaaaaagcgaaaggcagaacaaaagaagagggccaaggaaacaaggggcacccaccccaccaaagggaaagacacaccaggaaacggccaaaaacagggggggaggcccacggaacaccaaccaagcaaaccacaagaacaacaaagcagacagaaacccaccccacacacgcacagccacccaaggcaaccgccaccagcccaccccagaaagcggcaggaaacaacgaagccagaaaaaaaagcaacacagaagagcaaagagacaaaagagcagcaaacagaggaccaaaggcccggccagccacaaaagagggcaagaacaagaccccaaaggaggcaagagaaacaaccagcagagccaggaaaccagaaggccaaaagcaaaccagggagccaagcaaacaggcaccagggaccagggcgcggggcggagggaggcagggacacgagagggccggagaaccgagaaggaggggggcaagagccagagccacccagggaagcccagcccagcgcacaacgcagaaccggcccagacaagaaacaagcgcagcccccccggccagccaagcccacacggcccagagccccccaagcaacaaaagacaccaagagcagacagaaacaagccccagaaacaaaagccacggaaaaaacacacaacaaaacgaccacaacagaaggaccaaacaaggaagaaccacaagacaaccaagaacccaaaaccacacaaaacgaaaccgacccaaaacgaccccaccccccccaaaaagcgacgcgaacacgaagggaacaacagggcggacggccacacagagagcccaaggcacagcaaagcaagcagacgcccgaaggcggaaaaccagcaggacacagaaccacacaaggacacggaggcccaggcacggaaaagccacaacagggacaaacacagggagccgccaccggggaaaaaccaaaggaaaagcgggcaaggaacccaagagaaagccaaagccacagggcgcaccgacacccacgacaggcccacagaggggccacccagaaggagaggcaccgggaagaaggcagaaaagaaaagacaacagccgacacggaaggccgccagcaccaccgccagggaaggagcacaagccccccgcagcacggcggaaggaaggaagaggggcccagccagcgggagccacagcggcgcgaggagggaccccaccccgccccgcacaccacgcagggcgcccgacaaagcccaccgcaaccccaggacgcccacgccccaggagcacccacaccaaggacgaaaaggcagcaaaagggcgagccagccggccagcaaaagggaaaagaggaaaaagcgccccaggaaccagaccaacaaaaaaaagacccgaacagagccggccacaagaaccaaccgcagcaagcaccagaacgccgagaccgagaccagcaccggacaacaccaagacagcaggaagaagggaaacgcacaggagcagagaaggaagaaggacaggaacaaccagcccccccaaaaccaccggaaaaacaaaaacgccacccgggccacaaagcgagcaggaggcaggcagcggaggggcaccaccgcgggcagacggagccaggaccaccggcccagcccacgaaaagggagacaagaggaaccaagcacaaagcagacacccacaacaacaaacccacacagaggcaaacaccagcaagagaaaaagagaaggaccaaaacaaaggccggaggccgaaacaagccgacacacccccgcacgcaagggcccgggcccaggcccccccgaccgccccccccggggaaccccaggcccaaaggacgccgccacaccagagagccagcccacggccccagagcccagaacgaagcaacccaaaggcaggcacagcaggcgccgcggagacaggggacgcgaagaagcagaagccggcaaagaaaccaccagaaaagccagcagagcaaaccacccggacacccgcgggaaccgggcgagcaaggggcagacccgagcaggggccggaaacgggaagcaggcaggcggcgcagaggcaccaaaaagcagagcagaggacgggcgggcgcggaccagccccagcgcacgcacgcccaggcagaggggacggggcggggacgccacccggccgaggggaaaccggggaggccaggaaacaggccccggagcacagacaggagccggcggcacaagggcagccacgcgaccacacaggaaggcaagagggcgagaccaaagaaagaagcaagcgcagcagggaagcccagagaaacaggaagcagacagcggcaagccagaaaaggaaaacagggccccagccgccacagaag

SEQ ID NO: 408 - RNA, 8212 nt, Homo sapiens
cgagaggaggccacaagccgggaaggaaggcgcagagcgcgacaagccacgcaccaaccaggggcacaggagaccccccaaaaaaaagaaaaaaaaaaagcaaccaggggaggaggaacaagcacagaaggagccccccagggaacgaaggagaaaggagaaccagacggacacccaggaagggaagaggagggcaccaaccgacccaagccagccgcgaagggacagaacacacaaggcaggccagccaggcccccaacaaggcagagacccacccgcacggggaggggggacgagaagcagacgaagaagaagcagggggagacacgcacaaccagccccaagaaccaaggcggcacagacccacgagagggacagcaccacaggcaaggacagaaggggcacacaggacccgcagggcaacacagccccacagccaaaggggagcacgaggagagaggggaccagagagccacgccgaggcagcagaaaacccccccaaccagggcagcagccgagaccgaggagacgcgaagggggaagaagaaagcaccccgaggaccacgccgcaggcccaagccgggcagcccggccaaccgggcaaagccgccgaccaacaagaaacggagaaccaaccaaccccggcacggagacagggaaaaaaggaggagaggacaagccgcccacagaccaagggaacaggcagaaggcacagcaaacaggcggggccacaggccgcacaacaccaaccgccgcggaaaaagcagccacagacaaaaaaccgagagaaacgccgcaggagaccacagaaaggccaaccccgccagagcacgacagaggggagaccaggaacagaagaacagaaagaaaacgaacaggagaaaaaacagcagagaaaaagaggcagggcagagaggagggggcgggggcaggagacacaaggggaggggggagaagaaggcacaaggaggggcaagaagcgagccgagggccaacaggagcggccagaacaaaccagaaagaacaccaaacagcaggaaccacaaggcaaaggcccgggcaaagcaagcggagggagaacccgagagaggcacgggcgagcaacgagacaaggaggggagagggagaggagaacaggccggagcccccgggggcgaaccagggagcccaaggccagaagccacaggaggacccaggggggagcaacgcccccgcagggaaggcacgggaacaacgcccacacccccccccccaggaaggccagacccagcgccccaccgaggagcaccccggaggcaggccagaggggccaggaccgggggggggccggagggaccggcagaaacccgcagcagacgccccagcggggggagggggggcgcggagcaaaccgggggcccaggaggcaggaaaccaccccgcaccccacccggcgaacgcaggcacccgggccacaggaggggcaaggacaaaggggcacgcacaagggcgagaacgaaaaaaaccaaccaagaggggcacccagacccccaaaacagagagggacaaaaccccagcaagagaggaaacaaggagggaggccagaaaccagcaaagagcaggcaccaagggcggagcaggaagaagcgagagaaggaaaaacagcgacacagagaaagagcagacacaagaggccggcaggggcccgccaaacagaagacagcgagaggggccggagaggcaccaaccgggggccgggaggcccaggggagccagcgagccgcagcacggggacgcgaggcccagccagcagagaccagcggggagagaagccagacaaagcaacacagagagaggcaggcgaggggacagaggaagggcaccaccggacacagaccgcccgggacaggccaagccggcagcccgacaccccaagacgccccaagaagagacaccgggcaccagcgcccacgccgagacgaaccggcgaggaacagacacccgagccacggaagagggaagccacaggggcccaccaaggaggagcacgccaaggaaacaaacaacggaggcaccaaaagagcaacacgaaaaagcagagcacacccaagaaggaaaaagaaaaaagcaaaaaaaaaaaccaacccaacaaaaccaaaaacaaacaaacagaggaaagaacaagagaagacacccaacacccgaaaccagagaacacacagcacacccaacgaacagccacagcaaggccagaagcacaaggcagggcccgaaggacagccaggagacagagcggggaaagagcgagaacccaagccccagaagcccggcggccaggccagcccaacgcccccaccggcccccaaacgccccccacacccaggggcacgggagaacaccgagcacccaggaaacggcggagacacgggcgcagaagggaacaaaacacggggagaagaaaaacagaaggggaaaccaggagcagcgagggaacccaggaagaaaaaacacccagggagaagagagaaacgccaaaccaaccgcaagaagaaccccccacaaaagaaggagaaggacacaccccaggaacgcaaaagccaccggggccaaccggggacagggaggggaggcccagaaaagaccggaggcagccaggggagggggcaggcaggggggcgcgggggcacgagagccgcacccccaaaacccaaagaccaccggaccggccacccgaagaagggggggaacagggggggaggaggcgcagcaggcagcagcgggccaccacgcccgaccaggcgggaagggcgcagagaaaacgccgccgagcagggcaggcgggcccgcacacccaccggcccagggaagacccaccgccaccccagacccacacaacagccgagagggaaggccccgggcacgacaagcaaacccgcccgccgcagaaagaggcaaaagaagcagagacgcggacacgaccaaaaggcaaccccccagaacgacgcacgagagagcaggaaagcaaagcaaacagacacaagcccccagaggaggagaagaaaggcgcaaaacaaagaccagaaggaaagagacagggaggcagccagggccagggagcaacacaggacacccagacccagaaaaacacaacagaccagacacaaacacacacggcaccacacggagagacggaagccaaaagggagccaacgcagacaggaaaaaagggagggcccgaaccgagcaacaaaaagccacccagcaagagaaagcaaggaagagccacaaaaagacacagacaaaagacagcaacagacccaaaggggacgaccagaaaccagcacccaggcaagaaacagcaccccaggcccagaagccccaagcccaaccgcacccccccaccgaacaacaccagagacagacaagcacagaaaggaacaacaaagaaccgcggccccaacaaggcaggaaacacagggcgacagacgcgaaaggcccacgaggacaacacaaccaccaccacgcgaacacgcgagcaggggaaccacacacaccaccagaaggcaaagcaaaaaggacagaaaaagaaagggcaaggagggaacaaccacaacacacacaagcggccagaagaaagaccaacccggaaaagcgaccaaaagcgaacaagacaaaccagcccagcaacacccaggaccaaagaaaagggggcacagaacagagcaaggacaaagcaggcgacccaagcgaacccccccggcaccgaagagggcaggccaggaccaaaagccggggcacgagaaagcccgaggcccaccaagaaccaggggggagcaaacaagaaaacgagaagagccagcgaaggaagaaaccaaaaagaaaaaccgaaaggcccaaaaaaaagaagaaaaaaaaagaaaaggggggcaccaaaagcagaaaaagcaagcagcaaaccaaacacccaaagcaggcagccaggggcacgagacccacccacccccacgaaacccgacccacagaacagcacgccacagaccaccacaggcccaaccgaacccagcgcaccccaggggccagcacgccgaccacccaccggcccaggaccgcccagacacagacaaggcaaggcccccagaagcgccaggcggcgggccacgggaaggagcccggcacacacaccgccgcacccgagaggagcaccacggccggccaaagaccccagcccccaggccaaagcgaccacgggaaaaaaaagacaccaaccggaaagaaacacaaaagacagcacgcgacagacaaaaaaaacaaacaggccaacacaaaaagagaaaacaagaaaggaagggccaggcaggggccagccgaacccagcacgggaggccaagggggcagacacgaggcaagagacgagaccaccggccaacagggaaaccccaccacaaaaaacaaaaaagcgggcacggggcagcaccgagccagcaccaggaggcgaggcagaagaagcgaaccgggagaggagggcaggagcgagaggccacgcacccaaccggcaacagaggagacccaccaaaaaaaaaaaaaagaaaggaagaacaaaagaaacagaaaagggcagacaaaccaaagaaacaaagcggggagccacacacagaaacacaggaagcaacagccaaaaaagaaggaggcaagccagcacaaggaaggccaccaggaggacgaaaaaaaacaacacgggaaaacccgacagaaaagcacaaccaacccaaagagcagaaaaccaaaaaaacaggcaaaaagcgcaaaggccgggcacagggccagccaacccagcacgggaggccaaggggggggcacgaggcaggagacgagaccaccggcaacaaggaaaccccgccacaaaaaacaaaaaaaagccgggcgaggggggcgccgagcccaccacgggaggcgagggggagaaggcggaacccgggaggcggagcgcaggagccgagacgcgccacgcacccagccgagcgacagagcgagacccgccaaaaaaaaaaaaaagcggaaaagagaacagcagaagagaaaaaaaagacgaagccgggacacaaagcaggaggaggggacaacacccacccgcaagacagcccacccgacccggccaacagacaggagcacccacccagccgaaacaaccaaaaaaccgaaaaccaaaaggccccaggaaaacgggccaccaagcgggcagcggcacaaaaagccaagaacccagcaccaacgccaaagcagcaccacccaggcaacaagaacgagggacgaaggaacagaaaaacaggaacaacaggggccaccagcgggaaaaccagcgcgggaaagagggcacagcaacggaaaagcaaggagaaagacaggaagacccagaccacgaaaaacggggaagcagcaacgagcaggccgaagggcagcggggaggggcgaggaaggaggggaggcccccagggagcgggaggaaggcaggagaaagacccagccacagggcacggaggagaagcagagccaccacagggccggggaaaaaggagaagaaagaacaacgcagaaagagcggagccaagagcaagggacagacacgccggacccacccccgaccccgcccccacccccagcccggcacgaccaccacccggcgccacgcccaccccagacggcgacccagcgcccacccacccccccacgcgcggaacaccccggggcagcaaaagccaccacagggaacggcccagccagggacaggcagggggcagcaagcagagccgcccggaccagaccagacccagcagcaggaccagggcgcaccagccaacagaggcggggaggagcccgaggaaggccaggcagacaggcacccaaaaagcaaacaggcaggcgggggccacgccgaacccaacacgggaggcgagggggcagacacgaggcaggagcaagaccagccgaccaaaggcgaaaccccggcacaaaaacacaaaaagcggccgggggcacagcgaacccagcacgggaggcgaggcaggagaagcgaacgggaggcagaggcaggagccgagaggccagcacgaagaggaagccacaaaggaaaggacgggggcaggagcagggaaagcggaaagaaggggcagaggcgggaaccccacaaaagggaggcaaggaaagcgaggaaaccacggcagggcagggaaaggaggacaggacaaaagggcggagaacacgggcaaggaagggcagggggggaggacaggcggagaagggagcagcagcagggcacgggacaggaagggagggacgagcagagaaacggggccaacaggcaggagggaagaagcaggaagaacaaggggggaaggcagggacccagggcaacagggcagaggagaaagaaaagcacagcaggcacagaggggagacaacagagcacaccgccaggcacgggccaggccggggaagcagaaagaccaaaggcacgagggaaaggcgcagagccagaggcccgcgaccccaccccgccccccacaagcagccccacagagccgcccaccaggaagcccgaccccaggcaagagagggcccgcgccgggaccccagaggccccaggggaaaaacaccgaccccgaccaaacggccgggagagcaggagccagcaccccagggcagcacgacggcaagcagacacccacaaacggcgaaaaaagacaaacaccacagcaaggcaccaaaggacacacaagaaacaccaacccacagcaacccaagagcaggacaccgacacacccaacagaccaaacgaggcaaagaggaagcaagccgaagcaaagcagaaggacagagccaggcagcggccggagccccccgagccacaccagacgcagggagaaagaaggcggagccaagcccaaacaacaacggggcaagcacaggcccccaagcaaaggccagggaaccaagcgggagaccacgcaaagagggagaacacacaccggaaggaaccgggggcaccagagaggagcgggaaggacgaccagggggggagcaaggaggaggggagacgaggaaagaagcggccaccgaaggagccacaggaagaaagggccacaaagagaccaacaacagaagagagggagcaagaccaaagcggaggaaacagcagcaacaccaaagcaaggaaggagaagagacgggggagaagccgcgcggcagggaacaaggacaccccaaccacaaggcacaggggacccgcgaaggggcggacacgccgggcaaaacaccagccgagccgagagcagggcagcccagcgcacgggcacccagggaaaaaaaggaacagcccgaacgacaaagccaagacccccaagccccaagccagagggagcgcaggaggggcagccaggagggggaggaggcggcaggcacaccaacccggaacgaaggccccggcacagcccgcccgcccagcacacagcaagggcgaggcgcaggccaaaagcaccgggaggcggcaggcccacacgcaaagcaccacaccaaccagaccaaaggccccaggcccccacccagcacccggggccccacgagaaggaccgacaaaagcaacaccccccccggaaaggagaccccaggaccacaaaacagcgcacggcgaggccgcagcggccccccaccccaccccccaccccccccgacccacccccagcaggggaaggccacacgcccccccgaccccgaagcagaggagccagaacagccaccgcagaaaccacaggggacgggggagcagcccccccccccccccccagcaacaagccaggaccacagcagggcaccgagggccggggcccaggacgccaagaaggcgagccaggcccagcggaaaagccccggaaggccggagaaagcaaccggcgacccgggagccgcagaaaccgggagcagcacgggccagcaccaggcagcgccggaaagccaaccacacggaaccaggaccgcagcccaacaaagacacaagccaggagggccaggcagccaaaagggaagaagcaggcggcaagggaagcggcgagagcgggcccggaccaaacccacgaaaaggagacccgcacaagaaacgaggcacacggaaagcgacccaaaccggaaagacaggagaaaagaggaagcagggcaagggccaggagccagacaaccacaccaa

SEQ ID NO: 409 - RNA, 12760 nt, Homo sapiens
aaaaaaccccacaccaaagacaggcagcccccgagggcacacaaaccaaagcacacacggcacaacagggagggggaagaagaaaccagacaagaagggaacgggccaggcacagacagcggacagaagaacacgggcgcggaccaaccaccccagaggcgcgggggcgggcgcaaagccagcggcagagaagcgggaaaggagaagggaagacggcgggaagccgcggcaggcagaagcagagcaggggaaggaagcagagaccaggcaaccacccaggaggggaaacgaagccagagagggagaccgccaagagaacagggagagccaggggggaaaggacagaaccggccccaacggcccccaccacacgcagggcacaaggcaagggggcaggggagagaaagacccgaaagcacagggccgggagaagccacacccaaaagagaggccaaccaagcacgaagggcagagagcaaaagaaagccgagggcggaaagccccacaggcaacagaagaccacaaaagggcgacgagggagggaaccagagcgccgaagcggcagccccaagcaccccagcacgcaaagcgaggaagaggcaccgcaggcaggagaaaggcccgcaacgaagacaggaacaaagcccccccaacgcggccaaccccagcaagacaagaacacagaggaacaaaaaaaggagaagaaaaagaacaagaggcccagaaaagacacgcaccaaagcacaacagagaagggacgcaagacaaacaacaccgaaagggcgagggaccccgggaccaggccacgccaacgagagcccaggccacgcaggaaaagcgagacaaggcccagacgaacgaagcaggaacaacaagagaggagaacagaggaggaagaaagacacagccacaggacacagcagagaaacaccgcagggacaggaggagggcgccggaagcaaggagaaagaccgagggcagcagaaaggagaaggaaggagaagaagagacacgagcgcaggaacacggaaacaggaggcaagcagccaaaacgccacccaaccagagccaaaacagcggcccggaacggcaggaagacaaacgagcaaaaaggagagagagcggagaagccagggccagaggaaacaaagagcccaagacgagaagacgccaccgcgccgagccccccaaaacaggcaaaaaagagaacagcaacgagagagaagcacaccaggcccaggaccacaccgggaccaagcagaacaggccgcgaggaaagagaagagaaggagcaaacacagacaaaacacgaacccaccacccaaaaagacagagaacaccacagagcaggcaggcccaggaaaggcggcccgaagacaagggaacaggaaaaggcccccccgccaacacagaaggaaggaaccagacgacagagggggccagagccgaaaaaccaaccccagcacccaaggaaaggaaaagaagcaggcgacccagaacgaggaaaaacaaacgaacccaaaccggcacaggggaaagccagccagccgaggagagacccagggccaaggaccaccgccaagacaaaacccaaggaggccagaaggaggagccacaccgcacccagaagggagagacccgcgcgggggggcaggagcccccagccaccagaccggccagaaagacacaaaggaggacgacagacaaccccgccacccaggggccccgcccaggacacgggcccaaccccccaggacggccccacgccaggcagcgaagagaccgcacaccaaccgaggaaccaggacgaaaagcccgcccagaagacacagcaccccagagagccacacccaagaggaacaggacgccgaacggagccaggaaggcacagacagacagccgggggccccgggacccgccccaagcgggcaaggacgcagaaagcgcagagaggcccggcaagccacccgaaccacccccaagggcagccaaagcaacgcagggaaaaacgagaagaagacaagcaggggaggggaggacgggaaacgggacacaagaaaaaacccagcagcacaggcccacaaggaggcaggggaccccagaccgacgccagggcacccaaaggaggccaaaagggacaagagcccaagcgaggggaacccggcaagcggagccagcagagagagaggagaaacagggaggaaagacccagaacaggacaggcaaaagagaaagaaagaaggcgaagccagccacagcaccagcccagacccccagacccacagaccaggcaagacgggaaggacgagcacacaggggaaaaagaaggcaagcagaagcagggggggagcgagaaaagccaagaggccaaagaaggggaaaaagcgagcagaagccaacaagaggaaccgaaggagaggaacggagagagcagaggcagcccaggggagagagaggaggaaaacaagcgggccaagaaagcaggagacaaaagcaacaaaaggaaaccccagcaacaagagcaccgggagaagggagaacccaaaaaaaacagaagacaaggcaccgcacccaggcggaggaggggccaccggccaggcaacccgccccgggcaaggaccccgcccagccccgagagcggggccagggcaagggcaggcacacaccagcaaaaagagagacaaggccacaagcccaggcgcgaacccggccaagcgaccccccaccagcccccaaaggggaaagcaggggagccacgcgcccagccagaacccaccagacaggaaaaacccagaaaccaggaaccccgagacaggaaccaggccacggcgcgccagcccccccccagacacaaagcagaaaacccaaaggcccagggccgacaggaagaagaagcggcacacacagggagggcacaaccagagcgggacaggagaaagcaccggccaaaggggacacaggggcaggagaggcacagaggcaaagaacacagcaagaagaaggggaggggaagggaagacacagaagcagaagggcgaaggaacaagccaagcgaaaccagaacacccagagacacacgcaggagggcggaagaagcgaccacgccaaccagaaccagggccgcgcaggcaaagagcgccacgccaccccagccccagaaaccgcgaccgcgccacgggccgcacccccgcccagagccacccaaacaaagccagggggcacaagggcaaaaccaagccaggcgacccagcagcaagcaaagcgagaaagcacacccacacacagcagagagacacaaacaaggaaaccaaaagggagagaagcaaaagcggaagcaagaagacagaacacacaagaagcggaacaggccgagagccaggaaaagggacggaaaggccccacggggggaaggaagagcccggggacccccaaagcaaagccagcacgggcaaaaagagaagaagaaagcggcaggccaacaaccaagaaaacgaccaaaaagaccaaaaagagagcaaccaggaggcaaacagacagcaacgggcacagaaagacacaaacagacacacaggcgacgaaggggagccaggaaacacacaagccacgaaaacaaccaaaccaaaagagcaccaaacgaaggcaggaaaggacacggccagaggagagcgggggggagaggaggcggaggaggcaggaccagagggggcgaacaagagaggaagacagacaggaagaggaaaaagcagccaggggaagaaagagggagcgaagccggagcggaggaggggggcacaacgagcccagggggggacagcaacaagcaggagaagacaggagaaagaagaaaagagaaaacaacaaaaacggaggagaccaaggaggacgggcccagaaagcaggacgagcaaggaagaaaccaacaaaacaagaaaaaggaaacacacaaaaaaagcccaagggcagagagacacaagcggaccagccaaaagagcacagggccagccccccccagccggccacgcagacacccaggaggccccagggggcccggcaaccaggcacgcacccagcagccaccgccaaaaccagaagaaccagaacaggacgaggcggggggccagcgggcagaacaacacccaacccgcggaacacaaccagaccagagggaggggcccacgaccaggcgggacgggcccaagagggcaagcacccaccccaaccaaggaggaaggccacgagcagagcgccaggccccaccaccccggccaccacggggagcggaacacgaacaccccagcgccgagggccccaccaccagagcccaccgaacacacaagaaaggccagaaagccagggagaacacccaagagcagccggccaaggcgggagggaggagaaaccccagccggggagagaccgggccagcacaggccagagccccagaggaaagccaggccaggggcacgaagagaacaccgcagaccccccccacacccacgccacggacccagaaccccccaaaaaaccacacgaacgcaaaggcgcggggaaccaaaaagaaccccaaggaagaccagagcggccaagaaagggaaaaggaacgggagaaagaacaaggagcagccccggaaaagagggaaagcgggcacagggccagccgaaccccagcacgggaggcgaggcacaggacagaggcaggagcaagaccagccgaccaacagggaaaccccgccacaaaaaacaaaaaacagcgggcaggggcgcggccaaacccagcaccaggaggcgaggcaggagaagcgaacccagaaggggagggcaggagccgagagcaccacgcacccagccggggacagaggagaccgccaaaaaaaaaaaaaaaaaaaaagggaaagccgggacgagcgcccccagaggaggcaggagccacgagggaaggccacagccaccacgggggcacagaccgggcacagcagagcaaaagaggacgaagaaaagcaagaagaacaaaaaaggaaccagaacggaagaaggggcaccaagacgaaccggggcaggggaggaacaggggaaagggaagaagagagaccacagaggcgacacagaggggcgagagaaagagcgggaccaggagggagcaggagggaagaaaaggcagagggggagacgggcacggggaaagggcaggagagagaccaggcagaaggagaagaaaccaggaggccacggccaggacaagcaaggcccagccagaggggaaagaacaccaagcccgaggagagggggagggcaggggggaagcggaaaaggagacaagggcaaaaaaaaggcggaggaggagcacaacgacgagccagggggcccagaaggaaacaacagggacggaggggccggaaagcccacacaggaaacgagaaagcagaagccccaaggggcgggccccagcagggaggccgaaagaacaaaaggcgaccccccggaagaagaggaaaccccagacgccaaggggaacagggggcgcccggaccgaacgcaacacggcccgggcgagccgcaggccccacacggacacacacagccccgggccaagacgcccacgcagacgggacggcagcccaaagagagccaacccccgacagggccggcccagacagaagcaggagcgcaggcacgcagcccgacccgggccaaggacccacaccagccccaaggaccgggacaaaagcagcaccacagccggaacaagagagacagggccacaggccaaggcgccaacaaaaagccaccaagcacaccacgcgccggagaaccgacaacacagcccggggccagcccagagaggagaagaggagcacagccaaaacaggggaaacgaaccagagggagggaaacgggcagggagagaacagaggcaagaccaaacaggacagcaggggagaagagggaaaagacagacgaagaacagaagggcaaccagcgggggagggaaaaaaaaagagagacagggcgcgggccagggacaaacccggcccaaggacccgcccagacccaaaggcgggaacaggcagagccgccaagcggcccggaaaagccgacccacaacagcgcggggaaggcccccaaagccaggggaaacaacccaagcaacagggggaggggagccaaaggagggaaggcagaggaccgcccccgaaggacagccacaaggaggggagacaggagggggccgaaaaggaaaggccccccccacgcagccacgcccacccgccagggagagcagcagaaggcccgcaagagccagcacagccaggaccccaaccccagaaccaagccaaaaagccacaaacaacccagcggaacgaaacacagaaaaggacaagacaaaccgcagagcaaaaggaccaaaagagcgcacgggagagaaaaaggcgcagaacccaaacagcccccagacccaaagggcccccaagcggggacaagaaccagggagcagccgacgaagagcccacccgaagagccgaagcccgaaacgcggacaggagagagaccagagggaacagcagcacacccaaccccccggaggacccgaccccgacagcagcaccccgcagccggagcggagagaccccagagccgcgggcaggaggggaggagaggcaggcgggagggggggagaggcgaggcgcggcgcccaccagggccgaccggaggggggcacaacagcagaggcgacaaagggaaaaagggaaaacaggaaggcacaggggcacagagggggggagaaaagcaggcggaaaggaccaggaggacgcaaagagcacaaaggcgacgggcaggcgaccccaaagcgccccgccccagccccagagcacgcaccagccacagacaacaccccccaaagccccgaacggcccgccggcaccaccagcccaaaacccggaggaaggcgaagcgagccaggcacgcccaggccgccaggggcggaggcaaaaagagaacccccaccacggaggggggagaggggagggacgcaacccaaccgcacaaggggaggcccagagaaagggagaagcggacaacaaaaacccgaggacaccgaagagcacggggcaggaggacagacagcagacccacccacaccacagggccggggagacgaggaagccaggcaccaccacaaaacccagacccacacgaaaaccgaggcggagaaagaccgcgccgggcccggaggccgcgcccggggcggaggggcggagcggaccacagccagacacagaggcaaccagaagagaggagaaacaggagagccagccccccacagcagcgggagaagcaggcggaggaaacccaggagaacggcaaaggaacaaaggaagaggcagacacgacgggagcaagaccagcccggggaacccccaccccaaaacaagcaaaacagggaggccaaggcaccccgaggacaaaaaaagggggggggggagaggagccgccgcaccaggcggaggaggggcccggccacgcaacccacccgggcaaggacccgccagccccgagagcgggacacaggcacgccaccagcccggcaagaagagagacagggaccaaggccaggcaggcgaaccgacccaaggacgcccgcccggcccccaaaggcgggaacaggcgaagcaaccgcacccagccaagaaaaggaaaaggcgaaaaaaaaagaaagccagggaagaggaacaagaggggccgagggcagggaccacacgccgccccgggaagcaaacaacgggggagaaaggccagaacgaggagaacgaagacagcaagggagaaccaagcaaaggaacaggggcagggagcagcggggggcgcgggagacaagggaaaccaagaaggggcagaggggagggcagaccaagcacccaggcgagagggagcaggcaccaaccccaccccgggcacaggcagaacacccagccccgaggcggggcaggaccagcccgaccaggggagcagggaaaggccgaaccacccggccggccaaaaggccccggaccacaccccggccacgcggcgacacgaggagaggggggaccaagcaggagaaacagagccacagggaaagggcgggcccgaagacaaggagcagagcccaccgaccagacggacagaagaagaaaaaccgaggaagccacgagagggcacagagggcaagcacccacacaggacaaccaaacggggagggagagaggggcaagagcagaggcagaggccggcgcaaccccccaaacgaaaacaaacagaggccacagacaagagaagaggagagagagaaccaagcagggaggacgggaccccaagcgaaggaagggacagggaaaccaagggacgcggggccgggccgagaagagaagcccagagaagggcacgaagccaaagagaaaggccacgaggaagagcagaagggaaaagggggcaccaggacgagccgggacccagagagaagaggcaggagggggaggaggagcgggaagggccacgagcagaggaggagagccgagagacacaccagccaagggggaggaagaccagagaggggggacacaacagaagagaagaccggaagaagagaccagaaaggacccccccaaggaccgagagaaggagagaaaaggccacaggagggggaaaaggaggagaaagaggagaagccaaccccacaaaagaagagcgcggcggaggcaggcaagacagagcggggacgcgcaggcgcaaacgagccccaggcaggcgaggagcaccagagggggggaaaggggaggcggacgggcggagcgagaaggggagagagaagggcaaaggaggggagcagagacccggagcagaaaggggccaggaccagcgaacgggcaaagcagacagcaaagggaaacagcaaggaccacgagcagaacgggaggacacaagaaacccacagccggcaagggaaaacacaggcaggcgcaccagagaaccccccaggggggggcaacaaacaagcaccacgaaaagggccaaaaaccacccaaagggcaaggagaaaacagaacacaaaggcaaaaaacaccgagcagagaaaagaccaggaaagagccagcaaagcgacaggagccgacagcaagaacgccgacaaaaagccacaagaacaaaaaccggccgagccaccaaaacacacagaagggggcagcgaaaaaaagaagaaacaagggcccaagaacccaagaccaacagaggaaagagagcacgccccacagaccaaagaggccggcgcaggcagaggacgggcaccccaaccaggcggggaggagaaggaggcggagggagccaggggccaccgaggccaggagaggccccacgaagcgggaagggagggggaccagcgaggggaaacagggcacaccgaagaagcagaaggaagcgggagcaacaacagcagaaccgaggcaagcgccagaagggggggcccacaggcccaacaagcccacccagacagaaagaccagaacagcggccagcgggaagggcggaaaaccacagcgcagcgccgacacagagagcgaaaaggacaagggccagaacagagggaaaaggaggaccggggcgcacaaacaaaggcagagggccaggccggaaggcccggagagcccgaaccaggccaagccaaggaggcaggcacaaccacagcaggggagaaaacgaggcacacacagaggaagaagagagacgggacaccaggcccaggcgcgaacccgccccaagaacccccgcccagccccaaaggcgagaacaggcaagaacccggcccggcaaagggaagaaacccaccaaggacacagccagaaggccagacaagaagacgaacaaaagaccaaaagacgacaacccaggagaaacgaggcagcacggcggggagaggagccccagaagcacacaaaggggacgccggggaggcagcggaaacaacaaaagcagccccaggacaaccaggacccgcagcagggagggaggggccgggaaacacgaaccacaccaacccaaggggagaggaaaggcaacccaccccccccccccacaccccgccggaaggcacagccaggccccaggaaccccacccaaagagcccccacccggaggggcggggccggcccgggcccccagggaggccaccggcccccagccagaggggccccagccggccccgaacccagcacgacaaagaggacgcccccagggaaggaagcccagaagaacaggacacgcagaggacccaggccagaacagacggcacaagaaagcagaaaagagaagcagccgcccaccaagacaaccaggcccgacccgcagcaggaggcgaggcaggggaagcgaaccagggaggggagggcaggagcgagacaccccacgcacccagcccaggcgacagcaagacccaccaaaaaaaaaaaaaaaaaaaaaaaaaaaaaaaagcagccgcccaggcacggcaagccaacaccacgaacccagaggcggggccgcaggggcccagaaccaacgggggagagcagaggccgagccccgccgcccccaccccaacgggcgggaagaagcaaggaaagacccaccagggaaaggcggaaacacaaagccagggcagggggcacccggcggaagggcaccacgagcggcagccacaccccagggacgccgggggacaggacaacacagccccaggaccccagaaaagcaacggccaaagaggagagaaccgccgggaggacggagggacggggggggggagagggcaggggcccaagggggagagggccggcccccccccccccagcgcccggcccaccaccccgcagagggaagagggccggccggccagaaggccccggggagaacaggggcagcccaccccaggaagagaggccccggccagagacaagaggaaaacacagcccaccccgagagcaaaagccaaaagcaaaaaaacaaaagaaagacaaaaagagacacaagaaaaaaacaaaagaagcaaaaaacaaaagaagaaaaaacgggggcaaaagagcccgagggcaacaggacgggagaacgggcggaaaggcaacaaggaccgccaggaagcagccccaccccacccccccaagcgagcgcgagaggggccaccacacccaggggaggcagggggaccgcacgcaaccgccccgccaaggaccccacccagccccacaagagcgggaccacaggcaggccaccacaccggaaagcggagagaggagcaccaaggccaggcggcgaacccgagcaggcgaccacccgccggcccccaaaggcgggaacaggcagagacacggccggcccacgcaacccccgcgacccaacacaccaaaaaaaccaccaagcacagagaagcagaccaccaaagcgacgcgggaaacaagccacaacaaaagagaagaccccggagacagccagcccacaacggagcaaggcagacgaagccccgccccggagcaaacagggcagaacacccaagcccacaagcagaccaacggcgggaccggaaccagaagagggcagaaacacaccacaacgagaaacaaaaagaacacaaccaccggaggcccccccccaccaagcaccccacacaacccccccccaaccggagagcacggcagaaaccagacaggaggggccgacgggggccaagaacgccaccagcaaacaccaggggcgcccagcacacgccaagagggggagcgaggacaaaccacccacgcagccagcccgcgcgggccccaggggacagaggggcaggcagggacagagagaagaccagccgggacccccccagcccccgcagggaggaacacaccgggagcagggggacacacccccaagccgccgagaaccacacgcccaagcggggcggacccacggaaccagcacacgaagcccggagcggaacaggaggccaccaaagggagaagaggagggagggagagggcagacacgccccgcgggaagcagacccccaccaggaaacaggggaggccagcccgggacgggccagggccgcgggacacgagacaggagaggaccagggcgggagggagaaaccggacacagccggaagggcccgaaaaacggccgaccccccccacagagaagagcagcagggaggaacaccccggccccacggcagggaagagcggcggaagaggagccggcaacacgacaaaaaagaagagaggggcgcggggccaggcggcgaaccccggcccaaggaccccagcccaagccaccaaaggcgagaacaggggagccaccaaacggccaaccacgcaccacccacaaacccaccaaagaagaaaaaaacagcacacagacaaaagacaggcaaaaaaaaaggaaaacccaaaagccacaaagaaaagaaaaaccccaagacgacacgccccagagggacagaacccgagccgaggcaaacccaacagcaaacccgacccgcccaccaaagggcaaacgaaccaacccacacggagccgcagggagggacagggggcaggcacaaaggcaggaaaaacggcaccaaacaaagaaacagaaggaccaggaagaacgcccccagacgccaggcaagacagcagggggcaggcccagcgcgcaggagggaacggaaggaagagccagccgaccagaagccaaaaaagggaggaacgggaaacaccaaaaaaaag

SEQ ID NO: 410 - RNA, 2471 nt, Homo sapiens
accccgaggcaaggcgccggccaggcggaggcagggggagacggccacgcaacccgcccccaggccaaggaccccacccagcccccagagcgggacacaggcacgccaccaaacccgcggggggggggggggggggggagagacagggcaccaggcccaaacggcgaaccagagccaaggaggcgcccggcccccaaaagcgggacacaggggagccacgcacccggccagaaagcaccaaaaacagccgcaccaaaccaaaagcccgcagggacgggaaaaacgaggaggcaccagaccagcagagccaaggaagcggcaaacaaccggaagagagggaaagaagaggcaaaaaccaccaagcacaggcaggagaggcgcacgggcgaacccccagaccagagcaaaaaaacaaagaaagaagacagggaaagcccacccaaccggccccccgccaaccgccccggagaacgacaggccggcggaaggaagagacaggacagaaaaagcacaaaagaagcgcgcgcagccagagcgacacccgcacgaccggagaagggcaccagcacggccaggcggcaccaggagaggagaaggccgcccgggacaagagaaaagaacaggcagaaagcaacaccaagaacgagagaggcggaacaaaaacaaccagaaaggaaggcgaaacccgaacagaagaaaaacgagacggggccacccgcgccaggcggaggcagggcgcgaccggccacgcaacccgccccgggcaagcgacccgcccagcccgagagcgggaacagccaccgccaccacgcccggcaagcaagagagaggggcgccaaggccaggcggccgaacccgaccggacgccgccggccccccaaggcgaccacacccggcaagggagcaccgaacgagaaaagaaaagacgggaaaccacgagaggcagcccagaacaggcgacccaaagagcccccgagaccacaaagggggagagggacaggcgcccaaaaacgaaacaacgcggcaggaagaaaggaagggagcgcccagacggacagggcgcccggggcaaagaaagacagcaagggaaaccaaccaaacaaaacaggaagaacaaaaaggacggaggcagaaagaagaggaagggaagaaacccgaggaaaagaagcaccaggagagcagccaaaaccccggcgcgagaaagccggagaggccagcacaccccccaccccacggaaaaaggggcgcacagcccacgcgccgcgcagcccaggcccaaaggccccagcagacccagcccccacagcagggcccgagaagaggcccggcaaacagcgggacacgcgggagacccagcccagcgcagcgcgccacaccgaccccacagaagggaccaaaccgcccgcaggcacccgacacccgccccggccgcagggaacacaggcaggacagcgaggcagcagagccacacaggcaccaggaggggggaggcaacacccgcggaccccccaagagaagcagcgcgacacaccggacaacgccgacagccagcgcgcccgacggaagcgggagccgaagaccaaagcgaaagcgcacacaacaagccgcaaaagcaaagagcaaaaaagaagcaggaagaccccagcgggcccaaagaggccaaaagaggccccaggcagcacagcacacgggaaggcagaaagaaaaccagacccacccaccacgaaaagaaacaggggggccaccaaaaggccagcaccgccaggggcgggcacacaaaagagaaaagcccaggacagacaacgcaaaagggggggaggagaagcagaccaaggccccaaacaggagcaggaaaccgacaagaagaagaagaggggggaaaaagagaacaaaaggaaacaggggaaaaacaagcaccaggaaggaccgccgcaaaagagaagccggaacacgccagccaccccgcccagagaccccaggggggcagaccgcccagccccacagggccaagagccacaagaaagagaaaagagaaaaaaagagaaaaccaaaggggaggccaaggaagcagcaaggcacaaggagcacaacaaaaaaacagaaaaccaaaaaacaaaaacccagcaacggcacgaagggagacagacaaacaggcgcccagaaaacgccaggcgccacaagagggaccagcaaagaagacaagaagcccggaaacaccagacaaaaaggaaggaggcggccagacgaccaaagaaaaccacaaaaagaacacgacaaccagaggaacagaaaaagacagcaacaagaaggaccaggggcaacccggaaaaaagggacaggacagagcaaagagaagaagcccacccggcacaaacaaaacagaccaggggggagccacgagaccaggcccccgacaaccacaaccgaaacccagcagaaaaacaaagaaagggggaaaaaaggaaagggca

SEQ ID NO: 411 - RNA, 80943 nt, Homo sapiens
cccaaaaaaccacggggacaaaaagcccaaaaacaaacggccaccaaagccgaaaaagaaacaaagaaaaaaaaaggggaaaaggaagcccagaaaacaaaaaacagcacccaacagaagagcggcagaacaaggaagccagaagacagaagcacacggagacagcacagcaaaggaggaccacacaggagcaggagccgaagaagaacaaaacaggcgccaaaaggcagaacaagggagggcgaaaacaccaaaaggaaaaaggacaaccccaccagacaccaggagccccgcaacccccccaccgggcaccagaaaaacagcaaagaaagaaacacgaacagcccaaaaagaagggacagaaccacaccaaaggacaaaaggaaaaaaagaaggcaagggaggaaaacaggcccaggagaaaaaaagggccaaaggcaccagggagaaacacaacgacagagccccaggaaaaaaaaagaaaaccaggccaacaggcagaaccacgagaagagcccaagaagaagagcacacacacaggaaaaaaaccccaggaaggaacagacaaaaacaggaagagaaacgaagaagaacaggaacaaccaggccgacgcagaaagaggacggacaccaacagagcccgcagcagaaaacaaaaaggaacccaacaggaaaaaacagcgccgcacaccagaaccaagaacaccagaaaaggagacacacagaccccagaaagaacacaggaaagcacacaagaaggcagcaggagagaaggaaaggaaaacagaaagagcacacaaagaaggcaaacaaacaaaaaaaggaggcagggaagaaaccagaaaaaaaacagaaaacaagaggaagacgaaggagaaggaaaaacacacccagaaaacggaccagccagagaagagaccaagcgccaggaaagaaggagggccaacgggcaagggagacacgggggaggagggaacggaagacgaaaggaagaagagaaagggagcagccgaagggacacccggacacagcaagaaagcaaaacagcccagagaaaccgcccagggaacacaaaagacacccaagcacgagagagacaggcccacgagaagagaagagcacaagaaacagggaggagaggagagaaaacaaaaccaaacaacagagaagggaaaaaacgaaaacaagcagaagaaacaggagagccgacccccgcaggagggacaaggggggcgcaaagcaccacagccaaaccccagagagggagaccagacggcaggggggaaccaggggagcgccgggcccgcccacagagcacagggggggaccggaccccgaagccccaggccacacaggcccgacaggccgacaggccgacaggccgccgccaccacagacagcaagcaaaccagccaggccccgacccaggccgccggcgccagaaagaacagcacgggacaaagaaggggggaaccaggggaagcggaagaggggcccagcaagaggaggggagcggaaagcgaaagaggggaagagaccccggagccagcaccgcggccaaccccccgaccgccccagccaaaccccaaacagacacccccccccccgccgcggcgccccgcccgcgcggagccgggagggggaggacaagaagggaggcaggcaggccaaaaagcaacaggggggaaaacaggaagccgcccaaggcaggccaggcgagagagggccgcgggggaaacacccccacccggcaccgccccgccaacagaaaacgaaaacagagccagcaaagaagaaaccccacggagagaacaccaggacccggaaacacacagacaacgaggcgaacccaagcggagaaagagaagacaaggcagaaaacagaagaaaaaagcagggccaggaaagcaaaaaaaaaggaaggaaaacaggcagaaagcagaaagaaaggaagggaggggcaggaaagcagaagaaagcaaacacggagagggaaaaaaaaaaacaagagaaacacaacacagaaaacaaagcgcacaaagcgaagacaccccaagagaaaccccacggccaccgcaaggccaagggacccgaaacaaccccagggccagacagcccgggaagaaaagaaacaaggcaaaagccccgccagaaacaccacacgagggaaacgcccagcccccgcaagaagaaagaccaaagacacgaggacagcccgcagagcggccagcagggaccagaaaagcccccaagaacagccccagggggcacaggaacaggcagaaagggaaggcaaagggaggaacagaagccacagaaaagacagaacaaagacaaagagccaaccccccaaacgcaacaacaaaaacggccaaaaagacaccccaaggagaggggacagcacccgaacaagcgaggcaccgcgacaaagaaagagcgaaagggagcaggcccagacaagaagcgacagcccaccccggacacggcggcgcaggccacgaaccgaaagagcaagacacggagaaaccacagggaggcccgaccagaggcagaccacggccgccacgacacgagcgggaacagaacacgccacagcaacgacacaaaagcaggaggacagacaggagcaagaaacaagaagcaggaccaggagccaggccaagaaagcccccgaaaagagaagccaacggagcaccaacgcacacagcgaggggccccgggaaaggcagcccacccaggacccccagggaaaggcaccacgggcgaaggggaagaacacggccggggggagaggaaaaagccagcgcccaggcagaccgcaaccaagagaccaggagggacaggaacaggaacggggagcaggcagccccccacccaggagcgcacccagcacacgcagacccagaacagcaagcaagaagggggagaaccaggcccaccaaaggccccgaagaacgcccgcacgccacacaggagggggccagggggcccagcccagccccccaagacccaggaagagaggcgcgaccccagaccagaccgagccacagcgaaaccacgaagacccccagcagcaccacaagcaaagacaaccaaccagcgacaaagcccgaaacacaaaaaggaagcacagcaccacacgagccaagacagaccacaaacaaggggccaaaaaaaaggagcgaaaaaccacaccaggaacgagcgcaaaacagcacaaggcaaccacacaaacagaaaaaaagaaacaaaccaaacaaaccacaggaaacggaagaagaaccccaagaagaaccaggcaggcccaggaggaccagaagaaggcagcacaaggaaagggcagcccagcagagcccccgaggaccccaggggacaaaagggagggaagacaggacagagaccgaccgggaggccaggcacggggggcggaacaaaaaccaaaagaaaaaaaaaacaaggccaggcacggggccagccgaaccagcgggaggccgagggggggacacaaagcaggagcgagaccagccagccaaagggaaaccccgccacaaaaaacaaaaaagcgggcagggggcggcgagcagcgccgggaggcgaggcaggagaacccgaacccgggaagcaaagggcaggagccagacacaccacgcacccagccggggacagaggaggcccaccaaaaaaaaaaaaaacaaacaaaagaggaagaaacaagaacaaggaagaaagaaaaaaaggcagcgacaaggggaagcaagcgacacaaaagcaaaaagaaaaaggaaaaggaaaagagaaagacagaagcaaggaaaaaagaaagaaaaacaaaaaaaaaaggagcaaagcaacaggcaaaaacaccgaggacagaagccaggcccccccaccaccacaccaccagcaccacccagagcaacccagccgcaaaccacagaaagacccagaggaaccaaaacaccccacagacgccaagaacacaaaacgccgcaacaaggcaagaggacacaaacaagaacacaaaacgccaacgacaacgccacggacggccgcggacaggaagcagccaggagcaaaggcaaacagagccaggggggaggcaacgacaggaagaggacacccagaccgcacaacaagaaacgccaagagacagaacaaaccccagaaggagcagacaaaagaggagaagccaccaaaaggaaggacacagccaaggcacagaaaagaagaggcgaaaagcgcgaaaaacaaaagcgcaaacccaagccagacagagcgcccgcgggagacaaccaagaagcgcccaagccccccgaaggaacgagagcggaaacaaagcagccagggagcaccaaaaaagcaacaaaagaagaaaaaagaaaagaaacccccgccaccaacaccaagaaagcaccaggaaaggacaggaacagggcagaaaacacgaggggaaccccccacagggcgcaccaagcagccaccaagccacgggcagagggggaagcagagacaaaagcagagaccccgggaaaacggggcgaaaaaggccaacaaacaaggcaggagcccccccccggagagaagggagaaagagccaacgcagcgacccaccgaaaggccagcacggaaggaagcccccccagccccgagcccaagcaccccgccgagcagcagggggagcaggggagaaagaaacgccagaaaaaggaggcaggggaaacccagaaagccaggggaaaaagcagcaagcaagaaggagaaagagaacgaggcagccagcacagccacacgcgcacaaccccagacaccggacaacacggaccacagaggacacggagcgcacaagcaaacccaagaaggaaacagcaacaacaaaaggcagaagcacgggaaggcaccgaaacaaacaggagcagcaaaagaaaaaaaagagggcaaacgaggcagaaagaagcaggcgaccaggagacacagaggaaacagaaaaggacaaccaaagacgccaaaaggcaccgcacacaacacacagaaaaaggaaagagcaccacaaaaaacaaacaaggaaaaaacaaaaaaagaaagaagagacggaagaaaaaaagcaaaaagagcaaagggaacaagaaggagacaggacaacaggaaaaaaacgaaaaacacaagaagaaaagaaaaaaaagaccagcagaagagcagccaggaccaaagaccagaacacaccccaagacgccagagagaggaaaaagacccacacaaaagggaaacgaggcagagggggaagcaaggccaagacccgccagaggggaagccagacagagccaggagcagcagagagcccagcccccacggagacggccagaggaaccgcgccaccaaggacccaaaagacgacaccagagcaaccacgaagaagggagagaacaaaacagaaagcgcaagaacgacaggcgcccccccaaaggccagcaaagccaccccaaaccgcacccccgcccccgccccgcacgcccccacccccccacggcaagggcgcccagcgccggggccagcaccacaaaggcacagggcggcacccgccccagcggggggggccaagagccgagaacaggccagagcgccacaccagccccccaccgccaccaaggcaagccgccaaaggcacagagaagcgagaggccgggggagaaaaagcggccaaagacagacagccaaggagagcaagcaagcccgcaggaaagcggaccagaacgggggcccaagaccacacgggacaacaccaccgcaagcgccggacgcgcagaggcccacagaaccagagcgaggaaacacagcgggcggcacagcaccaacccccgcaacaggaaaggagaggcaaggcagacaagaaaggacggacaccagagcgacagcgaagcagagcggacacccgagggagcccgagccacaggacggcaggcagacaaacaccacgacagccaggaccaacagaaacaccacgcgggcggggggaggaacagcccagcaaggaaagacagagagccccggaaccagggcagacaggagccacagaaaagcaagacccgaaagcaagacagcagagacaaaaaaagaaggaggcagaaggcaaaacaaaccacacacaaagcacacagaaccacgaccagaaaacaaaacggaaggaaacagccagaacgaaaaagccacggagacgaaccaaaggcagacacaaaaagaacaacaaaggcgaacgaaggcgagaaagggacaaaaaaaaaccccacagggaggagggaaaagagcacacaacaagaaagcgagaaagacgggccacggaaaaggaaacaacagaagcaaaaagacacacgggagggaaggccaagaacaggagaaaagaaccgccaaacaaaaggcaacagccaaaaggagccaaccccccccgggggaagcgggccacaggagcaaagcgccagaaagaagagagcggcacaggacgaagagcgacgcaaccaaggccaaggaagacaaaagcaaagaaagcaaaaacaagcaaaagaagaggagaagagaagaagaacaacaacaacaacaacaacagcacagcagaaaaagccagagacgacgcgaacacagggcaccggcaggggacaagggcggaggcaaaacaaacagaacaaacgcagaacagcccaagaaaaacagcccaacaaaaaaaaggaaaaccagaagcacaggcgaagaagagaaagagagggaagcgccgcacgccacagcagaagaggagcgcgcaaagcaaaaccaaaaccccaggaagacccagagcccgaaacggcccagagggaggggaggggcggaggggcaggccaggcccagaacccaacaccaaagcggggagaccgccagggaacaaacacacaggaggaggaaaggaaaaaagaaaaggccacaggccggcaaagaaaaacaaacaaacagcgagaacagggagaggcgcggcgccagggggagcagggaaaagccagcaccgccaccaacagaaaaccgacacaaccaagaggggcggcaaagaagcacaggcgcagggagcaaaacaccccaacgcgcagcagcggcaggcccgacaggcgaggacacaagaaaaacaagccggccaaagccaggacacaagccggcgacaggaccgccaaggcacacagaaagggccagcggggcgacgcaaagcgcaacaagcggaaaaacgcagaaacaggggccgagggcacagggaacagcccaaaagacaggaggacgaccaaaaacaagcgggggggaaaaaaagacaaaacaagaaaggagaaagcgacccgggacgcaacaagcaaccgaggagagaaagagacagggggaaacaaacaaggaaaaacgagagagaagaaagggcaaagcagacaaccagaggggagaagccacgcacgcgcacagaaaagcccgggccgccaaagcaaccaaacaccgaaaccgaaaggccaaccggaaacagcaacagccagcagaagggaaggcaacagcaggaaaagcccccaaaccagaccagaaaaacaagaaacagaagccgggagccaaaacccaagcagaaacacccaaacgggggcaaaagcaccccagcgccccaaacacacaagcagccccccccccgggcagcagggcgaagaaaggggcaaagaaaaaggggggcgaaccaggggacacaagagcaacacacacgcaaaagcgcccaagcaccaaacccgaaaaaggacagaaacagaggagcaaccccgagacccggcaaaagccccacaaacaccaaacgcagaaaaggaagcagaagcggaacaaaaagagcccaacagacagccaaaaccaccgaaggaaggaggcaacaaaaaaccaaaggcccaaaacgaagcgaagcaccacaaccaaaagaagcaacgaccaaaagaaggagaacaaagaaagaggaaaaaaaacaacaccccacacccccaaacaaagcaaaacaaaacaaaacggaaggcgcacaaggagaagaaaaaacccaacacaacaagaaagcacacaaaaggaaaggaagagacaccaacaagggaaagggacgggaaaacaaacacagggggaagcagagcagagggaaaaagcagcaacccacccgcaccacccaaaaaccccaggggaggcgcgagcgaacgacgaggcgaaagggcaagaagcccaagcacagcggccacacaaaaaggggacaagaagacagaaagggaggaagggaaaagaaaaaagaagggcccggagaaagacaaaggagcacaaaaaacaaaaaaagaaagaaacaacgggagggagcccgcaaaagcagaaagaacagaagaaaggaaaggaaaacacaaaacaaacaaaaacaaaacacaaaacgaagcccagcaaaacaaagaaccaaaaaagacaagaacaaacaacaagaaaagagccaccacggacaccacaaaaaagaaaaacaaggccaaccaaaacagaaaaaacaaaacgaacccacaaaaggaaagacacgaacaccagagcaaccacaggcacggaacgcaaccacggaaacaggaaagaacagcaagcaacaacccccaaaacacccgcacaaagaaaacaaaaacaagggaaagaaaacagaggacaaaaaaaaaacaacaacacacaagacagcgaaaaaggaaaccgagaaagaaaaaaacaaaacagacaaaggcaagcacgaagggaagaaacacaaccaacaaaaagagagaccaaaaaacaaacacacggaacaaaaccaaaggaaaaacaccaacgggcagcgcacaaagaaagaagaggaaacaaagagagcagcaggcacaagcaaccaaccccaccaagagaggcagaacgcccacggacaaccaaggagcaaacacccccccgaccaccccccacccacaccccccaccacccaaacccccgcaacaaaaaaaagcaagcaagcaagcaagcacggaacaagcaagaggaagaaacagcacagaaaagaggcgacgccaaaaaaaaaaggacagaccaggacagaaggaacgacgcggcccacacagcaaggcccaccaagccccacaccccccgagcagagggaacaagccgggccgcccaggagggaaagaggagggggggacgaggagaggcaggaaggggccccccaaaacggaaacgaccccaggacgaagaaggggccgggaaggaaaggcagagggcggcccggaagggcagccaaaaaggacggagggaacgggcaggcccgcccgcgcccgccaggaagacacaggcgccccacagaacacgacaacaaggcaccaccgaaagcagagaccaggccccaccagacaccaaaacggaccgacggaccccagccccagaacgagaaaaaaccgcaaaacaaccagacaaaagacagcagcacaaaaggacagacaaaagacccccagaagccaccagaccggaaagacgggaaaagggagcagagaacaagaagagaggcacacgcaagaggagccaaacaagacgggccaaaacaagagggaaagcacacacagacacacagagagaagaaagccaggaagaggagacagagagaagcgcccgccaaaacaggaaaccggggccaccacaaacggacaaaacaaggaaggacagacccccgaagccacagaggaagcacgcccgcccaacggcagacagccagagccagagaaaaaaaaggaaagccacccaggggacacgacaacagcagacagacagacagaaacaggcaggggccaagggaaggaggcaagaaacaaaccagcagccacgggcagacaacaaaaacaccagaggacgacagcgccacaaagacagagcacccaaccacgccgcgcccaaagaacacaggcgaagaaaacagaaccaggaacaacaagccccagcacagagaaggaaacaggcagaagaagaagggcaacccaggcacaagcggggggcagaacagcacggaacgccgacagcaaaaccccagcagcaaacaccggccagggggccgacccagcacaaggaaaacaggaagaaaaagagacagccgccggaagaacgcaagaacaggcaacaaacccccaaagaagcggagggaagggggagcgcgacacccaacagcaggaaaaaggagaaagaacaagagagagacaaaaaaaaggccaacagggggacggaggcagaaacgcagggccgacgacggacggacagccgaggcagaacccccaggaaccgcagagccaaggaccaacgaggagggaccaccgaagagggagaacacccacaaagcaacgagcaaaaaacaagcgcaaaaacacagcaacccaagaggagccacaaaaaaacacacacacccagcacaaaccacagcggcccacaaccggaccgaccccagccagcaagccaggccacccccagggagccccccgacccagacaaaagcaaccaagcaaaccaaggcagcgggcccaacccacgcgcccgcagaagcacagccaccaccccccagaacaaggacagggagccagccgccacacaccccagaggcagaccagggaagagcaggaaggaagggggcgcagagggaacacagccccaaaaagcggcgacgggaaagaccaacccgggccggcgcaccaaaacgcaacagggggccagggcggggccaaccgaaccaggacaggaggccaaggggaggaggagcccaggaggagaccagcgggaacaagcgaaacgcaaccacaaaaaaagcgagggggcagacgagcccagcacgggaaacaagggggaggacaccgagccccagaaggaggcgcaggagccggagcgccacaacagaaccggagaaggaggagagccgcaaaacaaacaaacaaaaaaaccggaaaaaaggacacaaaggaggcaagaaaagaggagggaaagaagagggcaggcaaagggaggcacagagcaacacacagaagaggacagaaaaagcaaaaaggaaggaaggagcaagcccggcaacgggaaccaggcacaccaacgcgcccaccgaacccaccaaacagagaacacaccccagacaaacaccgaaccccgcccgccaggcccaagaggacccgcccgaccgacaacagcccacgaaaccccagacagggaaaacgcacggagcgaggaacccacaagagaacacgcgccagcgaaccccggggaccaggaggcgaacacaccccacccaacgcaccccaggacaacacaggcccagagcagggcaagcacaaaggggaacaacgaggaaaaaaagcaggacaccgagacccggaaacaagagccaccaggaggcagggacacgccacagcaagaaaggaccagcaacaggacaggccaccagagaaaggagagggagaagcaaggaaaaaggaaaaggaacagaagaaggacacgaggaacaacagaggaggagacagcacggggcaaaacagccaccaacggcgacaccccgagacaacccccaccccaccccagaccaggaagggaccacagcacgccaaacggcgagaaaccaggaaaacaaggggccacaaggcagcacccaaacaacaaacacaggaaaagagcacagggaaaggggaccccaagaggaaagcacaaagacccacccaaaaggcagagcacaggaaaaaaaaaaccgacaagagcagaaaaaacagaaaaaagaacagacggagaacagggaaaccaagaggaaggcaacacaggcacagcaaccacccaccagagcgaccccagagcagccacagagcaaaagccagcaccacagccagaccaccgcggaccgcgaaggggacaccaggggagagggacaggcaaggcccaggggggggcggaggggaagacgcgcgggggagcacacaggagggaaacgccacggcccaggccccaggaaggagagaagcgggaaggaagcgacaagaaaggcgggcaagggagaggcagggggggaacaagcacccaaagggcacggcaggcacaggccgaaggggaagagggacgagccggaaaggcccaaaagaaccacgcaaaagccaggaaacaaaaagccccgaagagaccacaccacgaagacccgaacggaggagaaggagaaaaaagagaaaagaagagagcacacggggcagaggggggaacgcccagcccagagaacaagcacaaaccaagcaggagcagaaagcgggaaccaacagcaaacaagggaagaaaagagaaaaagaaaaaagcaacccaagaggccgcaaacacaacccccaccaacaccaccaccaagagaaagggagaaaacgaaaggcgggcacagggccagccgaacccaacacgggaggcaagggggcaaagcgaggcaggaggagaccagccggccaaaagggaaaccccgccacaaaaaacaaaaaagccagcaggggcaggcagaacccagcaccaggaggcgaggcaggagaagcgaacccaggaggggacgcgcaggagccgagacgcgccacgcacccagccggagacagagcaagacccacacacggggcaggagacgagaccaccggcaacagggaaaccccgccacaaaaaacaaaaaaagccggagggggcgggcaccgagcccagcacgggaggcgaggcaggagaaggcagaacccggaaggcagagcgcaggagcgagacggccacgcacccagccgggcgacagagcaagacccgccaaaaaaaagagaagaaaaagaaaacgaaaaaagagcaacaaaaaaaacagaacagaagacaaagaagacaaaagacaaaaaaagaaaaagaccccagacccacaccagaaaagaaaaacaaggcaagcaaaacaaaacgaagggcaagaaaagaaaaaccaggaacagaaagagagcagaaagacccagaaacaggaacgaaaggaaaagagccacacaaaaaagggaaagacaaggcagagcagaggggaaaagggacagaaaggcgggagaagacaggacacaaaaccaaaagaacaacaaaaaccgaaaaaaaaaaaaaacaacagaaaaagaggggaccgaagaaagagagcaacgggcagaacaagaggagacaaaaaagagcagcaggacaacaggagcagagggaaggaagcaccagggaaaaagaaagaaaggaggaaacacagagaagcacgcagaagcaagagagggacaagaaacgaaaggcaaagggaggacaaaacaaacgcgagggaaaaaaaaagaaaacagagaagggcaaccacaaccagaaaaaaaaaagaacacacacaaaacaacacgcaaaaagaccacacaacacacaggaaaaaaacaagaagcagcgggggagagggcaagggacagagagggccgccaaagagagacaggggccaaacacgagagaacgcacaccagccccgcaggagacaacccccaaaggccgcacggaaaggacagagacacgacaaacacggacgcaccaagggcgaaggaaaagccagaagaggagacaggcccccggggagaaggcagggcacagggaacaaagaaagccaccaaagcaaaggggcagagggaagcccaaaaaagcggggcaagccaagcccagagcaaccaaccacgcaggcagcacccccgacgccccgggaaaaggagcaagaggaggaaacagaagccagaaccggccagagaaacaagccgcgacccaggagccagccgccagcacggaaaccacagcagcgcgaaccgcaagaaggaaaaccagaacgacaacaaggccagagaggagcggggccagagaacagaaaccacggcaagcaaccaaaggggccggggaagacaaccggcccagcacgaaaaaagagaaaagaaccaaccacaggcgcaggagaaaaagagcaaaggcaagggaaaaccagacggcacaacaagcacgggcggaacaaaaaacaccaagcgacacaagcggaaagcaaaaagcccaccaaaaccccacaccaggaaagcaccagacaagcgcgaaagcaaagcacccgaaggcggcggaacacaccgcaagccagaacaaacaggcggaaagaagaagaaaagaggggggggcccagaaaccaaaacagggaagagcaggcagaggggcaaggacgcaagaaggccaggagaagaaacccagcccaaagcaagaagagccagggaaggggcaaaagaggggcggacacaggaagaaaaaaaggcggaagcagagaggagagaagaagcaaaaagagacagaaagagaagcaagaagaggaaagaggaagaaaggaaaacgaggaggaagaacaaggagaaaaagggaaccccaaaacaccggaagacgaggcaggcccaagacagaagaccaaagccaaaaggaagaaaaaccaaaagagaacgagccaagaccaccagaaagccaaaaaagggccaccacgccgccaccgccccacaacccacccgcccgcagacgccgccagcaccgacccccaagccaaagaagggaaacaggaagcagaaacagagcaacaaagagaacaccgcaaccaaaggagaagagagcaaccaaaaaacaaaggaagaacagaaaaagaaaagaacaaaggcaagaaaaaaaagaaaaacaccaccccaagccccagagaagcaggccgcaggagagcaaggaaccaaaaagaaaaagcacgccgcgacccaccccccccaggaccagcacgcagcacagccaccagggccaaaagagaaaccggcgaggaaaaaaaacaaaaaaaaggccccaaagaacgggagacagaacggaaaaaacacaaagcagacacaaaaaccgcgaagcaaaagagaaaagacagcaaaaaagagggaacacaaacacggggacaccaggaggggaggggggagggggcgagggcgaaaagcaccgagacagccgcaccggggacaagacacgacaccaaacccagcaacacgcaacacccagcgacaaagggcacacgaccacccgaaacaaaaaaaaagaaaaaaaaaaaaaaagaaaagacagcaagaaaacccggcccgaagagacacagcaaaagagccggcaaacacccacaggagaagaaaagcggagaaccaagaccaagggaaaaaagaaaaaaaaaaagcaacaaaagccgggaagagacggcacaagccgcaaaggagagaggaagaaacaacccacccaccggcagacagagaacaaaacgacaacaccgacaaaaaaaaagaaaaagggaaacaaagccccccaccccaggacaagcaagagggaaggccaacagggccacagcacgagggaagcagagagaacacagcaagagccagacaaaaggggcaaccgcgacacaggcacaagcgccacgcggacccacgcagacggaagaacagagcaacagaaaaccagaacaagagccagcagacaggcaaacagaaagggagcccgacacagaaacccaggagaaaaggccaccgcacagaagcaccaaagccaagccagagccggccccccaggaccaagacagccgaaccacacggccagcaacgggcacgaaaggcaaaggaggcaaccaggccgaccccagcacacccaagaagaaagggacggcaaacggggcccaagaccccgccagccagcaagcaaacaacaacaaaacagaaaccacacgacacccaaaaccaccaagagcagacacccgcaagaaaaggacccacaagaccaaacgaaccaaagaaacaacaaaggaggacagaacaaagagagcgaaaacaaccaaaaccaccgagcaaagaacgaagacgcaggcgggcccagaacgaaacgcaagaaaaaaaacacagcagcaccacaggggaaaagacacagagacaacaacccaaaccgccccaaacccgccagacaccaaaccgccagaaaaaaaagagaaacaacggagaaaaaccaaaccaaaaaaacggaggaacaaacaaaaacaaaagaagaggaaaaaaaaaagcaaagccccaaaaaagagaaagaaacaacacagaaggaaaggggacagagaagcaaacaagccaacgccaagaaccccggcccaagcaaagaaccggaagccccaaaggagccccccggcccgaggaccagcgcagaccaacaagaggcgaacggcagggggaaacagggaggcgggcaaggcccggccccagcgacaggggacagaccacagccagcaacagaggggagcgaccacggaagcccccccccgcagggaggagaaaacagaccaaagcaccgcagaaggggaacggcaggcacgaaaacgcgaaggaaaacaggagagcagaaccacagccgggaccggagccagaggcaaacgagcgggggaacacagagacaaggaggaaagacagaacccaaaaaaaaaccccccaacccccacaaaaaaacagaaaagaaaaacgagccagcaaaacaaagggacagaaaacagagagccccagacgaaaaccggcaaaaaccaaacaacgccacgaaaccaagacgccaccagccaccaaaacaaaagcacgcccgccccagagagggaagggcaggagcagcacgaaaaagcgccggaaggacggacagcacggggcggccagagaaacccaggacagggacaggaaccgagccccaggccgagggcacagaggacaggagcacagcaggaagccaccacgaccccccggcgcccagcaccggcacacggaagcacagaaaagcggcgaagggggaagagagagaaacccaaaagaagaagccaaggcgggcaggagccacagaacgcaagacaggcaaagagggggaccgcccccggagagacggaagggaggcgagagggggaggcgaaaaccaggaggagaaaggagcgccaaaaagcacccgcgccacccccagcccccagggaagaggacgcgggcaaaaggcgcggcaccacagccccgcagcggggaggggggcccagacccggcccgcaaccaggcgggagggagggggcgcggaaacgggcaacccccagaacaggcccggcccgcaccggagggcggcagaccacgaggaaaagaggggcaccaagcagggccggacagaacccaaaacacgaggacagcaccaacacgcccacagacccaggcgcgccccccgccccgccccgcgggcgagaaacccgaccaccgccacccgaaccccaggacgcaacagaaaacaaggcccgcggaaccccaggcgcgcaccccccccggccccggggcggccccagcaggccagacccaccccagagggacccacacccgggcgcccaggggccaggcacgaggccgcaagggggcgcaaaaccgaggcgagaaaccgccgggccggcgcgaggacaaacgccgaccgcgggagccacgggcagccaggggcgggagaagcaacggcccccaggggcggaccgggcggccagggagagcgaggccccggggcccggaggccccagcgaagagacgcagcggggaaggcgccgcccccgggcccccgcgccacccaaccgggcccccagcaaaggacaaacgagaggcagcccagggcgcgcggagggcgcgggaccggggaggaaagagcaccgccgcgccagcccgacgaagggaccggcccccagccaaaacgcagacgaggcacgcagggggcgcagggagagggcccgggaccgcccccacgcaccgcgcgcgccagccgcgacggccgcggggaccccgagacagccggggcagggcgagagaccagcgccacgacccaccgcaacccggggacccccagcccgcgcggagcggaggggcccggccccagccccgcccggaacaggaagagggcgggagaggcgcgcacccgcgccgccggcggggacgccacaggggcccggggccaccgcgagcgcggacgcggcgcggcgggccccgcgccaacgcaccccaccccccgccccgcaggcccagggaaggccacgaaaacagacgccgacggaaaacgaccgcaggcccgagccggaggacggggccccaaacgggcacgggacaggagaggccccaacccgcagggacggggagggaagggcaccacccccgcaagccagaggcgagcgaagagcaggccaccccccccgcacggcccccccggccagcgccaaagacaccccagccccgagcggcggcccccaccgaccgccacacggaagagcggacccagcggggcgcaccgggaggacaggcccagaccgcacggccgggaggacaccggccccgcgccccacagcccccccggccggccggagcgggcagggaggggggaccggggggccaagaacagccggggcggagacgggagcccacccagcagcacccccccccagggaggggagaaaaggggaacagagggccccggagccggaagggacgggaacgcgaagaaaggggcgagcgaggcggggggcagagggggccagcgcccccagaggaggaggcgcaacgcgaagcgcagggaggcacaaaaccgcgaccagcagcgggaaaaaaagaagcgaggggacacaaggcccccgcgcggagcgaggaaacccgggcggccagccgggccgcccccgcccggcgggcgcggcccagcggcccagaaacaaagacaggagcccagccgacgccggcccaccccaagggcaccccgccccaaaaggcacgccgggaaagcgccgagaggcagggggcccaagggcccgcccaggaggacgccaccaaaacgaaggcggggaacggaagaaaggacgcggggccagagaagaaaaacaaacgcaaaacgagaaaggacaagacaacgaaaaaaaacccggccgaaacccacaccgcggcagaaaccggcgcgaaacgagaaaagggaaggcaagacagaaaagcgccgcaaaccacagcccagcagacccgccaggcacaagggaagggcccccggagagcgaaggagaaccccaaaaaccagaaacccagagacgggcccaaacacccccacgggccgccgacaaagaaacccccggccgaagccaaaagaagacccagaaaagagccgccacaagagacccgaaggaaggggcacccaaggcaaaagcaaagagcccggccaagccccagcaggagggacacacagccaaacgaccacgcgaaacaaggaccgccagcagcacaacacaaaaccacgacgccaggaaagaagggcaccgcaaacccaaaagaccagagagaaggcagaggcccaccacaggccaacgaaggcacgagcccccagaaccaggccggaaacaggaccaaaagaagcaagggcaaggagaaagcgccgagagaaacccccacccccccccaaaaaaaaccggggaaagacggagggcgccggggcaaaaaaccaaaggcccccacccagagaaagaacaccccgggaaacagacgaacccccagcgccaaaaccagggaaacaagacccccacgagagcaacaggccgccggcgagagggggagcgagggagggaaaaagggaggagggggagagcaagaagagaaacccacagagagccgccgacagaggcagacgggaggcacagggacccaggaaagacagggcaaacgcaaagcccagacggccccgcggacagaaagagaccacaagccccccccaggagaggagcggcccaaccaacacagggagacaacacagaagcaaaccggggggcacaacagggcaccagagggaaaggaggcgggggggcacccacacagccgaagccccaaacaaaagacaaaacgcgcggaacccgcagacaaaccaagaaggaggcgggagggaaaagagaaaagagaaaaagaccccgagcgacgagaagagcccaagaaagcaacagaccagcaaccaagggaagaaagaagggaggaccgcaaaacgcaagacgagacggggggggaccacccggagccaccacaaagcagagaagcccccccgaggccagcccgaggggcaggcaagcaggggagagacacaagaccaccggacaaaagaacagaaacaggggggaaaagcacaagcaaaaaggaaaagaagaacgacgccaccgggccaacacagcacgaggacacccaccccaccgccacaagccagaacaaaacaaccgagagagggcgaacgcagagaaagagccaaaagcaaaacagaaggggcaagcccgcgaaggacaagccaaaaacagcaccaaacccaccgacgacgaacacggaaaacccacacgcccacccaccaaacccacccagaacaccaccggccacggccacccacacccccacgcaagaaggcaaaggcaaagccacgaaaaggcagaaaccaccagaaacacggaaaaaaaacaagacaagaaaaaaaaaaaaagacaggacgcgaggcccaacaaaaacaagcaaagcaggaaaaaaaaacggcacccccccaaaaccaggaaagcaaagcgaaaagagagagccaaccccgcagcagaaaacgagcgagggggggggcgcaagcacagagggagcccaggcacaaagcggccccagaacagcaaaggaaggccgaaaaaggaagggggggggggggagaagaagcgcgggcggagggggcgcaccgcccccacaacaaccacagacagaaaggagacgggaaacacaaaaaccgacaaggaaaacggcaccacagccgcacgacaacagacaagacaagaagcggcagcacgaccacacgcgcgaaaggaaaacccacaaggagggcagcccggacccgggagacaaaacgggcgaccccgcgcccccccccccagccagaaaaacgggcaaggacagagacaacaaacgcaccaccaagaaaaaacaggcacaaaagggaggccgcccaaagcgagaacacagagcagagaaagccaaccaaaagccccgcaagaacacaccgacccacaacaacaaagcaggacaagagcaaggcaggaaaaaacggcgcggcaggggaaaagaagcagcagcaaaacacacgacacggcgagcccccgcaccaccagaaagcgggaggcccccccgggggcaagggagcgagacccagacagcggggaggcgcgggccccggagccgccccccggggccgagcggcagccccccccccccggcccggcaccgcggcccccccgccgcccccccccggcagccgggcccgcccgcgccacgagcaagccggaccggccgacagccgggccagggcgggagagagcggacagggcggcggcggcggcacggcagagggcaggggcagggcagaccagcccaggcggaagccgcgcccagcgcagcgcgggcggcgggagggcgccgagagcgagggggaggccggagggccgaggcgggaaggaggcggcggacagcgggacgaggcggccagagagagcgcgccgcccaagagggggcaccggggcacggagggccgcggcgcggggggccggccgagggcccacggcccgcaggaaaggccgagggggcccccaagaccgccaaccagccccacccccagggagcgggagcagaggagagcggcgagcaggaggggcgacggagagcgcgcaccgacggcccagcgcgagggcagaccgcgcagcccgccaggcaggcaggcggcaccgcgcgcgcgccggaccagcccaacgcgaggccgcccgacagcgccgagacgcgccccccgcggccggcgccagcccgcgagaggcccccgggcaccgcacaacgcccgcgggacgagaccgaggagacggccccggggggggggcggggggggccccaggacaccaccagccggagagaagccgcggagacagagccgaacagaacaaacaggggagcggcccaccgggggaggcaggcgggaaaaaagaaaacgaaaaaaaaaaaaaacgcacgcccaggaacccaccccgcggcaagacggagaagaaaagcggagacgcgcccccgccccccccccacgcccccccggaggcgcccggacagcaggggggcgaacaacccacgcgaaaaagaggggcaagagcgcggcggagaaaagagacaaaaggagcccccacaccgggcggaggagacggccacacagggcgggcgcgcgcccaagcaaggaccacaacagggggccgcccgggacacccgcccgaaccgcaggagcccccaggcacaaaaccccgagacacaccaccgcccagcacgccccgaaaccccaccccacccccccccaaccaaccaaacacacacaggaacggaaggaaggcaagagaaggggccaggcggggggaggcccgagggagagaggaagaaacacgcccccccggcgccccaagagagaaaagggcaaaaaaggccagggaaagggagggacagagggcggcggagggaagggcgccagcgggggcggggggggggaagacgcagccgacccgccaaacaagaccccaaacacccacgcaagagggccccgggggcaacgggagccagcgggaggcgcccggcagagggcggagaggccacggcccccgaaaacaggacaaaagaacaggcacaacaacccagaccaaaaacgcgaaaaaaaaagaagcacaagaaaagcaacgggaggagggaaggaaaaggagccaaggaggcagagagagagagaggccgagagcccagagagagcccacccaggcccggaccggcgcggcgcaaaacgggggacggccgcgcccgaagcccgccgggcccccggccgcggcgacggccccgagcccgggaaccagcggcaccccggccgcgcggggggccaccaggcggggccgccgacggcgcggacagggaaacagaagccaaaaaacacgagcggggggggggcggggggggggggcggggcaaagaagcacgggggaagggaaacaacgaaaggaccagaaagccccggcggcccgggcacgcggcagcgcagagcgcgggaaaaagaggaggcggagggagcccgggcgaggcggagggggcgagacccccccgcggggacaagacagccagcagcacgaggggcgggaaggcagaaacccgggaagggagagagccccaggagggccagaagaacccggacaccgccccccccggcggggaacgggaaacaaacgcagcaggacgagagccggggaagggaaacgaacaacgcggaacccgggcacggggcccgcgccgcgagcaccgaagaacaggagcccccccccgaccaaaccgagcggcaggggagagggagcgcgcccaggccggaggcacgccgaggcggccccacgacagcacgcgcgaaggcagccggccaaaccagaaggagggcaaacgcaacaggcaggagcgcacaccgaagcgaagggggaaaaaggccaacagccccgcaaggccaggaagaggccgcagaggacaggagccccaccacccaccggggaaggaaagcaacaagaggagaggagggaaagacaagccaaaagcaccaaaccaagcaaaagaagcaacaccagaccgccaaaagaaggacaacacaagcccggaaaaaaaggaggggaggggggaaggcccagaacggcagcccagggagggaggaagcagggcagccaacgacaaccccgcgacccccgcgacaaagggggaggagagagaggcggacgggggagggcagggagcgagcacggacggacgaagagcagcccccgcccgcggacgggcacaggcggcccccgccgccccgagccacccccgacccaggcgcggcggcgcgcccccacacccagacgaaaacgcgcaccgaggaggggaagagaagcggcagagcagaaggggcaaagaaggagggaaaaacaggcacaagaaacccaaaaaaagcgacccagggacaagaaaaaaagaaaaccccccaaaagaacgaaggggcaagccggggcggggggaggggagggaaggagggagagcagccccgaaaacaagcgcggggcggaagccggggccagggcgggagccaaaccagaagccacccccagcacagcccagccgagagggggcgacgccgccgcagccggccgagggggcgcgagggccgggaaggggcgacgggccgcccgaacagaccaggacacccccccccaagggcagcccagaacagagggccgaaagggagacgcggggaccaggccgggaccccggcccgaggccgggacgggcgcgcccccgccccggcaccccgccgaaggccgaagcggagggggggccaaggcagggccccccagaagacagaagcagcccccaccccaccggcggggcgacaacagacgaggggaggagaaagggccacaacgcaccgaaaagggaaaccgccggggcccaaaaggcgagcgccccgcacgcgccgggagcccgacccccgccaccgcagccagcccggagagcccgaacccgagaaggagcaggcccggagccaggagggcaggcacacggaccgagggcgacaccaacgcccaccccagacgacggaaggagagagaaaggagcgccgccggccaaggcgcagcagccacagaggccagccggagacgcaccagaccggcccggccgagacccccggagggccagaccggcgaggagccggagcgagcgacccgcgcggggccgggcgcgccccgggccacaccccgcgccccgcggcggggcgggcgcgccgcggaggcggggacgcccggcaacagggcgcccaaggcaggcaggcaccccccaagccgcggccgagaagagccggagccagccccacaacaagaaaacagcgggcggcgcgggaccggggcagaagagccgccgcgacccgcgcgcccagggcgcccgcggggaccgcgcaccgggaagcggcggccaacaccccccggcccccagacaccagggacgccaccgacacccaggcgcgccgccgggcccgacgcccacgcccgcagccagccaccgagcccccagcagcgccggccgccgaggccgcggcgaggccaggagcgaacccccacccccacccccgcaagagccagagcaaagcgcagcgaccgccgaagagcacggagaggcaggcaacagcaacgccaggggcccccgccacaagcagcaaacgaccagcagaaacggccgagaccgaaaggcgggaggcgcccggggccacccaacccaaccacccccaagacaaaacagaacaaaaaaaggaaaccaaacacaacagcccaggcaaacaaggaaagccaaaaaaggaccacgcggagaaacccaaaaaggcacagcagagagaacgaaaccacaacaaagcaggggggccggcaccagggccgagggacaaagaagccagaccaaaaaagaaaaaaaaaaaaaaaaaaaaaaaaaaaaaaaaaaagaccaaaaaaaaaaacaacaaaacgcagcaagcaggaaaaccccgcagcagcgcacccgaggaaggggcagggcacggaacccgagccccagagggagagccaaaacagaaccagcaaaaaagggaacaagggccagagaagaggacggacagacgacaaagcgaccacgggccccaaaaaaacacgaaaacacgacgccagccccccacaaaaaccagcaacggggaaaaagcagaagggaagggcagcagaaagagcggagaacgccacaaaggaggaggcggaagagccaggcagcccagaaagcacaaaagagagggcaaaggaaaaagacaagaaacacggcagaacagaaggaaagagcaaagcaccaaggcggcagaacacaaacaaaaaaaagaccacgaaagcaaaggaaaagaagcgggccaaaggaagccaaaggagcacccagacccccagaacacgccaagccaaaacccaaccgagccccgagaaagccaaaaaggaaaaaaccaagagaaagggggaaaaacacgggacaaacaaaacgagagaaaaacgcaacaagcacacggcaggcccgacacggagggcccaaaaccaaacaagaaccacaagcagagaaacagagagaaacacagaagaagacagccaccgaacaagaaccaaaaaaaacacagaaacaacacgcggaggagacacccggcaacaagaagaaacacaagcgacgcgaaggcaaggaaagaagagacagagcaagaacccagaccagaaacagaagcacacacaaagaaaagaaaagaaccacaaagagaagaaaaggaagcacaacaaaaggaacagcagaaaaagaagacaccagacaacaaaacacgcaaaggaccaacagaagcgaagaagaaagcaagagcaaaacaaaaaaccgaagcgggcaaaaaaaaaaaaaaacagagcgcaagaagacaaggaaaacaaaaaacgaaagaacgggagaaacccacaggcgacccaacaaaaagaacaaacagagaaaagaaaaagacgcacgaacgaaaaaaaaaaggcaacaaaacagcccaagggacaaaaccagggaggaccaggggagccacacgaaaacaaagaaaagaaaaagacccaaggcagacacaagaagggggcaaacaccaacagccgaagaaacgaaaaaacccaaacacgacaaagacaaacacaacacaaaaaaaacaaaaaaaacaagcccaagaaaaggaggccgcagcagggcagaggggaggaggaagaagggagagaggaagcaggcggaaacaaacacaacacagaaacaaaacgcagaccaggcgaacccgaacaagaaaaaccaacagacacaagagcgagaaaagccaaaagagcacgcaaagaacaaaaaaaaggaaaaaaacaaaagaacaaaggacagaaagaaaggaaaccaggccaggaggacgccaccaaagcggagaaagaaaagcagaaacggagcagccacggaaggaaacagagaaaccaaaagaacggccaaaggcaagggaacagagagacagaaaaaaaaacaaagaggggaaaagaaagaaggaggaaagaaaacacagcacgaccagcgaaaaaaaaaccacccaaggcaaggaggggcaaaagcacgcaaaaaagaacaagagcaggaaagaaggacaacaaaaaagaacccagggccgccaaaggcaaagaagcaaggcaacagaaaacccaggacgggcacgcacaccacaacacccccaaaggaaccagcaaaagccgagaaaagcggagaagaagaaaacacgagaacccagggaggacccgagaaaggacagccagaaacggcgcagaggcaaaggaaaaacgagaaaccacagacgaaaccgcagaaaagaacagaaaaaagaaaaaaaagaagaaaacaaagaaagaaaagaaaaaggaaacgggaagccaaggggaacaggccaaaaagcaacccggcaaaaagaaaaaagaaagcaaccaagagggacaaaaagggcccaaggcacagcaaaaagcacacaaaaagaagcaaacagaaacgacagaaaaagacaacccagagacaagaccaagccaaaaaccagagaaaaagccggggaaagcaaggaagccgagaggaaacagagcgaggaaacaagaaccgcacaagcacccacgcgcaaagaccccagaaagaaagcaggggaaaagccgccccaagacaaaagaagaagcaaaagagaagaagccgggaaggaagccaagaacagacacccaaagaaaagggccaaaggagagggaggaaagaagggccaagagcaaaacaaaccaaccaaaagaagagcgaggaacaaaaacagaagcaaggccacgcagcggaggaaacaaaagaaggcaagaacaagggcaagccccgggggccacagcccggggaaagacaccaacaaccagggaacaaaaaacacagcacaaaaaagcaagcaaaaggcgcggcaaagcacaaaacccgggacaagaaaagagagccggagagaaaaacagaaacccaggaaacaagagagcaccgcacggaggagcaccccccaagagaagggcagaggcagaaagagaaagaaagaccacaacccacagaaccagaaggaacagaccaggagcacaccacaagcgccacgaaccgcgcacgcacaagaaagaagaacggacaaaccaggaggaaaaaaaagaggcaaggggaagcacaccagaggacagacaaaacaagagcaaaaaaaacaaaaaaaaaaaaaaaacgaaaagagaggaacaaaggcaaaaccagaacacaaagagaaaaagagacgagggacacaaaaaaagaacacaaaacacacgaaagacggaaaggaaagaaaacggaaaacgagcacaacagaccaaggcccagaggaaaaaacgcaagccagggaaaacagcgaagcgaaaaaacacagacaagaccccaaaacacccagcgacgccccacccaaaccgaacacaaccaaagacaaacgcaaagaagcaagacacacacaaaaaaaagggacagggaaaacaaagaaaaaagcacagcacagaaacagcagaaaggaagaaccaagcccagcaaaaaagaaaaaccaaagaaaaaaaagagaaaaagagagcccaaaaggacaggagaagaaacaaagaaggaaaagcaacaaaacaaagcaaaacaaaaaacgaagccaccagcgcggaagaaaccgaggcggaaaaaaagaaaagaggaagacacagccgcggggaggcccaggaaccgcaaccacggggaagaccccaccgggcggcaggagagagaagagcgcaagcgggagaaacgccagacgcaaaaaaccacagacggagacaccaacacaagaacagcagggagaaaccggcccagaccacgaccccaccggcccgcccgacacaggggaagagggaaccaacaagggagagggggggacacagagcaaacgaaagcaaaagcaaacaaaacaaagaacacagagaagggaaaagcacaaaaaaagaaaaagcaagcaaggaagagaagaacagcaagacaggaaggagcaccaaggaaggaggaggggaaggagggagagaaccacacagagaaaaagaaacaaggccagcggagggagggcgcacagggcaaaacaaaaagacacaaacagaaggaccaagaaaaagaccagggccgagacagagccacgccgaacccagcacgggaggacaaggcgggggacacgaggcaggagcgagaccagcgaccaaagaaaaccccaccaaaaaaacaaaaaagcccagcaggggcaccccgaaccagcacaagaggcgaggcaggacaagcgaaccgggagacggagggcgggagccgagagcaccacgcacccagcgggcaacagaggagaccgccaaaaagaaaaaaaaaggcggggggaggcaaaggcacgaaaaaacaagaaagaagagaaccgcccaaagaagaggaagaaggaaaaagcaaccacagcccaccacagacccggacgaacggacaccccaccaagcgaacccaaaagcaacaacaaaaaaacacacgcacgacaaaccaaaccaccaaaaaaaaagaacaacagaacaaaaaaacacgggaaacaaacaccaccacaagcacacgagaaacccaaagcaacaccaaaaggcacaagaaagacaagaacaaccaggaaggcaggcacaccgagcccagcaggagaagcaaggggcaggacccgagccaggaggaggccgcaggagcagggacacagcaggacccagccgagcacaaagccagacaccaaaagaaaaaaaaacacacacacacacagaagacaacagcgaaaagggagaacaacagaagagaaaaaaggaaagggaaaaacaaaacaaaaaacacagagaaaaagagggcaacgaagaagaagaagaaacgccacacgccacccgcgcaacaccaacgaccaggcccgggaagaagcaagcaacaccgggagccgcagaaaaggcagacaccaggaacacaggaagaaagagagcagccccagagagcccgagcagaaaccccacccaccgagcaaaacacgaaagaaaaaaaaccagccaacaaacaaaaccccgggagggggaaaaacccaaaaggccagaggagccaacccagaagaagaaagggcccgggaagcacccggaacaggacgaacagaaggaaacagacggaaacagcaagaggaggggacagagaccgaagcaggcaccaaaacccaccccccggcccagagcaccagaagcagcccggagagggaagaggagggaagcaagcagcaggagaagaacagggcagccccacaccccgcacacgacacacgaaccagcagacagaggacacgaggccggaaaacaaaacagacaggcccccacaaggagagcagaacgcccaagacggacacggaaacacacaggacaagaagaaacccgcgaagcaaggcccaagagcaaccgccaaaacaacaccaagcgcaagcaacaccagagaacacacaaacacaaggggcacaaaaaaaagagacagcagaggacaaacagcagagagcaaaaacaggcaaaggaaccgccccacaaagggaccgcccagggaaagaaacggccgcagggaaaaaaaaaacaaaagaaaccaaaagaccagggaaaggccacacgagcacagagaaaacagggaaaggaacccaagaagggcaaggcacagcccaagggaagagcgcagagacaggaaggcggcaccaaaagcaccgaaaaaaggagagcacaaacccacagaagcgcacaagcaacaaaccagcagaaagagacaggcgaggaaggggaacaggccgccccgccacagggacagcaagagggggaaaacagccgacagggaacggcccgcgcaagccccaagcagaggacagcccaaccgaccacagcaccgaaaccaggaagacggaggcggccacgcaccaaacgggggaccagcacggacaccagacaccgaacaagcacaggacaaagggcagaaaaaccacacaaaaaaaaagcaacgcacagccaggaaaaggcacagagagaaagagcaaaaaacccacccccgagccgaaaaagggaaacacaaaagagcaaaagcacggacagagagacaagacagaaaaaaaaggaaggaaggaaggaaggaagagagggacgaggaaggagaaagggagcggaggacaacagaaaaaggagaggaagagccaggaagcgacaaaaaccgcaggaggcaaaagaccaagaaagagacccagagaaaaaagccggcagagaggcagcggaacaaagaggccgaagagggcaaccgcagagagaaaaggaggccaagggcgaagaggggaaagaaagagagccgggcgcggggccacgccgaacccagcacgggaggacgaggcgggggacgcgaggcaggagacgagaccaccggcaacagggaaaccgccacaaaaaaacaaaaaaaaagccgggcggggggggcccaagcccagcacgggggcgagccaggagaaggcgaacccgggaggcggagcgcaggagccgagacgcgccacgcacccagccgggcgacagagagagaccgccaaaaaaaaaaaagaaagaaaagaaagaaagagaaaaaaacagagagaaacgccgcgggggacagcaacgaagggcagaagacagcgcgcaggaaaaagcgccaggagcgcgggcccaccgagaagaggcaccccgagaggggagcagaggagggccagccacaacagaaaaacacgagagaagagacagaaaggggcaaggaaagcagggagacaaaggaagccagcaagcaacaggcaggaaaaaggagggccgaccacgggggagggggagaggggcagacgaagaagaaggacgagccaacaggagcgagaggacagagagagaaaaagaggaaagagacccaaaggaagaacagaaggaaagagcaacaacggcaagaaaaacagggaggaccgaaggggaaaagaagagaaaaagaagaagaggccacaaccaccacaggacgcccggcgaaggggagccgaaagagaaaaacgccaagaagagcaaggagggagagaaaagagacgccaggagaccagcagagaaagcagaagcgccaaggcaccgaggccgaagggaacaaacggcccaaaaaagagaaaaaaaagacgaaaacgaggagcgggagagccacacggcaagagagggaaaaacgagcgaggagaagcaagggaaggagagccgccaaagaaaaaaaacacaccaacagccacagggaaagacacgaaagaaggaaaaagccagcacaaaaggacagaacaagaccgcaaaagaacagagaggccgggcacagggccagccaaacacagaggggaggccaagggggggacccgagccaggaggagaccaccacaaaaaaagcaaaaaagagccaggggaagggacgcccaacccagcaaggggggagggggaagacacgagcaggagggaggcgcaggagccagccgccacgcacccagccgaggacaaaggacagccgcaagcaacaacagcaggacagacgcaaaccaagaaagagacggggcgcgagagccagagaagggagaaaggggaggaaaggaaagagcaggcccgacaaagaagacgaaacaggcacagcaagagaaaacaacacaagaacgacacaagagggaaagaggaagcacaaaagaacaaagaaaacacgagaaacaagaaaggcaaccacacacacaaaaaacccaagcagaagaaaaagcacagaaaacaaacacacacagggagaacagacagcaggaagcccccaacaccaagggaaaaagggagaaccaaggaggaagcaaagggaagaacaagcaacgaaagccggaccgcagagggccacgacacaggaagaggcacaaaacaaagaccgcagaaaacaaagggcgggcacagggccaaccgaaccagcaagagaggccaaagggaggacggagccaggaggagaccagccgggacagcaagacccaccacaaaaaaaaaaaagccagcacagggcaggcgggacccaggcaagggggaggacacgagccaggaggcaaggccaggaaccagaaagccacgcacccagccgggcgaagagcaagacccgcccgaaaaacaaaacaaaccaaacaaaagacccacaaagaaaacaggagcggggaaaaagagagaagaagaagagcggagaaccaaggagaccacagaggggccccagcgccccaaacacgaacacaaacggaggcacaagggaacaccacgcggcaggaccacaagagacgcaacccagaaacagccgccaaggagaacccacagagagggaaacgaggccagcaagagagcaaccaggacacaagaagaaagggagccaggacaacggcagcgacccaaaaccaacaccccacacaacaaaaagcacaaagggacgggaaccaggacagggcaacccacccaggagaaagagagggccccccccgccagaagaccacagagaccagcaaacaggagacagaagaccagagccaaacaaaaccccaaagcccagaacacagaaaaaagaccaaacaaaaccaggacaaccaacgaagaggaaaaggcaaccacagacaacaacaccaagagcacagagggaaaacgaaaggacaagacaaccacaaaaaaaagccaggaggccggggggggccagccgagcccagcaccaggagggaggagaaggagccagcccaggaggaggcgcaggagccgacacccacgcaccgaccggagaacaggggaacccccaaaaacaaaaaaaaaccaagagcaaagaacacagaagccaagagaaaaaagaaaacccagcaaagaaacaaaaaccaaagggaaaagaaagaggcagggccacgcacccagggggaggcagggcacaaaggccaagcagggcacaaaggccacgcagcccgaccccggaccaaacaaccccagcccagagagagaaaggccccaggcccaggcggccaaacccaggccaagcaacccccacccagccccaaaagcgagaaaagcagagccacaacccagcccaaaggaaaagagagaaaaaacagaaccaaaaaaaaaccacagagggccaaagaagaaaggaggagacagaaggaagaagcgggaacccgaagaaaaacaaagaaacccagcgaacgaagagagaaaacagacgagcaaacaagaacaggggaaagaaggcaccaaacacgagacacacaagggagggcccacaaaaagcacccaaaaaccgccagagcagcagaaagaaggaacacgaaaggggacgcaggaagacaaaaaaagccccaaaagaacaaaggaaacagaagaggcaaaaacaaaagagaaaagcaggaaagacaggcaggaaggaagcaagagaggggcgcggcgcccaggcggaggcagcagcacaccggccacgcaagccgcccccggacacgccacccgcccagccgccgagagcgggacacaggcgcccgccaccacgcccagcaagaagagagaggggcaccggagccaggaggccgacccgacccggaccgcccacccggcccccagaggcgggaacaggcggagccaccgcacccggccgaagcaaaaacccaaccccacaacggaggaacaggccaagagaaaagaggaccacaaggaacagcagaagacagagggacgggccccagccaaaacaaccagaaaaccaaacaaaagaaaaaagagacacaaccaaagaaacaaaaaaagcaccacacgaaggaaacggagagagaagaaccaaaaaaaccacagcagggaaagagacaaaaaacaacaaaaacacaaaaaaacaaaaaggccggcaaaaaaaaaaaaaaaagacaccagcaaaacccaggagcaagggagaggaacagggaaacaaagaccaaaaaacagccagccaagagccggcgagaaggaaaaaggccaagaaagggagaaagggagaaagaaaggggccaaaccgagaacagaaggagaaagaaaaaaaaggcagaaaagaagaaggggacagcccacacaaggaaaaagcaaccacacaacaacgcagacaaggaagcacaacccacaacccaaagccccaacacgcccccccaccacaccaaacaaacccgcaagcaggccaagaagcgagcagccccagcaaacaagggaaagcaagggagaccgcaagaagcgaacaaaaagaaacacaacgggaaagaaacgcggagacgggccgagcaggaacaaagcaacaccaaaagcagaagggaagagccgggagcaccgcaggacccagaacaggcagggagggacggaaaaccagaagaggaacgacccccgcaaacaccaaaaaaagcacgccccgaagggcgaaagcaaagcaagccccacccccccggggcagaacggaaagcgaaaccaagcgaacggacaaggaacccaaccacaaccgccccaaggccgagggaggcagcacacaagacaagaaaagggccaaaccggaaagggaaaaagcccagggagagagcgagagggagagccccggcagagggaccgcgaagaagcaggcagcaaggaaaaagaggggggaccgaggccaagggaacaagaaggagcccccacccgagcccgggaggagaacaaacccacccagcggagcccccgcaaacagccggacacgagcaaacaacagaacgagacagccaaaggcgggaaacacccagcggcgccagggccgagcccagcaggccggggcccgacgacggagggccaagcgcagaaccaagacagccggccgacggacgagccggccccccaaacaggaagggaaagagggcggaaacagagaaaaaccaagacaaaaaaaccacagaccacgcaagaccaaaagaagcaggagaacacaggagcaaaacccggcgaggcaacggagaccgaccaccgggcaagccgaaggaggcaccgcagcgaaccaaaggaaagggccgcacccccaggaagaagcggaaccaccacacaaaaaaacgcaaacagagaaaaggggaaaaaaccgggaacagacaagggcgaggcgaaacagaaagagacacaaaaagcaccagacaagcccggaaaaagagagaaaacgcaacccagaggaaaagaacaaaaaaaagaaagcacgacgaaagcaacacaacccaaaagccgacaaaaaagaaccacaacacaaaccccaccaggggagacaacaaaggacagggcacaacaaacaaaccagcaaccagcggcagaggaaaaaaaagcaaaaacagcaaaacaaggcaaacaacaaaacccaggcccagggaaaagccgacgacaaacgaacagaaggaggggccaaaagaaagaaaagagagcaaaaaacaacaaaaaaaaaaagcaaccacaaaagaccccccacaccgagagaacaaaggaagaaaaacggcggaggaaacaaacaaacaacccccccaaaaagacagaaaaggaccaaaacaacgaaacgagacaggcacacaaggaacacaaaagaagcacaaaagcccaagggggggcgcagccccaacagagaggaaaaagggacgaagggacggacgccccaggcacgggccccgagccacacggaaggcacccagcgcacagcccacccggcccccccagcgcccgcgagacacccaccgaagacgggcacagggcagagcaaaacagcaagagaaaacccaaacgaacgaaaagcaaaggagggagagaaaagaaaagcagaacaagacaagaggcgcacccggcagcaaacgagcacaaacagaaacaggagcagaaagccaccgaggcagaacaaaacccaagaagaaacaaaagagagaaaaaacccgaggcgagccgacagaccaagaaaccaagagaagaaagaccacaaagcagagagaaaagaggagaagaaagaggaccgggagagcgcccagcggcccagcccagcaaaaaacgaaggccagcacccaaaaaaggacagaacagaacagaaacaacaaaaaccaagcagccaaaaaaagagccaggggaggaacagcaagaaaagacacccgggacagacccagccgacaccgccccaccccccaggccacccccaagcggcgggaggcagccacaccggggacccaaccccaacgggcaccaaagcccgaaggcagaaagggccagcaggacaggaagggacgacacccccgggcaacccggacaagaggggggaccagggaaccggcccccgcccggcaaaggacgagggcacaacaacccagaggaccggccagacagaaccccgggaccacagagggccagcggacgcaccggggagccaggacaccaccccaaaaaggcgcagaagaccagaaaggcacccaaaaaacccagacaagaagagcggcaggaggaacgcagacacaagagaacgaaaagaccccaaagagaaaaacgaaaaagaaaaccagccgaaagcaaaagaaaacgagaaagaacgaggaagagcagccccaagcccgagaggccagagacccaggcagccagggggaagaaggacagaaagaggaaaagacaaacggaaaaggaaggagaacagaaacagcggaggaaacggcaagaacaggagaacagggcacagaggccaaaagggaggcacaaggaggcaaggcgacacccacgaagcagagacagagaaaccagccaagcaaaaagaaggaggcagcaggcaaacgaaacacacaaaggaaacgagaaaaaacaccaggaagagagcgcccaagacaacacacgagagacgcgaaccaggcaaccaaccaaccccccacccccaaagcccccaccacgcagaagccaagccccaacccggagccaggaaaagagcccaacaccagcacccagcgcagggcccgaaccgccaaaaaacacaaacagccaaacaacgagaagggagaaagaagcacccccacaccgaggcgcacgaccagcacccagggcaccccccaaaacaacacgcacacaacccacagacaagccaccagacgccaggacaacggcaagacaccaaaacaaggcagcagaccacaaagagaagagcagaacagggaggggaagaaccccaaaacgacagccccagggaaaaccagcagcagccaccgcacgaagaaggcagacaggcagaacggcccaggagggagccccagaaggaaaaacgaaagcagcacggaacccagcagaagaccgcagaaagacacagagagcaaaaacaaaaaagaagaacgcgacaagggggaaaaaaacaacacaagcaaagaagaaagaacagccaaaacaaaaaagaaaaaaggaaaagcgggcaggagcagcccaacagaaagaacgaacaacggcacagagccacagagggaacccgagggccgaacgaccagaagaaagacagagcaaccaaaaccggcccgaggaaacggccgagcaacaccacagaacaacagaggaacaggccagaaagacaaacaaaaagagaaaagaaaaaaaaaagacccgaaacaaaacgagaaaagagcgaagagcaaacaccgcaacaaaagcggaagcggcaagaacgcaaaggccaaagagaggagggaggaagagccaagacagacagaacgagacgcacccgacgcacgggggaaggaacagaaaggaggaggcgagaaaaaggcgggaaggagcccgaaaccaccgccggccccaacccaccgcacgcaagcagcacgcaggagcagagaggaaaggaccagccagaaccccccaaacaaggggacagaacaagcgaagaccgccagaaaaaaaggaaagcacaaaaacaaaagcacaaaaaaacacgcaagggcacaggcagccggaaagagaaaagcaggaaagacagaggacaccaaggacgcggaaaaggagggggagaaggaagcagccagcgcaagcaaaaaccaagacaaacaaacgcaaacgagcagaggacaagcaaaagcagagacgcaaacaagcaaagcaccgaagcaaaaaagcccaagggccaaacacaacggcccccagaagacaaggaagacaggacaaaaaagacaaagggaacaaaacggcaaaaagagacaaacaaaaacgaaagcgaaagccacaaccagaaaaaacacaaaggaagaaaaaagacaaagaaggaaagaaaaaaagccacgggcacacccccccaagcccacagagacagaagaaaagaaccacagggaaggaggccccaacccggcccccaacagggggccgaagaagaaggagacacggccgcaccaagaaaccccccccaccccaagcaaaaaccaccagcaacggaaggaacaccccggggacgggaccagaaagcaagaacaacacggcacagaaaacacaacgggggagggcacacacacgcaagagaccccggccgagcaagagccaaaccagacgcggggggccgaaaagcaagaacagccaccaggggaaacgaaggacagcaggaagcgggggcaggcaggccaccaacacaagacggccaacggaacaaaacaaaccagccaccccacagcgccacaccaacgggcaagcacaccggcacacggaaggcggaaacaacaccaagcaggaaacagacacagcgacccgaggaaaccaaaaggaaggggcagcagagacaaacaaacagaaacaaaaaggagaaacagccacgagccaggcgcagacagggacaggagaagcccaaacacaagcaccgaagcagcaccgcggggggggggggaaaaaagaccaaaaagaagcaacgcacccccccccccagaggaagaagaagaacagacaagaagaaccagggaccaggccgagaccacagacaaacaaacccaaagcaagacgaagaaaaaggggaaggacaacagacgaacccaaagcaagacaaagaaaaaggggaagggcaaggaaaggcgcacgccgaccgacccagagaaacacccccgcccaccaccccaacccgcacgcgagaagaaaccggaggaacgagagcacagacaacacccaacggaccggccagcaggccaggaaaacgaaacggcaaaacagccggaagggccgccacccccgcccccccgccccgccagggggagggggggggggccaggccagagagagaaaccagcagggggaacccccacaaacagacccccgacccgagcaggaacaagggaagaagcgaagccccgcagggacccagaagaggcaaccggcggcaagaggagcagggccaacgggaagagccggacaagaaggcagacagccccccagaagcagaggggcagggggagacaagagccgaaacgggagagccccacccaaccccgggggaaaaaaagaaggcggaaaaagagacggagccgccgcgcccaggcggaggcagggcgcaccggcacgcaagcccgccccgggcacgccacccgcccagcccccgagagcgggaaacaggcgcccaccaccacgccaggaaaggaagacagacggggcaccagagccaggcgccgacccgacccggacgccgccggcccccaaaggcgggaacaggcagagccaccgggcccagccaaagaaggcggagaaagggacacaggccaaaaaacaaaacaaaacaaaaaaaacaagaaagcgacagggacgggagacagagccaacaagcaacagaaaaaaaggagcaaccgcaggcaggcagaagaaccagggagaaaagccccagaaagaaaccggaccgggaggaccacacaaaaaagcacaccaaaaacgcgaacaccaaagcagcacagcaccaacaaaaaaaaaaaaaggccaccccaaagcaagccaaaacaaacaaacagacagccagggaaaaaaaaaggcccggcgacccgcaagcaaaacaggaaggacaaaacgggccggaggaaagaagggaaaaggaacaacagcaagcgaggagaagagagagagccaagcccagagaagaacccacgaaaacacaggagaacgaggacgcaaccaacaacaggacagagagaaaacccagcccaggaaaaggcaagacgacaaagaaagaaaaaccacccggcacaaaagaaaagacaaacgcaccagagcaaaagagcacgaccaaaaacagacgaaaaccgcgagcccgggaaaaaaacagacaaaagcaaaagcccacccagggacggaggccacaaggaaaagaccaacaaagcagaaaaccaccaaaccacgaagcaagccacgcagggaaacagccacagaaagagacgagacacaacggaaagagaacaacacagcagccacaacgaaaaaagggagagggaagggcagcagagaggcagcggggaaagccaaaggaccgagaacaagggacccagccccggcaacggacgcggaagcccagacagagaaagcaaaggacccagccagcaagaagaaaaaagaaggcaggaagcccaagcccacgcagaacaaaaaacagaccaaggcgagggcaccaaaaaaaaaaaagggaggaaaaaaaaaaaggaaacaagacacgcaacccagcaagaaacaagaccaggaagagacccagcaggcagaagagcaaaaagaaagccacaggcaggggcgggaaagcaggaccagaaaaaagcaaaccaacacaacaaccccagcaccaaagaaaacagcagacagccgcacaaaacagggacacaagacagaaaagcaaaccaaaggcgacaacaaccaggagaaaggaaaccaaaaaccaaaaaagcgcaaaagagacacaggcacagggcaagaaacaaaccgcacaccaagggaagcacaacagggcaccagaaggagcaggggaaccccccaacaccacgcaagcggcaaagcaaagaggccaaaaagcacagaccgagcaccagcacgcagagccccggcggaacacaaagaaaagcaagggcaaacccgagccacacggcgccgacagcgcgccacgcggccaaaaccaccaaacaaaaaagagaagggcccccacccccccccccccaccccccccccccgccaccccccccccgcccccccccccccccccccccccccaacccccccccccccccccccgcggcagccccccaccagcgaaaggggcaccccccccaaaagcagagaaagaaaaggcagaggccgggggccgcccccaaaccacggcacccgcgccccccacccccgcccccaccaccaccaccaggaaacagaagagggaggagaaagagaggggaaaaaaaaaaagaaagacgaagcggcagaaagccggaccggcaccagccgaagagggacaaggaacaaaggcagcccgccaggagccagcgcgagggggggagccggcgagagcaccggagaaaggggcacaaacacaaacaggcacgagagaaggagcagaaaaaaagcagagcgcagcccagagaagagaacgccgaccgcaaaagaacagaacaaaggggccagggaccagagaggggccaggcagggggccaacaaaacccaaggggaaagaacaccagcaggccacaccaagaggccaccaaccggcaaaaagggagggcgcaagggggagcgcaagaaagaaggggacaggccacagcgggaacagaagaaacaacaaaaagaacacaaagaaaagacggccaggagggcaaagcggcgcaacaccaccagccaaacaccagccccccgcagccaggacggcccgaaacgcaaggcaggacaggaaagcgaggaaaggaaacaacaccacagcggggagagccaagcaggcagaagaaagaaggcaccccccgcccccacccgcacggcccaacagcagcagccaggaagcaagagaggaagaaaaccaacccaacggaaaggagccgcaggcggccaaaaccaaggcagcaaccgaacacggaccaagccaccaccccacagcagcaagaaagagaaacaccgacaaacagccacagagaaaaaacaggcagaaacgccacaaaacagagacaagaccaccgcaccaagcggaggcaggggcgacacggcacaacagcccaacccggggacaaggcacaccaccagcccagcaaaaagggagacaaggccaccaggccggacgggaacccgggccaggggaaccgccaaaggcgggaacaggggagcccgcccagccacaagcccgagacagaggcccgcccaggcggaggcaaggcggaccggcaccgcaacccgcccccgggaaacgacccgccagccccgggagcgggaacaggcaggccaccgcgccggcaagaagagagacggggcccaggacaggccgccgaacccgaccagggaccacccgcccggcccccaaaggcgggaacagggggagccacgccggccaagccaaagggcagacaggcagaaacaccacaaccaaaagacagccaaggaaagacacaacagagaacacaccacaacccagaaccaccccacgaaaccgcccaaaacaacggcgggcaggcagccagcgaacccagcaccggaggccaaggccagggaaccgaggcaggagcgagaccagccggccaacacggaaaccccaccacaaaaaacaaaacaagcggggggggggacaccgaaccccagcacgggaggcgaggcaggagaagcgaacggggaggcagaaggcaggagcgagacagccagcacccagccgggcaacaagaggaaaccgcaaaaaaaaaaaaaacgccccccccccccagcccggcaaccaccacacccaacagaaggggcagaaaaggggaccccacccacaaagagcaccgcaacacccgaacaaaagaaggaacaagagaaaagacaacaaaaaacaaagaggacagagaaacacagaaagaagacccaaagaccaggaaaaacgccaagcaggacaagaagaagaacagccagagaaagcacggaccaaagggagacaagggaaggcgagggggaaacccagcaaggccgccgcagaccggcccggagcgcccaccgggcgggaggaccccgggaagaaggcaagagagaggacccaggaggcgcgggggaaaagaggcagcagacccaccgggaaagaggaacggcagaccacagggagaaagagaggcgagaaacaggaggagggagagggcagagagacgcgagacccaaccccgcaaagcacagcagccaagggccaacggggacagccagccccaacaaaaacgacaccagaaccaaaaagagaaaacaaaacccgacggcaacacagcacaagcccagggaccaggaggagcagaacccccaaggccaaaagaacaaggaaggcggccggcccaaccaaaccagagaagaacaagggggaaggaccgggggagggaccggggggaaggaccgggacagggggcgagcccccgcgaccgaagagcgggaaaagggagcaccccccacccccccacggcagaagaagcgccccccaaccaccgagaaaccgaggccccccagccagcgcggcagacgcagaacggagccaaaagcccaaaaacccagcccagaagcaagcagcaaaaggacaaaagaagaccagagacggacaaaggacaaaggggcccacgacggaaagcgcaaaacaggagcacaaaaccgagaaccccgggaaaccagaggggaagcagacaaccaaacagaacgggacaaaaacgcacagggccacacgaccagcaagacaagggccaacccacgccaacacgaagcaaccaccaaaggggaaggaccacgggaaagcgcccaaaagaaaaaggcacaaacacaggaaacagagcacaaaaacagccgcagggacaggaaaagcgggaagccacaccagcaaacaacacaggaacagaaaacaaacaccacagccaccaaaggggaggaacaagagaacacaggacacagggaggggaacacacacaccagggcccggggggggggcgcaaggggagcaagagcaaggacaaaaccaagcgagggcaaaaaccagagacagggaagggcagcaaaccaccaggcacagaacaagaacaaagcgcacgcggcagacccagaaccaaggaaaaaaaaaagaaaaaaagcggccagaaagggaggagaccagaaggccacaaaccggagaaaacacaagccgccagaagaggcgaagaaggagccaaaacgaaaaacccccagaacgaagcaagacccccacagggcccacggaacgcgaacacaaaaaaagagaagccaacagcagccgcgagcaaccaagaaaaaaccaaacacgcaaaagccccccaacaagagaagagcacacaagacgaagagaacagggaaaggaagggccaaccaaggcagggggacaggggcagagaaccagcccaaaccaggaagacaccagaagaccggcacccgcaaaaaacagccaaaacaagggacgggacaccaacaggcaagcgcagccagaccacaggaaaccaagcgagaaggaaccagaaagggaaaccgcagaaggacagagacccgagaccacagaaagaggacaacagaaaacaaagggagaaaggagcagaaagacagggagaggacaacaaacccaacagaacaggaagcccaaggacccgccagcaaacgaggcacaagccaccccgaaaagcaagaaacaacaacaaaaggaacaacccaggaacacaaagaacaggaaaaaaagaacaccaaacccaccgaaccacccaaagaaaggacaagaagggagaggcgaccagaaacaccccaacccgccccagccagggaaagccagaccgccccaggcagcccgccccggcaggaagccacagggaaaacaaagccaaggaaccgcccccccccccccccccccccccccccccccccccccccccccccccccgcccccccccgccccgacagagccagcgccccaggcggaggcagcacaaaccagacacgcaacccgcccccaggaagccacccccaagagcgagacacgggcaggggccaccagcccagcaagaagaaagacaggggccagggccaggcggacaaggacacccaccggccccaacaggggagccaccacggccgcccggaacaagagacaaaaagaacagagcagaaagcagaacaccaaaaggagaaaccaccaaacgaaaagaaacacgaagcaggaagccaagaacgcgaagaaaacgaaccacccaaaacgagaagcaaaaacgcaaaaagaaaaaaaagagccacgacaacccagaaagcaagcacaaaacggcaccagaagggggaggggcaaaagaacagacaacaccacaaaggcaaaacccccccaagaaaacaagaacacagacagcagaaaagaggaggggaggggggcagaaagacaccagagaaggacaaaccagcaaccaacccgcaaaaaaaagagaaaaagaacagcaagcagcggagaaaacaagacacccacacccagagaaacagccaaaaaaaacaaggccaaaagaggcaagaaacagaagagacacggcaaaaaaaaaacccagaagaaacaaccaaagaacaaccggacgacacacaaaggaaacaaaaaacaaaaacacacaaagaaaaccagcaaacaggaacagagaaagagggccggcgcccaagaaaagccaaagaagaagaacaaccagaaaagaaaagaaaagaaaaggaaaagggccacaagccgggcacaggcagacccaccaaaggagaaacaccggcgccgagagaggacccaaggacaccacagaaaaaggaaaaaagaaaaaacacaggcagaagaaaaaaaaaaaaaaacaaagagcggcaaagaacagggcccaagggccggcagcaacagccgaacaacgacaagaagccacggggcagggcaaaaacggaacaccagacacaccagccaaagggaccagagaccgggacaaaaaacccaggaccaacacacaacaccgaagcaccacgcaagcccccacaggagggagcgcaaacaaagccagggccaaggagagacaagcggcgacacccagacagcgggcgcccgcacaaggaagaggagagcacagcaaccacagggcaaagccaaaaaaacagcggccaaagaaaagggcgacccgaccagacagcagggccaaaagccgcccacccgcccaaagagcagcggaaacaggcaggacccggcaaccccagggcccagagaaaaggcaaggccaaccagaccccccacacagagagcgagccgaacccccagccacccccacccccgcaacgcccccaggcagcggaaacagcagcagcccccaccgcgccccaccaggaggcccccccaggggcgcaggcccagccccaaagcaccgcagagaggcccccgaaaacccacgaagcagcacacccaccccaccaccccgccaccaaaaaaaaagcgggaacaggcaggaagcagggacaaggaaaccggccagggggcacaaccacaccagaagaaacccagcagcaagcaaacgagcccccaccccccaccccgacagaccccagggagccccccccggccagcaccacacagccccacacaaggagaacaggggggcgccggagccgaggaaaggccagcccaccagcccgcaaaggacagaccaacaggcgcaggaccacaagaagaccacagaccaacacagagggcagggggaccagcgcaggaaaggcgcaagaacaagggcagacaaaagaagaaaccggggcgccaccccaccacaccggcgacggaaaacgcaggaccgcccgcaccagaagcaaaaaggaaacaggaacaaggaggccagcgccacgccagcaaagacaacacagcgaccgcgaacccacccacggggaggccgggcgacaccagacaggccccgcgcgcagaggcaaaacaacacgacaacgggacagaaagaaaaaggcggccacggggagaacgaagacaccaaacaacccccgaaggccagaggagaggcaaggaagggggacaggggacagggagggggaagagagacgcgggagaaacacagaggggaaaggagccgcgccagccgaggggacacagaacaggagccacacggcgggggcaccagaggcacagaaagcaaagcgaaaaaaccgaacaccaacaggaacaagggagcaccaagcacaaggggagcaaccaggagaccgaggaaccggggcccggcgcacaccgcaccaagcaacgggcaagaggacgaaggggcggcccaggcaagaagaggagggggaaggggcgacacagcaaagaaacgaaacaaaccacaaagagccagccagccagaaagaacaagggcagcggcagaaaagcaagggggggaggcagaccacgcgaaccagcaaccagcaaagcaaagggagcacccccgaaggaaacgcaagagaagagccaagagcccagggcgcagcagccaccccaagcaaggcgggccaccgagagggcgggggccggggaagaacaagccaccggcaccccccaacaccaccccagccccaagaaagggcagaaaaggaaagggggaaggggggggcgggggagggagggggagggggcagccaaaggaaacaggacagggacagcccaaacgccccaaaggcaaacaaacaccagccccaaacaggaaaaaaaccccgcccccccacaaagaacaaaaggaacgcagggggggggccccgcccaagcaaacaaaaggggcggggagagggccaacgcacagcaacaaaccccggggccacccccagcccaaggaggaagaagagcagacaacaaacagagccaacccaaccggagagaagggaagagacagaacaagccagcagggacacggaaagcaccacaagggaccaggacccccgaagggaccgaggcaccaggacacagggggggcaacaacgggggagaaagagaacgagaacccgacccaaacccaagagggcacgaagagaacaaggccaaacgcagagggacagaacacgaagagccaagggaaaaacaaccacacggcccggagccaacacagcagacaggcacaaaaagagaggccggggcggggccacaccgaacccagcacgggaggccaaggcgggcgacacgagcaggaggagaccagccggccaacagggaaacccgccacaaaaaacaaaaaaagccagagggggagggccgaacccagcaccaggaggcgaggcaggaaacggaacccaggaggcagagggcaggagccgagaccgcaccacgcacccagccgggcaacagaggagacccaccaaaaaaaaaaaaaaagagaaaaacaagcaaaaggccaaagaaaaaagaaaccaggggggcccaaaaagcgaaagagcaaacacagggaaagaaaagaaaacacaccacacaacaacaaacgcaaagaacaaaaaggaaaaggaacaaaaaggagaccagacccgcaagcgagaccagaaaacaaccagccgccacggagaaaaggacagcaaacgccagaacccaaaagcaaaaaacgccagaacggggaacagagcacacagaagaaaaaagagaagggaggaaagaggggagagacaacagacaaacgacagggaagcaaaaaaacgggcaccaaagcaaacgcaaagaggaaaaaaggggcaagaccacacaagcgcaaagggaaaaacacaagcaccgaaagaaagccagaccaaggcacaagcgccgggacacaggcaacaaaaacaaagccaagagaccaggagaacgagaaagccacacaagacgagcaaaagagaacgcagggcgagccaaaaagggagacacgagaagaagggagccgagaaccaagccagagcaggagacacagggccaaccaggccggaggaagagcccaaaggaaacaggaaagggagaaagacggaaaaaagaggggcacacaaggaaaccgcccacaggaaagacagcagcgaaaggggcaaaagcgaagcaacacaccagcggacaaaacagaaaacacaaaaagcgcaacacacgggaaaagcacaccggaaaaggcccagcaaccaaagaccggccccccccccgcgccaaaacggcagggcgccgccccagggccaccaagagcccccaccgcccaagccaaacacagccccggaggcacccgcagcggcccaccccaaacaccccgaggcccccaggaacaaaagaaaaaaaacacacaccagaccaggcggacagagcacaaacaaacaaagaagaagaagaaaaaaacagaaacaagaacgaggacaaaaaaaagagagacagggaccacaagcaaaggcgagaacacgggcaaacgacccccaccagcccccgagagaagagccagagccaggccaacgaaagcaccaaagcagaaacaagcgaagcggaacacccaccgcagggccgcggggacggacccccccgaaaccaccaccccccgcaaaacccaccaccccagggccaaaccacccccgagcccccccaccccccacaagagaccccaagagacaccccagccgggccaccaggaccggcccagcaacggagaagccaggacaacaccgcaaaaggaccagggaaaaaacccccgccccaggaccccgaacgaacacaccgaccacagcacccagcagaacaaggcaccaaaaccaccaaaacacagcagccccagccccccgccccagacaaccacgggacaccaaagagcaaccaaggaagcacaggggaaaaagagggacacacaagacagcaggagaaccagaaagagaagagagagaaacgaccaacaggaagaaggcaaaaggggggggcggagaccgggcgcgccccaggcggaggcaggcgaaaacaagccacgcagccgaacccgaaccaagaaacccagcccccagaagcgggacacaggcacacaccaccacgacggcaaaaaaaaaaagcagagaccgggccacagacccagccgggcgacccggcccaagacccccaccggcccacaaaggcgggaaaaacaaagccacaggcccagccgacaaaaaccaaaaccagaaaagaaacgggaagaaacagaaaacgcaagacaaaagggccgcgggccacagagaccaggaagcagcggacggcgaagacgcccagccaaagaggaccccaggcagagaagccaacacaggagacaaggagccggcaagcacagcacagcccagaccacacaaccaacgcccagacccaacaccaccaccacccagcccacgagcaaaacgaaacacagaaaagaaggcgcaaagccccaccaaacccacccagcggcggggcccaaggccccccaccccgagaagggagacgcgccccgcaggcaacccccacaggggcacgagaccacgccacgcggaaaacccgcaaccccccccccaccgcccacgaacacccagaggagcaaacacaaaccccagggaaaaaaagaccccgacccacccccagacgccggacccacagcgaaaaccgaaagacgcgcgggcccccccccaacacaaccaaacacccagcaaggcccagccaccaaaagacgacaaacacaagccacagcacaccaggcacaacaaccccgacccaaagcaaccaaccaagcgacacccccacgaaagcacaaagggccaggaaccaccacccgggccccacccaaggcccccaggcacccggccgcaccaccccccaaaacaaagaaccggaggcaccggaacggaggccaccaagcgcacacacccaggccgcggcagcgcagagcgaagcacacgccagacacgcccggaggcaagacagcaaaaaagccccagagcaaccgaccaaccaaaaccgccgcagccccccaaaaggaaaaaccagaaaaaagaaacacccagacaagcaaacggaagccgaccccccacaccaaaagcaaacagaagccgccagccaccagaagcgacccccgacggccccacgcccaggcaagccaccaccccggacaagcaacaaccaacacaggaaccgaaaaaaagaagagccccccaaaaccaaccagacgggccaaagaacaaaaaagagagacaaaaaccagggccccaccgacagaaaaaaacaaccacaacgaccaccaccaccacagacaccgaacccccgcaagcccacaccagcccagcacagccccgcaccaaggacaggcacaccgcacacagccagacgcagcccccagagccccccaagcgcaggggacaccccagaacaaaacggcgcagagagcccggcacaagcacaaacacaccccggacagaccacgacccccccacacacaaggggggaagacagggccgccgcacccaggcggaggcagggcacagcggccacgcaacccgccccagacaaggcaaccagccagccccgagagcgagaacaggcggcgccaccaccccaacaagaagagagaggaccaccaggccaggcggcgaacccaacccaaggacacccgccggcccccaaaggcgggaagggcagagccaccggcccagccaacacaggagaaccaacgccaagcacccacagaaggaacagagggcgacgacgccagcacgcgaccgagcaccaaaaaaaagagcaaccaaaagacagaccagcaccagccacaggagcaccagaacacaaaaaaggaagaggcaaggaacaaaggcagagaggaagagcagcacaagcaaggaagcggagcaccgccccaaaaacagagacgcgggagcggggccacgccgaacccagcacgggaggcgaggcgggcggacagagaccagccggccaacagggaaaccccaccacaaaaaacaaaccacaaaaaacaaaaaagccaagcaggggggcacgagcccagcacgggaggcgaggcaggagaacgcgaacccgggaggcagaggagggagccgagacagccacgacccagccgggcaacagagcgagacccgcaaaaaaaaaaaacaacagaagccaagcaaagaggggacacagaaagcagacacgagaaggggacaagcagagcaacaaacgggaagagcaaagacaacacagcaagaccggaagcaaaacagcagggaggacaaaaaaaggaccccaacaaggcagccgacagcaccgccagggcacagaacccgcgccacagaacagccaaggcccccagcccacagccacaagaagaggccaaacgagacaacgcaaaggaccgaagaagagagggcaaagccagaaaccagaaagaagaaagaagaaaaccaagaagccaggggcgacagaaaaaaaaaagggcaagggccggaagcgggaaacccgaagaagagacagagggcccaacccgccacaacaaagaagcagaacgacacacaaagggaggaacaacccaggaacgaggagcaacaaagccaacaacaacgcaaggaaaaaaaaagcggcaaaccaagggcagggagaagaaaaccaagcaagaggaaaggacaggcaaggaaagcgccaaagaaagagaaagaagcacaacggacggcacccacccagaagggcagcacaccggaaacagagaaaaaggagcgcaaaagcaaaagaacaaaaaagggcacaaacaaacaaaagaaagccaaagagggaacagagcagaaagaaaacagcaagaaacacgaagggaaaaggccagagagacaacagaggaaagaaaaaaaaaacaggaaacacaagaggaaagagaacaacaccaacaaaacaggaaggagacaaggaggagggaggaggaaggacaaagagcacacgagaagcaaacaagaaagacaaaacagccagggagaaggcaggcaaaaacacaaaaaaaaaacaaaaaacaacaagagagacgcaggacaagacaagaaggcagaaccaaaaggcgccgcaaaaaaaaagcaccgggcaagccggacagaaaccaaaacacaaaacaacgaggaagcaccaagccaacacccaacacaaaaggagaagcagaaacagcacagagaagaacaagaggagacacaacaaaggagaggaaaaagaaggaaaggcggagcgggaagacccgaagaagggaagggggaaccgggaggaaggagaggaggggagcacgaggaggagaaaagccagcaggaccgccgccgacaaacccaccccccgggcaagaccagacacacacgaagcgggagcacaacaaacaaacaaaccagaagagcaggaaaaaagagcaaaaggaccaagaacaacaaggaaagaaaaagagaaagaacaaccacacagaaaaaaccaaggaacaaaacccgccggaaagaggaggaagacaacagacggaaaaaaaaaagccaaaaaagaaaaaaagcagggacaaaccccccaaaaccaaagagaaaccccaaaaaaaaccaaccggagacgccccagaaccaaaagaggaaaagaccccaaaagacccagccacaaagagccaaaaaaaaaaaaaagaaccaaaaacaaaaagaacaaagaccaacacacaaaaaaaacaaacaaaccaaaaacacccacaaaacgcggaaacagcaaaccaacacaaagaagaaaaagcagaaagaacacaagcgggggcagaaaaggagagaaagccgagaaggccgcagcaagacgggcaagaaagccccagaccgaggaacaacaaaaggagaaaccccacggcacaccgcacagaaagcaaaaccccccgccgcaggccgagaaacaaaaaagaaacccaggcaggaaggggcaccaggccacaggccacagaacaaagaaagcaccaagagaaaaagcgaggaagcccacggagcggccgcaggaagccggaggggggcccgaggcaacgacaagccgaacgaggggcccgggcccacggagacagcccagggagaaaagcgccaggcggaagggggcacgaaaggcagacgacaaggcgccagaaccgaaccccccagaaggcgccagaaccgaaccccccagccaagcaaccagaagagcagcagaaaacggagaggagagccaaccaacccagagaggaaccccaaaaggggaggccaagaaggaggccaaaagcaaaaggagacggacaggaaagcaaagaagagaacaccgaagagcggcgaggaaaccagcccaggcacaaagaagacagagacaaaagggaagggacgaagaccccgggcaacgccgaaacagagaagacacgacgccaccggcgccagacagccgggagacagacagggccaaaaggagaaaaaggaacggaaagcacaccaacccgaaacaacccccaaagggaggagcccaagacaagccagaagacaaaaaaacaaacaagaggagaccaaaccgaagcaagaaagacaacaacccagcagaagcaagcacaaagccaaggaggagcaacccaaggcagggaggacaggaaacaaaagggaagacaacaaggaaacaacaaaaaaggaaggaaacgacagcacaacaagagaaccgaggacaaggaggaaaaaaccagcacacacagaaaaccagacaccacagaggaccaaagcagccaacgaagaaacaaaagagcagacaagaaacaaaaagagagggacgcacaggcgggaggaggaggggagagaaggaagggcaagagcagacaagaaaaacacacggagagggcaaacaagaaagacgaacagaaaacaacacgaaaaagaagaagaaagagaaaacacaacaaaaaaaggagacagaggaaaggaggcaagccccccgaagaaaaaaaagaaaggacacgaacaaccccaaagagaaacagaccagggcaaaggaaaggaagcagaacaggcggcaaaagcagcccggcagggagaaggacacccgcggggaagcaccaaacccgggccccgcgcacgcccgccaaccaccgcacacgcaaaaagaaaaaaaaaacccacacagcggaggcaggagacaacccagaacaggaaaaagcggcagaaaaacaggcccccccggaaagaacacggggagggaggaggagaaagaacgccaaaccgcacgaacacacaacccacacacaacaaaacaacaacaccaaaaaaccccaaacaaaaaacaaaaacaccaggaacaaaacccaaagcacccaaacgcaccaaacccagaccaaaaaaaaccgggaggagacaaaagcaaaaagagacgaaaaaccgaacaaacagcaaaaaacaaaaagaacgaacagaacagggagcccgggaaaacggaacacgagcgagaaacagccagccagcccaaaaaccaaaaaagccacgagccacagacacaggacagaacacccccccccacaagccgggggcacgccaagacgccagggaacgcagcaaccaaggagaagcgcagcaccaagcgacaaaccaggaagcacggaggggccgcagaccagaagcaaaggaagcagaaagggaagcggacgggaggaaagaaaacgccacacaacagcaccccaaaccagcaaacacagccaggagaaacgaagcgcaagcaagcgcacgaccaccccggagggacccgcccccccggaccgagccgaagggcaaccgacagcgggaaacgaagcacggagggccccaaaccagcacaggcaagagcaagaggcgcccacccaaacggaacaaagcaacaacagaggaccgcaaacaacacgaaagggcgaaagagaaagcccagcaacaaagaaaaacaggggccgaaagagacacaaccaaagagggcgaaaagccagaaacaacacaagcgagcacacggcagcaaaaccaaaaacacaaaccaaccaggaacaaaacaaaccgcagaccaaccaaaaacgagaacaccagacgcaaacgcaccaagcccacaaaaggacacaaaaaaaggcagcacacgaaagcaggaagacagaaacacaaggaaaaaaaaacgaaaaaaaggcgaagaggacccaacagcggcagaaagcaaagcacagggacgaggaagagcaccaacagagaaaaaggaaggcagacgcagacaaaaagcaccacaaaccacaggagagccccaggaggagaaggaagcaaaaggaagggaaaaaccagaaagaacaggaacaaaaaaaaaacgcaccacaaaaaagcaacaaaaaggcaaaaaagcagggaaagcacacgcaccaccccaccacccagaggggcagagcagacaccaacccacccagaaccccgcagaagggaacaacccgagaccaccccagaggccagcgcaaccgcggcaggcccacgacaccaaggacacgacacaaaaacgcaaagaagaagagcaaaaaagggaagggaggacgaaagacggcgacaaaagacacaaccagcagacgaaaacacacggaaaaacaaacaggcccgggccagggaaaggccaggaccccaggaaccaaaacacagagccaagcccgaagaaaagggggacacgaaaaccacacacacccccagccaaagcacagaaacaaaacaaaaagaaagcagaaaaccgaaaaaaaaccaacaaagaccaagggggaagggaagaaacgaccaagagagggcaacagacaaaaagccggaaaaaaagcagcaaaaacgcacaaaaaacaggaaggggccaaaccacggacaaagcaaaaccaaggaagggacaaaaaaaaaaaagagagagagagagaggaaggccagcagggggccagagcaaagcaaagaaagcaaaacaaagagaagcaagcaagccggaggaaaacaaaggagcgcagccaagcaagcaaacggccaaagagaaacgggccagaaggagaaaacagacacaaagacgcgggagaaaaaggacaaacaagccaggcaaggagaccaaaaacaaggcaaacccaaacagaggcgagaacaccacagaaaccaccaggcagaacgacagcacaaagccccagccgggaagagcaaagggaaaagcaaagcagcaggggggccagaaagcacgagcagaacacagcagcgaaaaagaaggaggacggaaaaagagcccaagcaagacgaagcaaacaaacaaaacaccaaggcagaaagagcacgagcacacacaaaaaagaaagacagacaagacgcagaaggaagcaaaaaacgaaagaaaacacaagaaaggggcggaacccggagaggggaggcgagggcggagaaaagaaggagagagacaaccaaaaaaaagaagagaagggaaccacaaagagaaaaccaaaaggaacaacaggggcaagagcacaggggcaaccacccccacagccaaaacacacccaccaaaaaaaccccaccaaaggcacccagcccccccccagccggccacacccacacgcgaggaacgcggaaaaaaaaaaaaccaaaaggaccagacggcacagcagcgagacaaaagagaaaaggaacagagagacaaggcaaaaacaaaaaaaaaagaaaacagcgaacaccacaggagcaaaaaaaggaaacccagccacagaagggacacaaacaggacagaaggagagaaaaaaccccccaagcaacagccaaccccagcgagccccacaccaaacaaacacacgcgggagaaggggcagaggagaaaggccgaggacgccaaacgcagaagcagagcaagcacgaaggaaccagagcggaaacgcaaagccaaaggccccaccccggaccaaagccacggccacaccgcagaacaagagacagaaaaacagcacaaaagacccaccagcaaaccaggagggcccagagaaaggaacgcaagaaaggacggggaagccagaacaacgaaaaaaagaacgaaagccacaagcgcaaaggggagcagaaaaccaagcaacaggccaaaacagaacaggaggggaaagcaaccaggcgaccgacaaaggaaggccaacaaggacaggaccagcacaaaggaagccggacaaggagcacaacccacaagagcacaggaagaacagccggagaaccaaccagccacgccggaacggagcaggaagacaccgggaaaacccagaggagcaaaccaggaaggcggccccgccagccaagaggacgaggcgggaaggcagggaggagcaggcagaaaggaggacggaccaaagcaaggaggacagagaaggacaaaagcgcacccagcccacacagagacccgacaggcaacagacagcaccacaaggacccagggacgacaggaggcaacagcgagccacgacagaacaggggaacaagacaaagagcgaggaaaacgcaaggaaaaagggaagcagggcaacaaaaccaggaggaggcgggagcagcagcagcagagagaccgaagggggcgcggcgggaaaggcagagaagacagcaggagaaaaacgagaggaaagggcgggacgaggaaggaaagagagggagaaacaaccacaaggcaggcccaagacaaagcagaaagaacacgggaaagagcaagcgaaccgggcccccccaagcggacacccagagggacccagaaagggcaaaaaaagcccccagggacacaggaggaagagggggggggaaagaggagcgccgcaccgaggcggaggcaagggcaaccggccacacaaccccgccccaggcaagagacccgcccagcccccgagagcggggaacaggcagcgccaccagcccgcaagaagagagaggggcccaggacaggcggccgaaccccgaccagggaccacccacccgccccaaagagcgggaacaggcggagccaggagccggcccaagagggcagaaggcaggcgagacccccacccccccaaaaacagcacgaaagaaagaaccaacagacagcgcacacaagaaccccaacacccaaaggggaacacacagggaggaacgaggcaaagaggccagaggaggaagagccgaacacaagcggcgagagccacggcagcacaaaggaaggcaaagcaccgaccccaacacagaacaaggggcaggacgagccccacaccaggagacagaaaacaagcaagccacaaagaagcccagaccacacagcagaaaacaaagaccccagagggggaaaaaagaccagagagacagacaggagacagaacacaagagagaaaaaaaaagacaaaagaagaaagaaaagaaccaaggcaaggagaacgaaccccaaagcaagggaaaaaccacacagaaagacaacaaagaagagcagccgcgaaagcagcgaccaaaggaccaaaacaagacgaggccaaggcgggccgaccgaggcaggagcgagaccagccggccaacagggaaaccccgcacaaaaaaaacaaaaaacccgggcaggggggggacgaacccagcaccaggagcgaggcaagagaagcgaacccgggagggagagggaggagcaagaggcacgcacccagccgggcaacagagaagaccgccaaaaaaaaaaaaaaaaggaacaaaagaaaaaaacacacgcaagaacagagcaagaaccaagaagcccaagcaaacccggccgaaaaacagagaaaacgaaagcaaccacccagaaagaccaaccaacaccgaaggcacaggccaacaccaggcaagacacaaagagagccggaagaacaggcaaaaccgaaacgcccacccggcagcacacagaaacacgaaccccaaagcaaagaacccaggccaacccccccccagagacccgaaaaccaggaacccaaaaccaggaggcagcaaaaaaagggcaaaaaaaaaaaaacaaccacccaagaagacaaaagcaaacccaggccgccaccgggacagaagaaaaccgcccccaaaaaagggggcaaggcgcccgagggaaggggggacagagcgcacggcagagcgcagcaaggagaaagaagggggaaggccaccgcacacacagcccaccaacaaggccagcagggcaggcagggcccgcagaacagcacgcccggaaacggggccaaaggcccagcagcaacgaggccaaggaagcccagaggcgacggggcaaaacccccacggcagcccaaacagagcagaaagggggagcgaaagcgccggggaagcaccaagccagggaaccgcgggaaaggcagccgggccagagccgaaaaccaaagccaacccacccacacaggagagagagagagagaggcgaaacgccgaaccccaagaacaccccgaaacacgagagaggacaaagcaaccacccgccggaacacagacaggagaaccgcaggaccaccccaagagacagaggcgagagccgaaaaaccagcgcccaaagacaaaagcaacaacccgacaaaaggacaacccagcagaccccagcgaacacaaagggaacaggcaaggaggaagagcccgccaggagaagagagaaaaggggaaacagagagcaaagagagaggggcacccccaagagggaagccaaaaaagagagcaccccagccaacccaggagacaaaagccagacagccgggaccggaaggccggaccacacagccgccaaaagggacggggcaagcgccaaagcccagcacgacgccagagaaaggagaacacggggccaggcgcacaaaggccaaggaaggagaaaggcaggcgagacgacaacaaaaagaaggagcacagcaagaaaggaggccaaagcaggcaggaagccggcacccggcaaaggaagccaagcgggcacccggggagccagggcacgccccgggaaagcccaagggaggcaaggaagccaggccggaggcacgagagggaccgccgaagggcaaaggcgagaaaaccaagaaagccgacgacggaggcggacccaacggccaagagccacggcaaaaagaagggcggcacaacggagacccgaaagaccacagaaaagcggggcggagcaccaaacaggccgcaacccagccaggcagagcgcccgaaaacaccagcgaagacaccccccccccacgaacacaagcacccccagcacccaccagaagacaacccagcacaagaggaaagggggccaaagaaaaccacaaaccggcgcaagcaacaacaagcacacaccacagccagcagacagacccacagaaagaggggacccgccccccccccccccccccccccccccccccccccccccccccaacccccccccccccccccccccccccccccgccacacacacacaaacggcagcaacacgagcaacggagggcacaaggaacacagcaagggaagcagaaacaccgagaaaaacaaggaaaacagcccaaaaaggcaggaaaacaaaagcaagcaagccacaccggcagaggaaaacaggagaggaaaggacagacgaaggcaggaagacccggagaagcaaaagggaaacggagacgggacaaaagaagaagggaagaaaacaagcagggaaagcacgagaaaggaaaccgcaggacgcagcagacgcagagagagggaagcccaggggacagagaggcagagaggcgccaggggccagcagacaggcccgcaagaaggaagccagcacacacggaagaccgaagcacaagcgaccggagggaaagaagggagcagggcaggggaggaggaaacaaggccaagaggcgagccgacgggcagagacaagggaaacaaggacggggagaagaggacagaaaaaagcaaaaaaggggaagcaggccgggacggagcagaggaagagggcaggaagagcaaaaggacgcaagacggcgggcaacgggcagaggaggaggccccagacacaagagaggaacaaaaaaggaaagagcaccccaggcccaacgaccgaaggacaggaaaggaaccacagcaaacaagcaagagcagaggaccggcgggagcgggaggaagccagggaggggacacgaagcaaggggccgaggcgaggacagccgccaacacagggggaaggagaagagggaagaaagagacacaaagaaaacagaaggaacaggaaagcagacccaggaaagcggaaagaggggccggaagcaaagggggaagagaaaaagaccagaaaaaaaaagagaccaaggaggggagagggggggacagagaagcaggggaggagagggcacgaacccgggcagaacacgcacccggagcacccggaccccccaccccgccccaagccccaaagccagacacagccggcccaagcagccccacaacaggaccacggaaaaagccaaccaccaggcacgcaaaaccaaacacccaggcgagagaccgacaccagaggcgagaggggagcgagcaaagaagcaacagccaaggaacccacacgccaagggcgacagacacccaccagcaggagaaggcccgacaccacaccacgcaacacggagaaggccacgcaggaaaagagcacgcaggggagcacccgacaaggaggagcaacacaggggccagaaccgagaagcacagcagcccacgagagggggcgaggagggagacggaaagccgcagagaagaggaagacccaccgggggcaaacgcgaggcaaaagccagaaaagcccagcaacgagagcgggcggcagaaaccagccaagccaagacagaagggcccacgaaccagaaaagcaggcagaaagccacgacgaggacagaagggagagagaggaccaccacacagggcagccaaacccagcaccgggaaaagaggccccccacagggcgcaaagaggggcaaaaagagacgcaccacccgagacagaacgccgcaccaggcggaggcaggggcaaccggccacgcaaccccaccccgggcaaggacccaccaacccccaagggcggaaacaggcgaggccacaagccggcaagaagagacacaggcaccggggccaggcggcggaacccggacccagggacgcgccggcccccacaggcgggaaaggcagagccaggccggcccaggcccacgccaggcaggccaaaccagaccagcgggacaggccgaagaagaaaacaggagggagccccagagcgcagcgcggcaggggccgcccaagaaagaagcaacgaagaagaggggagaggggaacagaagcagaacggcagaggacacacaaagacacccagagcagggaggccagggcacagaccagcagggagccgagaggccaaccggaggaaccaagaaagcagcagaaaaggggcgagcgagacccgcgggcagggcagagaggagagcacgaggacaaaccggaccagaaacgcgacgcagcaggagcggaggagagggcgagaaaacgaccacagcaaaaagaagcacccacgaggagcgcacccgcgaaaccggcaggacccagacaggaagaggaggggagaggggcaccgcgccagcccagaaggaagccaacgcccacagaagggcggagaccagaggcaacagaggagcccaagcgagcgagagaacaaaagggagcggagcgaagccgcacagagagacaagaacgcaggagacacaagacgcaagaagccacccgcacccggaagaaacccacgacaggggaacagaagcaagaggcagcagagaaggaagcacagcacaggaaagagcgcagcggagccccggggaaggggagcggccaggaagaaagggagcgcccccggcgggaaaggcaaaggaggaccaaccgaagcgcagaacgcggaccccggccggaccgggaaaaaaccacaacggcgaggcgaggacaacccgaaagcaggagggcgaccaggaaaccaccccaggcaagaacgcaaaagggcgcaagagccgaagacggacggggcagaaaaccccacacagcggaggacccccggagcgcaaggcacaaaaccaaagaaccagggcaacgaggcagccagagcgccgacggaccaccgcggggaggggcgccagccgaggggaccagaggcagggcccagccgagcaggcaagggccagaaccccagcaccgccgcgacccagagggaagggacaccagcgcagcaaaacaaccacgacaaacccaggacacaggagcaggaaaccagagcagggaaggccggaggaccagggggagaggagcccgacccaggcagagcgcaaggcacaagcagccacgcaacccacccccgggcaagcgacccgcccagccccgagagcgggaacaggcaggccaccacaccggcaagaagagagacgggcaccaggccaggcggccaaacccgacccagggaccacccaccggcccccaaaggcgggaaaggcggagccaccacacccggccaaccagaccagggcgagagaggcgaaaacaacaaaaagaggccagggccagaggcacggagaaagccaagcacggaaagaaggacaggggaggaggaagcgaagacgaagccagccaagggagaaaccagcggaccgcgagacgaggcgcagggagagaagcccccacaaggacgcaccagaggccaagaagaaaagaaggcccaggagggcaaagaggacgaaccgggacaaggccacaaaaaagcccgccacgcggcgagacagagccacgcacccaggcagaggcaggggcaaccagccacgaaccccacccccaggcaaggaccgcccagacgcaagagcaggacaaggcacggccaagagccggccaaggagagagacagggcaccaggacaggcggccgaacccgaccagggacacccgccggcccccaacgcgcgggaacaggcggagacaccagcccggcccacgcggcaaaggggacaagaaagcaccccgcgcagggccagcaagaagcccccaccccaagaggagccaggaagggccgaaggcagcaggacgggggaacacccacagcgacaagggagcaagaccaacacaggagagagaggaggaccacgcaggcaggccgaaccgcggcaaagacgaacaccggagagagccaaagaggcgaaggcacaagcaagaagagcccagcagcaagggggcgcaaggcgaagccagcaggcgaaaaagacgacccaacagagcagcacggaacaaaacggcgaaaaggaggaggcgaagaaggaacccaaccccagagaggacggagaaacacgaacgaaggccaaggacgggcagcacagccaagacccgcaacagaaaccgagaagggccagggagacgcaagaaccgacagcggcccaggaagcaggcagcaaggccagggaacaaaacccaaaagccaagcggaccccccaggaacaccaaacaggggccaaacaaaccagaccggaggcgcaacaccgcgggagggaaagacgcgagccgagccccacgcaacaccgagacccagagagcacaaaaaggcccaagccgaaggagcccagcacaccgaaacccccaccgacgggaccgcagggcgccccaggcccccgaagcaaaacaaccccgaaccaggaaacagggaaccggggaccagcgcgaacagggaggggagagaaagagcgccaaaccagagggcggccccaaggaggccacagagggaaggcagggcgaagcggcaggcggcccacaggggccgagagacccccccccggaggggcccgagagccaagcgagagagaccccgggcagccacccagcaagcaccaggcccaggcggacggggggcgcacagagccggaggaaccacagggcccagcgggaaccagcaccaccagggaggggcaggggggaaaggaccggagggcaggggacagcccgggaggggccccgccaggaggggcgcccagagagcacagcggcagaggggaggaacgggggggcagggccaagaaccaagaagaagcccgccagcaccagggcgggagggaagagccaggggggcagggaagggcgaacagaccccgggcaggcgcggggcgggggaaggggggaggcccaggcagggagggaccaggaggaaggcgcccacgaaaacacagggcagggaaggggggaaagccggcagcacaggcccacccagccccagcaaccaaagggcgaccaccccacggcccccaccaacagcacagagcgccaggcaggggcaacagggcgagacgcccagacacccacccccagcgcaaaagagaagggcagcccccaacgggagcgcaggcaggacacacccccccaccaggcggccaggaggcccccagggcaaacgacaaagcagcggagaccccccggggcccccacgcggcgcccccgaaggacccggaggccaggcaggaaggcgccggggacccagcaggccccagggcccccgcgccccgcccgacaccaacccaaaggaccagcccaggaaggggagccccgcaaacaaacccaccccaggggggggcgggcggggcagggggggaggaacccccccaccgcaggagcaccaagagggggccccgggccgcaggagcagcaccccagagggcggggcccgggaccgacgaccgcagccgaagcaaaacagagcgagccccgcagcgccgcccagggaagagaaaagaggcagaagagccagccagcacacggaagccaaggaaaaccacgccaaacgcagagccccgcagagaggaaaaaaaacccccagaaaagccaagaaaacaacaccccccccccaaaaacaaaaacaaaccagaaaaagggagcccgaaaaaacaccagaaaaagaaaggcaagagaaacaccagaaaaaggagaacagcggacaggcaagacacacgagcacacccaacaaaaaaaacaaaaacagaaaaccaaaaagaaggacaaaagacacgacaagaacccgcagcacgacagaaaaggaagaaacaaccaaacgccaagaaagggaacggacaaagacacgcacaagcaacggccacggcccagcgcacggaacaccacagcggaaagccgcaagaacaaaagaaaaagcaagaaggaaaagaaaagaaccacagagaaaaaaaaaaacagcagggcaaacaagacgccggaaggaaaacaacaaaagaacaggccacagaagggaacggagcggggacaggggggaagacgacaccaaccaaccgaaccccaagcaagaaacgccaaaaagaggcaaaaagaaagaggagggcagcagaggcgggcaggaggagaaacagaacacagaaaaccacagggggccgaaccggacaagacaaaaggaacgagggcccccacaacagaccagagggggaggagaacccaaggaccacagcaacagaagggagacaaggggcggaaaacaaccagagcgggcccacaccgaacccagcagggagaccgaggcaggcagacacgaggcaggaggagagaagccggccaacagggaaaccccaccacaaaaaacaaaaaagcgggcaagggcacagccgagcccaacgccaggaggcgaggcaggagaagcgaacccaaagggggagggcggaagccaagacacaccagccccaggggcaaaaaggaggagaccgccaaaaaaaaaaaaaaaaaaaaagaaaaagaaaaaaaacaacaacagaaccaaggaacagaacgagaaaaggggaagagacaagcagacagaaagaaacagagacacgggaagcaaggccacaggccagagccaaccgcgaagagaaaggaaacagaaaaaagccaaggccacacagaaaagggagacagaaacggaacagcaaaacaccaccacaaagagccacagaaaaaaacaacaaaaagccccaaaagagccacgagaaaagcccacgggcaaggagcgccagccaagaacgggagaaggaagagagcacaacacacaccggagagcaccaccccaaagacaaacaccgagagcacagacaaaggaagaagggaagggacgaaaagcaaaacacagaagaagaaaaaagaagccaagaacaaccagcaacaaaaccgaaaaaacaaggcgccacaagagacaaaccaggcacgggggagacagacggacccaacccgacaagcaaggaccagccccagccacaccccacacgaacagcacaagccagcagggaggcaaacaccgaggaagccacacgcccaccccccagcacccagcaaccaaggagggaggaaaggcaccccacagaaagaaaaaccacaaaacagggaacaaaaaagagccaaaagccaaggcaacaaagcaacaacaacaacaacaacaaaaaccccacaaaaacaaagcggaggcacgaacccaaccaaacaacaaagccacagaaccaaaacagcaggcggacaaaccagacagagaccaaggaacagaaagagcaccagaaaaaagccacacagacgacaaagcaacaaaaaaaacaaggggaaaaaaccccacaaaaagagcgggaagcagcagcaagcagaagaagaaagggaaccacaaacaaacaaaaaaacagaagacaaaaaaaaaaggcgggcaggggcacgccgaacccagcacgggaggcgaggcgggggacaccgaggcaggagcaagaccaaccggccaacaaggaaaacccgccacaaaaaaaaaaaaaaaaaaaaaaaaaaggacaaagaaggcccaaacaaagacccacaggaaaaccaggaaacccacggacggggaagaaggacaagccaaaagcaagcaacaaaaacaaaagacaagaggaccaaaaacgaagagcgcagagcaaaagaaacacaacagagaaacaaccacagaagggagaaaaaagcaaacagcacacaacaaaggcaaacagaacaaagaaacaaacaagaaaagcaaaaaccacacaacccaacaaagagcaaaagaaagaaagacaccaaaagaaggcaaaagcagcaaaaacaaaaaaaagacaacacacaacacagagaaagcaacaaaaccacaggagaaccaccacaccagcagaaggcaaaaaaagcaaaaaagacggcgaagaggcgggagaaaagggaacacacacacggggggaagaaaagcagccacgggaaagccaggagaccaaaaaaaaaggaacaccagacccagcagcaacggaaagcccaaagaaaaaaacacaccaaaaagacacagcaccacggacacagcacacacaaagcgaagaggaaacaacccagggcccacaacagggaggaaaagaaaagaggaaaaacaccaggaaacaacagccaaaaaagaaaaacgccacagcaacaggagcagcggagaccaaccaagcaaaaagcaggaacagaaaacaaaacacagccacccaagaggagcaacagggaccaggacaaaagaggcaaaaagacacggggcagagagggggagggaaggggaaaaggggaaaaacaacgcgaggaaaccacagggggacaggacacaaccaaacccagcacagcaaaaccagaaaaaccacacagaaccccaacaaaacaaaaggaaaagagacagaggccagcccaggcggaggcaaggcggaccggccacaggaccggcccccaagcaagcgaccgcccagccccgagagcgggaacaggcagcgccaccacgccaggcaagagacggagcgccgcacccaggcggaggcagggcgcaaccggccacgcaagcccgcccccgggcacaccaccccccagcccgagagcgggaccacaggggcccaccaccacgcgcggcaagaagagagacggggcacagagccaggaggcggcccgacccagacgccgcggggcccccaaaggcgggaacaggggagccacgcacccagccaagaagagacacgggacccagggcagacggccgaaaccaacccaggcgaccacccaccggcccccaaagggggaacaggcggagccaccgcacccggccaaaggaaaaaaaagaagcggccaaaccacggggaggaagaagggagcacacaacagcacggaaaagggccaaccaaggaaggacgcgaaaagcgaagccgaacgggaaaacacaaacgcaccaaaaaccagaacagagagacagaagggggagaaggcccccaggacacccaccacgagacacccagacagcagggacaccagacacacaaaaaaagaaccaagcgggaacaggcaggacagcagggacacaggaaacgagcaagggggcgcaccacaaccaaccaggaaagcccgcggcaagcaacgagcccccccccacccccccacaggccccaggggggcccccccagccgggccagcagccccacaaaggagaacagggaggcgcaggagagcgaggaaaggccccagcccaccagcccgcaaaggacagaccgccaggcacaggaccagcgaagaccaacaccagcacagagggcaggggaccagcgcaggaaaggcggcgagaacaacaccgcgcacaaaaggaggaaccgggaaacccaaaaggagcggacaaaggacggcaaggccaagggcgaacaaacacccaccaacaggaaagcgccgcccacagcccaccagcacggcgacaaaagccacgacggcagagaggaccaggcgagaccaagacaggaggagccaagcaaggggccacaaaagccgagaaggcgccaaccgcccacaagaggcgaaacaagccgagacggaaagaccccgaaagaagaacacaaacccccacgagggcgcaccgagaagccggcggagaagccagaacacccagcaggcggcaagcgacagcagaaacgcccagccagccccaaggagccagaccaccaaggcaaaagggaggccacaggcgaccggcagggaaagaaaaccagaaagggcagaagcacaaaaaaagcacaggacaaaaacaaaaaggaggcgaaagcaaacgacgggcacgccacggcaccaaacaggcgccccaggcacgagcaaaaaggacacagcaagacccagggacacaacacacgggagagccaaaggagccaaagggagaaagacccagaaaaggggcaagcgagaggcagggagaggagagccaagcaaaacgccggaaaggcaggcaaaaggacagcaggaaggcgaggagaaaaggggcaagagagcgcaaaagaacaaacaaaggggaggggagggacccaggaggccggcgcaaccagcccgacccgcgccaccccagcccccccgacaagccagccgaggccaagaaaagagaaacaaccaacaaaaaagaccacagaaaaagcaggagcaaagggggagacgcccggagagaggagggcagaaagagaaacaagagaaaaaccccagaaagcgaacaaccggagacgccaaggcaccacgagaggcacaggagggagacagccggagaagagaggccagccccgccgccaccccagggcgcagagggggaagcaggggacgacagacaggccccaagccaaggaagcgaaggcgaagaagaaggaagggaacagaaggaaagaggagacggggagagacagagggacacacacacacacacacaaaggggaggcaagacgcgagccacacagaccagagggaagaaaaggagacacagaagaggccggggagaggggaggccccaagcaggccacaaaggcgagagagcaggaaagcaaagacggccgggaggggaggggggcaaacggacggggcagcgaagcgggagaaccaaaagagagacacccaggccaccagcgccagaaggggcaagaggggaagggggaagacggggagaaagggcaaacacaaaaaggagcagaccaacaaagagacgaaacgccgagagaacaaggaccgacaagggcaacgcacaagaacaagacacaaacacggcggcaggaaagcgagcaacgaaaaggggaggaagagagaacaaaggggcaaagcaaaagggggaaagacagaaaacaacaagggaacgcaagccaaggagaaaaaacacggggcccaaaaaccacgaggagaaggcaaaggagagggccaaaacccggacaggcagaacccagaaaaggaggaggagaaggaggggagggggaggaggggggagagagagagagacggaggagagggcaccaacaggggcggcccaggaaacagccaccacaaagaccccccagaaaggcacaaggagcccaaaaccccaaccaccccccccgacgccaaccccccagggccaaccaaccagaagcagagggcaaggcgccggcgaagcaggaaagcacccaggaacagagaggccgagagggagcaggggcaggagaagaccagaggaagccacgggacccggcgaaggaggaagccgagcacccaagacaagggaaagaacgccccgcccacccgggaaggaaaggcagcaaaacaacaaaagcgaaaagggggcaacacaggagggaagggaagaaagaaaagggcccccgccaaaaaagagaagcagagaaaagaagagccaggacaggacagcaagaaagaaggaaggcaccaaagccgggcaaggaaggcaaggcaccacaagcacgcaaaaccacagaaaacccccagagaaaggacgaacaagagacgcagggacgcacgagagaccacgcaccgcgacaaagaaccaccaagcaaaaaggaaaacacccacgggccacacacccagcaaaaaaagaagggagcgacacacagcacaggagacgaggcagcgagccaaaagcagggggccgccaccacccccaggagcaaaaaacgccagcacacagaaacaacacagcagccgaaaaccacaaaagcagcacaagacaggcccacagcaagaagcacagaaaagggcagggacgccaacccaacgaacccaaagagagaagcaaaacaaagcaaaggaggaagcaacaagcaaaaaaaggcacacaaaaggaaagagaaaggaaaacagaaaaaaccacgaggccaaaaacacaacgacacaagaaaacagaaagaaaaaaaagccaggcaccggaacagacacagagcaaggacgagcgaacaagccaggaaacccgggaaaaaaaaaaagaaaggaaaaaacgagacaggcagagcccaagggacagcaaggccccaaacagaagccaggcgacagcacagcagggagcacaacgggcaaaaaggaaaaaaaaagacagggagaggcgggaacagaaagaaagccaagggggcccggagccaggagccaccgcaagcagggaaagcagaacgaccccaagcaggaagacgagacacgggcagggaaccccccaagggcaagcagccaacaaagaaaccccagggcgagaagaccgaaggcagccagaagaaaaaaacacgagcaagccgcagaggcagccacgaacgggacacaaaaggccgacaacaaggaccaaaagccaagaaaacgaacaccgagagaaaaacgcacacacacacccaaaacaacagcgggaaacaaagaaaacaacagggggcgccagcgacagcccgagacagaacaggaaaaacgaacaccaagcagcccagacgccagaaaaggagagggaaaggaggaaagcagaaaggggcccaagccaaggaaagcaccccaccacaaaaacacaaaaaaaacaagcagaaagcaaggaaacacaaaaacaaagacacgagccacaaacacgaaaggaagaaaaacccaaggaacaaaaaaaaagccccccccccgccacacacacacacacacacacacacacacacacagcccaaagcaggggaaagagcaagggaagaagcaagcgaaagagagaccagggcccacgcaggagggccgggaacaaaggcccaaaaaaaaacccccaaggcagagacaaacaagcaagaaaccgcaaaacgggagacaaggagaacagcaggccaggaaaagagcgaacgcacgagcccaagaggcgaaccccacccacgaccacagaaaacccgaagaaggaacgacaagaggacaaagcagaaaagggagagaaacggcacacgcacgacaaggaggaaaaaccaaaagacgaaagaacaggaaaaagcgggaacagagaacccaaaagacaggacaagcagagcacaaagccccagggaaaagaaacagagaaaaggaagggaagaaccaggaaagaggaggggcaacaggaacggccaaacgaaagagaagagaggaaagaaaaaggaaagaccaaaaaaacgcgcaaaaccaagaaaaagaaaaagcggaaaaaaccgaggcagccgaaccacagagaccgaaaagccacgcaccgcggggaccggaagcagaaagagggcaagggcgcacccccggaagacagcaaacaacaccaaaagcacaaacgaagccacacacgggcccacaacaagggaaccaagcagaaaaaaaggaagcaacaggcaaaccaccagaaccggccacaacagagcagagaaagagaaaaaccaaagagaagagccaggaagcagacaaaagcaaaagaaagaaccaaccgagagaagacacagagacaagcacaaggccgggaagaggaagcgaacgaccaaaaacaagaacaaagcgcaaagcccagggccgcacgccaggagcgcgaagaacaggccccgagaaaaaacgggaagggaaacagagaggcgggagcaaaaaagaaaaccagaacagaacaggaaacggcggcaaagggaggaagcaaacgaagagaacaaaggaggcggggaaaggcacagagagaggagcaagcaaagacgaagaggaccggggagcgagagaagcggaaggagaagagcaaaggggaaacgcgggggaggcaagagccaaccccaagcagcgcgcgaaggcaagcgcggcaaaaaaaaaagaaagacacagcgcaagccaacaaaaaagcaggggggaggccaacaggccaaggcgaccgagcacagaggaaaggaaccaagagcgggcagggcagaggagggaaaagacaaaggccagagcaaggcaaaccagcgaaggcaggaaggacaaaaaaggcaagggaggcggaaggcggaagacaccagacaccaggcaagacaagggcaaagaagaagaggcaggagaagcagggacagcagggaccaggcacaaaaaagcgaagggaaccaaaggaaagaaaaagaaaggaagcacaggaagacaggagacgaaggggacaaaggaggagaaagaacgggaaaaaaaagagggcgagcaggagacccagcgaaagcagaaaagaaggggaaagcagaaaccacagaacgagcaggccagaagcaccacaaaagacccggaaaaaaagacgggagaaaacagaggaaccaacaagaccaagacgcaagaccagaaaacaaaccaacagaaacccaaggaaggacagcagcccaaagaaagaaaacgaggcacaaggaagaagaacgcccaaggaaaaaggggacgagaagaagcgggaaacagcaaagacccgaaaagcagcgaggaagagaacacccggggcagcaagagcagaaaagagagaggccggaacacaccagagggacagcaacaccagggaagaaagaggaaggacaaccccgaagacgaacagcaggagaacaggaggcacagaggcagggccacaggaggaggagagggaagggggagggccaagaggagcaacgcgcaagcagggaggaagagagggaagccggagagcaacagcagggaagccggcaaaaggagcgaaggggagggagaggcacacaagaagaaggaagaagccaggaagggcgcaggggggagaaacagaagaacaggggggcagaggaaacaggccgagaaaccaagccaggaaacaagcagagaggaacagagggggaccgaaaaacagagagcagacaccggaaaacagggcagcaccacgggagggacgaagcgcaaaggaggggcgagcagagagcaagaggacaacaacggacagggagagagccccaaacagagggagagaagaaagcgaaccaaggcaaagccaggaaaaggggaagaaagagagagagcaaaaaggagaggagaaagagggaagacagcccccaagcaaggacacaccaaaaggaagaccaaggcagaggggcggcgaggagaagagaacagccccggcccgcagcaggaaaggggagaaagagcagcgagagggcagcaaccgggggagccagggccaaggcaaggggccagaggagcacaggacaacccgaggacaaaaaacgcacaggagcaagagccacagagcagaagggaaagggaaagaagaggaaaaaggaagcgacaggagaaaggaaggggaaacaagaggagcggacgggagcgacaaggaaaagagaaaaaaagaggcaaaggcgcaaaaaaaaaagacagccgagaaagcggagcagaagagaggaccaccagcccagggagcagccgaccggggacacaccaaggagaccagcggcgggagaagaagcggcgggagggggacaaggcggccaggcaaagacgccaggaggcgggaaagccgcaaggcgcagcaacagggcccaaggccagaacagggcacaacggcaaggaggcaaaaacaaaggacgcacccaaagcacccaacaggacggagacagaggcgagaaacagcacaccgcaaggaagacggagaaaggccacaggccagccaacgcaccccgccgccaaagaaacaagcgcaaccgcacaccagccagggggaaaaagggaggcaagcagccgcagagaaagccagccggcaaccagccagaaaccccagaagacccgaaagacccaccccccagccccgacacaggacgacccggcagggcccaaagccggaaacacaaagggagcccaggcacccaagcccagacccgggggcccccaaaggcacacaaacacgcacccacacaggaggcaacacaagcaaagccccagaaaaccacaggacagaaagaaagccaaaaaagagaccacaaggcaaaacccagacggcacaaacaaagcaaaaacgacgggaaaaaccaagacgacacaagcaaccccgcacacccagccaaaagggcaccaggagaacagggggaaagggaaaaagacaccaagaaaacacaaaaacagacacacaaacagaaagggcaagcagcagccaacaacaagggcagaaacagacaaaaaacaaggacagggagcgggcggaaaaacgcgcccacgaaggccgaaaacgaagcgaaacaaagcagcaggcggacaaagaacacggaagcaacaaaaggagggaacggaaagagaaaaaccacaaaagagaaacaaaagaggccagcagaggagaaacacaaacacggggggggcaggcccaaccacaagcacccaccaaacacaccagaccaagcaaaaaaaaaagcaaaaaagcaaaaaaaaaaaagcaaaaaaaaaaacacaaaccaggccagcgaacaaaaagaggcgcccaaagcgagggcccaagcagaacggaggcccggaaggcacgcaggaggagaacacaagaagaaaagcacaggaagcaaagggaaccaggaaccaaccccaccaaaacagacaaaaacccacaaaccaggagcaaaggacaagaaagaaaccgaaacagcagagagaacagaacaccggcaagcggggagaaagcacagaaccagccaacgaaaaaaggacagcaacaacccacggaggagaacaagagcaaaaaagcaaagagccaaggcaaagcagacacaaaggggcacacaaagaccggaagggaagcagccaggcaaagcaaggcaggaacacagggcacaccggcccagaagaacgcagaccaccagacacacgagaaacaagagccgaccaggacgggcaaagaacaccaacacaacgaagagaaaaaaaaagaagcaccaagaaaggaggaagaaaacaaaaagaaaaaacaagaagagaccaaaaagaaaaaacggacaggaaaacaagccaagaaaaacacaaacaaaagagcgcccacaacaaaaagaacagaagcgcgaaaagaaaagacggggacgggacaagaacaaaggcaaaacgcacaaagagagaaaaacgaaaaggagagaaaacaccaaaacaagaaagaaaacaagaacaccaacaacccaccaccagaggaagaggacaaacggagcggcacaagagagaaagagaaccacggagacggaacaccgagagccgccacgaaggacaacacacaggaaaagaaaaccagacaggaagcggaccccccaccacccccacccagccgagggccgagagccgagagaagcagcccgacccgaccgacaccagaccacccacccaggaaggggacaaggggccaacaggcgagggccaaggaggggagaaagagaggcacacaacgagccagaaaaacaaacccaccccgccagggagagacagggggcgaaagccacgagccccacagccggcgggaagaccaaggccccggcacacacacacagcaagcacaggacgaacaagaaagacacgaggcaaaagaaacggaagaacaagccaaacacagcagaaaaaccaaaaagacaacgcacaagaaaagcacagaacggacacagggcaaagacacacaccaccacaaaaggaaacacacaagaagcagacacaaaaacagaaaacaagcaaaaggcaagaaaacaagaagggacaccaaagaccccaaagaacgaagacaacagacaccaccgccaggcagaaggaggcgaaaaaaagagcaaccccagacagcccaggcggcccgcagaacaaacacagaagcacgagccaagccacagcacacggaaaccacaacaccagaagcaccaaggagaagaaaacaacacagaagaccgaaaacagagcaacccaggggggagaacaaaaaaaaacaaaaagaaccaacaggaaccagaaaagaccagaacaacaaagagccaaaagaaaaacgcaaccgggaaggcaccacagaacccgcaaaaacacagcgcggaaagaacaaaaaacaaaacagcgaaaggcaggacagccagaaaaaacaaccaccggaggcccagagaagggggcgacgcagaacacccaaccaggagacaaagcaagaacaaccacaaggcaaagaaaaacaacacacaacagccgcaaagcacaagccagcccagaacaccccgcaaaagacagccgcacaagccaacaacaaacaaaaacccccaagggcaacaaacccaacggacccaggaaaacaaacaaaacccacacgaaaaccaaaaaaga

SEQ ID NO: 412 - RNA, 2457 nt, Homo sapiens
agagaaagaggggcaccagggccaggcggccgaacccgacccaagagacccacagcccagcgcccaaaggcggaaacaggcggagccaccaccggcccaacccaagaagggcaaggcaccacgacggacaggcagccccccaacacaggggaccacacgggagacgcacagggcgaggaagaggacagagaaggaaaaccaaacagagagagcagcacaccagcgggggcaaacggcaagggaaaccaaggagggaggacaggagggaggggaaaggaccccagaccggggcggggccagccagagcaggaggacaaggagaacgggggagagcagacaggaaccgaagggacgggagacaccaacagcagcagaaccaaacaaaagcaaagcagcaaacagaacgccaggaagcacaacgcccagccgggacagggcgcaggacaaccggcccgagccacgcgccagggccccgggagccccagcaccggagcccagcccccgcagagccccagagcaggagagggggcaaggacaacagccgaaggaggcgcacacgcaagggacacgccaaaaccgggacggcccagcgcccagcccaccgcccccaggaggcaaagacaaaccgcgggcagaaccaaaggagggggagaaggaccccaggaggagggaacaccagccggcagagaccccaaaggacccgaggcagcaggaaagagcagccccgcaaggagcgaggggcaaggcacaaggagggggaaaagaggcgaaggagcggccaccagccgcgagagggcagaggagggggaccacaaagccaccgggaacaggcaaggagaacaggggacgagagcaccaggaggaaagaggaaccaacggccaaccccgaaagacaggaaaaaggagaaccacgggaaaaaaaccagggccgccgcggagagaaccacggaaagagaaggcagaaccgaggaagcgaacaaggaagaagggagcagaaggaagacagcaagaagggcaccagggaggcgaaaaaggagcaggaaaggggggagcgggagggcggagcaagagaaaagacacaagcgaccccagggacaggaagaagcagaaaaaaggcaaacaggcagagaaaaccacagagcaaaagagggacggacaagagaagggacgagccggacccggcaccggggagcgcgggaaagccgaaagagcgaaccaagaccgcagagagacggaggcaagcccgaacaagaggggcaagagaacaccaggagagcgaagggggaggcaacagagagcagagggaagcccagaagcagaaacaaaggagacagggaggggaaggaaaagacggaagaaaggaggggcaggggcacgacaggacaggaaaagaggcagacacagccccaacaagagcagagggcagggcagaacaggaaaaggggcacggaaagggggaagagaaggccggagccgcagcacccacaacaacacggagagagggaaaaaccgcacagcaaggaaagggaagaaaaaaaaggacagccagcgaaggcgggagaagaagcagcagggccgggggccacacccccggacacaccaccaagcccccagcaggcggcgcagcaccggccccgaaccaaaagccccccccgcacgcaccgagcccccccggccggaaaccccaagggccacacaggcaacccccccgacccagacagccgagaaacaaaaacgcaagggacaaggcaagacaccccgaacaacgcaagaacaggaggaagagacccaaagaaggaaccaggccggagagcacaaagaagaaaacaggggagaaccagcaagggcggagcacccaaaaacccggcaacagcacacagcaagacaaacaccacggcaaacgcaggcgagggagagcaaaaccgccagcaaacgaaggaccaagaaaacagcaaaacacacaaaaagagcgagacaccgccaggcaaacacaaaaacgaaccaaacagcccaaagaaaacaacagagaaaaacagaaagccaaccccgcaccaaaacaagagaggcagagcggacaaaaaagccccgaacgcgcaagaaaacgcgggaggaggggagacagcacgacacgaaacccagcgaacagacacccgaaagcgggaacaaaggaaaaacagagcaggaccgccaaggagagacaaagaggagaagaaacggcaggaaaagaaacaacaccaagaaaaaggcacacaccaagccaaagacaggaggcagcaaggaaaccggggaggaggcaagggaccagggcaggaaagcgggaaaggggcagggagcaaggcacgggaagggcaccaaaggagaaaagccagaaggcagccaacaaaaggcccaaccggaaacggcagaaaacaagggcggggccaggaaacaaaccagagggaggagaacgcaaaaagg

SEQ ID NO: 413 - RNA, 1470 nt, Homo sapiens
ggggaaaaccaccaagggaaaacaaaagcacgaaggacagacacaccacgcgcaggacgcaaaaaaaaggcagaagaacgacaagccaaggcacacaaaagggaggaccaacagacggccacgccaaaagaaagaacaaacagaccgggcaaaaaggagaggaacccaaccgggcaagcacaaccaaagccagcacgaagggagaaacaaagacgcccacagagggaagaagaccggcacacagaagggcagaacaacaaaaagggaagcaaacaacaggggacaaaggcaagagagcaggaaacgacaccagagcgagacgaaacgcacaacaggacagcagacaagcaagcacagaaagcccagagcacggagcaaggaaaaaacgaaccaaaaaagaagcaaaaaaaacaacgcaggaaaaaaaaaagaaacgacgggcaagaccgggcgcaaaaggaacaagacggacacccagagacccacgaagaaaaggaaggaaaaaaagaaaagccgagcaggggaggggggaaccgaaagacaagcacccaaacacgccggaaaccgcgccgcaaccaaacgacaaaaccaaaaagaacagagggaaaaaggaacgggaacgcaggccggcggaagcagcggagcccaggaaagcggggagaagggaggagcacggagaggggggagccggagccgccacgcccccccccacaccacaaccagccaaggaaaggcggaaacagcacccgggcgagggggaggccaggacccaggcacagacccaaggcggcaaaagcccgaaaaaaggccaaaagcaaaacccagcccaccccaaacaaacacccagaacaaagaccaaaaagcaagaaagcagaaaaggagcgcagagggaaagacaagaaaaaaagcgacaacagacagcacagaaagcaacgcaggggagccacagaggaacccacagaacggaggaccaacggacacaaaacgagagaacaacacacagaccgcagcaaggccgacgcaagacgccaggaaaacccgccgacgcggagacagccggaccacagagccgaaggaaagaaaagaaaggccgggcagaacaaggacacaaaaggccaggcccaaaaccaagcgcaagcggagagaagcccaagcagacagcggcagcccaggccacacgagaagaaggaaaaggcacgccagaaaaacaaaagaaaacagcaagccagaaacaccagcagaaaacaccagccaacagcagagaaaaagaaaagagaaaaacgcgcaacaagccagaaaggaaaaagaagaagaaagaaaaaaagcagaggaaggagagcaagacagcaaagcagcgaaccaccaccaagagccagagcaccgacgaccggccgacacagacaaggcaggccagaaaacggaacccagcggcaagcaagagaagagagaagggagcagcacaaagagaca

SEQ ID NO: 414 - RNA, 2262 nt, Homo sapiens
gaccggggccagagaaaagccccggagcaggagacaagcaagggaggggagcccaggcaggaccaaaccacgcacccaagacggggccagcgagaagaaggccccaagagccgccaacacagccaggagccgaggggggccagcccaccgacggcagacagcacacgggcgcccccccaaacgaaacagggccacgacccaggcggaggcagggggcacagcggccacgcaacccggccccgggcaaggacccccgcccagccccccagagcgggaacaagggagccaccagccggcaagcaagcagagacggagcgccaaacccaggcggccgaacccgacccagggaccgcccccgcccccaaaggcgggaacaggcggagccaccacgccagccacccccccagccaggaaccggaacgaggagagaccgcccgagcccgccgccggagccccccgccaaccgcccccccccacgagcacccacccacccccacggggcccgcacaccacccccggccccacccgggcacagcaaagcagcagccaggccaaaaaaccgacaagggaagcacggggagaggcgccaagacgccccagaaaagggcacgagcgagcgacaaaagcccacaggggggacacgcccacacagagacaacccaagccagagaccaaagggccccagcccagaagcccaaagcgaaccgaccgacccggaggggaaggcaccggacaggagaaaaaacaaggcaggaccagcccagccaaagaccaacacggaccgaaagaaagcaagcgcagggaaccggaaagaaggaccacagaacacccaaaggcaggcacaaagcgcaccagagaaaaacccaaagaaacaaaggggaccccaaggaccgaacccccagaaaggcaggagagacaccaggcaggaacagacaacgaggcagcaaacggaaaaaaaaaaaaaaaaaaaaaaacgacgggcgcggggccacaccgaacccagcacgggaggccaaggcaagggacacgaggccaggagcgagaccagccggccaacagggaaacccccccaccaaaaaacaaaaaagccaggcgggggcacggccgaacccagcaccaagaggcgaggaggagaacgcgaaccccggagcggagggcaggagccaagaccaccacagcacccagccgggcaacagagcgagacccgccaaaaaaaaaaaaaacacaagacaacgaaagaggaaaaacaaaaaaggaggaaaaaaaacccagagccagagaagccaacgaccccccacaggaagggaaaaaacaaaaggaccccgaaagccggcaagacagaccgagggagaaaaaccccagaacaccacgagacaagacaagacagacccacaggggagaagccagagggaggagaaaagaaccgaggcgagaggaacgagcccagcaaagcaggagacagccgcgcaggaaggcaaaaagccaaaacccgcggcagagagccgaccacggacacaacaaagggcacgaaagcgaaaaaaaaaagcaaggggaccggcagacacgcccccggcaaggggccccccacaaccccacaggaacgaaaaaaacccccgaaaaaaacaccacaaagacagggcacaaccaggcacccacaaaccacaaggaaaggaaggccagaggaaagacagcccaccgcccccacggccgccccaccccccccaccacagcccaggggccacgaaggagccaagacccggggaaagggggccacagaaacacagcgaaaaaacagaccacaggagaaacacggaccagaagaagccaggggccaggccagggccagcccgaacccaacacgggaggccaaggcaggcagacacgaggcaggaggagaccagccggccaacagggaaacccgccacgaaaaacaaaaaagcgggcagggggcagccgaacccagcaccgggaggcgaggcaggagaacacagaaccgggaggcagagggcgggagcgaggcagccacgcaccccagccggggacagaaggaggcaccaaagaaaaaaaagaagaagaagaagccaggaacagggaagaacaaggcggagagacaaaggggcaaaccagccggcaccgcgggagggagagaaaaaccccgaacagacacacccagaggagaaaaaacacccaggggggggagagaaacaagaacaacaaagcaccaagaggcgaagaaagagccaacaaaggagaacaccaggc

SEQ ID NO: 415 - RNA, 7529 nt, Homo sapiens
gccacccacgagagccgggacaccaagaacagaggcgaagagaagaagcccccggggaccccaggccaagacaccaacccacgccccaggacccaaggaaagaaaacgagagggcagcgccaggccagaacgcggcagaggggaccgggaccaccaggagccccacagggccccagaccagcgggaaacccagccagaagccccccccagcaggagaggacaaaggggcagacagagacccagcaacaggcccccagccaaaaccaagagaccagaaaagagaagggggcaaagcagcccagccccaccccccagggccagagaggccccaccaccgagagcaggggacacggggccaggcccccaggagagggcaagagagacaagggccacagcgggggggaggcgaggggcacggcacaggggagaggccagggagcgaaaaccacaacgcacagcacagcccgccacaaaggcgcgggagaagcccgccccaagcgggggcacaccacccacagccgaggaagcccgcggggcccaaagagcacgcaaccaggaagcggcagcccaacaacagcagaagggaaagagagaaggcgggaccagaacacgcgaaacgcaggcgacagagagaggcagggccccagcaggcacaggaccaagggggcaggggcaggagggggcaggggggagggcggcacagccggagcaggcgaaaaggccaaagaagcagaccgacccggagcccagaaaaaaggggcgcagagcaaaggaagaacgagaggggagaaccgacacgaggggccaaagaacacacgacgagagaaggaggcagagggagacacggcacaggaaaagggagaacaacagcagaaagggggagaggccacaagccaaggaaaggaggccacagaagcggaaaaggcaaggacagaacccccagagcccgggggaacgggcccgcccacaccgagggccagcgagacgacaaaacggccgccagaacggagagaaaaacggcaagccaccaagggggcagacgcagccaaggagacaacacccgagacccggggcccccagaggacccgaggcgaggggcaaaccccagcaggcaaagccagaaaaaggggaaggaaaccgcacccgaacaacacccacccacccaagcacccccggaaaacaggcaccgccccccaccggcccacagcaacaacaacgaagcgggcaaagcaagacacccccaggcggcaaaccggagcaccgcaccaccgaagcaccaagacagcagaaccaacagacggaccagacgccacaacacaccaaacacagcaggcacagccggaagaaggacgccgacacagaacaggggagcaggagccgacgaaagaagccccaaggccccagcgcacagacaggcacacaggaaacaacaagaaagggcccccaccagagaaaaacaggccagacgagggccaaaaagcacaaagccgaacgagcaaaagaacccaacgcgaagcccgcaacaacacaaccaggcaaggaggaaaacaacagaacagcacacacaaggaagcgagaaaccaaaaaccccggaaaccacgaccacacaaacacagcccacaccagaaagccccccccagcaaaacccccagcccccacacccaggaaccacacgaccaccccaaaacagggcgggaaccaaaaagaaagacagaagaccgcacggccccaacaaaggagaaccagggagacagaccaacgcggaaccagaagaaagccaaagaccaccagaggacaggacaccaggggcaaggaaaaagcgcagaaacgggaaggaccggccacccccggcagacaggagaaaagcgggcgagagaaggcacgaacaaagaagagacacagaggaagagaaaaaaagggagaaaaaaaaaagaaacagacaacccacacccaaccacagaaaaaagagagagaccccggccacaggcaggaagaacagcagacagaaagagagggcacgaggacgaagaaccagcaaaccacacgcgaaaacacccacacaaagcacacaccaacccaacaaaagggacccgacacgggggaccacaggcgacacagacagaaccagaaagcaaaaaagaggaaaaccccgaagaaaacgagaaagacaggcaggcaggaaaagcagggaaagagaacgagcaaaacagaccggggcccgagaccaagaagccaccccgccaaagcacaaccccaaggccgagcacaaagagaacgccggccccagcgccagccccccaaaggaaccgagcccagcgcccccacggaggccacgaacacaaaaccgaccagcagcaaaagcaaaaaacaggggcaagaaagacccaaggcacaacacgaaggcggagcaaaaggaagaacagaaagccaagcgccacaaggaaacaacagccaaccacacaagaaaacgcacccaaaaggcacaacaacaagaacacaggcgcagaaccaaagcccaaccccgcaccaaacgaccgcggagagcacaggcccaaaaggcagcgaacaaaaaccggcccacagaacgagagacaccccgggagccacgggaaaaagccagcgggaacaaaagcgacaagcagcaaaaagaaagcaacaccagggcgggcacaaggaaacaaaacaagggggacaaaccccccagggaaacaaccacgcccggggaagcacgaacaaaaacagaacaccacgacgccagagagacacgaagacgccgaaacgcagagcagaaagcccaggggacggaagcaagggaaagcccacaccacagaccgcagccaacccaagaggaagaaacaggacgcagaggagaaccacaaagagcacacaggagcagggagaaagaccaggacggcagaggcccaaggaagcaagacgccacgaaaccccacacaggacccggaagccccacagggggggaggccgcccgcaagagaggagcaccgcacccaggcggaggcagggcggaccggccacgaccccaccccgggaagcaaccgcccagcccccgagagcgagaacaggcgccaccaccacaccaggcagaagagagaggggcagcacggccaggcgacgaacccgacccagacacccgccggcccccaaagacgggaacaggcagagccaccacgcccggcccccgaaaggaacacccaagccacagcacaagaaggagggaaagggaacaaacgcacagggggcccacagaccacaagacggggggaagccgaaagaaaaaaaccacagaaaaacccagaaacaacagaggaaaacaaagagagagaacaccaccacaacaagaagagaacaccccacaaagccacgccgaagcagccccccaccaaccccagccggaaacacgacgggaccaagcgccagaaggaaaggaaccaaaaaagggccgcccacgcaccagcagacgccgagacaagggcaacagacgcaacgagcagaccaacaggaaaccaaaggaacaaccaaaagagcaggagcagggggcaaagaacaggcgcagaacccagaagacgcgagacaagcaccacaagaaaaccaggagagaaagcgaggagcggaaaagaaaccccaacagccaaagggcagacagcaccacagagaaagaccaagcgcaccggcagagcaggggaaaagccaggcaagccccagacgggaggcgaggcaggaggccgcgaacccaggaggagggcaggagcaggacacccacgacccagcagggcaacagaggaaaccccaacagaaaaaaaaaaagaagaaaaacgagacaccgggcagggcagcaggcaggcagcccaagacaaaagaacagcccaagacaagaagaacacagagccagaggagccacgccgggaacaaacgacaaagagggggaaggaaggacagcagaaccgaagagaaaacagaacagagcaaaaaccaaaccgacagcaccaccaggccaaacacccagcaggaagggggcgcccaccccgcacggacagcagggaaggagaagggggccaggccggccaagcaaacaccggcaaggcaaggggaagggaccccaaacagagaaaccaaccccccaagagaggaaagagaggggccaggacaaaaggcagagagcgcgcccgccccaaggaggaacaagagaagaagacacgcaaaccaagagggggcccccaccagacacggagccagcaccgacggaccccagccccagaaccagagaaaaaagacgcaagccacccagccggacgaagcagccagcgacaagacaaggcagcccagagagaagaaagaccaaacaggaccacccaacgcagagacaagaaaagggaaaggaagagcagaccaagcccacccagaaagacagaccggaaggagaccagaggcgaaaaaagcagccagaaccgaaaggggccgggagagacgagaaaccgaaacaaagccaccagagccagcgggggaaagagcgaagcagccaggccaaacaagagggagggaagcagagcaggggaggccacacaaagacaaaaagagaagaacaccaagaagcagggaagggcaaacgaacacagccgccccaccacaccgcacaaggcagcgaaaaaagggccagggaaagaaaaaacggaggggaaaggggacaaaaaaaaaggcacacaaaaaaacaacaggcgcgggaggcagccaaacccagaacgggaggccaagggggaggacacgaggccaaaagcaagaccagccgggaacaagcaagacccaccaaaaaaaaaaaaaaacaacaaccgaccgaaaagaaagcccagcaacaacgggcgccagcagggcggaggacggcaaaggccacgcacaggaagcacagacccaacagggaggggaagccggcacagaaaccagacaaaagagaacgccgcacaaaaaaacagaaggaaggagagaacaaggagagaaaaggaaacacagacagagcaacaaaacacccaaccagaagggcaaagggaaccccccccgaagggagcgcgaaaaaacgaaaagaggagaaagggcaacaagaaaggaagggagggagccaacaaaaagaacaaaagaagggccagaggggaagcaaaagcacaccacagaagggagagaaaagaggaagaggcaagagggaagaagacaggggaaagaaaagcccaagaagagacaaagccgggacaaaaccgagccggagaggggcgacaaacaagaaaggaggggagaaccacagaacaaagggcaagaagaaaacccaggaaccggaccgcccagaagaaagaagcgccgggcaggagggacagcccccggggccaacccggagagagacaagaaaggggaagaaaagaaccccaagaagccccacagaaaaggaaccccagagagagcccccagcacaggggagaaacaagggaaggacaaagccggcaaaggcagcaaggacccaacccaccaaaaggccagcagccacagcgaacggggacaccgagccccaacccaaaaaccaggcaccagaaggacagaaaccaaacaaaccaggacgccgaaggacaaacacgacagcaaagacaaccagcagaaagagcagacagaaaccaagggacgaccgacagaaaacaaaaggcaaacaggaccccagcaaaagaaaaaagccgacaaccggggaagaaaacaagcaaaacaaccagggcaacagagcacccaggccggaaacaaagggacaaggaaacaaagggggagggaagaagccggagaggaggcaagagaccaggcacgcgcgagcgaacggcccaagcccagagagagaacccagcaaaaaaaaaaaaagagagagagagagagacagaacaaggaaacaacagaaaaagacaaaaccaaaggaaacacgcaaaaaacacccaaaacaggcaagcaaacaaacaacaaaacaaccaacaagagggagacccccaaaaaaaggacgaaacccgaagccacaggacaaccaggcaagagagaaacaaaaacaaacaaagcagcaaaaagcgaaaaaagaaaaaaggaaaaagaaacaacaagaaaaaacaaaaaaccaccacccagaaaaaccacgcagcaacaggcaacgccaagaccaaacaacagagcagaacaaagggacaggagccacgccgaaaccgaaacgccgagcaagccgaggaagcagcgcggcaaaaaagcaccacacccagaagacacaaaccagaggcgaaaaaaacaacaacaaaccaggccccggcccagcaccaagcacgaacagcagccggaggaggagagaacccgacagagaaacgagaaggagaaggaaaacgccaggggcaaccccaaaggccaggacagagccaagccgaacaccggccagcgcccgcccccggggacagagcaaagcaaaaacaggcaggaaaaacccacgcccaaaagagggggggagggggaggagaaggggaagcagaaagagagacaaaagagagaacagagagacacggaaaaacagaagaagggcaccaggaaaaggagagccaaaaacacgagacaggggagggggaacaggcaggcagaaggcgagcaggacggagacagacagacaccaaacaagacacaggaagaaaagaaagcaacgcgagagaaaagagagcccgcaagaaaaacagagaacgagcgaacgacccaggaagacagaaaagaagccggcaaagagaggaacgcggaaggaaggaacacagagacgggggggggaaaaaagcaaagagaccacagacagacagcggacaaggcgaggcaggccgggaggagcgaggagaccgaacgaagcaggcaggcgcccgcagaccacaaggcgcacggccaccggacacagaaacacgaagcgcacacaaacaacaaaacacaacggcaacccacgagaaagaaaggagagaaaagaagaaagaaaggaaaccaccaaccagacacagaacccaaaagagggcaaacacaaccaaacaaaaaaagagggacaccaccaacaaaaacaaaagcacacaaaagggagcagagccaagaaagaaaaaaagagaccaaaagaagggcaggcgacaggcaacagccagaaccaccggcaggaacagaacacaaagaacaagggggaccagacaaggccacgcagaagaagagggggaggggagaaccaggaggaaaaaaaacaaaaacaaaaacaaaacaaaagcaacaaacccaaacacggaggccccgaggaggcagaaaaagaggagagcgaacaaacaccccacagccacaaaccgaaagaacaaaaagagaaacccccacccaccaacccacaagaaggaaccagaagaaaaggcacaaagcacaggcaaaacagaacaggaaggcaagcagccggggacaaaaacacagagcaccggaaagccaaacgaagagaagaaagaggcagggca

SEQ ID NO: 416 - RNA, 1801 nt, Homo sapiens
gcgaaaccccaacagagcgacgcggaggcggaaagggcaggcagaaaacagaaacggagggggggacagaagcaggaacaccaccaaggagcagcagcacacaggggaccccccaagcaccacgccaacaccacagaaaaggaaaggaaaccagggaacacaggggcacccccaaaggcaggaaaggagccagaaacaaaaggcaagaggaaggaggagcggaggggggcgcccggggaaagggaacagcagacagagagggccccgcccccaagccagagcccaccaaagagcaaggaacagaaggaagggggaagggggaagagccgaggaaagggcacacgggggccaacccgagggacgccccccaacggccaggcaggccacacagaaaccaaggggaggcggggggggccagccaaaccccagcacggggggccgaggcagggagccgagcccaggagcaagaccagccgggcaacagggaaacccgcacaaaaaaacaaaaagggccagaagcggggccacaccgaacccagggcgggaggccgaggcgggggcaccgaggcaggagcaagaccagccggccaacagggaaacccgccacaaaaaacaaaaaagccagggggggcggagccgaacccagcaccaggaggcgaggcaagagaacacgaacgggaggcggagggcaggagccaagagcgccaccacccagcgggcaacaagaccgaaacccgcaaaacaaaaaaacaaaacaaaacaaaacaaaaacacacaaaaaaaagcgggggggggcacacgcccaagcccagcaccgggaggcaagggggcagacgcgaacccaggaggggagggcaggggccaagaggccacgaacccagccagggaagagcgagacccgccaaaaaaaaaaacaaacaaaaaccaaggggagcccagaaaggaccaaaggggcccaaccagagaagcagcacaacaacagaaagcagaggggccccacagccacgaacagaacccagcaacaggcccccaagcaacagcaaacaggcccccaaggaagcaggcaagcggagaaccgcagaagggagggggaccaccccaggcacccccagcacccagaggacaagcaggagcagcccgaaggggagggacaaccaaagggccggagcagagggcaggcaaagcaggaccaggagaccgggagagccccccccccagacaacacccacccacacgccccccaaaaaaacagaaagggaggggggcagggaaaccacgcccaccccaacgggccccgccccggggcacgccccgcagcaggaggacagagagggaggaagcgaagagggggaggaaagggagggccagggcggggggggagggagggaaggagaggagggagggagaggaagaagcccacacccagcgccgggccgcaccgcagcgaggcccaaggaaagacaccaagcccgacagaaagaagcacggccccaccccacagcggggcccccccacacgcagcagggccgggaacgacaggaaaacggaagacaggggcgaagaggggcggggaaacagcggccccgcggggggagcaacgccgcacccccaggcccagagcccggcaaggcagcaggagcagaagggggaccgccagacacccccacagaaaggacacacgccacagcgcgaggaggccgggggaagcccacaacaccacaacacagcccaaggcaacaccccaaaagacgagcacagagcacaggaaaagagaggaaaaaagcccggcgccccaagaaac

SEQ ID NO: 417 - RNA, 3781 nt, Homo sapiens
cccggaagaagacagaacacaccagcaaagcgaacaggaacgaagagaaaaccgccagcacgaggcacaagggagagagaacgaaccccaaacacgacgaacaaaggaggcacagcaccaagagaagaggaccccacgcaccccaggaaggcagccagagaaaggcccagaaaaaaacgagggaggcacccacccacacggggcgcccggggccagcaaggggcaccgaagagaacaagccggggggaggaaaagcaaaagacaggccgagaagggcagcacgcaagcagacgccgaggccaagccagcgacaccccacacgacaaaaagagcgccaaccccaaccagagagggcaggagacggcacagacgccggccacgacccaccagggagcaggcaggaaaaggagcaaaagcggagaaaagccaaagccggaaaacaacaagcaacccagaaaacggcaagaaccaggcccagacggggaaaaaaaagcccccagaaaccagccggcacgagagagaagaccgagaggaaagggaaggggaacagccagcccgcacaaagaggggaccccaaacagacaaaaaaacccaaagcccaggcgaacaaaaaaacagagaaaaaaaaggcccagagcccagccgagccaccgcacaaagcaggcaggaggccacaaggagaaagccgaggcgaaaaagagacaaacagaacccaagacgcagaccaaaagaccagaaaacacagccggccgaacaaacagggcaagacaacaccgcccccagcgaaggagacgagcgaccaagacccccggccacaccccgaacagaaacaagagagaaacccacaagggggggaccacaaaacccacggggccagagaagcaggcggaaaagcaggcccgaacgcggggagaggagggaggagcaaacgggaacgacagcaagaaaaccaacccggaaagaaacacaacacccggggacagaaacagcagaggagcaaacgagggaaccagaccgaacaccaaaagcagaagagggacaaaaaagaacaccagaaaaagcaccgcagcaccaaacagggggggagggaacagggcagcacggccaccggcagagcagaccggacaacaaaggacagggaaaaaaaaaaaaccaacacaaggacacaagaaaaaaaaaaaggaagcacgccaccaaggacgaaacaacaggcggccagcaacagaccaaggagagcaggggaaggaaggagcagacaggaggaggaacaccaaacaccaggaacacacaacaccgcccgaggccccacccgcccagcccgccaaggccaggaccccccacgacccagagaccagaccccaggaggggacaaaaagaaggacgaaggaagagggggcgaggagcccggggaacaggagggaacacagagggggcgggagaaaaaaacacagaacgaaaaaggaccaaacggggaacccccccgcccccaaccccggaaaaaccacgagaggggcagaaggaaagacaagacgacaagggccaaaaggaaaaaggcccgaaagcaccggaaaaagggagcaaacggcggaagagcgaagggggggcacacacggaagaaggggaggagacaaggggaaccggaaaacaaacgcaggggaccgaaggaccagcaccagggagacaaaacaggaagagggggaggagggaggggggggggaggggggaggggaggagggagagggaggagggaggggggagggggcgcgggggaggggggaggggggaggggggagggggggaggggggaggggcaggccaacgcggggcacggaggggggcagaaggagacaaaaagagaccccagcacaccccagggagacaacacgcccacagaggaagagacaagaaagcccggaggaaaccggaaaaccgacggcggcacacacccccccccggaagaaacagccagcgcaaccaaaccacaaagcaagcgacagccacccaacaggaagaaggaagacagcccccaagcacaggggccacacagccgcaccccccacgcccgacgcagcgagcaaaaaaagggccggcaaaagacacggaagccagcaagaccaagaaaagccagaaaagaaagagaaaacacgcaccccaaggcccgggggagccccaacacagaacagaggcggaccaaaggaagcccaccggaggggaacaacggccagaagcagcgccgggggaaacacggaaaggccaaccccacggagagagaccgaaaaaacgccgaaggaccccgggagagccccgcacaaacagcgcggcacccacagcggcccaagaaggcccaacccagcacagagaaagcaaaggcccagcaagagccaaaccccaagcaagccagagccgcccacccaggacaaagggcaaagccaacgccccacccggggccgcccggggaaggcacgccaagaaggcccgggccgcgcagcgcgccccaaacgaaagaaagcacacagaaaaacaacaaacacaagaaaaagaaaaggcaaagcccccccaccccccagcccccaagaaagaagacaggggaacaccgcaggaggggcgaacaaagaaacgacccccccaagcaagcggacacaaaaaaaaaaaaaaggacccagccgagccccagcaacaagggagaagcgagcgaagccccgacagcaaacaccaagagacccagagccaacaccgaacacaaaagccagcggagcaaagggaacgaagcagcagcagcgacggcaacagaacccccccccggggagaccagaaaccgcacacaagacccaaggacagggcacaacaggggagaaacccggcggaccagcgccagagagaagacacagaacaagccaagcacaaaaaaagccagacgacagcagagaaccaaagaaagccccaccgacggaaaccaggcccaaacacgcaagagagggagaacgccccgaaaaggcccgacgacaaagaaagcaaaacgagggaccacccaccagagcgaagcccacccggcaccaaaggccagcggccaccgcaggaagagccggggagggacgaggcagagagcaagaccaagcggcccccggccccggggggcgggcccaggccgcccccgcccgcccggcaagccgggcaggcagccccccggcccgccccacaagccggcgcaggcggcagcagcagcgaggacaaacgcggccaagcaacacggcgccaagaggcaaccagagaggcagggaagcagcaggcgcaaaccccacaaaagaccacacacccagcgagcacaaaaaacagagacaagagagaacggggaaaaaaaaaaaaaaggaagcaaaccacaaggacagcaccagaaaaacccacacaggagggcgaggaggaaaaagagaaggaggaagcaagagaaccacacgacaagggaacacccaggacggaaaacacaggccggcgccgcacccgggccgagaaacaccagaagagggcacggcgccggccagcccggcagcccggagcggcaggcagcaggcggaggagcaccccaggccaccccacccccgcggggaagcaaacgccacggagcagagaggcccccgcccaaagcagcaacaacccaggccacacccgaccccggaggggacccccggaaaacaagcagagccaaacaagccggccgcaacagccagcccccccagaaccagccccccgcaccagccccgggcgaccccccggggaggaaagaaga

SEQ ID NO: 418 - RNA, 2774 nt, Homo sapiens
gaagaacaaagaggacccaggggaaagaaaaccccagcacacacaaaaagggggaggaggaggcggggaggagagaagaaaaaggaaaaaaaacaaacaacggaaccaccccggggcgggcaggaacggggcagcgggcacaccaggggacaggcacaccacaaagagaaacaaagagcaaacccgaggggaaaaaagacaggcaaaacaggcccccccaaccgccagggggcccccaggggagcagcacggccggagcagcacaggggcccgcgggcacccgccccacacagcggggcggccgcaagggaggccccaggcagggggaagagcgaaggggaaaggggcagggcagggccccaccccccgccaggcagccagggcagcaacaaaccaccaggagagagagggagagcaacaaggggaggcgcggccaagagcggccgggggcggaggccccagcgggccaggcagagaagcagaggcgcacgggggaaggacaagagggggaccagacgggacagccaaccccaacaggagcgaggaagccccgcaaaaggaccccgaaacaaacgagggcgcaccacagacagcgcaaagccagaaaaagagcacccaacagcagccggcgagggggacagggcaggccgccgcagcccgaagaaacaaggccgcacagcacaggccacccgcagcgggggacgcggaaaggcccccgagccagggcgacggcggcgaagcaagacaagagacgagcgccacagagaaaaacaagacaggggggcagaagacggcgggggcagagcaagaagagaacaaacaaaagggccaaacagaaacacacagaaaacaaagagagaaggagaaagcggaccagggccacagaaaccaacccgaccccaggagcaagggccaggcaccaggggcggggacgacagaaaaacgggagaaagcgagaacggagaaaaaaaaaacagggagccgaccgggaccggaagccagcgacaccaccaccgccacacacaaaacacaagacaaaaccaacacaaaagcaaaaaaacaggagcaagcagggccgacccgcacgaccacaacgacaagggggaacgacgaagacgaccgaaggaaaggcagaacccagggaaacagcaggggccaaaaggccaggacacaggcaaacaccggcacaaaacagccaaacaacacaagggccaggcacgcgaggcgacggcaaaagccccaacaaccagaaccccaaagcccgaaggggaacaaacccaacacagaaagggcacgaggcacagagaggaagaagcaccccaggcggggcggggccacaccgaacccagcacgggaggccgaggcaggggacacgaggcaggagaggagaccaccggcaacagggaaacccgcccacaaaaacaaaaaaagccaggcagggcgggcaccgagccagcacgggaggcaaggcaggagaaggcagaacccaggaggcggagcgaggagcggagacacgccacgcagcagccggggacagagcaagaccagccaaaaaaaaaaaaaaaaaacacccgaaacacagcggggggaagaggcagaggggagcgccccaggacaggaaggagaaccgcacggaggaccagccaccccaggagaggagggccccccagccagccacggcacgcagagcaggaaagcagaaggacagcgaggcggggccaccagaagccaggcaagcagggcaggcaggggccacgcgaaccaccagggaggcgagacagggaacaccgagggaggaggacaccagccggccaacagggaaacccgccacaaaaaacaaaaaaggggccgggcgcagggccagccgaacccagcacgggaggcgaggagggcagacaccgaggcaggagcgagaccagccgacaaagagagaaaccccgccccaaaaaacaaaaagcccagggggggcacaccgaaccagcacggggaggcgaggcaggagaacgccgaacccaggaggggagggcaggagacgagacagccacgcacccagcggggacaaaggagacccaccaaaaaaaaagcaaaaaaaaaaaaaaaaagaaaccagggaggaaagcagggccgcagaggccagccggggaaaaaggagaggacccagcacgcaggcagacagaaggcgggacaacggagaggaaacagggagccgacagccccgagcaggccagggcagggggaccccccagcaaggccaagaggggcccaggaagccaagccccagggagaagcgagagaccaaggcccacagaggaaggcccacagagaccaagccacgccacccccggagcaaagagggcaggggaacagggccacgggaagggaagaagggaaggagagacccaccaaccggaacacggagggacagcagagggaggagggggaggaagacaccccccagccacagaagaagcacacacccaccaaacgagaaaaacagaccacgccggggagagggaaggaaaccgcaccccaagcccacgcccccccccggcaccggcccaccgcaccccggccgccccacgaggcgggccagagggagggccacagagcacagggccccagggccgggccgagcacaagggggccccagagcggaggccggccccccccagggaggcagaaagggaaccagggaaaacaaggcaaagcacagaggaagggacggcccacgccccacacacacggaacaggacccgggaccaggaagcacaaaa

SEQ ID NO: 419 - RNA, 52 nt, Homo sapiens
gggacccaggcaaaacaaaaaggcagagcacccagacgcacccaaaagaaaa

SEQ ID NO: 420 - RNA, 3136 nt, Homo sapiens
cgaccagaacggcagcagaacccagaccccgccaaccaaagggaccggcgagacacaaaaccagcccacgaagcacaccccacgacaaaggaccccaaaacagacggagcaccaggggggggggcgccagcagcgggccagacacagggcaacaggaagcggaacccgagacgcgggaaaaacacaaacaaggagccccacaggaggccgggccgaaaggacaggcggccgccaggcacagggaaccaacagggaagaaccagcccgggacagcacggcccgagcaacaccgggagaaggaaagaaggcaagaaggaagagcagaaaaccgaagaaggaggaagacaacaggggagaaacccaaaccacccagaagcaacacgcacagccgccagaccaacgcaggcggaaggaaaccaaccaaagcagaggcaaagggagaagcggagaagaaaacaaaaaaacacaccgaccaaaaaaaagcaggaaggacagagggccccccccaacgggggagaggagcgcgcacccaggcagagacagggcaccaccagccacgcaaccccaccccggggaggaccccgcccagcccaagagcgggcacaagaggccaccacgcccaccaagaagagagaggggcgcaggggccaggcggccaaacccgacccaaggaccacccaccggccccccaaaggcggaaacggcccggcccagagccacaaacacaagccaggaaagccccaaaggaaccacacgaacgacaagacagggcccccggcccaggcggaggcaggggcaacaagccacaaaccccaacccaggccaagcaaccccgcccagcccccacaggcggaaacaagcagagcacggcgacccacaccaaaaaagaccgcgggacaccggaacccgagaaaacaaaagaacaaaaaacaaaaacaaaaagcagagcaaaaggggcaggagcagcgggcccaccccagaggcgcgcccggggagaggacaaaggagaggagaggggaaaaacacaagggagcggaagcagaggaaagaaaagagagaacagggggccgagggggagagcgaaagagggcagcgccagccccacaaacaaagaaacagaagaaaagcaaccacgccacagaaaaagcaaaaaagccgacgacaagacgccgaaaaaagagcccaccaaacccaaacaccccggaaggaaaggaaagaagcaccacgaaaccccacagaggagagaaggggagggagaaaagcagaagaaccagaacaggaaagagacgccgacccagaggcgaacgccacacaccagcccacgacacagcccagaagaccgacaaacgccaccaagaccccgagcagccagcaaaacagagaagacaacacaacaggaagaaagggaaaaaggcaaaacgcgacacaaaagggaagaagagacccccccccgacagcacaaaagcgaaaaacacagcaaaggaagggaacaaaagagagaaacccaaggggcagaaccacagcaaaccacacccaaagaggcaaacaaggaaagaaaggaccacagggggaaaaaagagacaaaaggcaacccaaagaggcaaaccccacaaggacacaagaaaacgaaaccacaaaaccaaaagagaagaaaagagccaaaaggacgggaagcaaaggagggggaggggcgccaggcaacagcaacaaaagggagagaacagaacaaagcacaaaacacaggcccaccagaaaaaaaaaaaagacagaaaaaaagaagaaaaaaaggaggcggggaagggccagggcaggagaacaggagaacaacgagaaaaacgagacggagccgccgcacccaggcggaggcaaggcacagccagccacgcaaaccaacccccaggcaaacaacccgcccagcccccaagagcgggaacaggcaggccaccagccggcgaagagagacggggcaccagggccaggcggccgaacccaaccaaggacgcgcccagcccccaaaggcgggaacaggcagagccacggccgggcaacaaaaaaaacaagggagaaaaggggcaagacaaaaaaaagaacacgaacgcagggagcacgcaacaaaaagaaaggaacccacccaaagcgccagaaaacaagcaccgaagaacaaaagagaacaaagaaacagcgccccggacacagaaggcggacagggcccaacaagacacagggacaagagaagccggcccacaggcagaggaaacaacgggcaggcagcaaagggcaccaggcaaggaaagccgggcgggagaggggcgaaagcgccgcagcaagagggcaacaaaaccggaaaagagaaaaaaaacaccaggaagacaagaagaggaaaaaggaaagaaaaaagaacagggccagaaaaaagcagacaagagaaaaaaacaaccaggacggagcgaccccaaagaaaagacaaaaacgagacagccgaaaaccagacgccggggaaaccagcggcacaacacaggaccggaaagaggaaccggccagaccgccaaaaagggaaaaagaagaacgcagaggaaagcaggaaaagagaaaagagcagagcaagcacaacaagagcaaagcaaaagggggagacaaagaagaacaaaagaaaaaaagcagacagcgggaagaggcccaccgcaccagaccgacaagagaaggaaaaccgcagaaccacaaagggaaaaagggaggggagcaaaggaaaccagaccaaagggacgagacacaggaaacgaaagcaaaaaaggaaagacagagccccagggacaagcaggaaccagacagaagacacaaggagaaccagacccgcggacaaaaagagacagcacaccccagagaaaggcgcaaccgaaacgacacacaagaagacagaggcaaccaagaaaaggagaaaggcaacccaacgaacgcgaggcaggcccggcggagaaacagcgagcacagaacccgggccccaagcaggaaaaagcaaggccgccaaacgaaacaggcaccgaagagaaaaacaacagccaggcgcagggccacaccgaacccagcacgggaggccgagggggcgacaccgaggcaggggcgagaccagcggccaaca

SEQ ID NO: 421 - RNA, 234 nt, Homo sapiens
aaacacaaggaacacgcggaacacggagcagaaagcagcagaacacacgggacaggcgaaccagcaaccaacaaccgccgaacaacggagacgccccagcacaggcggagaagcacagaggagagcccccgggcacgagggagccaaaaacaccacagggagagacaaaaccaccccaaaagagacgaaacccacagcacaaggcacggagaaacaaaagaacaggaccaaacc

SEQ ID NO: 422 - RNA, 427 nt, Homo sapiens
ccggaacccagccccccagccccccaagccccgccgggagcggacaccagcagaagggccgccccagacccgcagccaggccccgccacagacccgaggacaccggagggggcccagagccagccccaggccagcaaacgcccagcagcagcgggcccccaccggccaaaagaaacgggcgaccacacccgcccagcgggcaccaaggcgcggcaaggcgagggagccccagaagcaaccgagcaggggcgcgggccagaaccgaagaaggcaggccccccagaaaacccaaccaggacaggggaaacacccccacggggcagggcacgggggagaaacgcggggcggcagggcagccacccccgcccccaccaaccccacccaaaccaccaaaaaaagccccacgcccgggggggcacaacgccag

SEQ ID NO: 423 - RNA, 1690 nt, Homo sapiens
agaagaagcaggaaccacaaacgggacagcagcacgaacagcccccagggcagagggggcaccaggggcagaggcagagaccacccagccaaagcaccaggggaaaagccccaaaggagcgggaaaaggggcaacgcccaacacagcacaacccacagaacaaagcaaacaaagcggccggaacaaacacaggaaccaaaacaaagcaaagcaaccaaccaaaaagacccagccaaaaaaagcgcagggagggggagccccaccagcccccccgacccccagagccccagagcccagaaagggaaaggaaagaacaaaacacgaaaacagccagaaaaaccagcaagccgggcagagaaagagcgcaaacaggaagaaaaaaaaacaaagaccaacagccagccccaaaccaccaagcaagcgccgagcggcgggcacaaaagaaaaaacccaaaccccaccggcccaaaaaacacaagcacagagcagacccgggcacccagaaagccacacccaacccgacaaccacaaaaaggaacgaaagacggcaggaacagaggggaggggagaggcgagaggggcaggggcaaacagaaacagcccacaagccaacacaccccagaccccaaaccccccagacacacacggggcccccaccaaacacacaaacccacgccagcacaccgggaaaagaggacaacaccacaccgcgagggcgaagagagaaccccaaccccaccccaaccagccagagaccacaaaacaccaaaaaaaggaaaaggaagaaggaacgaagccaacgcgaaaaaagagaaaacaagcagcccagcagaaagagaaacaggacagcaaaaaagacgaggaaaaagcaccaacacaccagccccaaaggaggcgaaacaaggacaaaaacggggaagcgacgaaagaagcaacaacaggggcggaagagccaagaaaaccagccccccggaaacacagggcgccggggaagaaaccacaaccgaaggacaggacagcaaaccagcaaacgccagcacggccagaaaaaaacagcaagagaagccagccagcagaaggcagaagacagaaaaaaacgaggcgaggagaaaaggagccaaagccagaacacccgggagcgaagggacagagacccaaggcaaggcccgagacaaggggaaacgaggcccagagggagaggagacaagccaaagcacggagagaacagacagggcagggcgcggacccaggcagagcaccacccgggacgaagcgcacgcacaagcaaggcacaccaagaaaccaaggagacaaacacaggcgggaggccagaggcagccgacagaagaggaagaaagacgagaagcaccccagaaagaaagggaacccgggggaggaaggagggaggaagaacacgcccaaacagccccccagacccagcccagccccaccgggagcggcacaagcagcccaacgggccccaggccggacaggccgccacagcccagccccccaagggcacaccaagggcccggagcaaagcacacgcccaggggcgagcacagcagggaagaccggcccacaacccccagcacccacggcgcgagcacacaaggacaaggacagggaggcggagaaacacgcaccaaaaaaaccagcccccccaggcagcagaggaagccagaaaaga

SEQ ID NO: 424 - RNA, 3091 nt, Homo sapiens
gccacaaggaacacgcggcgagggaggaagcaaaaacccgcgcgcacaccccacccgcgcaggaccacgacagcggaaaggccagggggcagaacaccacagaaaggcaaagacacaggacccccagagagccgggcacaacagcacaccaaaaaccaggccacaggggcaccaccacaccccccagagaggccaaaggcaaacgcaaagagggagccaagcgagccagagggcccaccaacagcgggaggcggaagcagagcgggggacagccaagcgagacaaggacagcagcccaggagagccaggcacagccagaagcccgccagggcagggcaggaccagccaggagggacagaggaaggggacgggaggaagagccgggccgaccgacacagggcggagaggcccagaagaaacaggacagggcagacgccagcggggccggcaccacacggccgggggggacagggaggcacagacgaccccccacccccaggagaagggccaacaccgcaggcccccagccccaggccggcgagcaagcaggagggagcgagagggcaggcggggaaggcaggcggcaacacagccgggggaaaagagaaacaacaacaacaagaagacaaaaaaaaagaaaaaacgaggaaacagaacaccccgagaacacagacacgggggaccaaggagaaggagagagcggggagcaggggcagcgcagagaaaaaaaaggaagaaaaacacgcagggcgccaacgccaggggcgagaaacaaggcagacccacccccacaccacggacaccccagacagcagccggcaggaacaggagaagaacagcgacacaccagccgggcaagcaagaacacagggggaaggaggcagcgccacagacaacaacagacaagcggcagaggcgcgcaggcacggagcaagagcacaaagacgcaaggggaaaaagggagagagccgggggcggcaaaaagcagaagggagagcaccaccccgcagcagcagacccgcacagcaaaaagggggaagcaaaaagggggcgaaaaagcacaggaaggaaaggcggccagaagcaagcgggcacggaaccgggacccagaagccgcacccacgagcgcgagcccggcccaggagaaggggcaaagaccgaccagcgcccaggcaccgccaagggcccgggaagcagggcaggaagggagacgcacacggagccaagacagccagcccaggacaagaagggggaaggagagcccagggccagcacacggggaggcaaaagaaggcggaaccacacgcagaagggcgagaaaagcgagggcacagaagaaaaggaacgagaaacggagaacgcgcagcaggaagggagccgggcggagcccggagggggcgcaccgcagggagcacggccagaagagggagaggcacaggggggccggccccacaagccaggggcccgggggccgggaggggcagagacaagccaggggcccgggggccgggaggggcagagaggcagaagccgccgggggcaggcccccaccacaccgccaacggcagacgagagccagaagccccccacgggcggcagcaagcggcagcccagaaggaaggggagaaagccagaacccaccaaagcccaaagcagaggcccgggccacggcagcgaggggaggaaagaaaccggcccaaaacagggaagaccccgaacaaaagacaggaacaggagaaaaacaaaaagaagagacagaaaaagcacaggaacaaacagaagagacaggaaaagcacaggaagaaccagggagagagccgaaccagcagacagaccaacaaagaacagcaaaagagaaggacaaggaaaaggaaaaggaaaaggaccgaagaggcccggagcccgcgggcagggaggagcagggggggggggaagaaaaaaaaaaaaaaagcagaaaaggacgagccagggggcagcaacggggagaagcaaacaacggcagaggaaggcgccgggaggcgcccaggggccccagaccacccaggcgacaggggaaagcccgggaaccgccccggggaagggggacaggacaccgcggccccgcaggcaaaagagcgagggcagagagccccgcacgcaaggcccagccaacaaccagcaaggggggcaaccccccaagcacacagaaacgccaagaaaacacgacccaaccagaaaggagggaagcacgcccagaggggcgagaggccgggagagggaaggggccaccgcccagggggcccacccgccccggagggagaggggcggggcccgggacaaggcagggaaaaggggagggcggcgggggaggaagcgcccgggcccaggccagaccacccagaagaaaggagccccaggacccaggcccccaggaaagacagcgaaggcagacacaggcccgcggggaagaccgccccccaacaaggcaaagcaagcagggcaaggcccgaagggaacagcggagcaggcccaaccccaggggcccggggccggggacccggaagcaagcaggcagggagccaggaaggggaccacaagcagggagagagaccagggaggcccccaggggaaccccccccccagagcacccggcccaacaccgccgaccagcagcccaacacaccggccaacagcagcagccaggcgccgcgccagacgacccaaaacaccaaggggaggagcagaaagaccggaaaaccggagagaaaacgggccaaggcccccaggagacggcaaacagaacagcccagacgccagggacacaaaccaccagccgcgccccaaaacgacagaagagccagacccagcagagaggacacggcagggaagagagcaaagcagggcaaggcaaaccacggccccgaaaacgacacacaaccagggcaaagccggacgacagcaaagaacgcggagcagaggacacgaccagagcgacaaaaagcagaagagacggagcaacaagcccgggacccaggcggccgcagaaccaagcaacccggccaggcaggcgcacagaagggccacagaagagaacacacaagccacagaacag

SEQ ID NO: 425 - RNA, 4459 nt, Homo sapiens
aaagacagaaaacgcagagcagagaagcacaagaccaaaaagaacacacaggacagcacacagacaagaaacagacggggccaaaccagcacccagaagcccccaccccgccccaccccacaccagaaaaccacacgacaaagcagaaaagcgaaaaacagaaaggaaaacacacagacggccgaaacccggaacacaccaccaccaagcgccggggcaggcaaaacagaagagcgcaaaaaagaggagaaggaaagggaaaaaaaaaaaggaaaagaaagggaagcaaagagccaaaaccaaaggcgcaacagaaaaaaccggaccacaacaaaaaaacagggcaaagcaaaagagcaggacaaacacgagcaaaaagaccacccccacaacacagcgggaaaacgcccccccagccacccaaccccagagccacaaaccagccacaacccagccgccgccgaaaaaacaaaaaacagaaaagaaacccacagaaaagaagcaacccaaccagggagagaaaaagcaaaaaaaacgcgaagaggacgaccgacagaacaaaaaaaaagcaaaaccaaagaaacggaaaaagaacaaaaaagaaaacagcccccaacaaaggaaacaaggaaaacgcagcaacaacacacagacaaccaagagggcagacacagcaagacaaagaaagcaaacaaacaaagaaagaaaagaaaaaaggaaaggaagaaaggccccacaagaagaagacagcaaagaaaagaccaaaggacgaaccccggggcagcgaaagaaaaacaaccaaaaaaaacacagaagaaacaagcccaaaaagaagcagaagggcgaggaccccacagcccacaaaacaaaacaagacaggacgcacagcccaagccagcacaaacacaaaagcgcagcagacaggaagcagagcgagaggcaagggcgaagaaacaagaagaccgaagaacagacggaaaggagaaggaagaaagacaggaagcagagaaacaaccagaggcaaaccaagccaaaccagggagcaccagaacaaacgcgccacagaggcaggcggggcaacagcacagaggagggccacaagagggagagacgggagggccagccggcagcgaagcgacccgacgcggaggccccgacgccccggaggggcacgaaggccaccagcgacagccgaggacagagcaaaaaaaagaaaggcaagaagcgaggggacaaacaaacaaaaagaaaaacagagcaaccagggaagcccaggaaacggcaggacgcgcgaagagaggacacgaggcacacagaggaggaaacgccagcacaagaacaaacgcggaggaaaaaccgccggccgaagggggaccccaaggaacggaggaggcaccaccggcaaggacagacacaaagaaggcaaagaaggcgaaggaacaccccggggcagcacgggaacggcagcagggcaaaaccaccaccccggagaaagggggccaaagaccaccccaaaaggagcagaaagaagaagacaaaaggacgaaccaaacacaaaaagaaggcggaagacccaggacagccccggacacaacgaagcaaaagaacgaagcaaaagcaaccccaccaaaggcaaaccgaaaaaagaaaaaagagaacacgggaaggggcggccccaccaaaccacgaagagcccaaacccacagcaggggaaggaccgggggaggaacgaacagggggggacccccagagcagaaggaggagaccacaagacgaggaaaagggccccccgccagcaccccccgccgccaggaagaaggagggcccccccaccagagaagccgaggcccccagcaagggaacggagcaaaaacccagaagcccagcgggcagcaaagcaccagaaaaggacaaaacgaaccacaggcaaagaaggaggacaggccagcccaagaaaacacacaacccagaaaaccaagaagagaacaaaaccacccaaaagcgagaaccagcaaaaaaaaggacaaacgcaggggcaaagacaggaaaagacacccagacaaccacaaacaaacccacgaaaaacgacaacgaaaagaaacaaaagaccgacaagccagaacaacaaaaaaaaaaaaaacagccccagccagcagaaggaaccaggcggcccagcacaaagagcgaccaaaacgacaccaccaaaaaacagaaaaagcagggaacaggagcagggaccgagaaaccacacccccccggggaaagcaagcaaccagcaaagaggaagagaaagcgacaggaacgcaagaaaaacagaacaagaaacgcacacagaaaggagcaaagagcggaagaagaggaagagcaaccagaaacaaaaaaagccacaaaaacgcaagaggaaagaagagaaaaaaaaagaaagagaaaaaaaccaaaaaaaacaaaaaaaaaaagcaccagacaaaaaaaaaaagagcaacaaaacagaaaacacaccaagcaccaaaaaaagaggacccggagaacccaaccagaccacagaccaaccgcaagacgaaaaaaacgaagcaaagagaggccaccccccccacccaacaagaccagaacccacaaacccaacccacacaacaaaaagcaaaaaccaaagaaacaaaaaaggaagacacagcaggcagaaacacagaaaaggccacaagacaacaagcaaagaaaaaaaacccaagaagcaaaaagcacgaaggcggagaaaaaggacaaagacaggggcccagacaaaaaacccacgcacacgcacagaaaaaaaagaccaagcacagcaacacgcagcacccaaaacagagcacagacaaagcagaaaacaaaaaaaaggaggaaaagcaagccaccaacacgaaaacgcccaaaaaaggaagaggaaaaaaacaaggagcaaaaaaaacacaacaaaggacacccacagacaaagggaccaacccaggaaaggcgggcacaccccacccaccccacaacacagacaaaagaaacaccaagggggaaggcagcaagcacaaaaccccaccaccgcacaggaaacggacgaaaaccagacagggcaccgcagagcagcacgagaacaggaacaggcgagagggaacggacagacaggaagaaacagcagaggggagaggaccccaagaagagcacagacacaagggcaaaaaacaccaccaacaagaaagaagcaccaaaaccggagacaaaggcacggaaacacagagagagaaaaacaaacaacaagcaaaaagagggaaggcgaagggcgaagaaaaaaggcgcgggagaaaaagagaagaaacagaaaaaggaaagcagaaacacacagagcagaaaacacggaaggggagaacagcaaaggaaacgcgggaaacaacccaaaggagcagggaaaaacaaaaaagcaacaaaaaccggcaaagaagacgcgcaggaaaacgggacagaggcacgaggaaccagacgggcaacacaaaagagaagagaagaagagagacgccgggcagacgacaccacaggagcgaccagaggagcgaccccgacccagccgaaaagaggagaacagcaccacccaggaaggagagaaaaaaaaagagaacaggccggcaaaggaagcaagacaaaacgcggcagaagcggaaaacaggggagacacgggagacacaaggaaccagagaagaaagcacaggcagggaccagagaaagcaagaaaagacgaaaaaaaagcacggagacacgagagaaaccacaggaagccagacaaaaaaacacgcaacaaaaaaacaaaaaagcagacacagagagcaggagacccaaaccaggcaaaccaaacagccagaaaaagacaaaaaacaaaaaccccacagacaaccgagacgagaaaaaacaaaagaagggaaggaaagacgaaaagaagagcccggaacagaggacgccagaacaagggaagaagagacagcagcgccggaacagcgcagcacaccgagaacgaggcagcaagaacagaggagcacacagcccacgcccgcccagaaagccagacggaaaagccagaaaaaccaaaaaaccagaaaccgaaacacccagaaaaacagaaccgcagaaaaacacaggcccaaaggcaacgcaaccaaaaaaaacgagcaaaccaagcgaggcagcaaaaaggcgcagcaagacacaagcaacagcccaccgcccacggaggcaggcacccgagggcgagagcacaggccgcgccccacccccggaaagagcggcagcagagaccagacaggcccaaggcagaaggacgagcaaagcccccggaccagaaggcaccggagagagaaaccaagaaggagggagcgccaaccagcagcccccagaggcagccaacccagcacccaaagacaagaccaccacaggaagaagcgaaccacca

SEQ ID NO: 426 - RNA, 23973 nt, Homo sapiens
agaggcagaaacagagaacgacagaaaaaaccaggacgacacaaaaaagacaagcaaggcaaaggagggcaccagacaaacagacaaaacaagcacacagccagaccgcccagcagcacacagaccccaaacagcggacagggaagacagagcaagaaagaagccgcaacacaaagcaagaaaaaaacacgaaccagaaacaaacgacccaaaaagaaaacacgaaaacgaaagaaagcaaaaaaaaaaaaggaagcaggcaaaagacaaagacccaaaacaggaagagcaaacaaacaaacaggccacgaaacaaaaaaaagaaaagcaagccggaaagacaggaagaggaaaaagcaaacacggagcgaagcgcagagaacacgaaccacgaaggcagacaccacggaagagggcgagaaaagcgcaaacacgccagcagggccaacagcccacgaccggggggagacaaagcaaaaccacccagagccacccaaaacaaaaaaaaccaggaaacacaaaaagaacaacacgaaagaccccagcaacaaaggccagcacgcggagaaacagaaaagaaaaccaaaaagcagggagacacacacaacgcgcaaacaacccgcaaagcagcacggaagcaggaagacgcagccaaaaaaaagacagaaggccccaaaaaagcccaaaagcaacaagcgaagaacaaaaaaaacaaaaacaaaacaaaacaaaaccaacaacacacccaagaaaggaacccccagacacagagaagaaggcacggggaagcccccacgggaggagaggcgacagcccccaacaaggcgagggagcagaaaacggcagaacacgccggcaagcagcagaggaacacgcgagaacgccacacacggacagaaacgaaaacaaaaacaagggagcgccggaacgacaagaacagacgcgagagccccccacaaaacaaggggcggaagcccacagcccccggcagggcagcccacgggacaaaaacaaaaagaaaacgaaaaacaaacgccaaacccggaccacccggaagcagcacgccacagggaggacagaaaggcagcccaagacaggagagcagagacacgagcgaaaagaaaaaaggcggcaaggaagaccacaaaacacacacgagaagaaaacaagcgaaaggaaaaagagaacacccccccaaagcccccccccacccccacacccaaacaggacaaaagagggccagacaaaaaaaaagaaccgccaaagccaacccaaacacccagagaaagcagcccacacgggccgggggacgaaacacgcaggaccgcacggaaccaacaagcagcgcacggaccacaaaaggccgaggaccgcgcccagacacacagcgcaggggcacacaggaggccggggacccccgccacggaaaccggcaccgaacgaggaggacgggcggaggaagccagaaaaccagaaccacccaaggacggggcaccccagcagcgagggaacgcgccaaaaggaaaagaagaagaaaaaaagacacggccacaaaagaaggccaagaaaacaccaacgagaaaacccagcaagaaaacaaaacaaaacaaaacgcaaacagcacaagagaagccccaccgggaacaagggaaagaggcagggaccgccggggcccacaacagagccacagagccaaacacagcagccagaccaaaagaaaacgcaagcagccgggcgaaacaggcgagcgccaagaacccgacaggacaccgggaaaagccagacagaccaccgaaaaagaaaggagggaagagcagagaccccaggagaacagagcaaccggagccagaaagggcccccaacccacagcaggaccgggcacaaaacgagaccgagaaagaaacagacacgccagagggagcaggggaaaaccgagccggaagcagagcgaggcagggaggcagacagaggcgacaaaagaaaaaacgcaggggaacacgcgaacaagaagaaaaagaagggccagccagggcacgcggcgggaggaagaccccgaacccaggccgagcccgggggggaacacagaaccacgcccccccagggcgcagagagaaaaacagacacacaacaagccgaaacagacacaaaggcaagagaaagggagaacaaaacccacaccgccccagaaaacccaaccggacacacccgaacggcccagcaaggaaggccgcacggcccaggggcaaaccccaacaaggaaagggaaccaccaaaccaagccagaagaaaccccgcggccagaggggacagggacgaggacacgggccagacaagccccccccaggagaaggacaaaacaaccccaaccaggaggccaacgaaaccccaagggacagaacaaaggaagagacccacagcggcgcccaagccggcaaccaaaagacaacgcacacaccagcaacagaggggagcaccgcgcccaaacaggacaccccgcagagcaaaccaacgcacggacacccaaaaccagaacgaccagcccacaaccccgacacggaaccaaacccccacaagagaggacgaaccaacaagacagaaacccagggcccgaagcgagaggagccccaaaaccacacccagaaccgaggcacacagcaagccccccaaaaaccccaaaagcacagaaaaaaacgcaaaacaaagggacaaaaacccacaacgcgacacgaggcgacaaaaaaagcaagaggagcacgcacccaggcggaggcagggcagacggcacgcaacccacccccagggagcaaccggccagcccccaagagcgggaacaggacggccaccagccggcaagaagagagacggggcaccagcggccaggcagcgaacccgacccagggaccacccacaggcccccaaaggcgggaacaggcggggccacgcggccggccacgaaaaaagcagccaaaaaaaaagaaacaagcgccaagaaccaacagaaaacccaaggaaagacgcgagacgacaagggacaacccaggagaccaggagaacaaggaccccaaaaaaaaacaggcagcaaaacacaccgagacgaacacccaaaagagcgcagcccgagacccgagggaagaacccaggccaccacaagcaggaacgagaccgcaaaccagacagaagaacaacaagcaagacacaacaaagcaaagggcgaaaccagaaccaagcgagaaaacagcaaacagaagccagccaaacaagcacgcaaaaaggcgggaaaagcgaaaaaaaacccacaggacagaggccacgacacagaggagcgacgcgaaacaaccacaacacgcgagcccaaaaggaacagaaaggaagagaaacagacaaaacgaacaagcaagcaagcaagaaaagagcgaaaaggcaaggaagaacaccagcaacagcaagacccaacaacaacaccgggcaaggcccacgaaacgggggaagaggcgacaaaaaaaaaaaaaaaaagaaggaaaggggaaaaggaagggcaagcggaagaggaagaggaaggggaagaggaaggggaaggaaagaaaaaaaaagaaggagggaggaaggggaaagggaaggagaagggaggaaggaagggaacaggaagagaaccgaaggcacaccaaaggacacaagagagcgagggagggagaccagaaacaggagaccacccgccagagccaggcaggggggcagcggcagcgcacacacacacagcacacacggcaccagagcaagcacaacggcaggccaccagccgcccgaggaaacaaccgccaacggccgcccccacggaaagcgagaacgggcgggggccagcgggcacaggccggggcccccaggcccgccccacagaccgcgcagacaccccccaccccaggaggcgaggcgaccagggacccgggagcggaagcgccgcgggaaaacagaaaaccagcagaaacaaccgcggagggcaaaagggcagcgaggaaaaggcggagcacacccagaggacccagagacaggaccgccagccgcagcagagggagggaacaacagagaccaagaagcacagacaagaaaggggaaaaaagggacggaaacccaagacaacagagagaaagaaggcaagacagaagccacgccgaacgagccaaaaccccaagagcggggagaacgccacacaacaaaaggccccaggcaagggcaaagaaacacggcaagggccaggagggcccgagcacacacagccagacaccaaacaccaagagcgggccccgggaaaccaccacggcaacacgaaccaccacccaccgacagccacccaccacaggacacccccaccccaggaagaagaaagcggaaaacacccagagacaaaccaggaagagagaaacgccaacaaccaaagaacgaagaccccacccgaaaacagccggcaccgaccaggggaaaaaaacacaccaacaacaacacaacacgacacccaaccaaaagacaaaccaggcccgaagagagaccagcaaaaaaggaacggcaagagaagcaaagaaaaaaggcgcacccgaaacacaagaaggaagagacgaacacagcgaaggcaaaaccaaaaagaaaacaaaagaccacgggccagaacacaagacagaacaccacacaccagcgcgcacaggaacaaaaaaaagaaacacgaaccagaagcacacgccaacacacgacaccgcccagacggcggaggaaaccaccacagacgaccacgagagagagcaaaaaaaccaacaaacaaaaacacagcagagagagaggccaggacagcggcaggaccacccgcaccccgcgcgcggacagagacacaacggggaacagccccggccaccaccaaagcccgcagagggcaaaacccccccccccacacaagagcaacagaagcaaagaaggagagagcgcagaaaagcccacccaaacgccaacgaccccccgaaagagagaaaggaggaaagaaaacaaacacagaaaacaggaaagacaaggaggaaagcccgaaaaggaacaagcccaacaagacagcacacggagcgggcaccagacgcaacacaacagaaaacgaaggggcacaagccagaacagggaaaaaggcaagcccagccaaaaaacaggcagcacggcacacagcgaccaccaaccccaaacccgacaagggggacaggccccaagacacgagcaaaaccaggaaacaccgggcgggcagccgcccagggaggccccggccccgcagaggggcacggccaccacgagggccccaggcacggcggggacaggggcccacaggccgggagcaacacggaccacccagaggccaaacaggagaggaaagagccacacagccaagcgaaaggaggacaaaacgagacgacaaaagaaacgaacaccaaaaaaaagacagagcaaaggaccgaaagcaaggaaaccccagagccaaacaacgacaggacaccaggcccagcagccagaaacacagaaacaagggaaaagaccaggcaggagcaacgagaaaaaaaacccgaaaagacccagacacaaagcaagacaccaagaacagaaaaaaaaaaaaaggaagggggagaaacaaaagccagagacaggaaaaacggacgaaccaaaggaaaaaaaacaacaaaaggaaaaaggaagaaaagccccagacaaacaggggcaaaacgcccgcgcccccgagaaagacgaaaacaccagagccacacccacgacaaaaaacacagaagcgagaaaaaaaaccgaaacaaggcaacgagaagacacaaacaaaaaggagagacaacaggccacaggcggaagaaaaggaccccccaacccgaaccgcacaaagaccggcaacaccaaaacaggaaaacaggccccaaacaccacgcacccaaccccacacacaacccaacaggagccgaaaaacaggcacggcacagcagaggaacacagaagacacggccgaggagaaaaacccgccaggcagaaggagcacgcaggcaagaagcccacgccccgcagcagccgccaagccaaggagaaacagacgagaccgcacaaacaccgagaacaaaaagccaagaagcgggggaccccaaaagaaagagacccagaaaacccagaccaggaagcacgaacaacgcgaagcccccgccagcgggaagaacagggcccaacccccagaacacccccgcccccgggacaagagaggggggacagggcaggagcagagacaccgcaacgcaccggggccccagaggcaacccacaggaaccacagccaaaaacccccgaaggacaaaacagcagcagcagcacaagacaggaagccggagcgagagggggcccaggggcccgccagcgagcccaggcccgccccacccccgccccagcagccagcagccgcggcaggccagaaagcaaggaaaagaagcgaaaaccccagggcagccaccacaggcagaaagccaaaaagcaaaagagaacaaagcaaaacagaacgaagcaggacgcggagacccagaagaaaagaaaacccccagcccacggagaggacgccaagcagaggcagaaagaaggccagacggcgccgccgcaaaaaagagggcacagccggccacgcaacaaggcgccacaccaaagcagagggagcagcggacagagacgcaggcaagaaccaaaccacaccgacccacagaaggaacccaaggagcacagaacaggcaaccacaaggaagacaagcgaagaaaaacaggcaaagcagaaaaacaccaaaccacgggaacgggaaacaagaacccgaaaaacgcaagcacgacagaaagcaaacacacaaaaaccacacaccgacagacccacgaaaaagaggacacacacacaaaacaagaagccagcacacggaagaaccagcaccgcacagacagcaaacacaaaaggccaaaaacaacagcaaaacaccacacagcacccaacagaagaaaggaaagagacacaaccaaagggccaaaccccgggcagagaaggaagaagcaagccgcccaagagagggccaaggaaaagggcaaaaacgcaaaagccaagaacgacgaaccccagacaacacagaacgaggcacaacaaaaaaaagacaccaaacaagaagaacagaaaaaaaaccaaaagcgccaaaaagagaagagaaaaaacacaaaaccacccagaagccggaaacacaacggacccacaaaagcaaaaacgaggaaacccccccccggcaaacacaggaaaggacagcgccccagggacaaaccacacaaaaaagccccaagaacaccacgagccaacgagccacacagagcaagggaagggcaaaccacagcacgaagcgcaggcccgcagagacaaaggcccacccaacggccaacaaaaacaccgcccccgggagccaggaagacccagcccccaccgacaaacacagccacccacgacccaggaacaggggaaaggcgcgcgccacaccagagccgggccccagggcagcacaggaaccaccaccagcggaaccacagcagccaagcgcccccagaagagggggcacaccccccacccgaaccccagggagcacagggaaccgcaaagagacagaaaaaaaaaaaaaaaccaaaaagcgagccacaaaagaagcacagcacagcacaacggcagggggccccgcggcacccaaaaagaacagaaccacagcggccaacacagaccaagaccaggcagcccggcgccagggaaagacaggccccccacccagcggcaagggagagccacaggggccaggcagcacacagcccccgcaaaagacggaagaaccacgaacaaccacaacgcaagcagcaaaaaacaacgccgaagcacaaaaacaaggcaaagcccaaaaaaaagaacaaacgaaggacagaagggaacagaagagaagcgggggaaccaggccaaaagcgcaaagaggccgccagcgcccagccgaggacaggacaaaagcccgggaaggggcccacagcacaccaggcagcgcccacagagaacagaacccgccacgcacacagccaagcacacacaagcacacaacaggcgggcccgccggccaggccacgggggacagcacccccccgccaacaaaaagggcccaaaagcaggccgacaaagcccgccacaaagacagagaacacaacaaagcacaagaaacagaagcaaaaggaaaacgccaagcaccaacaaaaagcaacggagaagcaaaaaaaaagacagcagcagcgacaccagccgcccaaggagggagacagaggaaaccacacggccccccccaacaagcagagaacccagcccaaccacccgacccaacccccaccaagcagagaacccagcccaccacccgacccaacccccaccaagcagagaacccagcccaaccacccgacccaacccccaccaagcagagaacccagcccaccaccggaccaacccccaccaagcagagaacccagcccaccacccgacccaacccccaccaagcagagaacccagccccccaccggcccaacccccaccaagcagagaacccagcccaccacggcccccccccaccaagcagagaacccagcccaaccacccgacccgacccccaccaagcagagaacccagcccaccacccgacccaacccccaccaagcagagaacccagcccaccaccggcccaacccccaccaagcagagaacccagcccaccaccggcccccccccaccaagcagagaacccagcccaccacccggcccgacccccaccaagcagagaacccagcccaccacccggcccgacccccaccaagcagagaacccagcccaccacccgacccaacccccaccaagcagagaacccagcccaccaccggcccgacccccaccaagcagagaacccagcccaaccacccgacccgacccccaccaagcagagaacccagcccaccacccgacccaacccccaccaaacagagaacccagcccaccacccggcccgacccccaccaagcagagaacccagcccaccacccgacccaacccccaccaagcagagaacccagcccaaccacccgacccgacccccaccaagcagagaacccagcccaaccacccgacccgacccccaccaagcagagaacccagcccaccacccggcccgacccccaccaagcagagaacccagcccaccacccgacccgacccccaccaagcagagaacccagcccaccaccggcccaacccccaccaagcagagaacccagcccaccacccggcccgacccccaccaagcagagaacccagcccaccacccgacccaacccccaccaaacagagaacccagcccaccacccggcccgacccccaccaagcagagaacccagcccaccacccgacccaacccccaccaagcagagaacccagcccaccaccggccgacccccgcaggacccacggcacgaaacaggcacaagcaacagacgcacagccccagccaaaagccaaaggcaaaagaccaaaaacaagcaagcagaggaaacaacacagcccggagaaccaaaaggcaaagacgagacaccaagccagggcgggaggagcccacacaccagaggacccagacgcgaaagcggcagggacaggagggaggggagaggggcagccagaaacggggccccaaccccggagggccagcaggggcccgagcaccagcagggacagaggaggacaggccccgcccgccccaggcccagggacagaggccagaggcggcaggcagggcacccggcccgccaggcgggccacaccgggaagggccacaaacacgccgcccccccccgccagcaaggagaaggagggggaaggagaaaaacccagcaacaaaagaccacccaaagccagaagggaaaggggagaacgacaaaagaaaagaaaacaccacacgaaaaggaagggacgggggagacacagcacaccggcccaaggcggccgagccgaaggccaagaaggacaagagagagaaccaaccaccgagaaccaagggacaaaacgaggacaagcagagcgacagaaagacagagcgccgggacagacaagcccccccagagagcacacgcaggaaccacggaaaacagccgaccaccgagaggagccgccggcccaggcggagcgcaggggcaaccggccgcgcaaccccgccacgggccagcgacccgcccagccccaagcagcgggacacaggcagcgccaccacaccagcaacaagagagaagggcacaaggccaggaggccaaacccgacgaaccaccagccggccccaaaggcgggacacaggcggagccaccggccggcccagggaccaaaacacagacagagaaacaaaaagaaacagaaaaaagaccccagcagagaagaggaccaacaaacacggaaaacagcaacacagcaagcagaaacaagaaaggccccaccaagcacaacaggaaaacaagcaaaggagccaaacgaagaagaccaaagccaaccacaaaaaagcaggcacaaaaacgcacacagggcggagcccaaaaacagcaccccaccagcaggcaagaggacacagggcacccgacacaccagccccaccccccaagccacgccccagcaaaacccagcccggccccggaagccaggaccagaaacaaaggaaaaacaggaaaaaccgcacacaaccaaacaccaaaagcgaagaggaaagaggaaagccgaggagcaggccagaaccaaagcacggggcacccgcccaaggcagagcgaaaaagcggacagcagcgcagagggaaagaccgcaaagacggcgggaccagaagaacagaacaggcaggagccaggcgccaggaccacacccccacagacgggaaagcccaacagcaggagccaggccaacggcggggcaggcaaacaggccaccaccaggcccagaccaaaaaaacagggaaacaacaagaccaacccacgcaaggagggacaaaccaaaagcagaaaaaggacgcacaaacgaagcagaaaaggcagcaccagaacaaacggcggcagaccgaagcacgcccagagccccaacccaaggacccagcgccaccacagacaccaggccaaaaaacgaggaagaaacgaggacgaaccaccaagaaccaccaccacccagggaaccaccaccagagaggaagaggcacagagaaagaaaagccgcaaagcccaaggaccacccccacacacggacaggggcaacacagagcacggcggccgggccaaccccggcccacaccccccaccccgagccagccccagccagccacacggccccccgcggaacaaccgggcaaccgcgccccagagccgcacgcgcaccccgccacggacccccaacacgaagaccggcccccgacccagggcggccaaacccccccccccccccgccagcagagcacaccaccgaggccacccaaagcacaccaaaaagacccaggcaaaggcagacagccacgaagaccgcccaccgacagcgaaaaaccaaacgcccagccaccaagccaaaggagaagagagaagcaagcaacaagcacgaagaaaacagcagaaaaacaggaaacaaaaaaaaagggagaccaccagccacgcccgcccccaaccaccccaagcaacccaaagaaagccaccgaaaacgcaaaaggggcaaaagggagaagggaggagaccacggacaaccccccacagcccacgggggggacggagcccccaacccaagggacccccgccacacggccaccaccaggagggcagggaggccaagagcggcaagcagcccgagccgggggggcgggcggcaggaaaggagggggcccgaacaggcagggagccaagaaagaaggacaaacccaacgcagccggggcgccacaaaaaggagccaagaaaccgacaaggggaagcggaaacaccaacaacaaagacgagcacagaagaagaccaggagagcggaggcaaggccgccaagagccagggcaagcgacacaggaacgggaagcagcagaacaaagcacacagagaagaaaacacaaacacacccacgagcaccccaggcacgcagggggaagggggaaacacgagggcccagcggaagggaccagacggaagccagcaaggaaccacgcgcagcagagacacccggaaacacccaccggccagccaagagccgcggggggacacagaaaaggacagaggggcgcccagaaaagggcccgggggagcgccaaggaccgaaggcaccagggaacagaggccaggccacaccgcaccccaggacacaccggcgacacacgcgaacccaaacagaggcaaaaacaacggcgcgggaaaggcgaagacccaggacaaacagcccagcgaaccggacagacaagaccacacagagaaggacacccagacgcaagaaccaaaagccccgcgggaaaacggacacagcaggaacaccgaacaggaacacgaaagcaagcgcaaaaacagaagacggcaaacgaaccaaggggcccacggaccacgaaaccacgccccaaacaccaaaagcccacagagaagcacaaaaccaggagaaaccaaaaaaacgcagaacaaaaaccaacaagcgcacaagaagcaaacaggagaacaaaagggggagccgacagacagcagcaaaaaaaaccgcccagccagcaaaaaagagcgaaacgcaaaaaaaaaacaaccggaaaaacaaaagagaaaaagagaggacgcaacaacacagcaaagcaaccaaaaaccaggaacaacaagagagcacgacaacaaagagacaagccagcacaccaccgaaaagaacggaagagggagggagcaggagcgcagcgagaaaacgaagggcagcaggaagacaaaaaaaggaaaccacacaaccagaaaaaacgaagcaaagcacagaaaaaaagcaccaaagggggggaagaaacgaccacaagaccacccaggaacgcgcgggaagcagaagcccgcaagccacagaaacagggcccagaccccacgaccccaaacagaaacagccgccaaacaccaaccacgacgcaaccgcagcgggagcaaaggaaggcaggaaaagaaagaaacggccaccaaaacccccgccacaaccccaaccaccacgggagggaagcccgaacaaagaaaggagggcagagaggccacccggcagcgcgggcccaggcagcgcagggcagcaggggagggggccacgagagacgggacgggggcggccgccgcagacccgggaacacgggcagaggcccgaccagcccacggggcaagcacggagcgggcaggagggcacgcccccaggcccgcagaaggcaaaagcccagaggcacccaaaccgcggggaaaaggccggccgacagaagacccccagaccacacgcgcacagccgacaaaggggggccaacaaacccacacgcaacacagggcgcccgaacgggcccaaccggaagaaggccgaacccacgcccggaagcaaaacgcccgcgccaccagccaggcccaaccaccgcggggggcacggcgccaccgggggggcggccaggaaggaggacgccgagcgagaggccgacagcgcacaaagcaaacacgcacgcccacaagagccaggccacagagccaacagagacggagccgccgcggccaggccggacgcggacgcagggcgcgaccggccacgcaagcccgccccgggcacgccacccgcccagcccccgagagcgggacacaggcgcccgccaccgcacccggcaagaagagagacggggcaccgagccaggaggccgacccgacccagaccacccgcccggcccccaaaggcgggaacaggcggagccaccgcgcccggccgccaacaaaagggaaacaagaaagggcaaaggccgcgaaaggaggaacccacgcaagaaaaggcagccggaaaaaagagaaaacaaccaaaaaaaccagcaaagaccgagaaaaaaaaaaagaaaaaaacaagggcgaaaaaaaaaaggcacgacaaaaaccaaccccagaagaaaccaccagcaacaacgaagagaggccaggcaaacaaagaagcaaaaaaccaaaaaggaagaccacagaaaaagaaggacaccaaaggggaaaagaacacaagaacaagcaccgcagagacacagagagcaggaccgaagcacccgcgaccacacggcaccgcccaggcgaaccgacacagagccgcccaacgcagaaacaggcccgacacgggggccagaaacaaaacgcccgaaaagaaaacagaccaaaagccaaaccccccaccagagacaccgccacaagcagaacagccaaccgaaaacgcgccaaaggaacgcaccacggccagggcagcaggagaagaaagacaaaagccaaagaaaaagacaaacaccacaaaacaaggcaaagagcaaggcgaccgggagaaagacacaagaacaaagaaccaacgagaggcaggacacacccacccgagaacacaaacaaccaccacaagaacaggaccgacaagacccggacccacacagcccgcacaaccaaaaacaagacacacaacggccaaccccccagaacacccgaacgagcaccaccgaggcaagagaagagaggggcggggggggaggacaccaagacaaacaggcaccaagaggaagaaagacagccagagcaacaagccacggacacacagaggccaggaagcagacggagccccagaacagaccacaccaacgaggcaacaaaacacagaacacacagccgaaaaagacaaaacaaaccccaaaccggaggagaaaaacgacaaaaaagagcgcccaccagccccccaaggccccaccgaagaacccagggaagaaaaagggggagagaaacacacccagcaaaaaaacaaaggcgaggcaagggcaggaaaaaccaagaaagcaagagccccaagcagacaaagacaagagaacgggcagggaaccaagagagagggaacccgacaccccccggccagagacggagcaagcacggcccccacacgaggcgaccaaagaaggggcaggggcgccagccaaggaggaaaaaccaagaaaggaaaagcaccacaaaagggaagaaaaacacccgaaacacaaccaaccccaagagaagagggcaggcagaccgcaaagacagaaaaggacacgcagcacaaccaaaagaccaaaaccaggccaggcaccaagggggaacgacacaacggaggccaaagagacaaagccaagaagcaacagaaagcacgacaacaaaaaaagaaagcaaaacagcaaaaccgagacgaacaccggccaggcggagacaggcgcgaccagccacgcaacccgcccccggcaaggacccgcccagccccgagagcgggacacagggcagcaccaggcggcaagaagagagaggggcccagggccaggcggcgaacccgacccagagaccacccacccggcccccaaagcgcgggaacaggcagagccaccaagccaccaagaagaacacaacaaaacaaaggaaaggaacaaaacacacagaaaaggagaaagaacaaaacacaagaaagaacaacaaaacgagcagaaaacaagaaacaaccacaccgaaaacgaccaagagacaacgaagggaaaagagcagagacagcaagaaaagcaacagaacaaagaacacacaaaccgaacagaggagaaaaaacaaccagccccggagcagacggagagaaaggaaacacacacacacacacacacacacacacacacacacacacacacaccagccccaaaaggcggaaaaccgaaccaaaagaaaaaaagaccagcaaggccgggcgcagggcagccgcaacccagcacgagaggcgaggcgggaagacacggggcaggagacgagaccagccggcaacacgggaaacccaccacaaaaaacaaaaaaagcagggcaggggcagcacccagcccagcaccaggaggcggaggcaggagaacgcgaacccgggaggggacggcaggagccgagacacaccacgcacccagacgaggaagaggagacccgccaaaaaaaaaaaaagaaaaaaacccagcaacaggggcaagcgggacagacaaaaaaaacggggcaaaaagacaaaaccaaacagaaaaacacagaagcaaggaaaaaaaccggaaagaacaaagacaaagaaaacggacagagccaaggccaccacccacaagacaggcggacacaaaaaggaccaacaaacagaccagcaaagaaaaaacagaaccaccaaagacaacagaaacagaacccaaagaaccaacacagaacagaagaacacaagaaaaagcaaacacacagaagcacgcaagcaccacagagcaaaagggaacaacaaacccaacccacacaacccaccagcagaagcacccagaagaagccgagcacgaaagaaagaaacagagcaacacaaccccacacccccagccaaagagacacagccagaaaagcagcacgaaccggacaaaacaccgaaagagcagaaaaccacgcagcgaagaacccaccaaacaaaaagaaagaggcccacaaacggacagcaccacaaaaacagacgacagaaggaaaccaaacggacacagaaaagcagcaaaaacgccaacaaaaacggcacgaagaaaaacacgcgcaccgacagagaaagaaacagagaaccaccgcaacagcgccaaagcaggaggggggcggggggcacagcacgcccacccaggcccacacggcaagcagagaaagaaaaagacacccaagaaagggaaagggaacacgacggcaccccccagaaaaaaaccaaaacaaacaaacaaaaaccccacgccaaacgaaccaaaaagccagaacacgcaaagaaaagcaaggggaaaacagaaaacccaaaccagcgacaaaacccaagccccagaaaaaagagcccaaaaaccaaccaaagaaaaaaaaacaaccacaagaccgggggagaaaaacaaaagaacacgcaccacaggaaagcacaggcaccacaaaacgcaggaagaccaccccaaaacgaccccaaagaagaacccccagacaaacaagagagcaaacaacccagggcgccaagcacggcaaagaggcgaaaaagaacaaaacacacgcaacaccaaaaaaaaccagaaaaaaggaacagaagcagcaacaagcaggaaccaacgcccaagacacagaaagaacaccacgacaacgcaaaaacagaacagacaagacaaaagggggaaaacaaggccgggagccggagcggaacagcaaaagcagaaaggaagcaaaagggcggcccacagacagcgacggcaaaagagcacccaacaaaaggcccgaacacaggcaaagcaaaagacaacaacggaaagcacccagaagagcaaaacaccgagagacccaaccccagcggccggacacagaaaggggaggaaaaacccccaacagacagggaaaggagaaggcaggaaagggcccccaagacacacaagaccaaagacagcaacagaaaccggccgaccggaggccacaacagccccagaagacagaaaggcccaaaaaggaaacagaacaagcaggaccacacgaaagccgggggcaagcaccaggcgcccgcgaaagggcagcagcaggcacgcagcaaggccagagccagccaacaaagcaaacagcacccgccacagcaaacagaaaacgggggcaacacccacggacgaaaggaaaaccgcacgaccaaaaggcaaaaccaacaaaacggaagcccggaaacaaccacacccccaagaaagaaaccacaacaaaaaaaaggaaccagagaacgacaacgcaacaacaacaaaaacgccaaagaaaaaacccaaaacacaaaaaggaaacaaaacagcaaaaggcacacaacaccaccaacacaaaaacaaaaagaaaaaaacagaaagcacaggaaacagagcgcccaacccaaacaacaacgaaaccaacaaaggagagccacagcacacacaccaaaaacacagaaagaaccaaccgccccaaaaagagcaaagaggccggacaaaaaaacagagaccgagaaacaacggccgcacgaaagcccacccccacacgacagaaacaaggccagacaggcggaaccaccccgcacacagcaaaaccaaacaacccacaaaccccaaaaacgcacagcacacaacgaggccccagcagaacaggaagagccagggggaaacacaggccaccaagagccaggcagggcagggggccgcccaggaaggcccacaccaaagaaagcgcaagcggcccacaaacacccaaaggacacgacacggaaccgaagagcacccaaacaaacaggcagagagaaaaaaaggggaacccaagccaaagccccgccaacggaccacaacgggcacgggacaagggacacagccccacgcgccggcaacacacagaaacccaaggggcagaacaaagcggggcaggggacgacgcaggcagaaaaagaccaccagaagagggcacagaacccacacaaaccggacaaacagcagccccaggacccacgcagcagcacagaacacaggccgcggaccagaacaagaaccagggcgaaaggaaacgcagggggaaacaaacaaaagccaaccagccaaaaaacaccagagcaacacacagccgaaaagggcaaccaggaccccaacgaagacggccacagaaacgccgcgcccccaggccggaggcacaaaccagcaggcgccgcaggcagagcccacgcggggccccagcccacccagccagggcccaccagcccacgaaagcaggaaaagggagcggcgcgaagaacagacgggaagagaaaccagcaccggcaaacccaggcagaccaaaaagggccccaccaaaacgcgcgcgcgcggaaaggcggcaaaggcagcaacccaaccgacacacagcaaaggaaagaacccaaccaaaggacccagcgagaacacgcacaggaacacggcgacccaagaaaggagcgaagcaccacacccgaaaccggacccaccagaacggaaaaaggaaaagcccaacacagaaaacagggagcaccccacagcaaaaaacccaggaccgacagccaagaacaaaaacagagcggaagaagcacaaacggcaaagaacaaaaggcggaacccagcccaccgacccaccagacccgaagacgacaccaggccacacaaccagcaccaaaacaagcacgcccacaaagcccaccgcaggaacccacaaagaaaacagcacaaaaaaaaaagccccgaagagcacacccccccacccccgaccccaaacaccacaaagagacagccagaagcaccaccagcgcacgcacagcccccccaggaagacagaacgggaagaacaaaccaggcacccccaccaagcgagaagaccgggccccgcccaaagcacgagaaaccggcgcacacaaacaccggacaaccgaaaaagccgcccgccccagccaccagcaccaacgggcgggggaggcccaacaggaacaaccccccagggagccaccggggcagggcccacagggggcccccggccagcagcacggcaagcggagaccacagaaagcacagccgggccgcgccccaaagcacagcacggaaacgcggggaacacaggccagagaccagcagcaaagccccaggaaccccacaagccaaggaacaccacgcaaggcgggcagccaccgcaccccccgagaaaaacaagcccgaggaaaagccccacaggggaaaacggaaaggaacgcgcaagcagccacaaaaggagccacaaagaccaggcgaacccaagccaccaagaacaggcggagcccagcccaggaacacagggaaagggaaagcgcggcgagggcagcggccggacccgaggccccagaaggacggacccacgcagccggagaagacagcggggccccgcggcccaggggccggcgggagaacccacggaagggacagggggcggggacgcacagaaggggaagggggggcccaaaaaacagcccccccacgcggaaaacgcacacaacccaagacgaagccggcaagccgaaggaagagaacagggcagcccgcagaaaaacaaaacaaggagccaggccaggcgcggccgggcaaggccccaaaaaggggagcaggaaacccaagaggcccccagcgccccgcccccccccgccagacgccaaggcaaagggcccccacccacgaggggcccccaaggggggacaagaagcaagcggcgagggggcagggggcagggcaccgggacccggccccccgcacccgccgccgggcgccgacgcccacagcgcgagagacccccgaggccgggccggccccaggagccgccccggcgaggaagcggcggcggcggcggcgcggcggggggcagcccgggcccccccacgcgaggcgagaggagaccacggaagccggcagaggcccgcgcagggcgaccaccgccccaggacaaccgaccaagcccccgggcgacccggggccacggccggcccgcgggccaaagggggcgccggcgcaacgcgggggagggggcggccgcgcccccccagggccgacacccacgccgccccgcgcccgagagagacaccacggaggccgaggggcgcggggggggcgaaggacggggacacggggggaccgcgggggaggagaaggccggaacgggcggcggcggccccccgcgggcgcgcggagaccggcgccgcgggggggccgggggcggcggccgcaggaaggcccgaccccgacaccgcccagaggccagccccacgcccgacgcgggcggccacgcgggcagccggccgggggggccgcgaagggcggcggggggcggccacaccaaaagccaccgggagcaccagccccgggccgaggacaacgagaggcggcgcccgggcccgggcggggcaacggccgaggcggggggcaggcggacagccccccggggccggcggcggggcggcggcgcagagacgacgacggggacgcggacggacgcgggggcaacggcggaacggggaggaggcccgggggacaggaggccgccaaggagcccacggggggccgccggggcgcccggcaggagacgggggagcgaagcgaggcagagcggagagcggagaccgcgccggcgcgcgcgggcccgggggccgagcccagcgacgaggccgggcgcggcggacaagagcgaggaggacgaggccgccgacgccagcaggggaggcgcgggcggcgacaggcgggccccgggccgccaaagcgaggagaccgccggggccgggcccggggcaggggaccggcagcgggcaggcgggcagccccccagggacaggcgcggggcccaccgcccggccgcgcggcccaagaagcccccgggcggccgccgcaggccgcacgggcgaaggcacacaggggagggggcgcgggggccggccccgaaggcgcggccgccggcgggcccggcgggccgaggcccagacgcccccccaggagcgccccacgggggagccagagcacgacggcgcgccccgccacagggagggggccgaggagcggggcaaggagcgagcagcagccgggaacgccccgagcggcccccgccgggggcagggcgcggagaagaagcgggcgggggcccggggaccgcgcgcgggggacacggaggagccccggggcagcagcgccacgcagcccaggacagcggaaccgcaccacagcgcagacccacgcccgggggagcccggcgggcgagcggccgagccgcccccgccgccgggaagccgcccgccgcagaggggggcggccccgcaggccccgcagaaggcacggcggcggcggcggcggcggcggcccgggcgcaagacgcgggggcggacacgcggcggggccagggcagagcgcgcccgcagcgccgccccacgcccgcgagggccgcgccgggcgcagggcagagccgcgcgcccccagggcgcggagcccggggagccgaccgagcccgagcccgggaggggggaggccaccgggagaggacgcggggcaggacgggcagaggcggcccgcgcgcccgagaaggggcccgcacaggggacaccagcgaggcagaggagggcggggcaccggccgcgccgggcggcgggcagggagaggcccgcgcagccccggccaggccgggccgcgcccccgagacccggcggaggagcggccacagggccaggggccgccaggcagacccgagaaccaccgccgccgccgccgccgggccgggggcgcccgcgaggaccgggcgggccggggcgcagaaggcgcgcaggcgccgggcggagccgaccgccagggacagaagccggggcgcgggggagcccgaggcggaggcgcgccgcggagggccgcggccggggccggggcagcggagcggcagaggcggggcgggccgggcggcggcgggaggagcccgagccgggccgcgcggacgacagggagccggggcggggcggcgggcggcgaggcgccacgggcaggacaggagcggcgggcagcgcgcccccgccggcagcagcgccaccgccccgcggccgccgcagccgccgccagggggcgagcggccaggggcgcgcgcaccggcccggggccagggggccccagccaccgacaccggccggcgcccgcggccgccgccccgccgccgcgccgccgcgccccgcggcgggcgcacccggcacgagcgcacggccgccggcggggggcggccaggcgcgggcgcgagcggcgcaccaggcccgcggcggggggcagggaccaggggggggcggcgcgcgccggggacgcgagggggcgggccgacgaccccgacgaggccacgcgcggccggaaccgaagagcccgagcgcccaggccccaggaggccgggagcgcgccaccaccgagcgccgccgcaccacagccgccggggccggacggccgagcggcccacccgagaagaagaagcgccgagggccgcagcggcggagcagagcgcagcgcaccgacggcgccgcaggagccacgaagccgagggcgcgcagacaggcacagacggacacccccgcaggcgccggcccagacccgggccaggcaccgccacacccacggaggcggccgggcgggagccaccagcccgagcgcccggccccggcggcgccggcagagccgcccagggcgccgggcagggaggcgcgcaggacgcggcgggcgcggcggcggggggcgcgcccggcggccgcgcggccccgcgaccaggcgggagcgcgcggaccagcccccgcccgccgccggcggccacggcgaagaccgccgggagagggcgacaggacggcggcgcggcgcgcggagcaggcagcagcgagagcgacacccgcggcgcgccgccgcccgccacccgcccgagaccgagccgcggcgggcggcgccgaccccccgcccgccgcgcccgcgccgcccgcgccgggccgcgcagcacgaagaagcgcgggccagccgcgcgcaggagccgcacgcgcacgcgggggggggggaggggggccgcccgccgccggcccgggcggcccggccgcggcgggccgccacgcgggcgccaggccgcgcggcccgggcccggcgcccaggggggggcgaggggcggagggggcgcgggcg

SEQ ID NO: 427 - RNA, 6411 nt, Homo sapiens
acagaagaaggaaaacaggcaaacggacaaaggggcggaaaaagcagcagccaaggcccaaaggcaaggaaacagaacaggggagcaggaccgggaccccaccacaaaggagagagaggggaaaccaggcaccgcccacgaaccacccccaccgggccagagaaccacagcccaccggcagaggcgacgccccaaggccccacaaacccagaagcaccaaggagggagaacagcggaaaacaacaaacacgcaagcacaaacagagaacaggggaccaccaagaaaaccacaaaaaagcaccaaaaaacacaaagcccccccccgcccagaagggcgaaagccccgaagaaaaccacagagcacaaaagagagagagagcaaaagggcaacagcaaacagcagggacacacgaacaccacacccgagcacaaacagccgaaagaagagcacgcaccgaagccaaaacagaggccagagaacagcaccaaaggcccacagcggcagacaagagcaaaccgcggggccaaggcccagccaggaacccccccacaaaaccccaggcggaaacgaaaaaaagaagcggaggagagccgaggcccgagaacgacaagagccacacacagcaaaagagagggaggaaacccagagcccaaacaagagaccagacgcgaagcagaggccaaggacacgggcgggcgaaggaagcagcacagcggggaaaacccagggcacacggccaagaagaaaggacacagaccacagaggaggagaggagcagaggaaaggcaaaagaaagagaaaggaggagaccagccccccggagacagaggagccccaaaagggaaaaaaaaaacaccccggggacgcaccagaaaaggcaggcaaggaggagcgaacgaaggccacagaggcgaccaggcggagacaaggcagagggaaaggcgggccccacccaacaaagcgccagcaggggccaagcgcccacgacacaggggcaaagagaagggaagaggagccacagaacagccagcccaggagccccacggcacaacggggcacacccggcaagcccagcgcacgagcgcagcaaaacaggcgccgagaaaagaaaagagggggcgccaaaaaggaaaacaccaaggacccgagcccacacgccaagaaccaacccaacagaggagacacgcagaggaagggagcgcaagcgaaggcaaagagggaagacgacagaaaagcccaaacaagagccagaagaacccagcacagaaccgcccaccaaaaaagcgccacccaaacccggagggacgacggcgggagaacaaagcagaaggagcagccagccaggacgaagaagcggcagccgccacaaaagccagccaccacaagaaacgaaaccgagacaaccagcggaaaagaaacaaaccagccacaggaagagaagaggcacgccaggaacgaagcccagacccaacccagcccagacacagcggaacagccaaaggaggaccaggaacacagcagagaagagcgcggcgagccaaagcgaccacagacaggagaagagagaaccagaagaggggggacacagcaaggaaagaggagaggcaagaaagacaaaaaaaaaaaaaaaaggaagcccaacaaacgaccaagccaggaggcaaccggggacacagaacaccggaaagaaacacagagccaaagcaaggagaccaaaagcaaaagaggccgcacagcagaaaccccaaaaaaaaagagcagagaaaacccacaaaaaaagaccaacaagaagccccaaaagcaaaccgggaggaaaacaagcagaggcacaggaacacgaacagagcaacgcggcaggaagcaaagagagacaggagagcaaaacaaagcagcacacaccgaccagggagcagagaggcccaaagagagcaaaacagcacggagcgggccaacagggccggaaaggaagacagggcaaaagggacagggaagagacaaaggcgaacaacacgagggaagcacgaaaacaccccaggagggcccagagcgaaggaaccaagaaaaaggaggacgaaagggaccacagaaagacaagcagaaacaaaccggccaaccagaccccagaaggccaggaagaaggcgacccacccaacaaaaaaagaaggcaaagaaagccaacaagagcagagcagggaaaaggagggaagaaagaaggccgggagccggagagccgacgccccaacccccaagcgcccagaccaccccacaaagcccacagggggaccccccgaggaggggagcagcccccgagaaccacacacccacgaccgcaagaacaccgggggagcccgaagaaaggaaggaaacgacgcaccaacacaagcccccgaggaaaagaacaaaccaagccgaaaccacccgggcaagcagaagaagagaaagcagacgagcacccaccgagcaagcgaccacacccaaaaaacagccagagaaccgagaaagcggaaccagaagaaaggacacgaggcaagagaggacagccaaaacaaaaaagaaacggggaacaggagagcccagagggaccagccaaacagccaacaaagaccgccaagaaaaaaaaaaaaaaacaacagggcggaggggacacagcagacagacaacgaacgcagccaaccaccgcacccaaggagagcaaaaccagcagcaggccaccgaaagaagacagacgcagcaccaaggagccgcgacaggccacagacacacgggagccgggaaagcggcaccaagacccacccaggccacgaaagaacgcacacaaagccccagaccagcaggcacaaaagcgagaagcacgaccaaaaaggcaaagagccgaacccacgaaacagacacaggcaccacaacgaaccagagaaccacacacaagggggcggggggggggggccgaaacccaaagaggcaaaaagggggagacacccagaaaagggcagagcagaccaagaaagccaccagagccaaaccgcaagacaagaaagcggcagccaggaaccgcagagcgagggaaagaaaaaggccccaaagaaccccgaccacgagggagacagaacacacacaaacaaaaaaacaaaggcaaggggagacagggggcacaagggacagaagcccaaaagagacaggagcaccaggccgggaagagggcagcccgccagaccagggccacccacggaaagagaccagcccccccacccaccccccacccgccacccaccaccacccccggccgggccccacccagacccaccccaaggcccgccgccacccaaccacaagcgcccgaacacgaacgacagcagccaaaccacgcccaccaacacaccaggagccaaaaacaaaaagccccaaacaggcccaccccaaccgcagagaccagggcacaccccagagcgcaggcagcaaggggagagaaaaccggaccccaccgccgccacacccaagcagcgcaacagagagaggcagagacaaaggcccgcacgcacacccagacccacacagaccggaaaaaagaaggagagggcagccaacagagggaaaacaagcaagagaaggaagcacaagcccaaggcccagacggacccacaccgacgcccggcgcggagaaaagaggagaagaaggcaaagcccgccgccccaagcccccaccccagccaacacaaagcaccagccagagcaacgagggagacaacgccagaaggaggcaggcaccccaggcgaaggccccaccgagaaagaggaacaggagggggaaacagaaaccaagaccagacacacgagcacaccggagaaaagggaaggagcggacagccagaggaggaaccccaaaacaacaggagcagcgacagaagggcacaaagaggacagaggacagaaagcagggcgcccccacccagccgccacgcaccgcgagcaggccggaaggggccccaccaccgccaaaaagaaacaggaaaaagaagccccccccgaccgaaagcagcccaggaaggggcgagagaggagcccagcagacaaaacgggcaggaagggagggaggaggacaggaagaaaaccacgaacccgcaggcccagcgccagaaaagacggaagccagagaccccaccaggaaaaccagcagaaaagagcaaggcagggaacgggcaggggcgggcgaacgcccccgcgcgaggaaggaggcacagaagggcgcacaggagagcgacaacacaaccacaacagcacggggcagccaggaggaccaaggggaacagcaaaccagcagaaaaaaagcgccaaaaaaagcacaggcggacccgggcagagaagccgacagagaaacgccccaggacacggcgcgcacaaaagggcacagaaggcacgggccacaaaaaaaaaacccacaggccggaacgaaagggacaaaacccaaaaagggccagcgaaaccaggaccaaccccagcaacaagacaagagaaggcagcccagggccaggaaggcgaagcggccaacaaaacagggcgggcaggggaagggggacaaagacaccgaagaaaaacaaaccaccaccaagaaaaaaaaaacccccagggggcacggaaggacaaaaccaccagagaaaagccaagcacacaccacccggcgcaacggggagacgaggcacgggcgaacgacccacccaacaaaacaaaaaaaaaaagagacagagcgccggcccagggggaggcgggggcaaccggcgacgcaaccccacccagggcaagcaacccgcccagccccgagagcgggacacaggcaccgccaccaccacgccggcaagagaaaaaaggaggccagggccaggcgccgaacccgacccagggacgccgcccggcccccaaaggcgggaacaggcgcgagcaccgcacccagcccaacgaaaaaagaggacgaaccacacacagaaaacgcacgggggaccaagcgaggaaacacggcaagaacagaggcggcgccgagaagcgcgaagggaggaagacaaaaaaaacacaccaaagccacaaaggaaaaaccgaaaaagggcggaagacacaggccgaccggagaaggcaggggccaggaaggccgaggcagaacacaaagagaccaggaaaagaggggcagggaagagaagccggaagggcagggcggcagggggaggccaggaggcccgaaagaaggcagccgccaccagcccgccgcaaacagacaggagcaaggaaagcaggcagggagggacacagaagagggaaccagcacaaaaaggccggaggagacacagagccagggaaaggaggcaggagaggacacgaaagaggagaggcaaggcacagaggcaacagggaggggaggagacgaagcaaagccgaccagcaggggaggaagcagggaacggggcagagagaaacgccacaggagagggagagaggggagcacggagggccaagggggggggaacaaggcaaagaaagggagacagccgaggaagcaaaaagaaaagggccacccaaaaacgaagaacacaccagacgccgggaaagacaaaagcagggggcagcagacggaggcccagggcgggccaccgcccagagggagacggaggcagggaaaagcaaacaaccagggggaaccggagaggaagcaaaggaaaccacgcggcacccggcggggcgggcagaaaacaggagaagcagcaacaagacgacaagagcaagccaggcggcaggacccagagacgggagaacaaaaggaagggacacggcccacaggagccgggcaggagccacaggggcaggcccgccaacaccgagacagacagacgaacaagcagggcacgcacccccacagccaccaccacccagcaccaacaagcagcacgaaccgccagcaaagacagggcaggaccggggaaggaacccagccagaccgcccaacgccacccagagagaagaaagccaagagcaaaaaccaaggcgaggggacagggaaagacaccagcaaagacagagggggggggggggccagagcagaaagaagaccagcggaagagacaggaaggcgacaagagacacagccgaacccaaaggacaagagccgcaaggaacaagcagagaaaagacaagcccgacagcgagcccgggcccacagggcaagaacaaagccggacaccgccggagaggccccccaccagcaaaaggacacccagcacaggccagcaggaacaggcagccgaggggcacgaaaggagaaaagaaaaaaaacgcaaaacggcggggccacaaaaaggggaagcgaggcaagaggaaagagcgccggaacagaagagaaggaagcaagcaggaacccaaccgacccagagacc

SEQ ID NO: 428 - RNA, 507 nt, Homo sapiens
cagcccccaagcagccgaggaacggaaaaggcgcaccacgacccggagaaccccacgaaacagcaaacaagaggccaaccggcacaagaacaccggaaacgccaggccacaagggagcaaacaaaaagccacgaagacgaaagagcacacagaaacagggaccaccgacgacaaggggagggcaggggcgcaggccaagcagggggcggacacaaggcggggcccaaaaagaggcgaagcgcacagcaaaaacacagagagaagcgaacaagggagagagaccggcagagcaaccaaggaacaaagcaccaagagcgccgccggaccacagagccaggcggaaacccaacagagcccccgccacagagagaccacggaaaaggaacagagccaaaccagaagaggagggcccagaagaaaaagaacccagaagaaacgaagaaacaaaaacaggcacgggagaaacagcaaaaaaaagaaaaaaggaaaaaaaaaaaaaaaaaaaaa

SEQ ID NO: 429 - RNA, 5779 nt, Homo sapiens
aaaaacaaaaaaagcagcaacagagaaaggaaccacagcacgagcgcgacaggaagcgccaacaaaggccgcggacagaggaaccggcaacccagaaccacaaaagcacggaccacccgacaacagcaaaacagacaacaagacaaaacagaacacggcaaaagaaaaaagaagacgaaaaaacccccccacaggccgggacaaggcaaacaaagaacacaagaagcaacaaaccccacccagggagaagggcagaggcggagaacgcagaaggggcacacagacgaggaagcacacaacacaacaggcaggagcacagccacaaacaaaacgcgaaagcaaaccgcaaaacaagaagagcaagcgaaaccccacaacaagagagaccaagagacggaaggcccaacacagagagcagccaaaacaccgcacagagcacggacacaggacccaacacccgacacaacgacacgcacagccccaccacgcccaacaaacaaaaaaaggcaaaaaacaaaccacgaaaggccacaaaacaccaaggcaacaaaagcgaaaggcagccggccagaaggggcaagggcagagacaagcgccacaacgcacagagcaccaacacaagagacacaaaagaagcagccaaaagcacaacacaaagcacaaacacagccagagccagacaaacaccaggaagaagaaggcacagcagagaccaaaaagcaccgcacgaagcacacaggccaaggccaccgagcaaaaaagcccaggagcccccgcccacagaccagcagaccaccggaaaacaacaaaacaaacacacacaaagaaacaaacaagaaacacagaaaccgaaacaggcccggcacagagcaagcagggggcaaccaaaccgagaaaaaaaaccaaaacacagaagaacacgaaaacacggcaacgcaaaaagccaacagaaagcagaggacccccccccacaagaaaagaacgcaccagaagcaggcacacaccacccgaaaagaggaggaccagagaaaggagcagaaaacccaggagagacgagccagacacagagcgggcccaacggaaaggacgagaaaagaaacccagcccccaccccaaaagaaaagagagaaaagagcggaagaaacacagccacagccacaaagcacagaggcgagagagcacagacacaaagggccaccgaaacaaggacccacccaaaaccaaagaggcagaagcccccccagcaacccaaagaaaaccccccaccaaggcaaccaagaacaacagcaaggaaggagcccaggaaaaaggccacagggccccaccccagaggggaacgaaaagaaaaacaaaaacggggacagaacgaaacgaaacgaggagggaaaaaggaaccgcacgaacagccacaaagagcagaagcacaaacaaacgaaaaaacaacacaacggaacaacaagggaagaaggaagaagaaagagaaaaaaacaccccaaagggcacaccggaagacccaaaaaaaaaaaacccaaacgaccaaaagcaagagccaacccaaccggccaaacgagccccacagccacagacagggcgccccagacaccgcaaagcggcacggcaccccgcgcacgcgggcagcaccccaaccccaaagcaaaaaaaaaaaaaaaggaaaagaaagaaagaagcccccgacgccgggccccgccccccgcgcccacacccaccaagccccggaagccgcgagcagcccgcgcgccagggggcccagcgccacaccacgcgcccagcccggcagcccagccgccgccgaaaaaagagaaagaaacaaagcacagggaaacggagcccacaaagcaccaaaaacgcgccaagcccacgccccccccccccacccggggggggaagaagccaagagggaggggagccccccccacggcaccccccacacaccccaccaccaaagccaggaaccaaaggcaacggggagaagaaaaggggagcgcccgcgcgcgcccgcacccccaaccgcaccggacgcccaagcccgcccgcccgcccccccacccaaccagcaaccaccggacacagcgccccaacgaagggcccccgcccagccacccgccgggaaaccgcgcgcgggacccagcccggcccgcccccgcaggggagagcgcggggacccgcacgggccgccccccggggccccccacacgaacccaggcccagcgcgcagccgagcgcccggggccggggcgagcgcagccccgcggagccagaaggggaagagaaggagaaaaagcgccacaaaggacaaggccgcgagcgcacaccaccccaaagcgccccgccagagcgacgcggggccacgagcccccgccaccacgaggagcgcccgccccggccccgccgagcaacccgggaaaagcccgcccccgccaaagcccaaggaaaaaagcccgcccccgcccacccggcccgcacaggaaaggaaacggaacccccaccccgccaaagcgaaaaccccaccgagccccagacccacgggcggaccgcagcggcacccccccccccaagcggagccaaaaaggcgcgccgggacagcggcccaggcagaggccgggccggagccgggcggggccaccggcaccgggccaggaggcgcaccacaccaccgcccaccgccccgcggcgccgcccagccccccaccggagacagacgacgaggcccacggagccggggacagggggcccccacccggcgcgcgcagcgcgccacccgccgcagagaaaggccaaggcccgaggagggaagaaaagaaacacgacacccgcacaggaaagaaccccagcaccggcacggggaggccgcccgccaggcgcccccacccacaaacagggcggcaggacgaacggagcagccaccgaaacacgcgcaaaggcggaagaacgggcaaacgccccccaccaccgcaagagaaccaagagggcgggcgccaaggccaaagcccgacagcgccgagaaaaaagagcagaagacgcacaacaaaaggaaaagcaaccagacgaacaccgggcaaaagagagacaaccgggcaaacccccgcgcccggcggacacaggcgcaagagggaggggagcggcgggggggggggggggcgggggggcagggacgaggacaaacagagaccaggagcacgcgggcggaggaggaaagcccggaaggcaagcggggggcaaggaaggagggaagggggcaaaagaagccggacccccccccaccagaccaggggagggcagcccaaagcccagaagaggacaagggcgccaggaccaaccgggcacgggcacagagagccaggcaaacaacaaaagacggccccccgccccggcccgcgaaagagccaaccgaacgccagcgcccccaggagcagcggggagcaacgaaaaccacaacacccaacgcgagcaccgcacagggggccccccccagcaacagaccgcagccacccggcacgcgcggaaccggaaacacgcagcccgaagacacccaaccagacccccggagagcaccgacgcaagcaaccgaccaaggaacgacagcagggaaagaagaggagggggagggaagagaacagacccgacaagaagcggaaaagcaagaaagaacagaccgagcggagcaaaaccggagaaaaaaaaggggcgaaagggcgcgaagaaaacaggaccgaccccagggcgcccccccgccaaaccccccccccgaaaaaagggggggggggagcacaccgccccacaaacaagcaaaaaggccacagcgcagccagagccccgggcaagagaaacaacccaccccaacacagaacaaaaaaacccaacccgaggaaaagcccaaaaaaccaaccaaaagcaggacggagcaggcggggagagacagaagaaggggaaaagagaaacaccaaaagggaacaagagaagaacccccaagaggacaaaagaaaggcaaaggaaaaccgggagggaccacagcaaaaccaaaagagcagcaaaacaagacacccccagcccacgccaccccccaccccacccccccccagcccccccaaagcagaacaaacccggaaaaggagagagcaccaggaacgcaaaaggggcaacaaagaagcggacaagcccaacggcgaaaaaaaccaccagaccgcagcacaaggaaaacaacaagacaagaaaggagagaaacaggacagaacaccaaagaagcccggaaaaaaaaaacacggccaaaaaccagagaacaaaaaaacaaagaacaaagcacacacacaccccccccaaaagcagaaaacaacagccaaagaaaagcacggaccccagcaaaacgggcagcgaggcaaaagcaaagagcggaccccgcaaccccgcccccccccagaccacagcccagggcaaggcccaggccccaccgggcccgccgccccagaggagacaaacaaacaggcacgcaaaaaaaggagccacaacccacccccagcacacaagaccaaacagacggccggggcgaaacgcagagaaaagaaagaaacagccacacgaaagcccagagcgcagaaggaagaaaggaggaaacggccaaagggagggagaacgaccggagccaaggaccacacaacaaacgacacagagagaggacaaagaaaaacgggaagcccagcaaaaacccccaaaaagacccacgagccccgccgaaaagggggaagggaccgagacccagaaaagccaaaaagcagcaaccaagagggagaacaccaagaaaaaagacaacccaggagaaacagacgaagaaaaaaaagggcgaaaccaagaggacagaacaaaaaggccccaggaaaccagaaagaaaagagaagcccacacaacagaaagagcgcaggaacaccacagaacacacgcaaaaggcgacaccgggcccaggagagaagaggcccacgaaaagggcacagggagcaggccaggcagcccagaggccaaaacaaagccagcagacagaacaccacaaacagaaggaggcggaagacccaaacaaaaacaaagcagcagaccagagcaggaacggacaagaagcacaaaacggccacaacaaaacgaagacccagcaaacacaagagagaacaaccgaagccaacaacaacacaaacagccgaaaaaagaaagaaggaccaggccaagagaaaaagcagcagaacaaagagaaaaaagagcagaagaacgaacaccaaagcaagccaacaaaacagaaaaaaaaaaacaccaacaaaagcgccagagaagaaaacaacaaaagagccacgaaagaagcagaaaacacaagaacagcacagaaaaacagaaaaaagagaaagaaaaaaacacccaaccaaaggaagaagaccaaaggcaccagaaggggacaaccgaaacaaaacgaaaaacacaacaaaacgaagaaaccacacaagcggcgcaacgaagaaaaggcaacaaacacaccagaagaaacaaaacaaaagagaacaaaaaaaacaaaaaacaccacaaacagcgaaaagggacagaacacaacaggagcaagcaaggagccaaaaaccggggggcgcccagagagaaaacacaaccccacaacaaccaaacagcaaaaacacaaaaagggcaaaagaaaagaaaagaaaaccgcgccacagagaaaaagccaaaaaccccaccgagaaagaccagagacaaaaggacacaaagaaaaagg

SEQ ID NO: 430 - RNA, 17228 nt, Homo sapiens
ccccacgcaggccgaaaaaggaaccaaagcaaaaagaaccaaagacccaccaggcaccacagaaagaaagaaaaagcggccccgacacaagacaaagagaagcgaaaccccccaaaacagaaaaaggccggccaaaaacaagacgagagacagaccacagcacacaccaccagaaagggcagggcaaaacagagcgccgaaagggcacaagacccaaagcaggggccaaaaacaacaggaaacaaggcagcgggaaaaaagggaaaaaacaaggacgagacccaccaagcagaaagaaaccccaggaaaaacccagaacacaggaacgagaaacagccagaggagccagagaggggcccaggacggggaccgggcgggccgcagaggcagggcccagggggagcacagaggagccccacccgacaggccagcggagcacgggcaccgccaaggaacggccccagggcgccaggagaaaggagaaccacagggaacgacagcaaaacaggaaaaaaagaaaaacagaaacagcagggcaggcaggaacacgaacaagacagagagaagacaaaaacgaccgggaaaagcagacaggcagcacccccccagggagccgggaccccggacacccgaccaacccagacacgccgcccaggccccacaagacagaggagacagcccagcccaaacccagacccaacggcaaccagaggaccccaaaaacagaaacgccacacgcggcaaaaaccccaaggccacacgccaagaccagccaagacccaaccagacaaggcccccagaacggcgacacacccggccaagacccaaccccacccaaacccccacccagcacacaagcacgggacaccccagcccacgccagacacggggaagcaagaaagcccaaaaaaaaaggcaaaaccaacaggcagcccagggccacaggcacggcaaaagaagcaggaagaagcgaggccagacagcaagaagccaagcaccccgggcaccaagagaaggacacaaaggccgcgggcaaggaaaaggaacacaaaccacccgagggaggggggccaggcggaagagcacaagaacggaaagaaagcacagagagcagaagaaaggagaagggcaagaaaagaagaaagaaacaaagaaagagagcaaagagaacaaagcaaacgaccggacagaaagcaccacggaaaaggaggcaggaaacaaaccagagagggcaaggcacacaaccacgaaagagcaaaagcccgaaaccgcagagaaaaaccacccccggcaaggccccaagcaaaaaaggagaagacggaaaaacaaaaaaaaagacacagaaaaaaacacaccaaaaacaaggagggaaaaacacaagaaaaaaccggacacagaggagagcgcaacagaaacaaggcacacaaagccaaaaaacagccacccaagaaagggccaccaccagacaggcccggaggccaggccaaacaaaaagaacggcaaaaagaaaggcccccacaaggcaagcaaaaaccccaaagaacccccacggccgaggaaaaaaagaaagcagaagaccaccggccaaaaagaaggggaggaggcagggaaacgggcagaaaaggaagggccggcaaaccccacccaagccaaaaagccaaacgcgcccaaaggagaaagacacccgccccgccaaaggccccaaaaccagccggcccccccaccccccacccggcccaaaaaacccgggccagcggcagagagaggagaaacagcagacacagagagaagggcgaccagagggacagcgacagccagccagggaggcagacccaggggcagaacccccgccggacccccagccccccccgcgaaagccaccaggcaaaaaaccccgcacaccaccaacacacaaacccacccaggacaccagacaagagccagagcacaaggcagagaaaagacgcacacgaccccacgagcgaacaccagcgcagaacggcaaaccaaaaggcacgaacaccccggggccagcggcagggcaaccccagagcgcgcggggccgcaggaggcgcccggagcagaccaccaccacacccgcccccgcaaggggggaacacagggaccgagcgagggagcgcccagccagcaccaaagcaaccagcaccagcacagcaccgccgcccagaaggggcagggaaaaccgccaaaagaccacaaaagcaacaaccaagagcaggcaccgcacgacaaaacacccagagagacagacccacaaaacaagccaacgccaccaaacacacaccgaaaccccccaccaacccaccacaaacagagaccgacagcgccacccaacaccagaaaacacaagcagcaggaacagccaccgaccccagagacaaggcaaacaaacacagccgccagcgaagaagaacagaaggaagaagccagacaccagaaagagaagacacaacaacaaccgaagcaagcaccccacaccgagaagagagaggaagagcacaacccgggggaaggagaacagagaaaaaagaaaccacaccggcaggggcagaacggaaaagagaaggcaagcccagagacagggcagggccccagcagagggcggacacagcagaaggacccaggaaaagggagaggggacggacgcggccaggccgcccacagaggccacgcacccacaaggggcaggggcacacgggcaagaaggcagggagggagcaggaaggggagggaaggggcaggacccaggggaaaaagaacaccaagaggaagaaaaagcccagcaaacaggggaaagaagaccagccggagcgagacacaacaagcaggcagaaaaaaggaagaaaaaagggaaaaaaagaacaaaagagagaggcgggcaaagccggacagcaaaagacacaaaagcacagggaaagaacaaagagacgcaagagccccccccccccccccccccccccccccccccccccccccccccccccccgcgaaaagccaaaaagcagaaaaccaccaagacccaaagcacagaagcccaaaagcggagaaccaaaacagcaccccacaaaagacaaagaaaaacaaagcgcacccccaaagaaacggcaaccaaagaaagaacgaaaccagcagaaggagagcaaggagagccaaaagcagaagaaggaagagcagaaaagaacagggacgagacaaaagacaaaacagacaaccgacgaacccagaaaggggagggagggggggggaaagcagagcagagagacaccaaccagacaacacagcaggcagaaccagaaaaggcacaaacacgcaacaaagggcaagacgagaaaagcagcaggcagcaaaaaagagagaaagggcaggagagcgccacagcgagaacgaagccgaaccccaggccggagccaaagaggcgagaaggaacggcaaagcaccacacaccggggagacaaaaccagaggcaaggggaaacaaaaaggaaaacacagcagccacgacgaagccccaccggagccacggggccagcaaggcaaggccagagcaagaaaaggcccagagacaacaagaggagaagaaccagagggaaggggaagcccacagagaacagaaggaaggaagaaagcgaaccagcacagccaaggaggcggggagcgcgaacagaaagccaggagagggaagggaggccgacgggaagaggagcaccgggcaagggaagggcaggcccaggagggacccaggccgcgagcagcaagaacaaccaaagcaacccagacaaaagccccccccgcaaaaaaacacccaaagggacggaaacacaggaaaaaagaagcgacagaagccacaggacagaaaaacagggaggaagggggcaaacaggcgccacacaaggggcaggcaagcacaaccagcccagcccacaaaaagggaagaaaaacagagggggaggagagaacaaacaaaaagaccaacaaaagagagccacacaaacccgacggccacgagcaaccaagacaagcagccaaaaaagacagaccacaagcgaacaggaaccagagagcggagaacaaccgaacgaggaacccacacagaaacccgaaccagagaaacagaggagacagagaaggaaaaacaaccgaagagagacagggagaggggcgggaggagagaaagagaggcaaaccagcaagcagagcgaggaacgaaaaggagaacgaaaaagagaccccaaaaacaccagacagaacagaaaaaaacaaccaagcaacccaaggagacacacgcccagccccagaagaccacacacaggccaaaaaacaccaaagcacgcaagggaagcacacagaagggaggaaaggaccaaggaaaaaacgacccggcacgagaaagcaaagaaaagaagcaacaagacaaagaccaaaagcaaacgaagccacaaaccacggcacgccggcaggcacccccaccccacagaagccgcccgaggccgaaaacgagggaaggaagaaacgacacacgcacccccccccacaagggcaccagcaaaaggcagaccccccagcagcccaccacccacacaccaacaggacaagccaagcgcccgggcccaccacggcccagaaaccccgaacaaaaagagagaaagagacagacagggggcgggaagaacaaccaacccaaaacaggcgggcacacgggggcaggaacaaaaaacaaagaacaacaaaaggagcagcacaaagcaaaaaagagacaaacaaaaacaaacaaaaacaaaggcacgaccacaaagagacacgaaccaaaagaaaccaaggcaagacaaagaagacggacacaagaaggggcaacaaaaggaaacaacaaagacaagggaaccccacacaagacagaggcaccaaaggagagcaaacacagaaaaaccaggagcaccaaaagacgcagagacacacaaggcaaaaacacaccaaagcaaacgacaacaaaacaaaaccaaaaccgagagcagcgaccagagaaaaccccaccggcagacaagcaccaacagaccagaaagagcgggaaaaaaggcagcagcacaccaaacacacagacacaaagagaaaagcccaaaagcacggagaaaaaagaggaaaaaaagaaacagagagaacgaaagaaagaagggaaaaaacagaacgaggcagcaaaaccggccacaaaaaaaccaggcccagaaccagcccagcaacacgcaaacacccagaccaaccgaacagggagaaacgaggcccgagaagaacgggaagaccaaaacagaacacgcagggacagaggagccagaggaccaagcacacccgagagccaagaggggaccccaaagccagcggcgaaagacacaaaacacaaacaaagaagggaaaaaaacagaaccaaggcaaagagcaaagagcgaaaggaaagccaaaaaaagcaaaggaagaaaagacaaaagagaggaacaaaaccacaggcaaccccagacacgagacagcgggaccaccaaaaaacaccaagggcaaccgagcaaaaaccaaaccaagcagacagcacgggcagaaacaaagagaaagagagccgacaacaccaacaaagagcaccaaagggggcaggagacgaccacaggaaagacaagcgaagcgcacaagaggccagccaaaagaaggccagaggagaaggaacggaaagacgcagggagagaggaagaaagcaagcacccggaggagaaaagaagagaagaaaaacacaaaagcaagaaagacagacccaggagaccccaacgcaagccagaacaaaaaaaaaagaaacaaagaaagaacaggaagaagcagcagcccaaaaaaaaaggaaaaggacccaagccggaagaagaccacacaaaaggaaagcacgaaagaaaggcgacacaggcaagccgaacgaggaaaagggacagcagcccgaaaagaaaagagaacaagcacgacacagggagcacaaaagcgcaccgggaaaccagcccacgaacacgagcccccagaagccaggggaaaggcaggggcagaagaacccaggacggggcagcagaaaaaagaaggcggaagccggcaaaaacaagaaggaaagggagggaaaacaaggaaggaggggaggcacagaaaacaagggggacaggaaaagccaaaagccaaaaaccaccgaccacgcccgaccccaggaaacacaggaaaaaaaaggggaggaccagaaagcgggagagacagggacagcagggaggggcaagcagcaagcaagacgaggaaccaaggcaagaaggagacccccagacaccgaaagggcaccaaaaggcacacaacccaaggagggaggccggaaaaacggcaaagagaggaggcagaaacaaaacaaacgccaaagggcaaaaaaaagcaaagggcccccaaaaaacacagccaaacgcaaggaggcggaacccagcagccacgggagaggcagcgacgggcgggaagcagaggagagaagaagccgggcgacaggacagccaccaaccacacgaaacaaccacaccgcagaaagagaagcaaggccaacccagccaacaaaacagacaacaaaagcgggagaaggccacacacccaagagcagcagagcaaagccaaagcacgaaacccaggaagagaggccccaagcgacaccgagcaaaaaaagagaaaaggacccaaaccggagacaacgaagcccccgaagcaaaaaacagagaacaccggcaaccgaaacaaaacgaaacgcaccacacccaagacgccaagcacaaaaacagacaaaacagaccaggcacgggggccacaccgaaccagcacaggaggcgaggcgggacaaaggccaggagaaagccagccggccaacagggcaaaacccaccacaaaaacaaaaaggccagggggaagcacacgaacgcagcaccaggaggcgaggcagaagaagcgaacccaggaggcggaggcaggagcgagagcaccacgcccccagccggggacagagcgagacccccaaaacaacaagacacaagaaggcaaacaacccaaggggcagaacgacaccacacaaggaagacacgagggaagacaggaaaaacccccagccacaagcagcaaagaaaacaaagcaaaagggcggacagcggccagaggagccgacccacccagcaccgaacaggagggaacgcacaagggcagacaccccgcgaccaaccaccccgaggcccccccaccccagaaaaggaaaaaaccgggcacaaagaagaggcgccaccaccagaccaccgaggaacggcacaagcccgcacagaggcacagaacaacgacaagaagaaagacaaacaacagcagaaacaccagcagccaagacaacacgagagccaagcccccccagggccccaagacgagacacaggcaaaggaacaagcacgaacacggagaaaagagagccccaagaaaccgcacaggcaaggacacaaaagacacaccaccaaccaaagaaacagaagaagaaaaaaggacaggacaagcagggcaacaacgggaggagccaggcgaaaccagcccaaccacaacaccgaggaccagagacaaaacaaaacagcacaaaacagcaaccgccccgagacgaagcgccgacccaggcggaggcaagggcgacggccacgcaacccccccagggcaagcgaccccgcccagccccgagagcgggaacaggcgggccaccagcaggcaacgaaacagagacggggcaccagggccaggcggcggaacccgacccagggaccaccccccggcccccaaaggcgggaacaggcagagccacggcccagccacgcaaccaaaacacaaaacacaaaaaggcaaagaaaaaggaagcaaaccgcaccaaaccaacgggaaaaaaaagcaaacaccaacagagcccccgacacaaggccccgaaggcaaaccagcaccgcagaagacccgaaggacacagcgacggaacacccccgccacccagcccagaaacggaaacgaggcccaaagaggaaaaaggcgcaagcaaacaaacaaccagggggagccccgcaggcccgacagcgcccgcaaaaagaaacacccgcacaagacaagccaaacaaggaacaagcaagaacgggaaagaggaagaaaagaaaaaacgagcacagccaagcacagaaaaaaaaccaagagaaacgaaaaggccaaccacagcaacaggaaagagggaacacaaggcaggccaggaagaaaccaacccccaaaggaacccccaggccccaacaccaacacgagggagaggacgacaaagacgccggagagaggcccccacaacccaagcccaagaagggcccgggaaaaggcagaaacagggcggaagcagggccccgaccaacagggacgaagggccccaaccggcagaagccagaggccaccagcgaggaagaacgccacccacaggcccagaggcccaaggcgggggaggggagggggcacccacagcggagggggcgcgaagacgagacaaccaaggaaaaagagaaagagacccacgaccaggcggccacccaagaaggaaccggaccagggagcacacagagcccgggaaagaaagcacggggcccaaacaggaagggagaaagagacacgccacgagagggacaacaaacaagcggaaccaaacccccagaccacacccccacccaacggcgcccagaaccgacaagaggccgacggagcccgccacgggcgccagagcggccagggaggcaagaagagaaggaagagcggaaaagagaaggcacagacaccgcagcccaccgccagccaccagggcagaggccgccagggcaagcacaacaagcagccccaaggacaaccccccaagcaagagggcagcagagggcaggagggcacaggccgagcaggccaacagacccaggaagaacaaacaaggagacagaacgaagaagcagagccggacaccggggagccgaaaaacaagcaggcccaaagacccagggcaccggccggcaggagggagacaaaggcggcccaggcggaggcaagcacgacggccacgcaacccacccccaggcaagcaacccgcccagcccccgagagcggaaccacaagcgcccaccaacacgcccggcaagagagagagacggggcaccagaggccaggcggacgaacccgaccggaccacccacccggcccccaaaggcgggacaggccgagccaccagcccagccgcaccaaggggccgggaccaacgaaggacagcacacaagaaaaaggaagcaaacgaagaaacgaagccagagcagagaacgccaaggccacacagcagaagaaaaaacggagacaaacaggcaccaaaacaccacacgcagaggaggcaggagaggaacgaaaagagaagaggaaggcaacaagaaaagcgaggggcaagggagacaagccagaccggacaaagggaaacagcaagagagaaaagaaccaaaaaaaaaacaagggccccagaagacaaccaggacaaccaaaaacaggcggcagcggacagagaaccccccagcgcccccgaaagacacaggaaaaaaagaaaagcggaaaccacgacaagggaagcaaggaccaaacaaaccggcagagacacagccaccagggacaggaaaaagggccaccagggcacgccgaaggaaaaaacaagccaggaccagaagccacagccccagcaccgaaccaaaaaggagcccggcacagggaggcagggacgacacaaagggcacaccgccccccacagggacacccaaaccgagaaacacaaaaaaccccgggagaacccaacaccacacaaccaaaaaccacccccccgaacccacaccaccggccaaacaagggaaaacggcggagaggaaagagggacagcagcagaggagggagggccaagaggaaaccggaccgaagagcaaagccaacccgcagcgccggagacgcaggaaaggagcaaacagaggccaaggcaccgggacaccaagaagccaaggaaaaaagaaggaagcacaaaaaagagagagaaacagaaagagcaaaaaaaccagcagccagacggaaacaggggcggcacaggcgcacaacaagaaacaagacgggaaggaaaaacaaaaaaccacagcggggcggaaagccaaaacaaggcaccaggagacaggccggaggggggcgcacaggaggacccgcacaccacacaggagaaaaaacaaaaaaaaacaggacagaaaaaaaacggcagaaacaaagggcgagacaacggaaccaacaaaagagaaagccagacccaccacaccaaacagaaaagccaaaagaaagacaccaaaaaaagcgaaacaaaaaaccggaagaacacaaaaagaaaacggacgggaggaaaggcaaagacacaaaagcacaagcaagcaaaaaagaaagggccaccaaggaaaagcacgcacccaaagagaccagaagaaaggaaaagagaagccacagaagggaaagaaacggaaaacagaccgaacggacgaccagaaacaaaagagcgacggaggcaaacgccaagaccccccaagagacaggcacgacggccacgaacaccaccccgggcaagaacggcccagcccccagagcaggaacaggcacgaccaccaggccaggcaagagagagagacacagcgccaggcgaccaaacccgagccaaggaccaccgcccagccccaaaggcgagagacaggcggagccaccagcccaggcgagagccacaaaggccaggcaggggcagcagaacccagaaccgggaggccaaaggagggagcgagcccaggaaacaagaccagccgggcaacagacaaaacacaccacaaaaaaacaaaaaagagggcaagggcaggccgagccagcacgggaggcgagggggagggggcgagccccaggaggcagagggcaggagcgaaacagcacgacaccagccgggcgacagagccagacccgccaaaaaaaagaaaaaaaaaaaaaaaaaaaaggcagaaaaaaaagcacccaaagaagaaacaaagaccagaaggaacaagaaaagaagaacaaaacgaaggaaaaacaaacaaaacaagaaaaccccacaccagaagagagaaagacccagcaacccaacgggaaacccaaaggaaaaacagcgcaaaagacacagcacacaagagcggcacacacaaagcaaagacggaaccaaccaaagccaacaagaagacggaaagaaaagggcacaaacaccaggaaacagcagccaaaaaaagagagcagccgagagacaggagaagcggaaaccacacagcaaacacgcaaggacaaaaaaccaaacaccgcacgccaacaagggggaagaacaagagaacacaagacacaggaaggggaacaccacacaccggggccggagggggggggacgggggagggaggcaaggagaaaccaagaaaaacgagaagggacagcacaccaacaggcacagaacaagcaaccaaccgcagggcacagacccaaaacaaagaaaaaaaaaaaaaaaaaaaaaaaaaaaaaggaaaacagggcgggcaggggccaagccgaaccagcacgggaggcagaggcgggcagagccgagccaggaggagacaccggccaacaagcgaaacccgccacaaaaaacaaaaaagccgggggaggggagccgaacccagcacagggaggcgaggcaggagaagcgaaccagaaggggagggcaggagcgagaggccacgacccagccggggacagagccagacgccaaaaaaaaaaaaaaaaaaaaccggaagggggaagagagagaaaggaccgcaacaggcgcagaaagaaaagggaacaccgaaaaagagggagagcccacaaagaaacaagaaacccagaccagaaacccacccagccaaaccccaaaagaaaacaacccacaccaaaaaacacaaacccaagcacaacacaaagccaaaagccaacaaagaacgagagcaaaacggagcacaacaagaagaacagccacagaaaaaaagaacgacacagccacaacgagaagaaaacaagaaggaaggaagcagcacaaaaacaaaacaagaccaaagacaacccagaaaggcaacccaagagacagaaggagagggggccaggcacggggaaaggggaaagaaagagcaagaaggggccgaaaagcaaaccaaaagagaaggcacaaccgaaacacaaaaagacggaggaacaaaagggaaaaggaagacaagaccagcaaagcgacaaaaaaaagggggggcaagaagcccagccacacgccgccagagcaaacgaaaggaggagagagaagaaaacggcaaaaggcagagggaggaagagaaaacgaagcaaaagcccagaaacagaaggaagggaggagaagccggagccagagagcggacaacaaacacaccaccaacacacaaccagacaaaaaccgcagaccaggccacagaaacagagaagacgcgcaccgagggcacaggcgggcggaccggaccggaagagcggaaaagggaaaagaaacaagccacagcgacgagcagcaagcaggcagaccacaacagcccggacagccgagcaggagggggaccagaggcaaaggcccccccccgccagacagagcggccgcacaagcccgaaccagcggaacagccccacccgcaccccccccaagcaccagggacgcgcggggagaaccgcaagaaagaaggaaggagagaccaacaagccaccacccccagcccccccgcccaaagaaggccacaaagagcaagaacgcaccccagaaccccaggaagcaagaaaccggaaaacgaccacaccaaaccaggagaccggaacagcgccaccgggaagaagaagcccggagaggagggaaagcagcagggaggacaccgagaccggaaagagaagagacaacggccagaaaggcacaccacccaccaccaggcggcccagacccgagcaccggccacccgcgccacacccccccggggagcggaccaagcgcaaaagcaccccccaagaaggggccccggggggggcggagagaagggaaggggagcccccccgccagccgagacaccaaaagaaggaaacgcagagcacaagaagagcaaacacagacaaacagacaaagcaaaagggaagccgacgagacagggaaaaaggcgccagaaaacgggggacccaaagagacagcagcaaacgcaggacagccccccccacgcgagaaagcacccaggcccccaagcagacacgagaaaaacaaaaccaggcagccgaaccccacacggcaaaaaccacccacaacaaaaacaggagcgcccggaaagaaaggaaggagagggacggcagaaaaacggcgggaagaaggaagggaacaaacggagggacagcccagagacagacgaagcacacagccggcaggcaaggcaaggcacgagagggcaaacacgaacacccacagccacacagaaacgcccacgaacaggccccagccgcggccccaagcacagccaaggcaaggagccaaacagcggccagcgagacccacagagcccagaagacccgcccacgacacacccgaccacaacacacagcagaaaaggaggggaagggaacgcagagggaagacaaagccacaagagccgaagacccgaagaaacagagacgaaggaaaagaaaaaaaacaaacacaaagagagagagcgagggggagagagagagcgaaaagaaggcagagagggcagggaaaacaaaagaaggaggcaagcaggcagagccccacacgcccccggcccgacgagcccgcgagcccacaaagccagacccgagagagagcccagagaaagaaaacacaccaagcaggaaagccaaagagcggcaggacagagagcccagccagagagaaggcccacacgagccaaagaagaaccacacccagcaggcaaagccaagacgaacagaacaggaccccggaaacagcccaaaaaaccaaagcagcaagagcccccccggaaaggaacagagagcaccggaagcaggaccacaaccaaagaacgcacagcacaccgaaaggggggagaaaaccacgagaagcaaaaggccaagaaacaggaaacgccccaagccagacagcgagaagaaagccaaacaaccaagggaagaaaaacccggccagaaaaccacccccagaaaaaacacaacaaacacacaaaaaagcgaaaaaaagccagcacccgcaccaaaaagggggaaagcaacagaagcgagcagaagacgagacaaggagagagaagacagaagagagagaagaagcaaagaaagaacaacaaaacaaaacaacaagaaagaaagaaaagaaagagaagaggaaaaccaaaaaaaagagcaaaggaaacaacccacagcgggcgagcgcacccccccaccaccacgggcgaagggaacggagagaggacgggagcgagcccgaaccacaccaaaccgcccagaaaacacacagaaaagaaccaaggaagccggcacaagcagacacagacagagaagcacgacggggaaagaaaaccggaagcacgagaagaaccaaacgcaggaagacgacccagcgcgcaaccagccacaaagaaagaggagcaaaaagccaaaaacaaaagccaaaacagacaagacgaccaaaaaagccacacaagcaaacagaaaccgaaagaggaagaagcggcccaaagccccaggcgggaaaaggcacggaaaggagagagaagagaaaagggaagaaaccccaggaaaacaagcagggagaaaaaaacaaaaaaggacaaaaagaaggaaaacacaaaggcaaagaaacagcaacgggggagaggagacagagaagagagaacggcaaagggcaggaagaaagggcagcagacagaacccacaggcagggcaggacagagaagcccacggagaccacagaggggggaggaacaggagagaaaagaggcaaccaaaggagaaccagggggagcaacaacagcacagcgaacaggcaacaaaagacggaaaagaaaaagaagccaaacagcaaaccagggaaaacaaaaggagagcaagcaaacagggccaaaaaggaaacaccacagccacacacaaccacaggaagccacaaacaaccagaacaacacgagcgggaggccaggcagcaaagggaaaaagacaaacgaccgccgggggacaccaagaaaaagagggagacaaaagcaaacaccggcaacggcgaggccgccccggaggaaacgggggagagcacaagaagaaaacgggagagggccccagaaagcagggcagaacgaccggagccgagagagacaggagaagaggagaacaagggggaaaaaggacaagaggccagaagccaagggggaggagagggggacaccagggaagcccccacaaccccccccaaaggcccacaagccacagccacacccgcacaacaaagcggagccacgacagacagggaaaccacagcggaacccccaggcacagcaaaggaaccaacagaagagacagagaacacaaagccagacacgacaaccacaccaaacacaaacaccccacgcagcgaggaaacgaggcccagagcgaaaggaagcccaaaacaccgggaccaaacaagagacacaaagaacaaaccagcaccaggccccagagcccgcagaaccaacccacgcccagggcggaaaggaagagaaagcaaccgacccagaccaacaggacagcacccacagcacccacaaacggagagaaacagaaacagaaaacaacacagaacaaaacagcccaacagaaagaaacaccagcagaggcagacaaagaagaccaaaacccggcaaaaggcggagaagagaaaaaaacaccggaggggaccacgcacaccaaaagagaagcaggaacaagagcagaaaaaaacacagaaagcccaaaaacaagaaaagcaagagagagacccagagggaaggcaccccaaggagcggggaagagaggggcccagcagggacaggagacagaccaacccccagcgccccccacagcacccacagcaccaaacagaaggcaggcgcgggacagcacaaagaccgccagaacagacaggaccccaccagaaaaagaaaagggaagcaacgagaaaagaacagaaggcgggacccgaagaggaggccaacacgacccccaggggggcagaaacccgcagacacgcaccaaagagcgaaccaaacagggcggggaccaaccagcccaaagggcagcgcaacagaagaagaagaagagaagaacaaaaaaacagagacgacaacaccaaacagcaaaaacagaagaccagcaaagccacaccgcaggcaagaacgcagcgacgaagacacaaaggggacagcccccaggaggggccgcacaagacgcggcccagcgggagcgggaggaacacagaagagcagggaagaaggaaccaacacacaccacaacagaaggccaaacaaaaaaaagaagcaagaggaacagcaacggcagcaacggaacaccagcagaggcacagacggcacaaacaaagcaaaccccaaaaaggcgacaacaggagaaagcaagcaagaagaacacagcccgagggaaacaaaacccgcaaaggccaaagaagccagccaagaaaacagaaaagcaaccaaaacaacgaaacaagcaacggaagagcccagaaaggcagaccaacaaaaaagccgagcggagaaaaacaaacaagacgaaaaagaagaggaacgacaggagaagccaagcccaaaaacaaaaaacagcaagaaaaaacagaaaaacacaggccaccggcaaaacacagcaaagccacacaagcagccggaagcaaacaaaacccagcccccggagccccggagaccaacgcgaacacaaaagaccagacagccagcggcgaaaagagcagcaacagagaccagccgaacacaccagcaaagcaagaaaacaaaaaacggaaagagaggagagaaaaagaaggaaagagcaaaaaagcaagacaggcgggag

SEQ ID NO: 431 - RNA, 359 nt, Homo sapiens
ccaggggagaacccccacccgccgcaccgccgacccaaggacaggcagaaggagcaggagccagccacccggcccaacccccaggaagccggaaagcacaaccgggcccagccccacagggaaaagggaagcagaccagaggaggggcacagcgaagggagagggcgcccagggccccagcgcccgggcagggcaggcaggcgcggccccccagagccgacgcagggcccaggcgagcaggccccagaccccacgcgggcagggagaaaggccaagaaagggagggggccagaacgcacagcgcccaggcagaagggccccgcccgccgagcccccgcaccagagccacccgggcagac

SEQ ID NO: 432 - RNA, 2813 nt, Homo sapiens
agcaacagccacgagacggggccacagaaagagccgcaccaaaaggacaagacccgcccaggcggaccacggggacggaaaggggcgcggggcggcggcccacagagagcggggcccgcggagaaagaagaccccggcgagccaacgagcgcgagagcaaaaaggggagaaggccaggaaggaaggaagacacccaccccggcggggagcaagcaccccccaccaaagagagaacaagcccgcacaagccaaccccggaaagcccgaagccgggcagagaaaggggcagaagcagcaagcgggggagaaaaggagagccccggggggaaggggcaggaggggcaccgcaaacccccagggcaccagggcgagccagcacgagagagaaagcggcgagcccccagcagaaggacacggggccgaaccagaaacggggaagaggcagccacagggaagaacagaagacgcacccaagcaggccacacagcagcagcagcaggcaggcggagggaaaacaaaacagcggccccggagccgaccaccccagcacccgacgacacagcacccggagcagcggaaaacgaagaaggagaggagagagcgcccaggagggaagggagggaggggagcagcagaacagaagagagggcagagcccgggaacaccgggggacaggagcaggacaccccaacggaaccaggcaccgcccgccaccgcggcccagcaccaggccccgggaaacagagacccgacaccaggaacaaaccagaccaggcaagcaggaggcccagggcaggaccggaccccaaaacacagcggcccagagcaaggcgagggggaggagggagggagaggccgagcaagagcagaaggaaagagcgcacacgcgcaaaggccaaaagacagcagccaagacaacaagaggcaaagccacaaaagacggcaaaaaacccacccacaggagagaggaacagcaagccagagaggggagccaacggagcgacagagaaggcgggccccgagacaacgccgaaccagcacgggaggcgaggcaggggacaccgaggcaggaggagaccaccggccaacagggaaaaaaaaagcgaccaaaagaaaagaaaggaaaacaaaagcgacaaaaaacaaaaaagcggggcaggggcacaccgaaccagcaccgggaagggagcagagaacacgaacccaggaggcggaggacagcgagccaagagaaccagcacccacccgggcgacagaggagaccacagggaaaaaaaaagccgacagagaagcagagaccgccgagcccagcccaccaaaaagaggaaaacagccagaagggggcggggaaaaaaaaaggaaaacaagcagagcacagcccaagacaaggaggagcaggccggcgggccacgcagacccacagcccacaggccacagacagaggcagagcggaacccagagaggagaggacccaggggcagcacagggcagagccgaccgaaacccagggagggaccccagccaggccgggccccacacccaaaaaaaaaaagaaaagagacagggcccgcccaaggacccccgccaaggcgggaacagacacgaccaccgcacccggcccccggggccgaccaaagcagggaccagccaggaagggaaacaaggggaaacaaagacaggaagagcacaagaagggcggagggggcaagagagcaaaaccaaggaaaagcaggaaaggaggaggaaaggggacagaggggaggccgcaggcagcagcacagggaacaaagcggggcagggagacacaggaggcaacgaagagcgcaggaagacagccaccgcgaagccccaggcagagaaggagcaggggccccaaggagcacacaaaaaggagcgcacccggcggggggacggaggcaccgcacccaggcaggaggcaaggcgggccagccacgcaagcccaccccgggcaggcgaccccgcccagcccccaagagcgggacacaggcacagccaccagaccggcaagaagagagagggcacaggaccaggcggcgaacccgacccgaccccgccggcccccaaaagcggggacaggaggagccacggcccggccgggagcgcacccaggccccacaaaccacagacgaaggccaggggcaaggacggcgggacccgcggcagccccaggcagcacaggcggaccaggaggcacagacagcgaagaaggaaagggagggagaccgccacagacagacaccccggacccacaaccgcccccgcaaagaaacagacgaaagggagggggggggaaaggggagggaagaggaaaccagccccacgacaagcaaccaagaacgaagccacagccaaaccccccagcaccgcacaggggcagggagccaacccagggcaagcacaagcagagccacgacgccgcggacaccccagcaaaagccggaaggcagagccgggcccgaaaaagggcaagcagcacgcccaaaaagaaaaaagaaggccaaacaggcagccgaagcaacacacgggggaaccaacagcgaaccacggcacccagcgaggccagaaaaacaagaccccccaagaacagaaaaaaagaaacaggaaacagaagcacacccagcaaagggacagcaaaaagacagaacaaaacaaaccaacggggccaagcaaacggcagcccaccccggggacgggggaagaggaacaagcaaaaggaacagcgcccagcggaggaaaaaacgccgacccaggaacgggcgagcaccaagagcaccagagggaaaacagcccca

SEQ ID NO: 433 - RNA, 28579 nt, Homo sapiens
acgaccgaccagcagggcccgagcaccgacagaaagccacagacacgcaggggcacacacacacaaacacccacacaccacacccagccgccagaccgagaaacagcggggcagggcgaggcaggccagggaggagagagacgagcaaaagcaggagggggagcagccccggcccccccgcagaggcacccggacggagggcaaagcggcccgggggggaaagagaccgggcgcgcccccccagaacaggcaaacggcgccccggaggccccaacaagccccccccccccccacacacacccccagacccccccgcacccccaaaaccacccaccccaccccacagaaggagcacaaagccccacaagcccggcccccaacaccaggaggagacaggcccgggcccagcggggaccccccaccagggggccccgggccacgcccggcagaccgacgccggcggccacccgcagcaccacgccgcccgccgcaacacacagaagggcaggaccgcacgccccagcaccccggaggccagggcgggcagccgcgcccagcggcgcacggccgaaaccccccccgcaacccccgcccaagcgcagggcccacagcagcacccagcacaccacagcgaggcggccaccccgaccagccaagaaaaaagcccaaaaacccacgggccggggcgaggcccaccgaacccagcacgggaggccgaggcagaaggacacgagccaggagcaagaccagccgggcaacaggcaagccccaccacaaacaagcaaaaaagccggggggggcggcaccgagcccagcccagcacgggaggcgagggggaggacacggagcccggaggggagggcggagcgagacacgccacgcacccagccgggcaacgagggaccgccaaaaaaaaaaaaaaaaaaaagaaccagcagaggaggaagcgagcgacagaggcaaggaagagcacacccagccaagacacggacacacccccagaccgcccccccaccgccccacacgccccaggcaggagaaacgccccagccagagccacgcccggaggaccggaggcgagacccagcccccaggccgaggcccccccccagggggccggagaggggggcgggccggggcgagcacgccagccgccgcccagccccgaaccaggcaagcccgggcagggacccgcgcccagagaaggggcggcaggaagaaggcaggcccccccccccccccaccacccaccccggccacccccccgagaggagccaccgcgcccacacgcaggcagggcacaacggccacgcaacccgcccccaggcaaggacccgcccagcccccgagagcgggacacaggcaggccaccagcccagcaaagaagacagacggggacaccggagccaggaggccgacccgacccggaccacccgcccagcccccaaaggcggggacaggaagccaccgccccggcccccccgccacacccacccccgcccaacccgcacacccccgccagcccaggaaaaggacggacgcgagggaagcagaacgggcaaaacaggacaggagcagggcggccccagcaaccccccagccgaaggaggcccagccgaaccacacgccaggagcccggccagcacgggggaccagggcggccaccaacggggggggggggggggggggggggcagggcgggggagagaagagagggaggggaaaggaccagggccccagccaacgccacaaacgggcacgagaaaaaagaccgaggccccaggcaggcgcagaagggagagggaccaggaccccgggaacagcagccagggccccacagacccccccccgaggggggacggacgccgaggcacacacaccccggacgggggcaccagggcaagggcaccacagaacaggggcgcagaagagcaggacaaaccagacgggacccagcaagggagacgcacaccgccccaccggccccaacagagagggagacgcggcagggacaaagaccagccaagggcagcagaaccaggcggaccgggccggccccaacggacgagacggagccgccgcgcccaggcggaggcagagcggacccggccacgaaccccgcccccgggcaagcgacgcgcccagcccccgaagcgggacacagggcccgccaccacgccggcaagaagagacaccggcaccggggcaggcggccgaacccgacccaggaccgccgccccgcccccaaaggcgggaacaggcagagccaccacaccggccccaagcaggaccccacggaaggcacccacacaggacgaccacgcagagaaaagcaggcagagggggggaggagcggggaggggaaaagggccagaagggacaaaaaagcaaaggcaaggccaggcaagagcccacaccccccaccgagacccccacagggagggggcgggccaccccggcacccaggcccaaagcccggacagcggaggacaccgagccgcacacagagccaaagggaggggcacggccaaagccaaagcaacccacccaacacagggcaagacacggaaaaaacccccccaagaagcagccgaccacaggacccccgcagagccggggaccaccacccaccaggaagacagcacagagccccccaggcggggagaaaagcgagcacagccccaggggagcggccggggacccaggcccgagcccgcccagcacccagcagcaagccccggccggaaccgacaaaggagacccccaccagggccaggcccccgccccagcccgccgccgggacaaaggacgggccacaaccaaggaggagaaaaacggccacagccccagcccgacccgcaagcaaagccgccacaccagggggggagacggcacgggacagaagaggggggcagaaggggcccccagagggcagggcccgcacaggccgggccgcggaggggccacccaggccccacacagccggagccacgacccaggccaccagccccccgagccccaggagagaacgcgagaaggacccaaacccccgaccccgaaccacggacccccgggggcagggccagaggggcacgcagagcagaccgggccaccccagccgccacacccaccggacccggggcaagccacagcacgcacagacccagcgcacaccggaaaagggagagacgacgcccagaaaccccccccggagagggaccgagcgggggcgaccccccccacgcaagaacaccggaacaggaccaggccccggagcaccggacaccacggcccacaggccaccaaaccccagcccgggccaagccagggacccaagggagaggagagccgcaaggagcggagacccaagggacaggcccgccggcagggggggggggggggggggggacacccaccccccgaggcagcagagggggcagccagagggcgggcgggccaggccaggcaaaaaggaacagaccacacaagccgcccgcgcgcaggcccgcccaggccgacccgccaggcccggaacacagcacaaaaaggagccccagacggccccggggacggccccaaggggcaggggaggggagccgcccggagacagccccaaaacggccagagaagagcccccgccacaaacaccacgggagccagccagccgccaagcacaagagccccgcaccgggcagcccccccccccccgcccccgcaggacccaccagcagcggacgcacccaacaaggccgcccaggcggaaccagacacacgggaggcacagaggcgagaccaagcaccaccaaggccccaaacccagaggaggcaccaagaaacccgaaggcaggaaaacgagccagagaggcgaggacgcccaagcacacagccagaaacaaccaaccaacaaccgcacagcagggccagacggaagcgcacaggaagaaacaaccggcacacacccaggaaaagcccacaaacaaacagggacgaaacggaaaagagcaaaacgcacccaccacccacacaaaccagacacaaacagaacacacccccaagcccaccagccaggccaccagcaaagagacaaggggggaacgggccgagcagaaggaaaagcaggcccaggcagaaggaaagggaaagggcaccaaacacaaggaacaacgagcaaaacgaaaacgcaggaaagggcgggcggacacggggccacgccgaacccagcacaggaggccaggcaggaggacacgagcccaggaggagaccagccgggcaaaaggagaccccacacacaaaaaagaaaaaaaaaaaaaaagccaaggggggcgagccgagcccagcacgggaggcgagggggaggagaccgagcccaggagggaggcgaggagcagaacacccacgacccagccgggcaaaagagagagaccccggggaaaaaaaagagcaaacaacaacaagaaaaaccagaaacagcacaagaagagaccgacagaaggggagaaggaaaacgcggacaaacggcacacagcagggccagaaaggcaggcgcaaagaagcccaccccgccgccaaagaaaccgaacaacccgaacagaccagcagaccacgaggagcagaaacaaccccccgggcgccagccggaccacagggaaaagcacagcacacaggaggcacgcaaagcgccccccagccaccacaccggcccgacaaacacacaggggccggaaagcccggaccggcgaagggcagaaaaagagaaaaacaagaagagaaagggaaaaaggaggaagaaacagccgcgaccgggcacgcaagcccacggaaggcaaaccacacaggaacccaacccaagaggagggacagcaggagacgcagagcgcagaacaaacacccaagggggggcggagagacagggccgcgcgcaaggcgcagcggaacccggcccgaacaacccgcccccgagagcgggaccacagggcgccaccaaccaggcaaagagagacagggccaggcggaacacacaaaccaggcgcccaaacccgggccaagaaccaccgccacacccccagcggcgggaacaggcagagccaccgggccggcccacccaagggggcaaaacagcaaagaacgcaggcaaagagcacgcagagacggaggaccgagcggggcagcccagagacccgggcaaggaggccaacaacagcagcagagacacacggagcaagaaggggcaggggacacacagccagcgcaccggaagggagagaccacaccacacggccaaagcaaccacaggccacacaccaagggggaggaagaccaggcgaggaagaccaggaagaaggccaggccgcacccccaaccggcagaaggccaccaccccaggggcagcagccacccaaacggccacccaaagcccccgggcaaagagggacccaccccccaaaggcgccaccccccccggaacacccccccaagacagcacacaagaacgggcagccaccagcaaaacgaaccacaaggaaccagccgacggaagcaaaaacacaaccaacacagacacgggggccggcaaccagcaagggggggcggggagaaaaccaaggacagcggcggggggaagcgaacaaaaacacagcaggcaggcgggacacacgcgagggcaccacgaagagagcgccccaggcccagcacccaaccgcccacagcaaaaaggagacggggccgaaggcaagcagcaggacgggggcaagggacggcagccagagagggcaaacccacaaggagagcccgggaacacagccccgcggcccggagagggaaggacaggcgcagccgagccaggaagaaaagccgcaggcggggggggccacgccgaacccaacacgggaggccgagggggcgaacacgaggcaggagcgagaccagccggccaacagggaaaccccgccacaaaaaacaaaaaaaaaaaaaaaaaaaagcggggaggggcgggccgaacccagcaccgggaggcgaggcaagagaacgcgaacccagaggggagggcaagagccgagacagccacgcacccagccggcaacagaggagaccgccaaaaaaaaaaaaaaaaaaaaaaaaaaaaaaaaaagaaagaaagaaagaaaaggaaagccgcacacgggaggccgaggcagggaacaccgaggcaggagcgagaccagccggccaacaaggcaaaaccccgccacaaaaaaaaacaaaagagcgggcggggggcacacgaacccagcaccgggaggcgaggcaggagaagcgaacccaggaggggagggcaggagcgagacggccacgcacccagccggacaacagagcaagaccgccaaaaaaaaaaaaaaaagggggccgggcgcagcgccacgccaaacccagcacgggaggccaaggcgagcgaacacgaggcaggagagagaccacccggcaacacaggaaaccccgccacaaaaaacaacaaaaagccaggcggggggggcaccgagcccagcaccaggaggcgaggcaggagaaggcggaacccgggaggggagcgcaggagcgagagcaccacgcacccagccggggacagagcaagacccgccaaaaaaagaaagaaagaaagagagagaaagaaagaaagaaagaaagaaagaaagaaagaaagaaagaaagaaagaaggaaagaaagaaaagccgggggccacgccgaaccagccgaggggaggacaccgagcccaggaagagaacagccgggaacagggaaacccgccaaaccaccacacggccaccgcccagaaaaagagacagagcgccgcacccgggcggaagcaaggcagaccagccacgcaaccgcccccaggcaaggacccgcccagcccccaagagcgggaacaggcagaccaccacacccggcaggaagaggagggggccacgggccaggcggccagaacccgacccagggacgccccccggcccccaaggcgggaacaggcagagccaccacgccggccccaaaaaaaaaacaaaaaaaaaaagaaaaggcccacaccagaaggacaagcccgcccccgagaaacagcaaacagagcccacagcagggcccccccgcccaggggcaagaaaaggagggcaggaggcaaaggggggaggccaggagaggaaggggaagaaagagcagagcaggagagaaacagagcaaaaggaggcgagaccaggagacagaggcaggggcgcgggggcagggacggggggcaggggcggagggaaggaggaaagagcaggacggggccgcgccaccagagggaccgggcaaccccaggccccaagcccagccgagcagggaagccccaggcacagggcagagggagggggcccgaggaaaacagcagagcggcaccaggcagggaggccaggcgcccgggcccccagccgcccccagacccgggcagacaggaccgggagaaaccgcggcccagccgccaagcgggaggggcgccaggaccgccaggcagaggcgcagaagggcacggcccagcccccagcccacgcgccccaagaacaccggcacgcgcccacagcccgcggggccggggggaccgggggcagaggaagaaaccagggccgcccgacgagccaagcaacgggaagagagagggccacaccagaaaacaggaaaagagacgggggagaaagcaggaagcgcagaagcgggaggcagaacaggggaaggcgcggagccgaaggaggagcggaccaaggcagaggggaggagggcacgcaggcaggaggcacagcgagaagaaggccggagggggaggggaacacggggccagagacggaagcagggccaggcggagggggggccgcccagcggggagaggaaggaaaacagaagggccggggccgcccagaggcaaccccccaggggcagacgggggaacagcaagccgagggggacccacccccaccacggccaggagacaggacccacgacggcccacagccaggcccggcgggacaaagggcccccccggccgggagcgagagggcagaagcgcaaggagcacagaacccccccccccgcccgcgcccacacccgccacccccccccccacacacacacacacacacacacacgcccagaaccggaacaaaaaaggcacaccaaaagacgaccaggcagggcggaggggcggccaggccgggcagggaaccgcagaggggccgagcacggagggcacaagcggcagccggacaaggggagccaagggagcgcgaggccagggcaggcgggaagggagggaggcacggcgggggggggggagggaggcgggggcggaggcgagcacaggcggggcgcagcccccaaggggacagggcggggggagaacgaggcccgaggggccgcagggaaccgggggagggggaggaggggcgcgggcaggaggaaggcgcgcgggggggggggggcggggaggcggggggggggccggccagccaaccacacggcgcaggaggaaaaggggacgaggccagggcacacccccagcggacagagggggagaaaacccaaggagcaagcaggggcgggccgggggcccaccggggggcccaggagaagggaagccacgacccgagggccggcagccccccgccccccaaggggccacgccacgccaagcccagccagagagaaggggcacccggagcacaggccggaccgcaggcagggcaccggcgggcacccagggaggaccgccgcccaccacgagcccccccaccgacgccgccccagcagacgagaaccccaggaggcagggcgacccccccagcccagcccccagagcaaaggaggacaagaccacagagaggggcaacgcaccgggggagcggcgcgggcggcagggaacggaggcccccccacccccagccccaaagaaaaggcaggaggccccgggggggggcgggccgggccaccagggggcgcgacagcagccagcacggccgcaccgcccagaaagagcaaaagacagcgaaaaaaagaacccaggcaggccggggcagggcagagggcgaggcaagggaagggggaggaagcagggggcggacggaggggcggggcagggaccgcacccacggccaagaaagagcaccaaaggccccggaaaaacccaggcaacgcaggcgggccaggaagggaggaagggaaggagccggaggggaggccccacccccgggaggggaaggagggcaagaggcacaaggggcccccccccgcgagcccaccaaggcaggccgccaccggagcccccaaggagagagaaccacagccccggccaggaggggcagcaggcagaggagggcccggagggagggccacggggcacccgccaaaggcggcgccccgggaacccccagaggggcccgggggcaagccaggccccagcaaccaggccccgagggcgcagcggcagggaggagccaaggcaacgaaccgcccccccagcacgcccaccaaaagggcacggcccaggcaacacccacccaccggggcggggagccggggcgcgcaaacacaggccgcaggaaaggggacaaacgcgccgggcaccggccgagggccggaggaagcgggcggggcagaaggaagggccccccgccggcccgcccggccagccccgggccacccggccccgaaagccgcccaccagggccagcgcaccccccacgcccggccgcagacgccgcgacaaaaacccgccagcccgggaggccggcgcccccaggggggaaccaagccggcccagagcggggggcgggaaggcgccggaccgcagggcccccaagcaacaggcagggggacggaaccgcccagggagacagggcccacagggaaccacgaggagggccagcgccgcagcaaaggggcaaggcaagggaaggggcgcagggacagcgcaggagccaggagggcccgaaggaggcgagcgaaggaggaggggccaaaggagaccaccaaaagcagacagcaccagcccacaggagggagcagcaacgcaagaagagaagcgggcaccgggggagcaaagaaagggccggcgggggccagccgaacccagcacgggaggccgaggcgggggacaccgaggcagaggagaccacccgaccaacaggagaaaccccgccacaaaaaaaaaaaaagccaggccccaacaccgggaggcgaggcaggagaacgcgaaccaggaggcggagggcaggagcgagacgcaccacgacccagccgggcagcaaaagaaaacccaccaaaaaaaaaaaaaaaaaaagaaagaagcaacaacggcccggcaagaagccagagcaaccaaacacaaaaaccgcaagacgcaacccaaagggacaaccggggcccaggagaaaagagcagccgggggagagcggagggcagaacaaggaggaagcccggcaggcaccaaggcaggaccacagaaagagaaaccacacacgcacacggcagcacgggacgcagagccagggcacccacgggcccgagcccgggcgccccaggagggccaaggaggaacaacaaccagggcacgcccccaaagacacaaagcacagcgggagcccaagccccaggaacagcacaccacaagcgagcccccacaaagggaacacaccgagcagagccaccggccaggcggagacagggccagccggccacgcaacccgcccccaggcaagcaacccgcccagccccccgagaggggaacaagaccagccaccagccggcaagaagagagacggggcaccagggcaggcggccgaacccaaccagggaccgccgcccagcccccaaaggcggaaacagaggagccaccacacccagccaaggggacacacaaaagacagggcggaaaaaaaacaccacaaaagcagcagccgggcacagggccagcgaaaccagcacgggaggccaagggggcagacacccgaggcaggagcaagaccagccgaccaacacagacaaaccccaccacaaaaaacaaaaagagcgggcggggacgcagcgaaccaacaccaggagcgaggcaggagaagcgaaccccagaagcggaggggggagcgagacagccagcacccagccgcgcaacaagagcgaaaccccaccaaaaaaaaaaaaaaaaaaaaaaaaaaaagcacagagaaggaccgcagaggcagcgagacggagcgccgcacccaggcggaggaagggcacaaccgggccacgaagcccacccccgagcacaccacccgcccagccccgcgagcgggacacaggcaggccaccacgcccagaagaagagagacggggcaccagagccaggagaccgacaccgacccagacgccgcccggcccccgaaggcgggaaggggggagccaccacgcccagcccagccaacaaaagaaaaagacaagacgccacagaggcaggcgcaaaggcgaccacaaaagagggaaaaagcaggaaccaacggacaagacacgaggcccaggagaagggccggccaaggcagagccagcggggcccagggagaaccaagggggggcccccccgcagggaaggccccccacccccagagaagggccccaggacgcaggacaggccagggggggcaaccgggaggcagaagcgaggaacgaagggcaggagaaacaagggcgggcacaggggcacaccaaacccagcagggagacaaggcaggggacaccgaagcaggagcaacaccagccggccaacagggaaaccccgccacaaaagacaaaaaaaagcgggcgagggcagggcccaaacccagcacgggaggcgaggcaggagaaggcgacccaggaggcagagggcaggagccgagagcgccagcaccagcgggcaacaagagggaaacccaccaaaaagaaaagaaaaagaaacaaaggcaaggagacgccaacagacggggacaaccccaagaaaaagaaggcacccccagcccaccgaacccagagcccggagccagcagcaggccgccaggaagaagccggccgggggacaagcaggaagacaggagggggcccgggaaccaaccacgggccagaaagacccccccagggaaggaagcaaaggaaagacacgggacaaggaggcccagcacggacaagcgagagaaccaacaacccagaccccaaacagaacacccagaccaggaaaagcagaaaaggcagagccggcacaaacgaccccacaacgggccgacggcgggggcccccaggcgccgagcgccaggagaaggggccagagggaaagaggaggagggggcccagcccccacagccccagcccaggcgaacaccccagccgccagcacaaaaccgaaaaaggagaggccccccaagaaaacaacagaacaaaacaaacagagaaggggaacccccccgagcgccagaaagaaaggaagaaaaaccccgcagaccgggccgcccacgcgcaacagggcgggaggggaagagaaaaaccccgccccccgaccaaaaacccagagcgcccgaacgaacaagccaacccacccccagcaaaccccacgcccgccacacccacaccgaagacgacacacacacacacacacacacacacacaacacacagcgaagcagcgaaaccccaaagagcagaaaccaaggaagggcaaagaggaaaaaaaacaacaagccaggaaaaaaaacagccccaaaagcaccagcaggaccccccaagcaccccacgaggccccaggccaccccaccacccagagcaccgcacgaggcccccaaaggacagaaagcccacagggccccaagccagagggcgccgaccagcgcccaacaacaaagcagagcagcgagagcaggaaacaggacaccagacccacccacaggagcccccacaaacaaaagcaaccagaagcggcgaggccacggaggacggcagcccagagacaccgccacagacacaggggggccaaaggccagcaaggcacacgagccacagaacagcccgggccacagaagggaccaccggcagcccacaacagggaccagggcccaagcaccgaaaaccggaaaaaaggaagcgggcggacaaggcagcgggagaacagcccaaacaaagcccagcaaagacaaagacacagaaaaccagacgaccggccggggaaagacaagaagaagagagccaaagccccaggggcaagagaaggaggaggcagggagaggcgccaaacaacagaaaagagcaagaaaaccccaagagcgggagggggaggggaaaggcagcagggacagcaacggaggaaggaccacaagaccgagccccgaggcagaaaagcgccccgggccaggacgaaggccgcacaggaggggccaaggcacgggggaacaccacggccacggcagcagaggcagaggaggcaagcaagaacccgaagaagagaccagaccagggcgaagccagaccaccccgagcaacccccagcagcccaagccccaccagcccaaccccaacgaacagcaagaagaccccgcagggccgagacggagcagccgcaccaggcggaggcaggcgcgaccggccacgcaaccccacccgggcaagcaacgcgcccagcccccaaaagccggaacaggcacgcgccgccacacccagcaagaagagagacagggcaccagggccaggaggcgacccgacccggcccacccaaccggcccccaaaggcgggaacaggggagccacgacccagccgcacgaaaaacccaagggcccggagaggccaaaacacaggcagaagaaccccccagaagccgcggcccccagccgagaaaaagccggccagccggcaaaaggcgacgcgcccccacccccaccccggaacggaaaagcagagggcaaaggccaggcccacacacaggcccgagaagacggcccacccagagccccgagcccgccgaaaaaggaaaaagaagaagccaccggaggaaaaaaggaggggggggggagacagggccgccagcaccaggcggaggcagggcaaccagccacgagcccccaggccagggaccccacccagcccagagagcgggacacaggcggcaccaccacacccagcaagagagagacgggccaggcccaggcggcgaacacgggccaagcaacgacgcccggcccccaaagcgggaagggcagagccaccacgccggccaaacaaggaagccgcaagagaacagaggccccccacccaggcccacacaaggacaaccaaccacggaggaaagaacaaaaacagaaaaaaaacaaacaagaaaaagaacaacaaaaaacagcaaaaaaaacaagcacccaggccagggcacacgccgaacccaacacgggaggcgaagcaggaggagcgagccggaagcaagaccagacgagcaacaagagagacgagcgacaaaaaaaagagcgggcgggggggcccgagccagcaaccagaggcgaggaggaggacagaaccgggaggcgaggcgcaggagccagacaagccacgcacccagccaggggccacaaagcaagaccaccacaggaaaaaaaaaaaaaaacaagcaacagaaggaaaagaacagagaaaaaagaaccgagcacagccgcagccaaaaaaaagagcaagaagaggggggagaaaacagccaaacacggacgagccgggacaaaccagggagcggaaccaaccccccgccacaaaccccaggaacagagggagggacaacgcacagaggagccccaacacggggcccaacagcaaggagaaggccccaaggcccaggaagcgagggcaggaccaggaacgccggccacacccacaccacccccagggaccacggaccaggggagccagcaggacgagggcgagacccaacagggaagggccaagacagggggccgggagagggaacacacccccggcccgggcaccaaccagcaagacccagcccgacccccagaaagacccgccccaggcgggcaggcccccagcgcccacgcacacaggcagaaagcgacgaggcggaaaagcagacgggacagcggcccccaagagaccggccccccccacaccggagcaggccgagcagcccaacagggagaagaaaaaaagccggacagagcaaaccccgccgccaacaacgggaaggcacacacagaaaggagaggaaggggcccggaggggaggaggcagggccagaggaggaaggagggccggacacccacggggcagagggacgaggagggcggccacggggcaggccagggggagaacgcacaacccgggacccggcaaggagccgggccaggggaaagaaggcaggcccggcaaggcaacggaaagaagcggccagcccccacaggaccggcccgagaccgcccaccccccgggccaagcaccagccagcgaccgaaccggcaccaccacccgaaccccaagccagccacgacagggcgcaggcccagggcgggccgccgggagggagcccagggaagaagccggcgcggccacccccgcggggcgggcccaggcgccaggcacgcagccagaggcgcagggcaccacaaacccacacagccaaacaacaaaaaaggaaagggagcccgaagaccaaggcgggagggggggggggcagaacccaccagggaaaagcggagcagggcgagggaggagaggcccccacccgaccccagcaccccgcccccccccggggcgaccaggcaacaaacagccggcagccaggcccagcagccaagccggcccccaggcggcgggccaaccggccccccaacgccggccaggcccgaacgagagacccaccgcaccccgggggcggcacgcccaccaaggaaacaaacgggccgggaaaagaaaggaacggaccgaggccccagcggccggcggggagcaagaccagaggccgcccaaagagaggagggacggagcaagcgccagaggccagcgccgggcaagcccacccggccacgacgcgagaccgggcaagcccgacccgccaacaccgaaaagggcacaaaaacaacaaaaggcgaggagagagcaaaaaaagcacaaaaggaggagggggggaggagaccgagccgcggcccaggcggagcgcagggggcaacggcacgcaacccgcccccgggccaagcgaccgcccagacccgagagcgggacacagcacacacccacacaccaccacgcccagcaaaaagagagacagggcccgggccagggcgccgaacccgaccccagggaccacccgcccagcccccaaaggcgggaagagggaagccaccgcacccggccgaggagaaaaagcacgacaagagagaaagggggaaaaggggggggccacaggaacaaaaaaaccaacacccaaggccaggccagagggaccaggcccccccccaccccacaccgccccacccccacccccccccagcaggccaggcccccaccgcacccgagccagggcacgaacggcccagcggggcggaccgaggcccaagccccaaaggaagccgacaggggaaaccccagggaggaggcgccagccgggaggacggccaccgaggacaccagagaggcgggggcaccagagcggaacaaaaagagccccacagacgagggccgcagggggaaagaggagggagggggccagcaccaccccacccacgggggccgccaccacgcggacgaccaaaagcgaccaggcccagaccaacggccgacacacagcgggagacgagcgagcacccccaagcccgccgcgagcaggacaaaacccgccgcagggggcagggagagagaggcagcacaggccaagccggggggccgggggaggccagggccaggggccccccccccccacccccacccgcccaccccagcccacccaagccacacaggccgaaagcccgccagcggcgaggccgagaacccgaccccaacgacccagggcccccaccccaccagcccagcacccgggagcaagcaccggggcggacccagccccccccggccccaaggggccaaagcagaagcaacagaggacgagagcccaagagagggggacacaggcccccaccacggcagcgagacccagcacaagccagggccccccaagcccgcaccaccaacagcacagccgagcaccgccggccgacaacgcggggccgcaggacaagggaacgacacagacccaacccgcccgggagaggaacacagcaacggagacaaaacaaacacacccaacgcaagaggagagcagagaggaaggggcgagggacagacccagcgggcccaagagagggacccaaagcacaccagcaacgaaggaacaggaagaaggagcagggaagagagaggggagagcacggacaaacagcagaaacagcagacaaaagcccgaggcagaagagcgggacccgacgaaaggaggccacaggagggagcaaaagaagaccaaagagagggggaagagacagggcgaacggcgagaacacacaggcgggaaggaccgacggaaccaggagggaagggggggggcaggcgcagcgcgacccagagcgaaggggaaggcagagcgggcaggagaccagggaggaggcacccaggggaagagggggacggaggggaagggagccggagagaaggggcagagccaagaggcgcagggaggggacaaaggaccgggaagggcagaggaggcaaaggagaagagcaaaaaccgccaggcgacggggaaacgggggggccagacgagagggaaaccccagaggaggggcagaggggagaagggagagcaggaaaggagacagagaacccagcaagaagcaacggaaacagaaaaaagaaggggccaccagggccagacggcgaacccggcccaagcaaccccaccggccgaaaaggcgggaacagcgaaaaagaaaggggcgggcaccaggccacaccgaacgagcacagggggccgaggcaggggacacgaggcaggaggagagcagccggccaacagggaaacccgccacaaaaaacaaaaaagcagcaggggcacacgccaaacccagcaccgggagggaggcacgagaacacgaacccaggagggcaggagccgagacaggccacgcacccagccgggcaacagaggaggcccaccaaaaaaaaaagacaaaaaaaaaaaagccaggcggggccagccgaacccagcacgggaggccgagggaggcggacaccgaggcaggagcgacaccaaccggccaacagggaaaccccaacacaaaaacacaaaaagcgggggggggcgcagccgaaccagcaccaggaggcaaggcaggagaacacgaacccgggaggcagagggcagaaacgagagcgccagcacccagccgggcaacaggaggaaaccgccgaaaaaaagaaaaaaaaaaaaaaaaagaaacacagcggggcagggccacaccgaacccaacacgggagccgaggagggcggacacgaaccagaggagaccagccaggcaacaggcgaaacccaccacaaaaaaaaaaacaaagcaggcagggggcacaccgagcccaggaccgggagcaggaggcaagggggaggacaccgagccgggaggggagggcagaagcggagaggccacgaacacaagccgggcaacagaggaaaccccgccaaaaagaaaacaaagaaacagagaaaaggaaacgagaggggaaaaaagacaggaagggaagaggggagagagaacacggcccaaaaacagccaaagagaaccagcccagggccgaagaccaccccacaaacgccgggaagcggagcccagaacaaagaaaagggaggcgcacccgcagccacagcaaacgagaagcaaagaaggagaaggcacaccgggccggcacacagcaaagagcaaaaagcggggaggaagcggagagcagggcaagaccaagcaagaaagaaaccagacgcagaaaaagaagcggccggagggggccacaacgaacccagcacgggaggcgaggcaggcggacacgaggcaggagcaagacagccgaccaacaaggaaaccccaccacaaaaaacaaaaagccaggcgggggcacacgccgaaccagcacagggaagcgaggcaggagaagcgaaccgggaggcggagggcaggagccaagacacagaggcgacaaagaagggagcccacacagaggaagaacgcgccaagccacacacagggaagggcaggaacgcaggccccccgacccacgaacccccgggggacaacccccccgaagaccccgggaggcaacacagcgcggccaggccgaggcacacgagccgccacacagagggacaaccccgacccacggaacaagaccagggaaggaccccgaggcgggcgccagagcaccccgcaccagcagaggaggagcaaagggacggcggaccagacagagggccaggagggcaggaggagggaaaggacagaaccacagcaaaacaaaggcagcccccacaacgcggaaaggcgcagcaaaacgcaaggccgaggcacgcccggggcgccacaagaccggcaccaggggaacccccaccccaccaccccaccccaacacaggacaccagcaacccccacaaccagccagggccccccaccgccccccaccccagccccggcgcccaggcagcaccgagagaaccccccggcccacgaagggggccccccagagccaaggccagaccccaggagagcgaccgacccccaaagcccccccacacgcggccaacagccagccacccccgccccccaggaaaggacccgacccaaggccgcgccccccccgcgaccccgaagggcgcacaagcaggcaccacagggagggcgcgcacaccagcacgagggagaaggccaccccaacccggaacagcagacaccaccgcccagggacagagaagaaacagaggcagagaggcagaacagccagaccacaccagggagaaaaaaccaggacgaaccaaggcgacgagaccgacgaaaaaccgcgcagggcagcaaacagggagccccaagagcgaggcacaggaccggggcccggacccacgcgcggcagccgagagcagaagaacggggcagggagaaaacaaaagcagcaaacaccggcacaggaaaacaagaaaaaaagcaggcccgaaaaaagagaagcacagggcccagcaggaggccaaggggagggacagagacaaaagacccaaagccacacacggcccacagaaagcagcgggcccgcgcaaagggccccacagccccaggggcccaaacacacgccgaacagggggcggaagacccggaggaaaagaaggggacagcccgacacccaggaccaagagcaaaggccaagaccgaaaacaccagaaaagcccaaaccaaccccacgggccccgcgagccagacacgccgagggcgcgggggacaccggcccacaggacgaccacggggaggccccggcgagcaaagaaacaacccaggaaaacagcagaaggaagaaggccagggaagaagagcagagaggaggggacgcagggacccagaaagaaaaacaagccgaaaggaagcaaggacagggcgagaccgcaaccagggggaggaggagggaaaagggaacggaaaccgggggacgcaaaaagaaaaaggggccgggcggggaccacgccaaaccagcacgggaggcgaggcaggggacaccgaggcaggagcaagaccagccgaccaacagggaaacccgccacaaaaaaaaaaaaagccgggcggggggcggggccgaaccagaccgggaggcgaggcaggggaacgcgaacacaggaggcagagggcaagagccaagagcgccagcacccagccgggcgacagagcaagacacaccgaaaaaaaaaaaagaaggaaagaaaaaggcccccccccgcccaacaaggacgcccgggagggggagggagcgagcagccccgccgcgcccacccccaggccagacacgcagaggccccacacagcgcgggcagccgacgaccgacagaggcaggccgaaccagcgggccgagccccaaccgccccaccaagccagccaccagccccggggcccgaaagggaagcgccgccccccggcagcgggagcaagagaagcagagggacaccagggggaggggagcaaccaaaggaccaaaggaagccccaggggccccagaagcgcaacagaaaaggcggcaaaaaacagaagggaagaaaaggaaaacagagggggaggcccacagcaccaggcaacacaccacaccacgcgggggccagggagggaagacacgagcaacccaaagccaaccccggaggaaagaaaaagcaggcggcagaaggccggagggggcccaagagcccgccaacagagcccagggacgcccacgacaccggagccagggaccgagaagaccagcgcagggaagagggaggccaagggccgcccgaggggaggggagcccggaagcccagccgggcaggccgcccgaagaaggcacaggggcagcccccaggaccccggggacagccaacaggcccacacggaaacggggaggaagacccaagggccaagcccgggcggggggggaggaggccgagcggggaggcgggaagggcgggccccagacaaagcagcccccagccgaccccaacaagcagcccggaccggacggagggggcccgcggcagggccggggaaagggaagaggccggccgcccgcaaacagcggcgccaacaaaagggcggccaaaaggccaggggcgaaaagcccggcgaggaagggggcgaaaaggccccccaggaaggccgccccaaaggccagccaggccggcccccgccccagcacccccccgcagccccccagacggggcccggccccagcccccccccccagcccagccacaccaggaggccagggccggacccggccagccgcgagggacgccagccggacagcagcaccacgccacacaggccggcgagcggcacaagagggagggaaggcgggagagacacaaacagcccagaaaggggaccccgcagcaccccccccagaacacccgacggccgggccccccgagcccaggaccagcccccccaggacccccaccgcggaaccgggcacgcgggcaccccaccccaccacacagaaccaggcagggggggagagccggaagggcaaccgagcacacaccggaagggggagacagagggaccagacagggacaccccagggaggaggggaagggagggaagagggaaaggacggggcggaggaggggaaggagccgggggggggggccacagagggccaggaaggaccggaagcaacagcgccacagagaaggaccagcaacgggcccagccaacccgagaacaacaggaccacaccagcacaacagacgccacaccaccaaccgggcccgggagggaggggggagacggcccaccagcagaaagccaccgggggcacaacccgagacagggccgccgcacccacgcgaagcgcaggcgcaaacacggccagcagccccacccgggccaagccacccccagccccgagagcaggacacaggcacgcaccacaccggcaaggggaggacagggcaccaggcccaggcggcccaaccccgggccaaggaccacccaaagacgggagcagggagccacgcgcccagcggcacgacaacaccccagagcccacccccccagaaaacacgcgaaccaggagcgcggagcaacgccgccacccccaggcccacacccaaacaaaaccagagcccccccgggggccgccgcagaacgcccacccccgccggcccaccagagggggccagggccaagggcaggacaccccggcagcacaaggaaggaaagcccccccaccgagaggagcgcccggcccaggcggaggcaaggcagacggccacgaacccccgcccccaggcaagcaacccggcccagcccccgagagcgggagcaggcaggcaccaccacaccggacaagaagagagacagggcgccaggaccagggggaccgagcccgaccggaccgcccaccggcccccaaaggcgggaacaggccgagccacgcgccgaccaaggccagaacaggaaggcggaggaaagcaagcccaaggcagggggcaagggggcgaggcggaagaacaggcgcagagggacccccgaagcccggggcgagggccccaggaccccgcccccgacagcccgccagcccagcagccacgaaccgcacaagcacgagcccccagccgcgggccccccacggaggcccgcccgacggcccgccgggccccccaacagggccgccgcgccaagccagccgagcgagcggggccccccacaagccccaagcgccccccccaggcagcggacagcaaaccccccgaccacccccaccccaacacaccccacccaccccaggaagggcgggcccacaagcccgggaccccagccagcggccccgcccacaccgcccggccccccagggaagggaccccccccggaccgggaccgcggcccaagggccgcaacgcccccccaggaagccccgaacagccagcaagaacacaccggccggcggggcacaccaaacacaacgcgggaggcgagggggggacaccgaggcaggagcgagaccagccggccaacagggaaacccgcccacaaaaaacaaaaaagcggacggggggggcgccgaacccagcaccaggaggcggggcaggagaacacgaaccgggaggggagggcaggagccgaaccgccagcacccagccggcaacagagagagaccgccaaaaaaaaaaaaaaaagaggcagggggggcagcaccgagcccagcacgggaggcgaggcaagagaacgcggaacccaggaggggagggcaggaaccgagacgagccgcgcacccacccgggcgacagggcaagaccaccaaaaaaaaaaaaaaaaaaaaaaaaaacaaacaaaaaaccacaaccaaaggcgagaacacaggcaggcaccgcacgagcccgggccacaacccccacagcaaccagaagcagcaaagaccacacacccggagaaagaaacaaaggcagccaggcgggggccacgccggggagcacgggaggccgaggcggggcacacgaggcaggagcgagaccagccggcaacaaggaaacccgcgacaaaaaacaaaaaagccaggcggaggcaggccgaaaccagcacggggaggcgaggcaggagaacggaaccgggaggggagggcaggagcgagacacgccacgcacccagccggggcaagaccgccaagaaaaaaacaaaaaacaaacaaacaaacaaacaaaaaaccaaaaacgaaggcggcccagcaaaccacgaagccaggacgaagggcccaggacaggcccaccgaaacgggaaagccccaggcaacccagggcaagcggcaccccgacccgagaggcggcccgccccacagcccgaaacaggccaaaggccaccacaacccagaggcccccccccgcccagggggggaaggcgggcagacccaacgccccagggagcagggggcggagaggggcagggcaggccagccggagcaagccacccccagcccagcccacggcgcaccaccccccaagcggcgcgggcgggcccacacccccacacacaggccgcgaaggagacccccgcgcccaccccagccgcccgacccagaaagcgaggggccagcccaggaggagagaggcaaagcgagccggccccccagcccgaacccccgccggcccgggggaaagcagcagagaccccgggaccacacccaagacagaccgcccccaaccccagggcaaggacaggggcaggaaccggcccacggcagagaaaaaaggaggcgggggccgggcaccgggccacgccgaacccagcagggggaggcgagacgggcagacagaggcaggagacgagaccaccggcaacacgggaaaccccacacaaaaaacaaaaaaaaaaaaaaaaaaagcgggcggggggggcgccgagcccagcaccaggaggcgaggcaggagaagcggaaccgggaggcagagcgcgggagcggagacgcgccacgcacccagccgggcgacaaagcaagacgccaaaaaaaaaaaaaaaaaaagaaaagaaaaaaaagaaaaaaggaggcgggaaggaccgcccaaggcacgggccagacccaaggaagcggggcggacggggcccagcagcccagggcccgaggggcgggaggagcgaagagccagcggagaggccagccgcagagaggccggcacgccccccacagcccggccagcccccagcaccgccgagcccagagccccggccccccgcagggccgccccgacagcccgccgggcccccaacagggccgccgcgccaagccagccgagcaaccggggccccccacaagccccaagcgcccccccaggacagcggacagcaaaccccccgaccacccccacccgacacaccccacccgccccaagcaggggcgggcccacaggcccgggaccccaacagccacgcccgcccacaccgcccggccccccgcagggaagggacccccccccggaccggggaccgcggcccaggggccgcaagcccccccaggaagccccaaagaggcagcaaaaacacaccccaaaggcgagcacacaagccaggcacggcgagcccgggccacaaccccacagcaaccacaagcagcaaacacccacaacaccccaggcagaaaaaaacagaggcacagagaggcgggaacagacccaaggcacacagccagaaacagacaaggcaggacaggccggcagggaccaggcaccacggaagcaacccggggcagggaccagggcaggacggcccgaggagaagcagagcagaaagccagagcggacccccccccagaccccagcccagagccccgaggaggcagcacggggaaggacagaagaaccaccagcccagccaaaagcacgccgggcgagcaaggggccaccccgaacccagcacggaggccaaggcaggcggccacaaggcaggagcaagaccagccggccaaagggaaaccccaccacgaaaaacaaaaaagcggacaggggcagcacgagccagcacccacgggagcaaggcaggagaacgcgaaccgagaggcagagggcagaagcgagagagccacgcacccagccgggcaacagaggagaccgccacaaaaaaaaaagaaaagaaaaaaaaagcacgcggccggcggcaggcgggcccagcccaaggggcaggaggaaccacccagaggagggcgggggcggcccgggggcccagagccccgcgaccaccgcccccaaaccccacaaaggccagcccagcccaccccccaagaagcgccagcgcgcccccaggccagccccaccgccccacaggcggggagggcagggaggggcaagccagcgcccgcccgcccaggcagcgaggccagggcccaaccagcccaagcccgccacagcccccacaccacaccacgggcccagcggagaccggggcgagaggaaccgggccgagaccgaagacggaacgccagaaggcagccggaggggcagccaggcccagaaagcacacaaacgggggacacaagcaagaccagaaagcccagggcggggcggaagaggagggccgccacccaagggcggggccacacgccccgggggaccgggcacgggggggggggggggcgacaccgaggggggacaggaccccgcgacaggcggcagaagcgcaggcgaacaaggacacaaacacccagggcaagcgcacgcacagcccccacaccccacacgcaacccaacaccccaggacccccccgcccgccagccaaggccgccgacccccagcccacccacgaccgcgacccacccagacacgcgggcagcccggagccggcaccgccccgaggggagggacccaaaaccccaaagccccacagggagacacagccacaacaacacccgaagaaaaaacaaacccaaggaaaggaacgcagggggaggaaacaagagcccaagcgccccacccgcccgcccccacgacccaacggcaaccaacgcagcagaaagacccgaacccccccacaaaccagacaaccccaagacacgaaaaacccagcacagagaggaaacgaggcagggaggcacggaggcccaaggcacacagccggaaggaggggagggacagaaccccagcggaaggacaccacccccaccacccccaccagaagagagggggagggaaagggcgaccaggggccggagaggaggccccaagccccccaggcccaaggcaccggggagggagagcaccggcccccagggccaggggaccccaccggccagcaagggagaggccagagacgggacagccgggccgggacgagacaacagcccgccccccagccagccagggagaagaaaggaggagaaaaaaaccaccgggggccacggcgaagcccacgcaccgagccaccaaaaaccccccaccgccggggccagccccacacagggcccaagccccgcagggaaccacccccagcccccaccgcccggcccggcccggcccggccaccccaccaccccaacccacagcacagacccaaggaccccgagcggaagcgcaagcacaccacgaggcacccgggggcccggaggagaggaccgccgaacccagcacccggggcggagagccgcaggacaccaccggacccgacaggccacgccaccccaagcgccccaaagacccccgaacacacacccaggccccaacacccgggcacagcaacccccaacacgccacccccagcagagaacgggggcgccccaggaagccccaaaaccgggcaaggccgcgggcccgcccccagccccaggccgggggacaggcggcaggcgcgcacggcgcaggaaaccagcgcacgggaaggccgaagaaggcacagccccgagcgcgggggcggggacgccaccaccaagccagggccgccccggggaagccaggcacccccccacagcaggaaccacaggcagagacacagggcaccgcgccaaaaaagaaaaaggaaaacaaaaaaaccagaagcccaccggggggaagccccagagacgggggaagacaggacgaagccccaccgagccgggccgcacgccccgcagcaggaacgcagacacgcaggccaggacaggcaagcaccccaacagaggcgaaacgaggcggggaaaaaaggacggccacgccaaacagacaggaaaggcagaagcggccgccgggcaaaagccaacaaaacgaaaaggaccaacaccgcgccacagcgcaggccccaagccagcccagccacagccc

SEQ ID NO: 434 - RNA, 16172 nt, Homo sapiens
cgggaacaagcagagccagcgccggccgacaaggaacaaagcaaagaggcaaacagaacgaacagagagagggccccagaccaccccccccgagagcgggaaggcaggaaaaagaaaaacccagccccgcggaggggccccggcgaagggggggcggaagagcagagaaggcaggagccagacagccaagaaacagaggagaagccccaggaagaggcaaaaaagacagaaggaccaggcccgaaaaggaaccggagccggccacaccggaccaagagagagaaacaagcaagcaagacacgaaaaccacagcagccaaaccaacaacgaagaaaaagcgcacgcgcgaaaagacaaccgagacgggcaagacaaagaaagaagaaggacacagcgcaagcggggaggcccacaacagaggaaggcaaggaggagcaaacacacacgggaaggcaggcgaagaggcgcacgggaaaaccccccaagaaccaggaccggagacacacaagagaacagcagggaaagaccgcccccagacaaaccccacgggccaaaccaacacaaaagagggaagacaagaaaagaaagcaaaagcaagggcaagcaagcaacagagaacaggaaaaaaggcagaaagaaaacagcgcaagggcaacaccagaagaaacggaacaccaggcaaaaaacacaaaaggaacaaaaacagaaacaaaaaaaagagacaaaccaaacaagaagaaacaacaaggagaaacagggcccgcaagcaggaaagaaacagcaaaaagaacagcccagacaaaaaaaaacagcaaaacgagagcagcaaacgccacccaggaccccaaaggcaaaggaacaacacagacgcaagccacagcaaaaaggcacagacaaagcacgcaggaaaaaaaaaaacagacaagagaggcaggagcgagccacgggacaaacagggaagcgaaaaaagcgagaaccaagagagggaggagggaagacccgaggaggcaacaggcaaggcccaaaagagagaaccaggaaagaccagcacagcagaaacagaaggagccagagcaggggaagaacaaggggcaggaagagagccagaaaaggagcagggcagcacgggccagcgagagacccgcaccaaccagaaggcaaaacaagggcgggcgcagggcagccgaacccagccgggaggcgaggaggaggagcgagcccaggagcgagaccagccggacaacaaggaaacccagccacaaaacaaaaacaaaacgggcaggggggccgcagccagcaccaggggaggacaccgagcccagggagggaggcaaggagcagagcacaacacacccaaccgcgcacagaggagacgccaaaaaaaaaaaggggaaaaaaaaaagccaagaaccaagagcggcaaaagggaacagggaacgcaacgcgggagaacaacagcacggaacacagagcagcgaagaagcaacacacagccaacgaccagcaacgccccaagacaaaaaaaacaggcccaaaaggagcgagaagaggcacagcaaccaaaagcccaaaagacaaacaaccaaagccacaacaggagaagaaaaacaaacaggaaaccacagggaaacaaacagcaaaaaaaggaacacacacaaaggcaaaaacacgaacaaacaaaacaaaggagcaaaagaagccaagaacaaaagagaaacgggacccaagaaaacagaaaaaaaacaacaacggagaaagcagacggaccgggagggagggcccgcgggccaggagcgagagcaaaaagaaacaaacacagccaggcagggccagcccgaacccacacgggaggcgaggaggcagaggcgagccgcgaagcaagaccagcgggcaacagggaaaccgcacaaaaagaaaaaaaagccaagagggggccgcaccgagcccagcacgggaggcgaaggagaggacacgagcgggaaggaggcgcaggagccagaccgccacgcacccagccgggcgacaaagcccgccaaaagaaaaaaaaaaaaaaaagaaggccgggagcggggcagcgaaccaacaggggaggccaaggggggcacaccgaggcaggagcaagaccagccggccaacagggaaacccgccacaaaaaacaaaaaagcgggcggggcggggccgaacccagcaccaggaggcgaggcaggagaagccgaacccgggagggaaggcacaggagcgaggccggccacggcccagccgggcaacagagcaagacccaccaaaaaaaaggagaggagaggagaggagaggaaaggaaagaaagaaaagaaaaagaaacagggaagcagagggaggaaaacaaggaagacaacacaggaaacagcaaaaccacaaacgacacaaaggggcaacaaagaaaagcgcagaaaggaaaaacacacaggggggacacagcggacaagcaccgcggggagacagccgccacgcccaggcagaggcaggggcaacaagcacgaaccgaacccggccagaccccacaagcccccaaggcgggacacaggggacaacgcacgggcaaaaaaaaaaaaaaaaaaaagagaaacagcggcccagcgcccaggcggcccaaaccgggccaagcaacccccgcccagcccccaaaggcgggaaaggcagagccacaccggccccgacagaaaaagcgcgaaaaggacccgccccccaccccgcgccaaaggaaaagccgcaccggaacaacaaaggccaacccacaccaacccgccacagaggggccaacaggggaacagagaaggcgcagaagggagggcaggagaaagccccagaagggggaaggagggaaggggggaggacccagggagaagccggaagcaaagagaagcagagacccagggcaaggaagagcaggggccggcacaggaaagggcccaggcggaagccagcccacaccgcccccacagcaaggagccagagcaccaccgccagccagagaccgagggcgcagcaagcagaccgccacccgcagcaaaccgccaacaggaccccaagccggcaacagcagggggaagcggcaccccagggagagcgaggcaccaggccgccgagaccaccgaggcaggaacgggcgacccagaacgaagcggccggggccgggcacccccaaaacacagaaacccacacaggcccgcaggccggggcacaaagcaaaacaaacccaaagccagggggggggggccgagcccagcaccgggaggcgagggggaggacacgagcccggaggaaggcgcaggagccggacacgcacgcacccagcccaggcgacaagcaagacggccaaaaaaaaaaaaaaaaaaaaaaaaaagaagaagaagaaagaaagaaaaaaacaaacagaagccagaagagaggggcaaagcgggggggcaaaaagaggggaggacccggggcaggggaggaggaggagggccaggcaagggagccacacggggggaaccaggacagaagaggcagcagccaaggccaaaccgggccagaagagggacagcccaaggaagcccaagaagaccgggcccaggacaaaagcaagcacaggcacaagaagcggggcagaggcaagggcccacaaaacccaacaacaaccagaggagacacaccacccgacagaaggaaagaaggcacagaggaaaagaccaccccagcaagcagcacagcggacaagccaagcacagcaccccagaagcaggaggaggcgaagcgcagcggcggggggggcccaaggagcagcaaacgcccgcccggggacccggagccccagacaaagccaagcaaaagggagcagagaagaaaaagcagccacgccaaaacggcagccacccagaagggggaccgcccccggaccacaccccacaccccccccgcccgccccaccgccaacacaagccggggccaaaacgacccgcccccccccccgagcaaaacgcaagaccagcccaaaccacccccagaaaccccacagacacccgaggaacaacgccccagcccaccacgagaggaggcccaacgaggccggggcacccagggggcgccccgggggcaaaaaccacagggcgcagaaggagcgacacccacccaggaagcaggccaaggggagaggacacccacgacgaaaaacaggcggccaggcacagggccacaccgaacccagcacgggaggcgagggggggacaccgaggcaggagcaagaccagccggccaacagggaaaccccgccacaaaaaacaaaaaagccgggcgggggcaggccgaacccagcaccaggaggcgaggcaggagaagcgaacccaggaggcaggggcaggagccgagaggagacagcaccagccggggacaagagcgaaacacgcccaaaaaaaaaaaaaaagaaaagaaaaacaagagaaggaacccaaaagaccaaaaaccggcgcggggggggccacgccgaacacagcacgggaggccaagggggcagacaccgaggcaggaggagaccagccggccaacagacaaaaccccaccacaaaaaacaaaaaagcgagcaggggcgggagccgaacccagcacgggaggcgaggcagagaacgcgaaccgggagaggagggcaggagcacggccagcacccagccaggcaacaagaggaaaccgccaaaaaaaaaaaaaaaacggcaaaaaaaaaaaggagcgggcagagcacaaaagaagggagcccacccaccaaaaaaaaaaggaaagaaaaggcggaggagcgcacgagcggccacgcaaccccaccccgggcaagcgacccgcagcccccaagcaagggcagccaccacgccgcgaagacagagagacaggcaccagggccaggcgccgaacccggcccagggaccacccgccggcccccaaaggcgggaacaggggagccacgcccggcaccaaaagaagagccacaacacacagcaccagccaaacggcggagaaacccacccgccacacaggcacgcagcaggcaaggaccaccccggacacccaacagaagaggagagaaagaagaccacaagggagaggcaaacaagcaaaaagcgaaaagaggcaaagaacagaacaggccaagccagcacaaaaaaggccaaagagacaaagagggcccccccagcagaaagaggagccgcaggcaaggaggaaagggcaccaggcagcaggaacggcagacaaaggccagagggacaccagacagcaagcgagggaaccaggaggaaccagaggcggaacaacggcagcgggggcaggcgcgaggcagcggcaggccggcggcggccagccaggcagggccaacgaggaaggggagccgaaagggccaagacagagagccggggggcagacacggcaccagggaggaggagagaggaggaggaaaaccgaagagggaccccagccccggccaagaaacccgggagggaaggggagaaagccaaggcaggggggaggccaaggagggaggaggaaaggaagggcaagaaaacccagcgaagaggacgaggagaggaggggagggcagaacagggggcccgaaagcgcagcaacaagaccaagaaggggagacagggggggcaaggccgcacgaacccagcaaccaagacgccgaggaggaggagcgaggccaggagcgagcccagccgggcacgagggagacccgcaaaaacacaaaaaagccgggaggggcacacacccaagccaggaccaagaggccaagggggagaacacgagcccaggagccaagggcaggagcacgaggccaccgcaccgcaggcaacagaaaccgaccaaaaaaaaacaaaaagggaagacaacaggaagacaggcaggggcaggcgagccgggagggggggcagagggaggcccagggcagcacggggagacaccgggagccgccaggagccccagcccacaccaagacacacacaccagaagacagaccggcagacggccacccccacccccaccgccccaacccacccaggcacagccgaccaggacgccgcgaaggaaaggaaccaagccccccacccaaccgagacggaagggcgcaaacaacccccgcggcggccggaccgcggcgcccggaggagcgggagaagccaccccggaagagggcagacgccgggacccgcgccagcccaaagcgccacacaaccgggagagcccccaagaccccaccccccacaggggagagcagggcaggggcacgcagcaagggaagaaggagggcagagggaggaggggcaggagagcaaagaccagcccggacggccaccaaacccagcccggagaccgccagaaggaggaaccaccccaccccccgccacccaccgccaggcacccaaacaagggcgcccagagaaacccacagccgagcccacccacagggccacagaggaaaaaaaagaaaagaccagggaacaaagccagaggcagcgggaaccaacaacgagcccacaccccacaggcccagccaaggcaggagcgggcgccgagagcgagggggagaggagccccacagagagagcgggagaggggccggcgcccaggggcacacgggccgggcccagacagagggaggggcccaggcacggggggggcacagcccagagcacgggagcacgcaggccacacgggcccaacagcccacggcagcgggcacccgggaggcaagaaggcaccgggcaagcacacccagggaggggcaggggagcggggagcggggggacagcaaaccgggggggcaggcaggaggaggggcggacaggcggggaacaggagcagggggggaaggaggacgcccggggggaagaggacggacgacgaggggggcagcggccggcgaggccccgccgccaccccggggcacccccagggcagccaccgccagaaggcccagggagcccagccgggcggcaggccagcagaaagcacaagcggaggcccagcagaaggaagacacagccgaacagaaaaggggcagggaaaggagggcgggaggaaaagccccgaccccaacggggcggcaaaacagaccccaccccggaaggcggcccaggagggaggggcaaaaggaggcagccgccgcagagggagaccggagacaccacccccagagccaaggacggggggcccgggggcggcagaaaggccaaaacgaaggagaagcagaggaaggaagggaggggaaagggggcaccaggcggcagaaacaaccgagcaaaggcacagaggcgggaaaagcagggggccgcgagagccagaggcccgcaagcgcccccgcagcaggaagaaagcgaggcccagagagaggaaggcaagaccagcagagaaagaggcccacccaggcaggagcacccaaaaagcgcaggagggaacaccggggaacggcgggggccgccaccccacagggcgaacagggacccgcgcccccgccagcagcagcgggacgaaaagcaccccccgggcccccacccaaacaaaggaggaaaggcccggcccaccgggaacccaacggacccaagcaagcaaaagggcagacccacccagcaccagcagaacacagcacaacacagggccaaaaacggaagaagaaaggaaggaaagaagaaaagcacagaccccagcaccacgacagcccagcccccccccccaggcaggacaaaggaacaggagccaaaccgaagaggaaggcaagaaaaacaaaaacaacacacaggggcccaaaccgcccgggagagccccgagagaaccccgcagccggccgcgaaacggcagggggagggccggaggaggggcagggacccagcagaacaggaggcagcgggccgagccacagcggcccccccgccccccccaaccacagccccgcccaagaaggcccaagccccggcccaacccgagggggggcgggcgaaaccccgcccagccaagaacccaccagccagaaccccgaggccccccagaagaacagccacccccagacagcagcgacaacgaaaacacacacagacagggaagaaacagaacaggcccgcggagagacgacggaagggggcacgaaggaaggagggggaaaagcgaaacgacagggaggacagggcagaaagcaaaacacaggcgacacaagacggcaacggagggaagagacaaacccaaaagacgcagcacaaaagaacacaacagaaaaaacacggaacggacagccagaagaaaagccagcgccggaaacaccacccacaagccgggccccggagccacagagccggcaaaccaagcagcccagggacaccaacacccacagacagggcacccgacccagacaccaggcccgccccggacaggaaacacagagaccagggaggggcagagcccacaggcggaaccagaacccacagcaaccccaagcgacgcaaccccacaggaagaaggaacagaaaacacaccacccccgggaggggggccgacccggccccccaggagcggcgaggggggggggcccagaaagcaaggagaacggcccccgcacccgcaaaaaaaccccaggcagggcgccacgagcagcaggaaggacagagcaggcaaaacagaagcagccggcaggggggcagggcgggggggagagcaggcagggacgagaacccggcggcccggcacccccacccccagcgcagcggcccggggggccgagagggggggagaggcggcacgcgcagggggacagggcccccagcagcagagcagggagccagggaagccgggaagggggggaggggccgccgaaacggagcagcagcggagggccaggcgcacgacccaggggcccacccccgagaagcgcgcccgcagcccacaccaggccccgggggcggagagcagcccgcagcgggcgccgcccccgggggcccgcacacacagggcggggagcgccgagcccgccgcggcccgccgcccaaagagaaggaggcccaaggggggcgcagccggcagcgaggaacccggaaacaggaagacaagaggcaagcaggaccagcagaggaggacaggcgagaaagggaagggaagaggcccccggcgccaccgccccccccacacccccgccgccagcacagaggcccacagggcccccggcagcgggccccagcccggagccacgacaccgcagggccccaccaaggaacaaaaagaagaacaccaaacacaggaccccaccgggcacggcgacccgagggagaccaaacccccagcaagccggaaggaagaacaaacccaacaaaaggaaacgaggcaaagggaaaggcagcaggacccacggagacagaaaaaggcaaggcgaagcagaaggaacacagagcagccaagagacgccagaagacaaaagaaagggccgggcacggggccacaccgaacccagcagggaggcgaggcgggggacaccgaggcaggaggagaccacgcggccaacagggaaaccccgccacaaaaaacaaaaaagccaggcaggggcaggcgccgaaccagcacgggaggccgaggcaggaaaagcgaaccgagaggggagggcaggagcgggacagccacgcaccacagccacagagcgagaccgcccaaaaaaaaaaagaaagaaagaccacagaaaaggacacagggcgaacgaaaaaaaacacacaaacacacaccccaaaaagggcagaggagccccagcccaggcggaggcaaggcagccggccaccacaaccccgcccccgggcaaagacccgcccagcccccgagcagcgggaccacagccagcgcaccacgcccggcaagaagagagacgggacccagggcaggcggcgaacccgacccagggacgcccgcccggcccccaaaggcgggaacaggcagagccaccagcccagccgacaaagggcacagccaaaagcgaccccagggagaccaagaaacaaccccgaccaagcccagccaccacaaaaggggaaaaccgcagaggaacggagagagggagaaccagcccaaaccggaaaacacaaagcccgccgaggacgcaggcggcgcccggccgaaaccccagccccagagaacggacagacgcaccaggccagccaaaaaacccccaagcagcccccgagaccagcagaccccccacacacccacgcacccacaccgcacaaggacgaaacacagcgaggccgcccccccaacgccaaggaaaagcgaaagcggaacccgggggaagacccacacgggccagagcagcaccggcaaacacagcgcgcaaacaagaagaagaagaagagcggaaaagcaaaaaggacaacccacaggccgcgagggcggaaggggcaagggggacggaggagaggcgggccggccggcccaggccagcccgaagccccgggcgcagggaaccagaggcgccgggcccggcgcgcaggaaaaggcaaccgcggaacacgaggcgcaccacgggcgccgcccggcccacccccgggccccaaccgcacccagccagccagaccaaacaaccccaggcccaccagagaacaccgggcgccacgccgggcaacacacgcccaccggaacgccgcacccgccgccggccaacccccccgaacccgccggccacacccagccccaaccccaagacaaaagaccgggcacccaagaaaccagggaccagacccaagagcccaaggagggcagcgaccaggggccccaggagcacaaacggcacacacacacagagggcaacaagccaggcaggccgggcgcgaggccacgccgaacccagcacgggaggccaaggcgggcggacagagacaggagacgagaccaccggccagcacaggaaacgccaccacaaaaaacaaaaaaagcgggcgggggcgggggccgaacccagcacgggaggcgaggcaggagaagcgaaccgggaggcagagggcaggagcgagacacaccacgcacccagccgggcgacagagcgagacccaccaaaaaaaaaaaaaaaaaaaaaaaaaaaaaaaaaaaaaaaaaaagcccaggcacagggaggacggcccagggcaaaccaaccgggacacacagagggccgaaggcccacggaaacaaggcgagcaacgacacggcagaagcggggcaagggaggcaagggcgggaggaggaacaaaggaagagcccgggaaaaaagagggcagagggaagaaggcagaagggacgggaaaacccagaagacggaaaacaaaaagcaaaaaaaaaagaaacaccgaagaggaggaaacaggacccaggaacaaggagagagaaacagaaggaaagaaaacaaagaagaagaaccagagaaagaagaaggcagaaagacaaaaggcccagagagccaaggacagagccagagaccaggacagaccaacaaaacaacgcggggcccgccaccccgggggaggcagaaaggcggcacgggcagggggcgggcccccggggaagggcgaggaaagcccacacacacaggacaccggaaaacccccagccaggagaggcccggaaggaaacaaagaccccagacagcaacacaaaccagcgcccaggcaagcaacagcgccgccagcccagcaggaaagcgagcgacacagaggcaaaagacaacgagaaggcaggacaaaagacacagccgaaaaggccagggagacaaagggggcccccaaaggccgcgaaacgggccaagagaggccggcacgcacggggcgcagaagaccgaccagagcccggaacccaggccagccccggggacccagagccaaacaaacaaccaggaagaccggggaaggggaggggcagcaggcagccagccagccaagagacacacggagcccacagccagcaggccgacgccaacccacgcgagacgcccggggccgcagaccagacagccgcgaagggcaaaaacaacagcgcagacacacccaaggcagcaggagcccaaggaggcagagccccagaagggagaagggagaagaccgaggcgagaaaggagaagcaagacaaacgagcaacgaagacagaaggcggcggccaggggaggcacaccgaacccagcacgggacgaccaggaggcgagggggaggacgcgagccccagagggaggcagcaggagccagacccccacgacccagcgggcaacaggggagaccgccagaaaaaaaaaaaaaaagggcggcgagcagacagaccgagggaaccagcgagccgacgagcccagccaacgcaaagacggcaacaaagcacccacaccccagaagggaggagaaagggaccgaaaaaagaccgaacccaaccgggcagaggagcccggccacagcgggccaaacgcggggggggggcagagaagcccaaaagcaacaagaagccacaaggaaaaaaacccagcccgggggagaaaggccagacaaaacgagacccaaacaagccacgaggagaaaacggcacaaccagaaaacagagaaacacaaggcaaaccaaggaagggacccggggggagaggagggagaccccccccgccgcgaggcccccacccgcccgccggacgacaaggaaggacggaaccaggcgccgagccggaggcaacacaaggcgcacgcagcgggccaggaaagcaaaaggcgggaaacaaggcggcaaggggagagggacagcccaagggccagagaaacccagaccgggggagacccacagcagaggcagcaaggcggggagggagagagaaaggacgggggccaccccggagcaaccccagggcccgcaccccacccccacccccagcaagagagaaccaaagacggggaggggaagcaggagaccacgaccaggggagggggagcccaagggaagaggggagagagagcaggggaacgacagcaggagccacagcaaagaaggaagaaaaaaaagcggccaggaggacggacagaggccaagaaacacacggacaccggcccagcgaacaaacgaccagccgagagcggagcacaaaaggggagggaagagagcagaggcccgaggggcccgcccccccccccacccccacagccggggcaccgcagggaaagccgagccgcaaccacaggaaaccaccacccgccacaccgacccgccccagcagcccagacgggagggagcaagagggagcagggggggggggaagaggggcagacagccccagcagcccagggacacccggaaaggcggcaagcacacggaacgacggaagcacagccgaagggcgcaagagaggacagagacgggaggaaggccgccaaggcacacaggcaggcaccaggggggaccagaggcaccagaacaggcaggcgggcagcccggggagacgaggagggcaggccagagaacaggcaggcccagggacgagggggggagcccagaccaaggcgcccagccggggcgggaaggcaggccggcgggcacggcccccaagcccccaaccaccccccaaccaaaaagagaaagcaggaaggccagcgggagggggggagcaagcagaagagcacgccacccccccacccccccccacacacacacacacacacacacacacacacacacacacacacacagccaaggccagaaccccgggacccccaacccccagaaccacccccgagcccaagcaacacacaggaccaccaccgcggcgggaaaaccaacaccagcgggcccaagcccaaggggaggaacacaaacacccaaaagaacagaacccgggccaagccggccggggggagagggaagggggggaggcgggggcagggaggagagggccaaagaagaagcagacgcgcccaaggaccaacggagaagaacaggaagaaacagacgcagaaagagacaggccacacgcggccggagaaaggacaaacgagggcgggcgcagaggagacaggaacagaggcggcacgcaaggaagcagagcggagcagcagagagggagacagggaggacaggcacccggcagagaaaggcacagcaaacgggagggggaaggagggagaacaaaggaccaggacggcaacccagggacacagcaggacccaaacagagccccacacggaaacggcgaaaaagcgcccccggggagaggggggacaggaccagcacaggagcccacagaaggagggaaggagaaaacgggccgaaaaaccaggggggagcaaacacagggaagggcagaccaggggcagggggcgcccggccgcccccacccgcgccacacccaccgccaggcgggcccccaccccggcgcggccagggacccaaaccgccaaaagggcgggcgggccagccccgggaacccggagcccggccaggccggaaggacagggaaggggggcaggaaaggggaggcccccggggagcgaaggccccccaacacgggcccggcacggacgcgcccaggccgcaagcggggcggcgagcccagcacccccccgccccccggacgagcgcggagaagcacggacgagcgcggagagcgcggcggcagccgggggccccgccgagagcccccacaccgcccccccccagcggcaaccaggcgccacccaagccggggacccaagcaggggcaaagggggaggcaggcggggcccaaggccgggaggggcagggcgcggggcccacgcgcgccccggagggccgccaaccccgccccagcggcaacgcagggcggcggccgggaggcgcgcgccgagcgcaagccgcgagcacaaacagggcgaggaggcggggagcgccgggcccgcgccagcgcgccggggcggaacacaagcccgagcgggcgggcgggcgggcgagcgcgagcgagaacagccgaccagcagcgggaaggggggccgccaccagacaaccgccgcagccgcggcagcgacgacccggcaccggcagccccggaacgggaggggcaagcaacggcccgccccgccgcgccccagccgccgcgcgagaccccacgggccgggcgcaccccgccccgcccccaaaagcgccccagcccccagccgagcgcagcaggccgcccaccgggagaagcacccccaccccacccgacagggggccaggcacacagcgcggacagccgccccaaaccaccccgggacgcccggaaggcggcagggggagaaccaggcaaacagaggaggaggcggggagggggagagggagccgaggaaggggaccaggagaaaagagggacaagggcaagaggacccccaccgcccagcgacccagagcagagccccgccccccccccaaaaccacaggccccgaagacccccggagggagggagaggcagggggggggaagcccgagacccgccgcccccacccccaaaccacaaaaagacccaaaaagaccgccaccagccacaaagcccccccccccagcaggggaaaggggcccaggggccccacggggacagcgcccagcgcccggcgcgggggccaggaggagacagcagcccagagcagggaccgggggggggaccgccacgcccagcccgggggccgcgcaggcccgagggagcggccggagaggccaggacaggcggggaggagggccgggaaaggcccggcaggcagcaaggccgggcccagggccgagaggggccaggggagggacccaggcgcgaaggcccaccgggccccgccacggggcaccggcaccccgggcaaagagccaacacaggccgggccgggaccccccccaacacacacacgccccacacaggccacccagccaagcacacgcaccccagcgagaggcacccacgccacaccccacccccgagcgaaacgccggacccaggcaggagccgaggcggacagggacacccagacagcagcccacgcccggaccccacccaagccagcaccacaggacaccgcccacaggccagaaggacgaaccaacagcccccaaccagcccccccagcccaccagaccccccagccaaaaccacgcaaaggagaaaaacgccccccaccaccagcgaccacaaaccccggcacaaaagaaggcaacccc

SEQ ID NO: 435 - RNA, 6818 nt, Homo sapiens
gaaacggcgcaggcgaaaaaaaaagcgaaaagccaaccgaacccacacaagggaaaaggggaaaagaggcaacgggacggagacacaggaggacaacagagcaaaacgacccgcagcccggccacaggcccgaaccacaccaagagcaccagaagaggacaaaagggagcccacccacggaggggaaaacacccccgaacacaaggcagagccaaagcagggggggcgcaaaaaggcccagaggggagaacacagacgggagggcacccccaaacaagcgagcgcaaaccacaaaaagccggacaaccacacgaagacaggagcgagccgccaggaggccagcacccgcccaaccacacagacaggagcgcgggacgcagagaagggcgggcagaaagaccagcagggcagacagcccaggggcagccgcggaagggcaaagaagacccaggcacaaacacaaaaaggcagaaccaacgcaaggcgggagaagaagggaaaggagggcggcaccaagagcgcacagaaacagagcacaacaaggagggggcgggggaacgagagccggcacagccggcccgcacccaccagagggaaagagccaaacccggggccacagggccaagacgaagggagcccgccccagcaggagggggaggaaaaacaaaaaacaccaccgggcgccagagagaggggggaccagggcgcagagggacggccgagcaagggggcaggaagaggggacaggaaggaaagaaggcagaaaagaaagaccccccaggaaggcaacaccccaaacgggagaacgaaggggcccgagcacgcaccaggaggggcagagccaggccaccccccaccccgcaaggacagcgaggaccagaggcggggccgcacagaggcaggaccgcgccagcccggcaggccgccacggccagggaggaggcagcaggagagccagcagaagaaggggccagaacgagaaaccaaagccccacaaaggcccaggagagcagcgcagcagcgaaaagagagaaggacagccaacccacacgaaacacagggccgcgaaggcagacacagggaaaagagaagaagagaccccagccgcccggggcgaagagccgacgcccggggagccaagacgaggagaagcgccacccagaaccagaaacggcaagagccaaaggcgagacacgaaacaaggggaaacgggccagagaggggagacacaggcccaggacacgcaggggcagcggcagacgggggaaggcccagcagcccagcccaggcccaccagacaccccaacaaggaagaacaaacgcccagcagggggcgggagagcggggagccagaccgggccggcgcgggagcaggaggaagaggggccggagcgaagaggggacaaaccagcgagccaggggacccagccgagaaaggggacagaaccgacccaagggggaagaaagaagggcaggccgggcgggggccacgccgaacccagcacgggaggccgagggggcgaacaccgagccgggagcgagacagccgaccaacagggagaaaccccaccacaaaaaacaaaaaagcaggcgggggcacacgccgaacccagcagggcaggcgaggcaggagaacgcgaacccgggaggcggagggcaggagcgagacgcgccagcacccagccgggcaacaagagcgaaacccgccaaaaaaaaaaaaaaaaaaaaagaaggcaagcacgcaacgcagacaaaacggcgagcacccccacccccccaccaaccaccacccgcacccgggcgcacgaggagcgcccaggcggaccgagaggggaaccccagagaagagggcggagccccgaacccgggcccccaacccggcgcagcgggaaaccagcccaaacaaacgcccacgggacccggcacggcgcaccgccagggccaggcgcacagcacaacggggacgcaggaccgggccacagccccgcccgcccggagccgcccccaggcccgcacccccgcaccagcccccgccaccgcccccaagggccccggccgcgcccgcaccgcgccccgcccggccccacagaccgcgaagagcggggggggccacccggaagcagcccccacggccgcccccccacagccaggccacgcccccgaaggcggccggggggcccccgcccagccgcggccccgcccacacgcaacgaggccggccaagggggcgagggccggagggcccgcccgccccgcccgggcccgcgcggcagcgaacgcaggagggaggccacgagggggcgcaggaaccgcgggagggcccgggggagccggcccggaggcggacagcccaggcaccacagcaccgcccagccagggcaaacggccggaaggcgggaaagaaaaggagcaaagccgaaaacagcaccaagccaacacagaagcaagccagcggacaagcaaagggagcagcgccaggcccaagcagagaaaagaccagccaaccagggacggcaagcagaggagagaggaggaaagacagggcgaggaaaacccaagcgaaggggcacagaccagaaggacaagaagaccgacaaaggcaggagaggagaggcagaggcaagagggacgggaggcaggggccgggaaaccagaggaggagagaaaaggcgacgggcacacgcccagcgaagcaagcccaggggccagggaagaaaaggaccaaagagaggacacaggggacaacacaccagaaccagcccggcggggccacgccgaacccagcacgggaggccaaggcgggcggaccgaggcaggagcaagaccagccgaccaacagggaaacccgccacaaaaaacaaaaaaagccgggcgggggcgggcccgaacccagcaccgggaggcgaggcaggagaacgcgaacccgggaggcggagggaagggcgagacagccacgcaccagccggggacagagggagaccgccaaaaaaaaaaaaccaaaacgaccccaaaccggaacaaaaaaaggggccagcggcgaaggcagggaaaagacacgcagccagcacggagcgacgacaacaaggaaggggaagaaagcaaaaaggcggcaaaagagcagggacagaccagcaacacaacaacgacagcaacgagacaccacacggagggaaaacaagccagcagaaaaaagccccagacacgggccccgcaagccgcaaaaccacacccaaggggcaaaagccagacccgcccgacacccgacaccacccccgaggaggaacaaaaaaaagaaccacaagaacccaaaagaacgggaaaaaaaggcggggagcacccccagccccgacgaaagaccgcccaccccccccagccccaccgaaacaaccaaccagaggaagcaaaaagaaaaacaaacaaggagaaaagaaggagacacaaaaagaaaaagacaaaaacacacaacaagcaaaaaagcgggaggaccagaaaggaccacggggagaggggaggagaaagggagaaggcggggggggccacaccgaaccagcacgggaggccaaggcggggacgcgagcccaggagcaagaccaaccggcaacaggcgaaacagccacaaaaaacaaaaagagcgggcaggggggacaccgagcccagcacgggaggcgacagggaggagcgagccgggaggcaaggcgcggaagcggacgaccacgcacccagccggagacagagcaagacccgcccagaaaaaaaaaaaaaaaaaaaaaaaaaaaaggcggcagggggagacaaagaggcggagcagaagaggcgggggagacaggcggaacggaaaacaaagcccacacaggcagagaacgcaaaaaaagaaaacaaacacgaggccaggaggaaggcaggcaaagcggaaaagcaaaaaaaggaacaagaaagaaagcagacgcgagccagggccgaggaaaaggaaacagaagaggaggggcacaacaggacgcaaagccacgaacgccaaaaaaggaacagcgaacaccagcaaaaaggagcacagagcaagggacgggggccccgaacgaaaaaggacaaagagagaaacggaaaaaaaaagcaaaaaaaaaacggggcaaggccaaaggcaggaacagaacccagcaaaacggaagacgagcaagcaccccgaagaacccaaccacagaaaaaaggaggaggcgcaaaagagcgaaggggggacgagaaccccccacccccgaaccaaacagaaccgggcagaagggccaggaaaaaaggaaacaaccagccagaaggaaccaaaagccagaaccacgcagaagaagaaggggggggggaaacggggagagcaaaaaaccaggaaacgaggagacagagcgccgcacacaggcgggggcagggcgcagccagccacgcaacccgccccgggcaagcgacccgcccagcccccaagagcgggacacaggcaccagcccggcaagaagacagaaggggccccaaggccaggcggccgaacccgacccggagagccgccggcccccaaaggcgggaacaggggagccaccgcgcccggccaaacgagcaaagaaagcccacaggaaacagcaggagccaaggggagaaggggcagaaaacaaagccaaggaagagcggggacaccggacagagcacaagccgagagagggcaggaaaaaggagcaggggagcccccagcaggcgaaaaaggaagaagagaaaaggaaacaaggagggcgaacccagcaagcccaggaagaccacggccaagaaccacagaggagacaggggaagggagagaggcaggggacgagcaaaggaagccacagaaggagaggccagggaaaagaaaggagcacggaaggaaaaagcaagacaagagaggggggacggaaagaaaaaagagaagaagcagagaagagaggccaggcacggggccaaccaaacccagcacgggagcagagccgggcggacacgaggcaggagcggaccagccggccaacagggaaaccgcgacaaaaaacaaaaacagccagggggggcgcaggccgaacgcagcacaggaggcgaggcaggagaaccgaacccaggaggcggagggaggagccgagaggcaccacgccccagcagggcgacagagcaaaagccccaaaaaaaaaaaaaaaaaaaggaacgccgaaccagcaccgggaggcgaggcaggcggacaccgaggcaggagcgagaccaagaccagcccggccgaggggaaaccccaccacaaaaaaaaaagcggacgggggccggaccgaacccagcacagggaggcgaggcaggagaaacgaaccggggaggcagaggcgcaggagacaagacacgccacgacccagccggggacagagcgaggccgccaaaaaaaaaagaaaaagcagagaagaagggaaagcagggaaagagaaaaaaggaacagcaggcgccaagggaagagaaacagggcggggggggcagccgaacccagagggaggccaaggcaggaggagccgagcccaggagggagacggccgggaacacagacccgccaaaaaaaaaaaaaaaaaaaggccgggcgggggccacaccgaacccagcacgggagccgaggcggggacacgagacaagagagagaccaccggcaacaaggaaaccccacccacaaaaaacaaaaaagcggggggggcggcgcggcgagcccagcacgggaggcgaggcaggagaacacgaaccagggaggggagggagagagccgagaggccacgcacccagccgggacagaggagaccgccaaaaaaaaaaaaaaaaaaaaaaagggaaacgaaagcagaggccagacacagagggggccaaaaagaagcgcgagaacagagaaaggggcccagcacaccagaaaagccgcaccggccaggcaggggccaccccgaacccagcaccggaggccgaggcaggcgaacagaggcaggagacgaaaccaccggcaacacaggaaaccccaccacaaaaaacaaaaacaaaaagccaggcaggggcgaggccgagcccagcacagggaggcgaggcaggagaaggcggaacccggaggcagagcgcaggagccggacagccacgcacccagccgggagacagaggaggcccgcacaaaaaaaaaaagcccagcaggggggccacgccgaacccagcacgggaggcgagggggggacaccgaggcaggagcagacagccagccaacagggaaacccgcccacaaaaaaaaaaaagcgggcaggggggggccgaacccagcaccgggaggcgaggcaggagaagcgaaccgggaggcggagggcaggagccgagacagccacgcacccagccgggcgacagagagaccgccaaaaaaaacaaaacaaaacaaaacaaagccgcagagcagagcccgccggaagagcagcaccgcggcaccaaggcgagcagaccagacaaaggcggccaggaccacacgccaaaaacgcaggagagacacaggggcccccaaaaacacacggaacaagcagcagaaacaggaggcacaaacaagacagacaaagcaacaacccagcaccaccacaaaccacgaaacaagaacaggcaaacacacgcacaccgcaaaccccaagcaccaacagaaacaaaaagcgcggagcacgaaggaaacagaaaaaggcaagaaaggccaacagagaaagaagcagaaagaggaggagggagagagaccgagcaccacagacccaaggggaaggggccacaaaaaaagaagacagaga

SEQ ID NO: 436 - RNA, 751 nt, Homo sapiens
aacagacggccagagccaggcaagaacgcaccgcgcccagaccccggacacacaaccaccaggaaggggaccaagaaacgacagagaggaaaaagcagccgcagacaacaagaagcagaaccagaacaggaacagcgcaacccaaaagccgggaacggacagaagaggggaagaaaaaaagaccaccacacaaaaaaacagccaaaaccgcagagaggaaggagccccccacagcagcaacggacaacagagaacgagaacaaaccaaaaaccaaaagcaaaaaaaaacaggacaccccaggaggaaccagaaaaacggaggcggaacgccagaggcaaagacagcaagccaaacagcaaacaagaagaaccaacgcccacagggcaagaagaccacaacggggaaaagacggaagacacacgaaccccgcgagaacgaagcagaacaaaacggacgggccagccaaagaacaggcaccgcccccagccccgccgccccagcccccacccggggccgcgcaggagccggaggggcgcccccaggggcccccaggagccggcccgccagcagggaaaacccccaaccacacccgacaagaaccccaacaaacccgagaacacacccagggacaccaccaccgaggaaaggaaaagggccccaggccggcccgcgaacagaacaccaagcgccaaagggggaccggagaaggaaaaaaacgcgaaggccaccagccccgcaaggcaggaccca

SEQ ID NO: 437 - RNA, 242 nt, Homo sapiens
gcgagggcccaccagcacaaagcaaaacaaggcagcgcaggaaccaaccacagggcaaaaacacacggcaacccgaagaggacagccgggggagcccagaggaagggggggcccgggaggcccagcacaccacagaacaaggggagacaccaccaaccccaagccgggcacaggaacaagagaaaacggaagagaccaccgaagcgagcaaacagcccggaggggacaaaggggaccaaaga

SEQ ID NO: 438 - RNA, 4257 nt, Homo sapiens
aggaacagcaccaacagaagggcaaagcaacgacaaaaccgcagagaaagcaacacccacccagggccacacaccaacgcccagcaaggaaggcgaaggcgagacaaagaaccgcaaagcacacagacacccacgaggaaaaaggaaaacggcaaagaaaagcgcagaagaaaaaaaaaaaaggcgcgaaaaaggacgcaggaagaacgacgaaacaggcggggcaagaaaaagcagggacaaacgaaccaagaagaaaaacaaaaaaaccagagaccggaaaaggccgaaccaaacaccaccccgcaccagaaacagccgaaagagaaagccagggaaacaagacacaaacaacaaacaagacaacgaacagagaggacggccggcgacagaaagagcgaaagagccagcgggggggacacgcaccgagacaccaccgggagacgaggcagggggacagagccgggagcagaaggcaggagcgagagacccacgcacccagcaggcaacagagagacccgccaaaaaaaaaaaaaaaaaaaaaaaaaggaaagaaagaaagaaaccgcacaacaaggaaaaaaacgaacgaagggaaaacaaccagccacagagaacgaggcacagggcaacgcaaccccacaacggagacaaaggcagacaaagaacacagcccggaacagaagcccaggagcagaagaagccgggcggagccagaccgccgaacgcggcacggaaccgagaaggggaggccagggaccagccgagaacgggggcccagcgggaggggcacaccaagagaccccaggaccccaacagggcaggaagacaagaaaaaaccccggccgcagccgggacaagcaaaaaccagaaaaacccagaccccacccccaagcaagagacccgcccagcccccgagagcgggacacaggcacccgcaccacgcccagcaagaagagagacaggggcgccagggccaggcggccgaacccgaccagggaccaccgcccagcccccaaaggcgggaacaggggaaccacgcaccggccccgcaaaaaggccccccaagagaaacaaccagagcaaccaacaaggagaaggaaaaaccaaggaagccacaaaggacgagaccaacaggagaaaagcccccccccaacacccaccaccacacaaagaggaaaaagcaggggaaaagcgaaagaagcaagcccagaccccaaaggagccagacaaacagaagaccacaggggagacaaaaacaaggacacgagggaagagccgcgacaccacagcaagcaaacagaaacacagccaacccggccaaacaacaagaagccccgccaaggccgccagcgggccagcaaagagagcagcccaacaagcacgaaggacacgaagggacaggggggccccaggggacacccaaggggacaagcacacacaggcacagcagaaggcagcagaacgcaagagcacagacacagaaccacgaaggacagacgcgagccagaacacagaaacagcgcgaaggaacaaggcggcccaacaccacagcagagagaaaacgagcccagaagagagacggccgggcgcggggcgacaccgaaaagcacgggaagccgaggcgggggacacagaggcaggagaaaaaccagccggccaacagggaaaccccacacaaaaaaaaaaaaaaaaaaaaaaaaaaaaagccgggcgggggcaggcgcgaacccagcacaagaggcggaggcaggagaacgcgaaccgggggcggagggcaggagccgagaggccaccaccagccgggagacaagaggaaacccaacaaaaacaaaaacaaaaaaacaaaaacaaaaacaagaacaacaacaaaaaaacagcaggagcgggagacaaagcgaagacacccgccaccgagccggggggaagcgccgaccgaagaaaaaaaacaaacagagcccaggggaaagggcaaggccaagaaaagcaaagcaaaagacagagaaaaccacacgcccccccacaccacccagcacggggcgcgaggcggaacccaggggaaagaaggcggcacccgccccccccacagaagcgaccgaggcgagagggaaagcaagaagaggaggagaggaaagcacgaaggaagaagaggcagcacccgagggaaaacaaaggccaaacgcacagcgccccagacgaggggccgagaaccaccgagggcagcaaagcccgaaaaggcagaagaaaaggcgcaggcacacaccggcagcaccaaccgcccgaacgccaagaaggggggcgggccaacaaacgcagacagaacacccagcccaggggccacaggccaaccccgaccaccagccggaaccaggccgggccgggcagggaacagcggggcgaaccccaccccgggaaagaaagagcagcccagcccccccgcggagccgggcaacagcacgaacaagcggaagcaccccacccccacagggccgacacaggcacaagaaacgcagaaagaccccccgaccaaagaccgggcacggcgacccccgggaacacaggccacaagagcggccagggaaccagaccacaggcaagcaaaccaggcagcgcgccacagacagggacagaacccgaggggccgaaggcccccccgccgaagaaggagcaggcagggggccaaacccagcagccgccagacacccacaaaccccggcccaacaacccgacccccacccgggagggaaccgacgccaaaccaggggccggggggggccagccgaacccagcacgagaggccagggcaggaagacacgcgaccaggagggaccagccgggcaacaagggaggccccaccacaaaacaaaaaaaaaaaaaaaaaaaaaaaaaaaaaaaaaaaaacaggcagagggcagccgagcccagccagcaggcaaggcagaaggaggagccaggagcaaggcgcaggagcagaggccacgcacccaaccggggagagaggagaccgccaaaaaaaaaaaacaaaaaaaagccagggagagaaacaggcacagccacacccagcaaacccagacaggaaggccacacacgggagaaagcaccacacaggacggcaagcaccagccgcccgaccccgcgaacagcccccaccccggccaaagggacgccaagcccaacaagcaaagaaccagaacaaaaaagacaaacacacagcacaagaagcacaacaacacaagaacacaacccacccccacacacaaacaggcggggagaggcggcagaaggggagaggacagacgaggggacaaaacgagagagacaacgggggaaaaaggaagccaggcgggggaggacagggcaggcggcaaggacacgggaagcgggagcagaaaagaagaagggggggcgaggaagcaccaaaacccaagaaaacccaaagaaacacacaaccggaggcggaaagcgcacccgacgggcaggaagggccgagcaggcagaggggccaggcagccccccacaggcgcaccgcggggaaaaacaagaggccaggacagacgcacccaaaccagggacgaaggagccaacccagaacagcccaagcccgcccagcaaagagaaaacaccccacccagcgccggggagaggagaggcaccccaaggacagcgccacgcaggcccccgcacggcgaagacagacaggcaagaaaaaaaagaagcacaaacaaacaaaaacaagggcggaagaaaaaccggggagagaacacagaccccacaccggagacggaggaaaaaaagccgggcaaaggaagagcccaaagccccccccagccggaaacaacacaggaccagggagccgcacccacagcccacacaggcagcccgcaaaaggcccgcgcccccccgaccaaaaacgggaaccagacgccgcaccaaacaagcgacacacagaaccccaagacacagcacagccacccggccccccgcaagacacagcacagccaccccaccccccccagcagcgccacgaaggagccacacgcgagcgaagaacccaaaaaggcccaagcgggaaagggccacccagccccaaagccgccccccaacggaggggcagagcgggcccaggaacagcgcagggaaagacccccggccaggacgagcccacggcagccgccggccgcgccagagcccacggcccaaccagcacggggccaaccacgccaagggcagaaggaaaccagagcccgccgccccgcc

SEQ ID NO: 439 - RNA, 986 nt, Homo sapiens
ggcgagcacagggacagaggaagacaaggggggccccaggccccccccccaaggggcacaggaaacggaggaggggagacagggggggggacgaggggcagggacccccagcaggagggcccccccggccacggggcggggccaggggcacccggaggccaggggccagaggccaccaccggcgagccaaacagcaaccaggaaagagcgaaaaagggggagggcaagacagccccagcagaaggggaagaggggggcggaagcggaggagaccaccgggccaggagcccaggagcccgagggggcccccgagccgccaccacccgggcacaaggcaggccagacggcaggcaggccaccacgacacggcagggggacacagaaggccagccaggagccccgcagccagggagaccgcccaagcccgcaggccagagaggcagggagagcggagagccccgggccacacgccacagcccggaggggccaccacagccgggggcaggaggcgggacaggcagagccccacgaaccaaaggcaggagaccggccagggggcaagcaggggggcagaaggcacgccgacaacgaggggcaacccaggcacacccagacaaacaggggcacagcagagggggcagagagagacccggcccccccgcaaagaggcccagcccacagggggaagacgccagggacccagacgaccagcgccagcacgccccacgaggagggaccgcccggaagagggagggaccagagacaagccccaccagccgacgggccaggaagcagggggagcaaggaacagaaaccagagcaggcaagaaggggcagaggcaacaaaccacaccagagaaaagcagcccgggaccaggcgcccagacgaccaaacggacccgacccaccccccagggccagggagggggcgacgagcaaaagaagagcggcgacgagaacaggaggagcagagagccgagccaaga

SEQ ID NO: 440 - RNA, 667 nt, Homo sapiens
ccccagccccacccccccggccagccgcccccccccccccccccgggcgaacacgcgccccccgacaccgagcggacccgagcccgaaacccacggaccgaggggggggggggcggggacagagggggagacggaaaggagggaacggaacgccgaccgagcaacaggccccgcccgccggccggggcggggggcgggaggaggacgcagcacgcagccgggggcggagacaggcaagcgaccgggcggccgcgccagggggaaaccccgccccgcccgaaaaaaaaaaagccccaggaggaggcgggggggcggcggcaaccgcggcgggggaccggggagacgcgcgcgcgcgcgacgcggcccaggcggcccagagagcggacaccccgagcgggggggcgggcgccgccgccgccgccgcgcgcgccgcgcgcggggccgcgccgccgccggcgagcaggcgggaccggggaggcgagggggcgagggagcgggcgagggcgaggcgcgcgagggcggggggcgaggcgcgcggcggggaccgggggcgggcggcgggccccggcggaggagccgccgccgccgcccgggccccggcgcccgcgcgcaggcggagcgcgcgccaggagaacaaaacccccgggaagaagccgccggcagcagc

SEQ ID NO: 441 - RNA, 22763 nt, Homo sapiens
gcacgggacggagacagggcagcacccagaggacccgggaagcccacccagaccgccagaaccacccccccgaccacggcccacaccagaggggcggcgaggcaggagaacacgccccggcgcccccgccacagacagggggcgacccgcgccggcccccggcccgggacccggaggcaagaccagcggggaggcgaaagcgccgcaccggagcaggaggggccccgcacgggaacgggaccgcgccacggagggcgccgccggggagggcacccccgcgagaggccgcacaacgcccagcccaagcccccggaaccgaacgcggcgggcccccgccccgacccaccggcaaaggcaacccggagccagcgccaagccggaagggggaacggacgagcgagggagcacgacaggccccccgcaggggagaggccaaggaacaacgcaggaagccccccgaggacggcaccccgggagagcgcgcgcgcgcggaccgaaagcagggggcaccgcgggccaaagaccaggaaaaggaagccacaaaccagcagagaaggagaggagagcccggccgcggcaccggacgacccggacggcggacaccccaagccgcgcaggccggcccccgagccaaggccgcaggaaagaaaccaaggcccgaaccccgcacagacacccgaaggaaagaacgggccagggaccaacacaaaagcgaccaaagcgcccacaacccacagcaaacaccgcaacccgggaggcgcgcacgacacaagcggacgagaaccgccaacccgaagaacgcggcacagagggaggccggggcaaagacagaaaggccgaagggaaggcggcgcagaacagcaaccaagggcaaacccccgaggagacacggagccggaaggaacaacagcggccccagacaaggcaccccacccacggacgccaagagagcgccaacaccggcccaccagacaaagagggagagggcagccgcaccgagcaaaaccaaagccggggcaacggagggaaaaggccacgaagacgcaccacccccaacagcccgggccaaaaaccagagcaaaaaaaaaagcaaaagaaaggaagcccaacccgaacaggaagccaggagggcacggcccacaaacaaggcaacagggcccaagcccgacaaaagaacagcacaaagcaagccgcccagaagaggcaagagcaagaagcaacccagcaaccggagacaagggaccaaacccagaggaaaaaaaacagaaacggagcacaccagagcgaagagaaggcgggggggagcaacggcccacgcagcagagaaggaccaacaagccacaacaaaaagggcaccgaaacggcgaaaaacaggcaaccagcagacacaaaacagaacaccagaaaaccagaaacaggcaccgacaaacaaaagcaagaggcagaaagaaacagcgaaacaaaagccacaaaagcacagggagccacaacagcccccaaacaaagacaaagaacggaaaaaagagaaaaaaaaaacacagaaacaaaaccaggaacaaaacaaaaaagcaaacaaacaaacgcaccaagaaacaaggcccaaacacccccagagagcacaacagaggcaacaaaagagcacagaaaacagaaacccaaaaccccacaagaaaacaacacccagaaggcaccacggccaggggaacccgaaaggcacggaacgaaacccaaccacgcaaacccagcgccaacgaccgcccaacaagcacgggggggcccagccaaacaacaaaagggaaagacaacacaaagcccggaagaagaaaaaaaaacccaacagggcgcaacaggcagccacagaaaagggcccccaaacacccacacagcacggccaggggaaaaacaagccgcgccggagaagcaacacccggagaagaaaaccaaagccaaaccccgccaggcaaacaggaaggcagaaaagcccaacacaaaacaagcagaaccacccaagaaaaccaaaaggcagcaaacaccccagcaaagaaccaaaaaacaaaagcaacacccccccccacccaaagagcaaggaaggccgcaggccagagaagccaaggaaacacccccacacccgaaaagaaaccaacccgacaggaaaaacagacaacaaagccaaaaagacgcagacaaggaagggaaaggaaagaagccgaagccggcacacaaggaggacaacacagggcgggaccagcggggaaaaagaacacccagagacccgagcagcacaacccaaggcacgccacaaccacaccaacaaacgcagggaaacaaggaggccacagccaaacgggcggggaagagcacacagaaaagaaacaaaccgcaacagaaggaaggacaggcaacaagaagcaagcagcacaacaagaacgaagcagcgcccaggcaaggaacgaaaacagcacaacccagaaaaacagacaaacgacaacgcgcccggccaagaacaaagaccaagaggccccacagagcaaaaacgcaaaaaaacaaaagggcaaaggcaaagggagggaagccaagcaaaacaaagcaggagaagaaaaaaaaaaaaaaaaaaaaaaacaagagcccagcagcccaacaaacgaagaaacgacaaacggaaacgaaggggaacccacccacgacaccagaaaaagagacaccagccacagccgggaagaaaagaggaggacgggaagggccacaccaaccccaagcgggaagccgaaggggggacacagaggccaggagggagaccagccggccaacagggaaaccccacgcaaaaaacaaaaaagcgggcaggaaacacaccgaacccagcagggaacacgaacccaggaggggagggcaggagccaagacgcaccacggccagccgggcaacagagcaagccccccccgcccaaaaaaaaagaaaagaggaggacccaccagggaaacagcaaacagacgaaaaaaaaagaaagagggccaaccaaacgggaaagaagaccacaccccacacaagaccgaggaacacgcgggaaggacaagaaggaggcaggggaaacgacaggacagaggaagcccacgccgggaggggaacagccgggagaccggagagagggcaggcacaggccaaggggccggggcagaggggaaggaaacccccggcaaaacagcagaaccccaggaaagccgagacgaccaaagcaaggaccaacgccaggccccagggccacagcaaccaggcaccccaaaggccacccgacacccagcacacccacccccccaaagaggacagccaaggagaccccgaaaacccgccagacaaaaccaccgggcgaacgccaaaagaacacccaggaggagacggccgccacgcgcccccaagccggaacaagggccgacacaggaaggcaccgacacaagcgggaaaaagcacggaaagcacacggagaacagacacacgggccacagcacaaccgaacgacagaaaaaaaaacgcagcacaaaaccacaggcacagcgacgccacaagccacgcaaccaagagacaacaagagcgaaaaaaaaaacgaaacacaccaaaaggacagcacaagcaaaaaaaaaacgcacaggaaaccaccccagacccccaaaacaaaaagcgggcaccagggcaccgacagcaaagcccagccgacagaaacgcaacacacagacaaaacacccaaaccaagacaagaaaaacaaaccaggacacccaaaaccaagccacagaacgaaaggggaacaaaaagacgaaaacagaaacagcaaaaagaaacaacacaacagcaaacaccgccaagaagggggggcacaaacacaagcccccagaagccccagccccacacccgcacacagaaggcagcagaaaccgaggcacgcgaaaagaaagccgacaaagaacggaggagaaaagcaggaaaaaccaacacaaacaaagccagcgcaagaaaggagcgagaacacgcaagcacgaaaagaccacaaaaagccaagaaaaacaaaaacaccaggaaacgacagaacaaccaaacccccaacaccaaggcaaggggcagagaagccaagaaagaaaccagggaacagagaacaaaaaccagagcgaacgaaaccagaggaaccaagcagaaaaggcggaaagaagggagcaggcacaaacacacgaggacaaagcaccagaacaccacaccgagacgaaacagcaaaaggacacacacacgcaaaaaaagcacagaacggcaagacaacaacaggacaacagccacgcgacaaacgaacgggaaacacaccgagaccaaacgaacagaaacagcacagcccgccgaaacaggacacaggaaggaaagcacaccaaaacagcgaaaaggacaaagcccaaaaacacagaaaaaaaaacacaagcaacgcaacaaagcaccccaagacgagggccaaaaaggagaaaaaaacaacaaagcaccggccaagcagacccgaaaacacaaaaacccaagaccggcagaagacaccgaaagcccgcacgcacagacaacgacaagggagaaaaccgcaagccacacaacaacaaaaagcacaggaaaagccaaaccaacacgcaaggaaaacaggggcacacccagaggcaaaggcaacccaacccaaagcgggaaagagcccaagaagcgaaagaaaaagaggaaacaaagaaggacaaccaaacccaacgggaagcgaaaggaaaaacagcgaaagcaaaaaccaaaaaaggaagagaccaaagacaaaaaaaaacaaagcaagaggcaaacagaaacgccgaacacaaacagaaggcagaagggacagaagaacaaagaaacaacagagcaaaaacagaacgcacgcaaagggaaaaacaccgacgaaaaaaagaaaaaaggaaaggaaaaaaacaaaagcaagaaagcagcaccgcccaacacacaaccagacaaccaaaacgaaaaagacaggccaacgcaccaaaaaaaaaagacagcaaaaaaacgaaaaacgcacaccgcacaacccgaagaaaacacgaacgggaacacacacacaaaaaaaaaaaaaaaacacacacacacacaacagcccacacagaccacacaccaaccaccccaagagcgcccaaaaacacaacaagaaccagaaaacaagcaggcaagccaaggcaaagacgccgcaagaaaaaccccccccaccacgcgacacaacaaaggaacggccccagcaccggccaaaacaaggggaaaagccccaaagaaacaacagcagagaaaaacgaagaaaaaccaagaacaaaagaaacaaaaacaccagaaacgagagcgaccagaagaggagaagaaaagaacaacccaacgcgacaagaaagcagagcacaccagccacaacacaaaaccaaaggccagacacaccagaaaaaaggaacaccaaacagaaacacacacgagcgaaaaaccagccgagcgggggagccaaggaagacagcagggaggcagaaacaaggaaagcaaaagaacaaaggcaagaaggaaccaacaaccccaacaacccagcgccaggagaaaccaacacaaaaaaccaaacgccccaaaccagaaccaaagcgaacccggacaggaagaaggagagcagaacagcagcaacaaagcaaaggaaagcaccaacgaaaaaaaagggaaagggcggcagcggcagcgggggcccccccaacggaagaagaggacaagaagagcagcacggagcgcagaaggaaagaaggcccgcccacccaaagcagacacccccgggcaaacaaaaaccgccccagaaccacgcaaagcgaacggggggaaaaaaacccagcaccacccaaaaacagagcacagaaaagaacgcccaaaagaggccaaaggaacaaaacaggccccacccgaaaagaaaccgccgcggaaacacccaggcgaaaaacacccccccccccgcagaacggagaagaggggcggacaagacccccccgcccgccagccaagaaacagcgaaccaaacccccccagaaaaacaagagagaccaaccagggagcgcgaaaacccaggaaacacccagaacaaaaacacgagacaagagaacggaaaaacaacaaaagggaaaccagagcaacgccagcaccaccaacaaggcgaaaacagccagccagcccagccacccccaacacaaaacaccgccagggaaaacgaaagggaaaaggaaggaacgaaaaacaaacaacccagcaacccaaaacaaacaacaggccaagggcaacaggagagggacaagaaaagcaaaggaaacaaagccaaaaaacaaaaaagggccaacaaccaaaagagcagcaaaagagcccaaagggcaccaggcagcaagagcaaaaacacccaaagcacaaccaaacagggacaacggagaaaagaagaaaaaaggggaaaacagcacacgggaccccgaggccaacaggcaccagaaaagaggcccaggggggaaaggcacccgcgggcaaaaacagccacaaaaaaggaagagagaaaaaaggaagcagacgcaagaggagaagaaggacagcagccaggccaaaccaaacacagaaaggacgagaaagcacagaccccaaaacaagccacggaaggggaaggggcccaccccccgaagccgccaaaaaggaggccacaaagaaaaagcaaacacccccaccaaaaaagaaaggcagcaaagcaaaacccacgcccccccccccacaccggaaaaaaagaccgaaccaaaaagacccagggaaaggggagaaaagcacaaacaaggggaagccgagaagaaggaaagggaaaggaacccaacacaacgcaaaccgaccacaagacaaaaaacagcaaaggcaaacgcaaagcgagaaaaggggaagacaaaaggaaaaagaggggacacaaagaaaaaaggggcccaccaaaaaagcaacgcccaccccccgaggcaaaaaagacaacaaaggacagccccacacgccaaacaaaaaccaaacaaacagaaaaccacaacaaaaaaaaagagaacgccggaacacgacaacgaaaaaacacgcccgaaaaaaaaccgaaaaaaggcagcaacacagggaagaaacaaaacgaaacacaagcccagaacccgaacaaaacaaacaaaaaaaagaccccagaaggaaaaaagacaccaaaggacacaccaaaagcagcacacaaagaagcacaaacagggcgccgaacagacaaaaagcaagaggacccgcacgcacgcagacacacaaggcagaaacacacaaccggcaagacaaaaacagcaaagcggaacaacaagaaagaacaccaccaggggaaagaagacagaaaaaagaacagaaaccccgacaaacaaaagagaaggaaaaggccccaagaccccaccagggccaggccggacggcagcggcacccgcccggagcaaccagcaagcacaaccaaccaaaagcaagaagacaaagaacaaccgaacaaacagaccaggccaaaacaacagcaagcccaaacgacagaaaacgaaaaaccagcacgcgaggacacacagggccaaaaacaggacccccaaacggccagggaccacgcaaccgccaaccccggaggaagcaacgcccaagccccaagacgacaggaagaaaacgaggccaaggaacgaggagaacaaacaccaaagccaaaccgaaagacaccccggggggggggggaaagaaaaagaaaaaaaagcggggcccagggcggcccagagccagggcccagaagggcccagcccgaacaaaccggcggaaaaccccgccgccaccccacccccacccgcccaagaaagcgcccccgccggggcccacccagaacccaaaaggggccaacccgggcccgaacacccaaaccccgggacccaggccggcgcgcgccccgcggccgggcgcccccgggcgggaccgcccaggcagccccaaaccagcccccgggcccccagcagcgcccccgcccccaccacccgccggccgcagcggggccaaacgagagacaagagggcggccgaaacgagcggcaccaccggcaccccggcagaaaccccaaaaaaaaaaaaaaagaaaagaaaaaaaaaagcagcagcacgggcagcacaaccccgcccagagcccagcgcccagcggcggggccacagaagaggaaagaacaaggaagaacaaagacaaaaaaacaaaaagaggagggaaaaaaaaagccaccacgcacacaccaggaaacgcagccccggcacccgcagggagagcaggcgccccaagaccccggggacagagggcacccgagggagcacggggcgcgcgcggggccgcggcgaggcccagcccccccgcggcccagaggcgcccccgcccggcccgagggaccgcccggccagacggggggagcccgccggacgcagggccgcccaacgccccggcccccccgggcacgcggggggacccacgccgacgcccccccgcccgcgccccaagggccaacgggcaaagggagacccgccccgcggggcgacccaaccggaacagccccccaccgcccacccccgcagacccccgccccggcggagacagggaaccccgcaccccaagcccccgaacggcggcggagggacggccaagagcggagcagcccgggacgcccgcacccccgcgggcggaagcgcaggagccggcggggagggggcgcccagaggagcggaagaaagcgagacggggaacgaggcaccggggggggacaagacaacgagagccgggcgcccgggggcggcgcgggagccccgcaggaccgggcgggcgccccggcggcgcgggcggggggcgcgcccccaccgcggcccggccccggccacccgcgcggcggcggccgggacgagcgacaccaccgggccggccggggaagaggaggagcgggcgcggaggggagggggcggggagggcggagggagggagggaggcgcgcggagcccagccggcggacacccccggaccgcgcccgcacccggccccccaaaagacacggggagccgcgggcgagggggcagccaccgccgaggagccaggcccgcgccccaagacccccccccaacaaaaaaggagcgcccccacccccacccccgcccggagaaaaggggccgggccacccgggcgcggggcaagggagcggggcggggggcgcacgggggcaaaggcgcgggcgcccccaccgccgcgcggggacaggcaggcgcggggggcccagagccgccggggcgcggcgcgccggcgcgggggacggggcagaaaggcagggagcagcggcgcccccccggccccgccgccggagacgccccgcccccgcccaccggccgccccgcccccgcccaccggccgcccggccacgccccacaccgccccggccccgccccagcgcccacggacagcaaggcgcgccccgcccgccccccgccgccgacccgccccgggacgggagcgagcggcgagcgcgcgcaccccagccgccggcgaccccgcgcacgcgcgcgccggccacccccccgcgccccccgccccgcacccccccccgccaccggcaacgggcgggcgcgcgccgcggcggagccggacaggacccggggaggccggagggagggggccgcgagggggcgcaggcgcagaccggcccgccccgccgccccccccgcaaggggcgcgggcgaggggaggggcccgcggcccgaaccccgggcaccccgaaacaaacaaaaaccaacgccggccgcgggagaaggcagcggcgcgaaaaacaccaaagaccaagcgaggaaggcgagaagaaaacagaaagagaccagaaagcaaagggacgaaagggcgggcgcgcacaacgagacaaacagccaggccaagaacacgggaagaaaccaggaggaaaccggggacaaaaaaagggacaaaaaaaaaaaaaaaaaaaccgcaccccccccccccacgcacaaccaaaagcgcccaaagcccacgaaaaaaaggacaaaaaaaagaccgaccaaggccggaaccccaaaaaagccgaggaaccaagacaaacaagcacaccacaacaccccaaaagcaaacaagcaaaggaaaggacagcaagcgcacaacaaaaagccaaaaggaccggcccagcaaccaaaagaaaaaacaaaacacacaagaaaagcaaaaaacaccaaacaaaagaaagaacgcacacagaaacgaccggagcgggagcaagcaacaaaaaaggaaaaggaagagaagacagccagcaaaggggaagaagccaaggcaggcgcaaaaaacacaaccccacaaggcggagcaaaaaggaagcgaacaaaccacaaaaagcaggccagagacaggccagcacaaaaaacaaaggggaacaccaagccacgaagacacagaaggacccgacaaaggagaaaccacaaaaaaaaacagcacacaaaacacagccaaaaacaccaaaacaagaaaccaaacagaaaacaaagacagagccgcacacaacaaagaaacagaccaagggaaccagggagccgaaggaacccacacagaaggaaaccgaacccgagaccgaagcgaaacacaaagcacgaagaaaaacaggcaaaacgagcaaaaagaaaagccaaaccagggggaaagggaaacaacaaaagacaaaaacgcagaagaacaaggagaccggcccagaccggcacgaaacgagcaaaaacggggcgcccccggcccccaaagcaccacgcacaaagcacagagacgcgccgcccccaaaaaaaaaaaagagagcgccaaggagcaaaacgaaagagaaaacacgacgcgcaagagaaaggaccccaggagcaaagaaacaaagaaccgccggagcggccaacgaaacgggaaacggcaaaacgccaggacgacgcggggcaaaacaacggcagaaggacaagagggacgaacgccgggagggccccaagacacaccccagaaggagaccaaccccaaggaaagcagaagcaaacaaaaaaaggaaacccaaaagaacaggagaacacggaagcagggaaaaaagcaggaaccaacgcacaaaggaaaagaaaacgaacgggcccagcagcccacccacaagaaaccagccgccacaccccgcgaggccaccaaaggagcagggcacagagccagcaaaaaaacaaagaaggaaccaaaagagaagccgcacaggacggagaaggggcagaaaaccccaccaccccaagcagcaaacacagcacacccacacaacaccaaacaggcccccaagacaaccagagcgcaaaaacacaccaaccaaaaccaggaaaaggccccgagccaacacgacaccagaccgccagcacagcagccagacagaacaaacaaaaaaaaaaaaagaaaaaaaaaaaaaaaaccgagcgaaacacacggaacccgagaccagccaaagaagaacagaagaggaggaccacacaagacgaacgggaacaaagaaaaacaggaaacgggaaacccggagcgaaacagagccaacaagaacgggacgaaaagaacaggcagagcaggaaaaccgaaaaacgcaggaggagagcaggaaaagaacagaaaaagaggcaaaccgccagcacgcaaacacaaaggacagagaaggaaacagggacagcccgaacaagacaaagcaccaagaagaggaaaacaaacagccgaaggagcaccacagcccaaagcgacccagcaagcacccgaaagacacaaaaaacaaaaaaaaaaaaaagaaaaaaagcagaacacccagaagagaaggcagggcggaaccgaaaccgaggaccaccaccggcccaaacaaacggaagagaggagcgggaaagcacagcaaaaagggaggggcaagaaaagacaaaaaaaaggcagaccccccaacgaggaagcaacgaaagggacagcaaacggagccacgagaggccccccccacgcaaacacaaccagaccccaaacggaagcgaaaacccaccaaaagaagaaaaaccccaaaaagcacacaaaacacaacacgggaacgcccaaagcgcccaagaaccaaacaggaagggaagagggacggaggggaagaagaggggacaacaaagaaacaacacaaaaccaagccagaacaaaacaacaggaacacccacacccacccacacagaccgcaccacagcaaacccaagccaaggccaacaccaacaaaagccacaccaggaccacggcagggccagcacggaacgcggagcgcgggaaagggggaagggagagcccggaagaaagaaggagcccaaaacgaggcaggagccacagacggaaaaacacacgaaagagggcagagggcccgggggcagcgccggaagcaaggagaagagaaagagagcaaaggggacgagagggagcaggcaggaggcgagggaccgcaggagagcaggggacccaaagcaagggaagaaaggggcagcccacacggcccccagacagagacagacgaagcaggcccaaacccccaggcccaagcccaccaaaccaagacacccaaaaagacaccacggaacagaaaacaccaccccaaggcccagccgagggaaaaaaaacccacagccccccaccagccgcagacggcccgccaacccagcccaagccggcaagccccacgaggcacgaacccagcccccgaccagagcccagcccggggccccgccagcaccccccacccaagaacggccgcgagagggaaaaccccagcccgggagggggaggaggggggaggccgacaaggccggcagaacacccccaaaacgggccagaaccagacacccggagagcgcaaacccagaaaaaaccccaggcagccacaaaaaggggaagagaagagagaagacgacaaaaaaagggacaaaagaaagcacaccaagaccggagaagaaagagacacacacaaagcggagccagaggggggcccggcacgcaggcagggagaagaacaaagcaaaacaaacgaaccgcccaggggcaccgagggaagcagacaacacacggagaaacaaccacgggacgggcaaggagaggggaaaagccgcgaagagaggccccgaggagcagagacccccaggaagcaggggcaaacaaccgggaggggaggaggccacacagagggaacagaagggagaaggaccaaagaggaagagagccaagcggagaaagaaggaaggcagccagggcgggggccaggaagaagacaggaagggacagaggagcaagaaacaaggcaggcccgggaagaccggggagacccggcagcaggaacaggacagccgcccagagccaaacgcaacacgaagagccccgccgcaggggccccagcaccgacccgcagcccgcggcgcccccccagccccggccccagaccccgacccagggcgacagcccagggcccaagcagcaacaccacaggaaccagccgaagccagcagccacaaaggaaagcccaaagccaacccaccggaacccccccaaccccaaaacacaccaacgcgagccacagagaggcccggacagggcagaaagagaccgcccacaagcggccacaagacccaaaagcgcgcggagcaggccccagcgcagaaaaaaacaaacccgaaacacagccccagcacagaaaaaaacaaagcccggcgggcgagaggcggagaggccagcgaacaaaccagcagagaggagaggggaggacgagagccaggggagaccagcccgggcaacaagcgagaccccagcacaaaaaaaaaaaaaagccggggccaaccccagcaccaggaggagagggggaggacacgagccagggagggaggcgcaaaagccgagaggccacgaccagccgggcaacagagaagaccgccagaaaacaacaacaaacaaaaaaaaaacaacaacaacaaaacaaaacaaaagccgagaacaggcgcaagacgggggccagcaagaccgggaaccaagagcacgggaagccacaaaggaaaggaaaaaaaccaaaagaaccagaacgcaagaacgccccaagagagaagccccaaaagaccccaccggaacaaagaggaagacaaacgaagaagggagccgcggggggggccacgccgaacccagcacgggaggccgagggggggacacgaggcagcagcgagaccagccgaccaacagggaaacccgccacaaaaacacaaagggaggcagagggcaggagcgaaagcgccacgcacccagccggggacagaggacacccgccaaaaaaaaaaaaagagagagaaaagagaaaacaaggccaggacacagaaccgccgaggcacacagcaacaagcccaccccgacacaagaagccaagcacaggaacccaaggcagaccccccacaccaaccaaacccaacaaaaaggcacgagcaacgacccccaccaggagaccagcagcaggggccggggcaagggaaacgccgcacccacgcccccccccacacggaacagcaaacaggcacgggccgagggcagcccccaccggcaccccgagcggaaccgacaggacccccaccagacgaacagacgaaacgggagacggagcgccagcccaggcggaggcaagagcaacccggccacgcagccccacccccgggcaagcaacccgcccagccccgagagcgggaacaggcgcccgccaacagcccgcaagaagagaaacagggcaccagggccgggcggccaaacccaacccagggaccgcccgccggcccccaaaagcgggaaaggcggagccaccacgcccagcgaaaccgaaagggaaaccgggcacggggccagccaaacccagcacgggaggccaaggcgcaaccaaacccaagagcaagaccagccgggcaaaggcgaaacccgccagaaaaaaaaaaaagcgggcaagggcgggcacggggccacgccgaacccagcacggaggccgaggcaggggacaggaggcaggagcgagaccaccggcaacagggaaaccgccacaaaaaacaaaaaaaaagccaggcgggggcgggcaccgagcccagcaccaggagggaggcaggagaaggcagaaccagggagcggaggcgcaggagccgagagcaccacgcacccagccgggggacggagcgagacgccaaaaaaaaaaaaaaaaaagcgggcaggggggcacccaggccacaccaggaggcgagaggaaggaccgacccagggaggcaaggcgcaggagccgagaggcacaccaacccagccgggccacacacccgccaaaaaaaaagaaagggggaagaaaagaaacaaaaaaaccaacagcaaaggagacccaggagcgggagagagaaggaaaaaaaagcacgcagaaacaaccccagcccacaccccaagcagaaaaaccacaaaccacccaacccgaaagagaccccccaccaccacccagcgcccagccggaaaaccaaacgcacccgaccgccccagccagaaacccaaaccgcaaaaccaccgcacgcgggaaacccaaaaaaaaacccaaaaaagcaagccccccaggagcaaaaccacaccaggcccagccaaccagccgacaccagaaaagaccccccccccaagcacggcagaagaaaaagaggaggcacaaaacaaaggacccccccaggagcaaaacaggaaacaagacagaaaaaaaaacaaaaaaagacaagaaaaaacagacaccagagaaaacaccagcagaaagcaacacaaggagcagcacgccagaggaaaagcagaaacaaccacagcaccaaaagaaaaggccacaaaaacaaccaaccaaaaccaaaaaaaaagacaacaggccgggcgcggggccacaccgaacccagcacgggaagccgagggggcggacacgaggcaggagcaagaccagccggccaacagggaaaccccgccccaaaaaacaaaaaaacagcgggcacagggcaggcgccgaacccagcacgaggagacgaggcagaagaacgcgaacccgggaggcagagggcaggagccaagacgcgccacgcaccagccggggacagagcaagacccaccagaaaaaaaaaaaaagaaaagacaacaggccggggcagggccagccgaacccagcacgggaggcagaggggcgacacccaggcaggcgcgagaccagccggccaacaggcgaaaccccaccacaaaaaacaaaaaagccgggcgagggcggcgccgaacccagcacgggaggcgaggcaggagaacacgaacccagcaggcagagggcaggagccgagacagccacgggcaacagagcgagaccccccagaaaaaaacacacggaaaaaagacagccaaccgcggaaaacagaacaccacaacacccccgccacgacgccgcacccccccgccacccaacccccaacaaagccaaaaaaacacaaccgaaccacccaacagccccaaggcaccgaaagccacccccagacccccgcaagccccagacacgcgcgagccagcccgggagaccacaccgaaaggggggaggccccaagggaagaccagccccaggggaacggcaacacacaggagggcccaaaagcgccgcgcggcccggagagacaagccaccgcacccaggcggaggcagggcgcgaccagccacgcaacccggggcaagcgacccgccgagcccgagagcggaaacaggcggcaccaccacaccggcgagaaagagagaggcagcaccagggcccaacccgacccaaggacgcccgcccccaaaggcgagagaacaggggagccacgcccggcccccggacgagaagggccccggcccaggcggaggcaaggcgcaaccagccacgcgacgcgccccccagcaagcgacccgcccagcccacagagcaggaacaggcgccgccaccacacccagcgagaagagagacggggcacagggccaggcgggccgaacccaacccaggcgagcacccgcccagcccccaaaggcaggaacaggcagacacacccgcccggcccggacaaacaccgccaccacggacagacaaaagcacccacagaccaggcagcagggcggagagccgcagggaaccaaacagacaaaagccacccaggagaacagaaaagggagaaaaaaaagacaggagagaaaacaaggggcaaaggggcacagagggagggggggagggaaagaaaagaggcccgaaaggccacaagacacacaaaaaagacgaaggggggacaggggagccacaaggagcaggggaagagcaccaggcagggacaggcaagcgaagccgaagcaaaggcacccaggcaaagaacagcaaggaggccagcaggcagggcggcgggcgacaagcccggaaaaggaggggagggcacgagcacggaccggccaggaaagagaacacgaagggccgagagccgaaaacgagcaaaaggccgggccggagaagggcgacaacgggcacaccacaggagcgcccaaaaagaacacagggcccccgcgaaacaccagaaaaagaccacaggaccacaaccaaacagaaaaaaaaagaagaagaggacgaggcagggcggccacgcgaacccagcaccgggaggccaaggccggcggagcgagccaggagcgagaccagccggacaacaggcgaaacccgccacaaaaacaaaaaaacaaaaagccaggagggggcaggcaccgaacccagcaccaagagcgaggcaggagacacgaacccaggaggcagagggcaggagccaagacagccagcacccagccgggcaaaaagaggaaacgcaaaaaaaaaaaaaaaaggccgggcggggcacgcgccaaacccagcaccaggaggcgagacgggaagaaagagcccaagaggcgaggcgcaggagcaggcagccgcgcacccagccggccgacagccaaaaaaaaaaaaaaaaaaaaaagaaaaacagggaggagaacaggagggaaagaaggggaaaaacaggccggcccgggggaagccagcacgggaggcagaggcaggaggacacggaggcaggaaccagacagccggccaacagggaaacccgccacaaaagacaaaaaagccgggcaggggacagcgaacccagcacgggagacaaggcaggagaacgcgaaccccggaggcggaaggcagaagcagagaggagccacgcacccagccgggcaacagagaccgcccaaaaaaaaaaaaaaaaggggaaaaacaaaagaacgcacccccacacggccacccagcccaaagcgaaaagggacagcccgaaacccagcaaaccagcagagaggaaacggggccgaggaaccgacaaccacgaagacacaacagaagaaaggggacagcccagaccaagccaaaagccagcgaccaaccaccgccaaggggaccggccaggaaaacagaaaaaaaaggacacgagggcagaccgggcaagcacaccaccccagagacccccagcagagggaaccaagccccagagacaaagggcacccaggagcaggaccacccccccccacagcaggcagggcgagccgaaaaggcccgggcaaaccaaaaccgaccccagcggccgcggggcccgaacccgacccaccccaacagaggggaaaagaaccccaacggccgggcgcagggcccaggaacccagcacgggaggccgagggggcaggcgcgagccaggagcaaggccaacgggcagcaagcgagaccccccacgccacaaaaaaacaaaaagagccaggcaggggcgaagccgaaccagcacgggagccgaggcaggaggagcgagccaggagcaagaccagcccggcaacaagcgagaccccaccaaaaaaaaaaaaaaaaaaaaaaaaaaaaaaaggcgggcacggggccacgccgaacccagcacgggagcgaggcgggcggacacgaggcaggagagagaccaccggcaacacaggaaacccgccgacaaaaaacaaaaagagccggggcggggcacgcaccgagcccagcaccaggaggcgaggcaggagaacgccgaacccgggaggcggagggcaggagcgagacgcgccacgaacccagccgggcaacagagcgagaccgccaaaaaaaaaaaaaaaaaaaaaaaaaaaaagccaggcacggggccacgccgaacccagcacgggagaccaacggggcggacacagaggcaggacgagcccagccggccaacagggaaacccgccacaaaaaacaaaaaagagagaccagcaaaaaaaaaaaaaaaaaaaagccggggcagggccacgccgaacccagcacgggaggcgaggcagacggggcggacaccgaggcaggagaaacccccccacaaaaaacaaaaaaacccagggcgcggcgggccgaacccagcaccgggaggcgaggaggagaacgcgaacccgggaagggaggcgcaggagccgagaggcgccacgcacgcagccgggcacagagcaagacccgccgccaaaaaaaaaaaaaaaaaaaaaaaaaaaaaaaaaagaccgcgacaaggaagggaggaaaagcaagacccaccgggaacgggcgcgggggggggaagcggggggggcacacagcgccagaagcacgccaagacacgaccaccgcccgcggccgcagaaccgcccgccgcacaccagggcggacacccacagacgcgcccacccgcgcagggaccgccaggggcgcaaccggaggggcagagcaggaaaggaagagacaaacgaacccggaccgcccacagaaccgagcgccaacacagcagacgccccggagacaaagcaagggaaagaagagaaccgagcgggcaacccaagaaggcggggacgaccgccccaggccggagcaccccaaagggaggcgagccaggccaggaggaaagagagggcaacgcggacgaccccaccgcagaagagggaaaccgacgggcccaggaggggccccccaaccacaccccccacagggcccggagacggggaaggccggagagagaagggcagagccacaccccgacccgcgacaggacaaacgaagccacgcgcacacggcgcccgaacgcgggcccaaagcccaccgcccagcggagggcaaagcggccccccagccccacacagcgggccagaacccagcccagagaccgccggacaaaccgccgccgccccagccgcgggagagccgggccggcccaccccccagcccaccgcagaagggcggcccgagggaaagccccacaccagaagccaaaacgggccggcacaggcgaacgcaaaaacgccgccaaaagacgagccaggacgccccggaaggcccgccaacagccccaagagggcaacccggcccaacaacaagggagcacaggacacaaagaccaagcagcagcccaaaaaacaagagaaggccacgcgaggaagaccgccgggaggggggaaaacaggaaagcgaacaaggaaaaagaccacccgacgcaaaaaaggaggggaggaggaaaaaaacagagcggaaaagacgcagcaagacacaacccgcccaaaaacaaacagaggagccccgaccaaaaaaaaaacgacacaaaaccccaaaccaaacagcgaaccacaaagagaacgaaaccaaagaaaaaagaagccgaacagaaaaaacagcgcagcagagaagcccacaaaaaaaacagcagccccaaggaaacaaaaagaagggagcgcagcaaaaggccgcccaaccccacccagacagggggacaggaaacccgccacgagaagcgcagcaaccgaggcacacaaccaggcaaggaaacaaaaaaacagcaaaaaaaaaacaaagaaaggaagagaacgcgaccgcccaccccaggagggagaggcagaagaaagcaggccccccccccccgggccacgccccggcgggggaaacaccaaccacacaacaagagaccagccccaacaaagacggggggcagcgcgcagccagaagcaagaaaagcgaaagagagacagaccaagacaaaccaagcagcccaagccaagaaaagagccgaaaagcccggccaaacaaaagaggccccaccgaagggaaggaaaggacagccgaaacaaccaagagacaagcaagggccacaaagcaacaggagcagcaaaacacccggaacaaccaaggaaacagcccaagaggaaaagggaggaacaaagaccgggaacaagaacacgagggggagagcaaacacgcaccccagcaggggagggacacaaaaaaggagggagcaccaagagaccccacacgaacaacagccaagaaagaaagcgaaaaaaggccagggaaaaaaaagcaaagaaaaaaccgagagcaaaggaaagaaccaacaagaacgaaaaaaggagaaaacaaaaaaaaaagaacagaaaaaagacagacgaaaaagaaaacaaaaaaaacaagcgaaaaggcacggaaacagaaagcaaaaaaaaagagaacgaaggaaagaagaagacagacaaggagaaaaaacagaaaaaaaaaacaagagaagaaccaaaggggaacacgaaacagaacgcccaggcaccgggcacgccgaacccagcacgggaggccgaggcaggagacagaggccaggagacaagaccaccggcaacacgggaaaccccgccacaaaaaacaaaaaaagccgggcgggggggggccgagcccagcaaggaggcgaggcaggagaaggggaacccgggaggcagagagcaggagcgagacggccacgcacccagccgggcgacagagcgagacccaccaaaaaaaaaaaaaagaaaaagaaaaagaaacagaacgggcacagaagggggaccaacacaaacccaccgcaacacaaaaaaaaagccacccaaccagagggaaaaaaaaaggcaaaaggcaagagaccccaccaccaaacaaacacaaaccgaaaaaaaacaaaccaaaaagaaaaaaaagaaagaaacagccacagaaaagcgccagaacaggaacccagaagcagaaagccggaccaaaaggagccaaaggccaaacgggacggcaccggccacgagacgcgaaaagacagcgaaaaaggccagcgcaacaaccaaaagaaggaaccaaaaaacacacacacacacacacacaccacccggcccaaggaagggcaagaaccggacaaagcagcaaaacacgaagcaccgagcaggacagaacacaaccgccaagcgaccagaaagaagggccacaccaaagcagcagagaaaagcaccacccgcggggagcccacaccagccacccacggccggacacccaagccacgaaaaagacaaaagcggagacacagggaaacaacggaccacacaaaccaccaaagacaaacaaagaagaggaagacgagacgcagacaggagccgaaacgaaacacagggaggcagagagggaacacgaccaacgaaaaacagccacgggaggccaagggggaggacacgagcccaggaggagaccagccgaacaacaaggagaccc

SEQ ID NO: 442 - RNA, 86 nt, Homo sapiens
agccccaccagcgccacccccgcccccccccagggccagggacaccgacagccccaccagcgccacccccgcccccccccagggcc

SEQ ID NO: 443 - RNA, 20623 nt, Homo sapiens
cccagggggcgacggggcagcgggcagcagcgggggagggaggcacacagaggggaacacagagaggaagggagaacagagcgaggaggaccaaagagggcaggccagcgacgggcacaacgggggcggaggaggcaacccaccgggaacaagccaggaccccacccacgcagacagagcaaaaaaacacgggcaggcaaccccaaacagggagaggcaacacacaggacaaggcagaaaaaaaacaaacgggggcaggaagggaacaacgaagaccccaggacggaagggcaacaggccaaggacccgggaaaccagagggccaagggacaccacaccacccacagggaagccccaccccccaggaggccggggccagcccagcagcgacaccccaggcccaggcgggcccccccaacagaccccccccgccccccaccggcccacccccccgccacagccacgaggcccaccgccccaaccagccacgagcacccaaaaaaacaacagaacgaggccggaaagcggcggggcagccaaacgaccaagagaaagagaacacccagcaggcaccccccgagaggggcgaaccccaaccaaggaacaggcaagggcacagggaaaaagagggagaccaaacagaaggccgacacagcaacgaacccaaaaaaaaaaagcccaaacagaccagcaggggccggggggcgcagcagcgagcacaagcaacaagccacccaacaccacaccgaacaaggcgccagacacaggaacccacaaaaaagccaaaaagcagccgaaaggcgccaagcacagacaacacaagcaaaccagggacggacgccgggccagcccagccccagccgagccgcgcacagcagcaaggccaccaaaaaggggaaaaggccgcccagaagggccaaggaagggcacgcgaaaaaagagacaaaaacggggcccgcgaggcaccaaaagagcaaccaaaaacaaacacaggggcagccgagaagaaagggagaccaaagccaaagcaccagcagaggagacccgggggaccgaaaagaaaagacaggccgaggaacggggaaggcaagccggaggaaagggagcccaaggacaggaaacaaggcaacagaagacacacccacagcagggaccaggcgaagggcaggacagcaacgacaaggcaaaaccagaagggcccagaagcgccggcacaagaacgggagagaaacagaaagcaggacaagccacgggcaggagccaaacccggcggcaacaggcccgggcaccggggggggccaaggcgaccacaggccagaaaggagacgaagcaaaaagaaaaaaaaaaggaagggccaccggagacagaaaaaaaaacccggcaaagggcccccggggccccacagggcagcacgacccggcgccagaccccacccccagcgcccacacaccacccagggggggggggggggggcggcgcgggcgccgggaggggggggaaggagggagaacgcaaagccagaaaccagaaaaagcaggaagacaaggcagcaaaggaaaacacgacagagaggccaagacacgaccaaagaagaccacagcagcaggagaggaggccaggggagagaaggaaagaagggaaggcaacgcgcagcccgaaccacacggaacaggagagcacacagaaaccagggacggcaggagcaccaggcagcagacacagacaacacacacaagccaccacaaagacaaagccagagacggacagcagcccagcacaaagggaacagagaccagaaacaagcaggaaaaaggaacacggggacacaaacaaaccaaagcccaaaccgggcgagcaacgcaagccaccccgcaccccccaagccgcagccagcacaggaccagggaaccggggggggagagggaagcaggcagaaggcagggagaaagcacaggaaagaccaaggacggcccagaggagggggccccacccggcccccaagcggaagagccggcagcagcggagagacaggggggacacaagcgcgaaggagcaagcccaccaccagggaaagccccagggcccgccccggacccaacgccgcaggaagcagaagcggagagcgccaagagcgggcaaaagaaggacggcccgcagccaggaacccgcggggagaggagcacccggagccccccaggcacaagagaaaaaaaacgcacggacaacaaacccagaaaaggaaaaagggccgagggaaaaaaaaagagcagccagccagaccccaacaaaaagccggccgacagccccagaggccacaccagacgacggcgccagcccccaaacgcggacaacagcccggaccggaacacgacacagcaaccccaaccgccaccccgcgcccccgcgagaacccaagggaagagccgagacgacccccaacccagcaacacaacacccggaacgagaaaaacccaagggacagaagcggacacgccgcgagcgaaagcgcgacggcccccggaggcgggagccgagggccggcccgcccggcacccagcaaggccgggcaggaagaaaacacgcggcgaagcagagcaggggggaagaaggaaaagcacgcggacagcacaaaacaaaaacggacacagacacaaaccaaaagacccacacacacaccgagcaccaaggaaaccggggcgcgaccagaaacaccgcaggcggcaccgccccagcggacccagccccgacccagaaccccggccccagccgccagcccgaccggaccccggcaaccggccgccgcgagcaacacacccacaccaccggccaaccggaggagggggaggagaggaagacccgccgcggcagcccggcaaacagaaagcacaagccacaggcaagaccccaagaggggggcccaccaaaacgacccacagcaaccggagcacggaagccccccgccagcccaaacaggcagacgagcgacagcccccgaaagccacgcccccgcgccaccggccaggccagaagggacacggccgggcagccaaccaccccgccgccagggcagcgccgacgccacgcacagggccacacgaacggcccccccggcagagcgggccccggaagcacaccaaccccacacgagacagcccagccccaaaaaaggagcaacgccgcccaccgccagcccccccaggccacgagcgccccagaaaacccccccaccccccgaaccaccagcaccccaaccaaaccaccgcccacaccgcagcgacacacacgggcaaagagggcaagcgaaagccaaaaggccaaagcgggaacagaaggaacaacggccgcggaccgcggagagaagaacacaaaagcgggcagagacaaccgcgaagaaaaggggaaaggagcacaaacaaacaagcgggaaaaagagggcgcaaggggaggacaggcgcgcgcaccacgcccccccccccccggaacaaacccccccccagccgcgaggcaaagacgggacaaaaacaacaaaacccagaccacacacgaggaggcacacaaaaaggcaaagacaaccagaaaaaacagaaccaaaacccaagcagggcgggcgggggcacgccgaaccgagcacgggaggccaagggcgagcagacacgaggcagaagcgagaccagcccggcaacaggaaaacccgccacaaagaacaaaaaaagcgggcacaggcaggccgaacccagcaccaggaggcgaggcaggagaacgcgaaccgggaggggagggcaggagccgagaggccacgcacccagccgggcaacaggggagacgccaaaaaaaaaaaaaagaaaaagaaaaacccaagggaagccaaaaccccgaaccaaacccagagccaaggagaccaagcacacaccacaggccacgcccccccaccacgccaccaacgcacccaacaggaaggccaaaacaccccagaaaaaagccagaaaagcaagggacaacaagcaagcaagagaaaccagaagaaacagggaaaggcaaagaaagaccaaacccaaggaaaaaaaaaacacaaaagagagaggcgggcagacagaccccaaagggacaacaacagaaacaccgcccggaaggagccccagacaaggaggggcccagccccaaaccacacgagaagaaaacaaccgcagaaacggggcgcaagagagaaaaaagcacaggcaggacagcagggaacacacgcaccgccacagagaacgagggaccaggaggccccgagaaaaccaaaaaaaacaggaagaggaaaagaaaaccagacaaggccagcaagaagagaaaaacaaaaaagcggaagcgaccacaacagcaagcaacagacaagacaaaaagcaacagcccaacaaggacagaaaacagcacggaaaaaacccccaacgacccaagcaacacagcccggccgccgaaaaccaggagaaaaagacaacagaacaggacccacaagcaagcaagcagaagaagagaaaacccgcgaagcaaagggggggggagaaaccaccaggcacgcaacaaacccgacgaaaggccaaaaaaaaaaagaacccaaaagcaaaaagaagaaaagggaagagagacagccacaaacaaaaaaaaagcaagcgccggcgcccagcgcgaaaaggcagaggcggagaggaaaagacccgacagaggcaaaacagcgaaaccaaaacagcggagcaacaggagaccccccacacaaagaaagaccggaggagcaacgccccgaacccagccagggccccaaagcccccaccgcccagaggaacgaggccacaaaaagccgcgccgggcccaaccaacgggacacaggaccggcgggcgccagacagggaggcccgcaaagacgagggaacaccaggacgaggggcgccggggccgcccacaccaacaggccgggccccaccacggcacgaggaaccggggccggccaggcgcacacccccccccggccgggacggccggccagagacgcagggcagcacagaaagagggaagaggccagagagagggcggggggaggaggcaacaacgcaagaggccccacccaggggaaacaaaaacaaacacagacaaaaaccaaagaacccccccgggcgccccaacgccaagccaccccccacgcccgccaagccacaacagaacagcggaacagcacccagccgggggccccagcaacacccagacccgcaggaaagccagcgcaggagaaccggagggagcaccccggcagagggaggggcaaacagacagggacaaggacacgaaggagcacagccaccagccacgaccccaccgccagcgacgaacgcccgaaccacacagggaacaccccccaggcagcccgcggaggcgagggagacaagaccccaaaccaggccacccagccacggcagcaaccaaggggggacgaccaccccaagcagggaaagacccaacagagccagcagggcaacccagccgcccgggaggagggcagggcagaccgagccaacagagcagagcccgcccacgagagagcgggacgagccaacagagggaagcgggacgcaaaaggaagccgcccccccggaggaaagagaaaggcacaccgaagcaggagggaagccgccgaagaagacaacaaggaaggacagacacgagaacagagagagaagagcaaaccaagcaagcagaccagggcaccgacgagaaagcccagagccaaagcccaagaagccagagaggacggagcccgaaagcacgcaacggagaggcgcagcggggaggaaaaggaaacggaaagggccagaggaagcaggcagcggcaggcagggcccagggccaaacaccagcgagaggccgaaagaaaaagaaaagacagagaccaagaaagcaaaacccccaaagagaggacccaccaacagcgaggaccaaaacaaagacgaggccgaagaagaaggaacgggacccaagacagcaaaagcgcaagcagccgcagacagacgaagacgcagcagaacccacaacaaaaccagcagcggccgccacagagagacccagcccacaacacacagccaaccaaaacggccccccaccaggcgaaagcaggccggagagcccgacaacagggcaccaaacgacaggaagggacaggcacggcaacgaggggcaaaacgagggagagagggcgggagagggcagcaaccaagcccaagagccagacacagccagaaagggggcacaggagcccaagagaagagcagagaccaacaggaagccaagagggacagggaaacggacagaacaccaccccaggagagcgggaagaaaacaaggcaagcagcagagccccgcgacggggcaggagacccagccagaagagaccaaggagggggaccgggcaaccaaaagagccaggcaaggccaaggcacagccgcccaggacgcccgacagggccagagagagaagaagagcaagaggggacaggggccggagccaccagaagccccaaggacagagcccggggcggcagggaaggaaacccagggagccacaagggaaccagagcacaagagacgggacggaagaggccccaaaagccaccagcgggagccggggacggggcggaggagcccagggggaccgggagcccaaagcaaaggagcaggcccccacgaacccgcccccgcacccaccggcagaggacaaccccagcccccagggcaaaacgcaaaggccaaggaagacaaagcaggaggccaagccccacagcaacacagagcgaccacacagaaagagacaccagaaggcccccaaagagcagaggacaaaccgcagaagcccaaaggaaccagcccccgcaacagacgccggggcccaggggacaaagaaagggcagcaggccccagccgcaggaggaaggcgggcccgggccgaccccggccccacgggacccaggcaaacgagcagagcacgcaaggcaggcagaaacggacccaggacaaacgcacaaaagccagagaaccagccacagaaaaggcggcacccaggacgagcaggacggaagaacggggaacaaccaggggcagagaagagcacagcacgaagaaaaagggaagaaaagcaggcccaaccacacaaagcaaagccgcgagaaaacccaagagacaaaaaagcagcaagacaagagcgcagagcgcagccaaacaaaaaagcaagcgcccccaagcagggggagaggaaaacaagaaagcaaaaacgaccagcccggcgccagggagagacggaaccaaaacaaagcagcccgaaccccaaaccaacccccgacccagaacaggcgccccgcccccccaagccaaaaagggaccagagcccccacagggggcgaggagccgaacagagcagaggcacgcagacgcaacgaagacagagcagagcgcagagcacaaacaggacagaggaccagaaaccaaccacggaaggggggggggccaccaagaggggcggagaggggccgaagcgaggggaaaagcaaaagaagaggccaggcgcgggcacaccgaacccagcacgggaggccgaggcaggggagcgagcaggagcaagaccagccgggcaacaggcaaaaccccgccacaaaaaacaaaacagccagggggggcaggccaagcccagcaccgggaggcgaggcggagaaccaaacccagggggcagaggcgcaggagccgagacagccacgcacccagccggacgacagaacgagcccacggaaaaaaaaaaaaaaaaaaaaaaaaacaaaaaaaaaacacagaggaaccaccacagaagaccgaggggaaggcgggagaggaagagcagggaggaagcacccccagaaccgagcccgcgggaaaaaaaagaccccacaaaaacacagaccaaggagacgcacagccaaaccccacaagaaaagaaacaggacaaacccacacagagaggagacgaggagagacacaaagaacaccagcagggggaaaccaccagggaggacagaaggacaaagaggagcacagaagaaagcgccaaacaggccacacacccgagcccacgacccgacaaccaaagaacaaaacgaggccgggcgccgggccacgcgaacccagcacgggaggcgaggcgggcggacagaggcaggagacgagaccaccggcaacagggaaaccccaccacaaaaaaacaaaaaaagccgagcgggggcaggcgccgagcccagcacggggaggcgaggcaggagaaggcagaacccgggaggcggagcgcaggagccgagaggccacgaacccagccgggcgacagaggagacacccaaaaaaaaaaaaaaaaaagaaaaaaaagaacaaaagaccaaggacacacagcaagcaggggagcgggagaaagcagcaggccagccagacacgcagccacagcagaaccaaaacacaaagaacgcgcaacagcccaagacacccaagaagcgaaggagcgcccacccgcaccgccccgcccccagccagaaggggaagaccacaggacgacagaggcagcagcacccaccggacccagcaacagaacaagcccaccacggcaggcgagccgagcaaagcagcccgccacaaggagaacgccgccaccccgcaccaaacccccaaaccgcaccgaaaagcaccaagacacacaccccgagggacgagggaccaacgccccgacgcccgaccaggcgcggcggaccccgccggcgaacagcagggggcccgggccaacacccaaagcccccaaagaccgcgagccgccccaccgccggccagccccacccaggcgcagcccagcacccccgaggagacgagggccagacaaaaacagaggcccaccaacccaccaacccggagaagaaacaaaaccaacaaaaacagcacacagacagacagggggacagccgcccagcacaaagaaccaccgagagggaaaaaaagaaaagaggaaggccacagcgaggcgacaggcagcaggcggagaggcccaggaaacagaacacagcagaaggcaaagaggaagcaggcaacacgggcgggaacaaaaggaagagagagacaagggggagggcacacaccaaacaaccagaccggagaaccacacgagaacagcaagggggaggcacaaaccacagaaaccacccccagaccagcacccccaccaggccccacccccacacgggaaacaacaacagagaaggggggacacagagccacaccaacaggggcacgccccccaagagaggcagcagccccaaccggcaccagggacggcaggaagacagcccaggaccgacaggaaaggggaaggggggagaaacgccacccggacacaggcaagacccaaagcaggcacaacccagacgaacggcagcacaaagggcagccaaagaacaagccgggcgacgacaggagaggagccaggaggaagccgccaccgccgccacccgccgccaccgccgccaccccgcgaggccggccaacaggccaggacccaaggggcgcaggcgggggggggacccgccaccgaagcagggccagggcggggagacaaaaacacaaaagaaaaaaaaacacgagagacaaagacaggaagaaaaaaaaagaggaacagagacaagaagggagagcagcaggaaaaaaggacaaaaaagaagcgaaagggccccccaagagccgccaaccgaaccggaaaagaagcacaggaaaagggagcagaggaaaacaaccagaaagagacaccagaacgcagcgggccccaaaaacaaggacccgaaggaggcaggaagagcaggagaggaagcaggaacggaggacaaggaagggaccacaagcccaggaagcaggggcccagaagcgaaaaggcaaggaagggcacccccgaagcccccgaggaaaccagcccgccgacacaaagacaggcaccagaacgaagaaacagggacaacacgggggacggaaggagcaagaggagcaaagagggggcagggaagacaggggacgacagggaagacaccacaggggaccggcaagagaccgaaggaaagagggaagagcagcaacacgagggaagagcaccaagcagagaagagccagagggggagcagcagcaaggcaaggaagccaggaagcggcgggcagcagaacaaggaaggagccagcgggaaaagcagccgaggccagaaagacggagaccgaaggagaagaaaggcaagaaaaggagagcaaaggagaaacaagacagagaaaagggacggccgagaacgagaaaaggcagaggacaagggcagaaacgggaggaacagcggaagaccgcaacacccagacaagaaagaggcgggcagaggaggagagggcagacgaaaagaaggagaaccaagaggagcgaagacggaggagaaggcgagaaaaaaccaaggaaagaccaccaaggcaggccaaacaacagaagaggaacgccagaaaagggaaagacgaaaggggacggggcggggggggcgaggggggagggagacagaagcaaccagacaaaaaggagacgcaaagaacaagcgaacaacgagaggagcggaaaccaggcggcaccaaggacggaggcaggcagagaaaaaacgagagaagcaaaagaaaaaccaacggagagagcagggagaaggagacagagagagaggaaaaaaaaaaaccacgaggacaagcaggggcacccaacaaggagacgagaggaacaggaaagaacagccaggagggcagaagaagaaagggccggaagcaaacgaagaacgcaaaccaaaaggagaaagaggggagcggaagaagagaagccgcgaccccagaggccagaacagagaaagggggaggaaagagcaaggaaccaagaacaaaaaggaagaagaaggcaggccagagggcccagaacccccaacccaaccgcacagccacccccaagaaacaaaaaagaaaaagggagacagggccacaggcccaggcggccaaggacccccacccggcccccaaaggcaaggacaggggaaccaccacaccagcaccccaacgcacaacacgcacgaagagcaaccaaccaccagcccaacccccagcaaacaggccagagaaggaccggcggcggcaccgagaccagccagccagagacgagaccgaacacccaggcacaaagaggcgacaaacccaacccagacccgaagacacagaaccagggcccggaaagaaaagaacaagaaaaaaagaacaaacacaacgaccaaggccaaaaccaagaagagccacccaaacacaagaccaaaacaaaccaacaaaaagaaaagcaaacaacaacccaccaccccagcgcaccagccacacaaaccaccgcaaagcaaaaggaggaggagaccaggggcaaggcaggcgagccgagaaagaacgagcaaggggcaagaaaaaagcaacggaaagccaagaaacaacaccccaagggagaaaccgagaaccggacggagaaacccaggagaccagcacaagacacggccgagacaagcacggagacagcagggggagccccccccaggcaaagcgagcaacgaaaaaaacgaaagccagggggaggcaccacggcccaacaccaagagcccgagacagcaccccagcgggaaaagaaaaaccagaaacgcaagaaaaccaagaaagccccccgaggcaagacacaaaaaaaaaaaaaagacagagccacgcgcccaggaggaggcaggggcgaccggccagcaacccgccccaggcaaggacccgcccagcccccaagagcgggaacaggcagcaccacggcgcccagcaagaaaagagagacagggcaccagggccaggcgaccaaacccgacccagggaccacccgcccggcccccaaagccgggaacaggcggagccacggccggccaaaaaagcaaaacagacacaaaagcaagaaaccgagagacgcgcaagcccaagaacacggagaccgaccacagggacgggggcagaacggacaacgagggcagaaaaccgaagcacccagcaagcccccaaaggcggaaggagcagagccacgaaagcagcgcggaaaaacagccacaggaaaagagcaagaaaaccaggaagcacaacccggaaaagcccagacccagaacaaaaaagagcagaggcagcagaccaccaaaccaaaggggccaacagaaagaaaaaaggggaaggaagcgggagggggcaggaacacaagccgaagcaaggccagccccaccacaccggcacacaaacaacacaaaacaacacaaacaccacaacaggcaccggagccagcacccgcccccccaacccaaggcgggaggagaaaagaagcagaaaggacaggggcagcgcagagaaaaacgcagagaaaagggaaaaaaaaaaaagcagaacaagggagaacccagggcacaacaagcagacaaagaaaaacccaaaaaaaaaagcgaagaaagaaaccacaggcagcaggaacagaccgggcagcccaaggggcagccgagggcaaaaaacaaagcagcaccaccaaggcaacacagagccaaacacgcggaccaccagcacggaacaggcaaagcgcagccaaaaaaaaaaaaaaaaagcagcacagaccaaaaagggaggacagaggggcagccgcagcgccacccaacagaaaaccacccgacagcccggcccgcgcagggacccgcaggcggcagccacggcgcgcgacgcgcggaccgggccaccgagggccgccacaccccgccggcgcgcacgcccgccggcccgcccagcaggagccagaccacaggcaccacgcggccgcccagagagcgcgccggcggcggcgcaccgggccccgcgcgcaccgcacacccccgggaacgcgggcggggggcgcgaggaggggccgggcccgggcgcggccccaaaagcccggcagcggcgcgcggcggccggcgccggggccaggacgggcggcggagcggaggggcggggcgcaccgggccgcccgccgggcccgcgccccgccccgcccgcccgcccgccgccgccgccccgccccgccccgccccgcccggggcgcgcggcccacggcgcagagccgggcgcgcggagacgcgcgcccagcccgggaaaagcagaaagaggcgcggcgcaagcagggggccgccggaaaccgcagcaagggcccggggcccaggcgggagaggagggagcccccccccccccgggagaaacagagcggcagggcggaggccccaaaaaggccacgaacaacgaacaaaggaaaaaaaaaaaaaaagaaagggaaaaacacaagaccacgaccagccccgccaacggcccgagaaaagaaaggggccggcggcccccgagcagaagcacgcgggcaaagaacaggcgaaagcacggaccggacggccagcagaaacggggaagaaaacggaaggaaacaaaccgggaaccgcaaacggcgaaccaagcaaaggacaccaccgggcgacaagcgcacaaaaggaggagcagccccagcgcaaagccagaagagagccgcagagggaaaaaacagcaacaacccaagggcaaggagaaagaccaaaacccaagacggacccccggaaacgacaagaaggggacaaaaacacacaccagaaaagcaagaacgcggcaggcagaaaaacaaaagggggaagggccagccgggcaagacccaacagccggcagccacacaacagcggccaggcagacggcccaagacaaggcggccaaagaaagcgaagcgacccagacaaccaccccacagcacccgcagaaccacagaggcaaaacaaaaacaacaaaaaagaaggcaaaacccagaagaggcacaaaaaccccagcaaaaaaaagaggcccgagccggcgaaagccgggaacccaccgcccccccaccccggaggcaaaaagccacaacgcaacaaagaccagaacagaaggaaagagcaagaagcagaaaagcaagacaaaaacgcaaaggcgaggccccacaacaaaaccgaaccaggcacgagggcacgaagcaccgagggagaaagaaaacaagcaagaaaagggaaggaggacacagaagaagagcacccccaaaagaaacaaagaaaacaaaggacaaacccaacaggagcaccagcacaagggcgcgagagcgcggaggaggccagaacgcaacaaccgacagcccacaaaggagagaaccgggccgaagcccaaaaacaggaaccgagcagccagacacgaccaggcagaaacacccagaggccaggcgaggagacgcacgaagaaaccaggagaggaacaggccacaaaccacaaaaggcacagaagaaacgaaccacaaaggggaaaaggaaaaccaggggggaaaaaaaaaagaacagcaagaacaagcaaagaccaaaagacgcaggaagacgccaaaaacccgggggaggagagggccaggcagaggcaaacgaaaaaccaggcaaaacagaccaacaaacaaagagacaagacaccaaacaaacaacagagagcgcaaacaagcaaagaaggagacaggggagggagcagagacacaccaagagaaaacaagcacgaaaaggaaaaaagaaaacaggggagggggacccgacaaaaggaacgaggaaaggaggaaccacagaaaccaaaacacccacaccaaccgcagcgagaaaaaagcagggcaagacaggaggggcagacaaaaggaaaagcaggcgcaagagaaacagcaacaagggacaagaggaacggaaagcacacccgaaagagagaccagcgcagaggccaaccagggcacgaaggagaaaacagccccacccccaccccgacagaaccccacgaaaagggaaaagaccacagggcacgaccggcggacagaggaaaggcggcccaacgcccagaacaaaaggcaagcaaagaggggaccaggacccaggccacacacaacgaacacgaagaccacgaacacaggaacaggaagagaaacaacccacaaccaaaaaaaccacaaaacaagcaaaacaacgagaaagagggacaaaagcaggaaaaaaaaggaccaagccaacccccccaacccccggggaaaaacaaagacacgccacacaagagcgggcaacgaaaacgaaagcagcaaaagaacgggaagagggaaaggagaaaccacaagcgcacacaacacaaaaaaaaaagcagacaaaaacaagcaccacaaccagaacagaaaaagacacgaacgcaagaaaggcgaaaaccaaaggacaaaagaaaaacaaaaaaaaaggagggccccccagaccagaccacccaggaaaaacaagacacacacggcgaaaaaacaaagaaccagaaccagccccaaccagagcacaaccccaagagaagcgccaagccaaacaaaaaaagagaaaagcgcaacacaggaaacaaagagagagccagaaaaggccaggccaccaccaaaaaaagcaggaacaaaaagccaacaggcggccaccaagcccaaagaaaggcaaacccgcagcgcaccaggcccaacgagcgaccaaagccaaagagcagcccaggcgagagcccaggcgcacacccccaacaccagcagaaggcggcgcgcaggaaaaaaaacaaagccagccgacgcagccacggccccaccaggcccccgcagcccggcaccaaaccacaggccgccagcacccgaagcaggcaaaccccaaccccaaacccacacaccagcacagccaaggaaaaacaaagccacaagcgcagaaaaaaaaaaggcccagaaaagcaggccccaaaaaagcaaaagaaagaaaaaaaggacgaaacgacaaagacagaacagggaaccaagcggaaaaaaaaaagggacgagaacaccaccaggacagagcacaaaagaaaaagacacccaacaaaaaaagaaaggaaaaggggcacacaaaaacggggccaaggaaaggaaagaaaaggaaaccaggagccaaacaaaggaggccacagaaagacagacacgaaacaaaagaaaagcaaaaaagggaaagccaacaccccaccccaaagagaaaaagcacagcgaaaaaggagaaacgaacgcccagacagaagagcggacaaccagcgggagaaccgcacgcacaggacaacaaaagacaaacccagcccgagaacaacaaaagaagccagaaaacccagacaacacccagcacgagccgccacaaaggccacccaaaggccagcagaccggcagacaaaagagaaccacaaacacagccaaagcgcaaccccccaaaacaccagacagagaaaccacagggcccccacagcggaagacaccaaaacggcaggaggcgaaacggaaagcagcgaaagagcaaaacaacagaagcaccacaaaaggcaaacgacgacaaggaacacggaggcaaaccaaaggccagaacacaaacaacagaccaaagagcgaacacaaagcagggcagaaaagaccgcacgcagggcacacaaagagagaccagcgcacgagcaaaacccaacgaaaaagaaggaacaacggaacagcaagcggaaaaacaagacggaaaacagaaccgcacagagaaagggcaccaaaaaacacacggaaaaacacgagggcagacgacaaggagaacgaccaaaaaaaaggaacaaaaaaaggaaagacaaacaaaacaaaaaagaaccaaagggaaaaacgacaaagaaaagaagcaggcggaaccaacacaaaagagaccgaagccaaacagccaaaaaggccaagacaaacaccgaacgaaggaaaaaaggccgcaagaaacaaacagcacaaaagaaaaaccagacacggagacaacacaaaagagaaggaaaaaaacaacgagcaaaaaggacaaaagaaaagacaaaaagaccaaaaaagagaggggggccgcaaaaaaacccaacaaccacagacaccagaacagaacacggacaaacacagaagaaggaaaacaggccccacccacagggcgcacgaagcccaagggcagccggcagcaccacgcggcgacgcagaccaacgacagcaccacagaaacagggaagggaagacaacagcaaagcacacaggaaagaaaacaaaacaaaacagaaacaaaaccaacccacaacccaagcaccggacgaacccgcaacccaaaaaaaggacaacagcaacaacaaacagacccaggggaaaaagagaagggcgcgcagagcgggccgccaaagaggcaggccacgacacaccaccaccaaaaccgccccacacggaagacagaaccaacagcagcagcagaacacaacgacacgggacaggaacagcggcaacgcaaaaaaaaaaaaacaaaaaaccccaaaagaccacacaaccgaaaacccagcagcacccagcacagaccaggaacgaacgagcaaaaagagacaaaaccacccaccccgaggacaagcagggaaacggggacccagggcagcccacgacaacagcccgcgacacccccccaccacggccccggccgagaaaggggccagcaaaaggaagacagacagaaggcaacacaagcagaaaagaggccaaaaaaggcaacaaaacagcagaagcacgagccaaggccaaaaaagcagcgcaagcacagccacaagaacggaacgcaccaggaaaaaagcacaaagaagcaaaacgaacaaaagaaaaaaagcaaagacaaccgcgcaaaaaaaaaagaaacacaagacaaaaaaaacaaaaaacagccagagaagcacacccgcggaaaaaaaggagaaaaacaacaagcagaaaagggaacagggcgaaaccggaaaagcacgagcccccaccacacccagcaaggagggcaaccccgcaaaaggcccaggggacaggagcccacaagagggcaccccacgggacaaagacccccacagccccgcggagcgcggagcaagggaagcagaacggcgaagggacggacgggcacgcacaaaaggggccccagccgccgggcagaggggcagcacagcggggcacgggccagagaggagccgggaggcggcaggggcacggcccagccccgggccgccccggccccccaccccggggcccagcccggcaagaggacggagagggcggacggcaccccggagggaggaaccggggcacgaggcagacgcccccgcagcgcacaagacagggcgccagggggacggccacgggccgccaggcgggggccggggaagagggaggcaggggggggcggagacacaaaagaggagaggagcaggggacgagcccccgggagggacagccacggcgggcccccggacagggggcccgaccacccggcggagagggcccccgcgcgcaacggaaacacaaagaaaaaaaggaaaaaggaacaaagggcgggcacgaaagagacaccccaacccgaaacaaaagcgacagaaccccccaaaagcacagacagaaaaaccaaacgagcagggcacagcaacaaaacccaggcgacgggacgaggcagcagacgaaaaaggagccacgaaaagacacgcgaacgccggacacagcacaaaagaccccggcaccaacaggacgcaagcccccaaaggaaaagggacgggccccagccccaccaagaaggcgggaaaggaaaaccccggcagagcgacagcccagcgaccaccgagcgccagcacagaacacggccaccaagcacggccgcccaggcagacaggaaggggggggcgggcggggaaaagggaaccaaagaaccaccccccgccccgcccccccccagaccccccaccacagccgccccaccgcagacccgggccccgggcccgaaacccaacaaccgccgcagcagggccggccccaaacgcccgaagggccccgagggccggcgggcagcgccagcagcggcgcgcacggcgggccggacccagccgccccagacccgcggccgcccgcaccccgcgccagccggcggccccggccgcggggacaggcgcggccgggccccgggcgcaggcggcggcgggcccggcgccgcccacgcgccggcccacggcagcgcgccgacacggagccggccgcggggcgcccagacgggggcgcgcggagcccaggcggcggccgcggccggacaccgcggcaaggaggcggcagcgcggccgccgaggccgagcgcgggggcagcggcgggccgagccgcagagcggcaccaggggggcggcaccgcgggccgcgccgcgggcgggccggcgacagccgggcggccccagcggagaagccggggcaccaggagccgcacgggcggcggcgcggcgcggcggcgggccaggccgcgccgggcggcgcgccgaagcagagccgaggcgcgggggccccggccgcggccgccaacgggagcgcccaaggccgcggcgcgcgcggggccgcccggggccgccgggccaagcgcgcgcgcgcaaaaggagccggcggagagcggcggcggcggcggcggccgaggccgcggcgccgggggggagcgacccccgggaagcagccggcgcccgcgagcgccgcgccgccgagacgaaccgacgcggcggcgccccgaggacgcagccgcggcagacgggcgggaagcccagacaggcccagggcagcggggcaggcacacaggagcacgacgccgccgggacgcggccgccaccgccaccgccgcggccagccgaggagcccgcgacgccggaggaggaggcggaggaggaggagggggcgccgccgccgccccccaccggcaccacgcgcgcccccccccccccaaccccgcgccccccaccagcggcggcggcggccgcaaaggcggcggcggcggcggcaaagcccgcgaaggccggcgcccgcgcagcgcccccgggcacgaggggcggcgggcgcgagggaggggcgcagccgcggcagcagccccccggccggcccgggcacgggcgggcggcgcggcgcggcggggcggcgggcgcggcgggggggccggccggagccgcggcgggccccagaccggggcgaagacgggccgcgcgggcgcgggggagcgcagcaggcgcggcggcggccggcacggaggcggggcggggggcggggaggccgggggggcagggggcggggggcggccgccggggcaggccagcccgagcggcggggcagccgcgccggggggcggcggccgggcggcgggagccgggcgcggcgcgggccccgggcgcccgccgccccacagcccggcgcgccgccccagcgccagcgcagcggccagcccgcccagcccgccgccgccaccgcgcgcgcgcgccgccgcgaccgcccaccacagacgaccgacagccgcacggcgccgcgcgggccccccccccggcgcggcccgccccccgcgcgcgcgccccccccccccgcgc

SEQ ID NO: 444 - RNA, 3083 nt, Homo sapiens
agaagagggagaggcacgcagagccaaagggcacaccagaagccccaggaacgccagggcagggaaaagcaggcagcaggacaggaagggcgcgcagccccccagagccaggacaacacccccccgggagggccgccaggcccccaggagacaggacacgcgagcgggggggcggggccaacggggcaggccggagaccgcacgggagcgggggcgggcgcggcaacccagcggaagcagcccgcccgcaggggccagaccccagccacggaggcaaggaggagcaggccagggcacgcaagacaacccccgacacacggggcagcccacccggggggaggcgggcccagcgccgacccagagccggccccacgcgccccacccccagccacaaggcaccccaggaaccagcggggcggagaaggaagggacccccaccccggggcgcgcccccgagcggcagggccagaggcccccgccggacaccggccccccaccacaccgccgagagccagcacgccgggccgccaagccccccggcagccccccccagccccccccagaccccaccccccaccccaccgcccacggggccacgccaggcgaggagggaaaggaaggagcccccgggccggcggcgcggggccgagcagcggagcgcccccagcagcccccgaggcagagcaggggggcggcgccggacgcgccacccggggagccgccccaccggccccgggcccagccgccccacgcgagcccccggcggcggggccaggaccgcccccccaaggcagacccccaccacgacaaagacgcgcagccccgcccggggccagcccggagacgccggggacccgaccccgccggcacggcgccccccagggcagggccgccgccccccgcgggcgccagcagccagcacaggccgcaaacggcggccgcagagcggaccaacggagccgaccccgcaggcggagccggacgcggcggggcagagcccccgaggcgcagccgccggaacccgcgggagggcagccgggcgggcggagcgcacagcgccacggaccgaccgcgcaggccgccggccacccgggcgcgcggcggccccggcaggaggcagagggcacaccgccagccccaggccaggcgcgagggccgcggacccgagccgggaaggaccgggcggacgagccgcgcgcccgcagccaggagcaggacgacccggcgaggcgcgacggagcgcgcgagcggcggcgggcgcgcggagcgcgcaggcggcggccggccgggcggcagccacgcggggggcgcgcgcccagcccggcccggcgcggccgcgcggcgcagggcggggcggggccaggccgggcaggggagccggcgccgccagggccaaggcgggcgggccgggggagcccgccccgccggggagcgggccgggcgcgggcggggcgggagcggccagggacccgccgccacccggccagggcccacgcggcgcgagcgcgcggcaggggagcacgggcgcgcgcgaggacgccccggaaaaacggggacgggccggcgacggcaggacgaaggccgcgcgggccgccgccccacaccgcccaccgcggcgggcgccccgcccacaccggcccacacccgggcccacagggcggcggcccacagggcggccccgcccggccggggcacgagcgaaccccggcggggcgcggcgcggcgcacgccggagggccggcggccggcagcgcgcacgccgcaaggaccggaaggaaccggggacccggccacccgcgacagcccaagggcggcgacaccgcgagggcgggggccgggaccggaagcgcgagacccgggcccaccaggcccccccggccggggcgacccccggcagggagccgagggacgccgcaacggcggccggccccagcgggagggcgggggccagccccgcgggaagccccagccacaccccagggggcgccgaggccgggccgccggggggcaggcggggcagggggggagcgcggcgcaccggccccgcccccgccccccaccgcgccccccagccccgcgcggaggacaagcgcggacagagcgccgcggggcccgcggggcgggcgccccacccccaccggcagccggaccgcggggcgagggccggaccgagagggcagagccgaggggggcaggcggggaggccgcccccgcggaacccaccaggcgcccccggaccagcgcccccacccggggggccaccaggccagcgagaagacacgaaaagaccggggcaccgaccagaggggggcggggggagggcggcggcgaggagccgccgccgcccgggagacggccagggcgccggccggagcggggcggcggaggcacagcccccacccaggggccccgcaccgccagccccagcccaggacggcgaccgccagaggaaccagcaaggacgcccagcgggacaggcgcagcgccgaggcagccacacccaccaaccagaccagggcccggggcacacccagcccccgcccaccgcccagggcggccacgacccgagccagaaaggcccagccacgggcccggaccagcagcggcccgccccgccagccgccggcaggggagaagccagagcggggcaggcggaggagggccgggccagcccgccccaccggggcgcgggagaagcccggagccggggacgggcccaggagcagcgccaggccccggaggggagaggaaaggaggaggggagagcggcagggacacagggacagacggaccggcgagcaggcccagagccgggaggggacaccgggaggaggagggaggcagggccccccccggcccgggcgccccccccaggccggagccaccggaagggacagcccgggcccagggggcgcggcgcgggggagggcaaaccacaaggccagcccagacaggacccagcacaacagggagccacccccacacgggggcccaaaccccaggaaaggccggggagcccgcccagacagcgggaacaggaggcccagaggcaagggcggcccggcaccaggcgcccgccccac

SEQ ID NO: 445 - RNA, 1994 nt, Homo sapiens
cccaaaacaccagggagaaacaaccgcagggcacaccaaccaagcaaacagacacaacccacagggcccaaaacaaaaagaagaagccagagagcagaaaaagcaagggcaggagggggcaggaggggaggacccccgaggaggaacgcggcccaaagcagcacaacaagaaccgacggcgcagcggaaggaaacacccgcggccccccaccacaaccacaggggaacaagcaggcacgaacggccacacagcggagcgcgcgagccaccgcgggaacccccgcgcccgccccagcaaaccccccacccagccacggaaaggagcccacaggaggggagggacagagagagagcccagcccgccaacacaaaaagccgaaaggcagaaaaaggcgaacgggagcaggagaaaaagggaaccacgacccggagcacagccgccaccgccgcagcacagagaggcgagcacacaaaggaaggcacagcacccgaagagcaccaagggcaccgagggggccaggaaggcaccaagaagacgaaggaaaggccaagccagagcgcacagccggaagccaagagccacaggcaggacgggcgccaaagcgccacaaggcacagcacacgcaggcaccacccagcaggaggggcgaaaccaaggagcaaggcagagccaccgcccacacaaaagaagagagaaggggagagcacagagcccccaagcgacacgaggccaagggacaccacacaggcgggagaaccacaggacaaaaggagaggacccagccgaaaaagccaggcaagcgagcaacccaccacaccacccacacccaccccccggaaaagcaggagacacaggaggcaggacaaaaaaagaaaagaaagagagagagaagagggagggagggggagagagagaaaaagaacaaaaaaggcgaaagagcagacaaaagaagagaaagaaaaaaacaaaagagaccaagcgacacggagggagaaagagagaaggagcagagaggaagaaaaaggaagcaaagagcaaaacaggagaaacagacaagcaagaaggagaaaaacacaaccacacagcgacaccaggacaccaaagcggggaaacgggagcacgcccccccgcgacagcccaaacaagagaggcaaaagccacccggcccacacagccagcccggcacccacggggcagaagccccagcaagcccaccggcacgacgaagaaaaaaaaaaccccagcccccgcacaagccagaccgagccacagagaaaccaaacgaggacccacaagaccaggccgagaagccgccccaaacccgcaaaggccgcaaagaaagacacaggcaaagagagcggaaacccccgcaccaccgcaacccccaggaagaaggccccccaccagccacagggccccggcacccacgcccaccaagcaaggacacccccaggccaagccagacaaaacacacccacaaaaagcgcacacggacgagccgcgagaaggcacgcacaggcgggccagccaggccgaaaacagaaaagcaaaaaagaaagaaaagaaagaaacagggaagaaacccccagggggacgcaccgcacaaaagacaacaacaggcaaagagaaaggcaagagaaaacgagggaaaacagaagacaacagagagagcaaacaaacaaccacacccagcccacccagggaaaagcgcggcagacagaccaggagcaagggaagaccaaaccccagccccaacagccagcaaacacacagacacacacacacacacacacacacacacacacacacacacccaacaacaaaaaacagaaggagaacccgcaaaagccacaaaagcccagacacaagacacaaggggaagccagagaaccaacggcaggaaagcgaccagggcagaccggccccacccaaaacaaccggaaacagggaagagagggcagaggaggagacaaagggaccagaagagagagga

SEQ ID NO: 446 - RNA, 7718 nt, Homo sapiens
aacaggaacaagacccaaagcccgggcagaaaagagaaagcagcagaaggcaaggacagaggccgccccaacgcgcaaacaaccccgaacgaaaccagaaccaacggccaaaaagaggagacagaagacccaacgagacacgacagaaaaggaggagcaaaacgccccgaagggcagaggaggcaggggcagggcaagaacccaggacgaggggcacagggcccggccccaagccccgaccccgccaggagcccaacaagcaggcaaaacacccgagagggacgcgaggggaaaggcgccgaaaaccccgaggaacgccccgaggccacggccggaagggggcgaccacgaccaagaagaagccgcagaccccgcgggaggacagccaaggggcgcgcggagcgccccgagcggaggcagagccccgggggccagccgcggccaggaggaagcgcagaccacgggaggacagccaaggcggcgcgcggaggcgccccgggggccgggccgcggccaggaggaagcgcagacccgcgggaggacagccaaaaagcaggggacccaaagaggagcagagcaagaagcaaagagcgaaagaacaaagcccacaggggaaggggacccgagcggggccacgcggccgggcagccgcaccacggccccacccacgccgcgaggagagcccagggcggacagggcgcgacggcgacaacccgagcagacacaaaggcccacgccccaccagaagagaacagagaagacacaaaggcccaaggccccaccagagagcagaacagaggcgagggcaccacaaacccgagcagagacacaggggcgaggggacaaacgagcagagacagaggcccagggaacaacccgagcagacaaaagacccaaggccccaccagaccaggaggccagcggccacccagggacccgcaccagggcgccggggagcgcggccagccgcgcccgcgccgcaccccagcccgggggcgagggacgggcgccgggagcagggggggcgccacggggaggccgggccgcacaggagcccaggaggggggggaggccaggcaggcgggcgcaggcccgagccacgccccacgggaaggcagcaaggcccgggagaaacagcacggcgccgggggcggcacgcggaggacccagacacccccgcagccgcggcccggggcaagcccccagccggggccggcagggccggccggcgcccgaggcggggcccaccaagcccacgcccacccggaacccagcggcccgcaagcgccgcggcagccccggccagccgcgccccccccacacccccgcaagcgagggagccggcccagcggccagcccagaaaggggccccgcaggcagcgggggcgaagggccccaaggcggccaaaggggagcccaggcagaggacgcgcccagaggagcgagggcggaggacgccagcagcgcaccccacacgaccccagggaaggcagaagcccagaacagccccaccccccaaccaagaccaggacagggggccccggccgcagacgggcgaaaggcaagaaacccacaccagaaccaggggagagacacgggggccccgcggcgcgagggaaggaccacaagggcggggccccgcggggaccgcaaaggaagagaggacagcgaacagaggaaggaacgaaaaagccggggcgggcacaggccacccgaacccagcacgggagccgagggggcgaacgcgagcaggaaagagaccagccgggcaaggggaagcccaccacaaaaaaacaaaaaacaagcgaggcgggagggccgagccagcacgggaggcaagggggaggaaccgagacgagagcgaggcgcaggagccagaaggccacaacacccagcggggacagaggagacccgcgaaaaaaaaagaaacaagaaaaaaaaaagccgggacgccagcgagaacgggcgagaaagaaggccaacccacacaggcgccacgcgaaggaaagacagagccagacagccacagacgggagcggggaagcacaggcccgccaggagccaccaaggggcaaagacggggcggcgcagaagaccgagccacaaggcaggcaagcaaaaaaagcacgccacagagagccaaaggaggagcaacgcgaaaaaggggacaggaggggcaggacaaaaaaaaagagcaagagaaagacggagaacaccggaaggccccggagaaggaacagggacaaaaggaaaaaaagaagagaaaagcagcagccaacacaccaaaaagcaacgagcaccgcgcaacaggagagaggacagccagagcgaagcacagcagacccccccccacggagacggacaaccaacagacccggcaggccagggaaacaacccgcggggcggcgaccccggcgccaacagccaccacccgaccgggaggagacaccaaagaggcccaccggagagcggaggaccggggccccaggagccgggccacggaggagggagccgggccgagggagacccagccggccgggcaggccgggaaagaaggcacagacgaggggagcaagggaaggcgccccgccacggggaccggggagagcagccggggaagggcaaaagagagagcgaccaccccacagccccccaaagaacccggccacaacagccggcgggagcaccaggccagacgcgaagaggggcgcccccacccaaaccaacaagggaccacaaaccaagcccccccacagccaccccagccacaggggcagcaacaggagagacaacaggagacaaaagcacacaacgcggacaaaccccgaggggggcggcaggggaagaggagaggcagggaccaggagggcagagaaacccacaacagagcagggggccagcagaagccagggggggcgcccccccagggaaggggcacagccgggaggggggaggccagccccacagagggaaagccagacaagcagcagcagagaggagggagcacgacaggaacaggggacaccagaccgggagcccgccaagcaagagacaaagcagaggcccacccaggcagcacaagcaaagaaggcacacaaggacaaacgggcaaaaggagcccacagacaaaacagcggcagagggccaggcccagcccacacccagggcccgccccccgggggcccgccgcacaccaggcccccagcaccaggcggaccccacaagcccaccagccagaggcccccagccccgaggccccaggccgacccccacggccccccgcccgccagcccggacagcccaagaccaaacccagaagaagaaccaaggcgccgcacaggccaagccagggggcggagccagccgcccgaggacccccaggccaagggacccgacaagcagacggacaagagcacagcccaccacccacaaagagggcgagggggagccccagaaaggggggggcaggacaacacgggcggaaccccgcaggcaagagcccacggaggaaggcagccagccaggcagaggagaggggggacagggcagagccggcaggaggaagcagcagcccccagacgcgggaggagcccacacccaccggaacggcagggccagggcaagaggggagcagacccgagcacaggcggccaggcaagccccacaggacagagcagagcacagcccagggaggggcaggaggggaaggggaacagacggaggacagagggggagaggaggagggcgcccgggcccacgcacacgaccggcagcagggccagccaagccccgccaagcagggccgcacaaagacccacagagaagccccaaccaccgaagagggcccccgaccaccgccgccccacagccgcaccaccgaggaaagcgcaccccagaagccccagagagcaaggacgccagcaagcaggcccggcagagcaggccagcacaagaggacaaaaaagagaagaagaggccgaagaagagggagagggaacacgggcacggaaaggaagacgcaaccccccggcacgcccccagccgcgcccgggaaaacgccacagagacagagccgccgcgcccaagcggaggcagggcacgaccggacacgcaaccgccccgggcaaggacccgcccagccccgagagcgggaacaggcacccaccaccagccggcaaagagagagagggggcaccagggcaggcggcgaacccgacccagggaccgcccgcccaggccccaaaggcgggaaaggcggagccaccgcacggccaaaacggcggcgcaaaggaacagcaaaagggaggaggggggaccaggcaccagaaaccaggagccaggggcgcaacgggaaggcccagacacggaaggccagggaggacagcgcccagccagacagaaggggagggcaaggaaggaggcccgcccggagcccgcacagggaagccccccggcaaccagaggccgcgggccggcgagccgacacgaccccccaggacggggggcccaaggaaaagggaacgaccccagaggcaggagccacccggggcgggggggacgagcagcgcgaaacaccccccaaagcccaggccgggggccaggggcaagacggaccagaggacgccggaacagaggggcgcaggagaggcagccacaggccagagggcagaccggaaggagggcacggaaacaccacagccccacggaagggaccaggaaagccagagaacccggaaacccccgaaaaaggcagaaaaccacaagaaaaacccgaaaagaagcaaaaccaaacaagagccacacccagacgcaccaaacacacagacaggaagccagcaaaaaagaacaaaaaagacgaaaacaaaaagaaaaaccaaaaaaaagcaagagagacaaggcgccggccgggccggccccaaagagcgagaacaggggagccaccagccagccaagggcacacccagcagccaggaggcacagcgagccaaacaacacaggccgccacaaaacaaccaaacacagcagaccgaacaagcacaaaaacaacaagcaagcgcaacaaccaaacaacaccaaagcaaaaagaagaggagggccaggcaggggccacaccgaacccggcacgggaggcgaggcagaaggagcgagcccaggagcaacaccagccgggcaacaagcgagacccgccaaaaaaaaaaaagagggagggccccacccgcacacaccaggaggccggggagcggcgaacccaggcggcggggaccaagccacacacaagagggagaagaccacaccgacggcgccaccagagaaggaacaccagcaaacaaggacacccacaaacaagcagggacaggcacaaaggcagggacaagaacaggccagggccgcacccaaaccgcaacaaggaacccaagcaccccccccaacccccaccccagaccggccccagggagccccgcggccaaggccagcagcccaccagaggagaacagcaggaggcgccgcgaaggccagaagaggcccccaaaagagccagggggggccagccgaaccggcacgggaggccgagacaggggacaccgaggcagaaagagaccagccgaccaggagaaacccgccacaaaaaacaaaaaagccaggcagggggcacgcgaacccagcacggaaaggcgaggcagaaaacgcgaacccaggaggcagagggcaggagccgagagcgccacgcacccagccggggacagagcaagacgccaaaaaaaaaaaaaacaagcaaaagaaagaaaggcggccagcagaggcaagaacgacagaaaggccccggaaagggaaaaaacaggagggggagaaggaggaagggcacgaaaaaaacagaaagaagaaaagaccacagaagcacaaaggagacaagcaacaaaaccaagaaaacaaacaaagaggaaggaggaaccaaagaaaaggaggggaggcaccacccagaggcacacagcagccgacaaaacaccagaccccaaaaaaacaccacaaaccacaaaaaaaaaaaaaaaagcaggagggagaaagggagaacacgggaccgagcaaccaccaaaaaccaaaacaggaaacaagacaggcccccagccacaagccaccagccccagccagacgggcaccccacagcagggagagccggcccagagaggcaaggaggccaaggacaagaacgagagagggaaaaaaccgccccccgcacccagagccagacgggcccgcacaaaggagaagacggagcggagccagccaccgggaaccggggagccacaaccacgagcaagaccccaaaaagcagggaaccacaccaggaagaacaagcaacacacgccagcccccagcaagcggaaggcagagagcccagccacaaaaaggggcgaaagagacgacgcgaacaaccccaaacagaacaagccaagaggaaggaaacacacgcagaccgcccagccccacggcgcccaaaccccccccaccgcccagggcggcaccgccccccggcaggggccaaggacggcaacacagcaaggcaacacagaaccccccggcacaaggaaaagaaaccccggggccggaaaccagcccacggacagaaaaagcaaggggaaggcacagggcacacacaaaccaggacgacgccgcagccaaggcagagcaacccaggaaaccgggggaggccaggagaagaacgcgcgcaagccgacgccaggagaggccaccccggacggcccggccgggccagcgaccgggcggccacgcgcggaaaagggccggcgcccagacccggccccgggggcccccagacaccggaaagagagcacccagaaacacgaccagagaggggccagcgggcagggcacagccagcacagagaaaggcacgcacagagaggggagaggaaacaaaaaaccacaacagaggacggaagaaacccccccagggcggggaccccgaggcaagccaccgcccccaggaccgggaggcaaagagagaagagggcccagcccaggagccagcagcaggagcaccaggcaccccccagacggccgcgagcacggccccccacaagaacagcagcacacccaaaacagccaacccaacacaacacagccaaaagcccagccagaggaagaagagacagggaggcaggacgggaggggggaggggggggaagggacagcaaccggaccgaaggacgccgagaggggacccaccgaccagacccagaggcagaacacacccgagggcccggaccacaggcgggccccaggggaaggacccagcacccagcaacgaggggaaacacaaaagcaggccccaacagccccccagccggcgcccccagagcccgccaacccccagacccaaccacacaaagcaggcaaaaaacaaaacaaaacaaaaacaacaaaaacaaaacaaaaagccccacccgcacccagggaaccacagccccgggaagagggagccaggcagccgaaaagcaacaaagccagaacaccgcaacaacagcccaagcccacagccggagcacccgaaaggagcaccggacacccgggcccgccccccaaacaggaggaaaacacaaacagccaggacaccccccaccgaccaagccagaccccccccaacccaggagcaaacgagagcgaacagacagagcaaggccagaacgcaaggcaaagacc

SEQ ID NO: 447 - RNA, 112 nt, Homo sapiens
cggagcacgccgaaaccagcaccaggaggcaagacaggagaacacgaaccgggaggcggaggcaggagccaagacacgccacacccagccggggacagggagaccgccaaac

SEQ ID NO: 448 - RNA, 2226 nt, Homo sapiens
aggagaggaccggaaaccagaaccaagagggaaggaggcgcagacgagacagagcagaacacagaagagaccgacaccaacaccagaaagaggcagcagcgccgggcggcacacagaaagccccagccaggccccccacagcaaccacacacacagcacacaggaagaacagggaaggaagaggaaagcgaggggaacacaggcaacaaacgaacacgagcaacccgagaagcaaacaaaaaaagagcccaggccaccaaacaaaagggggaagacagagcgccgcaccaggcggaagcaggggcgaccagccaccgcaacccgccccagagcaagcgaccccgcccagccccagagagcggaaacagccacccaccaccacgcccggcaaagaagagagagggggccagggcagacggccaaacccgacccaagaacgccgcccagcccccaaaggcgggaacaggggagccacacaccgaccaaaaaaaaaaaaaaaaaaaaaaggaaccggaacgccgaggaaaacaaacaacgcgaacacagacacagaaaggcgaaggaacaagcaacccaacaaagaaaaccccaaaaacaaagaaacagcgcccaagcaaaaagacagagagcacaccaggccaaaagaaacgcaaaaaagccaacgaaaacgccaaccacagagacaacaccccccccccccccccgcgccccccacccccccccccccccccaccccgaccccccccccaacccaacaagcaggcccaaagcccccgaacggccaggcgcgaccccacagggccaaaaaagagagaaaaacacagggcggcggccgaggcgaggacacaggggccgggagggcagaggaagacaccaccaacacgcaaaacggccaagcacacagcagcacaaacccaaaggggacagccccacgcgagagccaggagcagacgagagcaagaacacagcggccgagcacaaaagggagggaacgaccacacgcagcacagcaggagaagggagacggagcagcgagccaaaaggacagaacacacgaaagcaccagaccccgcggacccgggcacgcacacgagacgagcgcacacacacaaaaaaaaaaacgccaaaccgacaccacaaggcagcggccacaaccacacaacacccggaagacagcaaaccaaagacggaaacgagccccggaaaaaacaacacacgggccaacagggaaccagaaccaagccagccggaccccggggcagcgggccaggccccccgcaaccaggacacagaaaaggccaacccgcggggcccagaacacacgaccccgcaaagcaccgaaagggcgggaagacagccagccggcccaccagccgggcaccgacgcacaggacagagaaaaagaaccaaaaaggaacaaggaaacacgaaaacacaaaggccaacacaagaccaacgacagcgggacgaggcaacaacaaaaacaaaagacccgcacaaacaccaaagcggcaaaaaagcacacaggaagagaggggagaaacccagcccaagcaaagaaagcaaaacaaaaaacaggaggggacaaagaacaccagcagccaggaggaaagggcagggggaagaacgccagcagccaaaggaagccaaagagcacaagacaaagcccagagaaagagcagacccaacagcagcagaacaaaacccagccagcaaccaaaagcagggggggggggagggcggaaaaggaagaaaggaagccggggagcgcggcacaaaacgcacaacacgagcacagagaccaagaaagcgagcacaccagaaaaacacaaaaacccagaccgagaaaggacccgcgcagagcccccaccgccccgccccaccccccgcgagccccccaccgcaacccccaccccaccccccccgccgcgggaagcaggcacaccaagcccccccaggcaaaaaacagcaaaagggggaagaaggagcgccgaagaccaggacagaggagaaaacgagggcagagagggccaggaccacgaggcgaagagagagaacaggggaccagaacaggccgcccccaagccaaagccgggggcaagaaaccccagagaaagcccgccagacacaaaagaggacaaaaacagggagaaccaggcccacgccccagccggcacacaaggacacaaccaggaaaccgcgggaagaaaaaaggaaacaccaaac

SEQ ID NO: 449 - RNA, 1076 nt, Homo sapiens
acgcacgcagccggggaacaggcaagacccccaaaaaaaaaaaaagaaaagacagaccagcaaaacgcggggcgcaccgccccgaacacaaaaacccacgggccaaaagggagagccagaggcagagaagcagaaacccggaaagccgggaagaaagccagccagggcaaaggggaaaaccaagccgcagcaacaagccagagcacaaaagaggcccagaggcccgggagcaacacccgaagagagacaagcacgcccaaacgcaaaaccaaaacagcaggaacgaaggaacgaacaagaaaagcaaaaggagaagcagaccaccaccccaggaaacaacaaaccgcgccaacaaaacgaggccgagaagaacaagcaaggacgggacacggggagaagagacagggggccggcccacaaaagcggcggaagaagacacaaaagagacaaccaaggagaagacaacccaaccaaggagaaaacgaggccacgagacagggaaaccccaccccagaacacaagcaagagcacgccccaagcccacagaaaaaggaaaggaacaccgcacacaaagaaccagggaaaacgcggcaaaaaaccaaaggaaaaaacagacaaccccaccacagggcccacagacggaaacgaaaaaacagagcaccacaaaggcacaaaacaagaaggcagacgaaggacccaaacaccacaaggcaccagcaaaaaacgacaaaaaaacacaagaagagacccgcaccgcaccagaacaagccggacaagaggcgaaaaggaagaaaaagacggagaaggcaccccggcccccgcacgggccccccccccccccccccccccccccccccccccaaaagccgaagcacaacagagacagaagaaagagacaaaaggagagaaagaaaccacccccacaagaacagaacaaaacacaaacgcccgcacacgaacaacaaccaaaaacccaaggagggaacacaacaaaagaaaacagagccaagcaaaaggagaacggaccaaaacagaaaaaagaccagaagaaaaggagccaaaagacccccaaaggg

SEQ ID NO: 450 - RNA, 380 nt, Homo sapiens
ccccagaacccgccgggagggccccgaacaaggacagagacgccggccccggccggggcacgagcaacagagggccagaaagcgcaggccgagcccagagccaagccccacagggagccggcagccgggggggcgggcgggccaggggcggggggcgggcggcgcgcgggagccaggacaccggaggaacagggccccacaggcggcagaggcaaaccggagcgccccggaaaacgaacgcagggccccgacggggccggccccggcaggagagaagagaaaacagcacggccgaaaacccaggaccagaggccagccgcccacagcccggggagcagaccaggagccccgcagcacgggagccccagacccacccgacc

SEQ ID NO: 451 - RNA, 1449 nt, Homo sapiens
cacacgagagcaagggcaagggccaacacaagaagaagccaaaccagaccagggaaaagagccaaaagcagccacaaccccacgcaccaccaacacacacaaaacaggaaccagaaaagcggccgcgagaaggggagacaaaaaagagagagaaggacagaaaaaaaacacgagagaacacagaacgggaggaaaggagaagcagacgggggacccccgagacggaaccaccgagcccaggcagaagcagggcaggaccggccacgcagcccaccccgggcaaggaccagcccagccccccagagcgggaacaaggggccaccacacccggcaagaagagagacacggaccagggccaggcggcgacccagacccaaggacgccgcccagcccccaaaggcgggaacaagggagccacgcaccagccaacgggagacaaagaaaaaaaacgagggaggacaaacaaaacacagcaacaaagccgagaggaaacaggaagggaccacagacaaaaacagacgaacacagagcgggcaccccaaaccgggcaagggggaaacagagaccaaccaaaaaggaaaaaacaaaagcagcgccaggaagaaaacaacccaccagccagaaaggccaaacaaccccccagggaccagcggccaacaggacacccacgcaaggaggaaggaaacgccccacggggacggcaacccaggccaaagggacagcaagcaaagcaaagcaccaaagacagcaagagacgaagcaacagccagggaggagggccgaacaccaaaggcaaacaaggaaagaacacaaagaaaaaacaagaaaaagcacgaagacaacagcggaagagacaacagagacagaaaaaaaaaaaaacgaaagagacaagacggaagaaaaaagaaaaaaacggagaaaagaaccaaaaagaaccaaaagaacagggcgcaaaagcaaaaaaaagcagcacccgaaaaaaaaaagaagaaaaccagcacacacagaaagagagcaacagggagcagcaaaagagaacaaaaaacaaaaagagaaaccccgacaggcccgggagaaggaaacaccaagacgggaaaccagcgaagccacaccacagagggacacaagaacagacaggcccagggaggacacgagaaggagcaagaagccacaaggggaaagcacaaacccaaaagggaggaaagagccaggaggaacaaaccaacccaccagcccacgcagaaggccaggaaacacacaaaggcaccagaggaggccaccaaccaaagaggccccccgaaagcccacaaaaacacacgaaagacgaaaacaagcccagagagccaagacccacaacccaacaccagacggcgacggcagaaaaggggcccgcaaaggcaagaacacccagaacacagaagagaagagaaggaaaccagaacccggcgg

SEQ ID NO: 452 - RNA, 902 nt, Homo sapiens
accacagccaggcagggcaagggaagagcaggggcaggcccagccccagaccaccacagggggggaccaagaagaagaaggaaaagacaccgaggcacgacgcgaccaagcaccaagagcggacgcgaaaaagggaagcacaccaaaaggagggaaagggacaagagagaggaagccccgcgagaaggagagcaccggaacgaggcggaagagcgggacaaaacccacccagcggccaggagaacgcgcgggggaaagcggcgcccgcagcagccccggcaccgcgacgcgagcacaacaaacagcgagaaaggaaaacgagagaaaaagggacacaccgcgggcaggaaggacagcacagcgagacggaagcgacggaaaaggaccagagaagagcggcgggggaaagcagccaagacagaaagaaaggcaaacgggccaaaaagcagacaaacagggacaggcggaggcccaggaccaagcaccaaccgcagacgcgaccggaagccgaaggaaggaaagcagccgcaggcccagcaggcccccccggcgggaagcgggccagccggagcggaggcgggggggggcccaccccacccgcagcgcagccaccaggagccaggaaggcaggacagccaagccggaaagaggaaggccagagaggaagcacacaggagccccagcggcccacgggccaagaagaaacgcccacgcagcaagcaaacaccagggagagcgccgaaagaccaggagagcccagccgggggagggagaacaaaccacgagaaacccacgggaagggaagcaaggaaaagaccacaagacccgagcaccaaggaaggccaccccaaaaaaaccaaaaaaacagcaagaagcaagcacagaaccaaacccaggccacc

SEQ ID NO: 453 - RNA, 6657 nt, Homo sapiens
ggaccccaggccgggccaggcgggaggccagagaaaacccgcaaccccaaaacccaaggacaaagaaggccaccagaaaaaaagaaaaaacgaagccacacggcggaggaggcagggaaacaaggaaacaaaagcaaagaaaaggcaaagagcccgcagagcaagagcagagaaagccaaaccggagcggacagaaccagcgacagcaaccacacccgagcacgcccggccccccaaccaacgagagaaagccagcccagaacgcgccacgacgaggaagcagcgcgagcggagagcagcagcagggagccaggcaccacagggacaccaggaaaaagcaaaacaacggcaggcacaccagccgaagaagggcaaggccgaaaaaaggagcacagggggcaacaccacaaaggagcaagcagagggaaaggcggcaggaaagccagggagcagagcccgaaacaaaaagagaaaaagagaacagacagacacagagaagcaaacacaagacagaacacacagaggagacaccagcaccggaccagaaggagcaacggaagagacaacaaaaagggagcaacagaaaccagcagaccggagacacaggacaagggcacaaacaaagagaccaggaacgcaaggaacacacaaaaccaaaggacacacagagagagaaaaggagcgaaaacagaaccacggaagaagaaagagagaggcgcccgggcaccccagaccagcaaccaggcagaaacaagcagaaaaccggccccggagaagaagaagcagacaaccaccaaggagaccgaccagcacaacaacagaaaagacccagaggaaacaacaagcagacacaaaacacggggaagaaaaaacaccggagaaaagaaggcgggcgggcacaagagcagcgggaaaaagaacaaaccccaccggcaaggccggaaagcccaacagaacagggggcaaagacaaacacagagcaccccaagacaacagaagacagaaacgcggaaagcgcaaaaaaaaagagacgacagcaccagaagcaggacaaaaaacccaaagaaagaagaacaaaaagaaaaaaaacaaaacccccaaaagaacagaacagaacaaagcaacagaagcggaaagccgaagcagcacgggcacacacagacacacacggcccacacgaacaacaacacacacacacacacacacacacacacccagaagaaacagaaacagaagggagaacaggaaaaggacagagaacgcagagaaaaagaagaccaggcaggacagaggccaacgccgcacagggaggagcaaccaaaacgcacacgcggccccccccgccaagagaaacaggaagaacccacggagaggggccaaaggagaaaagccagaacaccaaagagaaaccaagcaaaaggccaagaccagggaggaaggccaagagcacaaggaagagcaggaaaaagagggagaagagaaaaagcaaggagacaagacaggcacacgggcccgaagaaaaaaggggaaaagaaacaacacagaccgaccaggacccgagacaccccccccccgacccccaccggagcaacaaaggcagaggaacccaggaagaaagggagaagcacaaggagcgagaaaccagcccagcacgaacagagggaacagaagagaagaaaaacagaaaacgcaaaacacaaggacaaacagccccccagcaagaacaacaaaagccagaggaaagacaaaaagacagcagagacagaaacaaaaaccaccaacgaaaaaccacaggcagggaaaaaagccgaggaggcggagcacacacaagaaaaggaggcccccagaccccaagaacagaccacgacagcaacggggacccgggcagccacggcccgaaaccgaaagccaagacaaaaaagaaacaaaagaaaaaagggggggcggaaaaaaaaaaacagcagcaaaaacccagaacagcagcgcaccggcgaaagaagccgagcccagagcgcaggccgaaaagcgggggacagcaacgaagaaaagacaaaaaaacaccaaacaacagcgagaaagaacgacagccaaaaccaccacacaacaagacagcacagcacccacaaagccggcccgaggacccccccgacaccggccccagcaaccacgacaccgcacaaggcccaaaacaaaaagagaccaaagggacaagagacccacagcaacaagcgagacacaagcgcaaaaaccggcgagagaaccaagaggaaagccaaacagacaccagcaaggagaggagcgccagaggaaaaaaaagcccaggaacgcaacaagcggggacaagaaaccgggagcagaacgcgggacaggaagaaaagcaagaagccaagccaaacagcacacagaagggagaagccaggcacaccaccaaacagagagacaaacggccacagagcagaggaacaccagaaagcaagcacagaaaaaaacccagggaccaaacaccacagccagcagccccaagaggagaacggggggcgcccggaggcgaggaaaggcccagccagccagcccacaaaggacagaccaccacggcgaagccaggaaagaccacacaccagcacacgagggcggaggacggccaggaaaggcgcaaacacaacaaaggaagaacaccagggaaacccaaaagggagcgggcaaagaacggagacgaggaaagccacacgcccacaaggaacaaagcccaacaacaggcaaaggcacccacagcccaccagcacggcgacaacgacaccacgacagcaggagaggaccacgaggagcaccaagagaggagcgagcaggggcgcaaaagcgagaaggcgcggccgcccccgagggggaaaaaagaacgaaacggaaggaccgcagacaggagagcaaaaaccccacgagagccggccgaaacacgcggcagaagccagaaagacccaaaggaccaccaaagggaaagacacgaaggaagagcaaaacagaacggccagcacaggaagcagaggagaccacaagagacaggcgccggggccagggggggaacaaaaaaaaagcgagaaagaaagagaggggagcgagggaaaagagagagacaggaacccaaaggcgaaaaaacgaaaagaaaaccaaaccccgcagccagccagaggaggccaggccaggaggccaccccccaaacccaccccccaaggaaagcaccaggacacagcgagcgaccagagagcccacagcggcgcgcacgcacaagagccagcgacccagccagagaccagccagccccaccagcggcagaacaagcaaaagcaccccacgccgaaggggaaagagcaggcggaaagggaggcgcccagcaaaggaacaaagacaggaccccagaagagaagccgagaagagggaacccaaaggagcgaaggagacaggaaaaaaaaagacaggaccagaaacaaaacgacaaccagacgacagcggggaggaaagagccacgagaagaagacgacgcaggggaggagaagagagcagcgagcaaggagacacccaaagccgaccggggccgggagggagggacccaaacagaaagcagccacccagggcagaaccaccagagccggcccccggcgggcggccacggaggacacagaggcgcgccgcgccggaagcggcgggagccgcaggaagaaagggcaagaggccgggccacaaggggaccaggggagccagcaccgcacagagaaaagcgccggccaggcaccagcccgagagccacaaaaagggcagaaggggaaccagggagagaagcagaaaggggacacacaagggaaacaaagcacaggacaaaaacccaagaagaacacaggggggcaggggggaaaaaggagacagacacccaaaccaaaacagaagcacacagaagaccgcgcggacacacacagggagacacaggccaacccagcgccaggaggaaaacaaggaaagaaacaaacagagaacaccaaacagcaagccacccagggcgagggggcacaggagcaacagagaacaaggcaggcagagaaaaagacacagaaacaaaaacaagaaaggagggaaacaaaaagacaaccaaaaaaaagacgggagggaaaagcacaaacagaaacaccagaaacccaaaaacccccacccccacgagaaagacgccacccacacaaagggccaggggaaacgacccagcccagccgagaaaaacgaagcaagccaaccgggaaccaaccccccggcaaaggaaggagcagcaacgagccaaaagaggaagggaaagccagggaaagaccgccaccagcaaacgggagaaggacccaggcagcccagcacggaggagcgggacgcgcaggcacgacacagccgagacaaaagcgaacacgggagaagcaggagaagacaagaacaagagggaagacacaaggcacacccagggagggagaaaaaagcaaaggccaacacaagggaaaaaaaggaaaagagaaggacaggagacaaagagaaaaaagggaggggggggagggggggaaaagccaggcagaaaaaaaacagaaaaaaggcacagggagaaagaaaaagacacagacaaaagaaaagcacaacgaaagggaaagaccagggagagaaagaagaaaaaaaggaaaagaacagaacagagagaaaaaagcaaagaaaaaaaggccacacacagaagggaagagaagaaaaaggagcaaaccacacagcccaggggaaagaccaaaccagaccaaagaaaaggaaaccggaaaccaagaccggcacagaagaaaacagcaacaaaagaaaaaggaaaaagggggacaagaaagagaaaggcaaacccacaaacacaaaacacaggccaagccaacaagggcaaacaaagaaaaaaccagggagcgagaagagaagcaggcaaggaagggaccaacaggcagagaggagacaggaaagaacggaacaccaaggcaaggaaaaggaaggagaacgaagagaacgacacagcgaccggagagaacaaaggcgaaacaaacgaagaagaaaacaagagaagagaggaaaaaaaaaaagaagcaaagggaaaaaaacagaaaaaaaggaaagaacaagaaaagacagccaacggcggaaacaaacgcaaaacagacaacaagaaaaagaaaaaccaacagacccgaagcacgccaaaaaaaaaagcagaacaaaaggagagccacgagacaaacaaaaaagaaaacaaaaacgaggaagaaacaagggccgggggagagggagacacaagaggacgaggagacggggggaaaaaggcaagaacaagcaccgaagggaaacaagcaaaacagaacacgcagcgacaaaaaaccagggaaaaaaagcacagagacaaaaaaaaacaaaaagaagagacaggaaacaaacaaacggacggaagaacagaaaacagaaaagcgcaaagagccccaaagcaaaggcaagcacaggagaagccaaacgaagacagcaaacgagcggaccgacacgaaaggggccgggccagcagccgaccagcaagccagcagaacggaggacaggaagaaaccgagaaaccagaacagacaaaggaagaaacaagagcacaaacagccgagccagaaaaacaagacccaagaaggaaagacaggacacgggcacccacgcgaaggggccgaagggccggcgcacaaaagaagggacacaagagaaaagcgcacaggagcccaacaggacagcgaggcaaccaaagggacaagaaggaaaaaggagcaaaaaggggcagggcgaagggaccaccaggaaaggagcaacccaacaaggcggaacaggagaacaagcccagaggcccaaagggagaggaaggagcggacagaacccagaagagagaaaggcacaagaaaaaaagcgacagagaacaagaagaaaaaagcaaaccaacagagcaaacaccccaaagcaaacacaacagagaaaaaagaaacacccaaaagaacaagagaaacagcgcaggccacgccaacagacggaagaaagccaagggaagacagagaaaaagcagaaaaaaggaaagggcaggaaaaagcacacaaaaggagaagaaaacccagagaaaaaaaaccacaaacaacaaaacagccacaaaaaacaaagaacaaaaaaaaagaacaacagagaagaggaaaaaaaaacccccacacaaagcgcaaaaaaggaaaacacaggcaaacaggaaaagaagaccaagaaaaccaaaaacaccaaaagacaagaccaaaacagaaaagcaacaaaaaagaagaacaaaaagagaaaacccaacaaaaaaacaccgaaaaaaaaagccacagcgcgaggaggggcagaaggagggagcgaaaaagagaccaaggcaagggaaaaaaaacaaccaggaaaccaaaaaagagacgagaaaaaaacaaccgaaaacaaaagaaagccaaaaaaagaggacaggacggaaaacgaaacagaacaaaaaaaacggccaaaaaagaaggaaagccaaaagacagaaagcaaagcaaaaaagaaaagggacaccaaaacaaggagaaaaaagggcccaaacag

SEQ ID NO: 454 - RNA, 3664 nt, Homo sapiens
gcgaccccaccggacacaaccagaaaccacccgcccggcaaagagcacccggcacgcccaggcaagaacagccccaggcacccagcaaggcaggcacaaagacccaaaccccagcggcaccacgagagcgaaaggaccaaggacaaagacaaccagccagcccccagcacggaagagccagggagaccccagcagcaccgagaacccggccacaggcaggaggaagagaacaacaaggaccccagaccaggaggccaaaaccagccggagcaccaaaaaagcaaacagagcacaagggcagaggacagcaaaggaagcgcacaccccacagccccggccggggcaggaaggacccgaagaaagaggggaggcagaggaggaaccagaagcccacaggcggccaagccacacggagagacaacaaaggcaagacaggccagacaggggacaccaaaaccaccgagaaacaccagcccaagcagccaacgcccgcggcgcaaggaagccacgagcaaaggagccacacggggagaagagaacccaaagaacagcgcaggcagaaggaccgaggccagaggaggaagaggggcaaagaggacgagggacaaaaacggggcggagaagagaaaccaggcaagcagcaaacgccaaaaggacggcaagcagacagagaacagacgccggaccaagaagcaagcacaccacgaaaggagcaacggagacaacccaggccacacaaggcacagacccaaaagaaccgcggcaggggaaaaacgggaaccagaaaaccaaaggccccaggcgccagcaccacagggacacacaaaaagagggagcccacacagacccaaaggacaaccacacaaaaaacacaaaggaagaacaaaacagggagaagacagaccagagagaagaagacacacgcaaaccccaaagagagaacgaccagcaagggcgaagagaagggcaaagaaaagcagcagcaagaccaaggcacagccaagcggcggcggaaagggcggagcagaccaggggccaaccgaagacgcaaacggggcaagagaaaagcaagcaaggccaaggcagcaaccccccaggaagcaccggcaagcggaggcaggccacacccagaggggggggggaggaggcagagaaggacgcaagcacaaaaaaagcgagaacacaagaagcacagaaaagcccccacaacaaagaaaagcaaaagcaacaggccaaaggaaaaaccgaaacccacaccggaacccgagggaagcaacggcccgcccccacaaccagaacccacgacgaaaaaaaacgaaaaaagcaggaaagaaaggaaaacacaaagacaaaagcagaaaaagagacaaagagagagaaaggaagaaaagagaagagagggaaagagaaaaaagcaaaggaaaaaaacggggaaaggaacaaaagaacaaaccacgagagcaccaaagaaaacgggaaggaaacaacaacaggagaacaggaacacaaagacacagagcggagaacaacccgggaccagccaaaaaaagcagagccccacaacaccaccaccaagaacaaggcaccaaaaaggcaacccccccagaaaagcaaggcagcccgaggaacggaccagacgcacacacgaaccccaaaccaaacacaaaacaacaaccccaacaaagaaccaaaaaaacaaggacaggaacagagaagagacccacaaaacagcaggaggaacaggcacacacgacacaacaaaaaggaggaacaaacagaagaagaacagagaaagacagacaagaccaaggagaacaacccacagaaaaagaagaggaaaacaaaacagacaggcaaacaaccagccaacaacacacacaaaacaaaagaaaaagaaacaaaaaccaagaaaagagcgccccgaggaaaccagaaaggaagaagggagaaggcagggaaaccgcccccacaaaccaacacccaagaccgagaagacacaggccgggaggaagcagaggggaagaagggggagggaggggccgagacgaaggacagcacaagggagaaacaaccgggaaccaaaacaccgaaaacaaaaacaaacaaaaaaaaaaagcgaggggggagaaaggaaggggagagaagaaagaggggggcacgcccaacaacccaaacaacgagaacacacccccaaccgggccacacaagagaaacaaaagacacccacaaagagacagacaaaaaccccccaaaggcaaagcagcacaaacgagagacccaagaccgccaggagcaaaaaaacagcaagccaagcacaccgcaaaaggaaaggaagaagggaacagcacccaaggaggagaacgaagaaaacccagcacaaaacccagcacagaagacaacgggaccaaagaaggaagcaacagacagcacccagaagccgggagaaaaacaaacgagcacacgaggagacaagcaaaaaacaaagaggaacacaagggaaaaaaaagggcaaagaccaggaaagcacccaacgcgggcaacgcccacccaaaagagacggcaaacgacagaaacccaacaagccacacggggcgcgcccaaaacgaaaaagcggcccagaacaggggcccaggacagggcccacagccaaacaaccagcagcaggccaaagccagcaaccccagagccaaaaagcaaacagggaaacacacagaacacagggacagacaagaaaaagcacaaacagacagaagcagggaggggggaggaaacagacaacagaccaaaccaggcaaaaccccagggaacgaaaccaaaagcacgaagaggaccagcgaccagaagaaaggcgcacaacacagccagagaaaagggacagaagccagaggaaacaaacaggaacaacacgacaaaaacccacccgaaaaagaagaaagagcacagaaacaaggcgcgagaccagcgaaaaagccacagcaaaaaaacccagagcggagaaaggacaccccgaaaacaagccccacagggaagggaaaaaaaaaacccacagccaggccggcgagagggaaaaacaagacggggagggcagccaagaacccagaagagcacgagccacccaaagaggcagagggcagacgcgcccgaaaaaggaacagaaaaagacgagaacaaaaagacgcggccagcccccggggccaggcacacccccagagagccgccgcaccagccaggccacacccccagccagcagacgccccaagcagcacgcagccccccccgcaagggaaaaaacgaaaagcccaccccaaggcccgacaaacaaacaaaagggaaggccggaaaaaaaagacaaaaccccacaaagaaccaacagagggggagcgccaccccagccaacaaaaacagagaacggccaggccgcagggcaagggagcacggaagagacaccaagaggacaaggaaggaaggaaggaggcacacagacccaccccaagagaaacacgccacgaacgccccgagacggccgccacccacccaaccaaaagaaaccccacacaccacaaagaggagagaaagcaacaggaaagggaaggaaagaaagggaaagaaaggggaaacagagccggaggacagaggcacaaaaggaggcaacacgcagaagaag

SEQ ID NO: 455 - RNA, 662 nt, Homo sapiens
cccgcacaaagcaacagcgccgcccggggcacggccccccgggcccccgcccaggaggccccccgcgcccacaggcggcccaccacaccacacagaaccccgaccaaaagagcaccagcccacccccacaccgagcccgacagagaagcagacgcacaaaaggggggcacccccacagaaggaaaacggagaacaggaccgccaccccggcaccacgcaccagccgggacaagaagggccaaaaaacaggaagagcaccagaggaagcacggaacaaacgcaagacagcacaacgaggaaggcacacaaccccccggcagggagagagggggcagggggagaagaggcagacaagacacgcggagccagaaacgagccgagcaggacagcccaaaaaagagaagggcagaacgacccaacaagaagcaagcaacagggccgagacacaaagggcccggcacccaagggcagcggccaagccaacccagaaaccggaaaaacgacggacaacgggagcgcaaaaccccaacgaagcaagcgaccaaacacaagaaggaagcccagaaaaacaaacacaaagaaaacccaaaaccaaaaccacaacccacaccaccaaaaaggcacgagcaaagagaaaaaaggaaaggccaaaaaccggagaa

SEQ ID NO: 456 - RNA, 1666 nt, Homo sapiens
acccaaagaaccaggaagccacccacgagccccggaaagaccggagaggaagagaaagccgagaccgccaagacggcgcaggggagaacacaggagcgcagaaggacagccacaccgaccacacaggagggggccaaaagaaaaaaaccaacgcggccacggcaaagaccgaccaagaagaagcacaaggaggaagaacagcaagcgccaggaagggaggggaagggaaaagcggaagggggcccccaagggggggagagcacgccaccggcggaaggcggagaagcccagagcagcgcaagggagggccaacaaacggggggaaggaggaggaagcagaacacaaaaaaagaccaaaaggcaaagaagcaccacaaaaagaaaaggaaaaccaagaacaaaaacagagccccacaaaaggcccacaacggacaccaggacaggagacaacagaccagggggcccagcgaagcagaagggaggaggaaaaggggcgcccgacacagaagccaaacaacaacgccaaggaaaaaagaagacagaagcagcaagcagcaagcaacacaaggagacaggagaccaccgaacgccccgccggccaggcagaaaagaaaagaggggaggacaggaagaagggacggggaaggaaagaggagaggaaagcgggcagcacaaaccccagcccccagggcccagcgcaaaccagggggagggagaaacacaggggaaacaggcagacacagcaagcaacacacaaacccagcagccaaggcccaaccaaagccaggacacaagggagagagcagcaaaaagggcaaaacgcaccgcaagccaagaacgaacaggcaaccccgaggaagcaaaccaccagcacaagaaggaaaagcaaggaagagagagaaagggcagacacccaaggcaaccgggccaggaaagaggcgcgagagaaagcgcaggaggggaaggggggcggcgcaccaggaccacaccgcaacgacgagcgggggcccgcgcaggagcaccaacggcaaaaggacaccaacaccgccggccaagcgcaagaaggggccaagagaaagaacaagaccacacaacgaggccaacggagaccaaagcagaacaggcagaaaggacacccaggaaaccagccaagaacacgaagagagaggacacacagccaaaacaaaaaaaaaacaggacaagaggaaacgagacagaaacagggaaacaggcgagcagagccaggcggaaccacgagcagcagccacccgacgaaacacagccaaaaacaaaaggaaacggggagaaaccaagcccacaacaacaggaagagaagacgcacaaacaaacaacccaagacagccacagaaggccaaaaaagagagagagagaaccaggccagagaggaaggacccagaaaaaggaaaaaaaccaggagaaggcagaaaggaaacaggaaaggaaacggaagacaccagggaagaaacaggcaccaggcccaaaagaaaagaggagaacccgaaacagaacagaaaaaaaccccagcgcaaggcaagccggaccgacgaaggccaacacacacagcagaaaaagcaagaccaggaaaaggcagcaccacgccagaaacacccccagcgaagaaccaaaagcaagcaaaagaaaaaaa

SEQ ID NO: 457 - RNA, 5048 nt, Homo sapiens
accgagaagaaacggcggaaaaaagacacccaacaaaaaaaaaaggcagccacccagcgaaggacaggaaacgaacaagaaaaaagaagagaaaagaaaaaccaacagaaacaagggacaaaaagcaaggacacgaaaccaccagggagggaaaaagaccaaaacagcggggccgaaagaaagaccaaaccgaaaagccaaggaaaagaaaaggcaaacagaaagaagaggcaggacagcaagaggaagcgaaaaacagcggaaaagcaaaagccaaggagaccaaacaagaacaaaaaaagagaaaccggcaaacacagcagccagaagacaaaaaagcaaacaacaggccgaagaaaggggaagaagaagcaaaaacacagaagacccaaagggagaacgagaaaaagacagagaaggaaaaggagaccagaccacaggacccccccgccaaggaaagggcaacccacgggccgaagcacaaggcaaaacaggacagaccaacaggacaaaaaacaagagccaagcacagggccagccaaacccagcacgacaggccgaggcgggggacacgagcccagcagcaagacagccgggcagcagggaaacccgcacacaaaaaaacaaaaaggagcagggggacagccgagcccagcaccgggaggcgggggggaggacacgagcccgaaggcggaggcaggaacgaaggccacgcacccagccgggcaacagaggagaccgccaaaaaacacaacccaccgagcaaaggaaacaacgccacccaaaacccacacgacacaaacaccaaacagcacgaaaagacacacgccccggcccacccccccaccgacaaagggcagccacaagaccaagagaagagaacccaacgacgcaccagcaaaaagcagcaacacaagaaaagccgaaacgcccaccaccggaagacagacccaccgggacagcgacccaccgccccccggccacgacaaaagaaacgacagcccacacaaaccaagacgcccaaacccagccagacggcaagaagcacaagaagccaaagcccgaccacaccagcacacccaacacccaacacagacacaaaaaccgccccaggccaccagacagggcaacccccagccggcaaagcccgcggaagcaaagaagcccgaggcacaccaagaacacgcacaaaggaaccggcagccccaacccgaggcagaaaccccgggcgaacaggaaaaccaaaaagaacaaacacggaacaccaaaggcaaaaaacaagaggaggagcaggcgagaagaaggacagaacagggagacgcgcgaagagcccgacagaaggacagcaaaccacaaaaggaaggaaggaaaaacaccaaacagggcagacagggaagcaggacaaaaccccaggagaacacaaaaaaagcaggcccaaaaagggcgaagaagagaagggaagaagcaaccacccgagagggagaacaccaggcagagcggcaagacagggagaaggggagagggagagaagaagaagccagcaaaggaaaaaggaaagaacgggacagaagggcagaaccacggcccgggaagacagaagagcacaacgacaaggagaggggaaagaggaaaaaacacaagaaaaaaaaaagcaagccaccagaccccaccgaacgggacagacgcaacccaccacaaccagaacgccccccccccgagacagggaccggaccaggcggaggcaggggcgacaagccacgacccaaacccgagccaagggcccgcccagccccaagaacagcaaaaggcagcacaccacccggcaagaaaaagagagaaggccgcaggcccaggcggcgaagccggccaaggaccccgccgcagcccccaaaagcgggaaaagggagcggcgggcaggggccaggcgaacccagcacgggaaaccaaggcagggggacagaaggcaggagcgagaccagccggccaaagggaaacccaccaacaaaacaaaaaagcggagggggcaggacgagcccagcaccgggaggcgaggcaggagaacccgaaccaggaggcggaggcgcaggaaccaagacggccacgcacccagccggggacagagggagacccgcaaaaaaaaaaaaaaaaaaaagcagagccgggcccaccccaaaacgccaccaaaaaaccaagcccgcagaacccagcccaacacacaacacagagcagacaccggacccccccccacaacacgacgacggacacaccgagaccccgccccacaccccacagccgggggcccacccgaccaaaaagcagaggccagccagaccaccaccgcaacgagaacaccaagcgggcaaagcagaagaacgcagggaaccccaaagaaggccacagcccccaaacccaggcggcccgcaccaacccgaccaacaagaccaaacgaacccaaccccccaaccccccccagcccagcaaaaggcaaccaccggcaaaccaaaaccccaaacaccggaccaacccacacacaaaaggagccaaccagaacagaacgacacggagaggaaccgccggccaggggaggcagggcacgaccagccacgcaacccgcccccaggcaagcgacgcccagcccccaagagcgggaacagggccgccaccagcccggcaagaagagagacgggcgccaggaccaggcggcccgaagccgacccaaggaccacccaccggcccccaaaggcgggaacaggcggacccaccacaccggccaaacgacacccacggaccacccagagaggagcagccgcacccaggcggaggcaggggcgacccaccacgcaagcccaccccgggcagccaccgcccagccccccagagcggaacaaggcgcccgccaccagccggcaagaagagagacggggcaccagaagccaggaggccgacccgacccggacgcccacccagcccccaaaggcgggaacaggcggagcaccacgcccggccgaccacccaacagacaccgcaaaccaccacaccccaaaagcagggacagacgcaacggcagggacaagaaaggcagggggcccacccaaaccacaacaagagacccaagcaccccccccccccccaccccacaacaggcccgggggagccccacccggccaaaaccagcagcccaccagaggagaacagcggaggcgccgcaaaggccaaaggaaagccaccacaccgcggaaacgcagcggcgaacgccggcagcccgccccgagccaggagagaaaagaaagcaagaaagaagaaaggaaaaaaaaggcacccaaggcagagcagccccgccaacagcaagaacacaggaaacaggcgaaacggagcagaaggacacccaaaaaaccaaggccccacagaaaaacggcacaaggccaagagccacacaacgccacccccaaacaaacgaccaacccagcacgaccccgaccccccagaagacggcacgccgggacagcaaaaccgccaagaaccgcacgacaacggaagcccccaggacgcgaacggccggcgacaaaaacccaaaggccccggccaccaaaagccccccccagcaccgcacccccgcaaagcagcacaccaccaccccaagcagcagccaagaagaggggaacggccgcgcgaaggcccaggcaaagagcagcacaaaagacagaaacaaaacaggaggaaaacaaggcaggggacagggacgagaaggaaacagcacgggggggacagaacacacccaggaaagccggacccagagacgccccccccccacccccacccaagagacccgaggcggccccggcagagcaacaagcccacaaggagaacagcagaggcgccggaggcaaggaaaggccccagcccaaccaggccacaaaagacagaccacaggcgcaagaccagggaagaccacacaacggagagggcacagggacggcgcaggaaaggcgcaggaacacgggcaggcaggagaagaaaccgggaaacccagaacagcaggcaaaggaggagccgaggaagcaacgccacaaaggaaacaacacaccccaccaggggagagaccccccacaacccgccagcacgacgacaaaaagccacgacggggagaggaccaggcgagcaccaagacagggagagcaaacgcaggcacagaaccgaaaaggccagccgcccacaaaggggggccgaaagaagccacagagcggaaagacgcagagaaggcaaaaccacacaaaggacgacagaagcgcggcagaaaccaagaaagacccagcaacgcggcgagcggacgcagaaacgccgccagccaggaggagccagggccagggaaggagacaaagcaaccacgaggaaaagggaaggaagggccagccagccggaggcagccagaccagggaaacacaagacacgggagccagagagagaagcggcgccagcggggggaggaaaagggaaaaaacgaaaacgcaaaaaaaaacaacaagccagacaacgagaagaaaacagaggcccagaccgaaagcagagacaaagcgaacagccgagacggggagaaagaaccaacaccgacacagaaggaaggagaaaaaggcgaacagggcaaacagcaaagaaaaaaagaagggcaacgaaagagaggagagaggacggacggaaaggacaagagaaaaggaaaagaccaaggaggaagagcacaggcaaacaaaagaaaagccaacgagcaacagggagacacagagcagcaaaacaaaccgaaaagacagcaacagaaaagaaacacaaaaacagcaaaacacacacaaaagaaaaaacccaacgcagaccaaaagccggacaccagagcaaaagagagagaacaagcagaaaaagaagaagaagaagaggaggaaccaacgcacaaccagaaaaacggccggagcacagggcgccaaaagaaccggagaggacggggcaccaagacacacaagaaaaaaccggaaaagcgaaaggcagaagagacaagcaaaaaa

SEQ ID NO: 458 - RNA, 1167 nt, Homo sapiens
accaaaaccagaagaggaaaaagcccaaaaacgcagcccacagcacacgaaaaacccaaacaaaggacagggaggaaaacaaaggaaaagacacaacaacgcaacacgcaaaccccaaagcaccaccacgaccccaccaccacagcagcaaggcaagccaaaaacgaaacagaaaaaaggagcaaccaagaaaagcccaacaccaaacaccccaacaagacacggaaccaacaaaaagaggcaaaggccacgaacgccgacaacaccagggaggcaaggcggaaacacaccacaccaagacaggaagcgggcacggacacaacggaccccgcaaagcaaagcaagagcacacgcgacggagccccaggacccccacccccacccaaggacaggagaggcgacccaagggcggcacgccgaaaacgcagcccacggccggaaggcaacggcgcgcagggccgggacggggcgcggccgaggcacccgcgcggccccacccgggacccaggcccgcgcggccgacccagaagggccaccgccccacagcgggcgggcaccgccccccacggccccgccgacgcgacgcggggccccaagggccaggcccgcacgccccaccccgcggcgccgcccccaagcggccccgagggccgcgcccagcccgccggacagcccgcaccgcaccccagccgccagggaaccccagaacccgcccccggcccccgaaagcccagggcgccgccaggaagaaaccgacaagagcgccgacggccaaggccgagggaggggcggggccacgcggggagacccccaggccgcccggaagcgcccgcgccagcacccgagcgcccgcgggcccccacccccgggccgggcccggcccgaggaaaacccacggcggggcaggaaggaacgaggagagccacgcccgcccgcccgccccccaccccccacccacgggaccccagggaagccgccggagcaaaaagcaacccgcgcagcgcgcgccacggcgcgcggcccggcgggggcggggagcaaggggcgcggccggggagcaccggccccgccccaccgccaagaacgcgcgacgcagccgcccccgaaggggacgaagcgcgccacggggaggccgaggcagcgaagaagcgagcgagccaaagggac

SEQ ID NO: 459 - RNA, 395 nt, Homo sapiens
ccccccggagaaggccgcaggcaaaagccagcacacagaagggggggggaaggaccgcagaaggaaccgcgagaagccgccccagaggggaagccaagagccccaaaggacagaagggccgaaggggaagagacgagggcaccagacacgccaaaaaaaaaaaaaaacagaccccaccgggcagaaaccggggacaaggagagaaaaaccggggagacaggaaccgcggagaaacgacgcaagcagagccagaaagggcagggagggcccacccacaacggacaaaacaagcgccccagggccaggcagacggcaaaacagagggggccgagaaccaaaaaacaccgaagcagggcagggcaaaaaaaagaaggcagagaagaaaagggaaacag

SEQ ID NO: 460 - RNA, 37 nt, Homo sapiens
caaggcggagagcgggagccagacgcagcccccaccc

SEQ ID NO: 461 - RNA, 10567 nt, Homo sapiens
agagcaaaaaagacacgacggagccaagaaaccaaaccaggaaacccgaagggacgaaggaaggacaccaaggcaggcccagcaccgccccggaaaaaggcagcgccggcaggcagccagaaaccaagaagcaaaagaaaagacgggagagaagaggaagaagaagaagaagaagaaaagaaaaagaggaggccaccagggcgacacaaacaccggccggaggcccagggggggcccaaaaaaaaagcgcagaaaaccagaagcaaaccagaaaaccagccagccaaaaaagcgcgggcaggcaaccgagaagaccagaacccgccgacacagagcaagagcaggaagaaaaacaaaagccaagagaaagaaagagggcggacagagagccaaaccggagaaagcaaaacacacacacacaaaacaaaaaaaaccggaaaaggcagaaagacccaggcccagaaaaaccaaaaacgaaaaaaacccgggcccgcgacaagcagagcaaagaaaggaacagaggaaaaggaacggagaaaagggagaacgaaaacaaaaagcgggacgcgggagagaagaaaacccaaaccaggacaaaaagcccccgacagcacaagcccaggggaccaaaaaagacaggagcaaagaccagggcaaaaaagggaaggcgcaacccaaaaagcaaaccaggcaggagcaacaccaacgaacgaaaagagcagcccaagcaccaaaaaaggcagggaacaaaacccaagcagcacgcaaggacagagccaggagcaagaaaaacaaggacagaacccaaaaagcggaggaagaagaagcagccccggcacgcccaggaggaccagaaggcagcagccggccgccccagacggcgagaaaagggcgggccaggaggggccacgcgccaagcccagaccaggagggaggcaggagaagcgaaccaggaggcggaggcgcaggagccgggacagcgccacgcacccagccgggcgacggagcgagaccgagaccagccaaaaaaaaaagaaaaagaaaagaaaagaaaagaaaagaaaagggcgggaaccagcgcccccggggaagaccgcaacgaaaaggaacacgaaaggcgaacaacagaccagggccacaaacagaggcacgaagaaagaaaccgcaccagaagcagaaaagagcaacaaacgagaaggggaccgaaaccagcacagagggcccagcaccgagcagcccaggacccccaggagaaaggaacagccgcacacccagccacaccaccaagggacccggaggcggggaaaggacgacaagaccaaaaaggcaacagcaacaggaaacccagaacaaacccccaaggagaacccaagccggaaaagcccccaaccgacaccaaccaccacaggcgagggaaccaaccccaagagaaaggaccagacagcgggcaaacacccaaaaccacaaaacccaaaaaaaaaaaaaagaggcaaaacaaaaaaaaagaggcagaagaaaccaacaagggaggaagcgaggcccagagaaggggaacaccccaagcaacgcagcagggcaaagcagacaaagcagagagcagaccacaaagcgagaacagccacaacaaacccccaacacgaaacaagagaagaaagaaggaccgacagaaaagcaggcaaagaggggagaaagcagagagcacccagcaccacacacgcaggggccaccaccgaagaccccgggacaccacaggacgcgagccaagagcacgggccacagacaccccaggacacaaccggcagacaagaccagggaggaagcgcccagcccccaaccaaaaagcacacaccaagacccgaaggccgaaagaaaaggcgaaaaagcaccgccagccacaaaaagcgggcaaaaggagcaaaagagagcgcacaggaagggaaaggcaaggggaaacaagaggggccgagaaagcagcaaaaaaacccaccccaaagagcacaccgaagcacagggcaaaggggcaaagcagagaggcccgcagggacaggggcgcaccagaagggccggacggaaggcaagcacaggcggcagagcggcagaggacaccgccaagcaggacaaacacccccgaccaagaacccaccacaaggacagacacggccaaacgcccaaacccgccgcaaaagggcagcaaacacggggagaaacacacgcaacgcaaacacaagcccaaggacaagagccccagagaggacagggacaggacaaaacaacaaagggccaacacaaaagcaaacagcagcacaaaaaaaggggccgggagaaaacgaagacaccaaaagcaaaaggcagagggcgagccgggagggcccgccccccgccgccgcaggccagccggagggaacaggagaaaggcggaaagaagccggccagaagagacacagccaagacccggcagccgaaaccagcgaccagcaaacagaggggacgaagaaaaggaggagaggcggagggggcaacggagaaaaaaaaaaaaagccagacaaaaaggagaacaaaaaagaaccacgcgaagagaaccagccacggcagcaaggaagagacacagaaaagcaaccagagggggcgaacccgacaaaggcagacccaaaaaccggcacacacagagagaggccaccacagcccccaagaccaggcgaggaacagccaccacccaaaccagcccccagagggaaagaaagcccgagggccaaagagcaacaaagacggccggaaggagcaccacgccaagacaggccagaaagcacaggccccagcaaccacaagagggccaggcggacgccacaccaaagacaccacagccaccaggcacaccaagcagcaaagggagcaaacgcacggcagacaacacaaaagcaggggccacaggccggcccagccagcaagagaacaggggcccgaggaggggagaggcccgagaaggggcccacagccagaaccagcggcagaaccccacacccgaagaggcagaacccagcagccacaaaagacccgcacgggagcccccagaggggaaaagaaaacaagaaccggaccccggcccagggcccgcccggaggagaaaaacagaccccggagcaggggcgagggaacacgacaggccaaccagaaccgcaagaggcggaagcgcagacgaaacgcaaagaaacacccccagaggagcaagaagcagcagcaaggaccaaaaaaacacgaaaaaaggacgagcaacagcacaccaacgcagccccaaagcaaagcaaagggaggggaggaggagggggggcgccagaggggacaaaaagaaaaagaagaccgacgggaaaccgccccgaaaaaacgaacaagcgccaaccaaacagacgagccaaaaacagggcagccgcagccaagcagcaccgaacgaagagccccagcaaaaaggggcagaagagaagccccagcgcaccagaaaacacaccccaagaaggacaggcgggcaggagcgcaaggggcggagggccaggcccagaccgggaaacggacaacaaagcaaagaaacacaggggcgaagcgaagccgagagaaacccagagaggggaaaggcaggaggaaagagcacgagaaaccagacaaagccgaaaaagaaccacgccgcgggaggcaggcaggaacaggcaaggggcacaacagaagacaaacaacaaagggagcggaaagaggggaaacacacaaacccccagcgcccagcaaaacaaaggcggcacacacagggggcagagaacgcccaaaggaagggaggaagggcagggaaggcaggaaagcaaaccagcccagacgcagagcacaaaagaaaacccaacgcggccaccaggggagacacacaagcagcaaaaaaccaagccccgcacccacaccgccccaccgaaggggccaaggaaagagccgaaggccacaggaccagacccaagggagccccccgccgaaccgcgaacccgcccaaaggggcaccagggaccaagccagaaggccaaggacagaccggaccgagccccaggcgaaaagcacacagagggaccacgacccccagaggcacaccaacagcagaggcagccaaggaacaagagcaaaaaccagaaagaaaccaccggccggggcagagccccaccgaaacccagcacgggaggcaaggcaggcagaccacaggcgggagcaagaccagcgggcagcaggcgaaacccgccacgaaaaacaaaaaaaccggcagggggcagcgaaccagcaccaagaggcgaggaggaacacgaaccgagaacagaagcaggagcgagacgcaccacgcacccagccggggacagagcgagacccgcccaaaaaaaaaaaaaaaagaagaagaagaagaagaaaagaagaacagagaaagaaagaaagaaagagcccccggccagcccaaagcagccagccaaaaccccaagggggccaagcccccccaaggcaggaaagagaaaaagggagaggggggcgcagcaaaggcagggaaacaggaagcaaaggcaagggaaaagagagacggaggaaagcgcaaccaaagcaccacaacacggggggcggcaggccccaacccaagagaagcaccgcaacgccagacgaggagcgaggacgagagccgaagggagaaaacccagcagacacagagcccagccccagaggcccggggcagcggggggagaaggaacgggaaggagaaaagggacaccggaggaaacccaagggccccggagccaaaaaaggagagaaaagagcacggcagccgggggagcagccagcgccagcaggcgcccagaagaaggacacagagccacagccaaaacccaccgaagccaggggaaggggcacacacagaaaaacagccggcccgggggacaacccgcggccagacccggggaggcagggccgcaggcgccgagaaagcaaaggacaccagagcaaggaggaacccagaaaaaagaaagggcaggagggacagaagaaccgcagagcacccgcaagaaacccgagacagcagaagcaagaaagggggggagcaagaacgcacaacagccccaaaggaccacgcagggggccacaagccacaggagacggcaggcagaggacggacacgggcaccggacaaggaagcaaccaacaaaggaaacccaggagaagcaggcgagggcaaagggcagcacgggcagaaagggcgagcgggggccaggggccagccgcgaacccaggcccacaccccaggcacgaggcaagaccaaagggaacagaaaaaggcgggggacagggagaagcgggagccggccaagggaggaccggcccccggcgagagggcccgcacacagacacaaccacaggagcaggcaacggcaggacgggcagccagcgcacccggcagagcccggccacgaagaaacggaaagaagacaaaggaccgacaaggaccggcccgcccagggccacccacgcagaagccgcaccgagcagaccaagcgaaacggagcgagaaagaaacccagacacaggggacaagaaacgaaaacagaagaccagaaaagacaagagcggagagcaacccaggaagcccccacaaaaaaagaaagcaggcccagcgggccaagagaaagcagaccgacaccaggacaggaaggccccccaaaagggaaaacaagcgcaaggacaaagagaacaagacccagaaggaaacaggcgaagacgggggaaaacccaaagagaacagcggccaacagaacgaacaaccaacaagaaggaacgggcgagcacggcaggcacaagggaaagagaggcaaggaccggcccgggggagaaagacaaggacagggagcaccccggaggaggcagaaaaagcccagaaggagagccaccagaagacgggggagagagagagagagagagagagagaagcaacagcagcagggcaaaggcaggcacgccagagcaccagacggaaaaaggggagggagaggccgggaaggagagaaaagcaagaaccagggcggcaggagccagcgggcagaaaaaggggccacgggggaaagcccgaaaccgcccgagccacacccccgagaaaagccgaaccccaagggccaaggccacacccaggaaaagaggaaaaaaacgcacagcaacagccagagccaaaggaaaagacagcgggaaaaaaaaggaaagaaccaaggagaccaaaaccgagaacaaggaaacacagaagaagggaaacagcgagggagagaaagaaggggggggggacagggaaaagggaggcaagaagggaggggaaagggaaggaaaggggagggagccccaaccaacagcagggaagcaaaacaaaagcgggcaagcagcgcaaggaagaggacagggaaagggcagacgaacggggaagaaggaagcgcaaagcagaagggagcaccgaggggcccgaaaacaaagcccgggaaggcagcacggaaagggcgcacccgggcaggggacagacgaggggacagagaaaggcaacggcaggcagagcccaggggcaaacaaaacggagccagaagaaaagaggaaacaaaacagaggcgagaaagcagaacccccaagagaggcacaccaacagcgaaagccaagagcgagcaagacgcgcagcacacacacacacacacacacacacagagagagagagagagagagagagagaacgaggcgaagaaaaggcaacgcccccaaccaaaagagaaacgcgccgaggacgcgcccgcccgcagaggaccaagacgcaacagaccaccgaacggacaccagccacccacggacagacgccagccccacaaagcagcgaaaaaaaaaaacgaagaagagaagaagaagaagaagaagaagaagaagaaagaagaagaaaggaccacggcgcccagagaaccgaggacagcaagagaaccaggccggggaggagaagccccacgagagaaaagcccaaaggaaagggacaaacagccccggccgaggagaaggccgggcagacacgcagacccaacccaaagcgccaccccacaaaaaaccaaggcggcacaccacgagcccccccccccgcccgcggaaaagagcaaagcccaggacagcagcaccgcaacagaagaaaaagccacaaagaaggagccagaaggggaaggaccgcaaggaagacacagaagagacagcccggacaagacccgccaaaggagaaaaaaaccccccccagccaacccgagccgcacgcagcgagccaccgacgaacaccaaccagcgcacagaaaacaacagcaaccagagggccaccaagaaaaaagccgggagaagagaaggagccgaagacgacaacccgagcccaccgaaagcagaagcgagccaagacgacaacagcacaccgaagaacacagaagaagaaggcgggacaaacgaagagcggaggaggaggcaaggaccgcacaaaggaggcagaaaggagagggacaacaaaggaggaaaagagagcacagagaaagaggaaacccacacaaagaaggcgaacaaagccagaagggcggaaacaaaaaagaaaacacaggggcagaacagcacccacaaaaaaagacgccacaacgcccacacgccccagcccacaccaacacacaccacaaagaaaagcaaaggcacagggacacaaagagaaaagacaaagcagccacaaaaggaaaaagggggaaaaacagaaggagcagaaaaaaccaaagaaggcaagaaaagaaagaaaaaagcagaaccacagacggcccagaggacaggaagaccccaagcaagaagacacggagcgaacgaagaaaaggaccgcagagacggggaaggccaccaccacacccaccgaagccagaaagaagggagacccaccacacaggagaggcccgagggagcaggagaagaggaaggaagagaacgggcagagggagcagcacacagaagcccgggaagcggaggacaggcaagaggaaaggaaccagaaggagggggagagcagagagagaagcggggacagggggcagaagaagggaaagaccagaaaggaaggggggggcaaagccaagagaagcacgaacgagacgagaccacagacacaacgaacagaagccagacaacaaaccgggcccagagccgggacgagccgccaccaaaacaagcgagaccagggggaacagaaggacagaaaccccacccaagcaagcccaaaaaggcaggcacaaggcaaacaaaacgcagggaaaagaacagccaccccagacgcgaggaagcccccacgaggaagccacccagcagccgggggcaccgagaagccaagggagaaaagcaccaggaaaagggagaaaagcaggagaagaacacaaaagacaagccaaagagcaggaccggagcccggcagaacacgcagacagcgcaacaacccccgaaagcaccaggaggagcaggcggaccgaaccaaggggcgaccacaaccaagcgcagcaaggcaggaaaagagaagggggcgcaacaggaggaaggaagagacggacggcccagcgaaaaggaggcccaacaaaggcacaaaagaacaaacacaaacacacaagacacacaaagaaaaccaaaggccagggaggaccaagaagcaaagcccagaagcaaagcaaaggaaggagcaaagcagggaaaggcaagaagaaagggcgagaaaacagccaaagacagagacccggaaccaaaccagggaaagaaggaaacaaggcaaaagaaaagcagggaaaaaaaaaaggcagcaaagcaagcaacaccaggaagcggcgcacaggaggaggaggggaacagagcccagaaacgcagggagggagggagaaaacaaacaaaaccaagcccaaacgaaagggcaggagcagacccaacgcgaacaaccaacgcaccggacggcccgggcaaacaggccgagaccaaggcggcggacacccagaaggagcaaacagacaccagaacgcaaacacacaaaggccaagcgaagaaccagcgcagacagaaaaagcagacagacaaccccgcccagccccgaaagagcccccccccaccaagcaccggcgccaccaccacaaaacacaaagcacaaccaacgaagcagaagaagaacacacaaagcagcaggggaaaggcgggggaagcgaaaagacaccgcacgaacacacaaacacgaggaccggggcccaaggaagagagcgcagcagcccggagaaacccccccagccaagcaagccagccgaggagggaaacccccccccccccaggaaagagcgacccagccggccaacacagacaaaacgcaaagaggcaagaggagcagagcaggcggcagaaaccaccgacgcagcccggcccggcaaaaaaaacagaaacagaaagccccgcccaaagaaaagaaaaaaaggaggcaaaacaaaagagcaaaaggaaaacggccaggaagggcccgggagcccacaaggacaaaagacaaaacgacagaaccacaaacacaaaaaacccaccccccacaaaacacacaagacagcaaaacgcaaacacacggggcgccaaaaaagacgcgcgacgaaaaacaacccgaaaacacccacggaaaagaacaacccccacacacagcgggaggaaacgggggccgaagaaacccaagacacgggcagcaccccaccaacaaaagaaagaaccagcaacaccccacaaggcaacacggacagagaggaaaaccggaaaaagcccagaaaaagcagaaacagcaaagggcaagggaaaagacggacagggcgccggggcaagcagaaagacacccccaaagcaaagcgccacagaaaacaaaaccaaagagaagagccgacgaaagccaggagagccccgcaaaacaggacagaagagaaaaagaacaggggaaagagcgccaaggcccaacccaggaaaggcacacgaagaaaaaaggaaggaaacggaaccccaggcagaaacaaagaagagacagagggcacgggagagcaagccacgcaacgagagcggcaaccccacccaggagcaaccgacaacagcgccagggaagccagagaacagagggccggcccgcagcagaacgaacacacgaagagcacaggcagaacagagagaccgggccacacgccgacagagggacccaagcagggccacacgagccgcaacaaaaagagaaacaagaagcccccagagcgagaaaggacaagcgcaagccagaacaacggaacagaaaaacccaacacaaagaaaacaggaacggaaaccgaaaaaaaaaaggagggaaaacccaaggaagcagaaaagcagagaaagaaaagaagccccagacccaacccaacaagcaagcacaacaaaaaggaccgcaagccccaacccccacccccacccaccacaccaccaaaacccaaacaaaaaacacggggcaagacgcgagagaggc

SEQ ID NO: 462 - RNA, 3856 nt, Homo sapiens
caagagaacaagaccgccaaaaaacaaaaaaaagaaagaagaagacaaaaccaacaacaaacgagagacaagaaggaaacaaaagcccagaaaaccaaggcgagaaagacaaagagcacagcgccaaagaaagccgagcaggccagaagagaaggaaaaaacccgagaaaccaacagcagaggcaaaccaaccacgcggccaggaagcccaacaacacacgcaaaggcggcggcaacaaagagaaagaggggcaaggggagcccagggggggagcagcccccgaccagcaagggggagggggggagaggggcaaaaaccaggacaagcaagccagcaaaagaggaaaaaaaaaaaagaaaagaaagaaagacccacaggcaaaagcacaggccccaacaagagccaccagggggaacccgcaaaaggggagaagagaacaggcacgccgaaaaccggcagccaaggaaccagaagacaccggcaaagcgaaaaaaaacacaaaaaagaggcaaaagaacaagaccaaacaaaagaaaggaggcaagacgaaaccaaaaagggggcaggaagaaagaaaggacacacaagaagacaacagacaacaagacaaaaagcccggaagaagcggacggcaagccccgagagggaaaaaaccacaaagacagagcggccagccaggggagaaaaacagagaaagcgggggagggacagcagcaggggcaaggagaagaaagggacagagcgacgcaccagaaccgggccaggcgacaaccgggaaaagacggcgcggcgaccagcggggaaaaaacagaccacgaaaggacaggcggaaaaagaaaaaaagaaagcacaacacagcaccaggcccacggaaagggcaagagcacagaagggccaggaagacacgaaaaaaaggacagaacccggaaagcacagcaaaaaaccgagagagagaaaaaaagggaagccaggaaagaaaagagaacagcagaagaagcaaacagacggccgaaaacagagcccggccagcaaccggcgagggagacaaacacaaaaacagagaaaacccccaaaagaggacccccacaacccagcacagccgcacacacaagacaaaacagaacacagccgcggccagacaagagaagacaccgacgagcaagcacccaagaagaaaagcggagagagcagaagggagggcgggacccgcccagcagcccgggggcagggcagccaccgaagagagagccaaagcaggggacaaggcaaagaagcacacaacacaacaagagcccccggccagacacgcggaagaagcagagaaaacgcaccacagagcacagccaggaggaagacgagaaaaaaagcaaagcacaagcacagaaagaagccaaaaaagaagccgggaaggaggacaaggcccaggggggggaggaaaggggcaggaaaggccccacgaaaggaacagagcaagcgaaaaaggcaaggggacggggcaaccgggacccgcacagaagaagaaaccggagccaaagaagacagcaaacgagaacaagaacgaagaaaggacacaaagaaaaccaagaaacaaaagcgagcaaaaaaagcagccaaaagggccaaagagaaaaaaacaggaccgacggaccaacacaaaaggaaacccacacgcgccacccaccagaccagagaggcaagccaaccaccaccaagaaccaaaaggaaagaaacagcagaaggcccaggaagagcaaaagccccgagaacggacagacaaccacggacgggccaaccgcccaagcccaggggaaaagaaaacacccaaaacaaacaaaacagaacaaggcccaccacgaaagacaggaagacagaccaaaaaaaggaaaaagccaagcagaacaagagaagacagccaacaccagacagggaaaggcaaacaggggaagccaacacgaacaaaaagacaagaggaaaagaaacaggagaaagaaacacaaaagaaagaacccagggggaaaaacagagacagcaacgaaaagccacccaccaacaaaagacgagaagagagaccccccagcaccaacggggcgggcgcaccgaaggggagaggggggcagggcacagggcacagcaacggggggcagcgcccaggccaggaaagaacaagaagccagggacagggccagaaagcccaccaaaaggggcagggcacggggccacgccgaacccagcacgggaggccaagggggcggacaccgagcaggggcgagaccagccggccaacagggaaacccggcacaaaaaacaaaaaggcgggggggcacagccagaaccccagcacagggaggcgaggcaggagaacacgaacccgggaggcagagggcaggagcgagagcaccacacacccagccggagacagaggagaccaccaaaaaaaaaaaaaaacaaaaaaaaacaacccggagcagcccccccacgacaaacacaaaccagaagcagagcgccaaacccgaacaaaaacccaagcaaaacaaaagaagaaacggcagcaacgaccgaaggagcgggcacaaacaccacccaaaaaggccccagaaagcggggcaacgagaaacagccaaagcaccagggcaggcaccccaacacgaccacaaaaaaaaaaaaaagaaaaaaaaccagagaagcacagcaaggaaaaagcccccaccagaaagcaaaaacaacaacaaaccaggaaaagacggaaagccacagccacggggccggaaaggaggggggaaccaggaaacggcaggaagagacaaacaccagcaaggagcaaacgaccccaaaaaacaaggaaaggggcgggggagggaggaggaccagaagacccccagaaacggcgacaacacagagcaggaaggaagagagaaagacagaaaacacgagaaaaaaacaaaaaaagacagacagcagccgaaagagcagagcacaaccacaaaaacagagcaaaacaaacaggcaccgcgcgagaagacgccgaaggaagcacgccagacaaaaaacaccccccgagagcaagccgacagccagaacagcacagagaaaaagagaccacaggaaacagaagacagccggccagacccaccggcaccggccggaggagccggcaggaaaccaaaacagagccaagcaccacaaaaaagggcagaaagaacaagcagaagaacacgcacaagcgcaccaaaagacaaaaaagaaaaaaacgagggagcgaaagaggcaacacagaacaaaaacccaaacagcaagacgagcaagccagccaaaacgaaaggaggaagaaaaaccggggaagacacagacgaaagggaagaaccagcacaaagccacaggacagaaaccaaggggcaacacagaggaaccgcccgcaagacccagcaaaaacggacagaaacccgacgggcggaaaagacccgagaggacccaacaccgaaggaacggcacacgcagcaaacaaggagcccccaaagcaggggaggaaaaaaaagaaaggagggacagcaggggggaacccaaagaaagaaaggcagaaccaccacagcagaacacgaagaacaaggacagaaaacaaaaggaaaggaagccaccgggcggagacaaaccacccccgcgccaaacaagcgcagaagcaggccggcccagccccccacgacgcagcaggcaaagaaccgcggaggagcgccagcgaagccaggcccccaggcacgaggagaaccacccagggcaaccaacccccccccaacaaaaaccaaagacggggaagacaacaaccacacaaaaaaaaccccaagagacaacaaggaaaaaaaa

SEQ ID NO: 463 - RNA, 4671 nt, Homo sapiens
cagcgaacacccagcccgcacacacacacggccacaaagccaaaagcgggaccaaacccggcaggagggagcggaagccaggggcgggaccagaccggagagcacggaagcaaggagccgcaagggagggaggaagcagccacgcccaccagagagacagccgggacagcgacccccagggacgaagagagggacagacaagggacgggccagcccaagaggcggagcccccgagagaggcacaagcccaggaagacagcgacaagcccccagcccgcgccacacacagaccgggaccggggccacccaaaaaggagccaagcagagggcaacagaaagggaggaaacacaaacagacaacaacacagcacagggggggaccagggcaacagccagcagcacacccagcgcgaggggcaagcaaacaaacagccagggaaaccgaaaaggaaaggagggcacaagccaaaacgcggacagcagcccacagggaaagcgacacaaagaagcacgagagaaggcacgggccgggaacgacacagaacaaacacagggcacgccgcagaccgaaaggaaggacagcggggggggggaagggaagaaggagagacccagcagcaggacaggaaaagaggagcaacagcgagccgaaaacacacagccaggagaaaagagaaagcacaaaaggccaggaaaccacaaaaaagagcaaaggaggcgaggacaagcccaaagagggaagccagaaggggccaaccaccccgggccagaggaagaaaaagcgggccacacaaaaaacaccacagaagaagggagagcaaaaaaaaaaagcaaaaaaacccaaagaaagaaagagaagcagggcgcaaaagccaccgggccacggggcacagggccgcgagggacaagcgcagacaaggccaaccggaaaacggcacgggcggaaaggccgggggggccgccggcacgaggaggagcccccagagggccagcagcacccccacccccacaaggaaaccaaaaagacgagacagccaaagcccggggcacaaaagcccccaggagaaccacgccggagacagacaaacaagagccaagacccgcgaccccacacccaaagacacaacaacacaagccccagggggcccacccacgaccgcacgcccccacaaagaccgggcaacacccccccccccccccccgcaccacagaaccgcgagcaacgcaaacaacggaaaaccagggaaacccagggacagacacaccagaggcaacccagacaaaacccaaaaccaaaaaaaaagaaaccgaaaaaacagagcaggccgggcacagggccagccgaacccaacaccgggaggcgaggggcggacaccgaggcaagagcgagacagcggccaacagggaaaccccgcccacaaaaacaaaaaagcggggggggggggccaagcccagcaccaggaggcaagacaggagaagcgaacccgggaggcggaggcaggagcgagaagagccacgcacgcagccggcaacagagcagaccagccaaaaacaaacaaacaaacaaacaacagaaaaaaaaaaacacagacaaggccaggcacagggcggccaaacccaacacagggaggccaaggagggaggagcgaaacacagagcaagaccagccgggcaagaggagacccgccagaaaaaaagagagagagagggagagagaaagaaaaaaacagcaaagggggcagaaagagggagaagggcaggaagaagggcagaaacagaaaaaaaaagccacaccgcaagcacaaccacaagccacagcaaccaaacacacaaccccagagaggaggaaaagagaggaaggaagaaggcaagcccagagcgaacggcagggaggagaaccgggcagcgaccgggggggcccagccccgcacacagaaagccaaaggggggaaggcaccaaaaaggcgaggaccaagggcaggagaccaggagcgaagaacaacgcgaacagaggccccagccaggcggaccagcaaacgcaaggaagggccacgccacgcaggaaacggcccgcagcgggggagagccccagagaaagaaaaaagacagcgaaggaagaaaggcaagaggggcccagcagcagggcgggggaggggggggggggggaaaagggcggagaacacgaaaaaaaaacgacagagacggggagaaaaacaggggacaagaccaaagccggcagaccacccaccgccaagccccggccagaccaacgaaagcacaaaggagccaacggggcaaaagggcaaacagaaaaaagaaaaagacccgcccccccccccccccccccccccccccccccccccccccccccccccccccccccccccccccccccccccccccccccccccccccccccccccccccccccggggagaggagccaccggccaggcggaggcagggccggccacgcgcaaccccgcccgggcaagagacccgcccagcccccaagagcacagccacagcggcaagacagagagacggaggccagggccaggcggcgaacccccccaaggacaccgcccagcccccaaaggcgggaacaggcggagccaccagccggcccagcccccgagccaccccaacgggcagccaacggccccacaccgcccaggaccgcacagagggcacaggggcgacccgcccaggaagccccaggcgacaacaccccagagggccccgacccccaaacgacccacacccagcaccgggggaggcagggaacacagccacggcccaggcggaggcaaggggaccggccgcgaaaccccaacccgggcaagggacgcccagcccccaagagcacacgccacagccagcaagacgagagacggggcaccagggccaggcggccaaaccccgcccaaggaccaccgccagcccccaaaggcgggaacaggcggagccagagccggccccagcaccggagaaccaaacaaggccccaacacacaaagcccgagaacagggacagcaccaaggcaaggcacacaaggccggcacacaggaaaaaggagggaaacagaagcagacgaaagggaggaagcaggggccgccaacaaaaagggaaaacaaagacaaaaaagaaaaacaacgagcaaacacacaccagacaccaagcaagagccacaacagacccaacaaaacccagcccaaaggcacagaaacaagcaccacaggacaggccagaaaggcacagcccccccccccccccccccccccccccccgagacagagcgccgcacccaggcggggcagggcgagaccggccacgcaacccgccgccaggcaaggacccgcccagccccgggagcggaaacagggccgccaccagccggcaagaagagagacggggcgccagggccaggcggccgaacccgaccccggccaccaaaggcgggaacaggcagagccaccacccggccaaagcacacaggaaacccaacaaccgcggggaaaacccaagaaaggggacgcgaacaggaagcacagcaggcccacagaggggaaacgggacccaaagcagcgaacacaaacagccaagaaacaaacacacccccaccgccccccaaccacagaccaaaggaaacaaggccaaccgagggcaaggccaggccggaaaaaagaacagcaaggcaacccaaaaaaaacaaggcaaaaacaagaacccaacaagcaccagaagagcggggagacaacaggaagaaaaaaagccaccaggagcacagagagcaggcccaacagaacagaaggggggaccacccaaaaacacccggcccaacgagaccaaggacaagagcaaagaagaggagcagcgacgcgagggcaaaaagcaccccacaagaggcccgacaccccccacccgccccgccgacacccggagcagaccgccaccgacggacaaaggaagggacaagaggaacaaaaaccgaagcacacaggccggacagggcaaggcacgcacaaagacacgggaagagcggcggagcgaaaccgcggccccagccaaggggggccccaccggggccaccagccgaggaagggccccaccaccaagacccaggggacaccaggagccacgggccagagcacagaggcacccagaacgaggaagccccggccaaccagaaagagaaggaaagggagacagaaacagcgggcaaagaaaggaagggaaaccaccagaccccagcgcccaggaccagggaggaacaaaggcccagggaggcagaagaagccagcaacacaggaaaaaggcaggggaaaagcaacacaagggacaaaggacgagagaccgccagcaagcaaagaagagaaggaagaaggaacaacaggggaccagacaaccagagcaagcagacacccacaaagacgaagagaaacaacaccgcacagccccccagcaaaaccaagaggcacagggagacacagcgaggaagcaaaaaagccaagaagcacagaacggcaggacagacgagaacaccacagcagaaccaaccccaaaaggaggagaagagcaggggacacgacagagaccaaggcaaaaaaagaagggacagcagggcgaacccgccgaccaaaacccacaccggccagcgcagggccacacg

SEQ ID NO: 464 - RNA, 19863 nt, Homo sapiens
gccacaacaaaacaacaaacccaaaaacaaaacacagcccagaacaccgccacgccaagcaacaccgcagccccccgagaccgacaaaagggccacggggaagaagcggggggccgaaccccaggcaaagcaaagaagcccccgggggggggcaagaggggcccacagacaagagggcccaaacggcaccaacggacacacagacaaggcaccggaagagcacaaccacaccgaccaacagcccagacgcccccagcaggaccgggaaccaacgcggaccacaccaggacacccagcccccccacgagcccccagacacaggaccgggcccccgagaggccaggaggagaaaccccaagagaaacacaacacccaacggcaaccgcgagaagagggagaagagggccgaacccaagcaaaaagaccagaggcccacggaaacaaaccagcagaaccccccagcagccaccaggccagaaagccagggaggggacacagccaggaaacggaaaaccccgaacaccaagaaacacaaggaaaggcgcagcccaccggagcagggcaagcagaagcaggaaagccagcaaggcaagaccggggaaaagagccccaggcagaggccggaacaggagccgagagccccagaagcgcccagaggcagaaaaagaaaggaaagagcaaaagaacgaaaccccccaccgccccagccaggggcagcaaacccacagacggcaacaaccaccggccagggcacgaaagcagcgagacaacaggaaacaccaagcaagcacgaccagaaaacccaccacagaaacaggcagcaggcgaacggcccagggccaaggcgaccgccaaccccaaaagaggaaacccggaccaaagagcaccagagcgacacacagagcgggagaaaaacacaacagaagagcggaccggacaccaggggcccccaaccgaaggccccacaagcaccaacacaaccaaaagacccccagaagacggggggaaaaacagcaagcacaagaggggacacaacgaggaggcaaggcaagcagaggggaacacaaggggaacacaaaccaaaggcaagccaacacacacaggaaggagaggaggcccaggcagaaaccgaagcagacgacgaaaccgaggcaacgaacacaggggaagaaggacaaaaacaaacaagaagggacagaaaaaacagaaaaagaaaaaacgaacaccagagagcacaccagaaaggaacgcaggacggaagcgccaggaagcaggaggaggaaaggaaggccagaacgagaacagacgagacaaaagagacagggcccccgcacccaggcaaagcacggcacgacaagccacgcagccgaacccgggccaagcaacccgcccagccccggggcaggagcagcagcacacaggcacaagccacggcccagaacagcaagagagacagcccacaggcccaggcggccaaacccggccaagggacccccaccagcccccaaagagccccaaagggaacaggggagccaccacaccagccacgaaaccaaacacgacacaaggcacacaaaaaaaagaccggccaggcacgggcacaccgaacccagaacgggaggcgaggcaggaggacgccgaggcaggagcgagaccagccggccaacagggaaaccccaccacaaaaaacaaaaaagcgggcaaaggcgggcaccgaaccaacaccaggaggcgaggcaggagaagcgaacccgggaagggagggagcaagcagagacagccagcacccagcgggcaacaagaggaaaccaccaaaaaaaaaaaagaccggccgggcacagggccacgcgaacccagcacgggaggccaaggcaggcagacaccgaggcaggagcaagaccaccggccaacaagggaaaccccgccacaaaaaacaaaaaaggccggggcggggccagccgaacccagcacgggaggcgagggggcggacaccgaggcaggagcaagaccagcccaacaggagaaaccccgccacaaaaaacaaaaagccgggcacagggacagccgaaccagaccaggaggcgaggcaggagaagcgaaccgggaggcagagggcaggagccaagacgcgccagcacccagccgggcaacaagagcaaaacccaccaaaaaaaaaaaacaaaaaagccagggggggcacgccgaacccagcacgggaggcgaggcaggagaacagaacccaggaggcggagggcaggagccgagacgcgccagcacccagccaggggacagaggagaccgccaaaaaaaaaaaaaaaagggacccaaaaaaaaacagcacgagcacaaaccaaaacagaccgaaaagcaacaaaaacaaacacacacagcgacgaagaagcaagaaacaaggggcggagacagggcgccgcacccgacggaggcagggggacaagccacgcaacccaaccccaagccaaggaccccaccccaacccccgagagcaggaccacagggacgcacggccggaaagacagaggaggggccaaaggccagaccaccgaacccggcccaaggaccggccccacgcccaaaggcgggaagagcaggcaaagccaccacaccagccaagcccaaaacgaaacagggcgcacaaaccaaggcggaggcagggggaccaagccacgcagcccaacccccggccaagggaccccgcccgaccgaaagcaggaccacaggaccgccaccacaccggcaaaaggaaaaaaaagacaaaccaaaaaaccagacacaggccaggcacaggagcacgaaccagcacgggaggccaaggcaagaggacacgagcccaggagcaagaagagccgggcaacaaagagaccgccgcaaaaaaaaacaaaaagccgaggggggcccgagccagcacgggaggccgaggggaaggacacgagcccaggaggcgaggcgaggggccgagacacaccacgcacccaacacagggacaaaggagacccggcaaaaaaaaaaaaaaacaagacacaaacacacacacacacaaagcaggcaaagcaggccacacaggcaggacagacacgcccgcccacacgcccacggaagggcaagggcaagagcaacaggagcgcacccagaaacaagcccgcaaacaccgaaagaccgccgaggcgagagaagaaaagagaaggagacacaaaaaagaaaaacaaagcaaaacaaaccagaaaaacaagcacaagaacaacaacgagacggaggccgcacccaggcggaggcaaggcgcgaccggccacgcaacccgccccgggcaagcaacccgccagccccgagagcgagaacaggcgccgccaccagccggcaagaagagagaggggcaccagggacaggcggcgaacccggccagggaccccgccggcccaaaaggcgggaacaggcagacccaccagccggccagacaacaagaggcaacaacaacggcagcacagagggcaaccagcacacacaaacacaaagcaggaaacaagacagcacgacaccagggaaggaacagcccaaaaacagggcccacggaacggcacaaaccaaaacacgaaggcacagacgaaccgaaaagaaggcggaacagacaccaaaaaacacagggggccagggcagagccacaccgaacccagcacgggaggccaaggcaggcagacacgagcccagagcaagaccagccgggccacaggcaaaaccccaccccacacacacacacaaaaaaaaaaaaaaaaagagagagaaaaaagcgcacggggggggccgagcccagaaccaggagcgaggcaggaagacacgagccgggaggcgaggcgcaggagccaggcacaccacacacccagccggacaacagaggagacccgcgaaagaaaacaaacaaacaaaaaaaacacggggagacgcaaagagcagagagacagagcagacccaagccaagaggccaaggccgccaggacagaacacaccagggagaaacaagccagcgccaaaaaggaaaccgccgcgggagacaggcccccgggacccacggaagggacacgggcagaggcgcagaaccaagacccaggcaaaccagaagcacccggcacagaaaccgccgcaacagaaggcaaagccagcaggccaagcacgggagcacaggccaggccgggagagaccacaaaaaaaaagccccgcccaaagaggagcgcaaaaacaaagggcagggccagggcggggccacgcgaacccagcacgggagcgaggcaggcagacaccgaggcgggagcaagaccagccggccaacagggaaacccgccacaaaaaacaaaaaagccgggcggggggcccgccgaaccagcaccgggaggcgaggcaggagaacacgaacccaggaggcagagggcagaagccaagacgcaccaccgcaccagcggggaccgagggagacgccacaaaaaaaaaaaaaagcaaagggcaagcagcacccagggaggaggaaccgggaaggaacagaaaaaaccacccaaccacaccacgcagcaaggcggggaggaacgggaggggagaagcaaggagaaacccccggagcccagacgcagggagccaaacccagggagaaaccaaaaaacaagagcaaagaaggccacccagccgcagaagggcaaggggggacgaaaagcggcgcaaaggaaagggacgaagacaagaccagggggagggggagcaaagagagggacgcgcgcccagacggaggcagggggccagggcggggccaaccaaacccagcacaggaagcgaggcaggaggacacgagcccaggagccaagaccaccccgggcaagaggagacccgacacaaaaagaagaaggggaagaagaaaaggaagaagagaagaagaagaagaggaagaagaaaagaggaagaggaagaaggagaaggagagagggagaaggagaaaagaaagaagaggaggaggaagaagaaggaagagaaggaggaaggaggaaggaaggaaaagaaggaaaggagagagaaagaaagaaagagagaaagaaagaaagagagagaagggagagagagagaaggaagagaagaagaaagaaaaacacagcagcggggggcagcaagggcaggagcagacagccacgacccagccgggaaacagaaagcccgccaaaaaaaaaaaaggaaaaaaaaaaaaaaccacggccgggcgcagggcgacgcgaacccagcacgggaggccaaggcggggacacgaggcaggagcgagaccagccgcccaacagggaaacccagccacaaaaaacgaaaaagcgggcaggggcacaaccgaacccagcaccaagaggcgaagaggagaacacgaacccggaggcggaggcgcaggagccaagacgcaccacgcacccagccgggcgacgaggagacccaccaaaaaaaaaaaaaaaaccacgaagccgaacccgggccaaggcaccccgcccagcccccaaaaccggaagacaggcaggccaccacagggcaaaaaaaaaacagaagggggccacagcgcccaggcggccaaacccggcccaaggacccccacccagccccagaaagcgggaacaagacgaggccagacccgcgacagggagaaaaaaagcacacaaagaacacaacaaggcgaaaccacaccacaacgaaggaaaaccacaaaaagcaaaacaagggcgggaggaaaggaagaagcaacaacagaaaagggaaagcccccccgaagagcgaaccggaagcgacgcaggcaggggaacagaggcaaaaaaagcagagccaaccaaagggcgagccaagcacaagcccaaaagacacaacaccaaaaaggaggagaacgacagacaaagacccaaagcaacagaaccaaaaccaaaagccaaggcaaaggcccaagacaaaagaacaaaaaaccagagaaaaagcaagcaaacacgagggaagaaacaagacgaaacagagcaaaggaggcccagagccagagacaagcaagacccaacagaggaaacacggaaacacagagaaagaagaccaaacacaaaacaaagacaaaagacaaaacccaaaaaaaacaggaacaaaaaacaagccccaaggacacaaccaaacaagagaacgccgacagccaacaacccagagcagaacaccaacacacgagcccccgcccacaaaccaaggcaaaacagacccccccgcggcagggcagcaggcaagggcacagacgcaaaccgaacaaaagagcagaaaaagaaaaagcaagagagacacagagagggacaacaacgaagaaccaaaagaagaccaaaaaacacaggacacaccagccaccaaaaacccagggcgaccacagaaaaaggcaaacccccggggcaagcccccaagacaggcgccggcccaggcggaggcagggacaacacagccgcgcagcccaaccccgggagaagggaacccccacccagcccccaagagcgggacaaggcacacacaccacaccggcaacgagacacaggggccaggcccaggcggccgaaaccgagccagcaaccacccaccggcccaaagacgggaacaggcggagccaccgagcaggccacagcaagccaggaccacccagacaacccccagcccagccgagccccaaccacacaggacgccagagcagaggcaacacccccaacagaaacacaccaccgcagccacaacacaaacccaaaccaaaagccagcccccaccagcagcaccacaaaagacccagcaagcacaccccgaggcccccacacccacgaggagagcgaccggcccagggaagcgcagggcagaccagccacgcagccgacccccgggccagcaacccccacccaaccccaagagcgggacacaggcgcacaccaccacacccacaagacgacagaggggccccaggcaaggcggccgaaccccgagcgagggaccacggcccagcccccaaggagcgggaaaggggagccaagcgcccggcccaccccacaaggaaaaaaagcaccccggcccccaacacggcacacccacaacagaaggcaaaggcagcgaccaagccagaagaagagccgccaaggaagggagagcagcccaagagaggcacaggcagacaccaaaaagacgccggaagagaaacgaaaccgcgcgcaaccaaaaagcaaaggaggaagaggaacacagcgccaacccaccaccaaagaaaaaaagaaggaagagacaggaaaacagccaagcccagaggagaccagacccaaagaaaaaacagcagaaggaggcaaaaccaaaacaccaaacaccagagggaaaggcccaagacaaacaagaacacccaaggcagggaacggcacccaggcccgaacaggagcgaccagaaagagaaccagcagaacaagggcccacgacccaggaagacagccagcccaggcgcccaggcagaaaccaacgagacagggacaaacaccaaccagcgcgcgcggaaaaaaaaaaagacaacacaaaaaaagacaaaccgcaacacacaagaagccaaaaaccaggaaaccaaaacagaccagaccgaaagacaaagcaacaaaccaaacaagaaaaagaaaggcgaaacgaccacaaaaagaaagaacacaaacaaaacaaagacggcaccccaaaaaaacaacgcaaaccacagaacacccaaaaacaggacaaagggaaacaaaagaaagaacacaggaaaaaacaaacccacaaagaagacagcgaaccaagagaacaaccaagcggccaaaaaccaaaggcaccagacgagaagaaaaaaccaggaaggaaccaggaaaagggccagagaccaaaaaaagaacacacaaaacagcagcaggagcagggaaaccccagccaggggagccaaaaaagagagagaaaagcaggcagccaagaaaaagaaaaaaaaaagaaaacacagaaaaaaagaaaccgaaaaaaggaaaaaagaaaaggggaagggaagaaaacaaaaagagaaagaaagaaaaaacaaagcacgggggaaaaacaaaaagacaggaaggaaaacccgagagagaagagaagcagacaaaagagcaaaagacagaaaagaaaagaggcgggcggagggccacgccgaaccagcacgggaggccaaggcgggggacacgaggcaggagcaagaccagccggccaacggggaaaccccaccccaaaaaacaaaaaagccgggcgcagggcaggcagcgaccccagcaccagaggcgaggcaagagaacgcgaacccagaaggcgagggcaggagcgagacacaccacgcaccagccgggcaacagaggagacccaccaaaaaaaaaaaaaagaagagagaaagagaggagggccaggacagggccagccgaaccagcagggaggccgacccaggaggagacaaccgggcaacagagagacccaccgaaaaaagaaaaagagaggagcaggaagccagcagagaggaagaacaaaagccaaccagaaaggcccaggaagcagagcgcaaacagaagacagacaaaggaacaggaagaaagcaaggaacgggaaaaaccgcaaggagagaaagccggacccacgagccgcacaaaacagaaacgaccgggagaaaagaaccagaaggcccacaagaaggacaacacaccaaacgaaggaggagagccccaaccaaagccacaagggaagaaaaccacaacacaaacaagcacaaaacaaaaccgggacagacagcaacaaagacagcagggccaggcacggggccagccaaaacccagcacgggaggcgaggcaggggacaccgaggcaggaggagaccagccggccaacaggcgaacccgccaccaaaaaacaaaaacaagccaggcgggggcacacaccgagcccagcaccaggaggcaaagcaggggaacacgaacccggaggcagagggcaggagccaagaagcaccacgcacccagccggggacaaagaagaccaccaaaaaaaaaaaaaacaaagacacgcaaccaaaacggaaaaccaaaaaggaccgggcaaggaagaacccaggacaacccacaagagaacaagaacacccccaaaagagaagaagcaacggccaggcagggggccagccgaacccagcaccgggaggcaagggggcagacaccaaggcaggaggagaccagccggcaacagggaaacaccgcacaaaaacaaaaaagccaggcagggagcgccgaaccaacaccaggaggcgaagcaggagaacgcgaacccgggaggcggagggcaggagcgagaggccacgcacccagccgcggacagagcaagacccaccaaaaaaaaaaaaaaaaaaagcaacaaaaacccaaacgggaggcaggggagagaaaaagcgaagaggaggagcgagggcacaacaaaacaacgccccaagcacaccaaaaagcaaaaggaaaagccagcacaccacaaagaagaaaaagaaaaacagacaaaaacaacagagaaaaagcacacaaaaaacacccccagaagggcagcaggggaacaaagagacaaccagaaacaacgccaagcaagagcagaaaagagcacaagcacgagaaacgaaaaaggacacaacgagaaaacagggcacgggggcaaaaaaaagccgaggcaaaaaaggggagggaaaccaaacaagggaaacaggcggacccaaaccagagccagagagaggagaagcaggacaagcagagaacaagaacaaagaacccaagcaaggaagccgaagaacacgaaaaccaaagaagcccaaaagcacccccaggaacagacaaaaaacacgcggcaaaggcaaaaaccaagagacacgaagcacaaaaagggagacaaaaagacaaaaagacagaaacaagaaaagagaaaaagaacaaacaaagcgggaacaaaaaccaagccgagaggaagggcagcaggagcacaaagaacagcgaaccgccccccccgaaaaaaagcccaaaggcaccagagaaagacccccagacgcacccccaggagaaaaagaaccggaggcagcaacgaaccaaccaaacgcgggcaagcacggcgaggaaaagaacgcacaacacaaaagaaacgaacccccagaagaacacccacagaagcaggcccagggccacccaagagcgaaaaaccaagaacaacgcgaaccaaaagggacaaagcaaaagacaaaaaaacgcagggcaagggcagggccacaccgaaccacacgggggggagacaaggccaccgcgcccgcacccaggcggaggcaaggggacgacagccacgcagccgaccccggccaagcacccccccagccccagagagaggacaacaggcacacccaccacaccggcaagaaacagagacaggacccacaggcccaggcggcaagcccggcccaaaaaccccacccagccaccaaaggccagccgacaacaagcaagacccacgcaccaaaaaaaaaaaaaaaaaagcgggcagggggcaagcgaacccagcacggaagcgaggggaggagagccaggagacaaggcgcagggcgagagccacgcacccagacgggcaacagagcagacgccaaaaagaaaaaaaaaaaaaaacgccaaaagagcagagaaaagaccagcaaaaaccagcgggcaggggccacgccgaacccagcacgggaggccaagcagggcagacacgaggccaggaggagaccagccggccaacagggaaaccgccacaaaaaacaaaaaaaaagcaggcaggggggacaccgaacccagcaccaggggcgaggcaagaggacacgaacccggaaggcagagggcaggagccaagacggccacgcacccaggcgggcaacagacaagaccgccaaaaaaaaaaaaaaaaaaaaaaaaaaaaaacaaacagcggaaaaggcacagaacagagaaacaaaaacaaaaaaaagaagaagaaaagagggggaccaccagaaaaaaaggaagccagcgaaaggaaggaagaaagaaaagaaaagaaacgaaaagcaagaaaaaaagccccagacaaacacaggccagaggaaggcagccaggaagggggaagcacggacgaaagcagagagcggaccaaacagcgagcaacacgggaccgagcacaccacaacccggaccagcaccaaaacaaggacgggcccgaaaaaggcacaaacacccgggaggcgaggcaggaggggcgagcccaggaggcaaagacgaagcagacagccacgcacccagccagaaaacagaagagacgcaaaaaaaaaaaagagaaaaccaaacccaaaaaacacaccacagaaccaaaaggaaaaaaaaaacaacaacaaaaaagaaaaaacaaacaaaacaccgggccaggcacagagccagccgaacccagcacgggaggcgaggcaggcggacagaggcaagagagagacaccggcaacacgggaaaccccaccacaaaaaacaaaaaacagccgggggggccgggccgagcccagacgggaggcgaggcagaagaacacgaagccgggaggcggagggcaggagccgagagcaccacggcacccagccgggcgacagagcgaaaccagccaaaaacaaaacaaaacaaacaaacaaacaaaaaaaaccggggacaaccgaaacgcaggcccaacagggcggggaggagcccaaggacaagaagccacaggggacacagagagcagaggaaaagagccccccgaaagccccccaaagcgacacccaaacaacggagacaagcgaaaggggaccgagaggagaggcagcaagcgagaacagagaaaagggaaccacccagaacccgaaaaacaaagcaagcagaaaaaaacaaaaaaaaacaagaaaccgggggggcacaaaacaggcgacacgagacaaggccgccgcccccaggcggagagcaggcacgacacagccacgcaacccgccccaggccaagcgacggccagccccgagagcggaaccacaggggcaccaccacaccggcaaaagcagagagagcaccagggccaggcggcgaacccgacccaagcaaccacccacccggcccccaaagccgggaacaagggagcaccacaccggcaacaccacagggaccgaagacccaaagaacaaagagagaacacacacaaaaagaaaggaaagagagaaagagagagagagaaaaagaaagaaagaaagagaaagaaagaaagagaaagagaaggaaggaaggaaggaagaaagagaaagaaaaagaaagaaagaaaggaaggaaggaaggaagaaagaaaagaaagaaagaaagaaagaagaaagaaagaaagaaagaaagaaagaaagaaagaaagaaagaaagaaagaaaaaaagcaaagaaaccgcaaagacagagcggcagcagagaaggccaaacaggccccacaccagcaaaaaaacgaagagggccaggcaccaaggcccagacacgcagagagaaggggccaaagaaaacaggcagggggcaacagccggaagccacgcaggacgcgggacaacccgaccacacgggccacgccacagccgaggccagaagaacaccggagacggaggacaaccagcagaaacaaaaagccggcccaggaaacccccagcggcaaaccaagacagcggcagcccggcaaccgaaaacacaggccccaaagacgacagaggggagaggcagggccgagaacgcacaaacgccccaggggaccacacagagaggaacacgccagacagccaacccaacccagggacggagcagaaccggggaaagaaaaggcaaacgaaagaagccaccaagccgagccacaagcacagcggggacaaagaaagaaaacccaagggagaggaacccaggccagagaaagacacagggcgcaggacgagggagagcggcgggggcacggacccacgcaaggaggcagcgcgcagcaaccagggccgaaagcagggagggggccagagaaccgagggaagacgcagagggagggaccccgagggagcagaaacggcagagaaacaggaaaggaagaacccaaaacaaaaggagagaaaaccgacaaggccgacaaccacacccccggcaaggcgcgagcagccacacccgcccagccgcaggacaccccagcaaaacacaccaacaagagaggggagacagggggccaaccagagcagggggagcagaccagaggagagcaagaaacgcagcccaagccccccacccaggcagaggagggcacaacaggcacgcagcccgacccccaggccaggcgagccccacccagcccccaagagcgggaccacaggcagcaccaccagcccagaaaaaaaaagacacgggaccccaggcccagacggccaacccgggccaacgaaccgcacagccccaaaggcgggacacaagcagagccacggcccagccaggcccaaaccagagagaacaggggccaagaaaaaagaaaaaaagcgagaaggaaagcaacacgcaaaagagacaagacagaaaaaccaccacagagaagagaaacagcgcaagagcaggccggaggcaggggacaagcgcgggagacgaccagcagccacacagcagaaccggagagccggcccagccgaaacgaaaagagaagaaaaaaaccacaagggggaggacaaaagaaagaggaaagcccagcgcgaaaagacaacccgagacgggaaacaaagaaaacgaggaaggaccacagcccaagggcggggaagcccacagcaggcagaaggcaaaaggcaggacacagcagcagcaacagagaagagggacaaggaaaggagaaaccccgaaaaaccacagacggagacacacaccacgagaacagagggggaaacccccccagagaacacccccgggcccccacaacacaaggaaagggagcacaacaaggagagggagggacacagccaaaccaacaagagaaacagaaaagcaaaaaaggcagacagaaagcaaccaccaacgaccgaagaaaaaagaaggacaacacggggggcagccaaccccaaacccaagggaagaggacagagaaagcacgagcaaaaacaagagcggacggcacagggcacccagagggcgaacccagaaaccaaaacaaaacaaacaccccgccgccacacccccagcccgggaacagcgaccagaaggaaagcagccccacccagcccgccaccgcccccccacgcaaccaagaaagcgcaaccaggagggagggaggcgccagccgagaaacacccaccaccaaacacgagcaacaaccaggaccgagacaagcgaggacaaagacagaaagagagcacagcaagagaagaaggagaaaagcacaaagcaggccaagcacaaggccacaccgaacccagcagggagagagagggaggacacgcacccaggagcagacagccggccaaaaacagaccccaccaaaaacccaacagcaacaaaacaaaaaagcacaaagcaggcaaaaaacgcaaccaaccccaaccacacagcagaccaaacaaaccagcacaaccccgagacgcgcaaaggaaagacagacaaacaacgggaggaaaaagccaacggggcccaaaaccaggaagaaaaagcacccaagggccaacacaaaaaagcagccaagagagcaccaaaccagaggggaaggaacgagaaaccagccccccaacacccgacaaaaaaaaaaccagaaagaaaacaagaccgcaaacccccaagacagagagcaccacccccagcaagaaagcagggcacaaagcaaacccacacccacccaaaaggacgacacccacaagaacccaggggcggccaaaggaggagaccaagagggacagcagacagacaaacccacacccccccccacacgacgacagcaaaaaaaaaaaaaacaaaaaacaaacaacaaaaaaagaacccaacccccaaaaaaaggccacacgacccaaccgcaccggggaccaagacaaccagcagggggcccccacaccggcccaggaccagaaaccaacccacacgaggccacaacgccacacccacggcacgcaggcagcaccacaaccccaccggccacaccgccaaccgacacccagaaggggaccgagaggagcaccggcccaggcggagacaaagcagaccggccacgcaaccccacccccgggcaggcacccgccagccccgagagcgggaacaggggggccaccagccccgcaagcaagagagaggggcccagggcaggcggccgaacccgacccagggaccaccaccccaaccccaaaggcgggaaaggggagccaccacgccaagcgaggacccaacgcagcacccccccgcagagcgaggccaacagacacgggagagcacagagaccagcacccaaggagaccagaagaccaagaaacacccaggaccaagcccggaggggaagacaagccagggggcaccacaaccaaccgcacccaaagaacaaacacccaaaacaaccaccaccacccccccgggccacccgaaaggaaggcgcggaccgaagacagagggaagacaagcagaaagcagagaggaagcagggaccgaacagcaagaacaacccgaccccagccaggccgagccaacaggccgaccagcaacgaagccagagaaaggaagaaacaggacaacggcacccccccgcccaccaccccggacccccgggcccgcaccccacccagccaccaacacccccgccaacaaacgcgaaacacacccacaccaggcacgaccagcaacgaccagccccccccaaaacacgagccaaaagcacagcccaggccaggacagacgaaaacaaaggacaaggccagacaaaaaaaaaagagagagagagagagagagagagagccgccgcaccaggcggaggcagggcagaccggccacgcaacccgcccccaggcaagcggccccgcccagcccggagagcaggaacaagcgcccaccaccaggcccggccaagaagagagaggggcaccagggccaagcggccgaacccgaccccaaggaccacccacccggccccaaaaggggaaaggcggagccaccgcacccagcccaaaaaaaagaagcaacccacaacgcagcaacaccaggaaccgagcaacagccccaaaggcaggcaacagaacggccagcacgcaagcccccaaccaacgggacaaccagaaaagccagaaggcccccaccaacacagggagcagcgcagaaaaccccagcgggcgaccgaaccaccaccacccccaaccccccccacgaaaacccacccccagccacgagccgccaaaggaaggagaggcgaccccgcacagcaagcgaaaaaagccgcacgggaggacaagccaccagaccaaacaagccacgcccacccacaaggagccagagaaacaacacacgcaaaggaaaggacaaccaaggcacggaaaggaacgggcgaaagagaagcggaagggcaacggacccaggaggaggaggacacccaggcgcgaaaagaaagcaccaaagagcccgccagggagaagggaaacacagcccaacccccgccccccacaagaaacaacccccccacaagcccaagaagaccgccgccaaacaccaagccaccccccacaaaaaacccccagcaaaaaggagcggcaccaaacacggacgacgaccagcccagcgaagcacccgcccaacaaagagacacccgaggccaggagcagggcagccgaacccagcaagggaggcgaggcgggcagacacgaggcaggagcgagaccagccggccaacagggaaaccccaccacaaaaaacaaaaagcaggggggggcaacgaacccagcaccggaaagcgaggaggaggacgaacccaggaggcagagggcagcaagcgagacagcaccgcacccaccagccgggcgacagaggagacgccaaaaaaaaaaaaaaagagacacccgaaacaaggccgccccaaccagagccccacacagcccaccccccccacagccgggcccacgaccagaccaccaacaaaggcccaaccgccccggccccacccagccgacaaagagccagccccaccacccagagcgccccccgacgcacaccacaaacccaagaacccccaaggacgccacccccaacgcaaccaaggcaagcaaccacaagcagacaccccaaaccaaacagcacccaaacaggagccaaaacaacaacaccccaaaccccccgagaaacaaaccaagcacccagcccccaagccaggcaccccccgcccgcacccaacgaaaaccccccagccaccaccacgcacacagccgcgcgcaacggggcccagcccagaacccaggccagcagcaacaaccccaagggcgccaagccccagccccacagcgacgcaggaaaccgccccaaaaaccaggcccaagggaacagaagggagaagcagaaaggagagggggccaaccaggaagccgaccgccccaaacacccccaaaaccagacagagaccacgagcacagcggcagccacagcaacaacaagggacaacggacagccaccagagaacacaggaagaccgaaaagacgccaagcacgcaagccagcgcacgccggagaagagccaaggaaggaacaaccagggcaccaaaacaaaaaggccacccagaagacaagccagaaaacccacaggcaggaaaagcccaagccaaagagaaggggggggggcggcaggcaggaccaaccacaagcccgagcacacaggaaaccccaccaggacagcgggagaaggaagagggggccagacccccccccgcccaagacaacaaaagcaaaggaggacacagccccagcagaggcagccaagggggacaacccgcccacgggcagacacagaccaccgaaggcgaggggccgagccccgggagcgagcggaacgaagcggagcgcagccgagccgggaccgaccggcggcggcacagccgagccccggcaagcgggcacgagcacgcccaagcgagggggcaacgaggcaagagcgacacccggaacgggcaaccccggggagagggcaaggcccagcacggcaccaggccggcacgcgcccgcaccaggcccccaggccggcaaaccgcaggcaggaacggggccaccccaaaagacgacggaccgggcagagccgcggccacgggacgggggggggggcggaggccagcgcacgaaccgggccccgaagcgccagaacggcagacccaccgcaccccgagacggcccagggcccaggcacagcaagccaaaggccaggcgccaacaaggcaccgccccgcccgggccccgggccccccccccccgggccgaacgaaggaacacacacaccagggagagggacaggcccgcagagcgggaacccacacccaaccaaaagaccaacagaggcccagccaagggcaccaccgacccccccgccccaccacccacaccccaggcacccagccacgccgaacagagggagaagcaccccccgcggcgaacccggaaccaccagccaacacgcagcagaggaggaaaaacaacccccgagcggaaaagaacagcggcaaaccccagacaagagcccacgagggcccgcacgcccgccccacgcgcacagggaagcgcaagggccacggaagaagaggaaaaggccacccgaccccacgcgcccaccaaagcaccggcccaacaacggaaaaaaaaaagggaagaaaagccgggcaaaaaggcagcaaaagccaccgcagagccggaagcggacagcgccgcagaacgcccggccccccgcccccccgggcgccgcccgcccgggccgcgccgcgcccagcccccaccccgccccgggcagggaggcccgggggcccggccaggccgccaaaaccggcgcccccggcgcgcggggcgggcgggggcagggaagcccggcggggagccccccgcccgagcccccgccgacccaacggccggcgcgggccccaccgcgccccacgcccggcaccgcgccggcccggcccaggggcggggaagcgccggcgcccagagcccgaggcccagccgggggccccgccggccgcccggcccgcccagcccgcaccaccgcggggcccggcgccccgcggcgccgcgggccaggccgagcagcagcaacagcggcagcaggcggcgagacgggcccgcacccagggcccccggcccagccgccgccggccccccggcgcgcccgcgcccccccggggccccaggggcagagaaaggcacaggcgccgcggggaggggaccagccggcggcccggcgccgccgagggaagcggggggcgcgcggggccccgggaggccgcagagcgcgggcccccgcggggccgggcaggacacgcccgccgcgccgccggcccgcacgcgcccccgccgccacacgcaaagggggacagacaccacggaaagacacagcggacgcagagccccggagaggcggggaggaaaggcggaggacaagccaccgagggccagggaggcacccccggggagagggggaggggagcaaggggcggaaacccaggacggaaagggagcggagagggaccacagcgcaaggcccagagagaggcggaagacgcagacccaggccacccaggggcgacacacgaccagggaca

SEQ ID NO: 465 - RNA, 633 nt, Homo sapiens
gagaacaaaacagccagcacgaccacgcgcacagaaaccaacgcaggacaaaagaaaaaacaaaacaccaggcgaagaagaaacagaaaccaacacacgaacaagagggaaaagaagaaggggaaggaagagcggaaacggagagcaaaaggccaaggaagacggccaaaaaaaaaaaaaacccgaaagacagccaagaaacaacacaaaacccagcaaaacccaaaccagaaacggaagaggaggggggccacaccagaagggcaggcaagcgaacaaacaaagccaacccaagcagcgccgcccgcccaggccagagggccccgagaagaagacagaagacgggagaagagggaagaaagacccggggccccgcaaaggggaaaggagcacaggaaaggcgagcacccaaaagaaaagaacaaaagcaaagacaacaaacaaaacagaaaaaaaaaaaagaaccagaagacaagcccacaacccaaccaaaagagaggcagaaaccagaacagaaaggggaaaggaaagacgaaaccaacccaggggggggcgcagacccgagaaacacaaaaggcaagaaaaagaaaacaacaccaaggggaaaaaaggagaaaaaagccaccggggcag

SEQ ID NO: 466 - RNA, 16837 nt, Homo sapiens
ggcaaagagaggagcgaggaagggaaagggagacggagagaaacacgagaaaaaaaggggaagaaaaagaggagcaaaaaccagaacaggggaagaacaaaaaagagacgccaacaggagagaggcagcaaaaacaaggaaaaaacagaaaaagggaaaaagaaaggcaaaaagagaacaaggagaaggggggacagcacaaagacacaaagaacagggaaaacgggacggcgcaaaggggagaggggggggggggggagaagagacaggccggaaaagaacccaagagaggagagaccacagcgaaaaaaaaggaaagaaaacgccgcggccgcccccaccaccacggacaaacgcgacacccaaccagccgacaaacaagcgaaagaagaaaacaggaagaccaccggacaaagaagacacaacaaagaaccccgaccagcacaccacgcaaggaggcggcgccaaaaacacacacagacacgaggaaccgaaaacaagcgcagaacaccgacacgaaaaaggaagacaaagagaaagaacacacacacaagaaaagaagccaaaggaaaaaagaaaacaaaaaaaagccacagcccaaaggaagacaacaccaacaaaagagcaaggaaagagaggaaaaaggaacccaaaaccaaaccagggagaaaagacgaaaagagaagcccccggcaagcgaacagagcaaagagccaaaaacacaaagcagcgcacgcgaagggcaagggggggagagacagagccaaggagagaccagacgaggagaaggacagcagggaaaaagcaagcacgaacaaacaagaaaagggaaggaaacgacaaaaaagaagcacacaacaaaaaaagcacaggaacacaaaaaacccaaaaaaaaaacaaaagagcgaaaccagacaccaaccacacaaaaccaacagaagaacaagaaacacaaaaaaccgcaaaaaaaaaaaagccgagacagagcgccgcacccaagcggaggaaggcgcaacgggccacgcaaccccgcccccgggcaggaaacccgcccagccccgagagcgggaacagggggccaccacaccggcaagaagggaacagggcaccccgggccaggcggccgaacccaacccggacaccgcccagcccccaaaggcgggaaacaggcggagccaccacacccagccgagcaaaaagaggaaagagaggagaagggccaggaaagaagaaaagacaaaaccccacacgaccaggccaaaacacaaacaggacagggcccccgccacaaagagcaggaaagccagcaagaaccagaagaagagcgcccgagaccaggagaaacagaaagagaacaaagaaccaacaacagaaaggcaaggaggaaaaccgcaccagaacagaacaacacaacgcacggaacgggaacgaagaaagagagaaagagacaaacaaaggacgaaggaggggggcggaaagaaagacaacaaaacaagacaaagaagacaagaacccaaaaaagagaaaccccaccagcggcagagaaaaaaaccacaagaacgaaaaagaaaagaaaagaaaaagaacagagggaaccaagccaacagcagcgacaacgaagcacaaaagacaaagaaaggcaccgaaagacgcaaaagacaaacgcgagaccagaaagaagcggagggaaccagcccagggcaaagaaggaaagcacaaaagaggggagagaaaggggccccgacgccagcagagccagcaccagcaaacaccagccaaccacaaaccgcaccacgaaggacgccaggagaaccccgaaaaggaaaaaagaaacccaggggaacagaaacccaacggaccagacacgagaacgggcgcagaccagcgcacccaccgacccgcacaggggagggcaggccggcaggggggcaaggggaggaccccaccaaacaccgcgccccaggccccaagagaacagaaaacacagaaagaagacgcagcagcaaaaagggacacacccgggcagcccaaagaaagcaccacagccacaaacacaacacggaagaaggaaaacacacacagggcaagaacagaaaccgcacaacaagacggcaggcagcaacaggaggaaagccacacccaacacggcaaaagaaaaaaaacgaaaaggccagaaacaaggcacagggaaagaacacaaaacagacaggccacgggaaccacaccaaaaaacaccaggagggaaagccccgacagaaagacacgaaaaggaagagaggcgcgacccaggcggccaaacccggcaagccaccccaccggccaaaggcgagaacaggcaaaaccaccacacgccagaaccacgagaaaagcaccaccacagagcaccaggcaccaggcagcgcgaaggacgacccaaagaaaccacaccccccacccccagccggaaccaccaacgcccaccagagacacgagaggacagccggcccaggcggaggcaaggcacgaccggccaccgcaaccccgccccgggaaagcgacccgcccagccccgagagcgggaacaggcaggccaccagcccggccaagaaaagagaggccaagaaaagagagggcaggcggcggaacccgacccagggaccaccgccggcccccaaaggcgagaaaggcagagccacgcacccagccagagacacagccccacaagggagaagagcaaggcagacggcacacaacaaagaccccagccaccgggcgcaaagacaagaaacaaggggaaaaaccaggaaacaacacaacgaccagaggacacgaacaaggcaggaaaggcgaagccacacagcaaaagaacccgagaccgggaaaaaacaaaagaagaagacacaccacaggcgcgaggcccaggaaaccaaacagcagaaggcgaaggggaagcaaggcaccccaaaagccaacaggagagagagagagagcagaagggaaacgacacaaaccacagaccaaagaaccacacacacaagaacagcaggggaaaacacccaaaccaacacccccaccagcccccgacagggggaacaacgagagaaaggggggacacagagacaaaccaacaggcaaaaaaagggaagcaaaccgaaagagccccagacagggcaccgccccaggcagaggcagggcagaaaaggcacgcagcccaaaccgggccaagaccccgcccagccccgagagcaggacacaaggcagccaccacaccaagagggagagaggggggccaggcccaggcggcgaaccggggccagcaacaccgcccagcccccaaaggcaggagcaggaagagccacggcccagccgaccaccaacaggaacaccaccaacaggagaggaccccccccacacccaccagcacgacccgaccgaaaaagccacaaggggagaaagccagggagcacggaaggaggagcaggaaccgggggccacgccggaaagcacaaaccaaagccaaacgccaaacagaaggcagagggagcccagacggcaaaccccgcagaggaaggaaaaccacgggggccaccaacccgggaagagcaagacccacacaggcgagggccaaggcaacacaaaaacggggagcccaagcgagcaccaagccagagcaagcaggcagaaagcaaccaggacagggaagggagagaaggggcagaacacgcaagaaggccggcaccaagaagagaacccccacgaggcgggccgcaaaaaagagggcaaagaagacaacgggcccgaagccaggcaggcgcagccagcacaccagaagggaccaagcggaaacgaagcaggagggagccccagcgcgccgaagcggcaggaggcaggggcaagcggaccacggaagaagcacagacgaacaaagcagaacgaaagcgggacacgcaaacaaaaagacaccaacaagagcaaaagaccgcccaacacgagcaagaccgaagaccacaggaaagccccaaaagcgagcagaaaggggccgaccacaaagaacgacgacaaagacgcgagaagcgaggagacagccaccagcgagcccggaggcaggggcaaccagcgcgcaacccgccccgcacaagagacccgccagcccccgagagcgggacacaggcacagccaccacgcccccaacaagggagacagggcaccagggccaggaggccaaacccggcccaaggacgccgcccggcccccaaaggcgagaacagaggagccacgcacccagccgagaaacgcaacacaaaagcagccaaccaagggaagccagcacaaaacaagacaggcagcacaaagcaagaccccccaaggaggccacgcaagcaggcaagacccagaaggaaaaaacgggaaaggcaccgcggccagacagaggaaaggccaacccaccagaagagcaaggcaacaagccaagaagagcgcaacaaaggaacagaacaaaaggagagaaagaagccccacacaaaagacaagggccgcgaaggagacacgacagagaaaggaaaccgcaccaggagcacccagacagaaaggcaagggaagggcgcaaagagaagcacagcaagggaaggccgagaagggccggggggaacaaacagggaaaagaaaaggaaagaaaagagaaagggaaaagaaagggaaagaaaaggggaaaaacgaaaagggggaaaaaagaaaaggggggaaaaacagagaagcggcccaagaaaaggaagacccagaaagagaggaggagcaaaccaaaaggagaacagaggagccacacaccaggccccgggagacaacacgaccaaacaacgggaaacgccaggaacgaaggaggaagaaaccaagccaggcaaggacaagaggagggccaaacaacgggccaggcgcccggcacacagacccccagagcagcaaaagaggaaccaaaaaaccaacacaaaggaccaaaacgcgacaaccacaaggggcggcgcgcaaccgaggacacaaggcaagaagaccaacaagaggcaagcaaaacccacacagacgcgcgaccccagaggagaacacaggccaagaaaaaaccaaccggacccaggcacgggagcaggaacgggggagccaagaacgagagagaccgcagaaaaaaaaaaagcacgaacacacaaaaagagacggggccaaaaagccaccggagaaacaggcaggaaagaaggacacagaagcggacaaagcagaaacaggcagggaggaaccgagcaggacgcaggaccgccaacgagaggggaggaacccacacagacgagcagcaaccccaggcaaagcgaaacgggagcccagggggacaagacaaaagaacccacgagacccacaaaaggacgccaccaaacgacaagcaacgaacaaacagagcaccgacgccacgccggaaaaacccacaccaggagcaggccacaggaaggaggcgaggcagcaaaggggccaccaccacagcaccagccagggagaagagcacacacaggaaaaaaaggacgcacgccacggcacgaggaaccccccccgcgcccaggaaggaccccagagcacgaacagcaaggacaacagggcagagaccagaggcacaaaaacacagagaaaaacaagaaaagagagacaacacacaacacacacaccacaaaacaaacaaaagcaaagaaaaccacacaaccacccacgaccacgccaagcaaaaagccacccaacggagcaaggaagagcaggcaaaagagcgagcgagcacacaacaacaagaggaaacgggggccgacaaaccaggggaaacccaaaaagggcaagaccagagaaaaccccgagcacaaagcccaggggagaaagcgcggcggggaagacaccccccaaggaaaaaagagccggacaaagacggcggaagggccaggcagaaaggcacccggccggggcccaagaagcagccagagaaggaacccaaagccaacgcgcaggaaaagccgacagagggaaacagccggggagcagggacggggaccggggaccgaacccgaccggaaaaccaagggaagcgaaaaaaaagccaccccgccgccaacccccgaacagcaacaacagagggggaggaacacaaagcaacacacccacaccccgagaaacaaaagcccaaagcacaccccgcgaccaccgcggagaacccaaggccagcagcgaagacccagccaagaccggggaaaaacaaccggaaaccaaacacgaagcacaacggacacaagcaacgcgaaaaacgcaaaaaacgcaaacgggagagagccacaagcccgagggcagcacggccgcgccagggaaggcaagcccagcacacagcgcagaaaaaagaacagccggcgcggaaacaaaaaaagcgcgccacacaagaaggagcagggacaacaggcacgccaaccagccccggccaaggaccccaccccagcccaagaggagcgagacacaggcaggccacacaccggcaacagagaggcagggccacaggcccaagcgacgaacccgggcaaggaccccgcggcccaaaggcgggaacgggcagagccacggcccagccggcagaaaggcagagaccaaaaccagagcagcccacacaagcacaccccgggcaaagggccaaagcccagggccagccggcaaaaacagaacacgcccacagaggggaaagacccagaggggaacggagggaaagacgcaggggggcccaggggaccgggaacaacccaccagcagggcgcgaacagccacaaggcgcccggcgagcacacagcagagccaggggggagagcagcagcccacccgccacggcgccagagaaaccccaggcaacagagcccggggaggcaggacaggccccgccaaagaaaagaggggggaagcgcgccacccaacaccaggagaaaacagagcaaggacaaggcacacgggccagcagcgggaaaggagggcaaggaaaacgacccacagcggggagagggggggggggggcgacggaccccaggaacgaccaccaagagcgggaaccgggacagcaggcgaagggccagggggaaagcaaagcggcggcacaccaccagaagcggaagccgagagcagggaaggaacaaaaaggcccagaaaaagaacaaccaacagcccacacagcgaaaccccaggccaccggaagagcaccgaaagaaaaccaaagacacacggacaaggaggaaggcaggcaagccaagacagaaaaccgcagggcagagagcggaaacacgagcccccagaaaaaggcaagacccaccagaaccagaagcagagccacgcgccgacggaggaaccgaaccgccccgccagaaaccccacccccagccaaaaaaccggccaaccacccgagaaccaaaagccgacaacaacagacaacagacccacaccacggacgaccggcacccacggcaccaaggccaaagccaaagcaccaaggcaccaagcgaaaacacagaagaaaaaacccaaaggccccacagaaagaaaagacaaaaaaagccaaggaacaaaagaaggaagcaccaaacagaaggacaaccaaaacaacaaacaagagaacacacgggcaaaaaggaacggaagacaaaaagcaacaccaaaaggcacaaccgaacacgaaaaaaaaccaacgcacagcaagcaagaggacaaacaagaaaaaacaccagacaccggaaagaagaagcagcaccaaccagagagcaaaagagaacccggcaacgagagaagccaaaaggcacaaaaagccaccccgacgcgggcaagaagagcaaaaaacggagagccacgcaacgacccaagcaaagaacacaaaaagccagcaacagcaaaagaagaaaacacagccgggaccaaacccgcccgaccgggcacacgacccgcgcgagcgagacagaaacgagaagaacacacacagaaaaaaaggcaaaagacaccaaaaagggaagggaccaacacagaaccacagagcaaaaaagaaaccagcacccaccccaggcacaacccacccacccgggcccacccccgcaaaccgcgggagaccaagccagcccaccccacgacggcaaaacaggaaaaacgggccaaaacagcaccagacacgcagccagagaaggagaacaagccaaaacgcaagcaaagaacacgggcacaagaagcagaggcaaacaaaagcaaaacccacaaaggaaaacacaaacaaaagcagacaagcggcccacaacacaagccaagcaaaccagagaacagagaaaacacacaccaaggaggcggacggggggacgacccccggacaagcagacagagccccacacccaaagaaggccacagacacagacagagcaacgcaaacagcggaccggcaaaacgaaaaccaggaacagagaggaaaaaaagcggaaaaaaacgccgcaaggggaaaggcaaaacggaaggggaacaagggcacgggcaaaaacaaacggacccacgagccagaaaaaaccgagagaacagacgcacacagaaaacagcaagaacccaaaaacccgaacacggcaccaacaaaggcccccagaaaggcaaaaaaagaaaaaaacccacacaaacacaaaaaaaaaaaacacacgaaacaagaaaaaggcgaggaagagaaaggacaagaagggaaaagaggacaacgcaaaggagagcaacaaggaccaaaaaaacaaacaaggcagaacaacagcagaaacagccacagaaggcgaacaacgccgggaaaaacgaaggaaaccacagaaagcaagaaaaaaacaaacaaacaagcaaacacacaaacaagaaaaaccaagaagagagaaaagaagaaaaacaaaacagagaggcaaccgcccggacaccgggcaaaaaaaaaagggagaccagggaccacgagccccacgcaaggagagaacaaacaaacaacaaacagccacccagagaacaaacaaacacaaccaggaggaaaaccaagaaagaagagaaaaaaccaaccccagaagcaaagaaaacagcaccaaaccaaggccccaaacaaggacacaggaaggcaaagcagaaacgaaggcgcccaaacagcccaaacccgagaaggaggcaaaccgggccagccagcccaggaaaaaacaacaagcaaagagaaaaaacaggcacaaacaacaagaaacagcaaagaagaaacaaacaacacaagaacaagaccagagcgcagcggacaaaagagaccagggaagaaaaggaggccccaccaccaccaaaagaaacgcaagaagggcacacagcagcaaaggccgggagaaagacagcgggcgggaaccacgagaagaacaagaaagaaaaaagccaccaagagcaccaggaaaacaaagaaaaacaggaaacacaccacgagaccaaacaaaagccaaagaaacaaaagaagaaaaagccaaccacacaaacgaagacacaagcaagcaaacccaagggagagacgacccaggacaaaaaaccacgcacaaaaaaaaaaacccacggcacagagaccacagaacaaccaaagaagaaaacagagaacaaagccacaaaaccacacacgcaccccaaaaaacaaccaaaaccaagcacaggaaagaaggcggcacaaaaagcaagagcacggaagcagaggaaaacaaacagagcaggaacacaccaaaacaaaagcagagcaaacaaaaaggagaaaaaaccgccacagaaaacagggaagacaggaacaagaaaaaaaaaaaaagggaagacagaaaccagcaggaaagacgggaacaaaaacggagccaaaccaggacacgggcgcacccccaacgaccaggcaagcaagcagacacaaaacaaagcaaagggaccgaacagcaaggaaaacaaaaaagggaggacagacggccagacaaagaaaagaaaaaaaacccaaacacagaagggagaacggcacaacaagagccaaaagccagaaaccagcaccgaaccaacggggaaagaccccgaaaaacaaagcggggaaaaaaacaacaaggcacagaaaaagccaacgcaaaaaagaaaaacaagcagccaaagaccccgaaacaaaaaaaaaaacaggaaaaaacacagaaggcaacagacgcacaccagcacacaaaggaaggaagaagcaaacaaaagcaaaacacaacaaacgaaaccaaaaacaacacaaaccaggaacgacaagaaacaaaaaaggaggaaaaaaacccaaaaacaaggcaaaaccagaccaacaaacacaaagaccgaaacacagggaaaaagaaaaaaacagaaccaaccaaacagaaacgagggcaaagaacgccgacggaacgagccaacaaaacgcgaagcggaggaaaacagacggagcgacgagaaggcgggccacggcacagagcaacaccgggcagaaggcagagcagcacaaggaccaaaaaaaccacaaaaaccccagacaagaacccaaggggccccaaaacagggaagaaggccacagaggacccaaaaaacacaagggcaagccaaacagggaaaaacgcaaacaaaacaagaaaaaagaaaggaagagagcgaaacccaaaagcaaccacaacgaaaccggaaccaagcagaggaaagaagcgcccaaaaccgaaccaaaaaaagggaacaaagaaacaacgagcacagaaaaaggcgagcagaccacagaaaaaggagaaccaaaaacagcaaagcagagacaaggacaaggaaggaaacagagagaaaacccgcaagaaaccgaaagggggacccagacagagagggagaacaacaccacaacaccccccgcccaaccacaagaaacagaagaaaagaaagaaaaaggcagacaaagcaagccgaccaaaagaacgaaaaagacgaaaaaaagcaggcccgaaacgcaaaagacaaacagaaaaagaagaaaacagaggccagaacaaagaaaggaaacagaaacagaccaaaaaaaaaagagagcaaaacaaccacaagcacacaggacaaggaaagcaaagcagaaaaaaagcaaagacagaaagacaaacgcaagggaagcaaaaaaacaggggcaaaagacaccggaagggacaggacgacaacacgaaccaggaaggcgcagagcacacagaaaaccaaaaagcgaccgaaagagaacccacaacaaagcgagaaccggaaccgaaccacaaggaagaaggagggcccgagggccccagcggggagaggcccgagcagcacacggagaacccagagcacaaagcagcgggcagagaggggaggccaggacgcagcggaaacccgccgggcagcgggacacgcggccaggaaggaaacacagccacgaagggcacacaagaggcggggaagaacgggccaaacgacgcagcgagaacgcgagaaagcacggaacccggccggggccggagcaggccccaaacccggaaacccaccaagggccggaaagaaaaacggacgcacagcgacacgcgagcccagggagagcagggccccaggaagccccgggaagcggcgcccaggagggggcggcgcgcgggggcgcacgcgcgcagagcgaacggagggcggccggaggcgggcgcgagggcgggcgaggcgcccgcgaggcggcggcgggggcgggccacgggggagcgcggcccggggaaggcgcgcggcgccgccagcggccccggccccgcccccggccgccaagaacgagccgccggggcggggccgcgggaggcgggcgggcggggaggcggaagacgagcaagagggagggggcgccgaacggaggcgggagccgccgccccacacccacaggcccgagggccgccgccgccgcccgaccgcgcccgcgccaccgcgccccgggcgaggccgagggggggggacgacaccgcagcgccgccggggccgcgcccccgcgaagcccccgcggggcgggccggccggccgcacccccggccggggccccggcgagaaagcgcaggcgggcggggaggcgggagcaggagcccgcggccggccagccgaagaggggcggcacccccgggagcgcccgccccccggcgacggagggaaaccggggcggcccgggcggcgggcggggcggagcggcccggggcggacggcccggggcagcgggcggcggcggcgggccggggcgggccggccgggccgccccggcggggcagccgcacggcgccccccgccgcccgcgggccggcggaggggggcagggccggggcgggaggggggagggggcggcggcgcgggcggccgcgcccgggacccgcgcagacccgccgggccgacccgaaggcggggggcggacggcgaacacaaggcccccggggagaggacggcgaggcccggcccccggggcccggggcgcgcgcggggcgggggccgggaggaaagccccgagggcgagagaaagcgccccagaacaaagcggcggcggcggcggcacaggggcaggccgcgggccgggagggggcgcgcccacgaggaccgcgcgccagcgggcggcgggcggggcgggagcccgcggccccaaacgacgcgcgaggggggcggaggggcgccgagacggcgcggccgggcgccacccccgcccgcggggcgagcccgcggggcagcccggggcggggcccgcaacccccgccgggccccggaggaggccgcagcggcccagccgcggcgggagccgccgcgcccggccgcgcgggaggggcgcgggagggccagcccggccggcgggagcggcgccccgccgccagccgcggggcgggcgcacggggggagggcgggggacaggcggcgacgcgcgccgccgccgagcccggcaggcccgggccgcggcgacgggcaccgcggccgcggagcccccgcccccgggccgggccgggggggcgggggacacaaaggaggggcggcgcgcccgcgccccgccgcaccgggcccggcgccgccggcgccgcgcggcgccgccgggaaacgggggggggggccgcgccggcggggccgaccgacccgccgcccccggcggcacgcggagaacgcagggccgcgccccccggcgacaggcgccggcccgggcccagagcgggcgggcacgcagccggggccgcccggccgccaaacgcagcaaagggaaaaggaacgaaaaaggcaggccgcggcaaacaccaaaagagaaaaaacggcagccacaggaccacagcagggagaaacaaccacccggcgcagccacgaggcgagggggagggggggaagaaagcggggcgcccacggagcgacagggagcgggagcgcgacaaacaagaaggagcaagacagacgaagcaaggacaacaccacgacaacgaaaagggcaaaccgcagagccgaccacccacaaaggaggaaaagcgaggaggggaaaaagcaaaaagaggacggggagaagagcaaaaagacccacccaccagcaacacgggaccaacgcaccagagccgagaaacgcgaaaaggaagcggaagggaaggacgacgaaccaaaaacaaacgcaaaaggaaaaaaggaggcagagagaaaagagggccagacaagacccgaaaaacaaccaaagacggagcaaaaggagaaaaacaggaaaaccgacaggaaacggcagcagacgaaaaaaagaccccaagggggaaaagagaaaaccgagagaagaaaacaggaaacgcgcacaagacgaaacacgaaggagcgaacagaagaacacaacaagagcaagggaagccagaagaggaggaaaaggccacgggaggaagacccaaaaggacacaggacaaagccaaagccaaaaagccaagcagccaggccaggcaaccagggagaggccagccaggaagagccaccacccaggcagggaggggagagcccgaaagaacaaggcaaaaacggcaaaggacccaacgagaaaaaacaacccccaagggaagcgaagaggaaggagaggagggaacaaacacaaaagcaggaaaaaagagaacacaccgaaaacgaagaggaccagcagaaaagcaaaggcacaggcaggaggaaggcacacgcaggaaggcacgagcaagggacagcgcccgggaagccaaggggcaaaggcagggccgcgaggaggcgcaagggcacaggcagaaggaagagaagcacacgcccaaggccccggcaaagaagagacaccaaaacaagccaagcaagaaagggaaagggcagcccgaggcaaggcacacaagaagaagagggcaaacagcaaaacgaggggccgcacccaaagaagaacaaggacaggcgagagaacgccggcacgaggacagccgagcacaaaggcaaggcaggaggagacacgcaagagcacaaagacgcagcgagaacccagccggccgcgcccaacaaacgccgacgaacacgcaggaggcagggcaccagcgggaacgcggcaaaccagcaaaacgacgggaggaaaagcgagaaaagaagggaaaccaaacccccacacagggggacgggcaagcggcgaggagcacgcccggccggagggggggaggaccagaagagaaaaaaaaacgaagacgacccacgaaagacaagaacagaaaaaaagaaaaggaacggaaaacacgcgcacaaaaacacacgggggcggcagaggcagaaaacggcaaggagaaggcgaagagcgaagacaaacaacgaaccgagacacgaaagagagaacgccggagaggaccaggaaacaacaaaagaaaggccaaaaccaagaaaaagagagaagccgccgaaagcaaggaaagagagaagcaggaaagggggggacaagcaaagcaagaccagaccaaacagagaacgaaggaacgaaagcgaacagccgagcaggaaaagcaaaagaccaaggcccagacgcagcacgcaacaaaaaaagggagagaaaaagaacaaagcaaaagagaacagaaagaggacacccccaaagccaagaggcagcgggggggagacagaacaacaagcgagaacaagcccaccccacgaagccagacggcaacaggaaggaccaggcagacaaagcacgaagggaaacaagaagggcagaggacccagcacgcccccccagggccagccaggaggagaaaaggggaaccgaaaaagaaaaaggaccaagggaaaagggcccaagcgaagacaggcaaacgaggaaagaaaggagaaagcagaggagaaaagaggcacagaaaagaaaaaacccaaacacaggagaccacccaaaaacagaaacagcaaaaaagcgaagcaacaaaagcacccaaggcaagaaaaaggaacagccggaccgaaagaaaggaagaacacacggaggagaaaacaaaacaggaggaaagaacaggaaaaaaggaaacaaagacaagcagagcaagcgaagaaggagaccaaaaggcggaaggacaaacgggccaaacagcaaaaagccggcggacacggggccacaccaaaccagcacggggaggcgaggcagacggaaccgaggcaggagcgagaccaaccggccgacagggaaacgcgccacaaaaaaaaaaaaagccggggcagggcggcaccgaacccagcaccggaggcgaggcaggagaacaccgaaccgggaggggaggcaggagcgagaccgccacgcacccagccgggcgcaagaccaagacaaacgcaaaaaaaaaaaaaaaaaaaaaaaaaaagcaaaacagcaggcggaggcaaaaggggcggggagaacacagcaaaaaaacggaacagggaaggaagccgcggagacaaaacaaaagaagcaaaagaaaacaaagacaaaggcccccagagacgaaacagacaggcagaacaagggcgaacgagaaaacaaaaacaagaaaaaggaggggggggaggacgggcaagggaaaggaagcgagcggcagaaggaggcaaaacacggcaaagacaggcagcaacagccaacaaaaagccagaagagaaaaaagacacagaaagccagaaacagagaggagcaaggaaaggcccaccgaccgagaaaaaacaacgacccgcaaaagcaaccgaaggcgagacaagaggcaggcaggaaaaaagccaacaggaggggaaaaaagggcaacggcggcagacaaccaagccaaggaaagaaagcacaacaaggaacaaagcgcgcaaagggggaacgaaaacgagaccaacaggcagaccgcaacacaagccagacgggcccgaggaagacacacgacccgacaaaagcagccgcaacccggagaacaaccaggcacaaaagaagaaagaacacgaagacaggcaaggcaacagagaaaagagccccaacgagcagaaaggaaggagagccaacgcacagagccagagggaggaaaaagacacagcccacgagaccagaacagcaggggagagacacaaaagcgaaaaagagcgccgaaacacaagggaagaaagggcaaggaaaagcacaaccagaaaagacccaagaaaaggaagaagcaacaccagaagaaacacagagacagaacagagaggccagcgaacagggcggcggagcagcgcaaagaaaaaaaaaacgcaaaagcgaagaaagccagaacgagaaagaaaaaaaaccaaggaacgcagaggcgggcacacagaggcaaaggacaaaaaggggaagggagacaag

SEQ ID NO: 467 - RNA, 16697 nt, Homo sapiens
acagcaaaacaggaaaagagagaaaaccaaaaaaaggaggcgagcccaaccccaaaaaccaacacgacaagagaaacaagcaaaacccccgcacaagaaaagcccccgaacaacagcaaaacaagggcgccgccgagcagccccgggggcaccacgagaggggcccagcaaaaaagcaagagacgacacacccaggccaaacacaggaggacgccaaagacaaagaaaaaccccacgaaccagcacaccaacaacccccccaagaaacaaaaggagaggaagaggaaaaagccaaaggaagaaaagaaaacacccgaaaagacacaaaccagagagaaaaacaaagaagccgcaggggaacagacaggaaagagagggcaggaaaaaaaacaccaccaggccagaagaaaaaacacaagacggcgcaagaccacagagcagaacaagagaggaaaaccaccgcaagaaccaaccgacaggacagggcgcaaccgcaaaaaaacaaaaaacaagaaagaaccggaagaaaccagcagaaagggagaaaagcaggaggaaagcacacaggaaacagcaacagaaggcacgccgaaaaacaaaagcagcacccaaagaggaaaaagcaggcagaggcccacagcacgaggccacgaaagcacggggcagaaaaaaaaaacacacacacacaagcccgggcagcaaggaacacaagacggaaacagaaaagggaagacgaaaacacaagcaaaacacagaagaaaagcccagagacccaggagaccagacccgaacccaaagaaagcacacaagaagccccgggcaagagaacggcgaggggaccaaggcaagccgaaagaaaagccgaggacagccgcccagacagggcaagccaggagagcccaggcccagcagcagaagggcacccggaagccgcggcgagaaaaacagaagaacaagccgcaagcacgggccccgaaagagccagccgccgcggacagagcagcagccgccaaaggcacgacacagcccaagcacagacaggggcgaagacaagaacgaaccaccaggccggaaccagggggccagaggaaaagccccccccccaacaacacacagaaaacaggcaaagcgaggaagaggaaaagaacaaagcgaccaaaaaacgaaacaccgggccagcccgaaagaagagccggcagcgaacacgcaccgagacccaagcacgccaacaggcggccaagagcagcacaaaacggcccagaaaagacaaagaggaagccagagcagagacaagaaaccccaaaccaccaaaaaagccgggaacagacaacgcccagaagcacacaaacaagagaacgaaaaaacagaagccgaacacagggacccggcgaaaggaagcggaacaacaaggcgcaaagaaggaaacccaaaggagaaacgaaaagccacagacagaaaacagccgaaacccaaaaaaaccggggacgaaggagacagaaaaaagagaagggaaaagacccacccagcgagacaacagaacacagaacagcggcacccaacagagaacaacccagaaaaaaaaaaggaaaaacagcagaaaacacaaagggaaaaaagacaacaagacagacagaccgcacgaaagcacaagacaaagcggacagccaccagccaaaaagagcccccacgggaaaaacacagaccggggaagccgaaacgcagaagaccaacccaaacagcccacgaaccagcagagaaagaaagaggcacagaaggaaacaacacggcgaaaaaaaagaacaaaaacagaacgaaaaaagcaagagcccccccaaaaacagaaaccaccaagggggcaaaaaaagacaaaagaaggcaaaaaccacaagcaccaaccaacagcaacagggaacgaaacaggaaagcaaaaccacagagcaaaagggaaggaacaaccacaagcagacaggacccaggacaagagaggaaaggagggggcagccacccccagaaccaaggaagaaaacgaaacaacaacaaagcgaacaacaacaaaaaaaaggaaagggagagccgggcaacaaaaacaggcccggcaaacaggggcagcaacgaagagaaacacgacagaagcaacaacgcagaaaaccaagggggaggagccccaaggggcgagcacaaacaaagggacgacacaagagagacgaaaaacccaggcagggcggggcaaaaaaaagccaaaaggagaaaaccccccagaccaaagagggcagaagaaacccaaaagaagaccgaagcaccgggccgccaagagcgaagaaaggaaaaacagcccacagaaaggcacacagacagacaaggaaggaaaagaaaacaaaaaaaaagaaaaaggcaaacccacaaaagggaaacgcaccgaaaaaagccgccaggcgggagccaggccgaacccagcacgggaggccaaggcaagccaacacgaggccaagaggagaccagcggccaacaggagaaacccgccacgaaaaaaaaaaaaagcgggggaggcaacgcccaacaccccaccaggaggcgaggcagagaagcgagcgggaggggagggcaggaaccaagagaccacgcacccagccgggcaacagaggagcccaccaaaaaaaaaaaaaaaaccgcaaaccaccacgacagacgcaggggaaaaaaaaaagcaaaaaacaacggccccccaggaaaacaagacgccaaaaggcacccccccaggcaagcccagagcgaaggagcagacaggaacccccgcccagacagaaaggcaacaaccccaagcacgaccacagcacaaagcccagacaaaacaacccaaaaaacaaccgcaggcaaggagaaacacaaacccagccacgcggccggcggccagaaaccagccacccaaaggccaagggcacccaaagacccccccagaaaggccaccaaaggacaggacgaaccaagccggcgcaggccgaaccagaaaaacaaaaagagcagaacagcggaagcaggagcccccaaggaaaaaccagaagacgcacccgcagacagacaagcaaccaaacagagaaggcaacagaaaagcaagaagaaaagcgaaaaaaagaaggacaccccacaggacagggaccaaacggcacacacaaaagaacgaaggagccaggcaaaaacggggagaggccaaccacaacagggacacaaaccggaccggaacaaaggaagcggaagggagaccggagaacccaacaaggaggaaaaccagaaaagacgccaagcgaggcagcaccaaaagagacagcaaacccacgaaaacacagacgcgggggggggcagcaacgcaagaagaaaaccaaaagcagacaagacgggaagccaacaaaaacaggcaaccacagacaaagaggaaagagggcacggacagggccaggaaccacaaacaaaccaggagacaagacgcgccaagagcccaagaaacagcaagccaacccggcggcgaaaaccgcccaaacacaaagaccgaaaggcagccacccccgaaagacccggacaggaagcaacccgaggcccaagccaggccaaggggcaggaagacgaaacgaggacagccgaaagagaaaggccacaaaaaaaaacagcgcgaagagggaaggggaagagccaggacgcaggccgggccgaaaaaggacagcggagagaggccagagaggagagacacaagaggcaccaagaaaacaacgccacaccaaaagcaggcccaggaacgacacagcagcaacccccgcgaaagacgaccccgggcagcagagcccccacaccacccaacggagcagaaggaggacacggggaacaagggcagcaggagaaggaggcggacagagaaggcaggaacgaggaacgcaggcaagagaagcccaggcaaacgacaaaagcagccaaaaaagcccagaaacaggccaaaagagagcaaacccaaaagcgcaccgcacaccaaaccaaaaacaaaacgggacgcgcgagagcaacggggaaaagagcaggagaagacaggggagaaaacgagagaaaaacacagggccgcgggacgggaagaaaaagggaaggagcaggagacagggaaggagaacagaggagccagcgaacaagacgaccaggagggcaaaaaaaaaggaaagccagggagcgcaaaaaacccagcccaacaaaaggcgggaacaaagaagaaagccaaaagggaaggaaaaacaaaacagcaagcaaagcagggcccaggcgggcagacaagacgaccaagcccacaaaaaacaagaagagccgcccgagccccccgccacacaaagggacaaacaaaaaaaagaaaaacagacaaccgaagaccgacagcgaaggaggccgcggaaaccgaggggacccagcagaaaacgaggacacacagaccagagacagccagggaccggacgacccagcaagaggaaacgccagagcaacaaaaccaccaagggagccaggccacagccgagacacaagcggaaagggaaacgaaccaagcaggccagccacaaaagaaaggacacgacgcccgagagggcaacagggacaggcagggggaccacggaaaaagaagcacgagaagcgaaccacaaagcagccaacgcggcaggcaccaggccacagcccagagcaaaagggcaagcgaagacaacaccaaaggcaaaagcaacacgcagagaaacacacaagacaaaggcgcccacagaaaaggagggaaaagaaaagaaacggaggagaaagacgggaccagaacacaacggggccggaagaaaagccggccgcacacacaaaaagaaaacccagcaacaaacaagaagaaagaagcaacacagcacagaaaggaaaaaaacaaaaaaaaaaaaaaaacacacaaaaagcaagaaaagagccagagggaacaccagaccccagaaggaacaaacgagaccaaagaacaaacaagcaagcacgagggaaaagaaacaaggcccaaggcacagcagaagacaaaagagaaaagagaaacaaaaagaaagaaaaacaacgagagaaagcaaagcaaaggagagaggaaggcacaccaaaaaaaaaacaaaacaaggcaagaaagaacggggcagcacaagggaaggggggggcccccgaaaaacagggccagagggacgaaacacagcacaagggcagcaagaaaagaaaacagcaaagccgaggcaagcaaagagggcaaaccgggcccaccccacagcaacacgggaaacaccagacccgaaaggcacccaggaaaaaaaaaccagacaacaagaagaacacaaaaaggaagacaggaagacgcaaagacaacgaaagaaagaaaccagaaccccagaaagaaaggaaagcaggagaagaaaaaagaaagcaccgaaaccccccacaacaccggaaggaacagcaggaacaggcagaacacaaacaccaagagcacgggaaagagaggggacccacagcgcaagcaagccaggcaaagggaccccaccccacaagaccaaaaggagcaaagaagggaagagaaaaaaagaaggagccaaacacaaggagaaaaaacgacagggccgagcaaagacaggagcccggcaagccgcgaacacaggcacccacaacgaaagaaaaaaacaccacgaggaaaggggaggccagagaagcaaaaaaccccaacaaagccgaaaaaaaggcaaaccacacaaaaagcaaacacgaccgcaagacaaaaaaaaaaagcaaaggagaagggccaaaaaaaaaaaagagcaaggaaaaccaaacaaaacaaaagacccagaggaaaggaacaggcaagaggaacagcagcaaaacagaccacaacaggagaacaaaaaaaaacaaaccgcgccaaccagaaggccagcagcgaaacaccggccaaagaggagaggcaaaagcaacagagaaagagcaacgaccaaacgggccagggacgaacaccccagaagccagagacagacgagcgcagcaagacggaacaaagcgagcagacaccagagaggcaaagaagagagaagcagggacccagaccgagggagagccaaaacccaacaacaaacagagaaccaaacaaccagcaacccgaacaaaaaaacggcaaaacccaccagaggccagagacaccaaaacaacccccaagaaaaacacccaaccgcaaccggacacacggaagaacaccaccagaaacccagccagaaaccgccacgcggaccccgcagcaaacccaagaaccccgaccacagcacccagaaagcagaacgcccgcccaaccacacccacccccggaagcaagcccaagggcgccgcccagggaaccacccaccacccacgaacggccagagggccgaaaacaaacgacgcaccacacaaaaaaccccagggacccagccacacagcagaaaacaaacccagagcacagccacaaagacggacggcgcaggccacagcaacccaggacaaccccgaacccacagggccccgcgaagcccggcccggcgcacggcaggcagccggaacagcccccacccccaaacaccaccacccagagcgcagggcaccgcggagccccagccacggcaaccagagcaacacagcacaccaaaaaggaccagaaacgaaagccccccccggaacagagcagcgacccagcacagcagagcgccggcagagagagggaccaggcaggcgaaagaagaaaccaaggcagcggccagcaaacgcagcaacgcgggcagcagccaacacccgagaccgcccagcgaaaagggacaaccagaccacccgccacaaagaaaaagaagacagggagaccgaacagaaggaacgcaaaaaaaagaagacagaaaggacccaacacaggaacaagaaaaaaacgaagcaaacaaggcacaaaggacaccacaaaacagacgagaagaccgcccacccaccgggaacagccaaagcggccagagggagagccccaagccaccgcccgcccaagcagaacacaggccccaggccccaaacggaaaccaacgcaccacgcaacaggagggccccacaggacccccaagagacaacccagagcgaccccccaggaaccccgcaaaggggccacagacccagaacaaacgaggacaaacccacagccccggagcccccccggagaagggagggccgggaagaccccagggcagagaacgaaccccgaggcgccaacggccaggcccaggggaggaggcccaggcagcagcagaacagagcaaaggagggccgccccccagacagccaagccgagaggcggcacacgacccccggaccgcaaggcgagcgccaggaacccgagcacaggggcaacccggacgacaaccaacagccccggaccccccaccccgccccgcccccccaccccccgcccccccccccaacaaaaagaaaagcagccaagcgaagagccaggccaggccggccaaggcgacagcaaacacgcaaaaacagaggaaccacaagccaaaaaaaaaaaaaaaagaaggacacaaagcagagagaaaccgacggcagacacaaaccaagggcgcgagcaaaaccgccgaccagagaaggcccgagcacacgaccccacccgcacgccgaccccacaccccgaggcccgcccaccacggggcacaggccgccggacggaggaggcagcgcacaccaggcaacccccagcacgcgagacccacaccccagcgcccaagaccacacgaccccaccccgacacaaaaaagaggaacggaccacaagccaaagcccgcaagggaccccaaacaaacgaacaaaaaaaaggcgggcacggggccacgccgaacccagcacgggaggccgagggggcagacaccgaggcaggagcgagaccagcccaacaggagaaaccccaccacaaaaaacaaaaagcgggcggggggagccgaacccagcaccaggaggcgaggaggagaagcgaaccgggaggcggaggggggagccgagacgcaccagcacccagccgggcaacgagaggaaacccgcccaaaaaaaaaaaaaaaaaaaaaaaaaaaacaaaaaaaacaacagaaaaaaaggaaaggaaaaaaaaaaccaaaacaggaccacaaaaaacagccaaaagaaaacgaagaagcagaagaagacccacagcgaagaggcaagggggggaaaaggcaaaaaaaaaagagaaaacggggcaggggaagggccccacccaaaccaggaaagggaacccaagggcaggggaaagggggccaggaagggaggcagggggggacccggaacaaaggccgcagggggaacgcccagaaagggggaaaaaaggcggcagccaggccgccccaccggggacccccacacaacgccccacgccgccagagggaagcagcagaggcccaccagagcagcgcccaaggaccagccaccagaaggaaccaaaaaaacacgagaaccagccaggacgaagcaaacaaacggacaagagacaagcaaaacggaaagaaagaagccgcacaaaaaacgaaccccaaacaacaggcaaaagaagaagcaacaggggagccagagacacgggcaaaccagccaggggccaaggagcacgaaaacagaagggagagcaaagcaaaaagcagacaaacggacagagcgaacggaagccgggaaggaaccaaacaggagaccgagccaagcgaagaggaacaaaagaaaaagacgaagcaagaaagaaacaaaaaaaaggaccacgagcaaacgcaaacaacagggcgccaagaaccgaaaagcagaaaaagggacacacgcaaaaaagaaagagccaggcaacccaccacaggccacagcacgcagaaacaaaaaggaaggggggcaacccgcacacaagcacagcaccaccaacagcaagcccaggccgcacaggaaccacaagcaaaccaaaacaaacggggacggagcaggagagccaagacaggggggccacaaaccacacaaaagaacaaacagaaaaggggcgacccacccaggccaccccaccccccccccggcccccccccaagacacaacaaagaaaaggccaaagaccccaagggaaaggcaaaaagaggaagagacacacccacaaacaaaagaagaaagacaagcgagaaggaaggcagcaaagccaagaagccaaaaacaggccccgcagcaaacaaccaacggacgcaaaggaaaagcaaagaaaaaaaaggcaccaggaacacaaagaaaaagaaaaaaaaagaagggaaaaacaaacaaagggagcaagacaggccggaagaagacaaaccagccacaacaccaagcaaagccaaccaaagcaagaccaaacccaacaaaagggagagagggaggaagcgcagaagaaaaggaagcagcagaagcagagaggaagaaaagaagcccccaaagaaaaggcaaaggaagcagagagagagaagcgcagaagacaagaagacagccaagacagagaaggggcacacaaacaaaggccaaagagaaacagccagggaagaagaggccacaggccacagcagaaaggaaaagaagccggccaaagccaaagaacaggcgacccgaaagggcaagggcagcaggacaaggaccaggcagacacgaaaaccgaagcgaagaaacaccaaacacgcgaccagaaaggaaaaaaaacggaggcaacacagacagcaagacgaaaagcccacaggagacccacgccaaagacccaaaaacagccagacaagcaccggcaccaagagccgaggagaacaaggaaaaggcggccgaacaacagcacgcagccagacaagagcacaaccaggccaaaagaaaacagaaggaagcgccacagacagaaacccaggacgaacaaagaaacaaaaaccggaaagggccaccacaagccaaagaacacagacaggaagaggcaaaagcaacaaacaggaaagaagaaggaccgacccaaggagacgaaggggcaagacccgagaggaaggaacgcagagcacgaaaaaacaagagaacagaaagaagggagccgaaaaggacgaagcgcaaccgaaaaaacgaaggagaggaggccaaggagagcaaagacaggacgagaggaaacccgggaagagcggaacagaaaggcaacaaaagaaaaaacaaaaccaagaaaagcagggcaggggagaggagaccaagaaacaagcacggggaaaagcacaaacagaagcagcacagagaaacaaaaggaagagcaacaacggacaaaacaggcaaaaaaacccacagccacccaacccagcaaccacaccgacagagaagccacaacagaagcaagaacccaccaacaaacaacaacgcaaaggccagaaaacagaagaaaaaagcagacagaaaagcagcacacaaagacacagaggaaaacaaacaagcaggggaaaccaaaacaacaggacaggaacacaggaggggccagaacgaaccgcaaaccaaggagccgaacacccacgacgaaacggccaccaacagagacaagaagcaggaggagcgcaaaggcaaggagaaagagggaaaaaaggccacacaaaggaagaagcagccagagcaaaagaagcccgcacaaagagacaaaaagcccacccagacaagcaacacgcaacaaggaagagaaacacaaggaacacacgggcagagaaaacagcagcaaaaccacaacacacgaagaaacacaaaagcaagaaccaccaaaagggaaaacgacccaaggaagaaagcagcaaacaaaccgacacaaaaaccccacgaaaaaaagcaacaaggaagacggacgacccaaagacagaaccagaacaccagacccagcaacccaacgggaaacccaaaggcaaaaacacaaacaaagaacagcacacaagcagcagcacacacaaagcaaagacaggaacaacccaaagcccacaagaaagaaagaaaagaaaagggacaaacaccaggaaacacacagccaaaaaaggaagagacagccgcagggacaggaggagcggaaaccaagcccagcaaacaacacaggaacagaaaaccaaacacgaagccacaaaggggagcgaacaagaaaacacaggacacagggaagggaacaacacacacggggcgcggggggggggcagggagggaagggagaggacaggaaaaacagcaagcagcgggcgaaccaggcaacgagaagggcagcaaacaccaggcacagacagaacaaacgcacaccgcacaaacccggaaccaacaaaaacacccacagccgcagagaggggggcacgaaagcaccaagaaaaagaaaaaaggagggccaaaaaagaagaaaccaagaagaaagaggcaaaaaagaaacaaaaacagcaagaacaaggcaccgccaccgagacccacacaagcacacaacgaagcagcaaaccgagacaaccccggagagaaaagagaagcagaaccccagcaaggacagccagccagaacacagcaagcccaagccccaccagaaaaagagaacagaggggaagggaaccagaaagagcagaagacaccaaaagcggaagaaaccaagccacagaccagaacagccaaagcaagaggcgggcacccaaccgggaaccgagaggggggggggaagagccgccagaagccacagacacgcccgcaaacccccggccgccccaccaccagcagcgaggccccaagagcccgcccggccacagccaggcccgccagacagcacaccagcaacgcgccgcaacacgaccgcaagcacgagaggcagaaaaggcccccccccaaaaaaagccacacaaacaaaccaaaaccggacaaggcaggcaaagaggaaagggcagacagaaaggggccacagcaacaaaacacggagagacaacacccagggccaagcaaaaggccaaaggaagaggaaagcaaaagaggacacagaggaagcaaggaaggacgagcaagcggcagaggggccacggcaggggaggggcagcccaggagcgggaaagccaggaacagaagcccagagccgagggaagccaccaagagggaagaaaagccacagaagaaaagcagcaccccgaggagagggcggaaccggaaaagggacaccacaccccagagcacaaagacaaggggacgccccccagacaggaggacaccaccccacacaagccccaaagggagggccacagagaaagccggacccgggaacacaaaaaaagcccccaggggcacagaaccagacgggagagacgaggaggaagggaagccaccacggacgaaacacgccagcaagccaagcagagggacaggcccagcagcgagacagacacgcgggacggaaaggcccaggaggaacggcccgcccacccccacccccgcacgggagcagcacaccaaacagaaggccagcaggcccagcccccgggagaggagccccaagaaaacacgcaggcaaaaaaagaagagacacaccagcagcaacaagagaagccggaggccacccagcaaacaacacagggacagaacaccaaaaccacagccagaaaagggagcaaacgagagaggacacaaagaagggaacaacaaacaccggggccacgagggggagggaaagaagggagaacaaaaaacaccacaggacagcaaccggggacaaaaaaccgacacgaaacccggaggcaagaccaaaaaaaccgcacagaccgaaccaaaagaaaaaaaaaaagaaaagaaaaaaaagaaaacaggcacgcagccagaagggcacacccaaacgcgagggaaggagcccgagcacagaacaaagaaagagggaagcagagcaggcgccgcaacagcccaacaagccaacaggcgcacaaaaaaaacgagccccgcccaaggacccaaaccggcagagacgacacaggccgcagcagagaacagccgggcacgggcgcgaaggcgaggcgccgacggcagggcccgcaaggcagaagcagaaggggagaacaggaaagagcaagccccagggggaaggaaggcaagagagaagaggcaggagaagaaaaagaacaccaaaaggaggaggagaacccacagcagagcaagggcaagacaagaacagcgggggagaggaaaggccaaacggccaggggcaagaaagagccaagggagccagagaagccaggaacgcaaagcaacaggaaaaacgaaagcgacaggaccaagcaaaagggaaaggaggccagcaccccccacccaagcccaggaaacagaaaagccgccgggggggaccagccgaacccagcacgggaggcagagggggggacacgaggcaggagcgagaccagccggccaacagggaacccagccacaaaaaaaaaaaagcgagggggggggcaccgaacccagcaccgggaggcgaggcaggagaacgcgaacccaggagaggagggcaggagccgagacgcaccacgcacccagccggggacaagaggagacccaccaaaaaaaaaaaaaaaaagaaagaaaagcccacaggcaagcagagaaggccaacaaagcggaaagcaagcaaccggcggaaagaaacaggcaacaacaccagaacaagggagagcaaacgacccaggaggggcagcggcaaagccagcagaccaggcacaagggccgaacaacaacaccaagacgcaaaaaagccacaggacgccccagaaaaaggaaaaacacgcaaagaacaaaacgccaaaggcccacacacagaagcccaccaaaaaagagaaccacaacccccaaaccccaagaaaaaaaaacaaagaaaaacgcagaaaagaaaaaaaacgaaacaaaggcaaacacaaagaacgcaaacccaccacaaaggaacgcaaaacgcgaaaccaaacacggccaaacacaaagaacgaaaagagaagccagagccaaaaccacagagagcaaaccaccaggggacaacgcaccaagggaaggcaggaaaaccaacaaaaagagcaaaaaaaagcacaaggcaaaaagacaaaaaacaaagacacaaaaacagaacaaaacagcgcaaagccagacaaaaagccaggcacacgagaccacagggaccaccccaaaaaaaagaaaaaaaaaacagcggccaagcaaagccagggcaaacagaaacggcagcaggaagagggaaggcacaaagggagacacaaaaagacgaggaggagaggagacgaagggaaagacaggcgagcagagcacccagagaccgcaaaacagacaccgaaagaaacgggaacaaacccacagggaagggggagaaaccaaaagcagaagagccaaacccggacaaggaagaaaagacaaaaaaaaaaaaaaggaacacaaagaacagccgaccagaggaacacagaaagagggaaaaggacacaaaaaccgaaaccgcccacaagacaaagagaagggggaaaagaagcaagcgacccaagaacgggcgacgcaagaggaagggaacccagcgcagggaagcacaccgaggagggcagaggcgccagggcagagcccagcggccgccccaccggcgcgaaacagagcacagcagaacggccagacgcagagacgaaaagcaaccagcccgaaacaggcggagaaggggccagggaaaaaaaagccccggcaaagcgagaccaacaggggacagaggacacaagaaaagcagaacaggcagaaaacaagccaccgacaccacgggccagcggaccaggcgacacaaaaacccacaggacacaaaagcgaacacacccaaaacaaaaccaaacaaaacaaccaaccaaaaaagaaaaaaaacaggcacagaacagcaagggagaagaaaaacaaaccagaaagcaccagccgcggaacaagggaaacggcaggaaaaaccccaaaacgagagcaaaccccgccagaagagagacgacaaaaaagaaagaagcagccaaccccccagcaaaagaagaaaaccgccgcagccaaacaaacaggcaaaccccaaaaaaaacgccaaacaaggaggaagcagaagggaaaaaggggaaggaaaaaggacaagaaaaacaagccagcaacaagacacaagcaaaagaccaaaaaacacaaaggaaagaaccaacaggaaaggaacgaaagaaaaaaaacagccaggaagaacagacaagcacgggcaaacgaaaacaagcacccacggacggggagggaaagaagagaagaaaggacagcggcaaccaacagacaggaaacagagaaacaaccagcaggaaggcagaggccggaccccagggccgccacccaggagcagaaagccgagcggggcacacgacacaaacaagacccacccaaaccccgcagggggcccaggacaagggaggggagggacaacccggaacaaccccccccccacccggagaaggggaggcggcccacgaacggaaagagggaagccccaggaggcgacaggaacacggaggcaaccggcccagacgacaggaacacacaccgcccaaacacccaaccagaccagcaaaaagaaagaagacacagcaacaggaggaccgagaacaaaaaagcccaagaaacggaagagccaaaagcggaggggccaggcaaaaccgaaagagggcgcagggcaggaaagaaggcaaaaaccagcaacccacacgggaaaaccaagagaaacaacaggacacggaaagcagaccacagcaggcaagcacagggaaaagagaaacaacaagaaggcagaggccgggccagcagagacacaaaagaagaaaccaggggagcaacagcagacagacgaaccgcaaacaaggacagagcagaaaacaagaagaagcaacacacaaggggcacagggccagcaccacaggcagaaagcaacacccaaaaaacacaagaaggcaacgaacgcaaagagaagaccagaaggcgaggaacggccaaacaacaaaaggagaaaccgggacaagcaacggccccaaagcgaccaagcacacaaacggcagaggaccaggaagacaaagcaggccgacacagagaagcaacaagaaaggcgcaaagggcagacaccagaagacgaaacgggcccgagccccagcaccgaaagagccgccagacaaggcagccagccaggcaaaaaagagaagagagcggccccaccccagccgcaggacaagggagcccccgaaacagagaggaggggccaggcagagcccagaggaaaagaaaagcccacacagcaaaaaccgacccacaagaacggaagacacaggaacgaccgaagcaaaaaacggaagaccacaggggacaaaaaaacaagaaaacaaaaaccacaacccccaaggcacccggccaccaaagcaggaccagcaaaaggcagccacaaaagcgggcaggaccggggcagggccacgcccaacagcacgggaggccgaggggaggacaccgaggcggaggagaccagccggccaacagagaaaccccgccacaaaaaacaaaaaaaccaggggggggggaccgaacccagccga

SEQ ID NO: 468 - RNA, 12092 nt, Homo sapiens
aggggggggagggacgagaaacaccaaaccaggacagggggagacgcacccacaacccccgacacccaacgccagcccacgcgagaagagacaaaaccggcgggcccacagccgccccgcaagggacaacccccgggaggggacaccagggcgggccagggagccggaggggcgcggggaagaggcaaagagcaggcccggggaaaaaaggagagaggggcgcagaaagcgcggccccaacagccccacccccccgcagccagcgagggcggagggaggcgcgccgccagagccggccggccccggagggccccgccggcccaacacgcacgcaccagccgcgccgggcacaccagagggggcccagcagaaagccaagaacacaccgccccaggccaccagggacccagaggccaggcaggcacaggcccccgggccacccaggagccccgcagagaaaaacagaggacacaagcagaaaaccagaccgccaggaaaaacgagaggcacccacaggcgccagggggagggggggccaggccaggagccccacagcggcccaccacccaccacaccccgcaggcccgagaaggcccccacgcggcccggcagagaaggaagaaagagaggagccgccggcccaggcggaggcaggcaccccggccacgcaagcccacccccgggcaagcaacccccccagccccagagagcgggaacaggcgcccgccaccacaccggaagaagagagagggggcagggccaggcggccgaacccgacccaaggaccgagaaggaaaaaaaggaggaagggacgcagccccaccccagcaccagggcgcacacaagggacgcaggaccacaaaggacaacagagacccaggagcacaccccgcgggcaaccgccaggaaacgaggccagcgaacgagaccccaccgagcccgcagcgggagggggagcgggaccacacccagcagaggaacaccagagccgaacccccaggcgggcggaaccaagcacccccagcggcaccagagcaaaggacaggccccgccgggaaccccggggccgacggcccacagccacagccgcccccggagccgggcgggccccccgacgaggccagcacccgcagccgggcgccgaccagcccgccagggcaaaggggcccccggaggggcagggagggaggcagccggccgcgcccaggcagccgcggaaagccagcagcccaggccagcacggcacagggacagcacagacagagaggcagaaaagacacacagaacacacagcacgaggcgccccccagcccgaaccaggacgaccggacaacaaacagagggcccacacggacacaggaaggggaacacacacaccagggccgcggggggaggagagggggggagggaagcaaggagaaaccaagaaagacgagaaggggcaacacaccaacaggcacagagcaacgaacaaaccgagggcacagacccagaacaaagaaaaaaaacaaacaaacaaaaaaaaccagagggccccgcacaccagggcaagacagagaggggagccaagaggccagcaccaccacgaccacccaacagaaagacagggccaaggccgccagaggagcggcgccagcagaagggagacccaacccagcacacccagcccaagacggagcacgacccagccggggccaaggcagaagggcgccgacccacacgaccggggccgagagagaggaggcccaacccagcccccggggcagagggggcccgagggacagacaacccaaaccaggccaccgggcgagacggggcccccacgagaaacaaaaaaagcaaaaagcagacaaggcggagaggaagcggcgccagccccgccaggcagcagccgccgggaaggggccgcagaccggaggacgccagcgcaaggacaagcagccccgcaaacacccccaaggaaggaaaacaggcccggggaccagagggcgagcccccagggggacgcccaagcgcggcggcaacgcacaccgcaggcagcgcaaccagccagcagcacccgcaacagagccgccagagaagccccagacccagagcggccccagaggaacaggacgcagaacaagagccccaaagaacaccgccacgacagcaccgccccagaaaaacgaagacccagagaagggcccagaaacagggaaaacgaggaccacaaaaggacgagccggagcacccagccgagcgagcaccccaaagcgggacccagcccaggccccaggcacccgaaaggggcccagaggccaagccaccaggggagcagggccaagaccacaggcagacccaaacaggagagacaaggaaggggccggccagcggggaaagcagccaggagcagcgaaccccccagaccaaaaggcagcccagaaggcagcccagcggggaaaagagaaggcggaggcggcccgggggcacaagaaccgcagggaggggcgaaggcccccagcagcccacggcgcgacagcaaaagccccaacaccccgccccagcaaaagagccgggcggccagagaccaccaagaccaaccacacaacgcccaagacccacaaaccggcagaggaagaacagagaggaaacgaggccagagacgaaggggggggcagggagaccaaagccacgcccgaccaagcacgcccccgcgggaacaacggcccggacagaaagagcacacccagacgcacgagagagacgagcccggggagagcaacaaaggacacagagcaaggaggacaggacccaccagcgagcggccccggggcccccaccccaggaggaaaaagccacaaagcgcaccccacaaaccccccagagggggcgacaggaccaccaagaaagagagagaaagaaggggaaaaaaagacacgagggggcccgcacagcgggcacgcaaaaaccacagcccggaggacagaacgcaagcacacccagaccgcgccgccagcaaaaagcgcgaaaaaaacacaaagaagaaagaaacagcaaaaggcagcacccaaagaaagggcagaacacagcgacagaaaggaaagcagacaccaagagaaacaagcaacccaccaggagggcaaagcgggggcacaaaaacaagcaaggaacccagcccaccaaacggaagagccagagcaacaagccagaaacccaggaaaacaaaaaaagaccacaagacagaaccagagaagagaaacccagaagagcaccaaaaacccacacgagaccggcccaggcggaggcaagggcaagcggccacgaaaccccacccccaggcaagcgaccggcccagccccaagagcgggaaaggcagaccaccacaccggaagaagagagacaggggccagagccaggcggcccgaaccgacagggacgccgcccaacccccaaaggcggaaacaggggagccacaacacccaggcgcgggggggaggggggccacaggcccaggaggcaaaccggcaagcaccacccagccccaaaggcgggaacaggcagagccacgcacaccccaagaaaaaaaaaagcaaggccggagcaggccagccgaacccagcacgggaggccaagggagcagacagaggcaggagcaaaaccagccggccagcagggaaaccgccacaaaaaacaaaaaagccagcaggggccgccaagcccagcaccaggaggcgaggcaggagaacacgaaccgggagacagagggcaggagccaagacacggcacgcacccagccgggcgacacagcaagaccgccaaaaaaaaaaaaaaaaaaaaagcaaaaaaagcagcagggggacgcagccaagaggaaaaaaaaagcaaacaacaacaaaagaaaaaaaaaaaaaaaaagcaaccaaaaaccagcaaagcagaaaacaacaaaaagcacaaaaaaagcaagagcaaaacaaaagaacaaagcaccaacaagcagaaaaacagggagaaaagcaagacacaaaacaaaagcggcacgacccagaaagaaaccaggcagaaaacacagaaggggcaggacacacacaaacggagaaaaaaacaaaaagcaaaaaacaacaaaaaaaaagaacaggagaaggacgagggaccggagaccaggccgaaaggcacgggcccccgcgcccccgcccgccggaggaagccagcaccagcgagcagccaaggcccaggagacccagcaacagccaccgggaagcggaagcagaccccagccccagcaagcccagagccgcagcccggccagggcggacgcaaccgagcaagcgagacgaacgcagagcgagaaccccaaaccgaccccagaaaccagagaaaaaaaggacagcgcaaggcgggagaacggacacggcagcaaaagcaaaaacccaccacccgagaccgcacaggcggcaccaccccacccacccagagaaagccagccagaagaaggaggagggacgcgcacaaagcaggacaacgccgagccgcggaaaccaagaaaccacccccaaaggagaagagacccaaggcccccaggccacagccagagcaccgaccacccagagaacacccaaggccaaagaacacaggagcgaaagaaagggagccagcccagggacgggcccggcggccggggcacaggagccaccggaggagcaacagcagcaccccaggcgaaaaagggacaaaaagggaaaaggggcccaaggcagacagagcagaacagggcggccaccaagcaggccacagggaggagcaggggcagccaggagcaggggcagccaggagcaggggcagccagaagcaccacagcccccggaagccccacggggacaagcggcccacgagaagaaacgcagcgcacgacagcgggcccggggcgggggacgggggcggccgggaaggaagacacaacggaccgacgcagagggcagggcaggacccaaagaagacaaacaaaaaagaaacaacaaacacaccgcagggccaaaaagaaggaggggccaaagggggaacgagcaagagcccccaggaggacaccaagccaggagcgagaaacgagagaggacagaacgcaaaccgaaccaaggcaccacaaacacaaaaccgaaaaagcccgacaaaaagcaggggagccacaaagccgggcgggccagacaacaagccagacacacccggacaccagggcagggccagaaggaaggaccgagggagggcggggggggccagagcaggacgggaacgaagcaaagagaaagagaggggaaaggggacccagagagaaaacccccaaccaccaaacccaacggcaggccggagcacgcgccacccaggcggaggcagggcgcaacagcccgcaaccccaccccgggcaaggacccccaccagccccgagaacgggaacaggcaccgccaccaagcccagcaagggaaaacagacagggcaccaggaccaagcggcgaacccgacccaaggacgcccgcccagcccccaaaggcggaaacaggcggagccacacccacaacacaaacacaaacaacaccggaggccgggccaaggaggggcgccccaggaaaccacccaggaggaagaggcagaaaacagcagcaggagacaggcagccccggggcaggaaagcccccagaaaggccaggccacacccagagggagcgcaccagcccaggggagaaggggagggcggccagcgcccggggagcccggggccaaggagccaagagcaggcaagggggcggagccggggggcggcggggcgccagggcgcgcccacacccgccgcggccgccggggcccggggcgcaggccaggcacccacccacggccggaggcccgggagcaccaacaaggagggggcaggagcccaaaggcaggaggaagagaggaagccgacacagcaggcaggagcagcaggagcggagaagggaccccagaagccgagcacaggcggcaccacagcagcacagccggcaaagaagagcacccccgaacagaacagcaggccagccccccacagccccgcccaccagggcagcagcagggcgaccgggccagcccaggggcaaggggaggggccccccagcaaagaaaccaacccggggaggggggagggaagccgcggggggaaggcccgagaggaagccccagaaggggagaggcccagcaagaggcccaagagagaccccgccccacagaagcacgcagcaagaagcaccgacggaaccaggaagccccaccagacacgacgcggaccgagggcccagcccaaaacagagaaaaaaccagcaagaccaccagagaagaagcagccagaaggaccaagacaaagggacaggacacggggaccccccccccgcccggccgcccccccacccaccccaacaccgaacggccgcaaaaggaaaaccagcaggcgccccaggcgagcagacgccaggaaacagacccccaagcgggcggggggggaccgggagagagaaagaaagcagagaaaaccaacccaggaaaaaggacagggaccgggcacgcaaacaggcaccggggcggaagggagcacacgaagaaagacggggacagcggccgggcaggggccacgccgaaccagcacgggaggccaaggcaggggacagaggcaggagacgagaccaccggcaacagggaaaccccgccaaaaaaccaaaaaagccggggggggcgggcgccaagcccagcaccgggaggcgagacaggagaagggcaacccaggaggcagagagcaggagccgagagcaccacgcacccagccaggcaacagaggagacccagcaaaaaaaaaaaaaaaaaaaaaaagaagacggggacagcaaggccaccaacgacccaggcaaaagagccacagggacagggggaggccgaggcacgaagggaccaaaaggacaaaaagaaaagacgaggaagaagaaagaagagaaagaggagaggaagaaaaggaaaagggaccaaaaaagaaaacaacaagagaaaagagaaaaaaagaaaaaccaaacgggagaagaaggacacacaagaaaaagacagccagaaaaaaagagccagaaacaacaagaagagagaagaaaccaacagaaaaacggaaagagcgaggggccccacaaaagagcggccagggccaacaaacaagagaagggccaacccaggcacaaggaaacaccacaaaacacagggcaaaaccacaagagaacacccacacacaaaagagggaaaaaaaaaggaaaaagggggaaagggaggaacagaaccaacagcaggagaaaaaagacgcagacacggaaagcaacggagccaaaagaaccagagaccagaccagcaaccacccaagagagccaagaggaagaaaagggcacacaagaaccggacggaagcaagcaccaagcaggcgcagcaggcgcaagcacaggagccaaaaaggaaaacaaccaaaacacccacgagaaggaaacaaaaaggagcgacaacaaaaggagaccaaaaaggaagaagacgacagacagccaccacagaagaaccgaaaacacagcagaaaagaagccagcacaaagaccacacagaccaaccaaaagaaagccagaaaggccagggcggccacaccgaaccaagcacgggagacggaggaggcggaggcgagccaggagcgagaccgccgggcaacaggcaaaacccaccaccaaaaaacaaaaaaaaaaaaaaaaagccaggggggggggcaccggcccagcaccaggagggggaggagcgagccaggaggcagagggcaggagcgggacagccacgcacccaaccaggcgacagaggagacccgagaaaagaaaagaaaagaagagccagaaaggcaaacaggagacagaaaaagaaggggccagggaagggagaaggggggggagggagcaaaggaaaggacggggggagaaaagccaaaagaggggaagcgagaccgcaaacaaaacagaagacaccagaggggagagccagcgaaaaagaaaaaaaagagaaaaggaaagggaaagaaaagaagaaagaaaaagaaggaagggagggagggaggaaggaagaagggagggagggagggaaagagagaaagagagagagaaagaaagaaaaaagaaagaaaggaaggaagggagaaagagaaaaagaaagaagaaagaaagaaagggaaggagggaaacaaggaagaaagaaagaagaaaaaaagaagaaaagaaagaaaaagaaaggaggaagaaaaagaaaagaaagaaaaagagaaaggaaagaaagaggaaaagagaagaaaggaaagaaaaaagaagaaagaagggagggagggaaagaaggaggaggggagggaagagagagagagaaagagaggaaagaaagagaaagaaagaaagaggaagagaagacagaagagaaaagagaggggaggggaggggagggaagggagaaaagcaagccaccaccacccacagaaaggcaaaagaaaagacgaacccaaacaaggaggaggagagaaaccagacgcagggggagagggcggcgacacggaagacagggcagaccaaagcgaacaggcgccagacccagcaaccaccccaggaaaaaccaacagaaaacaaggggggggggggggggcaccaaaagaaggccaagaagacaaagcaggccgggcaagggccaggcgaacccagcacgggaggccgagggggggacagaggcaggagcgagaccagccggccaaacgggaaaccccgccacaaaaaaaaaacaaaaacagcgggcagggcgcgaccgcagccagcaccaggaggcgaggcaggagaacacgaaccgggaggcagaggggaaagcgagagcgagagccgagagcgccacgcaccagccggggacagaggagaccgccaaaaaaaaagaagaaaaaaaaaagagaaagcagcacgagagacaaacacgaaaacacccaaaacacaacagagaaagacaaaaagcacccgacagaaaccaaacacgagacaaccagcacaacacacagaaccacagagagaccagacacagagaggagagaaagaagccaggcccaaagacagacaaagcgccacgacaaagcaaaaggcagaacgccaccggggagggcaggggaggcaccagggggggagggaggccggaggggcccagagggagccaggggcggccaggcggccggagcgacacagagggcagcggggacacacaaggaccaggcagagcccaccggcccaggggaggcagggcaccgcacggcacggggcccgcccccggcccaagcgaccagcccagccccgagcgggggaacaggcagcaccaccagccggcaagaagagacggagcacagagccaggcggcgaacgcggcccaagggaccccagccagcccccaaagcacggaaaaggaaagccagaagcccagccccaaagagccgaggccgggcacacaacgggccccagccaagcagcccccgcccgccgcagccagcagcggggccacagagggacagaggcaggccggggcgcaccccacgaccagaccggacagcaggacgaggaaccccagagaccccccggccggacccccgccgggaagcagcacccagcccccggaacagggggaccaccccggagagagggcaccaaggcagcaggaacagcacgcagggaggagcagaaaaggcagcaccggggaagcagggagcgaaagaggagcgcaagcagcagcgccgggcggcagggaccaacccccagcgggagggcacgggccccaggacaagcaggagggacaagggagaaccaccaggcaaagagcaggagggagaggggccgggaccggccccgcgccacggcaaccagcccggcagaggagggcgaaaccagagacggcaaacccgccggccacaccaggggagcgaggacagaggagccagacccagaacagggaaagacaaagggagggggaaaaaggaagaaggacaaggcagagagacacgggccggcccggcacggaagacccgaaaagaggaggcacacgagccacgggggcaagaggacagggggcagccagggggaacagggcggcgggcgaggggcagcccacaggagccaggcagaggagggcggagggggagcgcaggagcccgagcagcaccacggggcaccaccagccaccccagcccccagaggcccaaagcggcacgaccagaccgccccggcacccacggcgggacccagagaggccacccgggaccagaagaggggcgggagaggaaggaggccgaggcagccgggggaggaggaaaaacccagcagggggggaagacccgagccaaacggccaaagagcaggaaacccaggggaggagcaccccgcggggagccggcggaagagcaggaggagcggggaaaaaagccaaaacacacacacacagacacacacacacacacacaacacacacgcaaaaacaaccaggggcaagaaacaagccccaggcacaaacaggaccacaccagccccggaccgggaaccaggacagggaccaacagaccccagggacagccgggggcaggcaagcccgagacgacgccaagcgaacaccgaaggggcacacacaggccaggcgagacaccgacaaaaacaagaagccacggcccaaacggcgcaccagcacacaacacagcaaacaaggcgcagagacggaaggcaaacacacggccaagccacccgggcaagaaacaggcgggggcagaagagccccacacccagcgccccagcacccggggcgaccgaccggagagggacgccccagcacgcggaagcgcagggaggcacgaccaaccaaagccccccccaggaggcagaacggccccaggagaccagccacaccgagacaaaacggggggagggacagcacccaggcagggcgggagcacagggcacgcgcagaggaaggagcccaagccaacgcagagagaggagggacgcgcacccccccagggcccggagcccagcgggcccgccaagccccaggaaagcagcagaagggacgcaaaagaccgaacagcacgaccggcaggcccccgccagagaacggccaagcagcagaccggaaaacccacagcacggcaagcgagcgcaacccaagaggcgaaccggaaggaccaccgcccgccccaggaacagccagcccgacgagcgggaaacccagccacagaccgcagccagccaaaggcccgaggagccccccgaaagccagggcaacccacccgcaagcgccgccgccacccgccaccccgaacccgcccagcgccccccagccgggccgaaaaggccacgagcacaggccgccccagccacgcgccccagcgggccagccacagcagccaggcccggccgccgcccgcccgccccccggcgacgaaccccacacccccccccacccagccaacacggggacgcccggggaccagccccacggcgcgacccacggcgcagggcccccggggacccgcgccagagcagaaacgagagggcaggccgcgccaccccccggcgccccaggcgaggcgccggcacaaagccagggccgcaaacgcgggaaccgaaacccacggggccggccgagcggccccgcccagcccagccccagccacgaacggggcgaccgggccggccccgccgggcccagagaggccggcggggaccgcgcggggcccgcggccgcgccagggcccaccagccgccgagcagcgggccacacgagcaccgcccgcccgcggcagcaggaaggacccgcgccgaaaggacgccagcccagggggcggcaggggaccggccccaacaccccgccaccgagggcaccaggcgcccggcagcccccccacccccggcccgcaggggggccaggaaacggcacagcaggcgaggccaaaccagcagggcaggaccagaggaggagcccggagagcagcacgcagaaccggcgagaaggagggggagaggggcagggg

SEQ ID NO: 469 - RNA, 34 nt, Homo sapiens
accaggagccaaccacaaagcgcagggagaagca

SEQ ID NO: 470 - RNA, 1808 nt, Homo sapiens
gccacaccgcacccacaagcacaccccacccaaaccgggcaggagaacagcaaaacccggccaacagcacaacacgccacgaaaagcccaaaaagagacggaccacacccccaaggagcaaaaaagcgaaaggaggcaggaacgccaaaagcacccgggacgagagaggcaaggacccgagaaaaagccaccccgccagaggcgccccgccgaggaacggcacgcaggcagcgaaaggggcaaccgaccccaggaaagagacccccccgaccggaaccccaaacccaggaggcgaccggccacaccgcagcgcgaacgcccgggagcccagaccaaaacggcacaagaggcccaagagcgggggggacagcacaccagacaaaccagagaccacgccacgcgagccagcacgaaaggaggcgaccacgacaccaaggccgccaaccccaggccagcaaagccagcacccacagggacaaagcaagaacggaacccacaagcgggaccggcagagagaagaaaccaagcaagacacaccagggaacaggaggcagcagacgcaggggaggaggcagccaccggggagcagcgagacaggcaacagggcacagacccaggggggggccggaccagacccaacagaccaccacagcgccagaaagcaggaaacagaaagaccaaagggcccgaaagcagaggccggggaaaaaccgccaggcaggggcggacagcaaaccccggccggccacgggaggggacaaaagcaaccaaccagaggggaaaagcaaaaaacaaaaagacaaaggaaaacagggcaaaacgccaaaagagggacaaaagaccccaagcaacagcagcaagcacaaagagagcccggccgccaaacacagcgaaacgacaacgcccgcaacccaaccggagagaagggacagccaacccaaaaacgcaaaaccaaggaaaaagcaaaaagagcccaacagggaaaaggaagcagaaaaaaggccaaagaaaaaaagaaccacagaagaggggaaaaaagcacccaaaaagacaggagaaagaagacgaaaaaaacgagagaaacaaaacccacagcaagagcaagcaaacgcagaaaagaaccccgaaagccgagaaaacgaggcaaaggagcgccagggagagccaagggccaagggcagaggcagcaaaagccaaacacccaacccagacgaccacagaggggaaacacaggacaaacagaacgcaaaacggacccacccagccgagaggccccaaccaacagagcacaaaccacacgccgcgcccaaagcccaaaacaaaaaaaaaaaaagaggagccgcgcgcccaggccggaggcaagggcaaccggccacgcaaccccgccccaggcaaggacccgcccagcccccaagagcgggaacagccaccagcccagcaacaaagggagacagggcaccaggccaggcgggcgaacgcgacccagggaccaccgccggccccgaagacgggaacaggcggagccaccagcccagcacccaaaacgaggaaacaagccggagccaaaacaagaacaaggccagccagcagccgagcccccaaagcgggaggaggaaaagcccccagaccccggggagcaacccagccccagaaggaccaagaagaaggcgggaagaagagacagaagagagagagcacggacaaggggcccaagcaaagagggccaaagaagaggagaagggaaccgagcagacacagaggaaagggcagcgaggcagagagcgcagcgcaagccaaaaaaggcagaa

SEQ ID NO: 471 - RNA, 44905 nt, Homo sapiens
gcgggagcgcggccgaaccacgcacaacaaggccaacggcagccaccacccccgggcaggggggcaaggcgacacagaaaggagggcaagagggggaaggcaaaaccaacaccccccaagaagagagaaccggccccgcaaggccacccgaggcccacccaaggcccaccgccccccccacggagccccaacccccacagcacccacaacccccagggcccagccaccacccaaagccagagggcagccacacggcgcaagagaggagcagcacacagcaagccgcggaagcgcaaggagaaggaaggaaggaaggaagaaggaaggagaggccacacgcgcaaaacaaaagaagcagcgcagcggaccggcaagccccccgcccaacccaggaagcggacccagcaaaaccgcccacacaaaggcaagcccagaggcccgccacagggggagccgaaccgaggggggcgcgggagaggaacccaagagagacagggcagaagggccagacccagccagcccaacagggggaggacagagaagaggagggcgcgggaagggagcacagccccccagagaggggaggcaggaacaggggccacgcaccgcaccagcccccgcagggccccagccgcaagccccagccgccagggccccaccccacgccacagaacccagccaggaagaggagaaacccccacgacacccaaccccgcacacgagcagacgagcgccgcccaacccccagaacccgaaacaaaaccagaaggcacgggaaaaggaacccaaacgccccacagaggccgcccgaagggaacgcagccgcgccccaacggggcaggggcccggacccaaccccgacagacaagaagcgcgggggcaggcccacggggaaggaggagacgccaagcccacagccagaccagaaacgcaaagccacccacccagaaccgcacccgaacgcaggcagccccaaggccgagaccggaacccaccgggggccccccccccaccccgcaggcaacccgaggcagcgaaaggcccccaacagaggcccgacacccgacgaacggagcccccgcccaccccacggcacaggaacacaccagcccgcagagacgcccagagacggaaggcaccgagcacagagcaggccggcaccccaccccaagagggagccacaagaagcaagaaaaacagaaaacccacgaccgccaacccacgagcacaaaaagaacgacaagaaaccagggaagcaccggcgccaaaaaccaaacagcgcggggggaaaaagaaagaggaaggacaggaaaagaaacacgaagggcaaggaaacaagaagaggccgggcgcggggccacgccgagcccagcacgggaggccgaggcgggggacagaggcaggagacgagaccaccggcaacacgggaaaccccgccacaaaaaacaaaaaaagccgggcgcggggcgggcgccgagcccagcacggggaggcgaggcaggagaaggcggaacccgggaagcggagcgcaggagccgagagcgccacgcagccgcagccggccgggcgacagagcgagacccgccaaaaaaaaaaaaaaaaaaaaaaaaaagaagagaaaggggcccggcacagggccagccgaaacccagcaggaaaggccagggggaggacacgagcccagaagcaagacagcggggcaacagacaaaaccccaaacaaaaaaacaaaaaagcgggccggggagcaccgggcccagcacgggaggagagggggaggacacggagccccaggagcagggcgcaggagccagacacaccacgcacccaaccgggcaacagaggagaccccaccaaaaaagaaaccaaacaaacaaacaaaaacagaagaaaaaaggaaaagagcaaagagagaggcaggagagacaagggggcagagagcgaaaaccggaagagagaaggaggcggaaccagcaaaggcgcagaaggagcaagcacagaaaagcccaaaggggggcgcagcaaaagcccagcccccaagccaggccaaacgcacacacacacaagcgggaagaaaaggagggaccggaacccagccagagacacagaaagaaaggggaggcagggcggggagacaggcccgaacagaacaaccagccaaagcaggaacagaggaaggaccccagaccagcagagggggagcagccagaacaagaggccgagaccacagcgacacgcaaacagagcacgaaagcacaaagaagaaccagaacacagagaggacccgagggggcccaggaaaagagcaacacggccagggaagaggcaaagaaaaccaacgaggcagaagcgaggagaaaggaggcccggcaggcgcgccggagcaaggagaccaacaagacaacacccaaaggggagaaccgagggagcagccacaacagcagccagagcaggcagccagcagaggaaaacaaagacaacgaccacggaccggccagccccgggggcccgggaaccccggggacggccccggaggacagagacgggccaggaaggccaggaggggaccaccgccgggcacagcccacccaccggggcaagccggacggcccgcgcccaaaggaaaccgggaaaacagcaaagagcaaccccccccccccccccccacaacccagagcgaaagcgagaagccgcaccccaacccacgaaaccagcagacgccccaaaacgcaacaagcgaagaagaaacccaagagcccccaacgaaaccagcagacgccccaaaacgcaacaagcgaagaagaaacccaagggcccccaaaaaaaacaacaaagagcgcgggagacacaccagagagcaggaaaccacaaaagcaaagcaaaccaaacaaaaaaccccgcacaaggccaaggagcgaagaagaaaagaaacacagaaaggggaaaacaaagaacaaaacacaggccaaaagaaaagaagccaaacagcgaacaacagagcggcagaaacagccgaaggaccgcagggaacaagcagacacgagccaggcccaggcccggcaaggccagaaggcccaaaagacaaacaccgcgaagcccaaagcccagaacagcgggggacagagggcggccgcaagaaaacaaccaaccaaaccaggaggccaaacggagaacagaaaccaagaagaccacgggaggcacggaaacagacccaaccgcagaaaagcaacggggccagggaaagaaagcaagggccgggccagaggaaggaggagccaaaagagggaagggacagcccggaaagaaccagaccagagggcacacaaaaacgcccggcacaccaccagacaagaaacaagacacccacgggaaccagaaaagagcccaaggaacgaccacaacgcaaaggcaggaggaccgcgacagagaggaaaccaagagagagagaggaccaagaccaaggacggggcagaagaagagccacacccaggagagcgaaggcacagagaagagacgcccagggaaaccagagggccaggcaccccacccggccccaagcccagccagcccacagccagggccccaacccacccagcaaggcccaacgaagcacaggccggccaagaacccaggaggggcaggagggcagcggccaacacaagaagaaaggaggcaaaagaggccagaaaccacgagaaccggcaaagacaagccaacaaagcacaccagggaccagccgggacacgagggcccaggccgcgagaccagacgcagcaaaccagggccacccgccagaacccccacaacaacccacccagggaagaagagaggaaggaagaaaagagaacaagagacccccaaaaaaggaagaaagaaaaaagaggggggagggaagagggaccacccagcagccccaggcaaaccaaaaggcggcagggagcagcccggaacagcagccccacccacgagcgggggagaaagaagggccaagcccaacagcacagagcaccagcagggcccaaaaagaaaaagcccagcggaggggcccgggccaaagacaaccgaacgggggccccaaacggcagcccaggaaacacggaagcagggaccagacgcggaacagagcgcgaaccagccccaggcaaccaagagcaggcagagggaagcagggagaacaagaccaacaacaaagaaagaacaaaacccccccacagagaaagaaagaaacccggaacagcaaaacaagagcacaagagagggaaagagcaggcaggggggaagcaggacggggagaccggccgacccaagagcaggagacccgggcaagacaggacccccaaacccggcaacggaaagggggagagaagagcaggcagggccaggagagcaaaaaaagaaaacgccggcacgggagcaggaaaaggaagcaggaacagcggcgccaccggaaggggcaacacaaggaagggaagccccacgacaccggcagcagcccagaagccagcacagagaccaagaccccacaccaccccagcccgcagcaagacagcacgcggggagagcaaggcaacgcaggggcacagaaagccagggcaccccagccagggcagacacggagccgggaacaaaggagccaggaaacccccccaagagaaagcaggagaagccgggcaaccccaaccgaaaacaacgaggcagccaagggcaggggggcaagggcggagggaaaggaggaaggccagcagacgagaacgcagggacggcaggagagaggcggaaggccccgggaaaggaaccagcgcaaagaagagccagagagggggggggcgagagggggccagagaccacagaccgggggcgccccacacgggggaggggaagcaggcagcccacccacccccacacgccccccagcagaggggcgccagggagcgggagggccccccaccggcaggggcaccacaggagggccgaccgaaccaaggccacggccggccacaaaagaaaccaccacagcgaccgcgaacaacagagggaccgagagaccaagaaacggaggacgccgagcagaaggcaggaggcacgaagagggggaagccaccagagaaaaaagggacaccagcagggccgaggacagcacgagagccaggcggaggaaaaaagggagggcaagggccacaaagacagcccaaacaagaccaccaagggaaacacagccgagagcagggcgcaggcacggaacgcagccgccaccgaagccagcacaagaccagaacggagcaaaaaaggaggcccgcaagaaaaggagcccaggaaaagacagaaagaaggcagaaaaagaaagcaaagcaacagcgcaagaaacgacccacccaggaaggggcccaggaggcaggcaggggccagccaaccgcaccggcggaaggaaggcccaaaacagggcaaggaagaagaagagaaaccccccagcaagaaaggaagcaggggagggcagagagggcaggggcacgcgaaggccgcacccagcccaaaagaacaccaggagaacaacaggacaggcccggagaaaaagaaaaggcacgacaaaagcacaggagcgagaacagcgggggcgacgcgaaggccagaaaaggcccagccaccagcccacaaaggacagaaccaaccacgcgcacagaccaggaaaggccacacaaccaacacagaggacagggggcaaaaagaaaagaacaacgaaagagaaaaaaaaaaaagcacaggagagcaccggccccgggacagcacaggaggaagcaccgaccgcagcagggccccaaccggagcacggagggccaagaagcaggccaggccaccaaaccagacccgggacagggccaaaaacgcaaaaaaaaacaaccaagagcagggggacacacagggcacacagaaagcagacacgagaaggaaggaagaccgcacccagaaggggcaagcaccaacagagcaaccggcccccccccccccccggagccccagcagcgccaaggccagaacacccacgagccccacaaaggagaacagaggcaggcgccgcacacccaggaaaggccccagcacaccaggcgcaaaggacagacgcaagcggcaaccagaggcagaccacacaccagccaccagggcaggcaccagggagcccgccgcaggaaaggcggagaacaaggggggcggagaaaaagggacaacccagcagggagcaggcaaaggaaccgcacgcaaaaaaaaggggacaagagggaaaaggggacagagaaggaccagcacacaagagcaaaacacacagaaaaaggggaccaccccaagcaaccggacaacccaagacccccaaaaaagaaaaaggaaaacagggagaaacaagcaggggacagagcagggcacacaggaaacggccgggggggacagagacacacccaggaaagccagcacagcaagagagaacccaagcgccccagggcgaacaaacacgccaccaacgggaaagcccccccccccagcccgccagcaccggagccagcgccggggagaagaccaggagacacagggaacgcagcgaaagcccagagaacgagaaaacaacacggagcagcacgacccaagcagcagccacaccggacagccccgggggaggggcacacagcacacagccacccccccaggaccacccgacccccaggggaaaccacccagcaccaacaaggcagaggcagcaaaaccaaagaaaccaggaagagaagaggcaagaccaaaggacaaaacaaagcgcaaaaaaaaaagcccgaagcgcaggacacccgaccacgcagcaggaggagcaggacaagcgaaagaagaagcagcacaggaaaacccaaacgcacacaaccagaagacggccccacggggccaccccaggcaccacacccacaccgggagcagcccccaggggccagaaaccgcccgccaaccacaacagcccacccggccccacaccacacccagcgagggagcccacccggcaaagcccaaaagaaaaaagcaccccgcaagaagccccagaacaagagagcggcccccacccccaccccaacaccccaggaacagcagacccgagacgaagccggcgggaagaaagaaaaacaaaggagaacagaagcaaagccaaccgccgggggccagcagacgaggcgaaaagcaaggcaagggaccggggcccgcggaagacaagcacacccagggcagccagggacaggacgcaacgggcagggaaccaacgaggcaggagcggacgggaaaggaaccaggccgccaagggccggagggggcccacccagccaggcgggcaccggggaggaagagccccacggccgggggacagggcgccgcacgagcccccaggaggcgaagaaagcgccccaccccaccccaggccggggagggccagggaccagagagccggcgacgggggggcaaggggggaaagcagggcgccccccccccccagggccaccgcggggaaaggcaggcaaaccaacggcacgcaccccccaaagacccaggaccggaggggggggcagaaggaacgagagcaccccccacccccacacacaacaccagccgcaacggccgcagccaggagaggaaccaggcaggcgaggacccgggcagcccgcaggaaaaccgacaaccgacagagaggcagaagccacccagaagagcaggagacaggggagaaggagccccagaccccagggcccaagccccacaggagagggggagcaccaccagccccccaagaaaggccaccgccacgggggcaaccacaaaaaagcaaaacagcaacccggagaaagccaaccaggggacccaaggcacacaaggcagggggaaggaccagaaggacccgcaggcccccggcgccgggcccagagccccgaggacagcagcccggggaggaccggcgcacgcaccggaccccacgccccaggggcgcggaccgacacaggccccgccccagcgcagcaagaacacagagggggacgcggaccaaggagcacaaaggcgaacaggccccgagagccacagcgaaccgcccgccaaaagggcaccggaggaagcacccggaccgccaagccccagccccagcaaaaggcaagcaacccgggacaaagccaacccacccccaagcacgccagccacaggaaccccagcccaagggccgggagcccccccagccccgcccagcagccccggaggaaccaagggcccagccaacccccagcacccaccccaacaagcacaccaggcgcaggggaacacaaagagcacccccggaaccacagcacaaaaaacacagacaagcaagaaaccccaaccagaggaaagaaggaaggggcagggccagcaagccccccccaacccgaacacagaaaacaacaaggaaagccaaaaagaggagaaagccacccacggcaaggaagccagcaaccgcacacagggcgaaaacacagcaccgccagcaagggcagagagcaaaaacgcggaagcgggagcgaccgggggcacgagacagggccgccggccaggcggaggcagcggcggaccagccacgcaagcccgccccgggcaagcgacccgcccagccccgagagcgggaacagggcgccggggacacacaggcaaccacaagaccccgagagggcaacagggcgccccggcgcaggaagcggcgcacaaaccgcccgcgaccccgcccccacaaaaaggccaaaaaaaaaaaaaaaaaggagaacggggaccggagcgcgaggagcaggaaaaacaaacacggaacaggcagagcagcgccaccgcagacgcgcccaccggcagcaaaggagccgccacgacaaggcaaggaggaaggaaaaaaacaaggagacgagacagagcgccgcccccagacggagacagggcacgagggcacgaaaccccacccccgggaagcgaccggcccagcccccgagaggggacacaggcgcgcacgcagcgcaagccaccacggccggcaagaaaggagacggggcgccaggcccaggcggcggaacccgagccaggcaaccaccgccggcccccaaaggaggaacaggcggagccacgcgcccggcaacaaaaaaacaaaagccacaggcgggcagcccggaggggcgggaaggacagaaggcagccacgggagcacgggcaggaggccgcggacaaaacaacagcccggcgccacggggggggaacacgagacgacagcaggagccccacaccagcgggcacaggaaaccaggaaagcaaggccgggcgaggaacccaaggggggcagaaggccagccagccccacccccggcacaccccaggccccaagcaggcacgagcaggcggcggcccaaaaaggaagaagccaaccccagacccagaaagaccggaaaagggcgcagaggacagaaaggcgagagaaacaccggagaggggggcccccaccaaagacggggccaaagcaaaagacaaccgcagggaaaggcacacggcaggggggcgacagagacacacccaggaaagccaaaacccaaggccgaccccccccacccccaaaaggccccagggggcccccgggccagcgccaaagccccacaaaggagaacagggaggcgcggcagcggcgaaggaaaggccccagcccaccacgcccgaaaaagacacgaccgcaggcgcgagaccaggggaacaccacaccaccagcaccagggggcacagggacgcgcaggaggcgccgcaagaacacccacaggcaaaagaagaaaccggggagacccagcaagggagccaggaacgaacgcaggcgaggacgccacacggccacaaggcgaacaaaaccccaccaacaggaaaagggaaaggggacaccagccccacagaggaccggcaggagcagaggagggaaggaaaacaggaccagaaaggccacagcagagcgccacccgagcgccaggaccaggcggaccgcacacgagggccggggcagggcagggccagggcagccggagcgccaccacgagcacagaacacggggcaaccggggaggagcaggaggcggaacagaaggaaagaaaccaacccgaccaacacagggccccccgcaaagcaaccggggaggagcaggagggggaacagaaggaaagaaaccaacccgaccaacacagggcccccaaggaacacaggcaagaagcacacggggggacacaccggagcgaaacacggaacaacgcagcagcggccagacacaggaccacccccgcgaaaggggaaaggcggacaaccaacgcaagcaaaaaaaaacaggcacacaacacaggggagggcggggggggagacagacagagcgacaacaacggccgggaagcccagaccagcagaagcgaacgagaaagggccaaggccccaggcgccgcaggggcagacacagaacagggaagagccacggcaggacacagaaaccacaccaagcggacaccagacaagccggcagcggaaaaagagcacgcacgaggaagacagggacccgcggcacaaaagaagcaaagagacccccgagagcaacacaagaaaaggccgaaacccaccaaaggcagcagaggcgcccgaaggcagcaggcaacgcggaagacagagcgcacaccaggaaaagacggaaaagaaaggggggcagcagcgccgaccccggaacgccaacacgcaaaaaggcaaaaaaaaaacaaccgccaccgcaggcgcccccacggcccggcgggccaggccccgccaggccacagggcagagcggaccaggaggcagcagggcaaaacccagggccaggaagcccccaaagacagaggaagagcgggagcccgaaacacagcggcagcccagccaggaccggccacacaccagcagggaggaaaaacaaaaaaaaagagggccaaaaacaaaaagcccaacaaagacaggcaagcaagagaccggcgagaccaggcgaggccaccagaaggaaccggcaaagcagaagcagaggcacggccgacaggaagagcagggaacgcaagaggcccaagccgggccagaaacggcaggacaagcaccgcccaggaacaccccgcgcaagccggcggcccggacgaccggaacaacagagcagaggcggggaggcaagcccacccaacacgccgcggcgggaaggccggggcacagaagagcggagccccgggggggcacagacaaagcggggcgcccacagaacaaacaggggaaacaggccaaacaccggggaaagcagcgcaacgcggggaccgaaccccaaacccaaacgcacagagcaaagggaaaaaaagagcggagggcccagcacagagcggaccagaaagggagaccgccagcggcaagaggaggagggaggagcacacacgaaccacagaaaggaacccgggaagagacagagaggggggaaacagaacacagcaaagcagcacaccgcgaaacaaggaaacgacaggacgaaaacaaggagaaggaaggcaaaaggggaccagggaggcccggaggagggagcccaaagaggcaggcacaggagaggaaagaaaagaaaaaaaaaaaaaaaagagcacagagccaaggacaggaaggacacaaccaagggacaaggaccaaaaccagaggagaaccgaagacaaggaaccagaccaaggaaaaagcccaaagaaacggcgaggggcaaggaggacgagggaagaggagccaaccccaagcaaagcaaaagccaacaacgaaccggcaacccaccaaagccaccaagccggaaacacacccagagggccaagacaccaaggagcagagccgggacacaggagcacaagcaggcgagaaaaacccagcgcgaccggaacgacccaagcacacccagagggagaagcaagaagagagcgcgcagaagcggagggcacacaagcaagcaaacaacgaaaagaagcacggacacaaaaaacgcaggaccaacaacaacgagggggggagagggagggacacccagcccccgcacgaaagaaggaggcaagccacagccaagagggggaggcacccaccaaaacagacggcacagcagcgcaaccccgacaggccgcggcagaccaaccaagaagagaccaaagacaaccaaagccacgaagaacacgaggaaggcaacagaggagcaaaagaaaaagcacacacagcacgccagaggcagcaagaaacaaggccgacacacacacacaaacacacacacagaagcaggaaacgacaggcagcaggccccaagccggagggggcaagaagcgccgccgggcggcccgaccacgggcgggacgggggccaccccgggcccgccgggacccacccagagaggcggcacgcccccaggccgaagccccaacagaacgaaacagcagagaaccccagcggcgcaacaaggacgggacgcaagcccggggcgccaaacaaagcaccacaaacgggaggcaaaacaacaggaaacccaccgcggaaaccagaacgaaacaagcgcggcagagggcccgaaggacgggagggagaacgcccgccgccagaccgcgcccagcagccgggcgcacaggcccccccggagggccggcgccccccggaacacgagcaaggaaaagggcccaccagacaccagagacaccagcaacgcacggcaggaccaccaaaaaagccaaagcgaagcagcaggggaggaccaaggcccgcagggacacaagaacccacagcagcaaaacaagccaaaccaacagaggcgccgcggcaacagagcgccgccgagggaaaaaaggcagccccccgccagggacccccgcacaggccccgccacagcggggacagaagccaacccagccggacaaaacggccagcacccaaacagacccagcgcggcaggaagagaagaacaaggaggcgaaaagcgcccccaggaagggcaccagaagcaaaaaaaaacaggacaccagaaaggacagaaaacaagaaaaccaggaaagcagcccagcaaaggaacacaacacaaaaaaacgaaagcaggcggggccgacacggcaagccacacgccggcaccagaaagccgaaggagcccgacccccacccccaccccagccggcccacgcccagaggcgagggccagaacccccaggagacagggcaaaagagcaaggaggaaggaaaaaaacacaagacaacacggaaaggggacaccaaaggaacagccgcagggggccacgacaggccgggagacgcagcccggcagaaacagcggcaggcaccggaaggaggcggggcagcaggagcccagcgaagagcggccaaacaacaacaggccaggaggagcagaaacacaaagagagccgagccggcccacgaacagcacgacagcgcccagcacggggggaggccacaaaaagcaacaagagcccacacgcaaaagggaggcagggaccgaaggcaacaagggcagccaaacagccgaaccaggcaggggggccaccaggagacgaaacaacccgccaacaaagcaagcacagcgggaacggggcagccagcgcgcaggggagagcgcagcggaaccggggccgggcggagcgcgaagaaaaagaagacgcgggggagagcagagccgccaaggagaggcgcggccgacccaccggcgggccgagggcgcaaagggcagccaaaggagcggcgcggccggccaagcagacagccgacacgcgaaaccacaaaggggagggacggagaagcggccgacgcccgcccccaggcgggagccagccaggccggggccccggccaagagggggcgcagcacggggaccggaaagcgaaagagagcaaaggggaccaacaggaagaaagaaggaggaacccaaagaaaccgcccgggacggacagacgacccagacaggcgcccccccgccaccgaccccaaggagcggacgcgcccgcaggaggagagcgcccgccacacccacaaagaaagaacccaccacaacccgcaaaaaaggggccgagaaaacgacaaaaacgcgggggaagcaggggaaaaaagaaaggccaaaccagccggcccgcacacacaagccgcaacgacaccgagcggacgaagcgggaagggggcggccccggcaacacacacgaacccagcggccagacacaccgcagcgacagggccgcagagaaccagcccccaccccacccccacacagaaacccaccaggagagagggggcagcagagcacggcgggcaggcgggcggccaagaaaagcagcgcagagagcaaaggcgggaagaaacgcggcgagcccccacagcagcgaggggaggcgggggcagagcagaaaccagacgccggaacaccgcccagccaaacccacccgcagccgagcaggagccgcacagagcagacacgccggggcacacaaagaagagaaggagaagggaaaaggaaggagccaaaaggcaacgcccacgagggcacggaagaccaagcaggaaaggcgaagaaacgggcccaaaaagaagagaggcgcaggacgaaacagagcagggaagacgccaaaaacacagcagcagccggaaaaagccaaaaggccaaggacagcgagggccggcaggagggcagaaggagccaccagcccagaggcgaaagggggcgggacgaaaggcccagaacagcacgccgggaagcaaaaccacggaagaaaagcagggacagccccaacggggggggggcaacaaagggagccgccgaagagcccgagcccgaggggaaggcggcaacaaagcgccgcgccaccacaccgcagcagcccaagaggacgagacccaggggccggcacgcagccccggaagggaccccaggcccccaaacgggaagccccacccccgcagaccaggagccggggaaagcacacccacacacaggacagcagcacgcgacccaaaaaccccaggaaaacaaaagacaccaacacaggagccccaaagccagcacaaacggaaaacagcgcaacccagcgggccagaggccgggaccggcagcgacagaacccaggcgcccggcgccccggcgggagcaccgggggaaagcggggaggaaacccagggggaacagggagaaccaagaaccagcgaagaaaagcaacaacaggcaacacaaaaagccagggcagacaaccgagaggggaaaagacacaaaagcaaaacagggccaccacgcaggacaaaggcaccccacaaaaaaaggaagccgaaccccagcagggggacgaggaagcagggccaaagaggcgaaaaagagaggccggggggccaaccaacgacgggccaagaaagaacagagaccccaggagcaacaggaggggcccgcaagcgaggaggggaccaggagaaagcaaacccacggggcgaccgaacggacggagcccagaaccgaaaaaaaacccgcgaaacccccagcgggcccgccagacagcccaacaaaccaaacaaagacaacagagagccagaggccacggggcccgccgggggggccaggcaacacgccccacccggggccgggcgcaccaaacccaccccggcccggaaccacccaggaccacagcccacaccagaggccaaggggcagccgaggcagaagaagaacaccacggaagagccgcagggcgggaccccccccaggcagccccggcgcagccaccccccgagccaggacccgcacacccccaggcccaaagaacccggagcccacgacagagcacccacaccgggcgaccccggccccagagcccagcccaggagaccgcggggcacgcgccccacccacccccccaccagcaccggccccgagagcagggccaaaacagcgccacggcagacaccggggcggagggagcaggagcagggcacgaagccgcgggcggggggccaaagcacgagcggagaaggaaagggccggcagaggaacagggggccggcccagagggagccgcagcagcgcggggcggagaagcaggaggggggaaaaaagcaagaggaggggggagggccagagggggcggagaggggaagggcaggccaccaaggacccagagcagcagggcaggacacgagaagggaacaacccaggggccgcagggcaagccccggccccccagggccaggggccaaacccaaacccccacccaggacgccccaaggagccacggagagaagaggccccaagacccacaacccccagcgaggccagcagcacgagcccagcagagaccgagcacccgaaagcccccgcgggagcccacgacgcgacagcgcccgccccccccggggcccccccacacaggggaacgcccccgaaaggagagggccaagagggaacaggcagcagcagccagacacacagcccgcgagcccaaacaaaagaagcccaggacccaggcaccgcaaaagacagccaagagcccgccaggaaggcccagccgggccgggggggaagacaagcccgcacaacggcccaggaaaaaacacagaccggagaggggaaaaaacacagcaagagccgggcaggaaagcccagggagaggggaacaacaccagagaccagcagaggaggaaggacaaggacaacgggggcccaaacaaaagaaggaagaggccaagaaaggaggacaggccaacaaaggaggaaaaacaccaaaccacgaaggcacaccaaaaagaagcaagccgcacacgcccacccggcaccccacagggcagggacggacagacaagcagaggcacccggcacaacagcgaacgacaaaaaaacccggggaagaaaaaacaaggagaaaaaagaaaaagagcaaggaggagcccaggagcgaagaggggaaagaaaaccagaagaaaaacccaaacagagacaaacaaccagcacaagcagagcagcaagaggggaagacggaggcgaaaaaacaacaggcacaacaaaaaaaacagaaagaaggaggcaagggaaggagggcaaagcacagaacaaacccccaaaaagccagcaggacaaggggcaccaagcgaaagcaaaacacaccccccaccccccaaagcaaaaaagaaacaaaacaccgggcagaggacccggcaaccgccaagccacacccccgagaccccgaacagcggccccacgccccagacagccagacggcgcaggcccaaagcccagaagcagcaacccaggacggcaacaaaccggccgggcagacccacccaagagccagggcgaacaccaaccggagcaggacaggcagccgaccaccccaacagacacaacagcacaaacagaacacaccccacagccagccacccaccaaggaacccaaggcccggcgccagagaagagagccccggggcagcgcgagggcaaggccgaaaccagccaagacccccccaccaggccgcccgccccagcagggcaaggccacccacccaagaaaaggccccaacccccgccagcccgccccgggccgcccaccgccgcgaaggacacaggcccgcccggcagggggggacgcgggggggagcacaagacaaggaaagggcccccaggccgaggcgcgacacacagacaggcccgggacaacggaggccgggcagaggcggcccccagaaaaaaaccagacgacgcaagacacaaagccaaaccagaagaaggacggacacacaggaaaagaaaaggcgccccacaggcaaacaggcgccggcacgccccgccagccgccgggaccggcaagccgggccgcccgggccgccccgggcccgccccgagccgccccgccggccccagccgcgccgccccgagccgccccgccggccccagccgcccgccgccccgccggccccagccgcccgccgccccgccgcccgggcccgccccccccccccccgcccacacacaaccccacggcgccaaccagccaagcccgccccgcacccaaagcccccggaaggccacccagaaggggcaccaaaagggggacgcaaaccagaaacgacccgccacagacccagccggaccgggccagcagggagggaaaaaccccaaggagcgagagaggccggagaagagggagcagaggagaagaaaccagagaagaacaagaaagaagagaggaaaacccaaaacaaagcccgccaggccaagcaccgaggagggcgcagcaccgggccgcggcaggaaggagagacagcccacccgcaggaggcgacggaagggaacagcccgggagacagagaaagacaggaagaagcgcgggcacagccagcagaaacagcagcagaagaagaagcaagggagggaagaaagcgaggggggccgcaaacaagcaggaacaccaccagggcgccacacaaagcgcagacgggcggcaaacaaacacaagcacacgggaggcacgagcgagacaagggccggcaaagagcccgaggcccccccggcgcaggggccccccgccaggccaaacggcccccggggccaacccaaaggacaccagccggaggaagggcccaccccagacccacaaacccggaaagacccacccaaacagcacacagagggcgagggaggccagccaggagggggacacgacagcccaaacagaggggcaagcggacaccccggggacccgcagacccacccccgccccgcccgccccaggacaccgaccacaaaagcaagaccccgcccccagccccagaagcgggagcacagaagacagccaaggagggaggaggggaccccggcccccccgcgcgccaggcaggcagcacccacccgaggcaacagcaccgaggagagcaccgcccaccagcccccccaggcgcgagaaaggcgccccccggccccagacagagcacggaagcccccacgccagaccggggggcaacaaccaaacccgcccccagcgaaagaccccaaacaccaaagccacacaggggccaccgaccaaacagggggacaggcaggaagaacagagaaagaaaaaggaaacaagaaaaaagggcccagaagccaagacacaagaagggggcagacggaaagaggcagaggaagaacgaagagaggccagcagaggaagagggggggcccaagcaaccccagggggggcagggaaggcaggagccacaaagcaaaaaaacagaaggagaagaggggcagacaagcagaaaacacacaacaaccaccagccacagccacacaacaagcacggccgaagccccagacccccagccgcggcaggacacccagaaggggcagggggggggcagcgaaggacacaacacagacaaggaagaccggaaggggacaaacgaaagaacagaacaaccccagaagcaaggcgagcaaaaaaaaaaacaaaaaaaacagcgacaaaaagccaagaaagccaaacccccaaagaagaaacccaaagacacaacaagaggcacaaagccccaaaacaaaagcagaggcgcagcaaaaccgagcaaaaagcacagaaagccagaccccgccccgccaccccacaaagccccccacgacagagccacaccaaagccagaaaaagcgcaacccaaaacaaccaagaacgcccaaaacccgacaacaaacagcagaaacggccacggccgggaggagaaccaagagggaagaccccaagccaaagccaagacaggccacagcaaacaccagccaccccccgccggccgcgcgaaaccacagcgaaccagcagcaaccacaccccaagccacaaaaccccgcccaggcaaggggggaggcaggcaaagcaaacaagccggggacaccgggaggcaagaaacgcaaagcgaagcccccaccccacagagacagaacaagagccgccacaccacacgcagaaacacgcaagcaaaccgccagccagacaggaacaagggccaccaaagaaaagaaaaagaaaaaaaaaaaaggaaacgggacggccaacagccagcgcacggaacaaaacagaggccagcccaaaaaggacaaaggacgaacagagccccaaagaaggcaacagaggcccgaaggaccgaaaagaccgcaacacacaaccaagggaaagcaaagcaaaaccacgaacaccgccaaccacaggaaccaggggcccacccaaaaaaaaaaaaaaacaaggcgggggaccgggagggacaaaaaaacggggcagggggcggacagaacacacccagaagaagcccagacccaaagacccgcccccccccacccccaccccaagagaccccagcgccgcacccggcagagcgacaaccccacaaaggagaacagggaggcgccggaggcaagaaaaagcccagcccaccagcccacaaaagacagacacaaagcgcgagagcagggaagaccacacaccaacgcaaagggcaagggaccagggcagggcaggaacagaccaggaacaggcgcaggaacacgggcacggcaaggagaagaaacccgggaaacccagaagggagcgggcgaaggagcgagccgaggaacgccgagcacaagggaacaagcacccaccaacagagcaaggagcccccgcaaccggccagcacgaaaacaacaagccacgacggggaaagggaccacggggagcaccaggacaggagggccaagcgggccgcagagccgagaaggcgcagccgcccaaaaggggggccgaaacgaaaccaagggcggaaagaccgcagagcaaggcaaaacccacgagggcgaccggaagcgcggcagaggccaggaaagacccacgcaacgcggcgagcgggcgcaaaaacgcccaccagacaggaaggaaccaaaaaaaaagaaagaaagaaaagaagaagcggcaaggaggaaacaccgaacacggcagcagaggaaaaaagggacaggcgggcaggaaccgaaaaaaaacaggaaacacacaacagcgaccaccggaacacaagaaaagaaagcaaagacgaacagaagcacaacaggcaacacaaagccaaaaagagaaacaacccaaagccacgaagagaaaaaagggacaacagaagaaaaacagccaaaaagaaagaaccgaccagcgcaacaagagaaccgaggaaagcaaagaaaaagccagacacaaaaggacaaaacgaaaccaacagagacgagaaaacaaacaagagacggaaaaggaacgggaccaggagagagaggagaagggagggagggggggggcagggacagagcagcgcaagaaaaaaaaagcggagaggaaaggggagaggcaaagagaagcaggccacgaagacacaaaaagggcaaaaggaaaagaggaaccagaaagcacaaaaaacacaggagccgcaccccgcaccaagccccacagagcagggacaggccagggaggcgccggcacagccacaggagacagggcagaggggagggccggagacaggacaacccaccccgccaacccaccagggagacacgcagcaagggggagccagcagccaacccagagacccgccaccaccgcgcggcccacaacccagcccaccacggcgaggccgcaccaggcccaggcagacagcaccaacaccccgccaggcaacgcccaaagcccgcccgagcggaaaaagaacacgaggaagaagaggcgacagcaggaaaacagaagacgcaaaagaaaaaaaggaaagacccaagaaacaccacagaaaccagcgcccaccgcccacagacaccggcccagccaccccggcaccgggggcacagcccaggaggaaacgcccacccgacaagccggggggacaacaaccacagagcccccagaggccccccgaggcgcgcagccgaggaggacaaaaggagaccccaccaacaaaggcccggaaaccagacaggaaggagcgacaagagcggaaggggcagggcgcacgaagccaccgccaccccacccgagacagggcgcagggagagcacccgcagggacaggagggggaagcccagcacccgggacacacacgcagaagggagcgccccccgaacccgacacgcaaggaagacccgaaccgggaagaggggaacccggccaccagccgaacagcccccggcaaagaggagcccccaccgcccccggccgcgcaaagcagggaaacgagcacggggacccagaagccacagaggccaccaggccgcacaagggaagacagcgagggagacacaggagacccagccgaccaccacggggaggacaagccaggagaaggaagaggaggacgggagggaggaaaacacaaaggacagggcccacaacgagcgccacaaaaccccggggccggagaacacagagggggcaccccccagcacgacaggagggcgggcagggccgagaacgcaccaagagccagggggcgcgagccacgaggggaggaaaggagccccggcggacacggaagggacccacccaccccacgcccaggaccagccgggcccacccccccaccccaccggcccacagcagggcgagccccccacacccaccaaccaccccaccgcgcgcggccgccccggacagccgggaccggccgccgccgcaccgaacgcgccccaggccacacccgcaggggcccgaccccggagccagaccgcccaaaagcccccaccgcaaccgacgacagaccagggacccgaccgccggagcccaccagccgacccccagcaaaaccccccaccggagcccagccacaccccaaggaccccccccaagacccaaccccaagcgcccacagagcagcacgccaacagaccagagaacacgaaaacacagaccgcgaccaaaaaccaaaaaaagaaagcggggggggcgggcaagccggcacccggagcgcagcagggggacgcgagcccaggagcaggggcagagaggccacgcagagaaacccgcacaaaaaaaaaaaaaaaaaacaaaaaaaaaaaaaaaggagaagagagaagaagaaggagaaagagaaagccaaccagagaggcggcgcaaaccacccagcacacgccccacccccaacccagacggaaacaccccaggcaggagcccaaaagcaccacaggaaagaagaacaaacaaacaaaaacacagacagggacaagaggaggcagaaaaaccccccgccccagcaaaaagacaaaaagggccacccaacccggaacccagaaagacccaggcaaaagggacgcagaggacaagggagagggaaaaccggacaccagggagcccaacaacacacgagccaaagggggaccccccgaggggcacggagaggggagcaggaagggcagagacagacgaaggggccaccagcccaggggcaggaagaagccgggaagcacaggagaacagaacccagaaaggagagcagcgccgccacccacgagacccaggagaccgggcagaggcagccaccaggaggaagagcaaggcagaagccacggggaaaggagagcagcagcagaacaaacagcgggcggggggcgcaacacaggggcacgacccgcagccagagcaaagacaagagcagccaaacaccgacccaggaacccagaaggaacgcacagggaacaaaggaaccacccaaaagaacaaagacacagaagacagaccggggcgacacacaagccaagaaaaaggaagagggcaaagaggaaaccggcccgggaacaaaacccacccagaagaggccgggagacgcaggcccaaacaggccacaaggaacgcgcccggccgaaaccgacaagagcgcagaccagcgcgccagagaacccagagccacgcaccccccagggccccacccccacgaccggcccagaggcagagcagcagcacaagggccaagcacagcaggggcacagaagaccccaggccgggcccaccccagcccccacccccccgcgaagggaagccagcaagccaggcaggggggagggaagagaaggcccagggaggcggggccagagcaggagaggagaccaaaggggggagaagaggggcccaggaaggagacgcccgcgggaaacccgaccccagccagggccaggagccagcccgcgagccaacaagccggcgcacaacagcacgaagccccagcccaaccagcgggccagggggagacacacggccaagaccccgccagggaccaaaacaacccgggcgggaaaagagcacgacagaaaaacgaaagccaagccgaaagagaaaggggggggcccaaagagacgaaggggccaagccgacaacccacagagaacaaagggcagggggcgagccagggggagcaaaggaagcaacacgcccacaggaggaggcagaaaaaagacgggaaaaaacgacccagcccagcaccgccaacaacagccaacaacagccagagcccccgcccgccccaccccagccagagcaagcacagccccgaaccaagcaaaagccgagacccccacagaagaccccaccccacgcaaagaaccgacagacaacaaaaagacaaagcggacacagaagccggcaccaaaaccaaaggaaggaggcggaccgcaaccccgcaaaacaaaaaaagggccacccaagcagccagagggggaaaaaccgagcaagaaagaggaaccaagggaagagaaaccgcacccccacaagagacagggcagggaccaacgaaccgggcccacaagcacaaggcagaaagaaaaaccaccccccacagccagaaccgcacagaaagccaagaggaaggagcacgggagccaaccacaaaaaacacggagcccagaaccagggaaaggcaggggacggaacagggaggcacacgcccccagcacgcagggaaacgggaccacagggacggaccacagggacagggcgcgggacacaaccgcagccgggggcacgagggccccaaaaaacaagccccaagagagagaaccaacggagacaccagcaaaagccaggagcggccgggcgaggaacccaaacagcaacacgacaaggaaacgacaaacacgcaacccagcagcacgacagcacggaccagagagacaaagcgcaccgccaccaccgcccccagcagccgccagggaaggagacacccagcacaccccggaggaagggaacagcccacccagagaggagacgaggcagcgggaaggacccggggcacaaggaggggcagagcggacgacgaaggccccacccagcccccccgagagcccgccacggcacaggccaacccacacccgcgagggcgccagaggacacggcccagccgcagacccggcccccaccccccgcccccccagcacacgccacaaagaggaaaaaggccaccgcagaagccaagcgcgccagcaggaccagggccgacaccacgccaggcccccgaaccacccacagaggccgccagcagccacagagccgagcaggaagcgggcgggggggggggggaggcggggggcccgggggggcagggggaggcaggaggggggggaggccgaggcgggccacacccgccagagcggaaggcacgcagccagaggcaggcccggaagaaggcccccagcgagcaccagggcgcaaaaaagaccacaaacagggaacgcgaaacaacagaaaacccaagcggagggcagaagcggcaacaaggcagggcagggccacgcccccgaaggccagggaggaacccccgccgcccagccaccacccggcacggccgggcgcaccgccccaccgcccagccacgcggccccccggcccccccccagaaggagagcaggcaggaggggccaccaacacagacccacgacaacacgcaaagacccgccaaaaaagccacacgaggcggagacagaagcgggggacaaccaaccacagcaagcggaccacccccgccaggccccggcaaacaagcaggagcaccgcaccccaaccaggaaggggggcgggcccagccccgcccgcccccaccccagccaggcaagcgcagcccggaaccgacgcaaaagccaagacccccacggaagaccccaccccaccgcaaagaaccggcagagaacaaaagacaaaggggaacagaggcccggcaccaaaaccaaaggaaggaagggagggaggggggagaaaggacacaaggacccaccaacggggaacaacgcaaagccgggggcagaggcggaaaagacaggcccaaagacacagcccaccagagacagcgcacagaagcaggcaaccagccaaccaggcaagcgacccaagcagcacgcaggaaagccgcagcggggcggacgcccggcgagccaggacacacaggggagcccagggcccagcagagaccacggaacaaagagagagagggagaaacgagccacgggcaaccccagaccaccaaggggaccgccacaggagaggccccaagcccacgagccacccaacccccggcagacggacaccccaaggacggagagcaccaggggcagaaaggcaagggggagagcagacacagcccccaagagcaacgccaggaaggaagaccagagaacagagggggcagagacgggagagacacgccggaggaggagacaagaaaacgaagagcgagcaagagaaaggggccgccacgggacaaacagaggccccgccccagccccgggcgaaagacacacggcagaccgcccgccgcggcccccaggccagggaacccgcccccagcaagagacaccgagaaaaaaaaagaaacgagcagcaagcgggcacccacagcacagcagcgccccaggggacgccaaccacgacgaaacacaaccaacaaaaggagcagccaacagaaagaaaacaggaaaaccacgccaaagcccggcacccccacccgcccacccagcccagcccccccagccaagaacccgacagccgacccgcggcagaaggccgacccagcagcgaggcgaagacagagcccacacggagcccacccgcagagcccccagcaaggaacaggggccagagagcggcacagcccacggcccccacagagggggacccaggcagaaaaggaccaaaaccaaacggccacacaacccccccgcaaccccaacccacaagaagagagaacagaacgcgagcaaaggagacagggacccacgggggaacagaaaaagccaaaccacaggacaaaaaaaaaaaagcaccaaaacacaggaaagacaggagaaaagacaacacagaacaaagagaagagaacccagcccccaaggggacaagcaaccaaaggaagagagaaaaaaagcagcgagaaagaacgaaaccagggcccaaggggccggggccagcagcgcagcacaccgggagcgagaaagcaaacccgggcccacccagaccgaacagaaccgaaaccggaacacgcccgcagggaaccgacacaaccaaaccgagaaccgcggcaacaagaaacaaagagcagaaccggaacagcaccagcacaaaagaaccagggcgcacacaacaccgcaccacccggaagggcccgaccaaagagcccagacccaagagagacagcacaacccggaggcgagaggagaacacaacacaggggcacacgcgagcaggaccagacaccaggcgcgcacaaacaaacccccaacaaccaagggaaaaaaacaaacaaaaaaaaaaaaccaacaacaaaaaacaccaaaccacacagagagaaaacgaggcccagagaagaagcacgcccaaggcacacagcgagggacagagagagcggagccacggccggccccaaccacaagaggacccgcaggaaagaaaaaacgggagccagaacaggaagacacaaacccagggaccagaggcaagaagccaccccacacagagaacaacaaggcccagggcacagggcaaggacagggcccccagcggcgcagcagaaccaggacaacccgaggcaccaacgacccacagaaaagccacagcccgggggcagaggagaggacagggcaggcacgcgccacaagcacggcccaccaaacgccacggcccaaaagcaagaacagaggccgacccaggaacaaagcagaacaaaaaagagccacaaaaccggaggagcaaaacaggaaaacccagcgcaaaaacagcaaggaagcacgaccccaccgcacccagagaggacgccaagcggagccgccggcagaggcagagaagccagacggcggggaaaccccccccgccacccggcgcagggccggccccccgacccgccccgcgggccgcacaaagggcgagccacgccgcaagccaaacagaggcgccaccccccccggccggaacggggagccgaaccaccacagccgacacccaacaaaaacaccgaaaaaggccaggcaccaccggcccgaagacagccccaggaaccggagccacggagagcccaaaacagcccgggaaaaagccccggcccgcgggggcacggagcaacagccgcccggcccacccacacaaggcaggggccacagccacacccagcccccaagaggccgaaacccgggaagacaagcaagcgaacaggaaaaagcacacagaaccagaaccccaccgggggagccacagaacggggggagaaacacagaaacgacaagggcgggaaccagggccaacaagcagcgaaacgaacaaacgagacggcaaaaaagagggcaaaggcagcaaaaccccaagccaaaagggcaaaaaaaacaccagacaaagaccaaccaacaaaaccaaccacccagagccaagagggacaacaaaggaccccaccaaaacacgggaaccccgaccaagcagcggccgggagggaagaagggggcacccagcagggccggggaaaggccgaggggaggggcccaccgcgacaggcagggggggcaggggacaggaaggggcaggaggggcagggcccacaccccaaagggaagagacgcggaggggggggaagaaacaccgccccagcgggcccccgcaccacagcagcggaggcagaaaagggggcagggcgcgaggggaacgagcgaaccccgaacaggcccccacagccccagcacccagaccggccacccccccggccagccaagaccggcagggaaaaacagcccccagagccaaggcgacgcggcccaaggcacggcgggcgccccagcccgcgggccagcgccccagaaggaaaagagacgcccgggagcccaagggggggggaggagggaggagaggaagggacaccaaaagcgacaaacagacgaccgcacaaacaagccaacagcggcaggaaaagcacggcggaaaccagaaaaaaaaaaaggcaccccagcgaccccaagaaaggaaagcgccccacaccaaaaaaagaaacgaacagccacaccagaggcggcgcagggcccgaggggcccacggaacacaagccaccagccggccggccccaccgagcagcccccggggggaaagagaaaacccaacgcggacaggcccggcccaggccccgacccgcagccagggcacaccgagcaaggccagggcaccagagcaccccaacagccagaccccgccccagcaaccgcccccccaggcccaggaggacccaagcccggagagaggcgaagccccccagccggccgcggcccccaggccacgaccacacacacacccccccgccacccccaggcccccccagcccccagccaggccccagcgggcccaggagcccggccaccacggccgcgcggcacaagccgccccccggcccggggacacaccccagccgcaccagcacaccccggcacccacaaccgggcccgcccggggggggcggggggagaagaagacagaggccggggccagaggcagacacacagagagaagcgaacagagcaggaaggacaacggacagcgcacccggaaaagaaggcgaagcaggaagaggagccaggcggggcacgaggaagaggggcggggcccgcgggaaggcagaggggcgcccggaacaggaagagaacacgaagggcagcacacgccaagccaccgccagccacggagaaggacgaaggagccaaggaggcaccaggaagcacgggggcagggcgcgccaggaggagagggaggggcccgcccggggggaaggggaggcgaccaaggcacagaacaaccgagcgaggagaggaagggggcaacccagaacccaggaaacaaccagaagacaagacagaagagagaacaacgaaggcgcggaaggaggcagagaagccaagacgggcagcaagcggacacccaggagagcaagggacagcccacgagcaaaggccgagaaccaggagagcccagaggaggccagccaaaagcgcaggccaagacccaggaaaagcgggcagccagccaaaggcaggaaaaagcccagagcagccgaaggccggcaggcaggaggaacccaccgggggagggccagccggcaccagccgggaccccagcgaccagaggccccccgacacggggaggacaacacgcgcaccacaccaaggaaaaccaccaaaaacagcccacagaaagcccggaacaggaggccaagacgggcaccccagccccagcaaggccacaagaaacaggcagggagagcagggagaagcaggggggaggggggcaggaggcagacacacacacagggggagccagacaagaagaacgagcaggggacagccagggcagacaggcaaggaggaggggccccgggaggcgggaggcccaaaggaaacaggcggagcaaggcacaccaggacagagcccgaggacccccaaagaccccacgcggaaggagcagacggaagagcggaggaaaagcaccgggaaggggcggcagggacggcccagggggcagagggacccggcagggggccgcacccaggcaccaccacgacccccagcaccgcccacacccaacagacaacgaggagcgaggagaaaacccacccagcaccgcacccaccccagccccagccaaaggaaaagcaaaccaaccaagaaggccgaaggcaacggacacacagcacagcagccaccagcagaccaccagccaaagggcgccccgccacaccgcccagaagcccggagccaccgcacagggcacccaagagggaggggagcgccgccaccgacaaagagagagaagacaccacgcaacccacccccacacacacaccacgcacacacaccacacagccacacgccacaccacgcaacaccacaccagccacaccacacaccacaccagccacaccacgccgcaccaccaacacacccaccaccgggccacacccgggcgagcaccaacaacacaagcacacagcacacacacacacaacagaacaccgcacaaacgcaccacaagccacaacaccacacaacacaacacaccaccccaaacacacaacacaccacacagaccacagcacacacacacagcacaccaaagccacacacacacaccacagcacacccacacacacacacacacagcacacaccacagcacccaaaccacacacacacacgcacacacagcacacacacagcacaaccaaacgccacacacacacacaccccacagcaccccaaacccacacacacacacacacagcacacacacagccacacacacaccccacagcacacaccccacacaccccagccggccacaccgccaccaacccacccgggccgagagccgcgcaggagaaggggccaccccaggcacagggaggagggaggccagaaggccaagccacagcagaccaaggggacccccaaagcagcggccacaagaagggcaggaaacgcggaaaaaggaggaggagggaggcagacagaaaggaagacacgcaaggaggcgcgcccagggaaacacagcagaaggcaggaccaggggcagccgaagccacagcgcgacaaagacaacccaagacgggaaaaaagaaaagaggaaggacccacggccacgggcggggggcccacacaagcagaaggcaaaagcacacacaggcggcaggcaagaaagagaagagaaccacccccggggagacagagccgccacgcccaggcggaggcaggagcgacggccacgcaaaccgccccgggcacgccacccgcccagccaccagagagcgggacacagggccgccaacagcccggcaaccagagagacggggcaccagagccaggaggcccacccacccggacccacccaccggcccccaaagacgggaacaggcggagccacgcgcccggccggccccaaaaaccacagaggcagagacacacgccacagaacagaagggggaaacgcgcccagacaaaccacacgggccccccacaacacagggaaagggagacaacaagaaagagggggggacacagccaaacaacacagcccccacgcagggccggcacgacagacggggaaccaggcaggaccgccgaacccccagaagacgagggaacacacagcaggcaaacccagggacaagccaggcggacggccccaggaaagaaggagccgacacacaggaggggcaggcaaacaacaggagcaccagacggcaggcaagaccaaaaaaacaaaagaaaaaaaacagaagaaggaggacgaacaccagcacacacaaaaacaaagagagaagagagccaaaccaggcaacacagagggcggccagcaggcgggggggggcccggacaaagcaccacgaacaagcacccggcaccgagagagacagccaggagggaggggggccggaggccccacgaggccaccaggcagccacgaaaaccgaaaccgacgggaacaacagggagaccgcggacgccagggaggggcgcaccagccaaaagaaacaggagccccacgaacagcaaacaaaggagaaaaaggcgcccacggggccggaaagacgggcaccaagcaacgaacacgaaaaagcaggaccagaacccagagggccgagcgggaagccacagacaagcaccccccagaaaaaacccacccgagaggcccccacagaaccacccacagcccgaggcacacaccaacgagaccacgaaaaacacggacacaaccagccacacgccccaacaggaaaagcacccgcaccagagcccgcgcagccaccggacaggggggcgaccaggccaaacccacagcacccccaccgggccaagaaccaggacaccaccaaaaaaaaaaaaaaaacgaagaagagaacacaccgaggcagaagccgggccacaaaacgagaaaccagggccggaacaaacccaaaaaaagcagagagcgacaaaaagagcagacaagaagggcaacggaacaaaaaggggcggacccagcacaccacacaaacagcaaaaggcggggggggccacacgaacccagcagcgaggcagaggcaggcagacacgaggcaggaggagaccagcccgaccaacagggaaaccccaccacaaaaaacaaaaaagccagggggggccgcccgaacccagcaccaggaggcgaggcaggagaacacgaacccgggaggcagagggcaggagccaagacacaccagcacccagccgggcaaaagagcgagacccgccaaaaaaaaaaaaaaaaaaaacaaccagcaaaaccggaacagccaccgggcgcgaaaggccccacgagaggggccaaaacagaccaaaaaggaagacacaagagagaccaaggaaagccccccccaggaagaaggggagaaaaaagagcgagagcgcgggcccggggaaggaaggccagaagaagacaaggcagcagacacaaagaggcgagggaccgaaccacggcgacacagacaacaccaacaaagacagagcagaaaaggaggacacacaggccgccccaagccacacagcccaccaaacaaccgcagccgaccacagcgcggccaagagcccggccccaagccccccaacccaggaaaaacgaggggggaccacgaaaagaagagagaaagaaaggcacagggccacgccgaacccagcacgggaggccaaggggggaacacaaggcaggagcaagaccagccggccaagagggaaacaccgccacaaaaaacaaaaaagcagggcagggggagcgccgaaccagcacgggaggcgagcagagaaccaaccgggaggggagggcagcgagccaagacggccacgcacccagccggggacgagcgagacccaccaaaaaaaaaaaaagcaccacaaagggaaagacagaaacagcccaggaaagaagccaggaagggcaggggggcaaggcgaagaaccacaagaaaacggcacggcccaggcggcaacgccaaccgccacaaaagcaggcaacagccgggaaaagaggaagggcagagcagcagaacggcaaaacagaagccaaaacgggcaaaaagaaaaggaaacacagaggaggcgagaagccaggcaagaggccacacgggaagacccgcagccaggacccacagagccggggggggcagggcaaccggggagaggaccaagccaccccgcacaaagccgccagcccgccacgccccccccacaaaacgccagccgcgagaaaaccaccaaccaaagcaaaccaaaccagaaagaaaccacagagggcagagcccagcccccacaccaaaggcccaccaaaaggacgagagacaagcaacagagggagaggacacaaaccaagaagggcaagaaaccacgaggagcaaaagaaacaaaacagccacaaaaagcccgagcccacacaaaaaaaaacagacagcggagccacagaaaagaggcggcaggcagacgggcggggcgcagcgcggcacgccagggccaccccagaacaaaaacggcacgcccaaaacacgcagacaggacacaccaaacaggagcaagcgagacgaaaaacgacaggacacccagaagcgcgaaacccagggacaccaaaagccgggaagcacgcgaggcaccaaccagaaaagagagagaaacccgaagagaggcgagcccaccacccagagaaaaaaaaaaaaacagggcacaacaccaacgagagagaaaagaaggcagccgcagacacaaagccagagggagaaaagaaaagaccagacaaacgagagcgcggcgacacagccaaaacgcagaagcacagaccagaaaacggcaagcggcaagcgcaaaaaccgacaagaaggaggaggggagaggggagcccgcaccccccccccggaggggaagccacccaacaccaaagcgacaaaaccaggggcacccagccggaacgagccaccggagccaggaaagcagggggagccccccagcaccgcagccacacggaccagcaaaacgaaccccagccggaggaacccccagacagcgagaacaggggaccaagaagcacaaacaaccccccacacccgaccccacaacaaaaggaggggccaggcagggggccagccgaaccccagcacgggagacggagacaggggccgcgagcccaggagcgagacagcggacaaaggcgaaacccgccacaaaaaacaaaaaaaagcaggcgggggggggccgaacccagcaccaggagggaggcaggagaacacgaacgggaggggaggcgcaggagcggagacgcaccacgcacccaacgaggcaacagagcgagaccaccaaaaaagaagaaaaaaagaaaaaaaaaagaggaggaaaaagccgcaaacacaacgcccaagcaccggggccgaaagcgaggcagcaagacacgaacaccagaaagggcagagcagagaaccccagggacgagcgcagaccgcccacagcaagggaccacgggccgcacgccaggacaggccgcgcaaacagcaccccaccacaaacgaccaccgacaggaaaacagaccggcagacagaagcgaggcaaacccgcagaggaccaacacaccaaagcaacaaagaaaacaacagcaacacaccagcaccaccccccaagggggaaagcccaaaaacacggcgggggggcaaccacaccgaacccagcacgggaggcccaggcgggggggacgcgagaggaggagaccagcgggcaacacggcaaggccccaccacaaaaaaaacaaaaaagccaagcaggggggcccgggccagcaccaggaggcgagacaggaggagcgagcacaggaggcgaggcgcaggagcggacacaccacgcaccagccgggcaacaggaaacccgccaaaggaaaaaaaaaaagcacaggaaaaccggagagccaaagacaaacaccaagccagggccaaagacaacgacaaacaccaagaaccaaagaagacagaaaccgggaagaagaccagaagaaaaacaggaaggcaaaggaaaaggagagcggcacggcacccagaaagacccaccccgcccaccaggggcaccccccaccccaggacagccggcacagcgaaccagcccacgaggccggagcgcggcgagccgcagcaggagccaaccacaggccccgaaccccagcacccggccacccaggacaacaacacagacaaccccaaaaaaccccggccgcaaggcaagcccaaagagcacacaaaaaaaggagacacgccaaaccgacgaggagcaacccacccacaaaggcaaggccccaaacaaaaagagcacaccagccaccgagcgaggcagagccccaccgagaggggaaaaggaggccagggggcaggcacaccaaaggcacacgacaaaggaaaaaggcaacaaaccaaaggagggaaaaaagcagccggcaaagaagaaggaggaaaaacaggaagacagggaaaagcgaggaaaagagaaaaagaaagaaagggagaggacggcggcgagggaaaaacccggcggggggggacaagagagacaaagaacacgggcgcagcggggacaagagaacagcaacgcaccagacacaacaaacaaacaaaaagaaaaagaacagaaagaaaaggaacaaaaaaagaaaaaagacccacgaaacaggcccggccccccaaaccaaagcagcaggacacgccggcagccccccgggcaccgacgggggggaagcaagcagcagcgggggggacccgccaggggagcccccggaacaccagagcgggggaaaccagcaaagcggggagcaaggggccaaacccaggcccaccagaagccccgggccccgccagagccaggaggaccgggccacagcccaggaaacagacggggccgggcaccccccagcccacccagcgcggggcagcgagaggagaaaaggcagccccaacacaaagacaagcaacgccgggacccccccggccagcggagggcagccgaggccggaccgccgcgccagggcagcgcccccccccaaccagagggaaaggcgcaccacgcaaacgccacccccagcagaccccacacccaaacaaaacagcaaccagacacagagcccaaacgaaacccaccccccaccccaaggagggcaagggagagaccgcccaccaacaacacccacacaccccaaaaggaagaagccacccccaaacgccccgacgacccggagccaggccgcggcgcccggggcagggcagggacccgggaggcccgaggccaagcccgagcacaggcgaccccacagcaacggggaagggcgcggggggagcggggacaacgggggcgggcaacagcagcggcccgacgcggcggccgcagggaaaccaggcagagggacgaggaaggcgggggggggcagggcggggacaggggagcaagggggggccaccccggacagacccccgggagagaagccgggagcgggccgggcgcaaagggggagagaggggaggcgccgggagggagcccgaacacaagcgcgggaggggggaagggaggaggaaaggggacgggccgggcccccgggagggcgagcggggacaggcacagagcagaaaggaagccacacccaaaagcccaaaaaaaaacccaggaccccgaccccaacgccgcggcacacaggcggggcaccaaagaagagaaacacagcggccacggcgggcggccagcgcggggaaccccccaggagggaaaagaagacgcaggaggggagagaaacggggggccccggccagccccccccggcccagaaagcacagagaacccgagcccccagaagccgacccacaccggcggcccagggggccagcccccccagcacccacccagcccccaacacgcaccccaggacccccaaaccacgccccaacccgcccggcgcccaggccagcgagggccccggcagcgccaggaagcgggccaggaaagcccacacagcggcaaccgcacacggaaagcagccagcagccccaggagccacaccaccgaccaccacaaaagggcgaacggacccaaggcgagagagccaggccagccgcccagcggccagaccggcaccgcagggcacgagcagcaagcccgacggaacccacagacaggggcggcccaaaggacaggcacgaacacggagcgggaaccggaagacggacccacccgccggccccgagcgggaacaaacagccccaccccaacagaagggagagagccggaaacgccaacgaaaacaaagagaggcaaggacaaaccacggcccagaaaggcccccaggcaccgcagccacccacccagcccaccccaacccccaagccccaggagggggcggggagggggggcaggagacccagcacccagcgggagcagggagccaagaccacacccagggccgccgccacccccagcaacagcaagggagaagaaaagcccaaagccaggagcgcgagaagagaaaaacagggccaaagaacagaaagccccaggggaggcaagccggggcaccgccccagggccaacaccccaccgcccccggaccgagcacagaggagacccccaaaggccaaccgagacccaccagccaaaagggcagggagagaaacaacaaaagggaagggagggggggaagaaaaacaccgccaccaaagaacagcgcaaacaagagaacggaagagccgggaagcgcgggcggggaacagcccaggggaacggccgcacgaaggcgagcgaacgcgcccagagaaaggcaagcccagcgaaaaggcaggcccccccaaggcaaggccccgacggaggcagccccacgcaaacgcacccccgcccacaggcaggcgcagcgcaggaacaaaaccagcagcccagaggagaggcgcaggcgggcccaggcccagggagggaaaaggccgcccgagcgcaaccgagccaacacgggcgaacgcagaccgaggccgaggacaggggccaaaagccgagaaggaaggaggcgcccacgcggccacggccggcagccacggcgaccggagggggaaggccgggagccaccccacagaagacgcaagccagggcggaggaacgccaaggccagacccacagaagcccagagaggcgaggcccagcccggcccacccaagccggcgacccccaccggacaccgcggcccggaacagggaggacaggaaaggcgaacgcggagacagaaacaaccagagcccggggcgccacaacaaagaacacaaaccaggaggcaaaacaacggaaagagccacccggaggcaagaagccaaaacaaggcgcgccccgagacccagacagagccccccgcccccagcccgagggaccacaacccggcaccccagcggcagcgcacgcccaccgcgccccacgcacacccagggcagcccaaacacacccaccaaaggaccagccaaacaagggacccacccaaaacccccacgacacaaccacaaagacccaccagcacacccaaccgcccagcacaaccagggcggcccacgcacacccacacaagaacaagccaaagagggagcacccaagaccacccaaccgcacacgcaaagacccacccaaaaaggccgccaaacaccaggggggaacaaacacacgagggacacaagacccacaacagaaccaacacgggcgaaaagaaagaaaaacgcacagccaaaaacaaaaaaagcaagaaaaaaagagaaaagccgaagaacacacggagccagggacaagcagcacgaaaacaacagagacaagggagagggacaaaacaacaacaaggaaccagggggagaggaaaacgcacagaaaagaggccagggggggagagaaacgcggggggaggggagaaggacaaccaaaacaaaccgaaaaaaaaaaaaaaaaaaaggaagaaaaaaaaaaaaagaaaggggaaaagggagccagcacaccagcgacaaggagggaaggaaacccgcaccagggcggggagacagagccaccgcacccaggcggaggcagcagcagcccagccacgcaacccccacccccggacaaagacccgcccagcccccaagagcgggacaggcagcaccaccagccggcaagaaacagagacaggggcaccagggccaggcggcgaacccgacccagggacgcccacccggcccccaaaggcgggaacaggggagccaccgcagccggccgcacagcaaggcacaaggcgaaacaacacccccacccgagggcagcggggacgacacagcgaaagaaggaggccagcagccaaaagaaaacgaggcggaaacaaaaaaaaaaaaaaaaagaggaagccacagcgcaggcgacaggaagggagccagcacgccagccggggaggcccgggagcccaccaggggaaagcaagggggggggacacacacacaccgagagcaggagcagagagaaaacgggaggcccagacacgaacaaccagaccacggaaagaggagaaccgccacaccaagggaagggcaagcacagaggaccaccgccagacccaacacccccaccaggccccaccccaacacgggacgaacagcagagaggaaggggcgaacaccaaacagagcaagccaaggagcaacccccccaccccccggagaaccacggcacaagaaacggcgccccagaacagagcaaggcgcaccacagccaaagcaaggagcccagaccaacaaacacgacaacaggaagaggaaaagaaggaagaacagcgaacaaagagcacaaagcaaaagagccaaccacggacaggggcacggcagaaacccagaagcggcaacaaccgccacaggccaaccaaggcgagcgaacaagaacccaagaagccggcacaacaccagccaagcacagcggggaaccgcaaagccccccaccacaccacacggacccacgccacacggccacggggcgccaccagggaggcggagcgggccaggagcagcagaggacaccggagcccgccccagggcccgggacggaaggggacagcaacaaacagaagaggcgggaggcaagagggagacgcccagaggaaaagacaagggagaggggagcccagcccagggcgagccgggggcgggacggcacaaagagcggaaggggggggagcaagcaccgaccaggggacagaagccaccaaaaaggaccagcagggcccaggaacacaagaagcaggggcggggcagagcaaggagcaagagacaggaggaaagaggccagagggaggcggggccagaacagcagggccggaagcaaaggccagacccagaaccggagaagggggccgcgcagggcgagaaggcaggcacaaaagagcgccgcacccaggcggaggcagggcagaccagccacgcaacccgacccgggcaaggaccccgcgcagaccccaagagcaggaccacagcacagccaccacgcccagcagaagagacggggcacagggccaggcggcaaacccgaccagggaccccagccggccccaaagggcgggaacagggagcaaccgaaaccaaccagcaggcaccaaagggaaccggagcggagagaacagcggggaggacccagaggaggaaggggccagggcaaagcggggggcgagagggggcagaccggacaaggaggagcacagagcagccaggacaacaagcccagcagccaccggagccaggaccccaggggagccacagcagggccagagcagaggagagagaagacacacgggaccacagcacccgccccaccagacgagaccacacagcccgagggggagaaaaacaggagccccacaaagaagcagacaacagggaaaaggcaaagacccagcaaacagggaaggacacgaaaagcagagacgcacaacaaaagaagcgaggaaagggccaagcacagaacccccaaaaaaggagaccggaaaagacccagcgaccaagacagagcccgccccaggaacgacaaaaacaaccacaccaacacgaggcaccagcacccagcacggcccacagcagcaccacaaccacagcccagaggaacaaacacgggcagagagaaaacgaggcacaaagaacgccaacaccaaaaacacagggggcaaaaaagcaacacacacagcacagaagccaggcaggacaaaggaccacaacccacagccagagacaggaacgagaacccaacagaaaggaaacaaacgagggaagggcccagcaggagaacccaggcaggggcgcagaacggccaccagcacaaacaccacgaaccaccgaggccaccccccaccaagaaacaacaaagcacaagaaacaccagagagccagggcaggaaggggcaaacgacaacagaggagaggaaacagaggagggggaaccagggagggcaggaggaggaggcagacaagaggaacgaacagggaagagggcaaaagggaggcgacaaacacccagaggaacaaaaacagaagaaaacacgaacgagccaaaagccagggcgacaagcagaaacccccagacgggaaacaggagacccaccacaaaaaagaaaaaagccaggcagggccagccgcagcccagcaccaggaggcgcaggagaggacccgagcccaggagggaggcgcaggagcggagcaccacgcgccggggggacagagcaaggccgccaaagaaaaaaaaaacccccagccgaagcaccccaaggcaaaggccccacgcacacagaaaacgggacagggaggccaagcaacgccgaggcaccccacaggaacagacagagcaggagcaaccaccacggcaaccaaagccaggcaccgccagccccccggcagccggaaggacccacccaaagcaaaacaggcacgcagaaggcggacaacaaggcacaggccgaaagaaacagagcaaggggagccgagaaaacagccccaccagaacccgcaaagagccccccggcgcgagcagccgcgcaggcccgggcagaggaaaaggagccgccgcccgggcagggagagcgcagcccccccgggcagagacacccaacagagaaaaccgggggaaaagcaccaggaagaaagaggaaagacaaaggaaaggcgcccccccgggcacccgcccccacggccaccacccggccacaacaccaccccgggaaccacggggccaagagccaggcaggccagagcgacagggcaagaggccacggagcaacgagacccgcgcaaaaacccaggaggcaaagcagaaaaagacaaaaaaaggagcaaaccagagaaaaccgccagccggaagagagaaggaggccagggcaaggccaccaacgcagagaccaggcaacggaacacagaagaacggggcagccggggagaagcaacgggaagcaaagaacccagcacagcgggaccagaaaaaggagggcagagcagacccgcaagaccaggagcccccgcggggaccagcccacagcccgggcccaggaggaggggcgggagggccagaccagccagagacagggaacaagagaagccgcagccgagcagccggcccgaaggagcagaaggggagccagagcgaaagcaaacagaaagcagaggaaccaacagcccagaccaaagcagcgaaaaagcaaacaaccaaaaagaagggcgcacaggaaggaagccaagccccgccgcgcaagggaggaaacgcagaagaaaaaacgaaagaggcaccagaaaaagaaaaaaacaaaaaaaaaaggagaaaagaaagaaagaaaggagccgaggacagaagccaaaccaacgcgagcaagccggggacagacaaccgcaaaacacaaaggcccagaaaccagcaggcacaaaaacacagaagcacacgcaggaaggacagacaaaaggccagggcccgaagcacggacaacaaccggcacgaaggaggccagccggaaaaaacccagggaggcccaacagaaagcagcagccagcaggagcagaaagcaaccccacgggcgagaggagagcgggccgggggcccaccagggcagccagggcaccggacggccggcggggccagccgaccgcggcccacaccccacagaggaaaggcaaaacccccaggcccgcaggaagccggcccccagagccacaggagcaaccgccaaagaaagagagcaagaagcaaacggcagggaagaggcggggacaggggcacccaggcgccaccacaggcacgcaccggcccaaagagacacgcgggaggaaggacagacagaaaacaga

SEQ ID NO: 472 - RNA, 13561 nt, Homo sapiens
cagcaaaagacgggccgagggacggaaacgcaagaaaacacgagcgggaagaacagccccggaaaaaaacaggcgccaccgagcaaaaaaaagcggggcaggaaaagagagaaaaacaaggagccagaggcaggcaaaagcaggaccgcccccagcagagcgccaccgccagccgaaagagacgcgaaaaaaagaaagaaccccagacacaaagaaggccggcaaacaaagaggcgaggccaagaaaagagcagcagaaagaaaggcgagcgggggagaggagccccaacaaagcggaccaccccaccacgagggacacacgggcaccgcacggagggcagaaggacccgagaacagcaagaacaagccggcgcagcagagcaaaaaaagcaaagggagaagcgcccccaacgagggaacgggggggaaacagaggaaagaagagaaccaacaccaccccccccagcgccccagcccccccacacacccaaagcggaacacccgcgagaaaaaagcacacacagccaacaaagagggcgcaaggggagagaaaacacagcagccacacagacaggaggaagggaagacagccggaaggaccgggccggcagagcggagggaggggagcccggggcagggcagagaaaaacaggacgaaccagaagagagcaaaaaccagaagaaggagacaaagaacagcaaagaaaagagggagccccccgccagcgaaagccaggcagacaaggcacggggaccgagggaaaagaaagcagaaacacacacacacacacacgcacacacacacacacccaaacccacagagagaaagcaccagaaaacacaggaagaaaaggaacaaagccgcagcccacaaaaaaacgaagcgaaggccgcacacacagggccgggaaaaggcacacccgcagagaaaacagaaaagacccagcggaccccaggcggggccaggcagagggagggggaagggcgagagccaagcagaaagaggcggcaaacagcaccacggagaacgggggaaaacaaccccaggccaaaaaaaaaaagaagccaagcggcagaaaggaagggcacaggcacagcaagagaccaacgaggaaaacagcagcagcgccacacacaaacaacaccagcacaacagggaaaaaaaaaccgggcaaccaaaacaaacccaaacaggaaacaaacagagaaaagcaaaaagacaaagaacacgaacccaccggacgcagaaccgcccaaccaccaacaccaccacggaaccaccacacccacggcgggagaacggcgcacggaacaggggaaagcaccagcaaaccaccacacaaaaagaaggacacgaacagagggaagcgaggcacagccaccccaaaagcagggaccaaaaacagaaagccacaaacaagaaaacaaaaggaaaaaaacaacccacaaacacagacacaagccagaggccaaaaaacccgggggggaagggcagggagcggagccaggcggaggcaggcaccaagccagcagccgaacccgggacaagcacccccccagcccccccagagacgggacacaggcacgagcacacccaaaaacaagcaccccggcagagcccaacgggacggaggagagaccaacccaacggaagcaccgccagaaggaagaaacaggccaagagaagccccaggggacccagcccaaaagacaggagcaccccccccaggaagaaaggaagggagggcacacgcacacaagcagacacagggccgcacccacggagagcaaggggaaaaggggccaccagagcccgaagcacacccgaaaaaaagaaacggggaagagccaaggcggcaaaaaagcacagccaaaaacaagcagcggaaacagcacaaaagaggaggccagaaagaccaaagaggaaaacaccgacaaacaaggacccccgcccggggaagcccggcagaacaagcagagcccccaccccaccaaaacccagggaacggacaaaacacaaggaacacaagacacacaccagggagggaaggacaggagaaaggaaaaaaaggggaaaggaagaaaaggaagaggagaacacagaaagccaagagacacaaaaaaggacaaagcaaacaagaggggccccaccaggcccaaccagacaggccaagcacaccccgccccgggcaaggggaacagggaccccgcaggaaacagcacaagacacaaagagaggcccaaagcggcaacagaagaacaaaaagaaaaaaggagaagggaagagaaaaaaagaaggaagccaggaaaccacaaaggaggaggccggaaaagaacacgaaacaaacccagggagagaaacaccacccggcacagagacgagagaagcccagcacaaagaagacccgaagaagaaaaagccgacaacacacaggaaagcaacaaagagacagggcgcagaagccgagggcgacgccaagccaaagcagagaggaagaaagaaaccgcaggaggacaagccccgaagcggaccaaggaacgagagacaaagcggaccaaaggcaaccccagccagcccagcgcagaagggagaaaagcccccgagcaggaagggaagaggaaacgagggaaccaggcaacacagagccagagcagaggaagaaaaacaaaggaagaaaaagcaggaagaaaaaaggaagaagaaaaaagccccaaaagaacagccacaaaaaggggaacaaagcagaccagccagacccagccaaaaaagacgaaacaccagggggcgccagaaaccgggaaaagcagaaaaaagagcccagggacaggagggcaaggggagcaaacccagaaccggcgggcggaaaaacacacaccgggccaaaggggaaaaggcagcacagaaccacggaaacagaaagcacaccagcccgcagacacgaccagaaacgggacaggaccagcaacggaacaaacccccagggacgagcgcaaaggagaacccagccccgcaaaaaaaacagggaacacacaaggccccccaggaaaaaaaaaacccaacaaagaaggagcaccccccggggaagagggaggcagccaggacgggcaaaggaaaaacaagagaagaaaagaaagaagaacagaacaacaccccaaacccaaagaaaaaggaggccaaacgaccgaccgcccaaaggagcagccaaaacggcacaagagaaaggcgagggagaagaaaaagacggaaaaagccagagaaaccagcgacccaacgacccgagcgcacaaggcaaaggagcgagacagagcaggcacaggagcagaggaagaggacaagacgacccggcggaacaaaacgggccccccaaccagcaaaacaagaacacacgcagaagagggaggaagagggaaacgaagccaccaacaaaagaccccgcaaccggacagaaaagaacaaacaaagcagccacaacccaacaccaaaacacggccaaaacaggacagggaaagggggagcagaagcggacccacagggacaggaacggaggagccaccggccagacgcaggcgccaagaccagagagagcagaacagacccaaggaggggaaggacggaaagaacccccgcacacagaaaacacaaagaagaaaagcaaccgagaaaaaaaaaaaaaaaaaaaaaaaacaggagaaaggagaaggggggaaaggcaacaaggggaagaaagaccgggaagaaagcaggccgcccaacaaagagcccagaacgcccagccagacggcggagccagaaggaaacagaggaagacaggagcgggggccacagagaaacaaaggcagacaacaaagccagcagggggaagaagagggaccgaaaaaagcccagaggcgaaagcaaaaaaagaaaaaacagacaccaacaaaggccaggaaagcaaccacaaaaaggaagaagaagagcgaaccaaacgcagcaggcaggccaaaaaaacaagacaaagaaaaaagacagaggacaaaaccgccaagcacacacacaccaaaaagacagcaaacaacaaaaaccagaaaccaaagcaacagcagaaccaaaacggaagagggacaaccaccacaagaaacgaaggcaggaaaaccaagagcaaaagcaggcacaagacaaaaaacggaaaaacgaagaaaaaacaagaccagggcaccaagcggaagcccccccggggggggggggcgcgcgcacacacccccccaacacgaagaaacaaagcgggcaagaagaagaggacccacagccccggcaaaaccccaaggcccagccccggggaagggaccggaggcagccgccacagagcacacaaaggagcccagcaaaagaacccgcagccgcccgaagcaggaaacgacccggacaccgaagacaagccgaaggaaggaccaccagcccaacaagcaaaggaaaaaaagaagagcaccacagcgcaagggagagagcaaaagaacagaaaccaacaaaagacagacacccacaagcgacaaagaacagaaaaccccgaagaagggcccagacaggaccaccccaacacagggaggccccaacaacgcaagggcaccccagaaacggggaaaggggaggggagagaggaaaagaacagaagcgaaggccagcacggccccccagcgggcaaggaggcgccccccccccaggggaagcagccagagccagaggcaggaaccaacaaaaaacacacccaaacagaaaacaaagcacgggaccagacagcaaggcacaacacccccagaggacgagaacggaagaaccaagacaagggagaaaaaaccagcacaaacagcaggagagagagccaaccgcacccaccacggcccagagccacagaaggcaggcccgagaagcaccacaggggagaaaaccagcaagccaaaaccgcaaaccaaaccaacaacgagaagacaaagaccgaaaaaggcaaacgaggccagcaccgcaaaagcaacggcgaagccaagagcaacaagcaaaagcaaaggaggaagcgagaagggccgcagccaagccaagcagaagccggaaacgagcgagcaagacaccccagggcagaaggccaagaaacaacaaggacaaggagcacacgaagagccgagaaacggaaaaaaagacagacagacccaagaagaaacgcacgcagaccaccagggggacaaacaaacacaagaaaagcgaagaccaaagacaccagcgaggccacaaagcaaccaaaacaaaacaaaaaccagagaagggcacccggagccacgaaaaggaagcagcagcaaagacaggcgcaaaacaaacacccaccacacaagagagaccacagggccacggaagcagggaaaccccagcaccagaaggacacgaggacaaaacacaaaaagagcagcggaaagcccagcgggacgacggcagggaagggacagaaacaccccaaaaagcacggcaaaggaagaacgaaggcaaaagaaacagcaaacaaggagacaccaggccaccccgcaaaagggcaaaaccccgaaaggaaacgaaaggaaacccacacgcaaagaagggaccccccaaagaggaagagaagaaagaccaggagacaacacacgagagacgagcacaaacagacagaaaaagcaaccaacacagcagggaaacagaacgaacagaaagaaaaaaaggacgccaggcgaggcgggaagcaagaggcgccccacggggcaggagggccgccacaaaacaagcagaaagaaggggaacgggcaggcaaaaaaaggcaaaacagagagcaaccaccaaacaacgccgggaacaccacccagagaacaaccacccgcaagaacaacccagccacaaaaaagacaagccaaacaacaacaccccccccacgagacggaacgccgcgcaggcggaggagggcagaccggccacgcaaccccgcccccaggcaaggacccgcccagccccgagagcgggacacaggcacgcaccaccaagccagcaagaagagagacggggcaccagggccaggcggccgaccgacacagacggcccacccggcccccaaaggcggaaacaggcaaagccacgcgccggcccaacaccaaaggaccacccccagcacgccacaagggaccaagcccaacagagggggggacaaacaacagaccaaacaaccagcacccccacaagacccccagaagccaaaccccccgcagccccaacacacccgcaaaaagagaagcccaggcaaccacaacggcgcacacggagccccacccggccaggaaaaacccccgaaccccgaagcaacccagaacgaaccaagagagaagggaaagcccccacagcccaagaaaaccgcagacagacacaccagaaacacaagaaaagcaggaagacagaacagccaggagccaagaagccagacaaagagagaaagaaggcaaacaaaaacaaggcccacagaaaaaacaaacacaaggaaaggagacaaaagaggaaacgggagggcaaccagcaagggaaagaaagaaaggacagaaagaaaacaaaggcaaaggaggcaaaacggcccccacagggggaagaaagcaaagaaccagaggcaaaacaacacagacaagaaacgcagcaacaggccacaaaacagaggaaaaagcggaagacagaaagacagaaaagaaacaggaaaggggaaaaaaagcacacagaagcacaaccccaagaccaaacccgggaaaaccagacaaggaaagaaaagacccccacagacaaacccagccagcccaacgcaacccacggagggaaaaccccaccgaccccaagaccacccagcaacacaaccacgacaggagcagaacaccggagcagacacccagaagcaaaggccccgcgccgcagagaaggaaagcagccgggccccaggagagccaacagcagggccaaggcaagacagaaacgacgggacaaagaagaaaggaaaaaaaaagaagggcagaacagacgcaggagggcagaaacagacagaagcgagccagaagaaccaaaaaagccacagaacggcggagaggacaccacaggcgcacagaagcagcagagcagccacagaggagccaggcacgccaggcagccacagcacgcaccaagcccaacgcaacgcaccaaaccacagggacgcccccgcaacacgccaccaaaacaggggagggcgagagaacagggaagccagccccagcagcaagggagggagaaagagcaaggcagaggccacagggagggagaggccccccagaccaaaagaggaaccacagaggaaacggaaacccaaaagcaaagggagagaacagcgggcaaagggcaaaacacgaggcaccgcccgaccaagcccgcacacaccaaccacagcaaacagaagcaaacccaacaaaaagcagacacgcaagcaaacagaagaaccaagcaagaaggcgggaagaaaacagagaaaaaggaaccaaggagaaagcaggcaagagcaaacaagaagcaggcaaaaagccggccagcgaagcaaaaccaaaagccagacgagcaacaagcaaggcgcgacaaaaaaaaaagcgggggggcacggccgagccccagcacccagcagggagacagcgggggacgcgagcccaaagggaggcacaggagcaccgggcaagaggacaacagcccaggcaacagagaccgcaaaacaaaaacaaagaaaacaaagaaaccgagagccgggaagcccagaagggacaccggggagggacaacccccaaaggcaaggaggacgcgggccccccccggcaccggaagcccgcaccacgcagccccaagcaaaggccgcaccagcagccaggcccagcgacacagggaaagcccaaacgcaacagaccccgaggaggaaggagcagccaaccccggcgacccgagaggcaacaccaaacccccacacgccacgccgcgccaggcagccagcgcacagaaagcgccgaccaccccgagccaagcgccgggcacacagaagacaccccgacccaagcgagaggcccgcccggcacaggcagccgcccagacagcgcacgaccaaaccaggaaacaacggacagaaaaagggcgaaagcaggacaccagacaaaagacagggccagcagcagcgcagcgaccggaaacgggacaccacccgaaccgcgccaggggagacccaaaaacacaagggcgaaccggaggaaacgggcaaaaccgcgcccgagagccgagacacccccagacgcagggcccagaggacagggcccgagaagaagacccaaaacccacaaagcgcaccaagaaacagaggaaacaaaaaaggccacaaaaagaaggcagccacacacaggacaagaccacaaacaaacaaacgcaggcccacaaccgaaggcgacgcccaagggcagagggagccagggggcccggccggggggggcaggccaagcaggcaaggaggaaaggcaggagaacaaagggaggaacacgcacacaaccacccccgccagaaacagaaccccagaaaaaaaaaaaaaagaaagacgagcacaacgaaacaagagaccaaaagaaacgagccaaccaccaaaagaaaacaaccacaacaggaagagaagcagaggcaaagaaaagacaacaccaacagcacaaagggcggcagggaccagccagcagaagggaaggcgggaaacacccaggagaacagggcggccaccccacaaccaacagaaccacggaccaaaacccagcaaagcccgaacagcggccgccagcaggcagccgcccccggggggaggacccgcgcgaacagcccaggaacccagcaccaacaaccaaaccgaagcaccaaaagacgaacaacaacaaaagggccacgaaaacagacgccaaaggcccaggcgaaccgcgggcccagacaccccccccaccacacagagaaacccgcacccacccagcaacccccccacagaaaacgaaccacaaaggagaaacaacgcgcccgcaccaccgccccacacaacaggagcccccacaaggacgggcgcccccaggaagacgaaaggaaaagccgcccccgcaggggaggagggggagggccgcccagggccccgcgccaaaccaggggagcaacagacgggcagggggggcccgaacccacggcaggcggggggaagaagcccgaaggcccaggggaggacagggccagagccaccgaggcagcggagacaaagacccgcagcaaggacagagggccgaccgggcgccgggacggaagaacagacacacggagcggagaagagacaaggagagggaagagccagcagagagggagccagaagggagagaccccggagcaggcgcaggggccgaacccccgacgcccggccaaccccaccagcgcggggccggaagaagccagggccccgcaggcggcccccagcgccagccaccggcgcggcccgccgacggccccgacgccagcacgggccgcgcaagggccgggggggggggggagacagagccaccggcccaggcagaggcaggggccgaccagccacgcaacccgcgccaggccaaggagcccacccagccccgagaccgggagacaagcgccacaccacacccaggaaaaaaagagacggagccgccgcacccaggcggaggcagcggcgccccggccagcaagcccacccccgggcacaccacccgcccagcccccaagagcgggacacagggcccgccaccacccagcaagaagagagacggggcaccggagccaggaggcggaccgacccggaccgccgcccagcccccaaaggcgggaacaggcagagccacgcgcccggccccaaacgagaggagcaccgcgccaaggcggaaagcagggcacgaccggccacgcacccgcccccaggaagcagccgcccagcccccagagcgagaacagggcccaccaccagccggcaagaagagagacggggcaccacggcgagggacgaacccgaccgagaccacccgcccagcccccaaaggcgggaacaggcgagccacgcaccgcaaagcacccagcaagaagaagacggggcaccagggccaggcggcagaacccacccaaggacacccacccggcccccaaaggcgggaacagacgggccacgcgccagccaagggccggggggaaggacaggaggaggcgggcaggccagggggcgggaaagcaacagggcacaaaggcaggaggccgccaccaggcccgggcacagggcgggggggagccccgccagggaccgccccccccagcacccgcccaacccgacagccaagaccccggggcgcagcccggcaaacccacgccccagcacagaacccgcccccacgcacacgcgaaccacaccgccacacacgccagccccgaccggcccgggccagagagagaccagcagcgaaccagagacacacaccaacggcccccgacacagacacgcgaacccgcgcaagcggccagcaccagccccagccccgcaccccacgaacccgccagcccaacagcgcaccagcgcacacggaggccccacccggccacacccacccacaaacaaccccaggcaaacagcagccaagaaccaccaacaggagggcacgaaaccgagccaacgcccagccccaggcccgccccaaggcagggcccgccggaaagcacgcccacaaagcagcacaccaaaacgaagccacgcccccaaaacgcccaccgcaacgccccaggaggacaaccaccacagaccaaggccggagaaccagacaccacccccagccccacacaacaagacagacgacaaccaccaaaaaccaaagccccccgcagccacacaaaacaaccggagacaaacaccagaacccagaacagcccggcccagcccacccagaagcggcccaagagcccgaaacaccaagcaggagaaccggaacagcgaaaaaacaacacccaaaggggaccaaggacaccggccccaagccaccgcaggcccaccgccaacccacaagaccggcggcgccagggggccacaagccggacgagcggcaccgccgaaaaacccacgaccccaacccaccccgaccagaaggggcccgcggcacggcccaccaacaaaggacaacacaccaagcccccagagccccacccaggagggcagccagaaaacccgacacccccaaaagacggagagcccgaccccagcccccaacaagcaaagggggaaacagacacaaggcgagagaaggagacacacagaccccgcgaaaagagacagacagcacaccgcaacagccggcagacgggcacggccccccacccacgcccaaccagcggggcaagccacagacccagaccccagcgcacccacggccacaccacacaaagcaagcaagcacaagacacagaggcacaagcgacgccaacgcaccaaaaaccagaaaacaaccaaaagcccagagaggcagggcccacgcacaacgaaaggagggcaagcacaccagaaggcaccaagaccacccccggcacccacacccggggcccccacgcgacaagggcagcgggaccaaagaaaggcagaaagaggacacacccgacaggacaaaagacaaaaaccccacgcccgcccccaccaacccaggggaagccagcgcagaagaggccgcgcaaggaaggaggcccggcgaagccgcgagagaagggaccccagccccagacaaggccagacgacgcagcccagacgacgcagcccagaccaagaaccgagagccagggagacccgaagcccagcgagcgcaccaagacgaccagaaacgaaaaagcaaaggcgcgaagccaggggggacgagagcaaagacagcaaacacagggcccgagcccccacaccccccacaaacaaagaagcccaccagacgaacgccccccaaacaggaccagaagaggaacgccacaccccaagagccccaccaaacacgcccccaccccacgccaccgcaccccgagcagcccccaaagccgcgacacacacaaagaagagacccccccaagaaccaaaagaagaccccagcacagccaggcaaaaccgcaaaagcgccgggagcgaacacaaagagggaagaaaaacgcaaagagcaagaaccagaaccgaaaacaagcggcaggcggcagcaacaaacaggccagccagcaaacaggagacacgggcccaccacagccgggggccacaccagagacagcagggagaggccaaagacaacagccggacagaaggccacagcgaccgaacacccaaacgagcaggagacgaaccaacgcgacacgcagacagccggaaaacagagacgacaccaagagacagcaacaaacagaaaacaaaaaaaccccagcaggccccccaccaacgccaaacagaaaagaaggcaaaccggaaagaacaaaacgagcaaaaaagccgcgcagccagcgcgacacggaaaacaaccaaccaacccccggggaaagaagggcacaaaagccgagggaaagggaacagaagcaaagggaaacggcaggaaaaggaaaaaacaaagaacgaagagaaaaaaggagagaccggaacagacaccagagccaaagggcaacaaaacaggccaccaaggaaaaagaccagaccacagagggaggaaaaccaccaggcaaaaggaaaaggggagacggggagagggacagcaagaccaaaaaaaaagaaggagaaaagggaccccaagacagagacgccggccaggcggaggcagggcacaccggccacgcaaccccacccggggcaagcgacccgccagccccgagcagcgggaacagggcggccaccagcccgcaagaagagagacagggcaccagggccaggcggcgacccgacccggacgccgcccagcccccaagggcgggaaaggggagccacggcccagccaagaaaagggaaggacaaaaaaaacacaaggaacaccaggaacaaacccaaacaaaagaacaagaggcacaaaggaagagaacaaggcacacgcaaaagaaaaagcaaaagaaacgaaaagacgaccaaaaaacaaagaaaaaagcaaaagaaaagaacaacccaaaaagcagggcaaaagaagaccagaaagcacaaagaagacaacagaggacaaacagcaaaaacaggcaacacacgccagggaaggccaacgaaaaacaagagaaccacccccaccagaaggccaaaaccaaaaacgacaaccaaaagcgccaaggagggggcaacaggaacccacacgccaggggaagcaaagaggagccacggaagacaagacagccacaaaacaaacaaaccaccagagagcgcagaccagcaacagcccggacaccaaagaagaaaacaagccggcaaaaaccgcacaggaagagcagccaaagcgaaacggaagcaacaagagcccaga

SEQ ID NO: 473 - RNA, 8126 nt, Homo sapiens
agagagcagacaagaaacaaaaaagcagaaacggaaaaaagacaaaccacaacccagagcaccagaaggaggggcaaacgaagagaaagaacggaaaaacagccaaggaagcaagaaaaagaggagcagacgaaccggaaaacaccagagaaacacaccaccggcaagagggcaagaaccccaaaccagaaggaggaggaccaggcgaccacacgcggcagcggcaggaaaaaaacacccggcacaggaaaggcaaccgccgcagacacggcccccacagaccccacaaaccaggcaacgacgagaggacaaaagacccccagaaaaaaagaagaaaaaaaaccaggccaaaacgaaacaagaagagcagggccgaggaaaacggaaaagaaaaaggggcagaaggcaaccaaagaagccagagaaaaacgcccagaaaaaagggaagaggagggacacaagacagaacggcacccgcagggaaaccaaacaacagcaaacaacagcaaaggcggggggcaaaaaagcagcaaagcaaagcgccgaacagaaagaacaagccgcgaagaaacgaagaccgagacagagcgccggcccaggcggaggcaaggcgcgacggccacgcaacccgcccccaggcaagccacccgcccagccccgagggcgggagacaggcagcgccaccagcccagcaagaagagggaggggcccagggcaggcaggccaaaccccgacccagggaccacgcccagccccaaaggcgggaacaggcggaaagacacgacagcaagcaaaagacgcgaccaaaaggcagcagagaagaaacacgaagaaggggccaggcgcccgcagcgaggccccacagaggcacagagacgaagaacccgcaagaagcccgcacgcaagcacccccacagcagggcaaccacccccacaaaaacagacgcgagaaacaagcaaaaaaaaacgacggacaggaccccggggcgccgccgccaccgcccccacagaggcccagaggcaacacgcgcggggaaagcaaaaaagaacaccaagcaaagagaaaaggagcccaaaacggagagaagcccagcgccgggggagacagagcccacggcacccaggcggaggcacggcacaaacaaccggccacgcacccccacccccgggcaagcgaccgcccagccccgggagcgggacacaggcgcggccaccacaccggcaagaagagagacggggcaccagggcgaggcggcgaacccgacccggaccgcccacccggcccccaaaggcgggaacaggggagcaccgcaccgccccaaagcccagcaaagaaaacaaccagcaaaaccaagagaacagcccacggaggacagaagaggcgaacaggagacacgaacacaaaaacccaaaagaccaacacggcccaacgcgccccagaagcccccaaaagaaccagcgcaggaccagccacagccgagcccgggccaaaggcagaaaaaagggaccaccgaaggaacggaagggcagcaaagaccgggcaacccaaacaagacccgcacgcacaaagggcccaagcacccagacaaaggaggagagaagcagagagaaagaccaaaaaaaaacgaaaagacaggccaacagaggcacgaaaaccaaaaaaacaaaaaagggccaggcggagccacgccgaaccaagcacgggaggcgagggggaggagggaagccaggagcaaaacagccgggcaacaagcaagaccccaccacaaaaaaagaaaaaagccaggcgggggcaggccagcccagcaccagaggcgaggcaggaagagcggagccaggagcaaggcgcaggagcacacacaccaccagagcaagacgcccaaaacagacaaggaacaagaaaacaaggacggacaaggaaacagccaaggaaacagaaccgggcggggcaaccaaaaaagccacagcagcccacaccacgccacaaaccgagcccaaaaaaaacaaccgaagaaacagaagagaacaaaccgccacaagccccccaagaaagacgaaggaagagggaacaaaagcagcgacacagcacacaagaaaaaagcagcagcaagaagagcaaaggagacacggggcagcggacacccagaggaccgcacagccgcacacaccaaaacggaaacaggggacaaaaggaaaaaacaggaaccccgaaacgccaaaaaaggaaaaaaaagaagaaaaaagcaagaagggaacaccagacgagcacaagcaaggcccaaaaaaccccaacaacccgcaggagggaccccaaaaggagaccaccgaggaaccccaaggaagaagagcaaaccagaccggcaaacccaaccaaaccacaggcaaacgaaacagaaagcaacagaaggaagcaaagacaaaggagaaaaaaaggcagagggaaggaacccacagaagaacaagaacaagacaaagacagacacaaaggagcaggaaaaccaggaaagagaaaaaaagaaaccggggggggggggggcggggggggaaggcccacgacacccaggcggagcacagggcggaccaagccacgcagcgaacgccaggcaagcagccgcccgcaccgagcccccgagagccagggcacagcagggccacggcgagcagaaaggaaagagaagcgcgggcaggccggcaagccacccaaacaccccgcgcaggcccgaagcccgggggaccaccggcccagccaaagaacaacaaacacagccaaggaaaccaaaacaaaagaaaagaagaaaacccggaaaaccccgcagagaaacacacaagggaaacaacaaaaagacaaaagaaagggagaaaagaagcaccaacgacccaggcaaaccaaaacgaccacaagccgggggaaaaaccgccccacacccgcacacccacaacaccccaacaaaaaaagacaaagaaaaaaaagaaacagaaggaaccgcaaggaacacggggggggggaggggggcacggcagcagggggggggaaacagacaacagaaaacacacgagaacagcaaagaagaagggaaaaacaaacagaacaagaaagcaaaaagggcagccccccccacaaaacaagggcacaagcccaagccccaccaggggcgaggaaaaagccaaagaaccaggaagaccggagcaaaacacaaagaaaccaccaaacggccacaagaaggcacccggcaagacagaaggagagaaagaggcaacagggagagagcaaagagcagcaaaacagcaaacacacaaaccagaccagccgaaaccaaaaaaaaaaaaaagaaggcaaagaaacgcaccagacacgaacaaggcagccaggcaaaaagagccaccacaccacgccggcggaacagggacaacaaaagaaaaccccggacagagcaaaaaaagccaagaaaaagcgaagcagcaccacagggaacaggcaccaagagaacaaagccaagccgaccgaaaaacagacagggagaacaaaagcagagcaaaacacgaacgccaaacaagccgggaagaccaaaaaaagggagaccccccagccacccccaagcaggagaggacagagcaggaagaccaccaccaggaaaggaaaacaacacagaaggaaaaaaaacaacgaagaggaaagaaacggacccgaccaaaaaagccagccccagccagccccaacaaacgaggcacagagagagccagcacacaacccacacaacccacacaaccccgacgacccaggaagagaccacaggaaacaaaagacaacagcgaacaacaacgaaaggacggaggcaggaggagagagcagaaaggacaggagaaaacaaggagaccgaaacggacacggagaaacagacaggacccgccgacacccgcaaaagacaacacgcaagagaggccccagacggccaagagaccggggcggcgcagcagggaaaccaaaaaaacaaagaacccgaagagccacccaaccaaggagaggcccagggcaacgaagcaccaaggagggacagccacaaaaaaaggaacagcggcgcaagagcaaaagagaaaaagggggggggggcacagggacacaccgaaccagacgaggcgagagagaagacacgagaccaggagcaaggcagccgggcagaaggagacccaccacaaaaaaagaaaaagcgggcgagggcacacaccgagccagcaccaggaggcgaggcaagaggacacgagccgaggagcaaggcgcagacgcgggcacccagccgggcaaggagcaagacccgccaaaaaaaaaaaaaaaaaagagagagagaggaaagaaaaggggaaaagaaagcagaaggaaaaccccaccgcagacgcaagcaaccagcagaagacgacaaaggaacaaaaaaaagaaaaaacaacaaggagcaaccaacgcaacagaaaagaccccaaagaacaaagaaaggcacaggaagacacgacggaaaagaaaacagaaaaaaaaaagagcggagagaccgcgaccaagaaacaccaacaaaaaacagaccacacaaaggaaaaaaagcacaccgaaaaaaaaaagccaccgaaccagagaaggcaaggaagaaaagcgcccgcagaaaaacagaaaaaggaaggaaaccagaaaccacaggaaaggagaaaacagcaaacagccaaagaagccaaaagccagaggcagaaacgcacaccaggagggaacaagcggacacggggaaaaacaagaaagagccgaccagccgagaaacaccgacggcaaaggaagaagaaaaaagaagggggaagagagaggggagcaaacaggaagaagcaggaagacggcagcgcgcagacgagagaaggcgccgcaagaagcggacagagaaaacaccaagcagggcgagcacaaagggaggggaagacccccaaaccaccacacacggccaaaccacagacgcaccaaccaaacaagccccgagacaaacaagaggggagaaagagacaaacagagaagaggagaggcacaggaaaccgcacagcgcaagaacacagacgaacaggacacagacagcccaggccgggcgaaaaaaagagcgacccaaggcccagaaggccccagagaggacaaagacaaaaagaaccacccgaaaagacgaacagacagggacaacagcacaggccagaggcagaaacagaaaaggggaggaaaaggaagaacaccgaaggccaggcaggaccgcacacccgaaaaccgagccgcccagcacacagcaaagcagccaggaaacaggaaaagcaaaccagaaaaaacagcaccacacaccaggcaaccacgaaaagcagaaaccacgcaacaaaagaggagcaaaaaaggaagaggccaaccccggaaaaacggcccaaaccgcagagcaagcgcaagcacgccacacacacgggggggaggaggccgcaccgaccgaacaaggggggcagcagcagcacaaacagaagacgcaaggaaacaagcagcccagcccccccccccccagccagccggccccacgacacaaggcagccaaagcgcgagccgcccgacggcagcgcccccgccggagagcacgcccggcagggggcgaacagcgaaaaagggccggcagaagaccccacaaacaggagacaaggaccaaagcaggggaggaagagccgaccaaagcacaaacagaaacacagaaagagccagggaggggggccaccgggaagaacaaggaggcaaagggaagcacaacagggaagagcagcaaggcgagaggaaagcgggccaaaaaagaaaacgagaagaaaaacccgagcaaaaaaacagagcccaaacaagcaggaaaaaccagcaaaaagaaaagaaagaaaagaaaaaacccaaaagggaaacaaagagacaggaaccaacaccagaacagcccggaaaggaaggagcccccccccaaaagcaaaaggagaaggccagagcaaagagaaacaaaagaccacagaacaagacagcaaaaccacaacaggggggcgaacagaaagcagaagaccgggcccagacggcgacacggggaccgcaagcaaccaacccccagcccggcagcaaggcaggagagagcgagcacagcagccagacgaacaacagcgagcagaggcggggcccaaagcaaaaacaccaagccaacccagagaaaaggagaaaaccagaacaggggggagaaaaacagaaagcacacaggcagcacgagaacgcagaagcgaaacacccacggaaaagggaagcaaagccacccgcccaccagagagagcagacgaaagagagagaagacagacaaaagaaggcaagaggcagacacgacgggacacccaccggaaaggacaaacaaggagacaaaggaaaacccaccggaaggaggcgagccaggggaaaggaaaacagaacgaaagccagccaagaccgccaaacaggccaaaggaccaggagagcaggaaccccaggccggccccaaggagggccaccgaaagcccgacgcagaacaaaggacccaccaccacagagccaagcagggaaccccgccccagacggaagcgacaacagccccagagaggcgagcaagagcccgccagcgccagaacacgacaccgcagacaagggacaggccaacaacggcacagagcccgacccagcccaggcccccacgcacccagccagccagcgggccccggcgaccagcccggggccgccagaagagaagcaccgggcagggcgggcacacaggaagcacaagagagacagcggccaccgacaaggagggaagaccacaggaaagaaaggagccacaaaagaggcagagagcacggcgaggaagcacccaaccagggacacgccgcccgccccgcaccccaggaccagggagaggaggagcacaagccgggaccccccggaaccccaaaaggaaggacccgggacagcgaggaacaacaaagggggagaaaaaaaacaaggcccccgcaccggcacccacccccgcccgcaccggccagccacccccaaccaccccgccacacaaaaccccccacgcaagcaaacccggggcaggagaaaagagcaagaaaccaccagaaaagagaaaaaaagcaagcaaggacacgggccaggcacggcaaaagcagaaagaaccaccaagcaagaaaaaacaagagagggacggaaccccagacaaagagaaaacaaggccagagaaaaaaccagggcacgcaacgagagagaggggggggggaggggggggggggggcagagggagagggagagaccgaacgaaccgaggcggaccacgccgacaaccacgacggccagcccccccacagccccgccgggaaaaagggcaaagaaaacaaaccaaaacaaagcagaaacgaaaagaagggggcaaaaacaacagagaaaggaggagacaacaacccgcacagggaagcaagaggagaaagagaggagcccggaacagccacccaggcacccccaggcgacccagaagcgccaccccgccccgccaaagcggcccaaacccagacccccggggacggcgagcgcgaggaagggcgacgagggcagaagccccgcaggcggccgggaggcgggagaagaaccaagaaaagccacgccagaacgccgccgcccagcgggaacaagagcgcggccaacgccaaaaaaaaacaaaacaaaacacgcccagaacgccacccccaaaaagcaccagcggaaccacagccacggggcccaggaaggagaaagcccccaggcaaaacgggaacccggcaggaaaaggaaaaagaaaaagaaagaaaggagaaggagaaagacaaagacaaggagaaagaaagaagacgcaacgggcacaccagccaccgggggcccacagcgagccaggagaagccccaccaacaaagagccaacggcaagaagagacagccccccgaagaggaacccggccaagaaagccacgccgccccaccaacgcccaagggagaagaacccaaccagacagaaaaagaaagaaacagagaaacaacagccaacagacagccccaacaaa

SEQ ID NO: 474 - RNA, 6349 nt, Homo sapiens
cgacgccagggaccggcgccccacagcccccgacgccagcacaggccgggcacacagaaagcgggaagaggagggcaaagcgggccagcagccgccagcccccacgccgccccaccgcgcagcccggaccccccgcccccgaggcgagccgagccgcagcccaccccagcgcgccgccgcgggccacccccgcaggcgaaacacaagacgagcaaggccagagccccacggccacagagaagacaagagaggaagcccaaacaccagcccagacccaacaaaggaaacgagccggagcagcccaggcccaggcccagagcaggcccccacaagaaacgcgcccacgcccccagccagggcccagcacccccccaccgcaccaccccacccagcacgcccaggccccagcgccgcaggcccggccgcgaagggcgagccccccggcacccccaggagcggcccccagcccgcaccccacccaccggcgagggggcaggacagggaggggggggagccgacccaccagcaccccacagggggaacagacccaccccgccaggggggaggagaaagccccggcggggaccggggcaggggggagcacaggcccacagcaccgggcggaagggaccgcccccgggcccccacgagccgggagcccccaccaggcgggcaccacgcgcgccagcgcagccgagcgggcagaggagcccaggagggagcccagcacccacaccccccccccacacagaggacccgccccccccaggcaaggccccccccgcggaaccgcaccagccaggaaaggaaaggagcaggagggaaaaggcgagggcagcagggggggagcagagcgagagggagcccaccaccggcggccgggggaagggaggagcggcccggggccccaagagccaccagccccacacgcccgcccgggcccgcccaggcccgcacccgccgcgagcccgaccgaggggcagaaccaaggccccagagggaaggacacgcccacagcaggcgccccagcccgaccaggacaccagcgcgcaccccgccccggcccccagaacacgggagggccgcaccccggggcgggccggaaagcccaggggcaaggggcggcaccgagaacagggccccagggcagccgccccagcccagccgcccagagcaggcccaccccacacagccagcaagagacccgccagcaagagcaaagaggggacgcgcccacccacccccagcccagcgaggaagacaaaggcgcaccccggccggagccaaaggcgagaccgggacccacgggcccgggagagggccaccaggccaaagccccagcccagcagcagcccgccgcaccaaaacgccggggcccagcgacggcagagaacaggaggcgccgggcccccggggaggggccccaagaaggggcgacaccaaacgggcggccagagcagcgcaagccagccagaccccccggccccccaagcccacccaccacaccccgaaccggcaaacgggggaggacaggcgagggaggggcaccccccagggccagccagggagacaaaacgagcaagaagccccccccacccggaggcggcacacagacacgccggcccccccagcccccccagaaggaggaggaccacgcgccaccaggagaggcgagaagccagacccaagcgggggccaagcgggcccggccccgagacaggggcgccaagccccccgccaggaggggccgaccggagccggggcggacgcaccgccgcccccgggagcggggccaggccggccagccaggcgggcgcgacgggggcgccccgccacggcggcggcgggaggaggcggcgcgggcgggccccgggcggcgccaggacaaccagggagcggccgggccgaccacggcagcgcggcaggggcggccggccaggccccgcgggcgcaggccaggagggcggaacccggagcccccaggggagggcacggcgcaggacgagcacgggaggcggaggggacccgcccaggacgggaaagcccccagccccgggaggcgcacaccaccacgagccggggcgagcacgggcaggggagacccggggcgccccccacccacgcacgcacccacacaccgcccgcgccggcgccaccccccggggccccgggagcaggcgccccgccggccggagagcagggcccgggggccaggacggcgggagcgggagcgccccgcgggcgcagcgcgacgcccgcagccgcagcacccccgcgggaccgcgcagcagccgacgaagcccgcacgggagccacggggacccccgagggggggacagggacagggaggggaccaggccaaccgcccgccccagccaccccgcagagccccgccgcggaggggcccgagcgcgagacggcacaccccccagggacagccggacaggcagcgagggccacagccccgcgagccccagcggcaccagaacacggggcccaaggcccagcacggcaaaaccggaacaccccacacaggggaggggagcaacagccagacccaccggcaaacagcccaagccggagcacagaaagcccaggcgggaccaggcccaccccccccccccccaccgggccggccaggggaaccaccccagcaaccccacccccccagcgccaaacacgcgcacccacaacaggcagaggcccggcagggcgagcggaagagggaccagggcccccgcaccgcccaccagaggagccggccgcagccccgcaccccgcgcaaggcagcaacgcgccggccagcaggcacggcgccacgaggcccgggccgcggcgggcagggccccgacacaacccaagcggccccggccggggcaagggggcaccaccagccagaggaggggaaggccaaggcaccgagggcggggcacccccaccccaccccccaaaggaggagagcagaaaaccaggggggagccaccgcccaccgacggggccagaaaaccagcagcccaccaccccacccagcagggaaaggaaaccacacgagaggacaaaggagcgcaaggggcgccacggagggccacccgcccccacccagccaacccgagagagccagcagaaggcgccgccagcaccagcacgggaaccagaaccgccccgccgccaggaaccccccaccagccccgcccccgcagcccagaaaccggccccgccggccagcccgcccccgcaccagccccagacgcccagggcgagcgagaccggaccccaagccagacagccccaggcccagcccggccccccccggcacccagccccgcccagcagcccccccaccaccccaggcgccgcagccgggccccccccaggcgcggcaagaccgccagccggcgcccccagccccgcacccccgccagggaagcgcccccgacaaggggcaggcagaaggggcagagggagcaccccacagacccagccaacagcccaagcgggcagagcccaggccacagggggccggcaaccaggcaggggcacccccgggccaggagcaccccagagcccccacggaaagagcagggggaggagggcacgaggcagagggccggcccagccagaacgcagcaccccagcccaagcccaccagcacggccccaaggaggcacagcgcgccgcagccccccagggccccagcagcccagagggccgccccaaagccaacagcggccggcagggaaaggaccgaggacagcacccagaaacccacgcacccagccagagcccccgggaagcaccaccaccaggccaaggagacaggagagaaacggccccagcccaggcccagagaggagcagaggaggccaggagaaggaacgccagcccccgccacaagacacccccaaaccggcacccccgccccccgacccccaccacccaccccccagggacagcgagccgagccccaccccacccccagacccccgccccccccaaagccgcccccccacaggagccgccacacccaccccaacccgcccagcccagcaccaagccccccccccaacaccccgcacgaccggcaccccacaccccccgacccccagccccaaggacagacagaccaggaagaagagacacagacagacacacgcaggaggaggcacagagagggacggggcagcagcagggccagacagacagacaggcaaagagggcagaaggacagacaaagacgaaagaaaggagcccccagacgccgagaagagaggacagaagccacagagaggacccacagacaggccaagagaggacagggggcaggggagcaacccgcccaccccggccaggcggaggacagggagagacccccaccgcagaccccagcccccacagacccacccaggaaagccccaccccacccggcccggcaggcgggccagagcggagcgcggcccaggcgggcagacaagcccgccccagggcagccccccacgggccggagccccgcccgggcggaacccccagacccagcgaagcgcagagcgccggaggagacagcgagcggggcgcacgcaggcaccccccgaccggagccagcagccagggggcaggcccaggcccaggcccagggccccaggccggggaggggcaggcccaggacgccaaggggccccagaacccgggccgggggacacacccagccaggggggggacggcgagggcagccaggccagccccccccccgagccgccaccgacgcccaccaaggggcgagccccccacccacaaaggaggcgcagaaggcgccagggcgcggagcggagccaggggaggagcaggcggagcgggggcgcgagagggaggagcgaggggcccggggggagggaggaggcagaggccaccgacagcgcgccggggaggggcgggggcccaggcgccggcaggcaagcgccagggggaagaggggcccccaccggggagggggggggcgggcacgcgcccacagaggccagggggggggggggcgagcagggcgggcagaggagcgcccgggacgagggcaggcggcagcgggcacgggcggggcgcaggcggggcggccgcgcgcaacccccagcccggccagaggccaggagcgcggggggaccccagggccgcgggccacccggccgcccgcgcgcccgcgcgggggcgggcggccaaggaggccgggcgagggcgcgcccaagccagccccgcggcccgccggggacgcaggggcccacagccaggagcccgagagggggcccgaggagggcgagcccagaagggggggggggagccgggaagagccagccccccccccccccccccccccccacccaccaaaggaagcggcgcggccagggaggcgcggacgggggcgaaccggcgacagggcggggacagaaggaagagcaggccacggcagcagcccagggccccacagggcccccaccccaccacacaccacaccccggagacagaggcgaggggggcagaggcccccacacggggagacgaagagacagaacgggggagggagacagagaccagccacagagaagggcagaacagaaaagagggacgagagaaacaaagagagagacagaaaccaagagaaagaaaccgggaagacaagcaaagagacaggagaaaagacggagaacccgcccccggcagagcacggggggcaaccggcgcccaggccaccagggaagcccacaggccggggggcgcccgaagccggaagcaccgcagccagacggcaaaaagggggacaaggacggagaacccccagccaggagcagcaagcagggcaggggcagacagagccccagagccaggggggggagaagccccgagaggcagcccccccaccgaacccgggaccaaggcaagccagcagccaaggcgggggccccggggcacccccacagaaagcagcgggaacgaacccagagccccgacggggcccacccaggcaagagccaaggaacggaggaggggggcaggggaggagggacaccaccccaaagcagggaggcaacacgcacgccacgcagagggcgaggcagagaaagcagccaagcgcagcgggaagagcacaagaaagacaacacgaaggaaggggccagggaaaggggcaaggcagagcacaaaaaaacgaacaaaaacacaggggacgagagcggcagcacagggccacggcaggggcgaggcagggaggcacagcagagaaaaacaacacacagaaaaagaaggagcacaaggcacaagagaagaacacaaaagacagccaacgcagaaaagcaaagacagggaaaaa

SEQ ID NO: 475 - RNA, 1579 nt, Homo sapiens
aacccaccaccaggaggcgaggcaggaaaagccaaccgggaggcggagggcaggagccgagacggccacgcaccagccgggcaacagaggagacccgccagaaaaacaaacaaacaaacaaacaaacaaacaacgggcggggggccagagggccaggccaggcccccaggccggggggggcgaggcaacacgggaagagagaggcaccggcaccccccacccggaaaccagccccccccagaaggccaggccccaccggagagaacaccccagccgagcgggcccagcaccgggcgagaggcacgccgcaggaacacagaaacgggaaagaacaacggaaagaaggcagcaacgcggaaaagagaacggggaagagagacacgggggccagagggagcaagagaacaggagaaggggccggaaggggggggggggagagagaaaaaaaggacggcagaagcaggaaaaaaaggaagaagacgcagggacggggcagagagcggacggcagccaggaaaggcaggccgggacggggcaggaccaggcagagcaccggcgggcgcaggggccgggagcagcagcacggccacaggaccgggaggccgccgcggcagggagaccgcaggagacccacggcccggccagggcgagcaggcagagggcgggaggcgcccaggcgaaagcagcacgcccggaagaacccaagagacagaccacccacacagaacgaccacggaggccacgggcgggccaaggggcaaagacgaaccggccccgggcgcgggccagagaaaggcagaaaaacaacccaccacccacgcccaacacaaacacgaaaccgcagagaagccgccagagggagggaaaaaccgccgcagcgcccgcacagaaaggcgaaaggaggccccacggcaagggacaccccccgaaaaagccagccagcaacgccacaagcaagggcagaacaagaaaagaaacccaacagccaccaagagcagcaggaggaggcaagccaaaaaagccaaccggcacgcaaagcaagaaaaccccaggcgggaccccgggaaggaacgcggagcggcagaaacaaggcgaaaagacagcaggaaccgacggaacggacaaccccgacgcggaagaccgcaaggccagcaggcgggacggcaacaaaccccccggccaggaacaccggcaccaaagggacaccggcagggcgacaccagggaacaccaaagcacaaaggcagggcagagaggcacgcgcaccaaaggcgcaaacaccaaagcaccagaaaaggaaacagaccaacacgcaaaagacaggggagacgaagagcccgcgccaacacgaaacaacaaccggggggcccagagccggcgcaacaacccgccccaacgcacagcgagcaacagacccaaggaggccaacaaggcccccagggaggagaacgagcacaaggggcagcacagaaggaacaccgagggggggccacaaacagccgggaggcccaggcccgccgccagacgcaacggggccaacaccccgggccgcaaaaaccaacacaccaaaaaaacaggcg

SEQ ID NO: 476 - RNA, 12687 nt, Homo sapiens
caccccccccccaccccgccggaggcacggacgacacaagcacaccgaagaggccccaccgcggaaggggcaagaacaccagcgcccagggaacacaacccagcagcccagccccaccccccaaccacgcccaccccaccccccaacacacacaaacagcagccacggggagccgcagggcgagccggcacgggacaaggaaaggcgcccaaacaagaggccccgcccaccgcccccgagcagcagcccccccgcagcccggacggaccacccccaacagaacagagggggcagcccccaagagccacccacacaagaccccgccaccccccaggaggaaaaaacaaaacaaaacaaaaaacaaaacaaaaacgggaaccgaccgaacccgacggggcgacaagacaaccccgaaccaaacccaaccaaaaagaggaagcagaacccagaccacgggggggaagaaagagaacacacaagcagcggaaaggagggcacacagcaagggccgaaacgacccagagggggagaaacagggcggagcacagcaggaggccaggccaccagaagcacagcacagcaaagcaggaaacggagcaacgaccgcaccgggagagccagacggaggaagaccgagcagggcaaccagcacacaaaagacgagaaccacacacaaaagacgaaggaaggacggcggcagcccaagagcagaacgggggagggagagaggcgccggcagccccagacccgacagagcaaagggcacacaaacagaaagcccagagcgagagacggcaggcgccaaagggcagaggacggagggagccagggagggaggcaggaggggccggcccaggcgaagcagggggggccaagccacccccaagcggaccgggaaagcaaagcacagaacccggccccgaaagggcaagaacaccagccggacccacaggggccgcagccacagggaaagaagcccaaagcgaccacacacacagcccaccaccacccaaccaccaagaagaacacaccagacaaaggaggagcgggacaaagggaaacccagaagacgggggaaaagcggccaccaggaccaagcagagacagccacccagcccccagagcaagggggccagcagacaggagcacgaaaagcgggaggggacaacccccaaccacccagggacaagggccggcagggagaagcagcccacccggacagggcccagggggaccgccccccggaccccagccagccgcccagcccccagacgaaccgaccccgccaaggcaggagagggccgaaagaagaaccggcgggcccagagagaacccacaccaggcaggaggagggaggaggggcccagccagcgcccccagaaaaaaagcagcaggccccccagaaacccgcagcggacagaacggaccaggccaccccagcaaggaagccgggaaaaaaggagcaggaacagagcagaccaaagggcaaaccggaaaggagacaggaaacaaggggggcaacagccggcaacaccaaccgccgcacgcaaaaacagcaagaaaaaaaacaaacgaggggaaaaaaaacaagaacacaaacgaacagcggggcagggccgcaccgaacccagcaggggaggccgaggcaggaggacacgaggccaggaggagacaaccaggcaacaagcaaacccgccaaaaaaaaaaaaaaacagaaaaaaaaccaaacaaaacaggcacaaaaaaagcaaccagaaacggaaaaaccaagccagaccagaagaacagggggcacagaggcaccaggccgaggcgacccggcagaccagcaagccagccggagcgggcgcgcacgaaggaagggggagggcagaagggagcaaaggggggcggggagagagacacaggcaacaacagacgcaacagcagaggaaccaaagcaccaccagccgcaggggggcacgcgacccagcaccaggcgcgaggcaggaggacgccgagaccaggagcaacaccagccgggcaacaaagcaagacccccaccaaaacaaaacgaaaccaaaaaaagaaaaagaaaaaaagaaaagacccacaccagcccggcagccccagcaacccccggcgggaagggagagggagaaggcagcaaaggcacgggaggggcagcgcacaagaggccggcgggacacagccagcccgaggcaccaacagcccccaccaaggccccagagggagacaaggagggggagcagggaggggccccaggggcaaagacccaggaagcgagaggggcggaggccgccccccccccccagggcacaccccgagggggagcaagggggggggacccggcccggaggagcaggaaccccccgacagaaggccgaaacgggcggcaaaacggagaagcaggaacgccacagcccgaccccccccggccgcccgcccaccccagcagagggagacgggaaagaacaaaaggagggagcacgccagcagaggcaaggaaaaccagagagcacagccaaaaaaaacggaagccaccaaggaaaaaaaaaacagccaccaagcacgagccgggaccccaggaaacaccgaccaggaccccaaaaccggaggaggggcagacccaccaagggggaaacgaggccaagagacaccacaagagagaccaggacaccaaggccgacgaccagaagagccccccaggaccaggaaagcaggcacaaaacgaaggaggacgaccaggccggcgcaaggcccaggacccgccgcccacccgccggcccaggcacaccccgggcacccccccgaagaccaaggccccaagcaccagagcgcggcagcacggggcccagccgaagacccccaccacccgcggcacccaacccccaagacagcaaacaccacccccaacaagcccccgaacccccggcaggagcccagccaccacaccgcaccaacgacccaggacccacggagagcaggaaccaaggcgaagcggcgagcacagaaaaagaaacgacggaagacagcacaggcggccccaggaagagcccgggcacagccaggaaacacccaaaagcgcaaacacacagaaggggcggggaacagagccgccggcccaggcggaggcagggcacgaccagccacgcagcccacccccaggccaaggaacccacccaacccccaagagcaggaccacaggaggccaccacgccggcaaaagaaaaaaaaaacaacaacgaagagggccacagcccaggcggccaaacccgaggccaaacaaccccaccggccccaaaggcgggaacaggcagagccaccgcacccagccagaagaaccaccaagaaaagggccaggcaggggcccagggggaaacacagccaacagcccaggcccaccgccaccagaagaagcgcaccaggggacccccagggaaagaaggcgccacagcccaggccacaagccccacaccaagacacgacaaccggagaaaaaggggaaccgggcccagagaacccccagaacgcacccccaaccagcgaccccgagacagagccaccgcgcccagccggagcaggggcaaccggccacgcaagcccgcccccaggcagccacccgcccagcccccgagcagcgggacacaggcacccaccaccaggcccggcaagaacagagaggggcaccggaaccaggaggccacccgaccccagggaccgcccgcccagcccccaaagcgcgggacaggcagagccacgcacccggccccagcgacacaagaacacggccaggaggcacccagcccacaccacgccagccggcaaaggaaagggaggccaaagaccaggagcaggcccggcccaggcagagggaagaacccaagcccagcaggaaggcggaaaggcggaggggacgacacaccggcacacaaaaaaaacggcaaaaagagagcaagcaaagagacagaggggggaggaaacaaaaaaaaaaaaaagcacggaaggaagcgaccaggccaggcaccacaggacgaagacagagggcgaacccacccgcggccgggaggccccaccaagcgggccccagaggccacacaccccgcccgacccgcacgcagagcaggcacaaggggcccaaaagcagacacgggcggagagcacagacagcccccaaccgcccaacccggaaaaaagcgcacccaagaagcaccccaaaaagacccaaaccgcgcgcaccaacggaaaaaccaaaccccaggagaaaaagaaggcacaacaggcccggaaagaaaccagggaaacaccgggagccggcagaaaaagaacaagccgcgggggaagaagagaagaggcacggcgcagccacagagggacagagggaggcggggccgaggaaggcagcaagccccccaggcccaaacaccagcggcgacaagcacacaagagcagggacacaagagaccaaaggaaggaccaaggcacgccgcccaaaccgcgagcccaccgcggacagccgccccccacccgcgcgagagccaaggcccccccccccccgccccacgcaccaggccccaccggccccccacccccagaccccgggccgccccgagccccaccacccccgccgcgcgccccaagagggcccgcgcaggcggccacccgcgggaggcaggccccgccccaggcaacaggccagcagagccaggcggagccggaccaggagccgcagaagggcaccccaccggaagccaccaggaggcccacacccccaacccaccaacccccacggacccgaacacggggaagcaggaaaacagaaccccaagggcagaacgccaggaggagccaggagccgggggagaccggcaccaagagagcccagcccacggaacgcaaagagaagaacgcaacaaggcggagggcaaggggcggccccggaaggacaggcaagcacaaagggccacagcaagggcaaaaaaaaaaaaggaagaaaacaaaccaccagcacggcggggggccacacgaacaggcagaagaacgcgacacgaaagcgcgcacaacagagcgaagcacgggcggaggcagagcgcccgcggaccgggcccgggcaacgccaacccgagcccccaccccacgaaagagcgcagaggccgggggccaaaggagaaaccaggacagccagcacggcacgaaaccgaaagggcgaaagagaagcccggcccggagagaggcgccacggaaagagaaaacaggagaaggggacgaacgcagcccccgaagcccaggaaggcggagcacacacccaaaaaaaagagaaacagaaaacacaaaaaaggaaaacccagcacagaccggagccgggaccaacacaaagcgcgagccgcccagagaccccaggaccaaagcaagaaacccaaaggaaggaccccccacacaaaccccacccaccccgcaccagcccaggagagcacggcccagaaagcagaaacaaaaaacccagagaaggagaacaccaacagacaaggaaagaacccagagaaacccaccgcaagagggagagcaggccaacccacagaccgcgcccgaccaccccaaagccacgacacccccaacggcacccccaaccccaggccaacacagacacggccccaccacagccccaccagcccccgggcccagcgcagggccaaggcagcaccgaaagccaacccgagcgccagcccccaggacgcaagccacaacacccgcacaagccccccgagaaagcaagaggccccaggaacaacgagccacagccagagcagggcagagcgaaaaaacaggccagaaaagcacaggggcccaccagggccaaagggccagggcagacagggcgccccaaagaggcgccagcagagagccaccaggaacagaaaagggaaaaaacaacaggggcgggacacgcgggcagcccacaccagcagaagcaacccaaggaaagccagcccaccaggagcccagagagggaaggagaaggcaagaaccacaacccaccccggacacagagggggaagggaacgacccaagagaccagagaagacaaacaccaaccaagacaaaggaggagccggagaaaaagaccacccccgcaaccaaaaaagaaggacggaggccagaacgcggccgcaccgagagccgaaaccccgcccaaaaaacgggagacgaagaggagagaaagaaaaacgagagggagccgaaccaacgaacaaaaagacaccgggggccgagccccaaacccacaagcccgggagggaggcgcacgcaacaaaaggcccacgaagaagggccggaggagaggaaggaagagaccgaagacgacgaaaagggggagagagggaggacaccaggcagagaaacagccaggaaaccgggagcgggcccgcggaagaagcccaggcacgaagcgaccacacccggagccccaaccaccccccgagccacaggaaccgaaagggcacgcaagcccacagggaggggagaagaaaacagccaggggagggccgacccaacacagacgcgagcaaacaaaccagcacaaggagaagagaaggaaaggaaaaaacagggaagggggaaagcggggaggcacaccaagcccgccacgagcgcccccacccgccccaagcaaccgagggagcagcgccagcagagagccaccaggagagcaggagcaggaacagaaaagggaaaaaaaccagaaagagaagaggcagagaaggaagaacacaaagcacaagcaagaagcacagaaacaacgacaaaccaacccaccgaacgacgcccggggcggagcgagaccgcggccccaggcaggcgagcagaaggcccccccgaagccaggcaagcgccggccggggcaaaacggaaaggaagcagcacaccagagagaaaggggaccgaaaggccaagcaggacagagaagacaccaccagccagccccaggacacgaccgggagcagggggagagacagacacccccgggaaggaagcagaggaaacccaaaggggagagagagcaagcacccagaggggcggaggaggccgggcccgcaaccaagaccacggaaaacaagcaacccgcccaagggcccgcaggggcggagggagaggcaggggaggaaggggagaggccggggagcccccaggcggagggggaccaccccaggccgagcacggcccgggcccaggagggggggggagaggggggggcgggggcccgccagcccccccccccccccagaacagagaaccgcaaggccagcccagccgggccccccgaccagggaagggcaggagaggccccgaggagcgcccacacccggcgaggcccacccccagggccccacgaggagcagcccacaggggccgggggccgcccggagccccgcggaagcccggggcacgaaaaggcccgggcaggccagggcccgggaccaggaaggaagggcaggcccgccccgagggcggcgcaagccccccacgccacacccaccaccagacccccacaaccagaggggggacacccccacacagaggaaaaaggaggccagaaaagggagaagacgcccaaagcaaggcaacaagggccggcaacggaacgccggccccacgaagccccacacaggcacaagcccacacaggggcagggagcgcccccgaagggacccacggaccgccccgagcgcccaagcaccggaagccccggggcgaaggcccgcagccagccgcaaggcccacgacccggcgcggcggcacgggcaacgcggcaggaccgccaccccgccgggcgcccagaggccccgccaaaggggaccccgggcggccagaggcagcccaggccaccgaggcaaaacggggccgaagaaagaggcagaaagcccccccacgggcccaagaagcgggcccaaagaagcccagccccgcagccccccaaagggagaaggggccaggccgcagccgccccacaccacgcaaaaaagcccagccagaagaccgggaaacgcccccacagcaccagaccaggccccaacacacccccccagacaccagacgggagggagaagaccgcaacagaccccaccccccgccacagaggaagggagggacagaccgaaggcaggcaaacagagccaagaaaccagccagaacgaacagcgcccgggagagggggaggccggagccgcagcacgcccccaggggggaaccagccaggacgagcgcaccggagaagagcgagccgaaagaaacagagaacagaaggggacagagagccccgaaagcgcgaaaccagccacaccccggacccacaaagcagaaaccggcaaagcaaaaaaaaaaaaaaaaagaaagaaaagaaagaaaaaaaaaacagcacaccaccaccagcaaacagagaagagaccaggccccgcccgacccagcaaccccaccaaacccccagaggccacaccccagcaaaaaccaacaaacagaaccgaggaggcccacacaacccgaaggccgccggcaggaacggacaacagaaaaagcccagaacagccaacggcgggaggaggggggggggaggaaagaaaggggggagagagaacaaggcacagcggccaacaccgccgcccaagcagagcgaaccccaagcaccgcaccgaagggagggccacaccagaaggccagggcggaggcagagaaccaagaaaggcgccgccggcggaaccccacgccccagagaaggagagagaagaaagaagagaccgcaacaaggcgggcgaaacggccccaccccaggaggaaccggagccagaggcacccaccacgcacccggccggcccagccacacccccacccgcaaaaagccccccagagcaggagccagagaagagcagacccacccaccacacggcaggcccacccccccggccacccccccgggcaaccacggacagggggcaaggcgcccaacagccagcggagggcccgggagacaggaggggcagggcgaccccagcccggggacggagagagagcggggccccagggagggccgcaacacggagcccccagccccaaagaagggaccggggcccgccccccgggcacaagacggcgccagcaaagaggaagaaaacccagggagccccgccagccccagaccccaccacgaaccgaaccgggcaacccagggcgaccacagccacacggaaggagggacaaggcgcgggaggaggcaccacgccggccggaacggcacccgcagccaagcccagcgcgccaccacaaggggcgagcacgggccagcgcccccccgcccccgccacagcaagcccaggccgcggcgggggccccaagccaagagggaccaacccggcaaacaagcgcacaggggcaccccgggacccccgccaggaagaagaggaggaagccagaaagaaaccaccaggcaccagggccccagggcaccccacagaggcacacccagagagggggaaagagcccgagaggcccgagcaagggcaaaggaagagaaaaaagaaggagcgccaagggcccagaggaggacaaaagcaagggagcaccccgcaaaaaggaacccacaaagcaaagaaaaaaagggaaggggagccagagggagccccgggaagacggggggagggagcggaggaggggcacgggccgcagcagagccccgcggagcaaagggacccaggccgcgggcccacagaaaacaccaaagggagagccagaagccccagaagcccgggcccaaagaacagagaaaagcagcagccggaccggagaacccaacacaccccagcccgggcccaaagaacagagaaaagcagcagccggaccggagaacccaacacaccccagcccggccacacaagaacacccaaagagcaaaaaacacccaaggccggagcggggccacaccgaacccagcaccggaggccaagggggaggacccgaggcaggaacgagaacagccggccaacagggaaacccgccacgagcgagacacaccacgcacccagccggggacagaggagaccgccaaaaaaaaaaccccagaccaaaggacaaaccccagaagggggcgggcagcagaacacacacgaacacgagcgacccaaacccagagaaaaacagcggggggcacgaaaaacgaaaaagaaggccggggcagggccaagccgaacccagcacaggaggccgaggcaggcggacacaaggcaggagggagaccagccagccggccaacagggaaaccgccaccaaaaaacaaaaaagccggggggggcacagccgaaaccagcacggggaggcgaggcaggagaacgcgaacccgggaggcagaaggcaggagccgagagcacaacacacccagccagggacgagcaagacccaccaaaaagaaagaaagaaagaggagagagagagaaagagagagagaaagaaagaaagaaagagagagagagagagagagagagagagaaagaaagaaagaaagaaagaaagaaagaaagaaagaaagaaagaaagaaggaaggaaagaaaagaaagaaagaaagaaaaacaaaaacaaaaagaaacaggccccaacaagcaaagccagcaaacagaaacggagggacgggaaaacagaacccggggaaaggcccaggcgcacaccaggccccaggggacacagcgacagaaagcaaaacacacaacccggcgccccagccgccagcgggccccgaccccgggcccccagaggccccggaacacaccgagcacgccccagcaccacaaaggagaaacggcaagccagccccaccagagaaaaccgaagggcaagaaccaggcgggcggaagggggggaaaccaggaggccgaagcggacgccggcccaacccagcccccacccagcgcgaccagcaaggccccccggcccaggccacgaaaaggaagaaagagaccgcccacagggagggaggaaaaagaaaaaagaaaacaagcagcaaggcacaggaaagcaaaaacaaaaacaaaacaagccaccaccacaacaaagcgaaaacgcaaccagaagccacaacgggggacagggcaaggccagcagggggcgcgcccagaggggcgggccaccacaggcaagggcggacgggacgcaagcaacgagggcgggggaggcgcaggagggaggccagcccccagggcccccagcagacagcggggccccagggagcgggccaagagggcgagagcaaaagcaagagcaccgcagcaagcaaagcaagacaaggcaccagagcaaaggacagagaagaggcaggaggaggagggcaaagacccggacacaccccaaggcgccgaacagcaggaaccagggcaggcccagagcaaaaggaggaagaaaaacaaaggaggcagaggagaaagaaacagaggccgagaggaaaacgagccaaggcacaaagcaaagagcggcagcaccaggacgagaaacaggccggcgccagcgccccccggcacaacgccagacagcgccgaaggggggaaccaaaaagcccaccccagccggagcccggagaaacagaaggcaggacggcgcccgaaaagcggggaggaaagaagggagcaccacccagggcaaacgcagcagaaaagacagagagcacagcagccccgggccacgagggccagcggccagggggaggcagagacaaaggcagacccagaagacgccgggccgcccagaccgcccacacacgggcacacacacaacagcagcacccccgcccccaaggcggaagaaagcaccaaaggagcagggccacaggccagggcccaaggacagcaacaggaagaacagcaagaacagggagggggaacggcagcaggggaaaggggaggcgcagaaggggggaaagcagcacaaccgcacagccccccggcggaccggggggaaaccgggcggcaagacgcgcccccacagaagccccaggccgcgagcacccaccgcgcggggaagcaccaagccgaggaaagagcccgagcacccagaccacaccggggcgcacagagggggccggaggggaccacagaagagacccacccccaccccaacaaggccccccccccgagaagcccacgcacagcaggaccacaaaccccaggagagaagcggcagagggggcaggggggcaaccaagcagggggggggcggggacagaagagacacgacggaagaagcgggcacacgagcagaaggaacgagagaagacccagacccaggcaccaccaggccccgccggggacaccacgcgggagaagaggggagacggaccccagcagccgacaaaggaggcacacacaacggaccaagcaagacccaccaccgagacccaaccggagcccggcggaccaggcacagaggcggaaggacacaggagagagcaggaagggcaccaagagcacccgccagagggaaaaggaagcaaagaaaggggcagagcgccgacagagccagagacccccaagaccgcaggcagagccaccgaggaaaaggggaaaaagcagggcgagacaaggccacgggcagaacacaccagcgaccagccccgcacccagaaagagagagaccggagaagggggggaccaccgcac

SEQ ID NO: 477 - RNA, 1641 nt, Homo sapiens
ccagacccaggcgccaaacaccgggccaaggacccccacccagcccccgaaggcggaaacaggcagaccagccaaaaagaacgggagggacagaccagaaggaaagccggcacaagaaaccagaaagacacggcggacccagcagacaccagcaagaggaaagcaaggccagagccacgccacaccgaacaacacccggaggcgagcgggaagaccgaggccaagaggagaccagccgagcaacaggcaagaccaccccccccccaccacaaaaagagaaaaaaagccagacgggggcaaccgagcccagcacaggaggcgagggcgggccgggagcaaggcgcaggagcagagccccacgcaccccagccggggacagagcaaaacccgccaaaaaaaaaaaaaaaaaaaaaaggagagcaagcccagggccggacacgaaaagaaggagggcagaagaccagcagcccaacaggaacaacagccaacgggagaaaggcaaagagacaagaaccaacgcggcacgacagcacaaggacggagccggcgacgacccacggccagcccaaagcgcccgaaggacaagacccccagaaaaggggcccacaccgccgccggagaaagacggaaaagacacgcccggcgccaccagggccccacaaggcagggagacccccgcccaccaccggcagagggcaacaggagagacaaaaaaagcacccagggccaccgcaagggaacagggacagacaagaacacaaggccaaacaaaccccgagaccgcgcgcgcagcgaagcagaaaaccaaaaacaaaaagaccaagggaaggcagcaaggaagcagggaacggggagagacagcaccccaggggaggaaacaacaccaggagaggaggggggaaggagcgaaagcggaaaggaaagaggggaagcccggcggaaaaaggaaagaggggggggaggagaaggccagcggaagaaagcacacaaagcagcacccggcagagcacaaacgcaagccggaaaagaagcaaaggggcagcacggcagcaggggccgagcaaagaacccccagacaaggaccgaaaacaaagcaagaaaggccacgcagaacgacggaggaggcagccagaggaaggcggggagggggggacgggaaacaggagagaccacccacaaggaagcagaaacaaccagcccagggaagggccaaccaaaccggacccacagcagaccacacaggagaagcggaaacggaaaggaagcaccaaaagggcggcaaggcaaaaacaaacaacagaccgagccaaaaaaacaacaagagacaaagccaaaggccaaccgaaaacagaaacagagcagcaacggaacgcaaagcacaaagacaaggcagggcccgaaaacaaagacaaggcaacaagcaaaaccaggaaacggggaacgcaaaagcggacgagaaaagacaggccagaaaaaaaagagcaggaacagccaacggaaagccgaaaccaaaaacagaaacaagagcaccaaaagcaaagaaagaaaaaggcggggccgggccacaccgaacccagcagaggaggcgaggcgggaggaggagcccaggagcgagaagagccgggcaaccaggaagaccac

SEQ ID NO: 478 - RNA, 174 nt, Homo sapiens; identical to SEQ ID NO: 383

SEQ ID NO: 479 - RNA, 9557 nt, Homo sapiens
caacccaaaccccagcccccaaaaaaaaaggaaaaaccacacagaggacaggacaaagagacagagccaaaggcgaacgaaaagaaagggggaaagagagagaggaaggggagaaagagaggaaaaggacggcggccaaaagaacaaagagcgaggcagggcaaaggaagaaaaggaaggagggagacgccaccacccggccgcccaccggagaaacaccagaggccgcaaacccagacaaccacaccccgcccccaaaagaggaagacaccgcagcggccccccccaccccacacgcagacccagcggggacaaacaaaacccgacagaacaccccacaagcggcacaaaacagcagagggccccccacccacacaccccgcgagggcgcagcacccggccgggcagagagcccggcagagaagcgccgaccccaggccccggcagggagcccgggggcagcaggaccggcaccagcggaaagcaaagcacgaaggaaaacacaaggagaaaacacagccaagaacacaagaggagcgaaaaggacaggagcaccggcaacccccggagaacagaaacgagcccaaggaagagaagcaacagcagacaagaaaagaaccagaaggccaaaagagacacaggccgaaccccaggaaagagagaaaacgaaagcaaggaacggcaggacagggaacaagacgaccgccgagaaagaacagcacgaaacacaacccgacaaaaccagacacagagacaagaaggaacgagggaaacagaagaaacaagggcaaggagaaagcaaaaacagaggagaaaaaaaaggggaaaacaaaccaaggaacaagacaagagcacaaaaccgggaagaagacaagagcaaacaaagggagaggaggaaaaaggcaaaaaaaccacaagaaaccacccaaccccgaggccaaaggagccggaaagcaacacgagaaagcaacacggaggccaaaggaggcccaccaaggcagacaaggcggaaaggagagccagggcgggccaaagccgccgaagacagccagcggggcggacgggcagcgaagaaaacgcccgggaggaagccccaggggccaaaccgggaaaaccacagggaacaggccaccaagcaacacacgaagggaggaagagaacacagcagcacaccagacaaacaacaacaaagcaagaaaacaaaaacccaagagcaaaagagaaagccaaaaaaaggaaggggagagaaaccaagagaagagaacaaaagacggcccagcagcccaaaaccgaaacacaaagccaaaacggaacaagccagcccagcacaccacaggccagaagaccggggaaccggcggcgcagcaggacagggagggaaccgagcagcgcaaaaaagagacaaaaaaaacaggaaggcaaaacaagaaggcagcaagagcccaagaaaaacaggacagaaccaaagccaaacaacaaaaacagcagggagcaaaggggagacagcgcagaacgcacaggggacaaaggcccagacagaccgaccgcccagaaggcaagcacagaagggaaaagacaggacaccaaaagaaaacagaacaagcaggcagcagaaaaacaaacagccgggaaagaagaaaagagaggaaggagggaggcagacaaaacagaaagacggaaacagagagccagaaaaagacccaagaacagagagaagggaagcaaagacaaagacaaaggaacaggaaggaacaaacggacaaggcagggaacagaaagaaaaggacccgaggagacgaggacaggcaggcaaccccaggcagcaccgaagcgaggaaggagagaggaacgagagccgaaaggacacaaacagcaaaccacgaaaaaaaacgcgcgaaaaagaggaacgcccccaaaagaaaagaagagaacacaaggaaaacagaaacaagaaaccccgggaaaaaacagccagggagaggggcaaaacccaggaaaacagcagaaagggaaaaaagcaaggccagaccagaggcagacagagcaagcgccacgcccggcaagccacacacaaaaaagcagagaccacaccccgcccagcgaagcgcaaaaggcggagaagccacgaaaaggcagaccgcacagaccacaagcaagccggaaaagagcagacgggcaaggaaacacagaaaaacgaaggggaaagcggcaggggaaaaacagggccccaaacccgagagaagacagggaaacccccggaacagaagcaccccggcaaagcaacagcacgcagcccacagacagaagcaggcgggacaccccagccccagacccgacagggggcacacaggccccacagagagacacaggggcgaaccccccccaccaaacccccaggaacacggaggggagcggggaaggaccggccagaagagcaaacacaaggggccggacacaggggcagcagccaccccggccaacacgaaacacaagagaaaagggggagaggaaccacaagccaaaaggcaaggcaaaaccccgagcagcgccccagggcaacccgagcgaagccgaaaagaggcccaggaaagaggccgagacaaggacccaacaaggccaagccccagaagaaaaaaaacaggaaaccgaggaacacgaaaaacaagaaaaaagccaaagagaaaggacgcccaagcacggacagagaggagagagcaggccagacggcaccccagaggcgcccgggaccaaccagaacgcaggccccaggaaccagcacgagagggcagggccaagaaaacaaagcggcagggggccaacgcaacaccgaagacaagcccaagaggggacaacaaaagggaacccaggaagaagaaagaaaggcgaaggcagaaagaacggccggagacagagacacaaccacacaacacaaaaaaccagagagcgcaggcccacaagcacgagaaaaggggaaaaaaagagaaagccgacccaggagcaagacagacggggccccaggacagcagagcaacccacaaagaaaaaagcaaaggggggggaaaaggaaaaaaagcaccccacgcccccaccagaagcccacacagcaagagcggacccaggaaccgcggcaccaaggggacgagaaaaagacgaaggcccagcacagaaaagaacaaaggagcaaaagaaacaaggacagaccaccacacaacaggacacgaagcgcgggcccacgagaaggccacagagcagaaccccaacccacccaacacggccaccgccggcgggcccccaacagcaagcgcgcccgaggggcgccaccccagccgagcccccggccaccccgggaccccacagagccgcgacagcaaagaaaggggggccggagagccaaagggacacgaggcaggaaaccagagaaaagaagacgagcagagaaaaagaaagaaaagaaaaacccaggggaaaaagcaccaagaaaagcaggcgccacgggcaaggaaccccaggcggaggagcccagaagccaggccaccaccacaagaagcaaagaagcaagcggggacggaggagggcacccgaggcccgaaccaccaggccacacccaccacggagaaaagagcaccaaacccagaaaccccccccagagagcaaggaaaaaaaccaacaccaaccacagacagagaacggcgacccagaaaacgcccccacaagaagccaaaaccgaaacaaccgaccaaaacccacaggcccaccccccaggcaacacccgcacagccggcaccggacccccaccacaggcccagaacacacccagcccaccgaacgccaccacccgcggccaccgaaagcacggccacggaacaccccccccaccacaccacaaccaggccagcaagagacaccacggagacagcagccggagagcaggacgccacaacacagccaggcccagcggcaccaagccagagaggaacaaagaaacaaacacaagagggaggcagaagagcaaggaagagcacaaagagccagaccccggggagccaaacacaaccaacgaggggccgacaagacaaacggaacagcccacgagaagggaaaaaaagcccgccgacgagaggacaaaaggcacccgacaggcaggcacacagccccacacgagcaccacaccaagggcccccaccccccccacagaaaacaccagaaaagcacagagacgaagacccaaggcacaaacacacggggcagggaggaggggcgccccggagaggggacacaggaaagcagggggagggcagagggacaggagcccagagacggcaccagagagaccagccaacgccccacgaaccaggggaggacagcacgccagcagcaccaggaagcccacgccaagggccccacggcaccaaaacccaaagccaggcggcgcgaccgagcagagcaccagaccaggcagccaagccccagggaggagggacacggcaggcccggaggccgcggcacaccgcgcagagcggaccccccacgcggacgcaaaccccagcgagaaaggaacgcagaacagaacaccaagcagaaggaaggagacaaagccaaccaaaaccacaaggaggaagaacacgagcaggaaaaaaacacgcccagagacgcaaaggccccagggcagggccagcaagcaagaagaaaaaggacaggcacgccaaaaagcacaccgccggaaacacacccaccacaacaccaaagcaacccagggccaacacacaagagagcccaagaggcccgaaagaaacaaggaagaaaagaagcaccgaagcaccgcgagccgggccaaaccgaacaggacagcgggccccacgccaacccgcccccccacagaccaagaaggcgagaaacagccaaaaacagacaaaaagcagcaaaacaaacccacagacacgacacaaggaccagcccgaaagacccccacagaggacagaagcaagcagagaaacagagcccagcgaagaacagcacgacagagccaggaacgcccggaagccagacgcccaagccgaaaagcccagccgcccaaaaggaaccagcaagacacaagggccagaggaaaacagcaaagccgacaccaccaagaagcaagcagaaaagccggagacacaggcaaaaccagggacagaagaaaccgagagcagagggggaacggagggcaggcacacaaccgcagggccagagaccccaaacccaggaccagaccaccaagagacgggccccaacgcggacagcaaagccagcagaccagcaaggaagccgagagcacaggcgacaaggcaccaccagacagccagggcgcagcacagaaacccccacccagcacgggagccagagccagcaccagagccccacacaagaggagcccaggccaaaggacaaagggccacggccagaaaaaggagcagaacgaacccgacaggacagcaacagccccgccacgaaccacccaaaacgaaccaaggagaaagaacaggagaagggaaagacgacaaacaagaaacaacaccccgaaaaacagaaaaaaacaaaaaccggccgggcgcggggccacaccgaacccagcacgggagccgagggggcgaacagaggcaggagacgagacaccgacaacagggaaaccccaccacaaaaaaacaaaaaagagcgggcgggggggcgccgagcccagcacggggaggcgaggcaggagaaggcagaacccaggaggcggagcgcaggagcgagagcgccacgcacccagccgggggacagagcgagacccaccaaaaaaaagaaaaaaaaaaaaaaaaaaaaaacagaccccacagaaaaagcacggaccccccggggccgcggccccaccgaaccccagacaccaacagggagggaaaaggaaaagcaacagcacaacccggccgaggggcaacgagaaccgccaaggggaaaaaagacaaagaaagacaaagccagcaaacccccccagagagccagagaacagggaaaccacacaaaaccaaagcaaaaaaaaaggagcacgaaaaacgcagaagggcaaaaaaacacaaaacaaaggcgcaaggacaaggggagaagagcaaaacaaggacaggagaacacacagggagagacccaaacagcccagacgaaggacccagagaagccaaaccagccgcccgggccccgccaacagaccaggcgcaacaggaaggacagaaaaaagccggaaaacagcacagcaaccccaaacacacacacacacacacacacacacacacacagagaacagcaaccaggacaaaggcagagaaggaaacccacaaccagccgcacaacccggaagagaagcaggcagcaaaaagagaaaaacgaggacagggagacaggacaggccgccggggcgggcagaacacagaaagaaaaaaagaaaaagaaccaaagcaaagaggagcagaggagaagaaaaagaaccacaacagagagacaacacacggccaccagaccaccaaccaccacacgcccgacaaaacaccgaaaggggaagcaaaaagaacaagaaaacaaaaacagcgcgcccgccccacccagcagcaagaggcgacgggcacgcggccccacggagggcgacgccgcacgcggaacaaggaagaaacggggcaccagcaggacgaccccccgccagcgacgcaagggcgcgggaggcggcggagggccagagagcagggacacgccccaggcacccaccggcgggccgggcaaggccggggacaggggaaaggagaggccggcaggcgccggcggagcgagccgggagaaaggagaagagggagagggcagcagcgcgagggaaaaaagacccgggaggcaggaaggaaacgaggggcgagacaccccccccaaccacgcccacggcggcccggggggacccagggagagccacagcagagcagagcaggcccagccccacgggggcggagcaaggccgagggccaagaggcccccccccccgagagcccccccccacagcgccaggggagacagcagcgcaccccgcagcgaggagccaaaggacggggacaaacacaaaacacaaggccaacacgcaccggagaaagcaaaaaccaacccagaccacccaacaccaccaccacgggggagcccgaccaaccgcccaagccaaccgccggcccccccaagcaaaaccggaaccacccagacccacagaaagcccccaggccccccgcaagcccaagaggaaccacccgcaaaacaaaaaggcaaaaagagagccaccagagaggccccacgcccaccagggggagaagaaacaggaggcacagcgaaaaggacaaaaacgcagcccgcccaagacgaaggagaagcaaagaccggagaacgaggacccaaggcccaccagaccgcgaacagaacagcaaacaagacccagagacacaggacaacacgagaggcacgcacccaagagcaaacaggggaagaaaaaaggcccaaagaggaaaacaaacaagcacaaggcacagcaagagaagccacaaaaagaagagaagcgagcaagcccccccgcagaggccaaaaagacaagccaagccagcacggaaacaagcaaagcaaccccccccaaccaaaccacagggagcaaaacaaaagaaagcaaacaagacacagcacgccgagccgccgcagggccagcaggcgaaccaagccacgacgacaagaacccccacagagaaggaagccgaggcggcaagaaaagaaagaggcggggggggccagccgaacccagcacgggaggccgaggccggccaacaccgaggggaagcgagaccagccgaccaacaggagaaacccgccacaaaaacaaacggccgggcgggggacaccgaaccgcagcacagaaaggcgaagcaggagaacgcgaaccgggaggcagaggcaggagccgagacagcggcacccagccgggcaacaagcacaaaacccaccaaaaaaaaaaaaaaaaaaaaaaaaaagaaagaaagaaagaaaaagaaaagaaagaaggcagcgacagcggcccaggcccaccagagaccgccaggaagaacagaagacagcacaagaacacaaaagacaaaacggaaggaaccaagagacaaccaacccccgagccagaggcaagagagcacagagggaaagacaccaagcaccaagagagcagaggggcaaggacaaagcggccacgggcagggcccagcgcgacgccaccccccccacacacacacaaaggaagaacaaacaagaaacaaacaccggacgagacacacccagaacggaaaagcagaaaaacgggagccacgccagaagcacagccgcaacacaaaccagagggagcacacagccaaaggaccacccaaagaagagcaccgggaaacaagcagaaaacagccagcggaacaaacaaagaggggacaggaaggaacaaacaacgaggaaaaaacaacggaaggaaacaaaccaagcaagagcagaacagggaaagagggaacagaaaccaaaaaaacagagacaagacaggaagaacacaagaaacagcgagcagaacaggacagacagcacgacaaggacaggaaacaaaagaaagagcaacccgaaagaagaaaacaaaagacaccagaaacagaaaccagagcagaagacacgacgggcaccaaaagaaaacaggaagaagacaaagcggaaacacacgcaaaggcacgaacaccagcaccaaggcccacagaacaaaaggcaccacaggaacaagaaggcaccccgcaaggaagagaaagaagcgcacaagagacaagagacccaagcccaggaagcaagccaaagaagcacgaccacagggacacccaaaccaccccaacacacaaggccgggaaagaaaaacaacacacaaaacgcaaacgcacaccagacgacagaggggggggaccacaggcccaggcagcgaacccgggcaaggacccccacccagcccccaaagggcaggaacaggggagcacgcacccagcgcacacccggaagacagaacacggacaacccagacagaggaggaacacaacaagggagaacccacaagaagcggagcgcaacaagcaacaaagaccacgaaagacaaggaccggaggaggggaccgcaaaaggaaagagaaaggaagcaacgccacggcacaaagcagaaagaagagcaggggaacgaggcaacaggcaaacccgccaggcaagacaaccaagcacagcgaggaaagacagagagaagagccacgacagagcaaaaacaagagaaaggacaaacggagcccccaggacaaaagaccagaagaagagggaaaaaagaacaagagccggggcaaaaaaggagccaggaaaaaaccccaaccaaaaaagaggaccaacaacaagccaggaaacacaaagcacacaccgcaaacagaaagacaaccgaccaggacacacaggacacgaaggacacccgagcccaagaagagccc

SEQ ID NO: 480 - RNA, 1714 nt, Homo sapiens
aaaaaaaaagaggaaagaagccaacagaaaaagaaaacaaaagacccagcgcaacagcaacacagaggccagcaccgcaacaagcaagcaaaggagaacacaagacgaagagaaaaagaaggcaccccaggcaaccccccccgaaacacacaggaccagcagccagggccaaacgaagcagcacacacaccaccaaaccagcaacagggggcaaagagcaagaagacgcagaacagaaaaaaaccaagggaagaacaacaaacgggaaacggaagagacaacgaaaaaggacaaagaaagcacaaagcaagcgccaacagacacagcaggaaacaggcaggccaggcagaaccaagaacaacaaaaggaaaagacgcaaaggcgaaacagccacgcacgcccaagacccccaaaagcaaaccagcccaaacaagcccaccacgcaagaaagaaggacgaagaaaacagaaagcaaaggagggcagagaccgcagcaagcagaggagcgaccccaggcacaccagaggaagcccagccaagacacagacgagagcccggcaaacacaggacacaggagccaagcagcacagaacggccgagcagggaagaccagaaccgagcccagggaccccagggaagccaccacaaaccaggaaggggcccagcgggaaggagaaaggcaggcccacagccccggacggaagcacacggagcccggcgggcaccgagaagcgccagaacaccgcccagcagcaggcaccccccaccaggccacgccacagacaggaggaggaaaagaaaagagacaaaagaacacacggcccacggcaccagcacagccacacgcacacccagggaggaggcgagggggagcagcaggaagccagccacccccgggggccagggcagccacacggccgccccgggaaggcacccccagcaccggaggacagggagcagcccaccgcgagggccgcgagccaaggacaaccccacccacaccccgaccccccaccccagcgccggaccgacccaccccccccaccagcaccaaaaagacaccccacaaccacaccgcgagaaggagaggaaggagaagacacaacagccagggaacccagccaacacccgccacgcagcagcagaggacgaacggggacaaaaccacaggcagcccagaggcacggcacaccacccccaggaggcacacaccccacggccaaccaaacccagagcggccccaaacaaagaacccaagaagcccaacagccgggccccgagggcccgggaagcagcccaggaaaacagacaaggacgaaaaggaaggaaagccagaccagaaagacaagggagaaaacagcaacggagcacacaaaacagcaacggacagggccccacaacaaacagaagaagggccgcgcaggagggacaagcaagaaagaaggccaaaacgaagcccgaggcagaagagcaaaggaaaccggagcaccgcacccaacccaacaagggcaaccccgccaggcagcaggacgagaggaaaaagacgaaagacaaccaggggaccacacagccaacccagggagaccccgaaaaacaaaaaacaccacaggaggcacaggggccaaggacgacagagaacagcagaagagcaaaaacaaagcaaacacacagcacacaggccagacacgccaagcacccacaaaacaccaaggcc

SEQ ID NO: 481 - RNA, 286 nt, Homo sapiens
cagaaagcaaacagaagcacaaaagaaccgaacagagccacggaacacccagggagaacagcggcacaaagagagaacagagagaaagaaaagcaaggaaagcagaaaaaagcaaaaagaaacaagaaagcacaaaaaaggcaaacagagagagaaagaaaccaggaaagggacaaggaaaacgcagacagcagcgaaaaacaacacagcagaaaacagaaaagaaaaaagaaaacaagaagaaaaacaccaagagcgcccgcggcagggcaagcaaggaacgcag

SEQ ID NO: 482 - RNA, 279 nt, Homo sapiens
caacaagcacggcaaaaaaagggaaagcaggacaccagcgcggcagccaagggcagaacaccggacaagaagccagggcaaccgagacccagcgcgcccagcaaaagccacgaggaggacaccaggaccaacagcaagacccacgaccaaagggacaggacagagaagaccaagcgccgcgacaccagagcgcgaccccagcacagcccacaaacaagagagccagaagacaacccagcgacgccgcagccaccaccgccaggggggaggcccccaacc

SEQ ID NO: 483 - RNA, 521 nt, Homo sapiens
gggggcgcccgagggcaggcccgcgcccggggcgggaccccgacacggacaagaaggacgggcgcgcgagcgggaggggggaggcccggggcgccagccgccagccgcagaggcagcacgcccgcacgcaggcggccgccccaggggaggggaggcgggaccccgaccagccgaggaggggccccgcccgacccgcaccccagccccgccgaacccaacccggccggcaccgcagccaccgggccggggacccgccgcccgcgccggaccagacaaacgcacccgccggcgccccagacgggccccgccccccggcgcacaggcgccgcccgcgagagcggggcgccgcgagcccgggcccgcccacacgcccggcccgccccgccccagacagccccgcccacagcccgccagccccgcagccccgcccagggcgcggcccgagcagcaagcccaggcccaccgggcacacggaacgcgcacgcggggcgccacagcggggaacccagcccggccgcgcg

SEQ ID NO: 484 - RNA, 17183 nt, Homo sapiens
acaggcaagacaacacggccaacccacaaaaaagagagaggaaagaagacccacgggaaagaagaggaaaggaagggcagaacagccgaccacaggaggccacaaagaagaccacaacacacacacaccagccgaaagcacagaggggcaacacggacacaaggaacaagcacagagaaacacagaccacgcacaaacgaacagaggaagggccacgggacaaaaaaacaacgcggaacccagagcaaaacccggggcacaggaaaggcaagagaaaagaccagcaaccaagcacagagcccgaggaggggcagcccacaaacccagaaggaaaaaaaaaagcaaaaaaaaaacacaaacacaacaccaaacaccaagcagcccaccccacccagcccaaacaccaaagccacagagggaaaaaaaacacaaacaaagccaaaaaaggcgaaacagaaagaaaagacgaaaggaagaacagaaggagcagggacgaagacagccagaaagacacgggacaagggaaaaaaaggaacaaaagggggacgccaaccgggcgccaaaaaaaaaaaaccagaccaagaaacaaagacaggaacaaaagaagacccagggcaaaacccgcaagaacggaacgcagccaggcccacacaaagcacggggccacccacacccaaagaagaggaagaaacagaagaggagacacagggcccaacaaaaaccacagaccaaaacaaagaagagaaacaagaaaagaaagcaagcaaaaagaacggacgccccccccgaaccacaaaaacaagggagaaaagccaaacagacccagcacagcacccccaggaaccaaaaagccaagccaaaagaaagaagcacagaaacgaagaaggcgcgcacaaaaaagagaagcggccccaagaagcaaggccccaaagggcaaagccagacaaaaggaaacaggaaaaagccccaaagaaaagggccaacaaagagaagaggcgaaacacgaaggcaggacacgagcaaaccaagacaccaggcgaaaacaccccaaccaaaacagacgaggggaagagaagacagggaaagagccgacaaacagaaagcagaaggacaagaagaagggggaggagagaaagggaagccaaaaagcagcagggaaaggaggggaagaaacacaggagggccaggcccgaccggaaaaaaaagccggacaagaaagagaggaggccaagaacaccaccaaaaaagaaaaagacaagccccccggaacaaagggcagaaacaacgaagaaacgcaaagccaaccaaaaaaaaacaaaagccagacgaaagggaggggagaaaagacagaaaaggccccagcaacaaaaaagaggccaaaaagcaaaaaaaggaaacgcggcaaaaccccaaggaagcaaccaacaaacaaaaagaccagggaagcggaccaaagaaggaaaaaacaggcaggccaaagggcaaaccccccaagacgagcgccaaagcaggaagaaaacgaaagcagcaaacgggaagcccgagaggggcagaaaagaagcagacaaaccaaacaggcagaaggaaaaggaacggaaaaagggagaaaacaagaccaagagcaaagagaaggagacaccagccagccaaaaggcccacgagcgaagggacgaaaaacccaacccccaggcgaccacgaagagaaaggggacaaaccacagagccaaaggcgcccgaaggaaacccaccgcgaccgcccccgggcccccccaggcccaacaggaaaagcagcgcaccagcgaagggaaagcaacgagcccaaagaagacacgccccaccaaaggaagaggaaaagagggaggggaacagagagagagggaggagagagaagaggggcaggggggggggaagacgacaccaagaggcagaaaagcccccgcagcagaagcaggcccaccgcacaaagccccacaaacacacacacagagcaaaaccgacgaaaacgccagacagaccccgagcacgccgcgcagaccccggcgcaaaaaagcacgcaacgcaaacccagcacccgcgagaaagacagaacagcccacgagccagagagccccgaaagagcccacgggccgcagagaaaaccacaggaaacaaagagcaccgagaacccggaagggaaagaagggaaagaccacagggggggccgcgggcgggacagaaagcaggccagacaccaaaaaggaaccagaaagcccgcaaagaagggaaaggaagaaaagcagagaaaggccaggaaaaacaaaccaaacagcaaaaagaccagacaaggaggaagaaacaaacagaaaaaacccacacaaaacagcagacaacaaaagggcaacaaaaaaggaaagcacaaaagccagggacgaccaagcacaaaaaagaagaacaagagaagccaggggcggggcgaaacagaacgccgcgcccacgcggaggcagggcgcagcggccaccaacccgccaccaggcaagcaacccgccgcagccccaagagcaggaacaggcacgcaccaccacgacggcaagaagagagaggggcaccaaggcaggcggccgaacccgacccggacgcccaccggcccccaaaggcgggaacgggagagccaccgacccgaccaaagcccagaaaacccccagcccccacagaaggaccaggagggcaagacaacaggcccgacaacacggacaaagccccacggcaggcgccaggccacgccgaacccagcacgggaggccgaggcaagggacacgaggcaggagacaagaccaccggcaacagggaaaccccgccacaaaaaaaaaaaaagcgggcgcggggcgggcaccgagcccagcacgggaagcgaggcaggagaacgcgaacccgggaggcggaggcgcaggagccgagacggccacgcacccagccggaacagagcaagacccgcaaaaaacacacacacacacaaaaacacacgagaacaagccaaggcgggcccagacccaaacaccgaaagccagccaccgaaaaacaaaacaaacaaacaaacaaacaaacaaaggagacaggaccgagcagcaagaaaaagggaaagacaagacgacacagcaaaagaaagcacgaaaacaaagaaaaaacacaaaacaccaggcaaaaaacaaacgagccacaaaacaacaccaaaaaaaaaaaagaccgagagcaagaccgagagaaacacccgagaaaagccgacggcgccagaaaaaacaaaaacaaagaaccgaagaaaaaaggcaggaagggaaaaaaacaaagaaaggacacaggaacaagagcaccaacacagcacaagacagaacagggaggcagcaaaaaacaaagaagcagaagaccagacaaacaaacaacgccaaaccggaaaaggacaaccaaagagaggaaaaacaagcaacaagagacagaaggccaggacgcacagagacaacggcagcaagcgggagcccaaaggcccacaaccacccaggcacccccaggaggaagacacaccaggccacaaaggaagacagacgggggccccaggcaaaaagaaaaagacagggggcaaaagaagcgcaaaaagagaaaaaggcgaacacaggaacggcacaaacaagggaacaggggggagcacaagaaagagacagaaagagagcgagcgagagagagagcaaggagcgagagagagagcgcgcacagggcaaagagaaggaccaggcacgacggaaagaggcaaacaagaaaaaccaaacagggaaaacaaacacgcaagagcaaacacagcaagcagacgagaagcaacgagacggcagagaaggacagagggaaaagaaaaacaaaacggaccaagaaaaggcacaaacacgaagacagaagagaaccaacaaaacacacacaaaagcaaaggaaagacaagaaaagaaaagaaacagcaagacaagacaagcagacagggaagaaaagaaaaaaaggaaaaaccaagaaagggccaacaagcacaggcggcgaaagaacgaaaccaacaaaacacaagggggagacaaaaagaacaaaaaaaagaacaagcgggggacggaaacagccaaaacgaggcacggaacagaccaaacaaaaaaaaacaagaagggagaggaacacaaacagaaaagcacgaagaaggagggagagaaagacgaaggagaaagaagggaaaagagaaagaaaaaaacccaaaagaaacaagcacaaagagagagaaaaaaacggaaagaaagcaaaaggcccccacacccaagggaagagggaaggagagaggaggggggggaggagagagggaggaggaagaagaacagaaaaaagcgacgggaaaacaggcacacggagaagagcagagaagcacgcacgacgcgacgaggagcagaggggaccgaacaggagaagcggagagacgagaagggaaagagaccgccacaccacaaagggaacaggaaaacgacccccaacggagaaacaaggagacgagacaaaagagaaccaagaaaaacaagaaaaggccagcacacaggagcagaaaaagagccacaaaacaaaaccagcaaccaaacacaagagaagagaagacaggggaagagagagaagggggaccaacagagcccgcaaaggaaaggacccaggaggaaccaaaagacagagaagagaagcacacaaagggaagaggcgcaaggaagagaagggacacagccagccccccaaaggcgaaacaaggaaacagcagcaccaaaaaagaaaccaacagcaggaaaaaaagaaaaggaaaaccaacggggagaagcacaacaaagagggagcgcagaagaagagaccacaccgggggcaaacacggaagccggacaagggcaaagcacagcccagacccaaaaaaaccagagaaaaaagaacaagggcgagggccaagagcaaacaaacagaaaaaaaaaagcagaggcaaaagcaacaccgcagagaacggagaagaaaagaaaagaaaacaaaagaggaaaaaaaacaacacagcaaaagcaaaaaaaccccaaccaacacccgagacccagcaaggacaaaaagcagaaaaggagcgaggaccaccgaacagggggaagagccaaaggacgagcaaaggacacccacgaagaacggaaccagccccaacacccacccgaaaagcaacacagcgggggaaccaaacaacgggcgaacgaaaaccaccccaccacccaccccaaagccacaccacaccacacaggagaaaaacgaggccaaaacacagcaagcgaaagacacccccaaggaaaaaaaaacaaggcacccacacaccaaaagacaagaagcaggggaaaagaccgaaagacagacaggcgcacgccaaacgagccaaacgaacacacggcgccgcaccggcaccgccagcccccacccaccacaaggcccaccaaaaccacgcagcgccggacccgccacccaaaccccccccacccaagccggaaaccccgcgaaagaaaaaccaaaaaaacaaaaaagcaacagacggaaaaaaaaagagagggagggaaaaaccaaaagaacgggcacggagaccaaaggcaccaagaggaaggcaaaaaagagaccgaaggaacaacacaggcacaagaaaaaacagacacgccaggggcaacaaacagaagaggagcagaaaccccaaggagccagagacacaaacgagggcaagaaacaacgcaacgaacgaaaccgagggcaaagaggagggacccacagcagccccaacaaggacaggacaccacacaaacaaggcagaaaccacacgaggcaagaaggcacaaagacacacccgccgcgccagagaggagacaaaaaccccaaagaacacaaccccaaaccacccaaaaggcaccagacaaacaagaccccagaggggagcaaaaagagaggccaaaagaaggggacagaaacacagggcaaacaaaaccaaacgcccacgaaaaccaagcaagggaccccacgagacaacggcaccaaaggacagccgagcaaagagccagaaggaggaaccgcaccccacggagggacgagcaccccccaccccagcccacccaggaccaacagaagacaaaggcccaccacggcccgcaacaaccagccgccccccaccaaccgacacaaccgacaaaagacagagaggaaggagaggcaacgaaagggaaccacaaagacgggaggcaacaacaacagccccaaaagcaaaggaaaacgggcgcgcgcagggccagccgaacccagcaccgggaggcgagggggcagacaccgaggcaggagcgaggccagacggccaacagggaaaccgccacaaaaaaaaaaggaaaaaaagccggacagaggcggggccgagccccagcaccaagaggcgagacaggagaagcgaaccgggaggcagaggcaggagccaagagcaccacgcacccagccggcgacagagcaagacccacaaaaaaaggaagaaaacaggccggggggggccacaccgaacccagcacgggaggcccagggggggacagaggcaggagacgagaccaccggcaacacgggaaaccccgccacaaaaacacaaaaaaaagccgggcgggggcgggggccgagcccagcgccgggaggcgaggcagagaaggcggaacccagagggcggagcgcagcgaaccgaggccggcacgcacccagccgggcgacagagcgagacccgccaaaaaaaaaaaaacaaaaaaaaaaacaaaaacaagaaaacaaaaggaagagaaacaaacagaaaaaaaacgcgacagagcacgcaaagaaaccaagcaacgaaaaaaaaaaaagaaaaacaggaagaacacggagagcagcaagaccagaaagaacaagaaaagcgagcaaaaccacgagcacaccacaggggacgcaaacggaagcccaaagaaacaaacagaccccgcggcaccgcacacgaccagagagcagccaaccagaaaagacaaaccaagagaaggggaaaacagccgggcaaagagaccaaaaacacaccagaaaaaagggaacgcccaagccaggcgaaagaaaaaaacgacagaccacaaaaacaaaccaaaacaaagggagagggagggaaaaagaagacaagagaaaaggaaccgcgagcccacgccagagccacgaccaaggcaagaagaacggagcaaaggaaaacaacacagagcaaaacgcaccccaaaaagcagaaacaacaacacaaaaaacgccgaaaagaaccaaaagaaaagcagaagaacagagaagaaaaaagaaaaagcagacaaaaccacaaaacccaccgcgagggggaacaaggaagaacacagaacagaaaggagccagagcaaaagggagcagaaaagacaaagaacaaaaagccacccgcacccgagaaaacacgccaaaaaggcaggacaaaaggggggaaaaggggaaagcagagccaaaaaaccccgaaagacgaaacaggaagaaagccagagaaacgccaaaaaaggaaaaaggacacaaaaacacagaagagggagagggagagcaaaaggaaaacaaaacggagagcaaaaaggagcgaaacaaagaccaaaaaccaaacggagagccaggacagggagacccaggaacaaaaaggcaaaaggaacaacaggaagaacacccaacaggggaggcaacaacccgaaagccgcgcccagaagcagggcccccaacaccaggggacgagcaaacggagaacgacacgaagcaaacgccagagacgagcaaaagaaacgaaaaacaagcccagaccaaaaaaaaagaagaaaaacagacaaggaaaagaacagaacagaaaagcgcaagaaaaaaggccagggggggccacgcccgaacaacaggaaggagccgggcccgagcacaggagcgagacagccaggcaacaggcaacacccgccacaaaaaaacaaaaaagacgagaggggacaggcccagcagcaggaggcgagggggaaaacaccagccaggaagcggagagaggagcgaggcggccacgacccagccgggcaacagaggagagccaccaaaaaaagaaaagaaaaaaaaaaaagacacacagaaaggaaaaggaagcacaaaagaaagaaaggcaaaagaaagagcgaaacaacaagagaagaaaaagaaacagcaaaccaaaggaggaaagcaaggacaacaccgcagcagcaggcacaagaccacaaccaaacgaaaccagaccgggggccagcaaaaaaacagaaaaaaagcacaacacgaccaccacaaacaaccagagcaacgacacaagggcaacacccaagggaggcagggcagacaggccacgcagcgacccgaggagcgggacacagggagccacagccagcaagggggggggggggggggggggggggaggggagaggggcaccaggcccaggcggcgaacccggaccaaggaccagcgcccagcccccaacggcagaaacaaaggcaagccacggccggcccagggcccaaaaaacaggcagggacaaacacaacccagcaaaacggcaaagaaacaaaaaaaaaaccgacaacacgcacaagaaaaaaaggcaaagcagaagcaaagcacaacaaacagacaaggcacgggaaaggcggacagaacacaagacacaacggacacagaaaggagaggccaccaccggaaccagcaggacgggcaaaccaccaagcaaggaacagaccaaaagaaacgagaaaaaaacaaacaagaccaaacccccaaacgaaacaacacacagaagcagaaagaaccaagcacggaacaaggaaaagccaaaggaccagaacaaaaaggcaaagggccgccaagacgcaaaaacagaccagcgccagcacaaagagcaaagaagccaaggacaaaccacacaacgggaacaccgggaagcaaaaggaccaacccccccaccacaccaacacgccagaaggcgagagaaaaaccaacccagaacaaggaaggaaaaagaacgcaaaacaaaacgccgaaaccagcgcacaaagagacagcaggaaacacggccaccaggaggcgagggggaggaacacgagcccaggagacaagggcaggagccaagagacacacgcacccagccgggcaacggagcaagacccgccaaaaacaaaacaaaacaaacaaacaaaaaccaccagggaggggagaaacccaaaagccaaacacagaagcaacaagaaaaaaaacaccaagaccaacaagaagaccacaaaacaaaagagcaagaagagcaagaagaaaaaaaaaacacaacaaaagaaagggaaacacacaaaaaaaccagcacaacccacagagcaaaaaagcaacagaaagacggagcaacacccacgacagaaaaaacagaacgaccaacgcagaaagacagaaaacaggggcaggacaaaacgaggacaaccgccaaagaaagacaaaaaaaagcaagcgcacaaaagaaaggcagcaaaagcagaaaggaagaaaaaccccaacaaagagcggacaacagaagagcagcaagaaacaaggagcagaccacgacaaaaagaaaaaaccaaagcccaaacgagagaccacaaaacaagaggaagcgaaaagccaagcaaaaaaaacgacagaagaccaaacgccaggcaggggagggcgcccaagggacagaggcaccaagggcaaaccagccaagacaggaaaagaagcacacgagaggcaagacaaggagacggaaaaacccaaacaaaagggcagaaaacccccaggaaaagacaacacgaaacacccagaaaaaagcaaaaagcaaccacagaaaaaagagagagcacgaagacaacaagaaacaggcaaaacaaaaagggaagaaaaaaaaaagggaggagcaagaaagaccagccgcgcagggacgaaaagccaacgggagaccaagcgaaagaaaaaaaaaggagcaccaagagaacggacaaaagaaacaaacaacgaaaaggcgaaagacaagagaaaagaaaagacaaaacaaaaagacacccagaagaaacgacaaaagaaaaagaaacaaaggagacaccaaagacaccaggaacaacaccaagacaagagaaagggagaaagagagcagaaacaaagggcacaggagagcacaggagccaggaaaccaaaacggcccaaaagaaaaccaggaacagagggcaggaggccaaggccacgaaaaggcagagaagcacaacacaggggcagaccaaaaacaacagcaacagaggggggcaaagcgccaccccaaaaagaacagggcacagagccaaaggcacaaagagaagagcaacaaagggccaccaaaggccaggaacccgcgggaaaagccaaaaagaagcagggaacaaaaagaaccacgacaaacagaagggaacccaagcaaaaagcaacaagaaggggacgagggaaaaaaggaggagaaaaagaaagcaaagagcgcagcaagaaaagagaaagggaccaaaaggcggacaaagacaaccacaggacacaaaaaagagcaaaggaaagcaaaaacaaaagcaggacaaaaagaagaacacagaaagagaaagcaaaacaaaaaaacgacaccaaggaaacaacaacccaaaaccaaaaacggaaaaaccaggaagcagggggggcaacagcaaaaagggcaacaagccggacaagagggaaaggaaacagagaagaccaaaaaagaaacgccaaacaagccaaaacaaccacaacaaacccagccacaccacacacaacgagacagggcgcgggccccgcggcacgaagcagccacacagccgaaccccgggcaaggacacgaccagcccgagagcgggaaacaggcagccaccagcaagagacaaggcccagcaccaggcggccaaaacccgagccaaggcacccgcccagcccccaaaccggaaacggcagagccaccagcccagccggacccagaaacggacagaaaaagcaagaccagcacaaggggaaacccgagacagagccacgcgccaggcggaggcagggcacgaccagccacgcaaccccacccccgggcaagcaaccgccagcccccgagggcgagaacaggcacccaccacacacccagcaagaagagagacagggcaccacagccaggcggcgaacccgagccggaccaccgcccagcccccaaaggcgggaacaaggaagcaccacgccggccaagggggaaccaaagaacccaaaacaagaagagcccaaaaacagccaggaaccccacaaagcaaaaacaccacaaaaaaaaagaaacacaacagccaaaagaacacagagaaagacagaaagcagaacacaagaaaaagcacagcccaggaagcaccacacaggcaacggcaccccgagagaaggccggacacaaacgcacccgacccaaccccccacgagaacagcaccccggcacacagacgcgcagcccacacagggccaaagaaaaagggccagaacaccgcgacgaggcgaccagcaaaaaacagcacaagacccacaaaccacagcagacgagcaaaccaacgcgaacagcgagaccggaggcaaaacaaaaccagaaaccacgagaccgacacaaaacacaaccaggaaaccaggaaaaaaaagcagcaagcaagggcaaaacaacacaggacgacaaaagaggccaacacacccaacaagcccgagagggcagccccaaccgcaacgcgaacgcagacgcacccacgaggcaggagggaaccaaagagaggacccggcacacgagacaaggacagcggacaacaaagggcacaaaagccagcaccgcccacggacaggaacaacaacgacgagaaaaacaacgaaaccaaccgcaagaggaaaacaaccaggccgcaccaggcgcgaaaacaacaacaagaaaagggggcggcaaagaaccccacccaagccaacccaggagacagagcgcaaagcgcccacacaggcggccaacaaaagacgggaggaagagagaccaacaacaggaaaagaaccagaccacgaaaaaaacccacaaaggacgcccaagaaaaaagaccaagcaagagcgacccagcccagccacgcaccagcaggaagccaaccgaaaacggagccaaaaaacgagggcaagcccacccagcccaaaagagacgacacgcccacaagaaaacggacacacacacacacacaaacacacacacacacacaagacagaaacaagaaacaaagacaaaaacagaaaaggaggcaggacaaaacaaaagggagaaagagacacacaaaggaccaagcagaaaggaaccacacaacagccagaaaaaacaaaagcacaaccccaagaaaaggcaccaaccagaaacagaaaaaagagcgaaaagaaaaacgacaaacaaaagcacagcgcaaaagcaaaccaacgggccaaaacgacagaggccaacccaaaacaccaccacgcagacaggacagaaaaaacaaaagcagggggaagcaaaaccgcgcgaacacagaaggaaagccaacaacaacgaacgcgagaaacacaaaggaagcccccgcagccaaaaaaaaacaagaaacagaggaaaaaaagcccccgcaagaaagacaagacgaacgaaaagaacaaacaaacccgacggaaaaaccaacggcaaaaaaaagaacagaaaagaaagccaaagaagcaaacggaggaaccacaaacacaagaggaaggccgaagcccaacaccacagcggagaaaaaagaaaaaaaagaacggagaccccacgaaaaaaaaaaaaagaacaagacggcgaggcagggccacgccggaacccagcacgggagccaaggcgggggacacgaggcaggaggagaccagccggccaacaagaaaaccccgccacaaaagaaaaagaaacagccaagcagggacaggccgaagcggggacaggccgaaaccagcacgggaggcgaggcacaagaacgcgaaccgcaaggcagagggcaggagccaagacaagccacgcacccagccgggccacccaggagacgcggccaaaaaaaagaagacacccgaagccgcaaagcacggcaagagcgcaaggacgagaacgaaaaaccaagaagaacacaagccaccaccagcaaaggcaaacagaaagcccacaccaaccaaaccccaaaaaaaaacgacaccagcggaacgcacacgggggccccaaacgaaggaacgcccaccgcaagccagccacagagggaaacaacaccccaacaacggggccagcccggacgacgccaccgaagcacaaaacccaacacgagaggaaaccgagaggaacggccaaaagcccgcaaaagcaaggaaaacccagaaaaccaaggcacgaagaagaggaacaagagcaaaaaccagccgggacaaggaaacaaccagccacggcagccacagggacaacaacggaaaagggaggcaaaaaagaacagacagaaaggcaagacagccaggcgacaaaagaaaacaggagcaaggcacaaaccaaaggcagcaagccacaacaaaccaccaacaagacaaacaagacaaggaaaaacacgcaaacaggaccagcacaaacaaacaccaagaagaaggggcagagaaaaaacgcccagaagaaaccaacaaaaaggaccaccagaaagggcaaagcagcaagaacaaacacagcacaccaggccacaagaccagcaggaaaagccaaaacccgacacagagaagcgagcaaagcagagggaacaaacccaaaagaaacaggaaagggacaaaggagacagacccaaacaacgcccaacgcagcccaaacacaacacaggccacaagcaaagagaaagcagagggaaaggaaaaaaaaaaaaagccacgcacccacaaaccacagcacaaaggacaccacagagagaccacccaaacaaggaacaaaacaaaaaaaacaaccagaacgcagaccaacccccacaacacaagggcggccgaaaaggcagcaaccagaagcccaggaccaagccacgaacgagcacggaccgaacgcccaagcaaaagaggcagccaggcgcaaagacaagagcaaggggaggacacgagcaggaacccacaacccgacgggaaaaagaaccaaaaggaggggcgggcgcaaccccgaacagagaaaaaggcaacaaacaggggcacagcagcaaaacccgaaaaccacaccaaccaaaaaaaaaaacaaaaaaccgaaacagaggaaaaaaaacccagagccaaccagagaaaacgaggaacaaacgggaaaaagcacagagagaaaaggcaacagggacaaaaacccacaaacggaaacaagaacaggagaccgaaaaacagcaagcaaaagcaaaacagaaaagaaaaaaccaaaacaaaaaaacaaagaaaaccacacgggcaggaacccacaaaaagacaaaaagccacgccacgcgaacagaaacacaaaacccacaaaaaagaaaaaacaaaagaaaaaaaaacgaaacgagggacggacacgcaacaaaacccaaacaaagcagggaagacaagaagcgacaacaaaggcgacagaagggccaaaccccggaaaggaacaaacacaaggccccaaaaggaaaagccacccacacgaaaaaccaaaaccccccagagaaaggaggcaagcgcaccaaccgaagaaccaaacacgcgaccaacaaaaagaacacgccaaacgccacaaaggccaaaagaagcagagccaggcagccaaaaaggagccgaaaccaagaagggaaaaggggacaccacgagaaaaaaccaacgcagccaaaagcagcggaaaagaagccgagaaagaaaaaacggggaaacaagaaaagaggaaccacaccaaacaagggcacacaacacgcacgaaagggggaacaaagcaaacacgaagagcagacgaaaaagagcaagcaagcaagagaacaggcaaccaggacaacgaaaggagaccccaacacgggacaaaccccgaacaacagaacccccacccgcagaccgcagagacagcaacaaaaaagaaaaggacaaccagacgggcaaaccaggccgcccaagagaaacagaaaagacaaacagggacagcacacacagaagagcccaggaagcgcagaaaagaaaaagcggccagcaaaacacgagaaacagaacaacccggaaacaaagccaagaaacaaaaaggaccaccagcaacccaaaaagaagcaacaacaaaaaagagcaacaaagcaaaaaacacagggagaaaaaagccacaaccagaaaaaggaccaaagaaaaagaaaagaaaagaaaggcacacgccagagagacaaccacaaagagccaaaacaaaaaaaagccaggcacgaaaaaaagacagacaacaagcaagaaaacaaaaaaaaaaagagaaagcaaaaacccaggaaaagaaagacaacaaaaggaaggagaaaaccccacccaggcaggccagaaccgcagccagaacgcaacagacaaacaggaacagcacagcaagaggaaagcggaaaaaaaaagagaccaaacaggcagaagaaaagaacaagaccgaaaaagaaaaggaaggcaaaagaaaaaaaagaaagaaaaccaaaaagaaaacaaaaaaaaaaaagaaaacaaaaaaaaaaaaaagaaaaaagaaaaaaaaaaaaaaaaaaaaaaaagaaaacaaaaaagaaaaaaagggggaagaaggggaacggcaaaaagccaccacaaaacaaaaaccagagggggccaaaagaaaaccgcagagcaggacaggcaaacaaggagacgcgccgaaagacagagacagccagggcccaggcccgagcccaaaacaaaacagcaaggcaacacagaagaaagcagcacacaccacacgcagaccgaggccggccagccaaccagaaaggccgccacacagaggaaaaaacggcgaccaaccaggcgaacaaaaacggcccgacaacggagacccaagaacagacagaaagcaaggaaccgacacggaggagccacagccgacggccagcgcccgcaagccaacaagggaaagagaaccggggaaacacacgaacaggacacaaggacagagaaagaaccaacaacccggagcagcccgaagaagcaacccaccaaaacagaacgaggaagcacagaaacaaggccacaaggacaaagagaagaaccacaacaagaccaaccagaagaaaccacaaagagaaaaaacaaaaaacgaacacaggcgggagagaccacgccgaacccagcaccgggaggcgcagcaaaagaacgaacccaggagcaagacagcagggcaacacgagacccagccacaaaaaaaaaaaagcaagcaggggcagcacgagcccagcagggagaagagggagaggacgcgagccaggagggagagcagaagcggggcgcacgcaccagccgggcaccaaaagagaccccaccaaaaaagcaaacaaacaaaagccaaccaaaacaacaacaaaaaacaacagggaaagaggcgaagagaaaaaggcgcaaaagcagggaaaaaagaccaaaaaaagacagaaaaaaaccacaaacccacagaaggaagccacgcccaacgaaagagacacacacaccacaaggacaagggaacaggaaagcaacaaaggggacacagaaacacaggggaaacccacaagagggagcgaaaaaagaacagaaaaacgaaaaaaagaagcaaaaagcggaaccacacagcaagcaaagaggaaccagagagggcaaccaagaaacaacacaggcaaaagaggaaaaaaggaaaaaaacaccaccaaaaaaggagaacaagaagaagagagcggcaaagcagccgagagaaaacaggggagaacaagggggaaagacagaaaaaagaccgcacccaaaaaacagagcaggaaagaagcagcacacagaaaagagggaaaaaccaaaacagaaagaacaggaaacaacc

SEQ ID NO: 485 - RNA, 2401 nt, Homo sapiens
ccgccagggaaccaaagcacacagaaaccaccagacccaccggggcggggaagggaagacaggaaaaaaaacaaagcaaaaaaaaaagccccaggcgggagcaacgaagccagaaagccagggcaagaacagagggagccagacccccgcccagaggcacccagagcagcagagccgccaaccgcccaccaggaagaaacgaggcaacccggcaggacccagagggaaacacagcgacgccccacaggcccccgaacaggcaacaccacaaacaaaggaagggaacacccggacccagcagagccaagggcaggagcggcaaggaagggagggacacgggagaggaccaggagccgcaacaacccggagaagggcacacccagaagaaaagccaaagacagagcagcagagaccaagccgccaggaccaaagccccgcgccaggggcaggagccccgcagccggggggggaggcgagcccccgcgcccaggcgcagacaaggcagaccagcgacgcaacccgccccccaggcaaggaccgcccagccccgagagcgggaacaggcgcccgccaccacgccggcaaagaagagagacgaggcaccagggccaggcggccgaacccgaccaagggacgcccacccgcccccaaagccccgcggccaccaagaccgcacaggaacacccccacgcaggcccggccccccgaggcccgaggcgcccccaggacggcaccaggcgccacccagggcacacgaaagacgagcaccaacagcccacacaccccaggacggggaacagcagagccaaacaaaaccgagaaagccgccccaagcagaaggagggaaaagacaaaagagaagcaaacaaacaaaaaaggaaaacagagggggaaaagcagaaggaaaaaagcagaaacgcaaggagcagggacccgcaggggaggcaagggaaggcccgcagagacgacagacacagcgagaccgggccagccagcaaagaagggggggaggcagaaggccgcaggggaacaggcagaaggggccgggcgggacagcccagcaggcagccccgggcgaaagccacccacaacaagagggccagccggagagagacccgcaagaggggcggaacaagggcagagggaagccacacaggaaagaggagaggaaaagaaccgcggcgccggaagaaaaaagaggggcaggagggaagaagcgccggggcggcgcagcaacccaggcggcgcgagggcccgacagaccaggggggccgggcgagcagaagaaccccagggacagccagccacgccagccccgggccggcccgggcacgagacggccccgcgccagggaccccccgcagccagcgcgcggagccgccacacgggagggccaccccccccgcccccccccccccgggccagccccccccgccggcccggcgccgcccagcgccagccagagcccaccccgcccccgcaggaagccggcggcggcgccgcgcggaccgggcgcaaagcgggcggcaaagcaaagcgagcaccccccccaggcccccccgagcgggcagccggccgccgccccgccccccgcccgccgcgggccggggcggcgcggcacgaacgcgccgcagcaaggccgcgcccgcccgccgcccggaggccagcacccgcgcgaccagcaccgcagaaggccccccgcggaggaggaggcccggaaagaggcagaggccccccccccccagcaggggggggcgggggggcggggggcagggcgcgagcgagccgccacaccgggaacgcggcggcgcggaggcgagcggaggcaggcaggacccgcgccgcgggggcgcccgcggggcacggggccggggccgcaggggcaacgggcggggaggggggcccccccaccccccccccagccccagcccccccccagaccaccgcccggaggacccggggcgaggccaaagggcacacccccccccggcacccccagccccacccaccccgccaccagccccaacagggacccaggggcgaaaacacaggccggaacagccacacccacacaggccagccaggccgcacgccacagggaccaaagagaaccccgagccgccacacaaaaaagagggacaaccccaaaagaggaaacagaggggcggaacacagcagcaaagggccgacacaaagcaaaggcccaggcaggcacaagccagggcaaaaacggccacaagaaaaaagcaccaagaagcccccggcgccagaaaagggaggggggggagagggaccggagggagcgggcaggagcggcagacaccacggaggagagagaggggaccgaaggcgccgggcagccaaggaagcaggaaggaaacacagacgaggggccgggagc

SEQ ID NO: 486 - RNA, 515 nt, Homo sapiens
aggaacaagaccagccgggcaacaggcgagacccaccaaaaaaaaaaaaaaaaaaaaaaagaaaaagaaaagaaagcaaagcaacgaaaagcgcaccaaagccaagcaaaggcaggcaccaggaaaaaaccacacaaccaggaaaccaaaagcagaggagggcccagacaaaggagaaagaggcacaggaggcgggacgcccaaggaacccaacagcaagggcaaggagagcgcacaaagcaggacccaaagcaacgaaaaaaaccaggacaaaaccaggccaggcgacccacagcgagggcagggacaccgcggcgcggacgccaaggcccccaaaagcacgcgaaagcaaccagccccgggagagaggaggcgggcaggaggaaggcagaggacaaacgcaaacacccccccaagggaacagcagacaaagcacgaggcaacagaaaggaaaccgaaagcaacaccaccggaagacacaacaagcgaagcggcaaaaacgaaaaagaagaaga

SEQ ID NO: 487 - RNA, 1294 nt, Homo sapiens
acggcagggggaaggcggcccggaaaccagaacaaacaaacaaaagcgcaagagacagaggcaagcggaaaaccaaagggaaaacgggccacccgaaaaacggaggaacccgcccagcccgccggggagaaggcccccgccccccccccaaaaagaaagacacaaaaaacgggcaaaaagagcaggagaaagagcaaagcaacgaaaaacagcgagaaggcagcggcccggagccaagaaaaagacaacaaacacacaccaagggcgcaagggacacgccacaggcaggcaaacacagcgagccaagcggaacacaggaaacccccaggcacaggccaacacaccaaaccaagcgaggacaaacagccagcacgcaggacaaaaggagaaaaaaagggaaccagcccagaagcagcggaccaaccgccaaaacacgaaggaaaaaccaagagggcagaggacaaaaccccggagacaaaaaccagcgaaagaagacacaaaaaaggaaggggcaagcgcagagcagccgacagaaacagccaacggcgagaagacagaagcccccggccccacgaaccagaacaaaagagaagccaaacaagcagcaaaaaccaagccagcagacaaacaggacagcgcagcggcccgccgagcagggagacccaccagccagaccaaccaaacaagagaaaggaacaacaacaacaaaacaagcagagcaagcccgaacaaacacgcgacccaggaacagaaaaccccagaagaaggagagagaaggaagggaaacaaaaaaagaaacccagagaggggaaaaaacagggcacacaagcacaccagagacaaaggcaaaacacaaaaaagaaagaaaccaaacagggacagaccggagaaacaccaaaaacaaggacaaccccaagcaaagcagaggacccacaaagaggacacagaaaaccccagacgcgacagcacgcaaacaacagccaagaaagccaagcaccaaccagaggaaaaagagcaaaaaaaacagaggggaaagaagaacggcgaggacccagggccacaaaacccacccgagcagggacagggaggcagagccggcgcacggcccgcaaaaaagaggccaacgccaaggaagcaaggagggacgagaagagggagaaaacaccggagcacgaacgagggcacgcgggacggaaagcgccagcgaccgcccccacacccgcaccgcccacgccacgcccgccaaagggcacaccagggaagaaccagcaggggcggcaaccccagagaaaaa

SEQ ID NO: 488 - RNA, 6149 nt, Homo sapiens
cccccccacccaggcccccccacccccccggaccacaacagcagccaaaaggccccagccggcacacagccagaggcacccacagcgaccccgcaaggccccaggaggggaccagccaccaaacccagcccccagaacaagaaacaagcacggccacaaggccccgggcggccccaaggaccgcaccgaccccagggacacacacagcccagcaacacaaacgaccgcccaccgcaccccggcacccacccaccagccgccagcccaacgaggaacccaagacccaagccaacaaccccaagcggccaaaggccaccagaagcacgacacccagccacagaaaacacacaaccccagaacgggagacccaccaacacccccgcaacgccaagacacgaagcaccgcaacaaacggcacagaaccagccaagcccgaagggagcacggcccagccacacgcacaccaggagaagcacccagagaggggccgacaccacagaggccacgaggagcacaggcccaggcgagcccacagcgagcccgcacagcccagaacaggccggcaagagcaacacccagaaacagaaagaaaaccacaagggagcaccaggcacagaagaaaccccgagaaaaacagaaagggggggaagaagcccccccccaacccagagcaagaaagccacgaacgccccacaagcaaagcacccggcaaaaacagacaaaaacgggcaggcggcaaaaaacaaaacagcagaaagaacacaaaaacagcccggagaagagagacaaacaaaccaaaaccggaccacagaagaggccaacccgggaaaaaaaaaagcaaaaagaaagccacaacgacgagaaaagaacagaaaaaacccagcgcaccaaaaaagaagcacagggccagccaaaaaaagaagccaccaaaacagacacaacaaccaccaaaaccagaaaaacaccaccacagagagggacgcgcgccaggcagaggcagggggacaagccacaagcccaacccagggccaagggaccccgcccagcccccaagagcaggacaagagcagccaccaggggcaaaagagagaggggacaggcccaggcggcgaacccggcccaaggacccccacccagccccaaaggcgggacacaggagagccaccggcccgcagaccccccggccaacagcacacggacccgacaggacacagcacaggcacccaagcaaccacaaccggccgaaagccagacccagcacgaacacagacccacgaaagagagcggccagccagaaacagaaacaagacgaacaggggacaccaccaacagagaccaacaggccccccaccccaaaggacagagacccaccgcgggaagcaaaagaagaagaaagcaaggccaaaggaagccccgaaaaaaacgagggaaaaccaaaaaacacagcaaaaaggaagccagcaagaccagcgagacaaaaagacacacacacaccaaaaacaaaaacaaaagcacggaaaaagccaaaaagcccgccacagcccggaccccacgacaggaaggacccaccaggacaccaacaacaaacgggcacaggcgcagaagcccacacagcaccaagaccaacaacaaaacacgcagccaagaaagccggcaaggggacaaaggaaaaaaaaaaaaaaaaaaaagccaaaaaaaacagacagaccacagagccccaaaaagagggaagaaaaccacaccggcacaaagagagcaaaaaccagagcgagaagccaaccgcacgggaacaaacaaggcgaacaacgaaccagaagacgaacaccgcaagggaaaaagaaaaaaacaaacgaagagagaacagaaacacagcagaaagaggaaaaacaaccaaaaaaaaacagcagaaccaacagaggggaaacgaaggcaagcaaagcagcagggaggacacacaccaaagcaagaagacagaccccaaacaaaccccgcaacgacacaagaaaaaggcaaaagccagcaacaaaagcaaacaaggaaacaaaacggccaaaaagcgcagcaggccacgagaacggacacggccagcgcagcccccgagagacaaagacacaaaagggccgagaaagaacaaaccgacaccccacacccgacaagccaggcgccaccgaagcccagggaggaaacacagaaaaagcaaaacaaaaaagaaaacccccacccgccagaggcccggaacaaacagggcagagacaccaaacagagaacaaacccagacaaacaagcagaacaaaggacaggcagaaaaccgcaaggccaagcggcagcacacacgagaagacagacacaagacccgggcacgacagggagaaagcgacaaaaaaagaggggagaaaaaaaagggggggcccccacccagacccccacgccgaagaaagaagacagaggcagccacccccaaaggaggggcagcagaagggacagccgccacggcacacaacaagacgagaggcaagccgccacgcccccaaacgcaacacacaaacgaaccgaaaaagggaaacaaacagccgacacaacgcaacaaaagacacacaaagaggcgaaaaaaacacagaaccaaaagaggcggaagcaaagaaaacagcaccccagccacagcaccacgagaaaaaagaacccaggacacagaagccaacaaacacaacaccaacagacaagaagaacaccccggcgcccagccacacccagcggccccaccacccaaggagcgcaaggacaaaaaaaaaaaaaaaaaaaaaaaaaaaaaacacagaaaaacagccaaagagaagggaagacaaaaacaaacacaaaccacccaccagccgcacagaaaccaagaacaaacaagaacaaccacacacaccggagagaggacagcaaaaaaaacaaacaaaaggaaaacaggagccaggcagaaaggcaggcacaggaccaggagggacgaagccccaacagaggcaaaagcacaccaaaacacaggcacaaaaccaacagaaagaaagaggcggacagggaggccaacagaccaaaaaagacaacacaaaaaagaaccgcagccccaccgagcgaaagcagcccgcggacacccccaccagcgcacaaccgcacaaggaccccgcgaacacggccggggaaacccacggccgcccaaaggaaacagggcggcgaacggggcggcagagggcccggcaaccagcaaaacgccgcggcaagcaaccaaggcaaagcggaccaagaaacaaaacaaaacacgcccgaaaaaacaaccccaccaaacagcaagccggcacacagaagggaagagggaaaagaaaaagaagcaacagcagaaaaacaaccaccccaagaaggggaaaaaacggcagccggaagaggcaaaacaagcaagaaaaaacacgcaggagagacaacaaagaaacaaacagaacacgcccagcacagaagcaggcggcaagagagacggcgacccccaaggcccgccacaaaagcgggaggcacaccagggccgggaacccaaagcggccaaagagccccaagcccagcagcagacacgaagacacacggaggacgggaagccccgcggagccccagcgacccggggccacgggcaccccacgggacacacacacaagcccgggacacccacgagccaggaaccaggcggccagcagaacgccagagaacgccagagaccaacccggcaccaggcaaggggaaaacgcaaagacgagagccacacagcagcagaacgcgccaagcccgacaaacgcgcaaaaagagcaaaggcacaaaagagaaggaaacacagggaggacgcacgccaagaaagacggccacgccccaaacgcaaagaaacccacacagaagacaccggaaaaacagaaaacaaaaaagacggaaaaacaagaaaaaacgcaaaaacaaaccaaaaccaacgggccaaaaaccaaagagaagaagaaaaaaaacacagaaaaaaagggaaaaaaccaccagacgccagccaaaaaacaaaaccccagcgaaacgggacacgaccgacgcaggggaaaccgcgccgaacccgacacaccgggggcaagcaccggacgcgggcgcacagcgaaccccaacccgaacacccgggcgaacaaaaccacagaacagaaggaagggcaagcaaaacccacaaaaccacaagaccagaaggcacacccgcacaacaagaaaacaaaagcagaacgaacaagcccggcaccagacgagacagacaacccgacccccccgcccaagaaacgggaccccaccaaccgccaaggcaagaacgccacagagacaaaacagaagccaaccacccaccaaaaaaagcccacaaacccaggggagaaaaagaaagagcaaagagcacgcacaagcacaaaacaaaagcaggaacagcggggggccgccggcacaaagaaacaacccgaagccgacacaccccgcaccccagccaaaacaccaaaacaaagcaacggaaggcaaccacggaagcaagccacaacaaggcaaaacccccagacaccaaaaaaacaaaccggccacaagaagggaaacagagaaaaaaaacccaagaaggcgaaacaacgaaaccacgaaaccacaaaaacacacgccaaacaagcaccaaaaaaaagaacacaaaaacaagagcaaaagcccggcaaagaggagaaaaagaaaaacaccagagaaacaaaaaaccagcaaagaacacaaaaagacccccaaagccagcgacacgacaaccaaaagcgagaaaaggcggagcagacggaaaaacaaggcaccgccgcaggaaaccaaacaggcagcagaaaggcaaaggccacgcaacgaaaaagggaccgaagagcgacccacagacagagaagagaaaaaaaaagaaccccaacacggaacccggcaccgcaacgaaccaccccaccgcacagggacaagaaaggaaagcagcaaagcgacaacgaaagggaagggccaagaaaaaccccaacagaccgccaaaacaaaagggagcagacaccaccgaaaagggaaaagacacagaaaaagaaaacggcaccccaaaaccgcccaggacaggcgaacaacgaacgaggccaacaggaaggagaaaaggcggagaggacgggaggaagcaggacccaacaagcaaagaaaaagcagcagagagcacgcaagaaaaaaaacaagcagaaaaaagggaggaaacgacccagaaaacaggcgagaacaaaacaggacgccaaaaaaaaccccaggacgaaaaaaaacaagaccaaggaaccacgggagaaaaaagaaaccaagaaacgccccaaggcaaccacaggagaaaggcacacaaaaagacaggcaaacgaaaaacaaacaaaacacagagcaggagacaagcaaaaaaggcgaggccggagcacaaagaagaaaggccagaaccagacccacaaagaagacaagagccacgaaacagaaaaacaccaagaggaaaagaaggccaagaagccaccagcacaagcgaaggcacaaaaagacgacacaggccgaagagccacaaaaccagaccaagacaccagcagaaacaaaaaaggggaaaaaaggaaaacacaaagggaagggcgaagagacaaacaaagcacaagacaacaccagaaacaacgcaaaaaaacagaaacagaagaggccgggagcgccaagcaacgaaagagaagaaaaaaaaccaaaaaaaaaaaacagggagagcagggaccaagccacaaaagcaaaccaaaagcacaaacagccaaaaaaaaaaccacagccgggcaagggcagggggcgccaggacaggaacagcgcgacgaccagccacccaacaaacacaagaggagcggcggaaagaagagacgaggaaagacagaaacccagaaaggaagcaaggagaaagaaaagagggaagcgagaagcaacaacccagaggagaacagacaacgcacacacaaacgaacaaggacgaaaaggaaagagaacagaccaagaaaaaccagcagagacaggcaaaccagccagccacgccagaccagaaggaaaacccagagagacccaacccc

SEQ ID NO: 489 - RNA, 6697 nt, Homo sapiens
agagccagagagaagaggaggaaggacaaaaacgaaggaaaccaggcccagcgcacccccagaagagacacccgcgaacaccagaaccaaagaagggcaagagccaacgccacgacaaggcaggcaaccaaccagaccacacgcgaacaagcagaaaaggaaagagagaagggagccccaccgcccaggaggcacagggacagccagcgcaaaaaaaaggcagcagaaaagggagcaagacccgagacaccaggaaagccaaacaaaaagcccaaccagaacacaggggcccacaggccaacaagaggagaagccaagacaagcgaaccgaaaaccaaggaggcaaagacaaaaaaaacacaaaaagagaacaaggaagaagaaaaagaaagcggaagccggccgcacaacagggagccaaccccaaagcaagcccgagccaaaccgcaccagcaggaaagggcaaaaacccaacccgccacccagcacaccagcccagggccccagagggccggaggacaacaaacaaggaaggacccccaaaaggcagagccaggagccacagagaaaaggaaaaggaaagcccaggaaagacaaggaacagcccgggaggcagggaacggaacgcccgggggaacagcggccgcagggcccacgcccccaaaggcagaagggaccgcacaccgaagcgagggggcggggagggggacaaaacagacacagacacacaggcaaacgaaccaaaaagacagacaaaccaagaaagccggaccgagacaggcagaacggacaggaccggggccagcgggaggggggaagcagccaggggaagagaaggcaagggaaacaaagggcagagaagggagagcagcgcaaaccaccccccaaagggggaaaccacgaacacaaacagccagcagaaaccaccaacccccacaaaggagccagaccaagcgaggcaaggaaggagcggacagagggcaacccaggccagcccaaaggaagaaggaacccccccccccacggcggaaggggaaggcgcagggcagagcaaccaccggagggaaacccaagaaggggggagagcaacagaaagaagcagcgcacaccggcgcccccagacccgcaggagcaacccgccggcaacacgcggggccgacagcaggcaagaagagagagagaggagacagagcccgaggcccaggcgacggcagcaggcaagcagccacgcaaccccaccccacgccaaggacccgccaacagccagacccgagaacagacgcgcacaccagcccggcaagaagagaaaggggccaggccaggcgaccaaacccaagcccagggaccacccgccggcccccaaaggcgggaacaggcagagccaccagccggccgcagcccaccgccaaaaaaagccagagggagagacggagcaggggcgaggaaaaaccagagagagggagagagagaagacagagcgaggggaaaccaaaggaacaaagccgagaagacaagaaaagagggaccaggaaaaagacaggaacgacgaagaaacaggagccccaggagaaagaagagaaaagaggacagacgaagggagagggacgggagagacaagaggaaggacaggagcaagagagaagaagaaaccaggaacagggacccccacaccacccacagcacggcccgaacaccacagacccagcaggacaaaagcaaacaagagacagggcgccgcgcccaggcgaagagcagaaggacagccacgcagccagaacccgggcaagcgaccccgcccagccccagaaagcaggacacagacaagaccaccagccagcaaaaaaaaaaaaagggggggggcagggcaggggccacgccgaacccagcaccccaagccgcgcccggccgggcccgccacagcccgcccaggagccccagccaggacccaccccccaccacaaccccccgcaccccccccacaagacgggccagaagaacaacggcaaacacgcaacagaaacaagcaggcaaacacagaaacaagggagaacagcaagaacaaaagccaaagacccaaggcccaacggaaggccgaggggggaacacgaggcaggagccagaccagccggccaacagggaaaacccgcccacaaaaaacaaaaagaaccgggcaggggacacagccagccgggaggcgaggcacgagaagcgaacccgggaggcagagggcaagagccaagacggccacgcacccagccgggaacagagcaagaccgccaaaaaaaaaaccgaaagggagaacccccaaacgcacagaaaggaccccaaagcggagggggaccaagggaggaggcaaggggcagacccgcagaaggcgaggaagagggaagagcacggagacggaagaaaagccggcacccccccccgcccccgccaggacacacgcccccaccgacccaccagagaaaagcccgaggcccggcagaagcgagcagagcgagccacgaaagacgagagcggagccaaaaagccccaaaaacccagccaggaccaagcaaacaaagggacaaacacagacagggcgcgggcccaggcggcacaaacccgaccaagcaacccccaccgggcccccaaaggaggaagcaggcggagccacaaccaaccaagaaaagagaaaggcaccgcaaaaccaccacccaaacaaaaccgacaggacccccacaccaagccccccccacccaccccgccccccaccaaagggcacaccgaacggacaagggcaaccggcccaaggagcacccaacccccgagacggagccgccgcgcccaggcggaggcagggcagaccggccaggcaagcccgcccccgggcacgccacccgcccagcccgagagcgggacacaggcacccaccaccaagcccggaaacgcaaaagagacagggcaccggggccaggaggccgacccgacccggacgcccaccccggcccccaaaggcaggaacaggcggaaccacagcgcccagcccgcacccaacaaaaaaagacaaaaagcgcacccaaaaagggacaccacaaaccgggacaagggcaagacgcaagacacgacagcaggcgggccaggcagccgcaggaacggggaaagccagacacagagccaggaacaggggaaaggagagaagaaaggcaggagggggaggaggagaaggaggaaggaccaacggacggagagcccagaggacagagagcgggcagggcacccaggccaggaagcaaagggcggggggaaaagcgaaggagagaacgacagaaggaggaggccgggacgaaagcagggaaaacgaaagcaaggccagaacgagagaggggaaggaagccagaggcagaggcggacaaggcccccacaggaacggcaggaggggagggagaagaggaggggagcggagccaggcagggagcgggagcgacagggagaggagggagggcaacaagcaggaggcaggaggcagggcgcagggaaagagggggagaaggcggaaagacaagaggaaaaaaggccaaaacccacacagcccgagggcagagaaggagaaaacagccccacggaggggggcaaggccggaggaggaggcaacaccaaaaagagcgaagaacaggggagggcgaccgggcgcaagagcccagcagcaggcaagagcagaggggaggggcagagccgaggggcaagcagcacacaggaccagccggcagagaaggaagcagcgggcgccgggaggggagggaccccaggccagggggcagcggcacacccacaagcacaagggcgcagcacagggcaggggggaggggcagcgcagcaccgcccccagcacagcaccagccccagccccgggcaagaccccacggagagagaacaaaaagcacgcccccggcacaagcgggcaggggaaaccaggggagaagggagcggggggacaaaggccagccggaaaccgaacacgcccgcggccaggggggcggggcccgggcccgggaccccgggaccgacccggcgaggaagaggcaccaggccagggagcccccaacaagggaggaggcgaaggaaagaagaagggggaagccagccacgggagccaaggaaggccaagagaaacggggccgcgccagccaacacaacagcacagaaagaaaggaagagcccagcccagcccagccggggccgaggcaacgcccggacccaagggcccaccaaagccaaagaaagcggaagagggggggcagagacacagaaccacgagaccggccccgccacacggccaagcacgcacagaacgcccccccaaccaggagcccaggaccacacacaggcgccccggcccccaaaaaaaaaacgaaaaaaacagagacgaggccccaggcccaggcagccgaacccgggcaaagggaccccgacgggccccaaaggcaggaacagacagagccaccacaccggccccggcccccccccaggccacagaggacggggggaccagggcggaacacccaggaccaggagaagagcagcccgaagccagccagcccggaacgggcccagcccgccagggggagacgggcggcgcgcagcccacgaagcgaggagcaccaccccaaccagggaggagggagcgaacccacacccaggcccagcaccaggacccccagcagagagagggccagaccccacccaagcagcccgagcgaagcaaaggcgccaacccgagcaaaaccgaacaaccagggcaggagcaggaagagggggaaaaagaaaaacccaggaggggagcagacggcccgagggcgccacacccagcagaggggaggcggccacaggcagaacggaggagcagggaacaaaaagcccacacaagagaagagcagcccacagcaaggaccaagagaaggcccaagagaaaaggaaagacggcgaaaacagagaccaaaaaagagggccaaacaagacgcgccccggcaacagccaggcaagacaggggacaaaaagacaggcacgacccaaccacacgaggccaccccggccgccccacccaaggaccaagagacacccacacaaggccagccgcacgaagggggagagagggccccagaagcaggccccaaggacaccacggaagcacagacaagcgccaacccaggccagaacgagacagagcaacagcgcaagggagccggaaaagagaccagaaacaccggcagagagaaaagggaaaagcgggggccaacagcagcgccacagagaccccaagacacagcaagaaggcggagcgccaggccccaccccccggccacaggggcaggcaagggaccaacgggaaaagacccgaccacagcaagcccagaacggacacagacaagggaccaacagggccccaggccgccccaaaaaaggaaggcgggcaggggcacaccggacccagcacgggaggccaagacggggacaccgaggcaggaggagaccagcggccaacgggcaaaaccccacccacaaaaaaacaaaaaagccgggggggggcaccaaacccagcaccgggaggcgagggggagaacgcggaacggggagccagggggcaggagccgagagagagcaccacgcacccagccggacgacagagcaacacccaccaaaaaaaaaaaaaaaaaaaggagacagggcgccggcccaggcggaggcagggcagacaggccacgcaaccgaacgggccaagcaacccccacccagcccggagagagggacacaggcacgcacgaccacaccggcaacaaaaaaaaaaaaaacaagagacggggccacaggcccaggacggccaaaccccccaggaccaagcaagccggagcagacagacaacccggcagagacggaggagaagcgaaccgaccacaggcaaccgcaggggaaggaggggcacaaagcccagcggaagaaagggggccacccgagagacagagagagaagagacaggagggaagcggggggagaggcccacggccccagggccgccgcgcccgcgagccaaagcaacacccccccaccaagcgacaagcaaggagccacgcaacccagacgcaagccgcgacccggggaaagaggaaggcgggggacacagcgagaggaaaacggaaggaaaggcccaaccacgccgcccccccgcacaggcccgggcacccaaagccccaccgcggaggcgcgggcccgcacccaccagccccgccgccgccgccaccagccccccccaggcgcgcagccggcccagcgcgagggggcccgaggacggcacgcacaaaggccccaccagcggcgggggcgacagcccagccaaacggaacaccgcacggggcagcccggggggggcgcgacccccgggcccccggccagaaccggaggggggcggacccaaaaaggcagccacccccgcacgggcggacgcccccgagcccccccgccccacagcccccccggacccggccccgagcaccaccacaccccacccaccgaacagcagaaccccaggagagcccagggggacccgggaaagcaggagaagggcaggcggcgccccagggcagcagaagaaggcggacgaaccgcggcggcccccaacacgaggcccccacgacgcagacagcaaccaagcgccgggccgggg

SEQ ID NO: 490 - RNA, 9983 nt, Homo sapiens
aaaggaaaagaacccacacaaacaacggcagaaggagccaggggcaaaccccggaaaggcgggccaaacggcaaaagcccccagagagcccaccacagcccagaagaccaaacaaggcccaaggccacgaaacccacagacaccccgccagccaaggaccgcacaggaaaaaaagacaaccagccggcaaaagcccaagaagaggccccagcagcccaaccaaaccagcccagcacccagcccacccgggccacacccaccgcggcaccgcccccaaaccagccccccaaggccagcccggcccacgccagaagccgcaggggggaagaaagacacagaaaagggccagaaggacaagcgcaagggcacgcaccacaaggggaaagacccgccggaaaaaccgccccaaaaaaaggaaaccgagggaggcaccacacgagccaaaggaaccgcggaagaggacccgcagaagagggcgaccgccccgccaggcaaccccgggaagccccaaccggcagccacacagccagaccccagaggagccacaagaaaagcagagaggggcaggccaagcggccgaacccggcccaagcaaccccacccggccccaaaggcgggaacaggagagccaccaaacaccacacacgagacagaacccgcacccagacagacagaccaggagcaaccagccacgcaaccccaccccgggcaaggacccgcccagccccgagagcgggacacaggcaagccaccagcccagcaacgaagagagacgggcaccagggccaggcggcgaacccgacccaaggacgcccaccggcccccgaaggcgggaacaggggagccaccagccggccaccaaaagcaaggggacagcaggagcaaaaaaaaaacaagcaaaaagccaaccccccaaaccgaaaaccccgcagggagcacacgacagagaagaacacacggccacagaacagagaccacaaacacaagaaaccggggccacaaacaaacaaagacaaaaaaacagcccaaagagaaaagcccgggggaaagaggcgccccacaaaccacgaaaagaccaagaggggggggcgaccacagggccagaaagcccgaaacaggaagaaccaaggacaggagggaagaaagccagaagcagcaggcaacaagggcaccccacccagaagcgccagcggaaacaaggagcacaagggagaaacagaacacacacacgcggaaaaagaaaaggacacaccagaaaacagcgcagcccaaaagcaaagagaccaccaaccagcaaccaccaggaacaccagaaaaaaaaaacgacaccacacaaaaacgaacaaagcagaggacggccgggcacggggccacgccgaacccagcagggaggccgaggcggggacaccgaggcaggagcgagaccagccgaccaacaggagaaaccccaccacaaaaaacgaaaagcgggaggaagcgcaaccgaaccagcacgggaggcgaggcaggagaaggccgaaaccaggaggcggagggcgggagccgagagcccagcacccaaccgggcaacaagagcaaaacccaccaaaaaaacaaaaagcaaaacaaaaccaaacaaacaaagcagaggacaacaaaggccaaaaaggaaaaacccaggccaggcgcagggccacgccggagccaggccagcacgggaggccaagggggcagacacaaggcaggagagagaccaccggccaacagggaaaccccgccacaaaaaacaaaaaaagcgggcggggggggccgaacccagcaccgggagggggcgaggcaggagaacacaaaccagggagcggagggcaggagccgagagcgccacgcacccagccggcgacacagcaagacaaacaggccaggcgcggggccacaccgagcccagcgcgggagccgaccacgaggcaggagcggagacagccggcaaagggaaaccaccacaaaaaacaaaaaagcgggcaggggcacggccgagcccagcgcgggaggcgaggcaggagaacgcgaaccaggaggcagagggcaggagcgagacgcgacacgcacccaaccgggcaacagagcgagacccgccaaaaaaaaaaaaaaggaaacaacccaacagggacaagaaaaagaaaaaaggcaagcaacagggaaacaagccaaaaaaggaggcagagagcagcacaacacggagagccgaaaccacacggaaaaggaaagaagccacgacaaaagaccacaaaaagaccacaggaacaccagaacaggcaaacaagagacagaaagcagacagggccaggacggggggggaaaggagaggacgcaagggcccaaggcaggggaggagaaaagcaaaaagaaggagagcacaagccgaagcagcaaaaacaaaaagagaccgaagggaagcaggagaacaaaccaaaaaacaaaaggaccaaggaaaaaaacaggcacccccagggaggcccaacacgaggagagagcacgggggcgaaggacaaaccgggggaacccacccaccacggggaccgggggaaaacgacccacgcaaaaaggggagacacacccagagggcagaaaaggcaaggagacccccaaccccaggaaaggcaacagagaaacaggcaaaaacggacaggggaggaggacagagggaggagggaagcgaagcaaccaagacagagagcaaaaacccacccaaacaagagcccaaaaggcggcccaacgccaagcaaagcaggggaccaagacaccacgccacccacgcagcacaaccccgcaggcggcccacagggcacagccaggcaagcccggagaaaagggggagaaccaggacccaccaggagcccccagcagagggaagcggcaggcaggggaagaggacagcacacacaaaggccaaggaaagaagcacaggcgagcagaagcaaccccgcgagcaaacaaccaggggaggcaaccgcgcccagagagggggacacggagcgagcccgcaaacaacccagcaagcccacaaaacaaccgggccgagcgggggccacgccgaacccagcacgggaggcgaggaggggacacgaggcaggagcaagaccagcaggccaacaaagcggggccacaccgaacccagcacgggaggggaggcaggcagacacaaggcagcaggagaccagccggccacagggaaaccaccacaaaaaacaaaaaagcgggcaggggcaggcgccgaacccagcaccggaggcgagagggagaacgcgaagccaggaggcagagggcaggagccgagaagcgccacgcacccagccggggacagaggagaccgccaaaaaacaacaacaacaaaaacaacaacaacaacagcccgcacgagccccgaacgcccccacagccccagccccccagaaagccaagcccgcgccaacacccccacccagcccagcgacagcccagccacccccaccccaaaccccagcccacaccccaccggagcacacccggacccaaaccaagagccaaaccgcccgcccccggagggcagcacaggacgcgagcacccaagcgaaaagcgacacacccagcccccgcccacagccacacaaccgaagcaggaccgcacaaacccaaaagccggaacggccccaccaggccagggccccacaaacggacccgcaaagccccccaccagaccaccaaccggcccccacaacgcccaagcagcccgagggagcaccgcgcccaggcggaggagggcacgaacggccacgcaaccccgcccccaggcaagcgaccgcccagccccccagagcgggaacagggcggccaccacccggcaaaaagagagacagggcaccaggaccaggcggcgaacccgacccagggaccaccgcccggcccgcaaagggggaacaggcagagccacgcgccggcgcccaagcagccaaagaccaggaagcacaggccgcccccaaaaccaaaaccagacaggcacagggcacaccgaacccagcacgcaaggccaagacaggaggacgcgaggccaggaggagacggacgcacaaccagcaagaccccgccacaaaaaaaaaaaaaccaaagggggcaccaagccaacgaggaggcagggggaagaacgagccgggaggcgagggcaggagcggacagcacgcccgccagccgcggacaagaggagaccgccaaaaaaaaagagacggagcaccggcccaggcggagcgccaggcgcaacggcaccacaaccccacccccgggcaagcgacccgccagcccccaagagcgggacacaggcgcggccaccaagcccagcaagaagagagacggggcaccagggccaggaggccaaccgccccggacgcccgcccggcccccaaaggcgggaacaggcagagccaccacgccggccaaaaaaaaaaggcgccagacagaccaaacccgccagccacgcccccaacacacaggcacaccccaggcccgagggcccagcagagcgccagccacacacccgccaaaaccccccaacccacccgaaagcccagcccaaggccaaccaaaacacccgcaaagagccccagaggggcgaaggaagccgaaggagcgaaggaaggggaggagacacacagggcccacagaggcacccaagcgacagaaaggggaagccggccaagcacacacagggcgggccagcacaaaggaaaagggcagaagcgccgaagagacacacaaccacgccaaacagaccacagaaagaaacacaaagcagaaaagcagaggcaacaaggaagcggaaccaaggcaggcaacagccagcgccgacacaggaggccaaacccaacagagggggagggggaacgggaaccacgcaaggcagcacggcccacaaaacaggaaagaagcaggcaagaggagagcaagagacagaaccggggaaaccagccgccacagcggaccggaaacaccggacccacaaaggaggaagaaaccacaaaagccccgagcggcgccccgccggaccacccccagacccacaagccccccacccccagccgcccacaccccgaccgagaaaaacagggaccccccccacccagcacgccacacacccgccaaccccaggccggaccagggccagccagagggaagaacaaaaaaagagaaggagaaaaagaacccaccccacagagggaagaggaacgagcgacccacagaaagcccgaaagaaaccaagaagagccccgcgagagcagccacaaccaggcacccagagagcccaagaggaggggggaagggcccagcgggaaagacagaagccaggagaggagcacccccagcgggagggggggagagggaaggggagcgggggaagggggaaggggagcggggagggaaggggaggggggcagggaaggggcggggaagggggagggaagggagcggggaggggggagggggaaggggggaggggggggagggaggggcagcacagcacacagccccagggaagacagcgagcgcacgcgcgagcgcaccgaggggaacaacagggaggagagagcacggccagggcagcacgccagcagacccagcaggggggcagacagcagggggcaggagcgcaagagaccggacgccccaaagggagcagagggcgacagggcacgaaccacacccgaggcaagcaaagggggaaccagaagagagagcagaagaggcgcaagaaccaggagaagccaagggcagcggagaaaaaagaaagcaggagacagaaacacggaaccaggaccccgggagggagggaagccaggagaccaggacggcggcaacaggaagggcacccgaaggaaccaagggaagaacagaggggaaaagccacacggcgacagagcgccggcccaggcggcggcagggcacaaccagccacgcaacccgccccgggcaagcaacccgccagcacccgagagcgggaacaaacacccaccacacgccggcaagaagagagacggggcaccagggcaggcggccgaacccgacccggaccgccgccccggcccccaaaggcgggaacaagcggagccaccacacccagcaaaaaggaaccaagacccaagccagaagacgcccagcaggaggaacccagccgcgagaacaccccccacccccggagccgagccgagcaggacccaggaggcacgcccggaagccagcacaggcagcggccccgaagggagcagcaccgggaaacggggagagggaagcaaggaacaccacaaaggggaggggagaaacggaaggaaacagaacagccaggaaggcaggagaaaccagaagccacgggaaagagaaaccagacacaagcgccagggccaggaacccccccagccacaaagacagacaacggcccaagcgccccccaccccaaaggacacacccgaagaacgagccgagggaaggcgaaccacagccggagccggccaaaccgcgcaacgcgacccaagacagaacagacacgagaaacaaaaacgggaagacccaggcgaccccgcgagggaaggcaaaaaacaggccagacgagagcaaaaaaagggcggcgggaccggccaaaacaaacccaggccgccgaaaaggggaaaaaaagcaagggaggagagaaaagagaaaaaccaagagccagaagaggcgaaagaggcggccaggccgacaccggaagcgaacgaggccacccgggcaacacagagaaccgagcccacaaaaacaaaacagccagaagggggcagccgagcccagaaggcgagggggaggacccggagcccaggaggcgaggcgcaagagccaaagccaccacacaccagccgggcgacaggaaacccgccaaaaaaaaaagagaacgaggcccgaaccccagaacgaaaacagaacaggcaggagcccaggcaagacccagggaccgaaacacaccagggcgagaaccacaagcacacccccccccccaccgaaccaggaaagccccggcgaacccaacagaaaccacagcacagaaacgccagaggcaggcgcacccaagcagaaacgagggcagcccccagacggagggacccaaacaaccacacgagcagccccaccaacaaaaccaagaggggaacccaagcgaaaaacaccagcaggaccccaagccccacagcagaaaagagaacacacaaacgggggagacagaacaaaggaaagagaagaacacaaggacgcaagccaggaaaaacgcccaaaaaaaaaaaacaaagaaagcagcggcaggccgaaggccggcaaccaaggcgaaggcccggacccagcagaggaagaagacagaaaggaaacccaggaaaaaaacaaaacaaaacagaggcgccacccggcagacccaggccgcgagcaggagaacggcagaaagggggaaggcggaggaggcaccccacccagggcagcagagcaccaaggcagacagccacacaccacccaagcccaagaaacaaaaaaaagaagcgaagaaaaaaaaagaacaacaagcacacgaccccgaaagaggaacaaaacccggagaccacccgcacagacacgggcaaggacaagcccgaccacaaaaaggagcgggccaggacaacagcaagccccaacccagccaggccagacaaaaccgcacagaacaggaacggaaagcagagcaacaacgcccgggagagcccgggaacgcacaccaccccgcagcagcgcgggacacaccgagaggaagacacacggagccacacgaggcaaagcgccaccacagaccaccagacaaaggcgcaaaggacgcagaaccgaacagcagcgcggacccccagccccagaacaaagccagacacacccggggcaacccccacaagccacacccaaggggaagcccccagcccccgagaggccaaacacaaagccaaaggcacccaggagaaaaacccaaaaggcagacaagagaagggagaaaagccgaagaaaccaccaccaacaaagggaggagaggagaagcagaggggaaagagagaaccgcgagacacaaaagcgaacaagaagaaacaagcaacagcaaaggggaaaaggcacaacaagaacacggcacggaaaaaaagcccaaaaccacagccaaagaaagaaacgagcccaaagacacaaccaaacagacaaccaaaagaccgaagcgaaaaagccggacacaaaaagaaaaagaaacaacagcagaggaaacggaacaggaaaaaacaaaaaagaagaagagcagcaagaaggagcagccaaaaaaccaggaaaacgggccgaacccagacgggaggcaaggcaggaggaggagcccagaagccaagcagaacaccaggacccagccggggacaaagcaagacccaccaaaaaacaaacaacaacaacaaagacaaggaaaaaaagaaagaggaagcaaagagaacacaaaagagacccggagagaggggacgagcagcccaaacgggacacaaaacaaaacacgacaacggaaaagcgagggggggggacacggagccaccgcacccaggcggaggcaggggcgaccgccacgcaaccccaccccgggcaagcgacccgcccagccccgagagcgggaacaaggggcccagcaagaagagaaacgggggcccgggccaggcggccaaacccgaccaaaggacgcccgcccggcccccaaaggcgggaacaggggagccaccagcccggcccgaggaaagacggcccccagaacaaagcagaccccaaaaacagaaccacgccgaacccagcacgggaggcgagggagggacacgaggcaagagacaagacgggccaggcacagggcagccgcaacccagcacgggaggcccaggcgggcggacacgaggcaagagagagaccaccggccaaccaacagggcaaccccaccacaaaaaacaaaaaagcgggcaagggcgcacgccgaacccagcaccgggaggcgagggggagaaggcgaaccgggagaagagggaagagccaagaaggccacgcacccagcccggggacagaggagaccggaccaaaaaaaaacaagagacaagaccaccggccaacacgggaaaccccgcccacaaaaaacaaaaaagcgggcgggggcacgcaccgagcccagacagggagacgaggcaggagaacgcgaacccgggaggggagggcaggagccgagaggcaccacgcacccgccaggaccgaggagacccaccaaaaaacaaacaaacaaacaaaaaaagcaaaacagaaacccgggaacgaaagcaagaacgggcacacgggcaaacacagacaccacgccgggcggggccgagaaaagacaaccccgaacccagggccaaaaggaagggagcgggcagggggaacgccgagcccagcacgggcggcagcggaacgcaagcccaggagcaagccagccaagcaacaagcaggacccgacaagaaaaaaaaaaaaaaggccaggcgcggggccacccgaaccagcagggagaccaaggcgggggacacgaggcaagagagagaccacggccaacagggaaaccccaccacaaaaaaacaaaaagcgggcgggggcacggccgagcccagcgcgggaggcgaggcaggagaacgcgaacccaggaggcggaggggaggagccaagacgcgccacgcacccagccgggacagagcgagacccgccaaaaaaaaaaaaaaaaaaaaaaaaaaaaaaaaaaaacaaaagggaggaaacacgcaggcgcgagaaaaaaagagcgaagcaaaggccaagggccacaaaagccggggagaagacaagagacaggagaggcagaggcacaagcagaggaagccagaaagaacggagaagaaaacaacccacccccaaccccaccccaaaacaggaagaa

SEQ ID NO: 491 - RNA, 4192 nt, Homo sapiens
acagagagcacgacccccccacaacccacagcccccaacaacccccagacgccccagcgaacccgcccagaaaacagcacagcaaaccagccaccagcagaccgccgggcccaggggaagggccaggcaaagaagcggaggcggcaggccagagggcagaagagcacagcaaacccgcccagagccgcagacagacccggggcccacccagagggggacggaacgcgggggaggggcagcacaggcgaaggccaggcacgaggggggaagcgaggggggaggcccccgcacacacaaccccccgcgccagccagaaacagagagcgggcacgcccagcgcagaagcacagaggggaccagaccaaggaaggagcacagaagaaagaacaggagaagaaacccaggagagccgggggaggaggcagagggagagacgcagaggcggagggagccgagagaaggggagggagggggaagaagcaagagccagaccccaccccagcaccccaacagcgaaagacaaccggcaagcacgagccaagcgacccagaagaagagaaagcaagagaccaacaaccaagaagaagaaagggaccaggaccaccaaaaaaggaaaaaggggcgggcagaggcacacgaacccagcacgggaggccgagggggaggagcgagccagcggcaagaccaaccaggcaacaagcgagaccccaccaaaaaaaaaaaaaaggcaaaaagcaaggcgcaggagcgagcgcgcacccagccagggcaacagaggagaccgccaaaaaagaaaaaacaaaaaaaaaaaacaaaaaacagaaaggcccaggggacagcaccaaaccacagaacaggaaaggcagcaacaggaacagacgaaaagacgggacagccgagcacggagaggggccccgcgcccaggcggagcaggggcaaaagccacgagccgaacccgggccaaggaccccagcccagcacccgagagcgggaacagcaggcaccacacccagcaaaaaaaacaagagaggcgagcgggcccaggcggccaaacccggcaccccagaacccagcacgagaggcgagggggaggagcgaggccagaaaggagaccagccgggcaacacagcaagaaccgcacaaaaaaagaaaaaagcgcacgccgggcacacaccgagccggcaggggagccgagacgggaggacggagcccaggagcaaggacaggagcgagagacgaagccccacccagcccagcagcggggcagaggaaaaagggacaagcacggaaacccggcacacaaacgaacagagccacccggacccaggaaccgccccgagcaaacacgcaagagaaagggccaagacaccgaggacacagacaagaagcacagccaacacagcccaaacggaacaaccggaagcccaagggagagcggcaacaccggacagacagaagcacagcacagaaaaaggggcacccgcgcacacaaccacgggagaaccagagaccaggccaacgacgacccagacccacgagaagagcacgggaaacagaagcagaacaacaaaaccacgagcagcgggcgcaggggccaagccgaacccagcacgggaggccaaggcgggcagacacggaggcaggaggagacaagccggccaacaagcgaaaacccaccacaaaaaacaaaaaagcgggcggcggcaggccgaaccagcaccgggaggcgaggcaggagaaagcgaacccaggaggcggagggcaggagccaagaggccagcacccagccgggcgacagagcgagaccggcaaaaaaaacaaaaaacaaaaaaccccacgaggcgaggaacagacagcacggcacccgggcagaagcggaaggcagggcccaagggggaagcccaggggcagggaagccgccggaccaagggggacacagaagcagggcaaagggagccaaccagggggcaccgggaacaaaaggaagacgaagggagccgccgacccagacggaggcagggcagaccagccagaaaccccaccccgagcaagcgacccgccagccccaagagcgggaacagggccgccacggcccggcaagcaacagagagggcaccagggccaggcggcaaacccggcccagggacgcccacccaggggccaaaggcgggaacaggcggagcagggcgcccccggcccaaaaggaagacaaaaagcccagccagagcaacaaggagacccgccccaaaaaaaaaaaaaaaaacaaacagggccaggccaggcacggggccacgccgaacccaggcgggaggcgagggggaggacacgagcccaggagcaagaccagccgggcaacaggcaaagcccgcgaggaaaaaaaaaaaaaaaagcaaggggggcagccgggcccagcaccaggaggcgagggggagaacacgagcccaggaggggagggcaggagccaagacacaccacccacccagccggggacacagccagacgcgccagaaaaaaaaaaacaaaaaaaaaaaaagccaggcggggggcaccccagcccagcaccaggagcgaaggggaggacacgagcagggggaggcagagggcaggaacgagaccgcacgcacccagcccgggcaacaggagacgaccgaaagcgagacagaggccgcgcccaggcggaggcagggcgcaaccagccacgcaaccccccccccagcaagcaacccgcccagccccgagagcgggaacaggcacacaccacacacccagcaacgacagagagaggggcaccagggccagacggccgaccccgacccagggaccaccagccggcccccaaaggcgggaacaggcggagccacaggcgggccaaaaaaaaaaaaaaaaaaaaaaaaaaacagcggggcagggggccgccgagcccagcacgggaggcgaggcgggaggacacggagcccaggagaggaggcgcaggagcagaggggccacgcacccagccggggacagagaagacccgccaaaaaaaaaaagcccgcgcaggcgcgggggagcaggcgcaggcagaggagggacaggaagaggcgggccaggggaaaacagaggaaggagacaggggggcaccgggcagaaggggaccaaaggggcaggaggcgggaccgggaagaagaggagccgggacccaggccgagcgagggggggagggggaagggaggacaaaagaagagccaggaggcggaagcacagaaaccggcagacgggcacaagcaacaacaaacaacccgaagcccaagccaagaacacccccagccggcgaggccccagccccccagaaggagagggggcggagggaacccacccccacgaccccccccggccccgcgggaggaccagccaccgaaggggggagaaccccccaccagcgggaagagggagggagcaggggcacgaacgagaggagccgccggcccaggcggaggcagggcggaccggccccgcaaccacgccccaggaagcgagccgcccagaccccgagagcgggaacagggcacaccacacacccagcaaaaggagaggcggggcagcagggccaggcggccgaacccgacccaaggaccgccgcggcccccaaaggcgggaacaggggagccaccacacgggggcccagaacccggccgggaaaccaaaaggaagaaggcgggccggaacgggggcgcgagcagacagcaccgcaagaccaccgaaaacgcacagcaccgccccccccaaaaagggcacaggaccaacccacaggcgcagaggggaagagaaaagaaggaacaagcaagccccggcaccccgcgggacacggggggagagcgcagagcaccgccagaccccgagcccgcagggaggccacggcggcagaggaacccaggccgggaaaggagaaggagaggcagggggggggggggggggggagggcccgcgggaggcgggaagcggggagggggcgcgccccggccccgcagcgaacaggccgccgccccgcccacgcaacccaggcgggcacaccgcccccaagacccaagggcgacaggaagagccccggaaagccaggacccccccccccccgggggcccagcggcccgaccccagcgcaggcgaccccccccccagccagagcccgggcccgccccccccgggggccagggag

SEQ ID NO: 492 - RNA, 12744 nt, Homo sapiens
caaaaaaaaaaaaagaagacaaaaaaccaaaacgaaacaaccaaagcgcggggcccgggagaacaacaaccacgaccgccccccaccccacgcgcccagaagaaacccgccaaaaagaagccagccccaacccggcacaaacaaaaccccacgaacaccaaccaggcagaaagccaccccaaccgaacccagaaaacacccagccaccccagaaggagccgccccaaaccgacccggccgaccccgcaaaaacacccacacacagacagaggcgcacccacccggcaaaagccccaggagaaccaccaaccagaggcaacacggagccacacacaaaccaacaggacaaaaccacgcaccgaccaaacaacaccacgccaccacacccacccaggaacacaacaccccaggacccaacaacaccaagaagaacaaagacggacgccaacacgaaaccgccagacacaagcacccgcaacagcacagccagagagaaagagccaggaggcagagcccgggccaaagacagcccccccaacaaagcccagaacggggggagggagcaaagcaacacacccaagaaaaaacccgacccgcacaggggggagacagcgccgagagcaaccacacacaagaacgggagagcaggcccgaaaaagggaaaacccagcgggcggccgccccccccgccccccaccgggaagagagcaagcgggaaaacgccaagaaacagacaagcaagaaacccacccagaccggggagaccaggaaaacaccacccaagcccaccacgaaaagggacaacaaacacaggggggaagaaaaagaaaagaaaaacggagaagagagcaagaccgccaaccagaaaggggaagacggcgccaccgaacccgggcagaaaaagaacaacacgccacacgcccagaaccgccccggagacaaggagacagaaccaccgaggccagacacacgcgaagcccgaagccgcagcaggggaggggccaaaacagaaagacagaacgaaagacacgaaaacaggccaggacaaaaagagagaagaagaaccaaggggaaagcaaagaaagagcacgaaaacacaaccaccagagaaaaaccggagaaacaggagccgcgggaaggcacccgcaccaggcccaacgagccaacagcccccccaacccccacagccacaacccaaagcacggggagcaggcagacccgggaaaagaacccaaacacccaacaccagcccccgccccgggcccccagccccccgaaaaaagacgggaaaaccccaagaagacccggcaacacaggcccccgagcgacaccccccggccaccagcaaacccaaagccagggaagcagggagcaggcacaccccgggagacagcaaccaggacccccggggaggggagagaagcagcgagggccaccagcaccagggcagcacccacacaccccagcccaccgcaccccccaccaccccaccccacacgcagcccgcgcacccgccaacacaaccccaccgccagaaggccgcggcaggacgaggcggggggcaccacgccaaccaagggcagcacagaagaagagagcccccagcggagggcgagagccccccacaaagcggaggcaggaggcagcccgccagacccaccgccgcggcaggcaagagcccccaaaagaccagggcagaaaggcacacccagagaaggagagaagcaaacaggaacaacaccaaccacggcggagggaccagaaaaggagaaaaggccacagcacagaacccgggaaggacacgcgggccaccacaaaacaacacacacaaaagacaaccgccacagcacccccaggagaaaaggagcacaaaaaaaaagcgacaggggagaaagggcaacaccgcaaccgaagaaaaagcccgagcagggcaggccgcagccccaggaagacgggcccaggacccacggagcagggagcgggaagagaggcacgaaggccgcgacaccaagacgagcagcaaacgccaggaaaaaacacaagagacaggagcccaaccagaaaagaaagccaccgacaaacagacaagccccacagagggacccccccccccacgagcgccaccaccggcagcccgggggacgggggagggcagccggcagagaaccgaacgacaaacagcagaccgggacaacaaaaggagacgcccgcccccccccccccccccccccaccaagcgcccggcccggaacgggcaggaccagcaagaggaaacaaggggcccaggggaaagcaagaggccaggccaccaaaacagagccaggaaagggggaccagggcacaaagggaaccacagcaaaaaccagccggaggaggcccagacacccggcggcccagccgccgccccaaagcccggaaaacaaccacaaggacgagccagcccgaacgccaacgccgagcacaacaaacggaaaagaggacaagaaagaaaaaacagagcaccccaaagccccccagccagcccagacccaaggaagagggcccagaggggcagggcgagaaacagaaacgcagagggaccgggcgcgaagagcaaaagcgcacggcaagccggaccccccacccccacccacccacaccccaaagcaggcccaaaccggagaaaaagaaggccccacaaaagcacgccaaacaaggagaccgcaacccaacaaaacaggacggaagaaacgacagcacaagacaaacagacgaggacagagaacggaggcaacgcagagggccgcgaacagcaagggaaccagaaagaccagccaaagccagggaggccagcccagcccccccgccccggccaggggggggcggacgagccgagggaagaggccggaaagagggccagccggaaaggccagcgacacaaaaaagaaggcagaagaacgggaagagcaggaacggaggcagacaaaccagggaaaccaaagcgaacacacacaggacggagaaggcaacccagaccccagcccagccaaaaggggagcaaagacgccccagaggcggaggaaagggaaacaccaaagcgcaaaacaagcagaacgaaaaaacccaccagaaacagcaccacaagaccacacacagcaacagaccagccagggagcagaacaccaagagcacccaaagggaaaaaaaaacaagaacaagcaccagcaagacacaccaagaagacggaacagacgaccacgaccaggccaagcgcggaaacaagaaggccacgaaccggacaaaggaacggaaaaaaccaagccaaccaaggaaggaaaaaaaagaaaacgagaaaagacaaaaggcgaaaagaaggacccaaaaaaccccccagaaaccaaaacacggaacgaaaaaacagcaagaacaaagggagcacacggggcagagacgcagagagagaccaaacggcgagggggaaagaagaaagcgacaaacacaaaaaaggaaaaacaaaaaggaaaaaagagcccagaggaagagcgacgagacgcgcaaccgagagacagacaggcgccaggagagcacagacaaacaaaagcacaaggcacaaaagcccaggaaggcagagcagagccccgaagaaaacaacgaaacagaccgaaaaaaggaccccccagaggagacagacccaccaacaacacaggaggaacacacaaagcaaagagagccgcgaaagcgcaaaccaaaaaggcacacacacacacacacacacaccaaagccaccccagagggaacaccgcggggggaggaaaaagaaaagaaccgccaaaagccaagaaaggaggaaacaagaacaaaagcaacacagaacccaaaaagacaacgcaggcacagaaacccaagcacaccgacagccaaagcacaaacaagcggaaaccggacaagggagggcgcccgccccaggacccggggggcgcagagcacggcgagggggagcaggggaagcagagggggacaagccgggcgccgcaagcagacaggacacaccacccccaggcaccgcacaacgaggaaaccccccaccacacaagcagacggccacaccgggacacaacccaaccagaagaccaggagaggggcagaagaccccccaggccccacagaaccgccccacaagcgcccgaggaaaacccaaaaaaaaaggcaagagcagaggcacagcaaaagagcagaaaaacagagagccaagcccccagacagagccgaccacgaaaacccgacagagggcaccgacaacgagaacacaggcacaccaacacccaaagcccaagccacgaacagggcaccgggcacagcaggaggcaggcaccaaagacaacagaaaagcgggcacaaaaaccgcgggccaccacacccccccaacccggcaacagaaaaagcccaggccccagaagcaagaggaggaagacacaacgaggggagccgccgcacccaggcggaggcaggggcgaccagccacgcaagccgcccccgggcacgccaaccgcccagccccgagagcgggacacaggcgcccgccaccacacccggcaagaagagagaggggcacggagccaggaggcgacccgacccggacgccgcccggcccccaaaggcgggaacaggcggagccacgcgcccagcccagagaaccaagagagaaaaaacagcagggaccccagccagggccaaagccacaggcgaaaaaccagaggaacaccacagaccaaacccacgaaggacacgggccaaggaaaaaaaaaaagcgcaaagccacgcggcaagggagagaaagcagaaagggaaacaccaagaagccaaagggagcagaaaaaaagaggaagaaaccccacaacgcccaaagggcgcaccgcaccacggcaaaagagagacggccccacgaaagcaggagcaggggaggaacaagggggagggaccagagcgaaccgagacaggagggagcagaccaacaccaagaggggcagaggcagcaaaaaaaaacgcccagggaaagagaaaaaggaaagaacgaaacaaaacagagggaaaagaccacaacgccaaggaaaggcagagcagaagccacaggagaaagaggcccagcaagggaaggcaaggacagggacaaaaggccaagaccacagcaaaaaacaggaccccaaagagcggagagaaaaaacccaaaccaaaagaaaaaaaaagaaaaaaagaaaaaaaacaaaaaaacccaacaggcaaaaaacagagagaaaagcaaaaaaacaaaaaaaaagagaagaaggcagggacggaaacaagccagccaagacccagaccagacgcagcacaacaggcgaggcaagcacaaaagaaaaggcgacaaaaagagcggaaaaaagaagagcccagaacagcgggaaggacgcagaacagaggagcggcagcgagaaccacgacgaaggcaggacggccacacacaaccagggccacaagccccacagagacgcagcaaagacgaaaaacaaaaaacggacccaagaagaaagagacgagaccgaggggaagccaaagagaacccacaagacccacaccacaaagcccaaaaaacgaacaggcgaaaagagcacaggccggagacaaaagaagggccaccaagccaccagaaaaagggagagaaaggcaacacacaccaaccacgaaaaaccaacaagggccagaagaaagagaaagcagaagcaaagaggacaaaagccacaaagagcagacaacagcaccgaccacaagacaacacagagcaaacaagccaacagcaagacccaaaaagacacaagagggcggcaggaggccaaaagaacagcccagcgcagccccaggagacaacacagaaggcagggacgcacaacgagaaccaagccaccaggaacggcagacaggaggaagcccaggaagggagcagaagcagggggggaggcccaaccggaaggcaagggcggggaaccccccccagccaagggaagccagagggacgacggaggaacaggcaccagcccagaacagccccaggccaaaaccgcagaccaggagacccggggccacaccaccagggcccgggcaagcacaaaacggaagccagggcagacaccgagcagcgcaggagccaaccccagggcacgggaagccaggagacagaacgcacccccggaaagggggacgaagccagggggccaagggcagccagcagacccaccccaagagccagcaagcaagaccacggcgaaaccacgccagacagcagcaaggaccgggagccaacgggggggaggggcgccacaaaccaaagcgagaggcggcccccacaggaaacaaagacgccaggaaggaacgggcagagcccacgcagcgggaaagccacaagccagacccccagacccccgggcaaggcacggaaagaaaggcagaagccccagcagggacaagaaaaacaccaccccggaagagcaccaagaggaagggagagcggggcacagccagcagacaaacgccacgccagccgaagagagcagggaccccagcacagcggagacgcaagggacacacgcccccaagaagcccgacccggccgacgagagacaaccccagcagggacaacagacacccagcaggagagccggcggcacggggggcccccgggagaagcccagaggaaggaacaggcagcaacgcgcgaagccccgcggagaacccaggcaaacacggcggagggaccccagcaaaccaggagaccgcagcagagaggccgacgagaaggaaaacaacaaacagaaaggaaagcacaacacacaaaaaggacgccacacaaaaaccccaccaaaggcaccaacacaaagaccaaaggagaaaaccaagaagagaggaaaaaccaggcaaaaaggcagagaaccaaaaaccagaagccccccaaaaggacacaacgcgccagcaagggaacaaaacggacagagaagaggagaagacagaagaggccagaagggggaaaacaaacccccaagaaaggagcagcaacccaagcaaggaagcaagaaccgaaaaaaggagaggaagcaacagaaaaccagagagaagaacacaaacaccgaggagcgaaaaacacagcaagacacagaagcaacacaagacaaagccaaagacaagcagaagaaaggaacagagggaagacaacaagaaaaaagcgaagacaagaggagaaaaaagaagaaaaggaagaacaaagcccaagaaaaggacaggaaaagaccaaacaacagagggaccgaaaggaggggagaacgaaccaagggaaaacacccaggacaacccaggagaaaccccaaccagaagacaggccagcacaaacaggaaaacagagaacacacaaagaaccccgagaagagcaaccccaagacacaaagcagacccaagggaaacaaaggaaaaaaagaagggcagccagagagaaaggcaggacccacaaagggagccaagacaacagcagaacccgcagaacccaaacccagaagagaggaagaccaaacaacacaaagaaaagaacaacccaggcaacagccaaacaagccaaagcaaggggggccaaaccaacagaaagaaaagaacaacccagacaacgagccaaacaagcaaaggaaggagaaaaaaaccacagacaagcaaagcgagagacacaccaccaggccgccacaagagcccgaaggaagcaccaaaaggaaaggaaacaccagaccagccacgcaaaaaaacaaaagaaagacagacagagaagaaagcacaagaagggcaaagcacaagggcagcacaaagacaggacaaacacacaaacaaaaaccaaaggaaacaggaaaggcacaaaaaaggcacagacggcaaggaaaagagcaagaccacagggcgacaggagacccaccacagcaaagacacaaaggccaaaagagggaggaggaaaaccaagcaaaggaaagcaaaaaaagcagggggcaaccagccgaaaaacagacaaaccaacaaagaaaaaaagacaaagaaggccaacaaaggaaagggacaagcaacaagaagagcaacaccaaaaaagcacccaaaaggcacaccagacaaaagaagcacagaccacaaagagacagacccacacaaaaaagggagacaacaccccacgcaaaagacagacaagagacagaaaaaacaaggaacaggacgaaccagccggaccaagggaccaaagacacacagaaccccaccccaaacaacagaaaacgcccagcaccacacacacacaaaagaccacaaaggaagaaaacacccccagcaaacaaaagaacagaaacaaacagccccagaccacagacaacaaaagaaccaggaaagaaaccccaaaaccacacaacacaggaaacgaacaaccgcccgaagacgcgggaaaaacgaaaaaggcagaaaaaaaagcgaaaccaagagaacaaagacacaacaaccagaaccgggacacagcgaaagggaaacaggcaaagcaaggagaaaggggaaagacaaaagacacacccaacaacaaaaaagaacagagaagcaagagcaaacaaacaaaagcagcgaagacaagaaaaacaagacagagcagaacgaaggagaggagacacaaaaagccccaaaaaacaagaacaggagcggggaaaagacaacaaaagaagaccacaccacaaaaagaagaaaagagagaagaacaaaagacacaaaaaaaagaaaaggggaacaccacgacccacagaaaacaaacaccacagaagacaaaacaccccgcaaaaaacaggaaacagaaaaaaggaaaaccggacacaacacccccaagacaaaccaggaaaaggaacccaaacaagccgaaagaggcagaaaaagccaccaagaaaaaaaaagcccgggagagacggacacagccgaacaccagaacacaaagagcagcggacgacccgaaaaaccaaacaaagaaaagagagacgcaccaaccaagaggccagcacaccgaaccaaaaccggcagggacacaacagaaaaagagacaggccaaacccgagagcggagcaaaaacccaaaaaaacggcaaaccaaaccagcagcacacaaaaagcaccaccaagacaagcggccacccgggagcaaggcgggcaacaaacacaaccaaaaacgacacacaaaacagaaccaaagacaaaaaccacagaaccaaagaggagaaaagccggaaaaacaacaccgccagcaaaaccccaaaaacaggaagaggaacaaccaaaaaaaagagcaagacgaacccacagccaaacaacgaagggcaaaaacggaagcaccgaaaacggcacaagacaaggagccccccaccacaccacaacaaaaggaagcggccaaggcaacagacaagagaaagaaagaaacaacaagaggaagaaaggaagcaaaaccggcagagacaggaaagaaaaccccagccagcccaaaacccaagcgaaagcaaccagcaaagccaggaagaaacaaggcaaaaacacaagcacaacaccaaaaagaaaacagagagccaaacagagaaaccccaacaagccaaagagaagaaaaccaggaaacaaccacaagggaggagggaccccaaggagaacacaaaccacgccaaggaaaaagagaggacacaaacaaaggaaaaacaccagccaggaagcaagaacaacgggaaaaggccaacgcccaaagaaaagacaagcacccacgaacaccagacccacagaaagaaaaaacacaaagcaaggaaccaaaaaagagcccacaagccaagacaaccaagcaaaaagaacaaagcggagggcagcaccgaccaaacaacacaaggcacagagccaaaacagcaggcacggaccaaaacagaaaaaccaaggaacagaagagaggcccagaaaaagccacgcacacaaccacagaccgacaaacagacaaaaacaagcaaggggaaagaccccacaaaaaagaggggaaaacggcagccaagcagaaaacgaaaggaccccccacaccaaaacaaaaaaaccaagaggaaaagacaaacaaagaccaaaaccaaaaaacccagaagaaaaccaagcagaccacaggacaaggcagggcaaagaccagaaaacaccaaaagcaaggcaacaaaagccaaaagacaaagggacaaaaacaaagagccgcacagcaaaagaaacaacacagaggaacaggaaccacaaaggaagaaaaccaacaccacgacaaagggaaaccagaacacaaggaacacacaaaacaagaaaaaaacaaacaacccaacaaaaaggggcaaaggaagagcagacacccaaaagaagcaagggacaacaaacaagaaaaaagccacacaccggcaagagaaagcaaacaaaaccacaagaaaaccaccacaccagagaaggcaacaaaaaagcaggaaacagaccggagaggagggagaaaaggaagcacacgggaggaggaaaagcaaccaggggaagacaggggcaacccaaggacagaaccagaaaaccagacggcaacccaaaggaaaaaacgcaaaagacacagcacacaagagcagcacacacaaaagaagacggaaccaacgaaagcccacaggaagacggaaaagaaaagggcacaaaaaccaggaaacaacagccaaaaaaaggagagagccgcagagacaggagaagcggaaaccacaccagcaaacaacacaagaaaagaaaaccaaacaggcagccaccaagggggaggaacaagagaacacaggacaaggaggggaacacaacacggggccgggggggggggcaggggagggaagcacaggagaaaacaagaaagaccggaggggcagcaaaccaccagccacggacacccagaacaaaacgcagcgcacggacccagaacaaagaaaaaaaaaaagacaccaggcgggcacagggccacgccgaacccagcacgggaggccgaggcgggcagacacgaggcaagagacgagacaacggccaacagggaaacccgccacaaaagacaaaaaacgggcgggggcacgccgagcccagcaccgggaggcgaggaggagaagcgagcccggggaggcagagggcaggagccaagacacgcacgcacccagccgggacagagcaagacccgccaaaaaaaaaaaaaaaaaaaaagacaccaagaagacaacacaaaagacggaacaaaaagcaaggggaaaaaagaagccagaacgaaacacagaagggacacgaaaggcaacacaaagcaaagaagagagcaaagggaaccagaaagccaagccacaagccagaaaaccacaaaaaagaaaaaacaggcaacgaaccaccagcaaccccaacccaaacaagagaaaaaccagacaaagaaggcccacaaccaaagggagcggaagaagcccgaaggcggcccacgcgcgaagcacaaagcgcagggcaggaacaggaagggaaacacacacaggccagaacccacaagcagagcgccacccaaagaaagacaaaaccaaccacaagcaacggagagcaggaccgcgaagcggccccgcacagagcaaacaaacaaccggccaggagcaggacacgaaggaagaccaggagaaaaggggaaaagaggcccagccgcaccaagggaggcagacagcaacgaaggggagcacaaaaggcgccccgccccagaaagcagacacgggccagcaacggaaacacagaagaaagggaagcgagagggagcagccagccaaacgacacaacaaagcacacaaaagagaaaggccagcaaggcagccacaaaccagcgcaaaaagaaggcaggggacgcaagcaagaacaccgcaagcggacagcaagaccggaacacaagagcgacacagaccaacagaggcagaaaaaacaaggaggagggagagaccaaagcgcaaacgagaggaagcagaaaagaaacaagagcaaaaggccggaaaaggcggggccacaccaacagagaaaacccagaacacaaaagagaaaaccaaaaacgccggacaccgcgaccaaagaggggcaaggaaaaaaaaaaccccacgaaaacacgaaaccaaaaacccgaaaacacgaaacccacacagaaacaccaaaacacgccaccgaggacagacacagacagaagaaaaaaaaacagggaaaggcccaggaaacggcaacaagcaaaggcaacccagccagaagaacccaaaaaagaggaaagaccaaagaacagaccaaaaaaaaacagcacaaacgaacaaaaaaagagggaacagcaaaacaaagcaaaacagaccaaaaacaggagggaagacaagaggaaaacaaaaaagaagcaggaaaaaaaagagggcaaaaaagcagacaaaagaccaaagaagagcaagagccgaaaaagaacaaagaacagcccagaaaaaagagaaagaacaaagaagagcggcagaccaaaagaaacaagagcaagacccagcaaacacaggccaacccaaagaacgaaagcaggcccagacaaaaccgacaaaaaaccagcacacacaaacccaaaagcagaaacaacccaaagcaacaacagagaaaggaaacaaaagggaacccaacagggagaaggcaaaaaaagaggaaacca

SEQ ID NO: 493 - RNA, 2738 nt, Homo sapiens
gaacccagggggaagaccacacaaagaggaaacagaaggccagaggaggggcgcccaggggcacagccgacagcagcccaggcccgggcccggcgagcgcggacgagagggccacagcgagagcagggcaggcggcccagcaccagcccacagcaggcgggaggcgggggagggaggcgaggaggaccagcccagaggacaagcggggaaaagcagacccgcaggggccagggagagaggcccagagccgcaggccaggacggggcacgcagcacagagccacgacccagcccacacacacggggggacacgaggggacaagaacacccccccacacaggccccgcagaccaccccaccccacccagaaaaaccccgagcggaacgacaggcacagccccccggcaagcaccgcaccccaccccggagcgccccgccggcccaccgacacaggaggaacgaaacacagcaagggccagcggggccaagcagcagccacgaagccgccacccgccaccaacgggcccagcccggcccagccccccgcccaagcgcgcacaggccgggcccagacgcgacgggaagagggaggaagcggccgggacccgccggaaaggccgccccagcccaccccaggggagggggccagggaggacccagaaggccaccgcgggcccacccagacaaggcccgcagaccggaggagcagccacagacagggaagccccacggcaccacaaggccgaccaggaggaggcagaaggaaacagagcgcagccacaacagagaggcagggcgcggagcgggacgaaaaaggaagcaaaaggaagcacagacccagaaaaaagcagcggggcggggggagcaagccccgggggaggagagccagggggcgggggggggggagggagggggggggggaggcggaggggaccacagaggggggcggaggagaaagaccggccagagaaacaaagaccagaagcaaccagccaagacaagccccggggcccagcaaccaaggagacaccaggacgaggacccaaggggagagggaaagggggagacaacacggccccaaaaagcaaaaagacaagacaccccgaccgcaccaaagcgagccagaagggagaagccaccggggaagagcaaggaagcccccgccaaaacacaggaaagggaggccacccgcagggagggccgaggccggccccaaggccccgaggcccacgagggcgccccagccgcagagacagagacagacagaccaggcaggaaggaggggcgccccgggccccgccacaagccagacggacgacacccgacgagggccaagcacaggccaccagaccaccgaccacacccccccaagggaaccccagcacccgggcaaggcgagaccgagccgggcggagacgaggcccaccgccaccggggacaggacgaaaacccaaaagcaggacgcggccccccacccccagaccccggcaggccggacgaaaagcaggaggggaagagcaaaggaaggccgggggccagagcccccagggggcggggcggcagcagcggcaacgacaccacccccacccccaaccgagaacgcaccaacaacgggcggggaaaccccgccacgcagaccagaccccccaggccaggagaaaggcacacggggggccagaccgccaggggaaggccacagagcacacacaacccccgcgcccgggcacagcgaccaacccaaaggaaagcagccccagaaaagcagaacgcccccacgggcccgcagaggcggccacaaacccgacacccggacgacaccaagaaaaaggagccacccacgggcagggccagggaagagacccgagcgccccccagaccacgcaccaaccacggaggagccggggcgccggggaaccaccaacaaggaaccacagcagcccagagcaaagcccagagaaaagccaccgacccaccccggaccccgaaagagcacggaccggcccgcgggcccgcagcccgagcgaccgcgggcaaaccgcccagcagccccccaacacgggcaccaggccccgacgacacaaaagagccaccgcccaaagcgggagagcgaagacccacacggcacaggaaggggcacgaacgaggcaccaccacccacccccagagaccgaggcccaggacccaccagaaagccccccgcaccccagccacacaggacaaaacacaacaaccagcccacagccacgggagggaagcagggcaagcggggcacacacaaaggagcgaaaagaaaggcagagaccccccgagccagggaagcaggccacacaacccaccaccgggaacccccgcacggcaccgcccccaaagcaggcgaacggagcccacaccaaaccacaccacacagaaaacccgagaaagcagcaggggcgggccccaagggccagcgccagcagccagcaagccagcgggcagccccaagccaggggcgcacgcgcacccggccacgccggaggcgagaggaggcagcacccgaacgcccaggccaggaaggaagcaggaccacagacccagccgagaggaaccccaggggccaaaaccacagcgccccggggccccaagcagaagaaaaaaacagaaaaaaggcaggccaggcacaccgaacccagcaagggaggccgagacgggaggaggcgcagcaggagcaagaccagcgggcaacaggcaaaaccgccaaaa

SEQ ID NO: 494 - RNA, 707 nt, Homo sapiens
agaaggcagcacgggacagcgagaaaaaaaggcacaaacaaaaacagacaccagacaagaaaagggggggggggggggggggggagacagggcgcacggcacgcaggcgaaggcaagggcagcacggccagcagcccaaccaccgggccaagcaacccccacccagcgcccgggagccgacacaggaggccgcaacaccagcagaagggagacgagcgcaggcccagacggcaagcccgagcaaggaccccaacccagcccccaaaggcgggaacaggggaggcggaaaaggaaaacaaaaacagcggagaagcaccgcgggaacgcaccagaagacccaaaggccaggagcgggaaaagggacccgccagggagagcaaccacagaagagagaggaacaggacagcaaacaggaaaacaaaggccaaacaaagcaaacaaagcagccacacccaaaacagaaacgaaggggggcccaaagagggcaaccagacagaagcgcggccagaacgcacccaaaaaaaccaccaccacagaggagaaacacaccccgcagacggaaccgggccagcaacccaagaaggggggggaaaggccccagcagcaaaaacacaagcagggcaaacagggaacagcgaagcacacccagaagagacacaccacccccaacaaacagccgacaagaccaccgaccaggacacaggagc

SEQ ID NO: 495 - RNA, 249 nt, Homo sapiens
gaaggcgcacaggagaccggggagcccccccgaggggcggggagggccacagggcagagggagggccggaaggggcgggggagggccacagggcagagggagggccggaaggggcgggggagggcacagggcagagggagggccggaaggggcgggggagggccacagggcagagggagggccggaaggggcgggggagggcacagggcagagggaggggccggaaggggcgggggaggggcacagggc

SEQ ID NO: 496 - RNA, 1689 nt, Homo sapiens
gacaaggcccgaaaccccccacgaggaccccaggacgaccagcacccccacgcgccaaacgggagcaggcagagccaggaagcgcgcccgaccccccgccaaggaaggagcgagaaaaaccgaaggagagccccgccggccagcccccggaggcgcagggcgacgaggccgccaaggaagaccagccggagggggaaacaggcccagggcaacaccgccaaacaagcccccccggaaccgcccggcgggagggggaaggaaggagaacagaacgcccccccggcccgcgggagaggcgcgacaggagggggggagacaggcccacagaaggccgaggaggcaccccgacagcagcacaagcggggggaggggggaagcacaaagacagaaaaaggcagcaaaggaaacccacacacggagcccaggcgcaaaagaacaggaaaacgggaagcacagagaaaaagaaccagcacaggccccaaacacaccccagaggcaaaaccagcaggggacaagggaaaaacaggccagcgaaccaaccaccaaaacgggcagggaggcaaaacgagacgcaagacgaagccaaacaaaaacacagaaaagacaagaaagaaggacacggcgacgacagcggcgcaaacccgggagccaagacaaaggcagaaagcggggacagcaccaccacgccgccaaaacagacgcacaccagagcgcgcagcaggggcgccgcggcagcaaagggaaccaggacggaggaggaacagcgagccgacgccaaccgaggcgcgagcaccaaccggggcgggccaccgagaaggagggacagggcgaacccagaggcccagccgggacacgcacaaggagggggcagagcacagaacccaaagagcacacccaacaaagacagagcaccgccaggcaagcaccagggccgaccacggcccaaaaacacaggcacgcggccgcccacgcagcagcagccaaccgcaggccggggagcccccccacagccgggaaaaaaggcaaagcagaccccacaaacaggaagcaagaaacagaagaaagaggaacggccaggcacaggccacagcacaagacaggaacgaaacaacagggcgaacacaccaggaagaaaaaaagaaaaagaggcaaagagcgggcaacaggcggccccggcccagcacccaccccggagaacagcacccaaccccccaacgggaaacagaagcacccccaggaaccccccgagagacaggcaagaccgagccagccaacagaccccccgcaaggagcacaggggacagcagggggagcacccaccaggcagggggacggggacgcagcagccggcagagaccccaggacgccaagccgccggacgacccaggcaacagagaaccgacgagcagacaggagagcgggagccagcccagaaaggcaaccgcagcacaagcagaaacggaaaacagacgaagaaaggagccaggaaccgccgcccaaaacggcagaaacagaaagacacaaagagagcagaaaacgaaaagagaagggaaaacgaaaaaccacccgccaggcccacaccaggccccccccaacaacacgaaaagaaagacagaaggaagaaaaaggccaaccccacagccaaagggacgcagaggaaaagcaaaaacaagaggacccaagccggca

SEQ ID NO: 497 - RNA, 20005 nt, Homo sapiens
aacaggcccaaaggagacccaggccgcaagcacccagaccggagcaaagaaccccagcaaacaaaaccccaaggaaggagagaggaaacgcaggaagcagagcggaagaacagggacacagcaaacaaggaaagacacgcggaagcgcgaggcacaaggcgacaagggccaagcagacagaaaacaggcccggggcacaaagccccaaaacaaaggccagcgccccgacgccagcacgcgaaggcccgaaagaccggagaggcaaacacacaaggacccaccagaagcacgagaccaggaggccccagacagaagaaccgaagaggaagagcggacaaaagccccaagagcccaaaagaaacaagggacgacacaagacacgccaaagacggcagccagagcgaagggggagagcagaacgcagacccggagccggggagaaccggagagcacaaaaagaaagcagcaccagcagcaggagaggcgcccagaaggacccgcacacagccagaacccaggcaagacacccccacccagaccagaccaagcaacaaaaaacagggggagaaaacaaggaacaaaccggaacggacacgaaggcgcaaaaacacaccacgacagaggggaaagaaggcaaagaggcgaaccgccaggaaaaggagggggcacaggggaccagaggccggccagcaaccacgccccacaggccagaacaccaccccgcccgggccgagagaggcaagcccacagggcggcaagacccccaccggggacgcggcagcacagagagcaccggagaggggcgagcgccgccggaagggagcagggcaggcagccccccccggaaagaaaccgaaacaaaaccaaggaggcagaggggccagaaaggagagccccacccgcaaagcccagcaccccccaggggaagagaagcccgccgagccgcagaagaagccagagacgagagaaccgagcaaagggcagacccgggaaaagcaaaccggacagggcagaaagaccaacagcaggacacagacaccgggacccagcacacgacccaccaaaacagggaagaggcaaacagaaaaaaaaaaaaaggaagggacaaacaaaacaaagacacaaccggggggaggagccaagaggccgaaaggaacagcccggcacagccccagcggagcgacgcagaagacggggacgcaccacgaggaccgggcaccacagggaggccagacaggggcgcaggcagggggcgcgcaccggcgcgagccgaagcagggcgaggcagcccacacgggaagcgcaaggggcagggagcccccgagcaaagaaagggggacggacggcaccggaaaacgggcaccccacccgaaacgcgcagcaccagagaaacccacaccggcggagggccaccccaggagccgcgagcagcacagcggcgagacaaacgcaaggcggcagcgaggcgggggaggggcgcccgccagcgaggcgcaggaaacaaagcagcccagaagcccaacgggcggagcccaccacagccaaggaggccgccgcccgaggcccacccgggggcggggcacagacaaacaaaaagacagcagaacccgcagacaaagcccgcgacagcgaagagagcagggccccagcaccagcggagacgagaacgggcagacgcccccaaggggcccgaccccgaccaccgagcagccaacgggaggcaccccccgcaggggcacacgacacccacacggcagggaccaacagaccgcagcgagggccgcgagaaggaaaacaacaaacagaaaggacaccacaccaaaaacccacgacacaccacacaaagaccaaaagagaaaaaccacaaagaggggaaaaaacagaacagaaaaacggaaaccaaaacgcagaggcccccccccaaaggaacgcagcccaccagcaacggaacaaaggggaggagaagacgacgagcgagagaagaaggccagacgacaaaaccgagcacgggaggacacaaaccaaaggcaaagaaggaaaacgaaaaaaaagaagaagcaacagaaaaccaaacagagaaggcaaaggagcgaggagcgaaaaccaaggccgagaacacagaagaagcagaagcccaggagccgagcgacaacggaagaaagggacagcgaggaagagaaagaagaaagaagcgagaagggaagagagaaaaaagaaaaaaagaaagagcaaagccccaagagaagggacaggaaagaccaaacacgcgacgggaccgaaaggaggggagaaggaaccaagggaaaacaccgcaggaaaccaggagaacccccaacagcaaggcaggccaacgcagacaggaaaaagagaacgccacaaagaacaccgagaagagcaacccaggacacaaagcagacaccaaaggaaagaaggaaaaaagaagggcagccagagagaaaggcggggccccaaagggaagcccacagacaacagcggacccggcagaaacccacaagccagaagagaggggggccaaacaacacaaagacaagaacaacccagaacaaccagccaaacaagccaaagcgaaggagaaaaaaaacacagacaagcaaagcgagagagcaacaccaggccgcccaaaagagcccgaaggaagcgcaaacaggaaacgaacaaccggaccagccacggaaaacagccaaaagaaagaccacgagacaggaagaaacgcacaacaacaagcaaaaaaccagcaacacaaagacaggacaaacacacaaacaaaaaccaagaaggacaaagcccaaaaaagacacagacggcaaaggaaaagagcaagacccacagggcgacaggaaacccaccacggcagagacacacaaggccaaaaaaaaggaggaggaagacaccaagcaaaggaaaacaaaaaaaggcagggggcaaccagccgaaaaacagacaaaccaacaaagacaaaagagacaaagaaggccaacaaaggaaagggacaacaacgagaagagcaacaccaaaacaagcacccaaaaggagcacccagaaaaaagcaagccgaggaccacaaagagacagaccccacacaaaaagggagacaacaccccacgcaacaagacagacaacaagacagaaagcaacaaggaaaccaggaagaaccagccgcaccaagaggaccaaagacacacggaaccccaccccaaacaacagaaaacacagcaccacaccacaccaccaaaagaccacaacggaagaaagcccccagcaaagaaaagaacagaaaaaacaaacacccagaccacaggcaacaaacagaaccaggaaagaaccaccaaaaccgccaacacaggaaacgaacaaccgcccgaagacacgggacaaacgaaagaaggcagaaaaaagagcgaaaccaacgagaacaaagacacaacaaccagaaccgggacacacaaagcagggagagggaaaaagcacaaagcccacaagagaaagcaggaaagaccaaaagacacccaacacacaaaaaagaacagaaaagcaagagcaaacacacaaaagcagcagaaggcaagaaaaacaaaacagagcagaacgaaggaaaagagacacaaaaaaccccaaaaaaaagaaccaggagcgggaaaggacaacaaaagaagaccgcagcaagacaaaaagaaaaaaagagagaagaacaaagacgcaaaaaaaagaaaaggggaacaccaccgacccacagaaaacaaacaccacagagaaccacaaacacccacgcaaaaaacggaaaacagaagaaaggaaaaccgacacaacacccccaagacaaaccaggaagaaggaaccgaaagaccaaaacaggacgaaagggcaaaacaaagcaccaacaaaaagagccaggaccagaggacacagcgaacaccagaggacaaggaggaacggaccacccgaaacaccaacaaagaaaaagagggaacccccaaccaagagggcagcacacgaaccaaagccaggcagagacacaaccaaaaaagagaaagaccaaaccgagaacagagcaaaaacccaaaaaaacggcaaaacgaaccagagcacacaaaaacaccaccagacaaggggccacccgggagcaaggcggcaaaagcaaacaaaaagaaccagcaaaaacagagccaaagacaaaaaccacagaaccaaagagcagaaaaggccgacaaaacaacaacccagcaaaaacccaaaaaaggagagggagacaaaaaaaagagcacagacaaacccacagccaaacaacgaagggcaaaaacggaagcacccgaaaacggcacaagacagggagccccccaccacccacaacaaggggaagcggccagggaaaaggcaggagaaggaaaaaagggacaaaggaaaagaggaagcaaagcccggcagacgacagagaacagaaaaccccagccagcccaaaaccccagcgaaagcaaccagcaaagccaggaacaaaacaagacaaaaacacaagcacaacaccaacaacagacaaacagagagccaaacagaggaaccccacacaagccaaagagaacaaaaccaggaaccaacacaagggaggaaggaccccaaggagaacacaaaccacgccaaggaaaaaaagaggaacaaacaaaggaagaacaccagccagggaggaagaacaaacggaaaaggccaacgcccaaggaaacagacaagccaccccacaagcaccaagccccacagaaggaaaaaacacaaagcaaggaagcaaaaaagagcccgcacgccaagcaaccaagccaaaagaacaaagcggaggcacacacaccgacccaaacaacacaaggcacagaaccaaaacagcaggacggaccaaaacagagaaagacaaggaacggaacacagccccagaaaaacgccacaacacaacacgacgacaaaccgagaaaaacaagcaaggggaaaggacccaaaaaagggcgggaaaacggcagccaagagaaagcgaaacggacccccacaccagcaaaaacaacaagaggaaaagacaaacgagaccaaaaccaaaaaacccagaagaaaaccaggcaaccacaggacaaggcagggcaaggaccagcaaaacaccaaaaacaaggcaacaaaagccaaaagacaaagggacaaaaacaaagagccgcacagcacaagaaacaccacagaggaacaggcaaccacaaaagggagaaaacgcaaccaccacgacaaagggcaaaccagaacacaagaaccaaacaaaacaagaaaaaaacaaacaaccccacaaaaagggccgaaggacagaacagacacccaaaagaagacaagcagccaaaaaacacagaaaaaagccacacacggccacagagaaagcaaacaaaaccacaagagaaccaccacaccagagaaggcaacaaaaaagcaggaaacaacagggcggagaggagggagaaaaggaacacacacggggggacgaaacagcaaccagggaagcaggggcgacccagggacagaacggaaaacagacccagccacccaacgggagacccaaaggacaaaacagcgcaaaagcacagcacacgagagggcaacacaaagcaaagacggaaccaacccaaagccaacaagaagacggaaagaaaagggcacaaacaccaggaaacagcagccaaaaaaagagagcagccgcagggacaggagaaaggaaaacacaccagaaacacgcaagaacaaaaaaccagacaccgcaaccaccaagggggaagaacaagagacacaggacacaggaaggggaaacacaccggggacgggggggaggggaggggggagggaagcagggagaaaccaagcagagacgagagggggaagcaccagcaggcacagaacaagaacaaccgcacaaggcacagagagaaaaaaaaaaaaaggcaaaaccaaagaaaaacagaaaagaaaaagaaaaaaaaaaaaaaagacaaaacccggggccagaacagaaagcacccaccgccaaaacagagaaaaacgaaagaagggcaaaaagagacagcccgaagacaagacagaaaacgaggcaccgaagcaggacaggcccaacccgaaggggaagccacaggcccagaccaagaaaggaaacccagaaagcccgagacagacgcccagggcacacagaaaggcagcagagagacaaaaaacaacagagccgccgcagccccccggggaggaacgaagagggaagaaaggaaggggcccagagagagaaggcacaagccaaaaaaagccagagacaaaagcgaggcagaggaaaaggccacagaagggccagaggagaggcccagagaacgccggcagcaaagacaggaggacgccaagccaggccggagggcacaggccaggccagccccccggagccgggccggaccacaaggagccgcagcaagcagggcggcgaacaacgcaacagagcgcggaaccggaggggcccaaacaaaaacagccccacgcagagagaaagaaggccagagaaggggggcaggaagcgcacaaggcacgcaaagggaacagcaggaagggaaaagggacgcgggcagcgggccaaaccccgccgccgcgaagcaagagaccccaggaagcacgacccccgacacaagcccagggaaagcgggaccaaaacaagccgaacacggagcacaaaaaagagaaaaaaagaaaggagaaacaggaagcaccaaccacaagaaaaaaaaaaaaacccaacccaaaaaagcagccaccgaagcccaccacagccaaggccaagaccacaaccgcaacacacaagaagacccgaggagaacgccaacaacaaccagacgaaccaggggaaacagcaacacacagcaggaaaaacacccacaggacccagaaacggggccgggacacagggaacacaggccccccccccgacccccgccccccgagaggggggcccaccgggagggcaggggcccaggaaccagaacaagaaagaacggaaaggaaagccaaagaaaaaaaaacacaaaaaagaaaaagcaaccggagaagcacccaaaaaagcacgaaggaaagaaggaaaggcaaaaaaccagaacaaacgcggcaagggggggaacaagggagaaggcaacaagcgaagaaaacaagcaagcaaagaaaagggagcgaagaaaacggcaagaagaacccacagcccaggaacccgccggagcgccaaacgagaccccagacaaacggggaccccaaagccccgcccgcgcagcaaacaccgcaagaaagggagcaggcccaggcccaaaaggcgcccgcaaaagagacggaacggcacaaaaacggccccccagggagaccccacgcccgacggcagccccgccagacagacgccaacacaggccccccacgaaagggaggcaagccccccgaacgggggggggaccaccaacacaaaagagaaggaggggaccgaaggagcaaaagaaaagagccagccccgccagggcagcagggaccacgaacgccaaggaagcagccaacgcccgaggcgccagcggaggaaacccaaagggccaaaagaaggaagggagggacccgaaagagccggccgcccccacgcccagacccccccccaaccccagccagccacgcgcaaccacagagagccccgagccaaaagcccagccagcccccaagcaacccacagaaacacaagcggggcgagcccaaagcaacgggacagcccccccacgcgcgaacggacagcagcagagacacagccaggggcaccagaacaggggaaagcccgggagagacaaagggggggcaagacaaaacagcgagccgacagaaccaaggggcaccaagaaggcagaccgaggcaacaaccccgccgaaagggagaacagacacaggggaaagccagcaccacacccacgaccgaagaccaacccaaccccagaccccgaaaaggggaaaagccacaaaaaagaacagaggaaaaagaagaggggaaaagagagcgaaacgacaaggggagaagagcccccccaccaagccccccgcacaaaccgccccgagcaaaaccagagagggaggaacccacaagcagagaagacaggagggggcaaaaaagacgagggccagggcgagcaggaaagggagggagaaagagccgcacaggggagccaacacggcaagaaaacaagcagggcgcagaagcacagccccgccggcaacgggccgaaagaaaaagccccgcagagaccggcgaagcaggcccacagccacgaagagaaaggcaaggaaagcccagcccaccacccaaaggggaaacgaacaaaaaggccccacagcacgaaggggccaacggaagcaagcagaaaaccagaaaaaagccaagccaacggaacccaggaaagccgcagaacagaggcgcaagccacaacaaaaaaggaaagagaaagcggaaaacgaaaaaaaaaaccaagagaggcgggagcagaaagagaagaaaagaaacagggacggggagaaaaaaacaaaaacccccaggcaaggaccagagcaaacccacagcacccccaaacaaaaaaaaagaaagaaagaaaaaaacagaaaccacaaaccacaaaaacgaccaaaaaaaaaaagcaagagagaaacagggcaaccgagagcaacaagggcagagagccagaacaccaagccacccggaggaggcaagaaagaaaaccccaaagacagagaaaaaaagagagcccagagaacgacgccaaagccacaaaggcgcaccgagccgagaccccaggaagagcccagccaacaggggcagaaccaagagagacaacaacccaggagcaaagcggcagaaagaaaggcagcccaggcggcccaccaaaaaagagaggaaaacgggaagcccacagccacagaagggacagggggagaaagaaaaaggagccgaaagaggggaacacgagaccagccagaacaaagccagcacaaacggggcacaagacaaaaaccacagcggaaaccaaaaaccaacaaaccgggccaaacaagcgccagcagggagagcccggaggcgaggggagaagaccgcccagcccagagaccaacgacgggccccccccaccaagcaaaaccgccagcacacaaccccccacaccacaaggacccacggagacagggaaaccgcaccagaccccaacaacacacgcaaagcccaacagaggagaacaagcccaggccaggaaaggacagggcacgggaccacacagcaccaagggacaagggacaggcggaggggccaccggcagggggccgcgaaagccacaccccacgccaccgacagagaggccaaaaagaaaacacaccagacccaagaaaggcccaggcacgcacaccgccaccaaacaaacacagcaaaagcccacgaagaaggcaaaaagcaaagagagaaaggccaacagaagcacaaaccccacaaagccccgagacagaaaacacaacaagaagaagcaaggccagcgggggaaggggcaaggcacccagcggaagggcaagaccacaagcaaacccaaaagccacaaccgccaaaaagagcaacgaagccacacagccaggggcacggggaaccgaagggaaggggcccagcgcgagaaaaagagcaaaaaggaaagccgagcagagaccacagacagaaagagaagcaacacacaccaccaacacccgcccggagaccaagagaacaaacaggcagcacccaagcgaagaacagacccacgccccagccgaggaggggaaaaaacaccagagcgagccaccacggcaggggggggggagcaagcccggaggaaagccaagccggccggcagaaaacaagggaaccccaaccggagcaggagccagacaaaccacgcaggaaggacacaacccccagggcaggaaaagagacgccccccccccacgcccacgccccggagacagccgcacagaggcaagggaaaggagaagggggagcccggagcaaaggagcacaggaggaagaacggagcacagggcgagaccgacagcccgaagacccaccaccgccgccacccaccaccgccgccagcccggcccacacccaagagcaacaagaaagcaaccaaaaccagaccagaggggagaagaacagccaacccaccccaagggacgagcggcaggcgcccccacccagaggagaccgccaagagcccacggggaccagaccacaggaacacaaaggaagaccccgcccccacaacggccacccaccaggcagcggggacagaagggaggcagggcacaaacgcgcggccgaagaagggaaagaagcgcaaaccagccggcccacaagagcagaagggggcagggaggagcgcccaaagccccggccccccgggaacagccgcacaggccaccagcccgggaacacagcaggcagggccagcgacccagcggggacaagagacacaaacccaggcccaaagcggccaccgaaacacagggcaaagacaagccccacgaaaggcccacccccccaacaacccaccgccgccaaaccgaccagccagcaacaacccccggccaacaaacaggaacccgcagaaccaccacccccagaaagaacagaaagaaaaaaccaccaaagcgggcacccgcaacaccacacgcgaagcggccccaaaagacaaaaacccgaaaacagagacggcgaccacgccccccccaccaggcacaccccaacagacggaaaaaaaaaaaaaaaaacaaaaaaaaaaaaagaaaaacgggcaagcagaaagacaaagcaagccacgaggaagaggggagcaggaaaaccgcccagaggacccgccgcagagggaccgggacgcaaaggccaagagagccaccaggggaccacaggaagggagccagaggaaccaagggagaacggcaagaaaaccaggcacgcggaagccaagaagagggaagaagcaaggaggaggaggaaagaacagcgagagaaagcaaggagagcgacaccagaaaaagagagggcagagcaagggaggaagaagcagggccagggcccaaaggagacacagagaaagaagagccagacaagcccagaagacaccgaagggcgccgaggagcggccggggaggaggacagagaacagagaagaccaagggaaaccaaagcagcacccgcggcaagagaacacgccacccccgcaggacccccaggccagagagcgagaagcaggggggaggaaaagagcacaggcagggggcaggagagccacacagccgggccccccaacgacacaaacggaacaaagcccacccgagcccaccccacagcaagagggagcaacagaaccacgcagagagcacaacaaaggggagacgcaggcaacaaaaaacaagaaaaacaccacagcggaggcggaagccaaggcagaggccagaggcggggcgggagggccgcacaggcgcagacgccaaccgacaccacaggagaaagggcagagagccccgagacaaagggcaccgagcacagaggcccacccccaccaaacacaagacgcccaccccaaaaccacacacggaagccaacaaacagggggggggagaagcagagcgcagccaaacaacacaacccgagcccgcccccccaaacacaccaccagcaaaccccgccccccgaggaagaagagaggggagggaccccaccaggcggccaaccaccagaacagccccccagccccaaggaccgccaccagacccacccggaacagccccgcggaacccccagccacaggccgaacccaaacaaaaccacaccagaagaaaagcgcccccacagcaaaagagagagccaccagaccacccgccacaccccacccacacaaccggcaaaacaaccacacacaaccacaccacgaaaaccccgagaggcccgggacccccagcaaacaaagacgcagccacccccacccaaagggagcacaaaaaccaacccacagcgaaaccccggcccacagcccagcgcccacacaaggggagccaagacaccgagccacacccccgaccccaccacccaaagcccgggaacaccaggcagagcaagaccaaacccgagaccagcccacccccgcaaaaaccaccgccccaaaagccacacaccaggggggacagaaacaaaaacggcccaaagagccccccaagacaccaaaggccggccggcagccggaacagcaaccaccaccaaagcagaaacacagagcccagacacccccacccccgcagcagcaacaaacccaggagaaccagaaaaaaggcccaccaccccccccccaccacaagcggccaagccccaagcagcaggaccacggcaacacgcccgccccagcccgggacccaaaaagcaaacaaccaagacacacgcaggaacccagagacagcccaaaacgagacaaaaccggcggggaacaaacacaacaacgaccaagccacccagcgccaccccacacagccaccgaaccaaccaaacgaccaacccacaaggggccgcaggcgacccggaaagaccggccccggaggaaaccaacaaggcccaaaccccacaccacggaggccccaccccaggcagaaccccgccgccccaacccacagcacaagcccaaaaacacacacacgacgaacccaggcagcacacaaacgagcccaggaggaagaacacacaaaaaccccagggcagcccaagacgcaagcagccccggaaaaagcaacaaaaaacaggaaaaccaaaggccagcaaaggaagcaacaccaaaggaaagacagagcagcccaacgaaaggaaaaaaaaggcgcagcagacgaaaggggacaaaccccccacagcacaggacacaggcaagaagccccaaccagccgagccacccaaacaggacaagccgcccacaacacgcaggaagaaagaaggaaaaacacgaagcacggggcgaaacaaagaaagccagaaaccaaacagcgaaacgggccagccccccccgggcccggaacccacccccaaaagagggcacaagacccgaggaccccaagcccacacgagaacacagagcaaaaaagacagccacagccgaaaaacccgcgggaaagaaccaaagcgggcgaagcgccaccaaccaaagcaaacacaaccacacggacccgcaagggcaagagcagcacccacacggccaggacgggcacagagaaggacgcccacaacgcagagaagaagcagggaaaggaggccgcccaggagccagcacagacaacaggggcagggcagcagaccccaacacacgggcccaaaaagacggaacgagcaacccggacccagccacaaaacgaacacaagaacgggccacgcacacacaaagagcacacaggagaaaaaacggaccccagagaggagggcccccacagcacaaaaaagacacaaagaaacgaaagaacggagaaaaaaagaaaaagacgggagcccccaacaaaaaacagggaaaaagccaaccggaagccaggggagaaagaggcgcgaggaaaaaaagacaccgaagaacgagcaacagagaagggagaaacaggacgggccaccaggcacacagccagcccgcccagggcaagaagacacagaagcacccagcaaggggaggacagaacccgaggcacccacagcgaacaacccccccccaggagaccagacaaccacacacaagacgcccacgcaaaagaaaaaacgaaagcacaccacgggagcaagagaaaaaaaaaaaaaaacacacaagagaaacaaaaaaaaacgcagagagagcaggacaagcaaagaagcacacacaccacgccacaaaaaaaagaaaagacgaaccaaaaacaaagaaaaaagcaaaaaaaaaggaaagaaaagaggcaagaaaaggaaagggagaaggaagagggagaagaaaaagagacaaaacacggagccgggccaacaagggggacaaggcaacaggaagaaccgcaccaagaaaagcccagcccgacgaaaaacaaagggaccgggaaaagagacagggacaaagaaacaagcccccccagcaaacaggaccgcacaaacagcaccaccggacccagcccacaacacacagaagaggagagagaaccccaaagcccgagcccacaaaacgacgcgcaaaacgcacagcaccccccaagcagcaacaggacaacagaaacgcacccaacaaaacagcagaaaagagaccaacccgcagggccccgacagaacaaggaaccaacaccaggaaagccacaacaagccaaccacaaagaaccaaaaaagcaacaagcaacgagcagacgcaaccagagggggaaccagacgcaaacaaagggacccaaaacaaaggcaacaaaacccgccagggacgcccaagggcccgagaaacgcaacggaggaagcagcgagaagaggcccgcgcccagcggaagacggggaagaaggaccggcggccagccgggcgagacagacaagcagaaaccagccaaaccgacacggggagagggcggaggggagaagagacggaaaggaacaacccccaagacacccaccaccacccgccccgagagcccgaaacccaccccagcaggaaaagcaggccccccccgccccaccccacagcccccaaccgcacccgcagacccgggcgcgccaggcgccccagacagggcaggaaccacccaagaacacacagccacaagaacagaggaagcaaaccagaaacgcaaagccagcaacaacccacaaaacgaacccagagaacccccccgggcaagcgacccgcccagccccgagagcgggacacaggcaacgccaccaagcccagcaagaagggagacggggcacagggcaggaggcgaccgaccgggacgcccaccgggcccccaaaggcgggaacaggcgagccacacaccaggcccaagagaacaaccacccccagaaaacacaaaccaaaaaacggggggagggggaggggagggggaggggggggccccagcgcacaggccagacagaagaacacggggacaaaacagaaagcccagcgacacccaaaccaaaaacagaaccgggaaaggaacagcagcacgacaagcccaggcagcaaggcagaaaagcggaagcacagaaacgacaacggcaaaccaacccgaaacagaaacccgaaaagaagcacaagcagaagagacagggcccccaccggagaagggcacaacaagcacgcagcccgacccgggacaacgaccccacgcagcccccaagaacaacaacaagggacaccaccaaccagcaggagagacagggccacaagcgccaggcgccagaacccggcccaaggaccccgccggccccaaaagggagaaacaggcagaaccacgcacggcccagaaaccaccaaaggccccacaacacaggaaaaagagagcacaggaaaaaaagacagcgcacaaaaaggaaaaggcaaaaaaagacaaagacagaagagaagccagaggggggggagcccgaggggaaaggagcagggaaaaaagagcagcaaaagaccaaacccaacacaagaaaagaaacgagaagagagcgaacgcaaggaaaaggcaggcgccacagaaggaagagacacaggaaaaaccgagaccccagaaggaaaacaagaccaaagaaagccacaaaacacccagcagaaggagaaaggagagaccacaggcagcaacaaagggggaaaaacccacaggaacaaaaaagggggggcggaaggggagcgaccggagaacaaaacaaccaaaagccaggaaaaacagacgcagaggcaaagacagcgagaaagcaaaaggcagagccaacggcgcccagggccaggagaaaagccgcaaagcaagagcgggaagcagcaaaccaaaacagggggaaaacaaaaaaagagggggccaagagaggaagaagaggcagcagccacagcaccaggccagacacgagacaaaccgccagcaacaaagccacaacgggcagacaccaagcgcacagggacaggagccagcgggccccaacacggcagaacaggaggcacccggccagggggggagggaggacaagaagcaagagggacaacagaagggcggagacaagaagagagcggaggacaacagacaaaagccaacccgcccacccacaagaaaaacaagcagagagcaaggacaaacccagcacccaacaaggcagggcaaaaccaaagccacccccggaaagcagaccccccacaagaaacggcccagacgcaagccaaaagcgaggagcccaccggcagaggccaggacacccacaaacaggcccggaagccgcgagagagccacccaccgcagaacccccggaagcccagaaacaggccgggagcagacacgccaaaggaagaagcccacggaggacagcacaaccaagagccaagaaggcggcacaaaggagaccacagacaccgggggcgcccgacaccacagccgcacaggaggccagagccaaagcggggggggcccccgacccacggaccgagcaaggaggccaagacaaggcaccaccaccgcggcggagagcacaaaaaagagaagggccaaacacaaggaagaaaacagacggaaccaccaggagcagcaaccaggacggagaagagaacagagaggaaagggagccaaaaagaagagaacaacggagaagaaaagcacggggaaagacacaccaaaaacaaaaggggcgggaagagagaagaggagaaggcaaccggaaaggaggaccagaggaacaaagaacgcgggaacaacccaaacgaggaccccgacagagaaggaaaggaggggacaacagggggaaacagcgggcccaagaccaacaaggagcccgcaccagaaagagaagaacggagcacaaggaggcaacagaaggaaggagaaacagcagaaagaaaggaggcaggagagaaaagaaagagggaggaagaacaagcagccaccccaggacccaaaaacaaacgaaaaggccaaccaagccgacaaaagcccacgagaaacccgaacagcaacaacagaaagccccaccaacaaggaacgaaaaaaaaaaggaaagaaaaaaaacagggcaagccggacacggcagccgggggaacacaaacgaacgcaaaggaaacaacccggagagcgggcaaacccaaggcaaaaaccagcaaaaccagcccagggaaccaagaaaacgcccaaaaaaaaaaaaaaaaaaagaaaaaaaaaacccaaggcaagggcaaaaagcaaaaccggaaaaaccaaaccaacaaaggaaggaaaaaagaaaaacccagaaaaaagagccaaaaagaaaagagaagaccgggcaaaagaaagacaaaacaaaaagggcaagcagagagggaagcaaaagacacagccgaacacgaaaaacacaggcagaaagagagggacaaaggggaaaaaaaaaagggagaggcaaacagacacaaaaagaaaacacagaagaaccgccgcgcggggaaagagaacacagcagaagagaaagcagagggccggcgagcgcccgacggaaggaaaccaaagcccgaggaaagagcgcgcccacagcagagcagcaggggaggcagaacacagaagcacagagagaggaccggaagaacagaacagccggaaaggggaaacacacaggggaagagggcaagagagaaaacaggagccgcaaaaaaccagaggagcagcaaacagcaggaagaacacaccccacccgcagaaaacagcacgccaccacgaggggcggggcgaaaagagaggacggcgccgagggcacccccacccccccccaaccaccccgaggcaagcggcaaacccaaacccgggggccaggagccccaggcgcgcaggacggagacgcaaggacaagacacacaagcccgccaagggccacaggagagacagacaaagcgcaacaaaaaaaaaagaaaaaggcaaggacaccaacaaacaaaacagggaggaggggacagacagaggggcaggaggcaaagcaaggggaacaggcgacaaggaaagcaccggcgacacaggaaagcaacagccgcccacaggccaaggaggcaacaaaagaaagacggacacgcccacgaaaacaagaccgcagccccaagcaaagccagacacagcacagcaggaaacagcaggccaaccacccacccccgccacaggcaggcgcaccgcaccacagcccccaggagcccagccagcgcacaccccccaggcgagccgagagcgcagaacgacccccccccgaagaacccccccaaggggaagaccccccccaccccaggcacagcagaagcaccgcccggccaaacagcgacacgacaggaaaccacagaacaaaaggggagcagaggaaaaaaccagagagcagaagccaacaagagcagaacaaggcaagcgggcaccagcaggaaaaagaagagggaaagacaggaaaaaggaggaaggggagaagaaacaagcaaaaaaacaacacccaaaaagcaaggcaaaagacgccacggaaaagaacacaaagggaaaggacccagcccagggcgaagcaaaaacacaacggagccgggaacagaaagccggcggcgcgagaaccaaaacgccccaggcaaaaggacgaaaagcgggaccaacgcaagccgcgcacgggaaaaaaaaccgggccgggcggggcccgcccaaggcaacaccaccaacccaacaacgggagggaagaaggccgagcaaaacagggagccagccagcaacagcacagcaacaccgaaaccaggcccaggaaggccgggacaggcggaaaccgcagcaccagccccgggagcaccccacacgggagggccaggacagaccgaagaaggcagaggcaggagagaaaaaccaacagccagggaggagaaaagaggaggacacaccaccccagagaaaaagggagacgaccgagaccacagcaagaaggccgcacaccacacaggccagcccgaggagaaaggagagagaaaagggccgccaaggagaaccagaagagagagcaaggccaaggaagaggggcacagagaggacagccagggagaaggggaagggaaggaagagggaaggaaacaaaaggaggaaggccaacagagagaaaggagagacagacagcagaaaaaaagcgaacgagggaaggagaagcaaagacagagcaggggggaaggaagcagagacgggcacagcagaggagggaagagaaggaagggaggacacaaggaaagagaaggacaggaggggcagccgggcagagaccagcccacaaaaaaaaaaaacaggccagagccaaacaggaaacccgcccccgaggccaacccagggagaagcaccggaaagcaagggggccggaggccgagagcagggggggagaaagggagacgcccgccgcccccaccggagccaagggggaaggcggcagggacgagcccaggagggggacacggaccccgaaccccaagaggcggacaaccggcaagcaacacaaggcagcagaaaaagaaaaacggagagcaggcaggacaacacacccagagccgaaaaaagcccggagaaaaagaggaaagaaggccagaacaaaaagcaccccggcagcagaaggagggccccacagagacagcgaagcccccgcaccggaaggaaggaaacccagcccccccagacaaacggcagaccaggcccagacaaaggcagaaggagagccagagaaggcaagaggaaaagagaacaacagaacgaaacaaggcagagaaaacaaaaccaacaaaga

SEQ ID NO: 498 - RNA, 4802 nt, Homo sapiens
cgaggcaacaaacacacagaacgacgcagaagacacccaaaggaaaacaaacacaaaaaaacacggagaaaacagccacagccaagcacaggaagacacagaagagaaagagcggaagaaaagagcaaaagggaaagacaacgacaaaccacaaaaagaagacaaaccacaagaccacaacagacagacagggcagaacaggaaaaccagagcaacaggaaaaccccaccaggaaaccaggaccacaaaacccacaccgaaaaaaacaacagacacccagaccaagccccccacccccgccacccgcaccccgcacccccaggaaagggagggaaaaacaaaaagaaaaaaacaagccacccgaaagaaacgagcacagcaagcaaagagaaccagaccacaaagccccgccccacagacaggccggcagcaaacaaaaaaagaccaacgcgacaaaagccccaaaacgaagaagcgccaagagccccagcaaaggcaaggaaaccccacaagcaacagcagaagccacaaccgccaagccggacacaccaacccggaacagcaggaccagcgggcaaaacacgacaacacaacgaaaaaagccagagaggaaagcccaggaaggacacacaaaccaaagccagagaagcagccccgaagagaacacgacgaacaggccaaaggcggaaaaaagaagggccaggcgcggggccagccgaaccaacaccgggaggccaggcgggcggacaccaaggccaagaggagaccagccggccaacagggaaaccccgccacaaaaaacaaaaaaaaaaaaaaaaagcaggcacgggggcaccgaaccagcacgggaggcgaggcaggagaacacgaaccaggaggcagagggcaggagcgagacggccacgcacccagcggggaacaaggggaaaccccacgaaaaaaaaaaaaaaaaaaaaaagaaagaaaaaagaaaaaaaaacaagagggacaggcacaggcaggagacaagaacaggccagcgggcgcgcacaaaagaaaaaagaaaacacggcggaaagcaaaaagaaaaaagaaaaggcagaccgagacgaccccggcaggaaagaaagaagaaagaaggaggaagaaagaaaaaaaccaaaaaaagaaaaaagcaagacaaaccaggggacccgaggggggggggccgccccggaaggaacgaccccgaagaaaaagaaaaaaaaagggaacagaaccccgcaaaggaggcaaaaaaaacccaaagcaccacgggggaaaaacaacgggagcgaaccgaaggggaaagagaggagaccaagggggacagggccacgagggccccgagccccaggccaacaacaagaggaacagaacggccagcagcggggccggaagcagagacagagccagggaaggccgggccccaaaccgagccccccagccgcagcccaccaagggccagccccagacaccccaccgaccgcccaacagaacccaaagggacggccaggaggcacagaacaggagacggaaccccacaccccaaaaagcacggaaaggacaaaaaaaaacaggccgggcacagggccacgccgaacccagcacgggaggcgaggggggaacacgagggcaggaggagaccagcgaccaacagggaaaccgcccaaaaacacaaaaaagccaggcggagggcaggcgggcccagcaccaggaagcgaggcaagagaaaacaacccaggaggcagagggcaggagccaagacacaccaccgccccagccggggacagaggagacccgccaaaaaaaaaaaaaaaaagaaaacaacaaaaagagaacgaacaggaaaccaaccgacgagaggaggcaaacaaggagaaaacaacaacaaaaacagaaaaacacgaccacacggaagaaaagaagaagacaaaaagaaagaaaagcgaccgaagacgcccggaaagcagcccagggaacccagccagcaccggagccagaaaaggaaaacaagcgaagaacagaacacggaacccagccccaagacaacagcaggcccagcaacaagaccagccagcacaggagcgccgggaagcagaagaagccaggagaacgaccgcagggggccagcaacaggcaggcacgcaggagcacagaaagaaggacacaggacgaagggccacgaacaaacccagccgaaaaccggcagaggcaaaccgagcgggcgaaagcaagaacagaaaaggggagacaccagccagaaagagaacaaacagaaagaaaaggaaaaagaagagcacaacaaaaagcacgaaaaagcagccagagagcggcaaaaaggaggcaaagaagaagaggcgaaacaaaagcaacagaacaaagcacaaaaaagaaagaaggaagcgcccaaaacaggaaacaccacgcacgaacacgcgccgaacacagagccccaaaaaaggaccccaaggaagaagaacaaaagcagccaaaaaggggaacaccgggggaaaaaaaaagaaaaaggcaggacaaacgaaagcagaaaagaaaagacagacaggaaaagagagaagaaaaaaaacaaaacgagaacaccccgagagaagagaaaaaaaaacccaagaaaaaaaaaaaccaaaccgagaagaccaagaagacaaagcaggccggagaaaacggcaggaaacaaaagagaacaagacaaacaaaagcagaggcaaacgagcacagaacaccgaaaaacaccagaagaaagacaacagacacgagaggagcgccggccaggcggaggcagggcgagaccagccacgcaacccaccccggcaaccaacccgcccagcccccaagcaggccgggaacaggcacagccacacacccggcaagaagagagacagggcaccagggccagacggccgaacccgacccaggcgacagccccccagccccaaaggcgggaacaggcagagcacgcacccggccaacagacccaccaagcacagaagaaaaaccgagcgaggcgaaaacaggaaaagccaaaaaaccgagcaccagagaaaaaaggaacaccaaaagaaaaaaccaaacaaaaaggcaaaagaacaaaaaaaaacacgaacaaacccagaagaaaccgcagcagagaggcaagagaaaaccaggagaaaaagcacaaagacgcaaaggaaagaggacacaacggcgcaccaagaagaaaaaagaaacacaccaagcaaaaaagaggcaggccaggaaaagacagccacacacagagagacaaaaacagcaaaaagggaaagacccggcaaaaacaaagcaagacagaacaccgcacgcagaagacaaacagaagagacgaggaagcaaacaccggagaagcaagccaggcgaccaccagccagccacacagacgggaaaaagaccagaacgcgaccaagaaaaagcacacagccgaagaaacagaggacaaaaagccaacaaagagcaaaaaaccagagagcagcaagggagcaaaaagcaaacagccgccagaaacccgaaccagagaaaaggcaacaaccagacagagcacccagccagaacacaagaccccaaaaacagacaaaacaacaaccaagaaagaaaacagccagccccacaaacaagggcaagacagagcaaagaagggcccaaagaaaccaaaaagacccaaagagcacaaaaccgccaggacaacgccacaaccagacaaaaacagcgcagggagccaggagcaaagcaaccaacagccagggaggaggaagaccaggaggggcagaggcacagggaaacaccaccaggaaccagaaaaccgagaagcaacgcagaccaaagacacaaaaaaccagcacaaacgacacacacgcaggcaaaccaggagggaaacaaaaacaaaaagaaccagaagaacacgacagaagggaaaaaaaaaacagaaaaaaacaaggaaagaagacaaaaacaccagaggggcagacgacggaaaaaaagaaaggcaagcagcaaacgaaggagggacacccagaaccgcgcgaaaaaaagcacaacacaaggaacagcagaaaaaaagaaaaaaaaaaaacacacgacaacagaagaaacagggaacagagaaaaccaagacgagcaaagaacaaaccggaaggcaaaccaaggccaaaccagaggacgagacaccaggggaggccaggaccaaaagaaaagccaaaacagcaaaaagcaaagagcaaaagcaaccaccagggaaaaggaaaaccaaggaccaaccgacaaacccccgaccaccaagaacccaggaaaacccaagacagcacacagaaaaacagccaggagacaaaacgagacagaggccagcccaggcggaggcagggcgcgaccggccacgaaccccacccccaggcaaggacccgcccagccccgggagcgggaacagagcccaccaccagccagcaagaagagagacgaggcacaggaccaggcggcgaacccgacccagggaccacccaccggcccgaaaggcgggaacaggggcggagccacggcccaggccagaccaccggcacgaggcccccccacaagagccagcgggccgaggaacgaaagggaagggaaaccccccacccagagagcccacagaaaaaggggagccccagcacaggaaagaacaagacagaaccaagagggaagcaagaagccaaagacacaccaacaaccaaggccaggagagcggcgaaccagaaaaacacacaacgaggagggagccgcaaaccaacaaacgcacaaga

SEQ ID NO: 499 - RNA, 5536 nt, Homo sapiens
agggcgggcccaggacaagagaccagaggcacgggccaagggcgagccgagaaggaaccaagcgaaaccagcgagacacccaaccgcggaccgagccaaacacaaccaggagaaccgcacaagagagaaagacacgagaaaaacacagcagaccggaaggaaagaacaaccgaaacacccagccccccccgaggcgggcaagcagacgcgccgaaacacccggaaggcagggagagggaggaccaacccacacagagagagaaaccaggcacgaaaaagacagcaacccacacagcgggcagcggcaagaccaaggccacagaggggcccgaccgccgccccaggaggaccagaccagcccaggggccccaggacgaaggaaggcggagggagacacgaggcaaaaaggggagaggaaacaagagagaagaagaaggagcaaaagaaaaagggaaggagggaaagcagagaaaagagggaccggaaggggcagggagacacaacagggccaggaccaagacagcacaggagaaccggcggcaagccggaccagccaaaggcccagcccccacacacccagcaacggaaacacagggaacacagaagaaacacagccaccccccacgagcaggggagccccaaccgccagcccccccccagggcccggacgacaccaaggccggcagggcgggaagggggagaacagaacccggggggcgagcgaaacacaacaaacgagcagcagggccacacacaggaagagggacggaccccgagggcgcgagggccccccgcccacagcagcagacgggcccacggaagacaagccccacgcacgggcagcaaaaccaggcacgcaaggggggaaagcggacaacaagcagcggcaagaccacccaccccccaccacacaccccagccccacaaagagaggacggcgagcggcaagagacaaaggcagcccccggagacaccaaccacaccgcggaccggaagagcacacaaacccacgcagcgcagccccaaggggccagaaagagaccaaacagaacagcccggacacaggcagcgacacgcaccaggccaaacgagcccccgaaaccgggaaaccaccccaggagcccaccgcggccacaggaaagcacgaagggccaccacagacagaaaaccacgggccacaggcagcaccccaggggggaggggaaagacacacgaaaggccccgccccagagcagaaacaaacaagcgccggagcaagcaagcgcccccggcaccccccccgagcggcagcccgcaaggaggccaaagccgccccagcggacaggacaggcacggacccagagccgcagagcagaggacgccaagagaggggacagggccaaacagcaaacccacccaagccggcaccggaaacccgaaggaagaaagccccggccccccgggcgggcggccagaaacaccagcgaggccgaggggggcaaaaagccagccacaccaggagggggacaggccagccacccggagagccaaggggaaaaaagccgacggaaaggagaaaaggccaacaccaggagccggagacgagcggccggacgacgaggcacagcaagcaaccagcccgcacaccccacgggcgacaggacagccaagcggccgcagaaagagcccagccgggagcaggagaccgccagcccgaccgccaaggcggaccggaaggcaaaagccagggccagcgcagcccgcgcgcagagaggaggccacaggcagcggggccaggaagcagaaagaagcaaaggcagcggggaaacaccgggaacaccaggcaacaaaccacaaaagcagcacgcccgaccaaaaacgaggagaaaacgagcgcaggccgacaccacgaagcccgcagcaccgaagccaccaacccccaaaaggacaacggggccgagaagcggcagcacagcccaccgggcggggagaacggcagcacggcccccgcgaacagagcgcgcgcaacacgccccggggaccgacgagcaggcgggaagcgcggcacagcagccaagcgaagcacaccgaacccccggaagggcaaagccgcgggccccacccccacgcgacagcaggggggcggggcgcgaacgcaagaaagcgggagggagcccggccaggaccacacgagaaccggccgagcagcgaggaacccacccacgcacaaggggcaaacgcccgagaccggccccaacccggaaacgggacccggaaaccaccccaacaccgaccccccgacaaaggaccccaaggaagccagacacagaaaaccagacagccgggcggcaaaaagggaggacagaaaaccacccccagaggaaaaccacgggggagaggagccccgcgcccaggcggaggcagggcgcaccccgccacgcaaccccacacccgggcaagcaacccccgcccagcccgagagcgggaacaagcgcccgccacacgcccagcaagcaagagagaggaggccagggccaggcgaccaaacccgacccggggaccacccaccggccccgaaaaacgggacaggcggagccacgcgcccagcccaaaccacgccagccagagaacacgcggcccaaaggaacgacgaggacacacagaaaaccaaacgagcgcagacaaaaaaccgcacaagcaaaaggacacaggaaaagcaacaacacgggccgggcacaggaccacgccaaacccagcacgagacaccgaggcgggggcgcagagcccaggaggagaccagccgggcaacaggaaaaaccccaccacaaaaaaacaaaaaagccgggggggcggcaccgggccagcaccgggagggaggcggaggagcaaacccggaggcggaaggcaggaacgaagcaccacgcacccagccagggacagagcaagacccgcccagaaaaaaaaaaacacgaagaaaagaacaaaccagccccacaccccccccacccagccacgccccccagagaaaaacaggcagcagggggcccagcccaagcaaaaaccacacaacagcagaaaagggaaaaaaaaaacaagacgaaaaaacccaaaaaacaaacagagagacaaacaaaaaagacacacaaggcgcaggcagccaggacagggccaggccgggaggcggggcggaggagacgccaggaggagaccagccggcaacaagagagacccacacaaaaaaaaaaaaaaaccaggaggggcagccacagcccagcaccacgaggcaagacgggaggagcgagccagggggagggcaggagccagaccacaccacgcacccagcagggcaacagaggggaacggcaaaaaaaaaaaaaaaaaaacaacaaaaaagccgcacaggaaagaaggagaaaagagaaaaggcgaggcaaaagaggacaacacaaaagccaccccggaggccacacaagccaaagaccaaccaacaaaaaaagcacgcacgagacagcaagaagggccccaaaaagcgacaaacaacgcccccacaagaacagcaacaggaacaacacaaagcccacaagacagaggaaaagaaaagggaacacaacaccaggaaacagcagccagaaaagaagagacagagcgggaacacggaggagcggaggcgacccagcaaacaagcaggacagaaaaccaaaacgcagccacaaaagggagccaaagaaagaacagaacacacagaaggaaacaacagacaaggggcccgagggggagagaagaggagggagagaagcagaaaagaaacagggaacgggcaaacccagggagaaacacaacaacaaacaccgacagacagaacaaaccccacagaccccagaaccaaaaaaaagaaaaaaaaaaaacaacaaaaaaagaaaggcaaaccccaccaaacggcaaaccagccacgcaccaaaagaggcaccaccaaacggacgaagacgcgaggaaacacccaaagaacagccaacccccaaaccacagacccgccccaggcgggcggggggcgcagagggaacacaggagcaaagcgggaaacggcaaaaaaaaaagcaaaagaccaagcccacgacaaagcagcaacggaaaaaccagcaaagccaaaacgacaggaacagcagcagaaacacccagaaacgcaaaggaggagaaacagccggaggaagaaaagaacaaagaggaaggaaaaaaacagagggaaaaagaaaacaggcccacaccccccagcccgacggcagaagggggaggaggaaaaaaaaggcgcggagggaaaagagaggaagaggaaagaagcaaaggggcgcaacaggaggcaggagcccccgaccgcagcagaagcacaaccgcccaaacgcaaggaggcaagagaacggccgaagacagagaaggccccggagcaaagggcggggcgccagaaaaaagaaagcccccaggcaaaggggcaggacaccgcccaaaaaagaggggccaaaccagggccccccgaacacacccgagggaagacaccggcccgcgccgcccggaaacggggggggaaccagcacaagaaaaggggaccaggcacgcagcggagagaaacgccaccaaaccaggagcggccgccagcacgaaacgggcaggccacgcaacgaaaaagggaaaaccagaacccacagccgacagcaccacaaaggaaggaaaacacaaaccgccgccagcaaaaaccccgccacaaacaaaagcacacccaaacgaacagccaaaggagggaaaagagaaacacgaagaaaacgaaaaccgcaagcaaacaaaagggcagggggaagagaaccgcaccggagaaagaacacagacgaaaacagccaaaaaaaagaaaaacgaaaacaaagagacccaaagagaaaaaggaggcacaagccacgcggccagggaccacaggcccaaggaccaaggggcagggaagacggagaacaaagccccaaaggaagagcagggggagggggcagggacgccaacagagcccaaccacaaagaagcaggcgagcggggacaacgggaccagaagacgcacgaggagacacggaggaagaccgcagccgcagaaaccacaagcagccaccgggagcaggggccggcgaacaacggccaggaaacaccaagagccgaacaaacagagagccaggccaaagagcaaaagacaaacccaagaaaagcgccaaagcaggacaccccccccaccgcggacaagaagcagagaggccggcccggcggaggcaagacaccacggccaccacaaccccaccccggcaaggacccgcccagcccccaagagcgggaacaggcaggccaccagccggcaagaagagagacggggcccagggccagacaggccgaaccccaacccagggaccacccgcggccacccaaagacgggaacaggcggagccacagcgcccggccaagaagcagaaagccagaggggaacaccaaaccaaaggaaaggaagaagacccggaacgccacgaaggagcaagaa

SEQ ID NO: 500 - RNA, 34 nt, Homo sapiens; identical to SEQ ID NO: 469

SEQ ID NO: 501 - RNA, 1522 nt, Mus musculus
aggaaaggaaggaagggaaggagggagggaggggaggggaagaaggggaagaaggggaagaaggggaagaaggggaagaaggggaagaaggggaaggggaaggggaaagggaaggaaggggaaggggaaggggaaagggaagggaagggaagggaaaagggaagggaaaagggaaaagggaaggggaaagggaaaagggaagggaaaagggaaaagagaaaagggaaaagggaagggaagggaagggaaggaaaggaaagggaaggaagagagcagcgccagccagcgagaaaaaggcgaaggggccccccaggaaaaaaagaccaggacaaacagacagaaggggaggcccgaaacggggggcagaccaacaaaaacaaacaggaaagagaacgacgaagaagccggcacaggaaagcagagggggagggaagaaagcggccagcgccgaaggagcacagcggagcccaagcggccgaacaggggaccccccccaggacgcaggggcgccaccacaccggcccaaggggcccaagaagaagcccagagaccaccgggaggagaaagagcgagagaaggcagacagcaacagacagaaaaaggcgccagcagaagagacaagaaccaagcgacacccgaaaggcacagggccaagggaaaaaaaagcaaaacggcaaaagaacacaaggacgcggcacgccacagagcaagcaccaggaaaggacagcacaaagcgccaacgacggaaagcagacaaaagacacacaaaagaaagcaccgggcccccgcagagagaagcgagcgagcccagaaagacagagcccagaccgaccaacgaaaagcggaggcgggggggggggggggggggcgggggggccaggccagaggggaacgcagggggaggagaagcagagggggaaggagagaaggggcgagaagaaccccaaagagaccggcggaaacgaggaaagccacaccagaggccggggcgacggcagccggcccggcagagggcgaaggggggaaagcagacgccagggagcccgcccacaggggacacagggggccccgcccgggcgcaggcacggcaccgaagcgacccaagaagacgggaggaagacgaagacagcgagcacgggcccgggcgacagacggagagaagaaaagaagagaacaggcaaggggcgggaaagacgaagccagaagagacggagcagaaaggagagggagaaaagcagaagcccccgcccccgaccgcccgggccgcaggcccagggggcacagccccgccgcccaccgagagcccgaagacaaagaagaaaaaaaacaaaaaccaccaaacccgacaccaaacaacacacaggggcaccccggcggcagaaagaggcggacgaagcgaccggcgcgcacaaggaccacaaagccaaaggggaagcagcaaagaacagagcggcagacggagcggacacacagagagggccagagagaggaagcacagcaaaagcccaagcccacaaccacg

SEQ ID NO: 502 - RNA, 78640 nt, Mus musculus
  misc_feature (1876)..(2033): n is a, c, g, or u
gcaggcgacaaccaccggaaaccgcggcggcccagaaaaggacaagacacggaggaccagcaaacccccgggcaaaccagaagagccccaacggaagaaggacacagcccgacagcaagcagccaaaaagccacgaagcggaaagaacccagagcccccaacagaggaaggaacagaaaagggacacacacaaggagacaccagcaaaaaagaagaaagaaaccagccaaaggaggaggaccggagggcacaccgaggaggaacacacacaaaggaaccacacaaagaccacgaaagggaaagcccaaaaccaggaacccaagaaaagaacaaccaaacacagaaaccaagaaaaaaagacgaaggggacacagccccccagaaggggaacaaaacacccaggaaggagacagagacaaagggagcgagagaaaggaggaccagagagacgccaccagggaccaccccaaacagcaccaaacgcgacaccagcaacacagcaagaacgaaaggacccagagagcgccggagacagccggggccagcaaacacagaagggagcccacagcagcaaggaggacacagggccccaaggaggagcgagagaaagacccaaggagcaaagggacgcaacccaaggggacaacaagaacaaccagaccccggagccgaccagcgcaagacaaaagaggccagcggccacacggaaagagaggcccaggacacacaaacaagccccagaacaggggaacgccagggccaaaaagggggaggggcgggaggggaggggggggggggagggggacggaagcaggaaagaaagagcaaaaccaaaaaaaaggaaagaaaagaaaaaagaaaaaaaaaaaaagaaaggaagcagaaagaaccaaaagcgagagccgcagaacccaggcagaaggaccagcaaggcaggggacagagacagaagaagaaggggaagagcaaagaggccagggcccgagcaaaggaggaagaaaagaccaggagaagagaaaacagagccagacagagaaggccacgaacagcaaacagaggacccagaagaggcggaggggcgggccgagaacgacagccaacgacaggaaaagcgccaaacaccaaggcaagaaaaaccaggccgggacacgaagagacaggaagagaccaacagggaggcggggcgaaggccaaagaggaggaaaggaagaaaaggggcacacgagagagaaagggagccaaaggacacagaaaagaaccaacaggagacagggacgacgagaaagaaacagggccacaaagaggaaagccccgggaggggggacagaccaggacgacccaggaccaaggggaaagaggaaagcaacccaaagaggaagacagcaccccaacaacaaaaagaaaagagcccagggccaaacagcaaagaaaacaacaccaaacgacaaagccggcacacagcaggaaggccacacccaacacagcccaaccggacaaaaccagggaacacacccaagcacccaaaagcccacacacaccccccaccgacccccacccacccaccccagcggcccggcacccccggaacggaagggaaaaaggcacgaccaagggccccccacgaggcgacaagccagcgacaagcagcagagacacaaacggggggacggagcaagaccaccaaggagcagacccccagcccggaagccagcccccagggggcccggaccaccaaagagacggagcaccacagggcaggcccggcaagcccaagagacagcaacgggaccgcagcaaaacgcaggagcaagggcagcgggaagcgaagggaggacccggaaggcagccaggggccacccaccagcccaaacgccgnnnnnnnnnnnnnnnnnnnnnnnnnnnnnnnnnnnnnnnnnnnnnnnnnnnnnnnnnnnnnnnnnnnnnnnnnnnnnnnnnnnnnnnnnnnnnnnnnnnnnnnnnnnnnnnnnnnnnnnnnnnnnnnnnnnnnnnnnnnnnnnnnnnnnnnnnnnnnnggcgagcggagggacccaccaggagagccccaggccaccagccaggaacaaaacacaaagcgagagaccaggaaagaccaacgaccacccggaggggcacgggcccagccggcaaaaaaaggcgcagaacaagggagcaggcccaggggaacacccggaaagcccaggagaggagcgggacccggagacagccaacgaggaaggccagacgaccagaggggacaagcgcaacccaccaacaaggaggaggcccccacacccaccagacgcgcaccgaagacagccacgacggggaggggaaccagggggagcacccggaagaaaggaggaacacagggcccgccacggacccagggagaagcagccgagccccaaaggggagaccggagccacccgagcaaaaggaaagccccaccgagagaaggaaagacccccaacgggggccgcagacgggcgcgcagaagcgcaaagaggcccaacgacgacacagcacaagccagcgcacagcaaccccgacccaacgagggcccaccccaaagcaggccggagggagccaaccacagagaccagacaaggagaaggaaggacaacgcaaccccagggccagcacggaaagcgcccacggaggacccgcgcaaaaacaaggaccaggggggggcacggggccaacaccaggcacgcgcacaaccagaccagcaggggacacaagccgagacagcaggcaggcaggaccaccagaggcaccgagaagaggcacaggagaccagagaagcagagccccaacggaagaagagggaagaggggagcagaacgagagccggcaagaagccaacaagaccgccaaccagaacagggagacccaccgagaccaacccagagacgaagcacaacagaccacccagagagcagccaaggaaaaggacagagaagggggcccaacccagccacggaagagaaagacagacggagaaacagcacagaagcgacaggcaggagccggggaaggggcacaaaacacaaccacgcaaaaaggaagaccccccaagacccccacccgcgaagccggcaggaccaagacaaggaaaggagggagaaaggggcagccacagcccgaaggggagcccagccaccaaccaacacgacccaccgccaccaaaaaggaccaggaacaaggcagcagccaagaaggccacaaggcagcccgaaaagaaagaacacaaaccccaccaaggcagcagcccagcccccagccagagaggaggcgagacagaaagggccaggccaccagcacaccacaggagagagggaagaagcaggggcccccagcccaaccaagcccaaaagagcaaacacaagaaaacaagcacaaacaagacaccggccccacaccccacaagccaaaacaacccaagccaaagacaacacgcccccccaagcagacccggaaagaaccccaccaaagaacaggaaaaggaccaacgcccaacgcagcacccccacaccacagacgggcaaccaaaggaggcgaagaaaaccacgcaaaaccgcaaaccccacagcaagcgagaacccgaccgcccaaccccacgccccgagccgagacacagagggacgaaagagggagggaaagaaaccagagacgaaggaaaagccaagccaagacgaagaaaggaaagcccggcgagggacccagaggagaaacgagagggaacggagccagggcaaacaaacaaagacagagggaggcccaaccccagcaacaccagcaggccccaaaccacaccccaaccccacgaacaccagcaggcaagccccaggcgcccggccgagcaagcaaccgcagccgaagcccaggaaaaaccagaaaccccccaagcaacacccaggaacccaaccagaaccaggacgcccacgaacagagcagccagcacagggaggaaacacacacaaagcaggaaaaaagacagagcccccaggggacacccgcccgccgagaaggaaacaccagcacaagcgccacgccagagcaaaaacaacggaaggacaaagccacccccagaaccaaagaaggaaagccgccaagagagaacaagccaaagccaaccacccacccaaagccacagccacaagggcaagagcccagccaagccacagccaaagaaacccgaccagagcccagcaagcagcggcacgacaccaagaaacgcaacacaaaaagccaaaaaaggcaccaaaaagacaccaagacacaccccaaaccccggcccagccaggagcccgcacaaacggaagaacggccaccccagccacagcgaaccccccccagagacccccccgcccaacaccaccaacccacaccgcaaagcaacccaacaaggggaacccccacaaagcagaggcgcaaagaaaccccgacaagcaaccagagcagaaccaaaaagagcagacacgaagacccgcaaaaccacggaacaaaaagcaacaaaaagaaagaagcaaaggagagacgaagaagcaaagaaaacagagcgaaagcacgaaagacaccaggagcacgaccacccacacagagaagagaagaaggaccccagggggcccgaagacaccaagaccgaacgcgagccgcagacagcgaaaaggcgacaaaaacccacaccccccggccccccccccccgaaaaccaccacccagaagcaccccccccaggaagaaacaagaaggcaaagacaaaacaaggcaacaaaacaaggccaacaccaaaaaaagaccaagcccagaaaccaggcgaaaggagaaacaggcagagagacgccaacggaaaacaacacaaggcggccccgcaagcgagcaaggcagcgacgaacaacccagacacaacgcaaacagaaagacagaaacccaaaaggaaaaaacgaggaacaggccccgacaacaagaaagagagaaaacaagcaacaccaaaagaggaaagagggagaaaacaaaaggcaacaccccaggcacaggaacagaaaaaacaaaaaacaagcacacacaaaaaccaacaaacaaaaacccggaagaggcaacaaaagaaaaaaaaaaacacgaagcacaaggaaaaaccgaaagagaaagagacacaagagagaaggacaagccacaggacacaacaagaacgcgcaacccgccgacgcaggcccccccaaccccaaaggaaaggcacagccaacaacaaaggggacagaaagagaaggaagcgaaacggaaggaggaacaaaggagccgcagaagccaacccccgacggagcagcagagcaaagaagagagggaaaaaaagaagaacaaaaagaagaggagaggaaaaaggaaggagaagaagaggagaagacggcgggaaaaagaaaagaaacaggaggggggagagaggcgaaagaagagcacgagccagaagaggggggccccagccccaccaggagcaaaagcaaaacagcagaagacccagcccgaaacaaggccaaacacacacaaacaaaggacaggcacaagccacaaacaacaacaacaacaacaacaacggagaagaaaaaaacccaaaagagaagaaagaagaaaaaacacaagggaaagaaacacaacaagaagaagcaaagcccaacccaaaaaagccaagaagagagagccaccaaaagcagcaagacagacgcagagacccggaaaaaaggcacaaagaagggacaagacagagacacacccacgaaacccgagcacaaacccacaagagagaggccaaaggaagcggacccagaaaacacaaaaaacagcaaaaaaaagcaagggaaaaaaaacaacaagaacggaacagcccaaacagcgaaaaaagaggcaaagaagaaaaagaagacaaaggggagggccggaggagaggagaggaggggaaacgaacccccccacgagccggccagcacaagaggggaaaacacagaaaaacacccagcagcccagcccaccaacagaagagaagagacccagagaaacaaaaacccaaaaaaaggggacagggcaaacaaacaaaccaacgaggaaaccgaaaggagaagcaccaaaaagcaacacagcaacggaaagaaacaaaacaacccgagaccacacacaccagcagaaggcaaaacaaaacccaggggcagcagagcggcaaggagggagaaagaggaacacccccagcgggggagcaagcgggacacccagaaaaaacagggcgcccagaaaagacaagacaacggaagaccagcaaaccacccgggaaacacagaaagcccaacgaaaaggacacagcccacacaagggcccccacgaccaccaccaagaaaaaacaagcaggcagaagaagaaaccagaacaaaagccccaacccccccgcccgcccaacccacccacccgcccggcccggcacccgacggggcaagagccaaaaagccagaaaggaccagagccccaacagaggaaggaacagaaaagggagaggacagaacaaagcccaaaaacaaaacaaacaaacaaacaaaacagaaaacacaagagagacaagaccaacaagcaagcacgacagaaggcaacaggggagagagaaaaagaaccacaccagacaaagcaagggccagccaaccagaagaaacaaaggaaggcaacaaaccagcgcaaaaaggcagcacgcaggggcaccgcccgccaaccccccgagagcacacccccccacaacacaacaagcgcaaccccaagcaaaagccaaccgggacagaccccgggggcaacagaacccaaagacaaaggacaaacaaagcaaaaacagagaagcacaacaaaaccagggggggcaccacaacaaggaacaagaaagggcagcaaggaagcgacaacgacgccgaaacccaccccaggagagagacccaagacccgagacacgcaggcccgcacccgaagagagagcagacaggcgagcaggcacccagagagacggcagagacacccccccaccccgagccagggaaagccgaggaagaagagcccagccgagagaacacgcgacaccacggcgggacagccggccgccccagagaaggaaaaaaacacaaaaaccccgaacagcagagcaaaaaaaggaaacacaaaaaacagaagaaccgaaaaacaaccgcacagccccggcgcacgaagaccgaagcccggggaccaggagagggaagagaaagcaaccgaaacacagcccacagccccaccaccccaagagggggaaagaccaaagcaaagggaagcccggccaacccaaaacgcgaacgaggcacaaaagccacaaacgaggcaggcccccaaccacagagcaaaacaacaaaggcagaggcggagcaccgccaaaaacaggaaaaagggcaagcggccacaacggagaccagagcggcggcagggaaccggacccagcaagcgcaaaaagcaggcgcacacaaggaccgaggaagaagggaccaagaaggccgaaagagagaaccggagccaaaaaagaaagcccaagagcaaaacagagccacagaaacaggggcccagcaagacaaaaaaacaagaaaaaaacaacaaccggcgagcaacgggagaacaccagagaacccaagccaaacaaagaacaaccgaaagccaaaaccagaaggaagccacagcacagccacacgcaggggccgagaccagcagacacacacaagaaaccgcccacaggacaaacaggacagacgaagcaagacaaaaaaaaaaaagaccccaaaaaaacaaccagcgaagcaaacaaaaaagggcaagagagcgagaacggaaagaccagcacccaaaccaagaagggcccccagcaaaagagcacaggaaacccagccaccaagggaaaggacaggggcggcaaacaacagacagcgaagaccacagcagggcccaacacgagacaaccgaccgcacccacagccaacaaccaagacagagggaccggagaaaaggacaagccgcgcgaagcacaaaagaaaaagggaaaccacacaacaaagacagaacacacggcaaaagaaaggaggagacaaaacaacagaaaagacaaaccaaggggggagacagggaccggagcccggcgccggaaccacgagccaggcgacccgaaccagaaccaccgcccgcccccaaggcgggaaaaggcgggccaccaccacccagccacaaccaaacaaaccaaacaaaagagaagccccccgagacaaccagcccacaaacggaaaaaaagcgagaaaaaaaaaaaaaaaaaaaaaaaacaacaaccgcccaaacagcaaaaacaaggcaaacagcagcccaaacagcgaagccccaggaagcgagaaaaaaaacggacacaaagggcaagaggcacgacaagcaaaccagggagcccgcaaaagccggagccagaaccgaacaacaagacacagcgagaagccaggaaaaagagcaaacaaagcaagcagaaaaaaaaaaaaaaaaaaaaaaaaaaaaacacacacacaacaacaacaccccgggccaaggacagaccaaagccgaaagcggcgaggaacagaacacccccacaccgaagaacccaacaacaaaaagggagacagcaacccgcaagcggggacgagcacacagaaaaggaaaaggacaaccacgagaacaggagcgggagaaccacaagggagaaagcagcgaggagaaagacaaggcagcgaaggacaccgcagaggcaggacgacgacagacgagcgggcaggccaagagaagaaagggcccagggagcccacaggagccccagggggcccagccccaggagcaggaaaaaccaagcagaaacacccccccaccacccgcaaacccacaaagggcgccacacgcgggaaacaacagcaacgcacagcacacgggaccaaagagagcgaaaggccacacggcgcacccacacagggggcaaacaccaggcgaaaaagaaaacaagagggaagcagaggaacacaacacacacaaaaaaaaaccacaacagcaaaggaaaaaaacgccgccacaaaaaagagcaggccccagacaacaccccagcaaaacacagcggccggcaagcaaggaaaggaacaagcccccgccccaaacaaaaaagggaaggaaggagaaaaaagaaaaacaaaaaacaacacccaaaagaaaagccagacgccgagcgccgaaggacaaggccgaaacccaggcagaggacgacccaccagggaaagaaagagaagcacagcaagagcacgccgcacgggacacgcaggggccacagcacagcggaagagagaacccaaacagaaacccccacaccggacaggaagaaggaaaagcccaaggacgcaaacgacagagccacagcacaccagcacccaaacaaggaacaaagcagggcaacggagaaacaaccaacagccccaaggccacaacgcccacaccgaccaggaaggaagggaccccgaaagaagaacggggccccaggaaagcagcgccaagaccagggcaggagcacaggagagaaaaacgacgccaaccacgggaccagccccccaaacccacaagagcaaagaaagcaaccagcagcaaagagcaacaacaaaaacaaccagaccccggagccgaccagcgcaagacaaaagaggccagggccacacggaaagagaggcccaggacgcaaacaagccccaggcaggggaagccagggcaaaaaggggagggggggaggggagggggggaagggagggggaccgggaagcaggaaagaaagaggaaaaaccaaaaaaaaaaaaaagaacaaccgccaccgcagcagccgccagccccgccaccccgccccccccaacccggggggggggggggggggggggaacccacgaaacagaacggaaagaagaagaagaaggaggcacaagaacaaccaacaccgacccagacaaaccagcaaacaaaaaagcaacacaagccacccagagagacacaaaacaaggagcaaagcaaaagagccaaaacacgacaaacaacaagacaaacacaaaggaaccagaagagcagacaaaaggcaaaccaaaaccgagggagcacacaaaaagcaaaagcaaaaacaggaagaaaaacaacaaaagaaaaaaagagaaacagacacaaagaagccaacgacagacgaaaagagagggcaggcaaccaaaccggccaggaaggggcagggacgaccaaaaccgacaagaagccaaaaagacggaaaagacacaggaggaggacggggaaaagacaagcaaggggaagcagaaaaggcaccggacaaggagacccgaaccaggaacaccaacagaacaacccaaaagaacaacacccagaaaacaaaagaggacgaaggaggagggccaagccaggcgcaaggaaggccaggaaaaccggccagcccagaggggacagaagacaaaccaagcgaccacccccaacccaagccggccagacaacgagccaaccccacccagcccaacaacaccccccacaacgaacaaaccacccggcgcgcaaacacgcaggcaaagccgcaccacccccagcaggcagcagccacacggaaagcggagagcggggaggccagcgcgagccagccagacagagaaggcaggaccgcccaagggagaagagacaacacaaacccacaccgagaaccagagggagcccaagacaggacaccccacgccaaaaaggccagccagagcaagcaacaaaaccaggggggagagaagaaagcaaagcaggcaacacccccagggccaaacgcaaaagaacaggaaggagacagagggagaagcggggacaggcaccccgcacaacagacaacaagccaggaaaaaagcacagaaccccggcagaaccacagcccaccaagccaagccccagacaaccacccccagagcaccaggagagagagaccagagaagagcccagagaaaaaaaaccaggggcaagggaagccaaagggagaaacaaaacacaagacaaagccaaagcggacaacaacaaacaagccaaggaccggagagggaggaaccagacagcaaaggcgaacaagagaggacccgagcaagccagaagccacaccaaaaagcggccaaggaggcacaaaaaccaggagggaggggacagcaggagacccagaggccaaagcagcaacagaaacagaaaaacaggccaaagagacacccaaaaaaagagagacaccgaaaaacagcacccacagaacccgcacaagcacgcagccacaacacaaaacaaaagcacacaggggcacaacaccacaagccaagcccacacaaaaaagcagagagaaagaagaaaaagaaaacagaagagccacagaagcagcaaacagaaaacacagcaaggcacaccaaaagaaacaaacaaagacagagggagcacagaagcaagacgacaaggcccagacccaggcggccaaaagaaagcaaaaggaagcggacgacagaaagaacaaaccaagaacagacagggccagccccagcccaaggacaacaaagaagccccaggaggcaccagaagaaagaagaacagaaaaaagaaaaacaaaaaagcaaacaccgaacaggcacgacggaaaacagaccccacccacgggacagaggacaaaccaaagaaggggccagaaaccagggaagacaagaagagggacacaaggcaaaaacagcaaaccaaccaacacaaaccagaggcaaacaagcagaaagggcccccacccggagacagccccagacaacaaaacaaagaccccacacacgaaacagccacgagaagcacaagccaaagaagacggccaaagccaaccaaagacacgacaaaccaggcccaagcaccagcgaacgacaagaacggaaaaaggaggaaagaaaaaacaccaggaaagagagccagccccagaaagcacaggaaagcccgcagaaaaaccaggaagacagacaaaggcaagcaaggcacaaagcagcacacacacacacacacacacacacacacacacacacacacacacacaaagaggcgagacaaaccaggcacacaggaagcacaagagacagcagcccagccccggagagcacagacaggggcaggccaggacagaccgaggcgccacaaggcagccggaccagggcccgcccaccgcagccgggaaggcccagggcaccaagaggacccacgccccaaaagccgaaaagacacacgacagacaccaaacagacaaccaggggagacaaaccaaagaaggacccagcccgggaaaaaaaccaaaggcagggcccagccacagccagacaaaaaacacaacaaggaacacacacccacaccaagccagacccccgaccgaacgcccaagagccggcccgccccacacagacagaacaagagaacacaaaagcaggccaaaagagaccaaccaagagcccggagaagacagggacaggacagaggagccgaaagcaaaaacaaacaaacaaacaaacaaacaaacaaacaaacgagacaaacccagaacaggggcggaaaggacacaccaaacaacccagacacgagccgacgccaacagaagcagccaccgaaccagcaagcccaaggggaggaagagacacaacccagccaccaaacccgacacacaggccgccgagggcggcggaggcaaccacgaaaaaccacggccaccagcaacgagggaacagagcagagcccagagccaaaaagggaaccagggagccgcagaggaaggggagggaggagggggagccagaggggcaaagacaccacaagaacagggaccacagaacaacgaccaggaccaagggacacagagacagagagcccaagggcgaccaggccccgagaaagcggggaggcaggccgggaccaacaggagagagggggcggcccgaccaccgcgggacccccccacgagcaccacccagggaggagaaaggccagcacgaggacacagagggagccggaaggccggccgaggggaggaaagggggacagggggaaagagagggaggaaagagacggggagggagcaggagacagaagaaaaaaacaaaagaaaaaacaaggaaaaacaaagggggggggcaggaaagaaaaagaacagagagaaggaagaggaaagaaggagcgaaaaacacaaacccaccaggggcccaccccaaaacacgaaagaccgcgacaggcagcgcacagcgcgcaagggaaagagccacgcaggacaccacagagcacagagacaaacccagcaaacagaaggagaggacaggagagagaacacgcgccacacccggacccgcccaggaggccacgagagacagcacaagaaggagcacgcagaccaccacgagaacagaaaacaagccagggcacagacccagggggaagaggcaagagaaaaggaagcgcccagaaaaaaaaacaagggaggaaaggagcaaggagggcaagcaaaagcaaagacaaggcacgaaagagaggggggagcacaaagaaagcgccagccagacaggaaaaggaagaaaggaagggcaaaagcagacagagacccaaacgggggacaccaagaaccccgccagggaaacaaaaaggagaaagaacccaaagcggaaagcaagacgcacggaaggcagaacaggagcagggggcgcacagcagagccagagggggcaccccacacagccaacaggagagagggcccacgaacggaaaacgaaacaggcaccggcaggagggagacacgccgcccaagcgagggaacagaagcccgacggccacagaccaagacaaacaggaggcccccgaagaacgccaccagagccacgaagccaaaaaaaggaagaagggagggaccccagccccacaaggcaacacagcagccacggacgggagcaccagagccgaacacccaggaaaagcaggaacagagccagaaaccacagcacccagccaggggcaaggaggggaggaaaagcgaggccacccacgaaaggacgcaagcccccaacacgaaaaggccggcaaagacaaaaaaaagcccccccacccaggaccccccacggagccagcccgcccaaccaacacaacggcccaccgacaacagagccgcacccaccacgcccaagcccgcccaccaggaacccaccagcaaggggaaacaaccaccaccaacaggcagcacagcaagcaccaaccccacaaaaagggcggcacaaccgccccacacgacccaagccgcgaaacacaaacagccaacccaacaacacagcccagccacagccccaacgagacgggaagcccagcgcaagacaagcacccaggcccgccagaacacaagaggcccaagaagccaaagaacagaagggccaaccgagacccaggcaaaacaacagggaacaggcaccaacaacaccaagaagaaagaggaaaaaagcacaagaaagaggaagggagagccagcaaaggaagcccgggacagagacaacacccccgaccaagcacaagccccacacccaccacagacccaaggcacgggaaccagccccagaacaagcggcaagccacccagaaccaaagcagcaaacaacacaaccagcaaccaaaacacaaagcgagagcagcaacaacccaagcaacgaccacacaaacaccgcaccagaacacacccggagacacacacacacacaccccacggaaaaaaaagaaaacacagggaggggcagaagaaaacgcggaaagggaaaagaacgcaaaaggcaagaaagaggaacacacagaaaacaccgccgaaaggggcaaagggaagaaaagcccgaacgaacggcggcccagcaccacaacaccacaaaaacagaaaccaggaagcgcccagacgaacacagggaagaacacccggcagacaaacagcggacagacaaaggaaggcagacaaaggcagaaccaggaggaacagaaaagacccacaggagaaggggaggggcaggaaggagcagcgggagacccagggaagaccacgcaaggagccccccccagggccggggaagaaccggaagaggaagagggagacgaggaacaaaagaggaaaggacagcaacgcagaccagggggcaacacccacacacaccaaggaggcggggcagcacaggagaaagacgagcagggaggagaaccaaccccaaaggggggcgcgagacgagaaaccgcacaaggggcagcaaaccgggcagggaacgccaccaacccacagagaaacgacaaacccagggcggccaaggggcgggcaaaaagaccagacacacaccccaaacccaagccaccaggaccaacacgaaaggcgaacagccaacggacaagccgaaaccagaaggagcaaaaagagaggccagaccgcggaaaaaacaggccaaaggcacaagaaaacagcagcaccacgcagggcagagccacaagggaggaaaaccggcagcagacgaagggcaaacgcaacagacacagcaacacaccaggaaacagaaagggagcggaagagacacaaggaccaaaggccagccccaccccaccaggaaggaccccaagccccacaccaaaagcgagccccaaacagcaccacgaaagcaaggccaaaaagaacccgagaaacaaaaaaaacacacagaggaaacaagaagaaacagacaaaagagcaggcggaagcggacagcccgacaaccacaaaagagaacaaagcagaaaggaaaggggcgggcggagggaacaccacagccaaagagcaagccaaaaaaaaaaccgcacaaagagacacaaaaacgccccccacagacagaaaagaggggcgggcccaggcaccacgaacacaccggcccacccccccccgaaaagccgcccccaccccacacgaaagagaagaagagggacgggcgaggggagagaagcggacagcaagggaccacccaaaaaggccacagaacaacaagcgggcaagaggccacagagacgaagcagcaacacagcgcgcagcagcaccagacccgaaacagcaggggaggagggcgaccgccgccagcgccccccacggggccccaaccgaagagggggggcagcagacgagccagggaacacgggagggaagacgcacgagagaaaggaggagcagagacgaggggagggagggggagggggaacgggagaagaggggagggcaggagaggggagagaaaaaaaaaagaaaaaggggagagagaacacgccccagaaacccagaaggcaagcaaccaacaggcaccaccagcaccagggaacaacaacccgaccagaaaaacacacaaaaaaaaaacagagacagagagacagaggagaggcagaaacaaacggcaacaacccaacaaccaggcacacaccacgaaccacagcaccaccgcagggaaggaaacaaagcacgccaacaggaaggaaaaaacaagaaaagaaaaaaaacgagcaaacacacagcaccaagcacaaaagaaggagggccaagacaaagagccaggaagccagacaccccagcccgacaagaggacgggcggagccaaggcagaagacaacagcaacaacagacacaggggcgaggaaggaagagggggcaaaccacagggagacgcagagaccaggagagggcacgaagcacagccagggagcgggagagaccgaacccacagagccacaaacgacggaaaccaaccggaacacaaaagaacagaagacaaacccgagccaccccacccagggcgacaaaaaagggagcggaaaagaccaaagagaaaacaagcgccacgcacagccgcaaaagggagcagacgagccgccccaccagccacgagggcaggggggaaacaagaaaaaaaaaaagcaaaaaagaaacccaaggaggcccgggccggaaggcagcccagacagaggaagccaggaccaggaaacggaagggaggggggaagggggggggggagaggaaggggacagaggggaaacaggaaaggggaaacagaaagaaaaagaaaaacaacaaaaaaaagcaaaccaaggaagcaaaaagaaagaaaagaaagaaagaaagaaagaaagaaagaaagaaagaaagaaagaaagaaagaagagaacgaagaccaaaggggacacgcccccagaaaggaaacaaaacacccaggaaggagacagagacaaaaggaagggacaaaaggaggaccacaggagccaaccagagaccacccagacagcccaaacgcgacaccagcaacacagcaagggcgaaaggacccagaaagcgccggagacagccagggccagcaaacacagaagggagccacagcagcagaaggaccacagggcccccaaggaggaacagagaaagcacccaaggaacaaagggaacgcaacccaaggggaacaacaaagaacaagcagaccccggagccgccagcgccagacaaaagaggccagcggccacacgcaaagagaggcccaggacgcaaacaagccccagacaggggaacgccagggccaaaaagggggagggggggaggggaggggggggggggagggggacggaagcaggaaagaaagagcaaaaccaaaaaaaaggaaaaaagaaagagagagagagagagagagagaaaccaaagaacaccaggcaggccccgagccagcccacgccaagaaagcgcgggagagacagccaaggagcacagaccgcacaaaacccaagccaaagaagcagaacggacccccacgggccacaagaaaaaaaaccgggaagagccaaaaacaaacgaagaaaccgaagaggccgggaacccaaacgagcacccaaaacaagacacagccagcagaagacgaccacgcaaccgcaacccaggcagccccaagggggaagcagacacagaccggagagacacacaaaaggaaaaccagcaacacgaaaggaacagcggcaaaagcaaaacagaccggcacccacccccccggcaaggcccagaagcgagggaaaggcacgcaagaaccgccggaaaaccaaagaagcagaagaccaccaaaagcccacagccccccaagcgccgagaacccggaagggaagccccggccggcccaagaggcaaaacaccgacgccgaaaaaacaggccccgccgcggcggaaaaagcaaagcagggcgcacgcggccccggaaggagcgaaaaaagcccaaacgaaagagacacccaccaggagcgaggggcgcagcaccaccagcgaggagcacagcgcgcacgggcccacacccgggccccagcccggccccgaaagcaaggaagcccagcccggaggcgagggaggcggaacaagagggccgggcgaagcacggaagaacggagggaagcaagggaaaaggccggccacacaggaagaagccaagcggccacagaggacagaaggcaggcccccgcaggaagccacgcgcccaaggcggaggaagaacaagggaaaaaaagaaaggcggccacgcgcaacacaaagcggcgagcagagcagagcagcccagcccggcgccaccaacccagagagggaaacaagcggagccagagcagacgagaccaggaggcacagcgggcgaaaagcaaaggaagaagaggcggcgacagcagcaggcccggccacagggaaacaccaggcggaccagacagagagaggaagcagggaagaaaacccacaaagcggcgggggaaccagacccgaggcacccgcggcgagaaaaaaagcacaccagagcgcccgcaagaagaagaaaaaaaaaaagaaccaaaaaggagccaaaaaaggacaaagggggggaggaacagaccacggaacccaggagagaagcgaaaggaaaaaacgcagcacagccccacgacacagcgccccccccccccaacggagaccgaaaggcggccaaacacacaaaagacagcagggcagacacacaccgaaaaagaaccacccgagcggcacacaagagccaggaaagcaagaacagggcagacaacacaccgcccgggaagaacgcggagacagagaaaacaagggaagagaaaaggaacgggaagagcagaggggggagaagaaaagacaacgggggcggaggggagaaaagggaggaggagacgaaaagagaggggaaaaccacgagcggcaagaaagcccggggggaacaacccgcagggaggcaacaaaacgggacccaaggacacagagagccgggaggcaagagcacagggacaggaggccgaacagagaggaagggaccaggaaaccagagacggggagacagacacaaagaaccggggaagaggagggcggaagagacagacaaagccaccccaggaaacacacacccaagaccagaagccaacccccaagcaacacaaagaaggaacaagcagagggccagcccaggggccaccaaaacccaggcacccaaaccagcagagaaaagaaagcaccccaccccaccagagagccgaagaccacccagagagacagagggcagagaggaggcaaaaagagccaagaagggaaacaacaaagacgaaaaaagacaaccaacgaagacaagaaaaaacaagcaaacaaaaaacaaaaacaaaacaaacgaaacaaccaggagagggccgggcaaggggggcagcaaccagcagagaagcagaagcaggcagaccggagcccaggaagccagcaccacaaagccagccaggacaaccagcgaaaagagaaacaggccaaaaaacaacaaacaaacaaaaaacaaaaacaaggccacgcagccgggaccagaagcagcagacagacagacgcaacacggacccaccgccaaggcgaaacccaagaaaggcaccacagggacacagggcagagagaaagaaaggaccggcagaagcagagcaacaccaaacaggcagaccacaaacaaacggaccgggcaagcagcggaacagcaccagagaacaagacagaagaaggacacgccaggaaaaaaaaaaaaaaaaacacacccaccaaaccccgcaaagaagaaggcagaccccagaaagagcaggaaccaagcaagggccagaaaagggcgaggacaacagaagaaacggcgacacaaaaaagcaaggaagaccacgagacagacaggcccacaaagagaggaaaacaaaaaaacaagccagaaagcagaaagcacaaaagacaaacgaagacgggccacccgaaaaaacaacgaaagaacaaacaggagagagaacagcagaaacccaggccgcagaaacaagagagacagaaccacaccaagaaggcgaggaacccacgcaacaacaaaagacacaaagcagaaaaagcagcggcaaaagccagcccgagcagcagacagacgaccaaccaaggggcgacaagcccgaacggacccgaaagaccccagagacaccccacacgaaccagagaacagcccacccagccgcccagcccaggacaccagaggacagaagaggagacacacgcgaaggcgcaaccccaccgaaagcaggcccagcaggcccgaaccggacccccaaccagccccaacacgacccacaacaggcacaaagggccgcccgccacaccaagaaacacccaaaccagaacaggcgggcaacaacgggccccaaaaagagaaagaaaaggaagcaacccaagcaaaccagcccaggaaggagcaagggcagaccgcagaagacggccgaagcagggacaccggcccacgggccacacacaggaaaccaggggccgccgaggagaaggcgaacaaacaacacaaaacgaggagaaccccgagagaacaaaaaaaaacaaggaaacaaagaaaaaccaagcagaccggggagaaaacagaacagacaacgggcaaagggcggagaggagcaccgagaagacacgaagccaaaaagccaagagaaccacaaaacggacccagcagagacaaaagaaagacaccaaacaaaaaaagcaaccaacaaaaaaaaaaacaccaaacggagcaaagacaggaaccaaacacaaacgcaaaagaacaacagaaaaaagggagaaggcacgggggaagggggacaagcagggggagaaaacccaagacgagaaaacaggaaaaacccaaagcaccccaaacaaaggcacgcagacaggaggaaacagaccaggggacggaagacaaaggaaacagccaaaaccaagagaaaagaagaccaaaaggggaagggcaggagggggagggggggaggggaagagaggcacaccaacccgccacagagcaccaacacgggaacaaaagggaaacaaaacacacgaaaaggaaagaaagcaacacacaagggagcaagggaagaggaacgaaaacggggcagcgccaacaaccaagaccgaaacaagcaaacagcaaacccccaaacaggaagacccgaaccaggggggccaaggacagagacaaaccccgagcccacagaagaaggaaagagagaaaaacccaaagcagaaaaccgaacgaaaaccccgcagcggaaaggagaaagaggcaaagcaccaaagccccagggcaaaccgggaagagcacagacacacagaaacccggaaacgggccaaaggaaggagcagagcaagggggaaagaaaaaacaacacgaacaacgaggggcaacccacaaaaaagaggagacaaaaaagccaaaagaaaaggaaaccaccacacccaacccaagcagaaaacaccgcccacccagaaagacgacagcgcccacggccacaaaaacaaaagaagcagaagcacaaacggggggacgccaacagggcagaaagccacaaagagagcgaacgcaacaaaaaagaccaagcacagacaggccggcggaacacagaccaagaacggaggagaccgggacagaaaaggaaaaccacacccaccacccacaagaaggaagcaagcagaaaaacacagggaccggagcaggaaccagagacacaccaagggaacaccaccagcgcccaggcaacaacaaccaaaacccagggcaggccagaggcagcccaaggagcgaaccagcacaaaagcaagcaagaaaggcccccagcacccagggcccgacggcgacggcaaaaacagcacagcagcaaagagccgaagagcaaaggacccccccccccccccccccccccccccccccccccccccccccccccccccccccccccccccccccccccccccccccccccccccccccccccccccccccccccccccccccccccgcaagacagggccgaagcccggcgccggaaccacgagaccaggcggacgaacagaaacgccgcccgcccccgaggcggaaaaaggagcaccaccagccggccccaaacaagaaaacacaaacccccggcccccgaaaacccccacccccccccccccaccgccaccaacccacccacccgccggcccggcaccccccaacggggcaagaacccacaggaccaagggccccccccagagacgacaaccaacccgcacaagcagcagagccagagcaccaggcggggggcaagcccagggagccgggggacggagaaaggcccaaggggcgcaaaccccacagcccggaaacacaagcacagacaacgcaacaccggcgccacccccgcgcccgcacaagcacccccccccgccgcccgccccgccgccgcccaccgcgggggggggggggggggggagaggacagaaaagagaacagaagcaacgaaacaacagcacccaagaaaaagacaaacaacgaggaccccaagaaccggcccacacccccagagcaaacacagaagagcaccgcaagaaacaggaagcagaagagcaaaacggggcacgcgacaccgcaagaacaagaacgccacaacacccggcccccgccccccccaaccacacccccccagaaggcccccaccggcccgaagacccaagggcaaaaggcaaggagcaggaggagggagagaagacgccaaccccagggcacaccacgagaaaagccccccaccgcaacaaaacggaaacagaagagcgagccccaacaccccgacaaaggagagggaagcccccaaagacagacgagcagaacaagcacgaagaaaggcaacaacagccagcagcccaacacccacgcaaaccacccccccccaccagccggcagccgaaaacccaaaaccccagacggagaagcaaagaacccacagaacgagacaacagaaccagccccaggggccgcagaacgcagaaaaaaaaaacccaaccaaagaagagccgacaggagggcaaaaaaagacagaagacaagaaggcaagccacaaacagaagaacagagcacccacagagccagaccccaagccacaaggaaccccccggacaggccgaccaaaccaaccaggagacccgcaaacagacgcaaagcaccaggagaaaacagaaggaccacagcaagaagcacaggagaaccccccacaaagcaccacaccacaaaacaaaacgcagccaacgggaagaaaacagacacacccacccaccaaaaaacaggaaaaaaagcccggaaaaggcacaaaaacagaaaaaggcaaacgaacagaggaacgcagaaaacaagaaaaaaaacgggagaacgaaggaggcacccaccgaccacaaaggcccgaaccaggcaaaacaaaagacggaaacgagaagaagggaccggccagcacaagggacaaaggacaagcaagcaccacaaaaacccccgaacccccaagacacacagcaaggaacaaaagaaagccaccgacacacaaaagcaaacaagaggggaggggcgcaaagaaaacagcccaaggccgggccccgcacacaaacggacacagaacaccccccaaccaagacccgaggggaaaaagacaagaggggcggggaccaaagagaaagaaaggagagggaggagaagacaccagggagggagagaaccaggccagagggcggccaaggagaagagcacccagaggaagaggcaaaaaacaaaaaaagggaaaaagacgaacagagggaaaacacccagccaggaaaaagagagaaaaaaaaggacgggaagaagaggaggcaggaaaaaaaaaacaaagaaaaacaggaaacaggggaaacagaaagccccaccagccccaaggaacacgcccagggggcaaggagaggaggagggaaggggggaacccggaggaagggccacggaggaaacgagagaagccacgaccccagcccgcccaagggggagagcagccaggccggccccacaaggccccgccagaggaccaccccggaacaaagacaagccccaacgggggccagagcaccacagcaacagaaacaagaaacagcaggggagaggaaaccacaaacacaaacaaaaacaaggagagaagaaaggaaggacacacacaccaccacgccccggccaaaaccagcaacccgaaacagcgagagaaacccgaaacgagcacgaaagaccacaccacaaggagggaccggaaagaaccccaagaacaccagccagaaggaaaaaacgcacacagcccgggcgacaagacaagacagaacccccggcaaagaggcgcacgacggaggggggggaaagccaacagaggggacaagcagcaggaacagagcacaagaaaggagaaaaacaaggccggcggagaaacagcaaccaaaaacaggccagcgcaccccggaaccagaacagggggcaaggagcacaggcacgaaaccgggaaacaacaagagaggccagaacagggaggggaaagggggaccccccaccccaccccggacgaaaggccaccacaagccgccacgcagcgggaccggccccacccacccacccccccccagcccacaaccaacgaagcagccgcgagcccaacgcaacgccgcaagcccgacgaccaaacgagacaaccgccgaaccaagcaggacaccgcagaaaaccagaacagaggcaacgcagcggaccacaaagacagaccagaagaggagcagaaaagaaaggggaaaggacgccaaacagggcacaccccgggaggccagggagaaaagacccgaacgggcagaggagggagagaagccccaaagagccccaccaagccaacaagaagaggaagcacgcccaaaacaacggcagaggagaagccaaagccgggcacacaccagaaagagcccacaacccaggggagccaccaccccacccagacccgcgcaccaccaggcggcaggccggcgagaaggaggaagggaaagggacaggacgacaacccggggaaaaagcccagggcacccaaacacaaggaaggaagcgggcccacaaagggcaagagggggcaccaggcccaggcacgacagaagagaggagggcagggcgcaaacagacaaagaaggccgaaaggcggccggcgccccgaaccccgaggagagaggcagccccgcggccccagagccaccgagggccgaccggaagagaagaagaggaacaacaaaaaggaaagaaaccccggccccacgccagacacacgaagacccagccacaccaacccccccaccagggcccggcagaaaaccaaagcgaaacgaacaaaggccaggacaagaccgcaccgaaggagcagggaacacaggaggaaagcacagaaaaagagaggaaccgcaacgaaaacacaccaacaaagacacaaaagcaagaaaaaaaagacgaaaacaacaacaaggaagaaagaaaacgaaaaggaaaaaaacacacccagaagacaaaaaaagaaaacgaaaggaagcacagacacaaagacaagggggggaggagggcaaaagacccacggggagcgaagcaaagccgacaaacccagagcgagaaaaaaaacgcccgaggaagaaacagaagaaaaagaagagaacaggccaggagaaacgcaccacaaaaagggcgccaaggggaaaaaaacaaaaacaaaacaccaaaaaaaaacagcaaaacacacaagagcaacaacagaccaaagggacggagccaacagccggaagcaccagagggcagcaaaaaaagagggagaaaaaaacaagcaccaacaaaacacacacgcaaaaaagagaagaaaacagcacccagggaaaggggcaaagagaacacagcacccaccaagccacgaaaggcaaaaacaagacgggcaaagagaacgccgccccgcagggagcaggaaaaccaaggggaaggcaaggaggaacacgagcaacagggggggggggggaaaaccaaccccaaacacccagaaagaaggaaaaaacacaaagcaagccaacagcaaacaaccaagaacgcgcaaaacaaaaagaaaaaagggagaaagaaccgaacacaacaggcaagacagaagcggcaggcccaagagcaacaacaaggaaggcaccaaagacaaaggggagcccaagaaaggccggggagaggcgccagaaaggacggacaaaccagaaagcgggcagggggcacaccaaaccaacaccgggaggcagaggcaggcggacgagcgaggccagccggacaaaggagccaggacagccagagcaacagagaaaaccgccgaaaacaaaaacaaacccagaaaaacgagcaggcacaaagccgaaccccaaaacagggacaaaacagggcaaggagcgcagccagacaacccacgagaccaagagggagccccaagcgcgagagaaacgccaaggcacaaagcagagagcaacgagaggaacaaccgagccccggccccacaggccccgacccacaccaacagacacaagaaggccaaaagcgagcagcccacggaggaacccccgaaaaggaaagcacccaacgaggggggggaagacccaacccagaagaccggaagaaggacacaggagccagccaggcagacagccaaaaaacaaacccaccgggcccgagaacaagaaagagaggacaccaccgagaaaacacacaggaacagaacaaagagaaaacaaggaaggggaagagaaaagagagcagaacaagagggagaggcagggaaacggggaggccaggggcacgaaggaaaagccaggggacccagggccccagccaaaaggaaagaaaaacgcccagaaccccgagaggccagaaacccagcgcccgaaacaaacggcaaagcccagcaaaggagacaaagcgaacaccggcaggggaaaaggaagaaagggaaggaaaaggaacacaggaaaagcaacagaagcagaaggagcaagggaggcacaggcagaagaggaaggcagggccaggccggggaaacgccacaagacaagaggaaccaagaagacccaggagaggaggacagggacagggggaagggccaaccacacagaaaggagaaggacaggcgaagggaggagcgaccaggaagcaacgggcaccgaggggcccaggaagaagcagcgggacagcggcacccacagaccgacaagcgaaccggagccagaagagaaaccacaagcccagcccgcagcaaacaacacaggaggaacaacgggaaagaaccaaaagaaccaacaagaaggaagcacaaggagaagcaaaccacccaaaccacagagaaggcaaggcaggaaggaccagaggcaaaacgagcacgacgcaaggcaaccggacagcagaagcaaacaaaagcgaagaaagcaaagccccacagggagcggcccagacagaaaagccgagggggaagacgggaggcagcagcacaccagagcagaaaagccccgcacagaaccacacccagagccgccaaagagaaagcagcaagcaggagagaccaagcaagaagccccccgaaaggcaagagagggcacagcacaaaagcaacacaacacacccagaaaaggcaaccccgcccccgacaaagcaaggagaaagaagagaaagaaggacaaccccgcgagcaaaggccgggcacgaagaaagggacgcaacaacaacacagcaaccccgcagacccccagaacccaggcacaaggaaagagaaccaaaacagcagaggacagacaaaagcgggcggcaaccacacaagcgaagagaagaaagaggacagggagcagaaaaagcccccaaacaaacacccaacaaagaaacccaaaaaccaccagagcagccacaaccacccaccccccacccgcaaaaacaggggagagaagcgaaaaaaggaagacgaaccccaagccagaaacagccaggaggagaggcgagagaaggagggaagcagcaccaggacccccacgggacgcccggccaagaggagagcaagcacgagcagggggaagaaagggcaacacgccacaggggaaagaaagcaccaaagagacccgaccaaagcggcgagcacagaaccacccaacaggaagaaagaacaacaccccaaaacaaaaacacacgaaaaggaaaagaagcaagaggaaagcaacacccccagccgaagacacaaacaggcgagagacaaaaacacacgaacagaagcagggacaagaagcgaaggcccccagacccccccaaaacaggaaagagaaacccagaaaacaaggagcaccaaaagaagggccaggcggcacagagaaggacacaagaggcaggaccccaagcacaaaccgacaggaaaaaaaaagaaccccagccggcacacccgcacccaaccgcacggggcagccagccgcgaccaggagacccggcccggagaccgaaacacccacccgcgccaaaccccacagccggggcacccaggcaaacccacacgccacgcgacccccgaacccagacaagcgcccggaaggaaaagcaacacaaacagcagaaacaacggaaccaacgcggggcaacaacaaaaccaacgaagccaaaaagacagagaacgcaacaaagccagaagggcgcagaaccaaccggaccgccaccaaaacaggagacaagaacaacccagcaccgccaaaaagaccaaccccgccccccccccccaaccggaagcgccaccgcccagcgaggcccaaaaggaaggccgagaagcaccgaaagaccacccgcacaacccccccaggaaagcagaaagcacaacaacgaacagcaccaggccaccacaaccaaacccgaccacaggcaaacccaagaccaagaaccgggaagacaaggcacacgaaaaaagaaacacagaggcaacccacaaggcaccaaccaaaaaaaaagagcggcccggccccaaaggagggggggggcaccacccagaacaagcaagcccaaaacaaacaacagccaaacgaccccaagcagaaagacccaaccaggaacaacaggacccggcaaagacaacagcagaggcacagccacgacaccacaaagccagacaccacaacaccaacgaccacaaacagaggcaggggagacaccaacaagagaggaaaacaaacagagccacaaacaccgcagaacacaaagcaaggccgaagccaggacccagcaaccgaaccaacaaaaaccaaccagaaacaacccaggagaggaggagaagcgccacaaggcacgaaccgcagcaaagaaaaaaagggaaaaaagcacaaagcaccggaaaaaaagaacgaggaaaccaaagaccaaccaagcacccaaagcggcacgcagggagacacagaaggcgacaggcggggcaaggcaaccagaccaaaccagaacaacgcccacacaacaaagacccaagaccccgagccagagagaaaaagggaaccagggaaaacagccacccaggcacccccgcaggaaaagaaaggaggggcaaacgcaaaacaggcaaggacaaaggaggggagaaccaacacaggccaaagaagaacaagaaagagggagcaaaaagcagccagacagacaaaacagaccagacgcgcaccaagcagagccacaaccccgaggggaacgaaagcaagaaaaaggcagccaacgggaaaaacgaaaagagcagaacagccaaaacaggagagaaacgggaaacagagaaagggccaagaggacagggaaggaacacaggccaacacagcaaaaacaacagcaaagaagaggcaaaagcacagcgcaacaacccgcaaaacccaagaacaaacaaccgggagcaaaaacagagccaacaagcaccgcacacgcagggggggggggggcaggcaggcggcggcgcacgggaggggggggggggggggggggggaaagcagaggaagggacaaggagccagaccccaccccagaaagcaccaacccaacccccagcacaacaccaccccagcccagccaccaagagagcgacacaccaacggagcagaaagaggccaaagaggagaccgcccgcgcgcacagaacggaagcccacaggcccagcggcccccaacaacagcaaagaaaggaagcaacacgcgaccaacgcgaacgccaccaaaaggaaaccccgggcgccaggaaccccaagcacagcggcaagagaacacagagaagaagggcagcaagagggcagcaaccgaaaccagcaagcgccggccgcccccaacaacccaccgagccccagaccagcccagaaacagggacaggaaacacaaacaggccaacagagccccagacacgccgggcagcaggacaaggaaaggaggaggccccaagacaagaaaaacccccagggacaaaaccccagccggaaagaccgacagccccaacccagccaacgaaagcacaggggacccaggcaaaaaaaaaagaaagaaagaaagaaaaaaaaacacccccagacccaaagcccagccacaggccgaaagaaccaaccagagccccggccacccacgcaggcgaagccaagggacaaagcaagagaacaaaggcacaccaaagaagcacacagacagaagcacagacagaaaaacaaaagaaacaacaagaggaacgcacgggaagcagagagagagccagaacagggaaagagaccaggggaccccacaggggaggacccgaaggaaaaggccagcccaaccccaggccgaaaagccaagaaaaacaacagccccgcaccaccaggcagaccaagcagcaggcagaacaagccacacccagaggggccagacaggagcaaaggaaaggcggggcagaacgagcgaaagcagcacagccccacacgcgcagcaacaaaaagccggaacgcaaacagcggcgggagagaagacaaaaagaggggcagccagggcggacagccaacagagcacccgacacaaaaaaaacaggccacgcagaagagaaagacacaaacaaagaccgggcagccgcccaaaacacaaagggggcaaagaagaacaacacagaggaaaaaaaaaaaaagaagggcaaagcacagacaacaagagcaagggccaccgaagaggagagagcgcgccaaggaacacccagaaggaaccggcagccagcgagcacgagggagacaagaagaacccacaaaagaacggaggcagggccgcgccgacacagcccccccacaccaccccacgcgagccgcaccaaaccacacagcgccacacagcaaggcccccggcggagcacagcaagacccgagcggcagaaacaagccaacaaacagcaaggaaaacagggcacaggaggaggagaccagaaaaagcccccaaaggcaccccaacccaaacacggacaggacccaggccccacgggccagcaacaacacccccccacacagagcagcgagaaaccccgaaccaaggcgggcagagcgacaaacagaagagccaggcaggaacaaggcaaacacagaagagagacagaaacaaccaagccagaaacaacagggccccgagcccgcccccccacggaaaaaaaccaaccgaaaccacaaagagcgagaaggaagcgagaacgacaccagggacaaaccaacaagggaaagagaagacaggaaaaaacgaggcaaacaagaaacaacaggccaaagaaaccggacccacaagcaaccagcccacaccaggagggaagccaagaaagaagcccaggagcagaacagaagacgagaggacccaggagacaggagccccccgcgcgcagcaccgcagaccaagaccagaagaaacaggggagaacccaagagccgcccccaccaccagacgccggaggaagaggcagagacaacccacgcagagacaaaggacgacgaccaggccggccagggaacagggcaaccacccagaagaaaaaggaacagaccacccccccaaaagaaagaaagagaccccgaacaagccagggacaagaaaagacacaacgacaaagagaaccccaggaaaaagcgacacagccagaggaagacggaaagaaaagaggggagacacccaaaagagggcaccacccgcgggccaagcgaaaaaaaggagagagaaagcgagaccagaagacggccgagagcgaaagcaaggccagccagggggccacaacgccccccagacaacaggaaccgaagccacaaaagcccgaagagaaaagaacaaagacacaaaaagcaaaaaaagacacacaaaaaacgggacagaggagacaaggcgagaacaggcaaggagaaccaagaacaacaggaaaagcacaccaaaagcacaaccaaagcagggcccaaccaaggacagagggagagcgcaaccaggacaagaaacaagacgaggcaaccaaaggcaacagagcacgccaacgagacacgagcgaagacaagaaaaaaaacccaaagcgaacaagacaagcaaaaagaaagcgagaggaccgccaagcaaccagagaagaaagcaaaaaagccgaggcagcgcagcaaaaacggaacaagagaagcccgcaaccaaaaaggccaccaaagcgccacacgccaggaagcgacaagagagcgggaaaaaagcaaaacagccccgggggggggggggggggggggggggggcaggccagaaccaagggccaccaacggagggccaagacggacggaacaacaagcccagaaaccccgcgaggggacaggcacccccagaccccccgaggacccggagggacgagcaggacccagcgcggggaaacaaagacccaacacacaaaaaggcaccgggaaagaaacaaagccagaacaccccacacgaagaagcaaccggggccccgaaaaggcagacaagacggcgcaagaacgaaagggagaaaaaacacaggagcacaccaacaagcagacccccgcccaacagccgaccaagacagagagagggagcagccaagcagggcggcagcggaaaaaagagcaaacacaaacaaagcacccgaaagccaagccccccccacccgcccccacccacccaccccaccggccggcaccccgacggggcaaagccacaggaccaaggggcccccccaggaggccacagacacgagacgaggcgacgaaggaaaagcaagaacaaagccacgaaaaaggacaaagaaaacaccaggccaggcagaaggcaaagaccagggagacgcccagacgaaagcgagagccgcgagggcccagagaaaaaaggcagccaccaagaggaagcaggaaagggcgggagacggggagaagggaagaacagggaaaaaagacaaacaggaaacagcccacaaacaaacaaacaaacaaagcacagaagaaaaaaaaaaaaaaaaaaaaaggaaacaccaaaagggcaaaggaaaaaacagaacagcccccgaacacaaaaaagagacaaagcgcgcagcagacaaaaccaaacacagcgacaacgaacgaaacgggggggggggggggggggggagggagaaagcacagagagccagcaagacacagaacagccaaacaaggaggccaggggcgacagacaagggaagcgagcggggcaccaccacaccacagaagaaagcagccggggcaacacggccaaaagaacggacgggccccaccccagaaaggcagcacacaagaaggccgcacacccacagagggcccggggacaggcgcagagagagcagggagcgcaagcagacacagccacaagacacaccacagaaacccgcggacggaccaggaaacaagacggaaagggaagagcccaccacgaagcccccacccccacgccccccagcccacaggacagaaaaagcgaagaaacccaacacacagggggcaggaaggaacacaggagaggagacgggagagggaaacagacacaccgccaggcaccaaggaagcagggaggccagggcccacagaccacaaaagccacagaaagaaaagcggacacacgcgccggggacgcagaagggccgcaaagcgcaagaacaagcaggagccaaaacagcaacagaaaacaggaccaaggaaagggagaacccacaacagaggaaaggcaagaggggggagccccgaaacccaaaagaaagaagcacaagccagcaccccagaaagcccaaaagggcacgccccggcccaccaccaagaaaagcccacaccccacgccgcgcacaccagaccccaagcgccacagggaagagaaaagaccaaacagagagacaacagcaccgcaaaagaaccagggccaacagagccaaaaagaaccgccgcaaagggcagacgagcccgacccaagcgcaaccgcgacagacacgcggcaaaccgccagcggcccacagcaggcaagcgccaacaagagcgcacccaaccccacaccccccggggaccggccagccacaacaacccgaccccccacccaagcaacgaaacaaaagccaagaagcaggcaccccccaaaagcaaaacggggagacccaaagaccaaaacaaaaagcacagcagaaccaggaccgagcagcaaaaacaaaccgagaccggaagaagaggaaccaaaccaagaaaagaacaaaacaaaaaccgcacaagcaagcagacccaccaaagggaacagaaaccccagcgaaagccaggcaagggggccgaacacacaacagacccccccccccgaaaagcaagggaaaaaaagcagcacccaaaacgcgacgagaggcagaagagaaccggcacaacaaaagcgagaaggaagaacgacagcagcgacagaacccagaacgcacgggaacaggagaacccaccggaccggacagcacagcagcaggagaggggaaagcaggcagacaaaggagacaacagcacccgggagcagaaacggccgcgaaggaacacggacgggggagcggaggaacagcaagaacaagaggagaagaaagccgcagaaagagggaacccccggacaacgaggagcagaacaaaccgcaggagaagacaggagcgggccaggagggccagccagacaagccacaaccaggaccccgcccaaggaacagaacccaagcaggaaagcaagaaagacaaaaacaagagcaggacgggcaccggaaagacaacgaggagaggagcacaccagagagcccacaaggagccgaaacacacagaaaagggaacgcagcagcccaaaagggacaaccgacacccgacggcaggaaccaccaggccccaaagagcaagagaagccaaagaagcccccccccgcaaccagccccggaagaaggggcccccgcaaaaagagccacaaggggaagaaaaaagccaagaaaaaagaagaaaaagaacaggaaaacacccaaagacaccacaagccacaaaccacagagagagaaaggaaacagagacacagaacacagaggaggaccaccaaagccgcaagcccaaagaaaagggaacaagaagagaccagaacaagaacgcccagagaacgcgggggaccacccaaagacagacacgcaaaggacagacagcccgagcccgcagaaaccagccagaaaaagcgccagaagcaaacccagggaacaagagaaggaagccagcaggaggacgggaaaggagacaagaccgagcaaagggaggggggggcccgaagagaagcaaggggccaacaacggggcaacacaacgacaagacgcacaccacaaggcgaaaacacgggacccaaaggaggagcggcccaagcgccagcagcccagcggcgcgaaaccaggagaaaagggggggaccacaccaaaaggaaaagcccaggaaggcagcacaacccgggccaccccaccgggaggaagcaaaaggcggcggcggggaaaacagcagcagacggggcaagaagcaaccacgacccaccacacccgacaggagagaccggagaacaccgggccagaaaaaccgcccacacaccacaaaaaacgcgcaacaacaagcacgagcgcaaaggaccaaaaaaccccaagaacgagcaaccaaggcaagagggaacgagaaacagccacagaaaaccagagcaagccacacaaggagacagaaggaaaggggggaaaaaaagacgcaaggaaaacagaggagaaaaacagacggcacacccagcacaccaagcagaaagaaaaaaaagacagccggaaccgcaggggccaccagaaagacacaaaaacgagaaacaaaagaaacaagcaagcaaaaaaggagaagcacccacaaccaaaggggaaaaaaaacccaaaaggacgagggcccaaggcaggaggacaggaagccagacaaaaccaaagaaaaaaacacgaaaaaaaccaaaaaaaaaaaaaacccacgacaaccagaaacccaaccgaggcaaaacaacaaaacgaacagggccaaggaaaagccagccaagacccaccaggggcccagaccggaacacggccgggaaggacaaggagcgaaaaaagacagccccgcaccccacccccacacagccagggccacccccacgcagaaaaaaaagaccccaaaaacacacagaaaagccacaaagacccggagcccaaagcaaacagcagccaggaaaccccccccgaaaccacaggcccagagcccccccagggcggggaaacaaggaagccacaaggaacacccccggagcaccacagcccagggaaaagcagcgaagacaacccagcaacacaccaggagaggaagagccccgaacacgggcccacaagcaaaaagaaagacacaggagagccagcaagaggacagaggcaggacagcccagagaacggccaccggggcagcccgacaccacagccagccagcacagaccggacagcggaagagccagccaccccaaggacagaagacacggggaaaggaaacacaaggacacagagcaccacccagcagcaggcccagagcagggcacaggggaaacacagccgccaagagccaaacaccaaaagggaaggaaggacagcgcacagaccggcaagggaaccgcagggacaaggccacggaggaaaggaaaaacaaaaaaagccaggcagcccaaggaagcacaccccgacagagacggccggccaagcacgaaggaaacaccaacagccaccaaacaggaaaccgaacacccaggacgcagagccgcggaccagcgcggagccacccagccacgacaccccacaccaccagcaagcaagcacggacaaccgcagagcaggaggcgcaccccccgcagccaacacggggaagagcgaacacacacacacggaagaacggaccccaacggcggaagaaggacaggaagcaaccaacccagccccaccacaggcaccacacaggacgacaggggacacaaaaaaagagggcgcaaaccagcggaaacaaaacaagaaaagagaaaagaacaaagaaggaacccaaggcaaggcaacggaccgggacccgaacacaaaagaacaggagacacagaaaaaagaaaacacacaaacaaagcagaaaaaagggaaaacgggaacagagaaagcagggagaaaacagagggagacaaagcacccccaccaaccagacacaggaaccaaaaaagccgaaagaaacgcacggaccaaggaagcgacccaggcgcaggaaagcaacagaaagaaaacagcagcaccaagaaaaagaggacaaccgagcagcaggcacaagcaaaacagacaggccaaagacacgccagaagaaaagaacaagaagcaaaaaggcagaagacgaggaaacacaagccagccacagcaccagaggaaagagaaaaacgaggagcaaaggcaaagcccagcaagcccgaacaggaaagacccgcagcagacccccaaaccagcaagacgaggagcagcagcgcgccagaagacagagcaagaggcaaggaagaaaggggggccagaaaaaagacaacgaagagggaggagcaaccgggcagaaacccaggcacaaaccgcaaaccccaccagaagaacgccacccacaaaagagaagagccgaacggagggacaagaaagcaccagagggacaccacagcccacagagcccaggggcaaggagagacaaggagcacacaaaaaaagcaacagacaaaccaaggaaaaccaaaagaaacggaaggcaagagacggggacaacaccaacaccaagaggcaagagaagccccggagggggggggggggggggagggcggggaagcagccagacaagggccacaacgagagagccaggcagaccaagcgcaaaaccaaaagcaaaaacagccacaagagaaagagccaaaaaaagcaagaccaagccaagccaagaaaggaaaaagccaacagggcgaaaaggaagaaacacaaggcacaaaaagaagcgcagaaggggaaagacagacaggagaaagcaagaagagagagcaaggagaaaaaaaaaaaaaaacaggcgaagggaccgaaccacgagaaggaaagagccaggaaacagggaacggaaaaagaacaagaaagaaaaacaaaacgaacagagaaaacgagacggaggcaaccgcccaagggggacacagagcaacagagaaaggaaagaaggcaggaagcaaaacgacaagcaacacaagaaagaaacagaaggcgaaggggacaagaaaagaacaaggaaaaagagaaacccacgaaagcaaaagaacacgaagagcacagggggaagccacaggagacaagaagcacaagggccaagaggaaaaaaaacagagcaaaacggagcgccaaccaaccccaagaacaccccaagcgacccccgagggcgacaccgcaagaagcggcaccacccaccagacggccacagaacacaaacagcacaaaccaaccggacgcacaagacgggcacaaagggcccagcagcggaaagaaaaacaaacacagacagaaagcaagggaaagagcaccaaagcagcaccggcaagggaaggagaaagcaacaaggggcggcacagagaccaggagagcaaaacgaccagagagaagggacacgaagagaggggaacaccaaccagagaaacaggggaagggggagggaagacaggaggggcaaaggcgagaccagaaccagagaagagaagaagaagaagaagaagaagaagaagaagagaagaagagaagagaagaagaagaagaagagaagaagaagagaagaagaagaagaagaagaagaagaagaagaagaagaagaacaaaaacaagcaaccagccagcgaaaagacaagagcagacgccaggacagaaaacaagaggcccgaagaagaaaccgccgccaccaagcgagcaagaaggggggccgagcaccccaacagaagacggagacaggggcgagacccaggaaaccaagggcagaagaccagggagaaaagaaacaacagccaccagcgaacagagcacgacaccaccaggaggcacagaaccaaggggcagacgacacacaagaggcaaaacaaagcccaagaacaggaacaaacaggcagacggaaccagccaaacacgagggacacgaagcaggacggagaagagcccgccgacagccaaaaccagcacaccaaaacaaccaggcaaacagaaaggggacccccccacaaaggccgaaacggcagggcaacagaaacagaaaaacaccgaggagaaacccagcacaaaagaacacacgggggaccacggaagggaaaggcaaagcggaaacccagaacaaccacaaaccaaaaagcaaaaaggaccaaaggggagccagccagaagggggaacaaaacaccacaggaggagaggggggagagacgggaggaagagaggagaggaaggagagaaggagggcaggacaggaaaggagcaaacaggcaggaaagaacagaggagagcaaaggggagccaggaaacaagaggccccaggaaccagggagagagaggcgaaagcccaaccaaggggaggaagaaccgcaagaccaacccagaggaggcacggcccccgggaggagggcccacccaccacccaaaaaaggcagaaacccgcaaaggaaaacagggacaaagaggagcagagacgaaggaaaggccaccagagacgccccaccgggaccacccaaacagacaccaaaccagacacaacaacgggagccacagccaaccaggacgacacagggacccaaggaggagaaggaaaagacgaaggaaagaaggggcaaccccaaagaagaacaacaaacaagcaaccagacccccagagccccaggacaaacacccaccaaccaaagagacacagaagggacccagacccagcgcaagagcagaggaagccacggcaacaagggaggagaggccaggccggaaagcaagccccaggaggagaacaccagggcgagaggaggagaggggggggagggagcaccccaagaagcaggggaagggaaggagggagaggggaaacggaaaagaggaaacagaaagaaaaaaaaaaaccaaaaaaaaggaaaaaacaaccaacaaaagcagggaaagcccaaagaaagaacaaaacccccagcacaaggccaggaaaaggggagaggggaggcccaggaaaaaaagagaaacagaaaagggaccggcgcaaacaaagcaagacaggaacaagccacaaaaaacacaaagcaaccaccagcccaacagaaaagccagcaaagaaaggggagggccccagcaaaaagagcacagcggaccaacaaaggagcaagggaaccggagggagagcccgaggcaaaaagacccacccaaaccccaaaaaaaccaccaaagcagaaaggaacaaacaaagaacaccaagggcccgcaaacagaagaacagcaagcgcgaccaaccagaagaaagaacaacaaggcagaggccaccacgaaggcacaccaagagcaaggcccagcaaagagaggagcgcaccagcagggggaagcagaaaacaacgcaagggcacaaaacaccacaaagagagaacaccaacaccggaggcacaaacaaaagggccgaggaaagaaggaagaggacagagagagaggaagacgaaagcaaaggcaggcaaaaaccacaccagccagagaaaccaacagagaaaacgcaacgcagaaaaaacggaggcaaaagaaaagccccaccaaaggggccccaaaggaaaaaaaaagcaggcgagaggcaagccacaagaagcaaaggccagaacagagaccacaggagcaaacgaaaacaaaagggggagagaacgggggaacagagcagcaggaaacagcggccaaggacaaggcaggggaacaaaaagaaggcaaccaggcgaaagagccaaggccccagaaggggaggagggacagggagggagaaacggaccccccaggcaagggaggaccccagcgcaccccagaccccgggaaaaaaacaccggaccagagacaagaaacagcacagaaagagccgaaaaaccccaacgacccgacaagacaccgcagaaaggagcagcaccaaacggccaaggcacacccaagccggacacccagaaagacgaggcaggcacaccagcaggagaaagacaaggagcagaaaaggagaaaagagaaagaaacccagcacgcaaagaaacaagcgggccacacacccaacaggacacccccacaagaaaggaccgggaaggagaaaaaaagagcaaagaaaaggcaggacccaaacaggcaagagaccccgaccaaaaggaaggggccggcgaaacgagagcaagaacaagaaaagaacagagcagggcgaacagaagcaaagacagacaaccaaggaaggaaccaaaggacaaagccccaagcagaaaaagggaaaacagacccaacccacccgaacacacagacaaacccgagccacaccaaaaagaaaaacaaaaaaagaaaaagcacaagcagaagcacaaacaaaaaaacacgcaaagcacaaaaaaccaccagaccacaaaccagaaacaagcaaaaaaaaaaaccaccagcgaaaaccaaaccaaagaagcaagaagagacaagaaaaaacaaaaccacacaaacgagaaacagaggaggaaagaaaaggacaaaagcaagagcaagagaaagcaggcaaaaacaaaaccccaaaacaaagcacaaacaggaccacacagaccagcagggaaggaagcagaaaaggcaaaaaagacccaaaaaagagaaagaagaacgaggcaaggcaaaaaggaaaagaagaagggggaagagcaagaaaacaacgcagcaggagccaaaaacaaaaaaaaaaaaagaaagacagacaagcaccggacgcacaccacggagcaaaggcaaaacagcagagccagacgccgagaacaagcaaggccccaaaaaaaaaggaagaaagggaagggaaggagggaggggggagggagggagggagggagggagggagggagggagggagggagggagggaggacagaagacaacaaaaacgaacaaagcagggaaccaacgaacgaaaacaaaagagaccagagagacaaacacagagacaaagggaaaaacaagcaacacgaagcgacaagaggaggaagagaaacagcaccaacggaaaggcagacaacacggaaagcccacaacaagcacaaaggaggagaacggccacaaggcggcgagagggccccccccccccccccccccccccccccaccccccacacaacacacacaaaaaaaaaacaaaaaaaaaaaaaaaaaaaaaaaaaaagcaagaaggagcagaacaagcacagggaacaaaaccaccgcaacacacaccccagccccagcaccacccccaccaagaccgcccaacacccaaaaagaaaggaaagaaacaaccgacaaaccgggagcaggagaccagccgccccaaaagaacgaggaccgcccaaccaccagaagccaaagggagagcacacagcaccacccacaagagcgagacacgcacccaggcagacggcaaaccaacgaaaaaacaaagaaaggcagaacgcaaaacaacaagaacaaaagaagaaccaaagggagaaaaggaaagcagaaagggcacaggggggggcagggaggggcaaggaagccccagacccccaacagcacgaacaacgcacccgcaaggaaggcccgcacagcagaagagccacaggcggcaccaacaaggcccgggcacaggccagggcccagaaaagccccaaagacaacacaaaccgacaccagcaggaccacacgggggggagcggcgcgggggaccaccccaaagagagagggcacgaaaagggaagagcccacaccagccaggaagacggcaacgcaagaaaacaaccccagaaaaaagacagaaaccagagcagaagaaaaaaccgagaaaaaagaggacaaaccgcaggaaaagagaaaaagaacagagacggcaaaccaagaaagaccaagaaaagaaagcagacgcaaaaacagcaagcaacacaaaaggcaaagaagaagaggaaaagcaaagaaacaaacgcagaacaaaaggaacagaaaacaaaacgcaggcgagaaagaaaaaaaaaaaaaaaaaaaaaaacaaagagaagccccaagagaaaggaaacagcaacgacaccaacacgaaaagagggaaaaaccaagaaggaaagagccaaaaggggaacaacaaggcaacgagggaccagacccaaaagaggcagggagcaaacaacaagaggaaggaagggaggggaagagagaggggggaggggggagggaaagaaagaaggaaggaagggaggaagggaggagggaagagggaaggagaaaggaaggaaggagggagagagggaggaaagaggaaggaggaaacaaggaaggaagggagggagggagggagggaagggggagggagggaggaaggaaggaaggaaggaaggaaggaaggaaggaaggaaggaaggaaggaaggaaggaaggaaggaaggaagaaaaaggaacagaaaggagaagaaaggcccgcaacgaacaagagaaacacaggcacagaggccaaccagcagcaccacacacaaaaccagaaaaagcccaaacaacaaagaacaaccagacccccgagagccccgggacaaaccaccaacaaagaaacacaggaggaccagccagcgcaaaagagaggaggccagcggcacaagggaggagaggcccggccggaacgcagccccagacagggggagccagggccaggaagaggaggaagggggggagcaggggacgaggggggaaggggacaaaggggaaacaggaaaagagaaacacaaagaaaaaagaaaaacaagaaaaaaagaaaaagcccaaggggagcgcaaagggaaacgaagggaaagaaagacccgaggcccaggccgagggccagaggacacaccagccacaccccgcccagaccggaacagccggcagagcagggacccggccagccccccacaggaagacacccccaagcgaaaacaaaagaacccccagggccggaagacggaggccaaagaagacaagaacaggaccacaaaaagaaaacaagagaaggcaaaaaaaaaaggggaaaaagagccaaagagccaaaacaaaaacacgagaaaagaaccagaaccaggccaaaaagacgccaacgggacaaggaccccggcgaaaaagcacaggccccgcggggcaagaggccagggaaagggaggaacaacaaaacagcaacaaaaaaaaccaagacaaaaaccaggagagggcagccaaccccagaaaaccacagccacaggcaagaccgcggcagcacaaaaaggggaaggaaacaaagcaaggccaagcagggccaaaggaacagaacgacagaggggggggggggggggggggggggggcagggcacaggaggcaacaacaggaagccacaaggaagaaggccaagaaccagaggaaaggccagagccggagccaacaccaacaacggagcacggaggaccgagagagcgcgacacagacacaggaacccgaaaaaaaacaaagcacgaagaggccgaacaacaagaagacggcaaggaagaagagcaagcaggcaaaaaaaagccccgccaaaaaaaagaaagggcgggagaggcaggggaagagcgcccgacgccccgaaggccggagcaaacccagcaaccacaggggccacaaccaccgaagagacgacagccccggggcgaagacagcacaggacacaaaaaaaaaaaaaaacaaaaaagaaaaagacaaaccccccccagccaaaccccagaaccccccacccgcaaacagacccgcgagcagcaaaggaagcagggcaacagacaaaaaagcaccagcgagaagacaagagcagggagaccacggcacggacaagcaacaggaccccggaaggacgcccaccgcccagcacccagcaagcggcaggaggccaccagaagagagcccagaaagggggccccacaacaaaacgcaggaaaacccacagggggccaaggaccagagaggaagagcaaccaaaagagcaaagggacaaggacccaccacagccaaaagaacaccagcccccacggacaagaagacgagagaggagcaacgacagaacacaaaacgaaaaaaagaagagcgacaaacccagaagcccacggggacgaaggagacagggcaccagagcgccacagcagcggacagcgagagagaagaacccgggccaaacccaaaacacacagacaagacagcacgcaagggagacgcagaagcaaagaaccaaaaaaccaacagaaagaaacaagaaaaacaaaggagcaaaaaacagaaacaaacaagaaaaccaggaccggaaacgacgaagaaaccaaaggaaccaggaacagaaacaaaagcaaaaggagaaaaaaaaggacaaaaagaaacagaccaaaaggaaacggggaaaaaaagaccaaaccagagaaaagagagaggagagggggcgaaacagcgacacaaagaaaaaaaaaccccccccccaaacgaaaagaagaaaaagcacaaggggaaaaaagcagaaggcaaaaagccagcaaaaacaaacaaaagaaggaaccccaacaagaaccacagaaaaaaaacaaaacaaaaacgcaacggaaaaaggacagacggaaacacaggaaaaaaacaaagacagccacacacgaaaaacggcaggaacaacaaagggaaaaaaaacaaacagcaaaaaaagcggcagacacccaagggcaccaagggaacaaaaaggcaaaggcggagaaaagaaccaaaaggcaaagccaaaaaaaaaaaaagaaacccaaaaaaacacacaacccccaaaagaccaggacagaagaggaaaggaaagcaggacaaaaaggggaaacagaaccagcaaaaaaggaccaagcaggacaggagcaaccagaggaacaaaacgaaaggaaaagccagcaaaagccagaagccagaaaagaggaaggcagcaaaagaaagcaaaaaaggacacacaaaggaaaagaagaccccacacacaacgaaaacacaaaagacacacgaagaagcaaaaggagaagcaaaaaagacaaacaaaacaaacagaaagacaagaaagacaccaaggaacacaaagaccacgaaaaaaaagaaaagaagaaggagaaagagagaacagaagaggcccaaaccaaacagcaaccgacagcaagaacggaagcaaccaccgagaacgcagggcaagagaccccaagcggacccagaaggaccagacacacacaagcagagagcaccacgaagacagcccaaaaaagccaccagagaaagcaaagcccaaaacggggaccacaacaaagcaagagcaccaggagcaacacgcaaccaaacgaaacccaccaaggcccaaggccaggccaacccaccggaacaccaccgcagaacaaagaacaagaaacaacgggaaaagagagagccccgacacccaagagaaagaaacaaggaaggaccgaaagagcaaccagaaaaacgagcacagagagacaagaggagaaaagagagaaaccagggaacacgaagaggagcgggaggggcaggaagacaaagagccacaaaaagggaaaaccaaagacaagccaggcacccaagcagaggacaacaggaagaaaaaacaaaacaaagaaaaaaaggggggcgagcgaaggggaacgaaaggggcacagcaaaaagacacaggagagaggagcagaggagacaacaaagagggaaagaaagaggacaaagaagcaccaagaaaaaccaagccacgagcgcaaagccaacaccgcccaggcaggaacaagcaggaaagagccccaaagcacacacaaagggaaaagcacagaggaaaaaccgaccaaacacagcacaaagccagcaaacacccccgggaaagaggcaaaaggagcagcccaagagggaaggggaagaaaggaacccagggaaggagaaaggcggaagaaaacccacacagcccgaacacccagccgaacccagagcgaccacacagcaccgagccaagagagagaaagaggaagaaagcgaaaaaaggggccagcgagcaagaaagacccaacacaacaggccccgagggaagaaaggcaaacaggaagacagcaccccaagggaccagccaggcaacacgggaaacaaaaaaaaagggaggcaaaaccaacaggacagacagcaagcacgggcagggagaaagaagaaagaggcaaaaaacaaagaaacaacgaaagacccggcagcccccaaacaaaacaaacaggccgccgcggagcagaacagcagagcaaaaaaaaaaagaaagagcaaaaaaccaggaaggaaaaaggccaaacgaaaccaaggcaaaacaaggggagcgcccgccaacacccaagggacaagaaaaaacgaacacagcgccacaaaagacaaacaaacaggccaaaagagcaagaaaggaaacaagcacacagaagaaaggaggacacgaggggagccccaaccaggaaaaacaaaaaaacccaaaacaggggaaaacaagcgcaaccaaaacaggggaaaaacacaaccacacccacagaagacaaagcgcaaggaagggaaagaagcaacggagagggagcaaaaagccgaagagcacacacacacacacacacacacacacacacacacacaaaaggaagaacccagaccaaagcaagcagacaacaaagagccaaacccgccagggagaaacagacccccaaaccaaaggaggccagaccagaagaaggaaacgagacccaagcagaaccaaccagcaccaaggaacaagcgagacgacacacggaacgcaacaggaacaaaccgggaagggccacagacgggggcacagaagcaaagaaggcagagagcacgcccaccagcccacccaccccacccccagagggcaacccccaagcacaagagagcaaaggaaggagaaggagcagggcggaaaggcaacccaggccgagccgggaagccacccaagcgaaagcgcccccccagaaggccaaggagacaccaaacaagaaagccagaaagcacacgccagcccccccagagcacaacaaaaagaaccaaaaacgacaagcagagcacaggacgaacagacaggaagacgggaaaacaacacaggaaagcagaagcaggggaaccggcggcggaaaggcaaggagaagcaaaaagaccaacagccccaacaacgcccaccaaagccagccacaagaagccccggcgccaaaaacgcccagagccgaaggaccacacagcaaagacaacaaagcaggaaaaaagacgggcggagagaaagcagggagagggagacaagaggccccagcaaccggacaagagagacagaacaaagcagagagaagaaacagagaggcaaccacaccaggcaagcaccaggggaccggggggggcagagcaagagggggggggccagggcaggggaggggggccaggaaggacacagcacagaggggacacaacaccaaggcggaaggcaaaacaagaccacacagcaaagacaaaagaagcaaacaccgcgaagcagcccacaaaccagaagacagcaagaagccagcggcagggccgcaagcccgccgcaccccaggcgagcacaggacacaagccaacccaccaggggccaggacagaacccaaccagcaacacaaagaggcaccagacccacccacaaaggcccaacagacccccaccccaaggagaagaggaccgcccgggccaaggcagagagaccagcaaagagacaacccagagggaacagaacggccaaagaaacacagcaggcccgaagacaagcgcacaaacaccggaccaaaacacaagaacccccaaaaacagaacccaccacgagccaaacaacccgacaagaggaagaaaggacagcccacccaaacaagaggcgcccaccgacccacaaaggaagaaaaacgaagaagaaggcgaaggaagaggaaaaagcaaacaaccaagacagaaaccgaaaaaagcggacaagaagacgggcgccggagggccagagcaccagaagcaaaaaaccccagccgcgaccagcccagagagaccaaaccccccgcaggacagagcagagaaggcaacccaagccaggaaaggaaaaggcaagaagggcagcacggaccaagacgagaacggaggaagaaggcgagccaggccccgaccaccagggaccggggcaagccacaacaaaccacccagccccagccaaaaacaggaaacaagcccaccagagaaccgcaggaccgagagccacagacaaagggcgaaacgaggcagaagaggaaggcaccagccagacgacaaagaccaagaccagccggcgcgccaagagcacaggaccacaacgcgccaaaagacaacacaggcagagggagcagagggaggccagggggaagcaagacagagcacagagggaagacaagcacagaggaaccgacagaggaacagcccccacagacccagccaggcgagcaacagccacaaagaaacaggaagaaagagacaccaaagaaagccaccaaaccccaacacgccccgaaagggcacgagcaaaacggaacagaaagcaagccgacccaggccgcaacaccgaacccgcacacccagcagccagaggacagcaaaaagacaggacagaagcacacaaacaaaaaaggcacgaaacccgccggggggcaaacacgcagacccagaacaggcagagaaacacacgcgaaaaacccgggccaggagaaccaccccaagcccggcaaccgacccacgcccgcccagggcacacggaaacaacagaaacaacaaagaacacggaaggccagacaggacgagagcaaagcacaaaaggcgcacaagaaccaggaccccaccgaggaaaggcggaaaaaagcaagcaagggaagcaaggacaaaaaccaaacaaaaaacagcaagcaaagaagcaggaacgcagagcagaagaaacgcagggacaaaggacagacaggcacccggccaaacagagagccccaccacaccacaacagaagccagagggggcggaaagaaggacggcagaaagaaaaggccaccggcaaccaagcagccaggccaaaacaaacagaggacacagccaccaaacagaaagccaccccaaggcagaaaaaccaaaccagcgacacccagacacaacacacaccgccaagaacaaggcaacaaagcaagcaacaacaacagaggggacagacaccaagcaaaaaaaaaccaaggaacaagaaacaaaagagaacaccacacccagcaacaaaaaccaggacccacagaccaaaggcacaagacaaagacagcacagaaagagaaccagccacagagaagacagggaggggaagggagggagagccacgagaaaccacaaaccaagacgagaaaggcaacccggagacagaaaaagggaaggagaacagaacccgcagcagaaagaagacacaacggcacaaagggcgggacagagggcaccgggcaaagggaaaggaaaggaggcaacggcaggcaaacacaacaaaggacaccagcggcacccagaaacaaccagccgacgggcaacgagcagccaagacaaaccagaagaaaaaaaaacagcaaaccaaaacaagagacaggcacagcgacccgcggacaacagccgggaaaggaggaaacaacaggaagcaagccgagcggacaagacacagacagggaaaaaaaacaaggccagaaggcacaagcaaaagaaaagccaagacacaaagacaacaggacaaagcacaggccagcggcccgagaaacccggcaaaaaaaagaaaaaaaggaaaagaacacgacacacgacagagggcagaaaaggggggggggagagagagagagagagagagagagagagagaacgaaacacacccagaccagagagaagcagaaagggacacaccgagcaagcaagcaaaaaaaagagaggaaaacaaggagacaaggagaagaagcaaaaccgcaggggaagaacaccaccagcccaccaacaccaggccaaccgaagaaccccaggagccacggaagagagagaaagaagaacaagaggacggggcaaacagaaagggccaaggcaacaaaaaaaagcagaaagaaggaaaacaaccagaaaagagcaaaaagaacaaagcggacacaacaaaaacagcgaagcaacaggggcagagacagacaggacccccaagccacacacgaaagaagagacggccaaaagaccccaaaaaaaaggccaaacaagaaaaaagcaccaacagaaaaacaaagagaaccaagagaggagcagcgaacagaaccgggacacgaaccaggggcacaccccaaagacaccaaacgagaccgcacgaaacaagcaaacacacaaacccacaggaaaaaaaaggaggacggaagaaaaaaaaaaggaacgcacaaaacagcacaaaagacagacaaacacccaaaccagcaaagcaaaaagcacaagagaggcgagaaagagggagacgcaccaacaaggaaacacagggagaaaacggacaagaaagaggaacaccaggccgaccaaaaaacacaaaaagagggaacacaaaaagacagcaggaaacagaaaaaacaaagcaagaagagaaaagacaagcagggcaagagcacagaaaggaagcccaaacaacagaaaaggaagacacagcaacaaccagcaggggagcggaagggaagacaagaacaaaagccagcccagaggcaggaccagcggccgagaagcggaaccgaagaggaggccaacagagaccgcaagaaagaagcacacaaacaagaagaacccccccagccagcaggacaaagaagaaggaggccagaaaaggggaccaccacaccggagggaagccgcccaggggccaaccagagacgcggccgcccgggaaaaggcacaccgccgggccaaggccaaggccacggcacaagacagaccacaggggccacgacagcaaagagagcaaacgacccgggaaacggcgagcgacagcgcacaaagccgacgagaacacaagcggccaaagaaagcccgggaaagcaggccggcagacaagagaaagaacacaccaacaaaagagaaccagaaccccgaacaaagcagcgccgcgaaaggcacagaaaaggaccaaaccgaggcacaaaggcagggaagggcaggcaagccaaagagggaagcaaggaacggccagaaaaaaagaacacacacaaaagcaagggggaggaaaggcacgcaaccgacacagacacaaaaggcagcagggcaggaacccagcagaacgaagcagaagcgaggaagaggcgccaagcgcccggcccaggcaagaacaggacacgaccaagggccccacccacaaaggcgggcccacaccgcacaaaaaagcccaggccccacagcgacaaagaggccccaggaagcccccaggaccagcgcacgggaaaaaaacaaccaaccagcaagcacaaaggggggcggaagcaggaaagaaaagaaaaaaacccaaaaaaaaagaaaaaaaaaaaaccgagcacagcccggaaacagaaaagcccgcaggcccacacccagaagggagcccaagcaaaagagcacagcacaaagcccaagaaacaaagccgagccaccccaccacgaggggaagaaacggaaaacaagaacaacgggaaaagagaaagcggcaaggccagaaaaacacaggaagaacaaaaccaaagagccaggagagcgcagcaggaaaagacacgcgccagccggaacaaaaggagagaaccacaagcgacacagccccacacaaaaaccaggcgagcacacacacggcccagacaaaaagaaaagaaacaaaaaaaagcggaaacagacagcaaagggcaggaaagacaacaaaaaagaaagcaaacacacaagcaagcacacacgacaacgggaaaaacggcagggacacaaggggaaaagagacagagaaaaaccaaaagaaaaacaccccgaacgaagagccacccggcaagcaagaagacaacaagaagacaaagcgagcaggcagggggcacacaccaacccagcacgggaggcagaggcaggggacgaggaggcagccagcacagaggagccaggacagccagggcacacagagaaacccgcggaaagaagaagaagaagaagaagaagaagaagaagaagaagaagaagaagaagaagaagaagaagaggaggaggaggaggaggaggaggaggaggaggagaagaagaagaagaagaagaagaagaagaagaagaagaagaaaaagaagaagagaagaagaagaagaagaagaagaagaagaagaagaagaagaagaagaagaagaagaagaagaagaagaaaaccacgagcagcggagagaggcagcaaccaaaagccaaaggacagagaggaacaaaggccccgaagccggaacacagggagcagcacccggcacacccaaaagcaaaggaaccaaaaaaaaaagaagcaaccaaacgcaccaagcacccaaagcccagagacaaaacccagggaggggaacaaaaagggagaagaaaaagaaaagaaggagcagaccaaaaacacgaaagccacaagaagagaggagggagcaagacagaaaaggcaaccaccaacccccacaaaaagaaaacaaaaaaacaaaaaaacacagaaggaccagaaacaccagaaacacaggaaaaagcacaaaaggggggcaaggagaaaaggaagaaaaaaagccagaaagccggaaagcaaaaaaacacaaaggaacaaaaaacaaagaccaaggaaaaaagaaagaacaggaaggagggagaaccgaacggcccacaacacaacaagcaggagcaacggaccaaacgggagaccaagagaacaggaggggaaagaaggcagagggaaagaggcaacaaagagggacaccccagacaagaagcacgaaaaacgccaggagcaggagcgggaggcagcggcaggaaggccaaggaccacagccaggaaagaagcaggcaccagagaaagagaagagaaaagacggaagagagaaaacaggcacagcaaaggcaaggggccccaaggcccaagaagaagaaacagcaggggagggcacacaggaggaaaggggggacggggaggggggggaaaagcccaagcagacccagagcccccccccgcaccgggaaagagagaacccagccccggcacagcgccaggccaccagcccccacaaagaaagggacaaacccgaaaccgccccgaaaagcaaagagcaaaaagcaagccaaaaaacggaagaacaggcagagcccacaacaaaaaacacaagagagagggcgacgggaaccaggcacccagaggccaaaagaccaaccgaacagcaagaccaaaagaaacaggagggaggggggggaacagagaaggaccccgcagagacggaagaaaaaggacagcacaagaaagcaagaaagcagaaaaagaaaacgagaagagagaagcaaaacaagaacaccaagacaaggcgggggagaaaggcgccaggaacacagagagaaaggcggaaagaaacccaggacacaagggccacccaggacggcgggaaaccaggcgaggcggggcccaagggaacaaacaagggaagcagcaaaaagcaccgaaaggcagaacaacgagacgcaccaaagacaccaaaacccgcaccaaacgcagggggacaaaagggcaaccaagagagcagaaaccgcagcaggacgaggggcgccccacccccaacgacagacagacacaacacacacacacacacaccggccccagaaaggaaaaaaaaaaaccaccccaaggaccaagcagccccaccagcaccaaaaaagagacagggcaacccaagagcaacaagagcagaaaggaaaccagcccaaacagaacagaaaagaccccaagcgagacaacagccaaacaaacaaaaaagccccaaaaagggggaccacagaccccgccgccgccgccgccccccgccccccgccccccccccccccccccccccccccccccccccccccccccccccccccccccccgccaccagaaaccgaaagaagaggagagaacacaagaggagagagagagacgaccagagacaaccaagaagaccaagaaggcggaaaaggaccccgcaaggggccccacaacaaaaaacaaaaacccaacccagcacccaggaaaaagaacgcccaaaaaaaccaacgggaagacaggaaaccaagagcagagaaggaccccagacaaagacagccaagacagcaaggaaaacaacggacaccaagaaaaaagaagacaccgacagggagagaccaaccaagggaaggaaaaaaacaaaccacagaaaaggcgagcgcacaagcaccacaccagacggagcgcacaccagggccaagccgcccaagacaacagcagaagcaaacgaagcacccagcaccgcggacacccgaaaggggaaaaccaacaagccagagcacccagaacaacaagccaggaaggaagaaggaaaaaagcaccgaagcaaaaaagaagagcaagagacagaagcaagccgccccaggcagcagacacccaaagcgaggaaacaaaaccgcaaaacgcacacgacaaaaaggccccagcccaaaaaaccccccccccccaaggcccagcaaagacacagaaggggccggaaaggaagcaccggacacacaaaaaagcacggggagaggacagacggaaacacccaagaacggccccaaggagacggacacaaagcaaacagcagagaaccaaaacagacagcgcacaacggaaaagcaaagaggacgccgaacaagcggagccacaccccgccaggagaagccacaggaagcagacaaaagcggagacagccaccccgaaacaccaccaccagccacgagcggaagaagccgagaagggccagcaagaaaagacccaaagacacccaaaagaccgaacccgcacccgcacccccaggcagacacagggaggacagcaggcaggggcaagcggaaaaacccaaggccggcggcaggcaagcacagccacgagacaccccgaaggaacagcagcagaaggaaagaggaagaagaccccccccccccaaggaggacaggaaagaaaggacagcagggccaaacgcaacaaaaacagaacaaaggggggagcacaagacaggaggaagcaggacaggaacaagcagggcggaaccggaggcaggagcgaggcagaggccaggggggggggcggcgcacggccccccaggcgcagccgcccaaggaccaccagccaggaggcaccacccacggggcaaaacccccccagacgcaagagaaaagccaggcggaccaggagacacccaacgaggccccccgagacccagcgggcaaggacacacaaaaccagccacagagaggcagagagggacgaaaggaaccacaggggcaaagggggaacgcaccaagagaaacagaagcagaagagacccaaaccaccaacggcgaccggcaggcacagcagcccacagcagacagcaggcgcagagacacaaacggcgacacgagaaaaggcccagagggacagccaagaaggaaacacagagccgacccaaccaaggccaaggaacaccaggaagaaggagaaaaagaaccaagagggaaaagggggagacaacggccaccgcgaaaagacaagcggcaccacaggccacagccaggggaccacacagacaagcagccaaaacccagcacagggggaaaggggcacaaacaccaaggcaaggaacagagcaggacagacgggaagggagaacggggccagcccagcacagggaaggcccagccccgcagcacagcagagaggcaaagagacaggggagaaagaaggaaggaagaggaaggagacaagggaggagaaacagaaagcaggacagaagggacacaaagcggaggaggaaaaagagggaacgacaaaaacacaaagaacaaaaaacaaaccaaaaggacccggagcaaaaacaggacaggccggggagggggggggcaagaacaagagaaagaacaaaggggaaagggagccagacagacgaggagaaggggaaaaaaaacaaaaagaggagaaggaagagaggaaaagaagaaaaaaagcgaacaaaaacaaaagaacacaacgcccacaaaggacccaagagccaacacccaggggcccaaaacgcccacccagcaagggaacaaccccggccgcacgaacccaccgaaaagcagcccccacacagacacaacaaaaaagaaaaaaaagcaacaaaacaaaaaacaagaagcaaggaaagaaggacgcggcagggagagaggggagaaacaggggcacaagggaagagcaccacaggcagcagggaaagggaacagcaccaaccccagacagcagcaacaaagaagccagcggccccggccacccccccccgccaaagcccagccccaaagccaagacgagcgagggggggggggggggggggaaccggagggccaaagagcaggggagaggggcagcggaacacaggcaaccagggcaaccagaaaaacgggaccccgcccccaacaaccagaaggcaagcccaggagaagcaggccagaggcccccccggcagagagccccaccaagccgaagaccaccaccggccaagggccccccaggaggccgacaggccacgaacaagcagcagagcaagagcccgggggacggagcaaggccaccaaggggcagaccccagcccgagaccagcccccagggggcccggaccaccaaagcgacggagcaccacagagcaggccccggcaagggcaagccacaagagacagcagcagggccacagcacagcgcaggagcaagggcagcaggagcaaacgcaaaaacaccacccagcccaaagggccgagaacaagccacacaggccaaaccaacaaacaaaacaaaagcaacacaccaggcaacagcaggcacagcaccaaaaccccacacaaccccagggagaacaagcaccaagaaggaaagaagacacagaaaaagaaaaacgcccaaaaacaggacgagaacagaacaaaaaaagaaagaaaaaaaaaacacagagggaaacaggggaagacaaccaagggaacaaaaccgggcaaaaagaagagccccggcgaggaaaaacccaaaaagcaaccaaacaaagcacccaaacccccccccaccacccccacccacccaccccaccggcccgggccccgacggggcaaagaggcaagccaagggccccacacgaggccgacaggccaccaaacaagcagcagagacagagcccggggggggggggggggacggagcaaggccaccaaggggcagaccccagcccgggagaagagaaaacacagcacagagacaaacgaaagaaacaccaggcagagcgaaaagccaaccagggccagcagggcggcggaaaaagcacaagaacaagaaacaaggggaagaaaagggaccacacaccagacaagccaaggagaaaacaggacaggaaccaagcagggcaggaccagaagcaggagcgaacagaagccaggagggagcggacggccgccaagcgccagccgcccaagaacccaggaccaccacccagagaggcaccacccacaagaggaaagcaacagcggaccagaagcaccaacgaggccccccccagacccagcgacaaaaccagccagaggcagaacagaaagaaaacccggggagagcacagcaaaggcaacacccgagccccccagcaaggaaacagaaacaaccagaagagggaaacgaccaaccaccaacacaccgcccccccgagccagacacgaaggggaaagagaaccaggaagacccagcccccgacaaggcagaaaaaaagggaagaagacaacaggcacgcaagcgacaggagaacagacaaaaaagacaacgcccaagggacagagcgccaagagacagcccaaaaaccagaggcaacacagggaaagagggaaaacggagggcagagaaaagcgaaaagggcgaagacacagagcaacagaacagaaggcggagaacacaccccgaagcaggcaggagcaaaccaaaaccagagacaagaagggccgcaaagaaaaaaagcagcccaaagaggcagaaaaacaaaaaaccagaaagccccacagcccccaccagacacaaccggacgaagaaccagaagcaacaaggagcaagcacccagcaaagcgggggggggggaaggacaacaggacagcacaaaggcagggacaggggaggggagggagccaggcaggaacagcaaggcaggaacaaaacagacccagaaggcaaacaagagcaagagggggagaggaggggggggggggggggggggggggggcaagggaaggcgggaaaagagcacaagcagaacagacagaaaagaacagaccgagaggagaaagacgagaagaggaaagacaaagacaccaaaggacacaccaaacgagacgaagcaggccagagaaagcgccaagagcccagagagcggcaaggaaaaggacagaaaaaccaagaacaaggacagcaaaggggggaaacagaagccccgcagcagggacacacccggaagcgcaggcgacaccagcagcccaacccaaaagggcaagagaaagcacgagaccagaggccgggcacgacacgcagggggggaggggaacgcccaccaagagcggccgaaaacagcaggagaaaggcagcagaagcgacgagggaccaggcaccacaaaaaaacaagacccccagcagaaagacagaacagaacaggacacagaaacaaagggacaaaaaacagaagaagccagcagagggacacccaagaagaaagaaaaaaaacccaccaaaaaaacaacccgaggcgaggcagacaagacaaaacacgaggggggggcgaaaggggggggagacccacgagcacgagaccaccacgaaagaagcaagacacagcagaggagggaaagagaaaaccaacaaacaagaagcaacggaaaccgccacacaccaaaaaaaaccgagcacgagccagaacggcgggccaaaacggaacaaaacaggaccgacccaagagcaaaacaggaaagcaggaggcaccaccggcccaccaaagcgggaagggaaaagcaccagcacagcacaacaaaaagaaaacaggcgaaaacacaacgaagaagcccaaaagaaaaaacaaaaaagaagaaaaagaagaccaccaggaggaaaaagccagaaaggaaaaaaaaagacaagccgaaggaccgaggggaaaaacaacacaaagggagagggaaagagcaggaaaagaggaaaaagacgggggcaaggcgggaaaggggggggaaagacaaagacacagaaaaaaaacaagaaacacgacaaaccacaaagagaccaaaaacaaaaaccaccagcacccgagccagacaaacaagggaagggagaacaccaaagagagaacacacacaaaaaaaacaccccaccacaaagccagagcacaagcccgacacgaaggaagacaagaggcgaacggaggcaggccggacggggaagaggccaaacacccgacccaagagagaaaacacaacgcgcaccgagggaccaagaaagaacaagaaacagaggaaaaagaggagcagacaaagcgaggaacggaccccccaaaaccacacacgaacacgaccccccccgcagcggggagaaggccaaagcccaagacaaggcgcccaagccaacgaagcgccggaccggcgcaacaagcggccaacagccggacaaacagccacacggcgaaaacaaccgccgcgaaggccagccaacccgaagcaaaccgagccagcccaggcgaggaggagaaacacaggaggcaccaacccggcaccaaagggggaacccaagcagaagccccaaccaaagacagagcacccacccacagcggacagagagaaaagagcggcacagcgggagcccgagggcagccaaccccaaaaggccaaccaaacgacaccccaggcgaaggagacgaagcaaacccaggccccagacaggagaaccacaaagccacagacacgaggagcacacccaacaaagcacagaacgggccgacccgggacagagagggagaaagcacagagaaaccaaggaagcccccgcggagaccgcccacaccccaccccaagggaccaacccaccagggacccagccaacacgccccagcaagcaaaaggacagcgcaagcgccggcagagaaaccagaccggaaccaaacccccaggcaaccacgaggaaacgccccccaaggagacaggcacaacagacccagaaccgccacgccacccgaagccacacccagcacggagccagccaaaaccagcaccggaaaaggagagcagagagaggcgccaacagcacaagccccacagccagagacaaaacgaggccagccaacccagcaaggaggagaaacaggagaaaacaggcccaagggagcaaggacgcccagaaaacaggaacgggcacccaaagcacaacaaaagcaccaagagcaaaaccccaccaacaaaaagaaaagaaaaaaaaaagacaaaaaagcgacgcaacaagaaacaagccaaaaagagaaaaaaaggcaacagagaaaacccgaaagagcaaaaagagaggagaaacacccaaaaacaaaaaacccaaaaacccaagcaaagcaaaaacccaaagaagaaacgaccgccagcagggcgccggaaaggaaaaaaacccaccaggccacagcagccaagaaagcaaaaggaaaaaagcaagggccaaagccgagcagacaacccaaggcccaagcaagcgagagaacgcccaacacagcaggggagaaagaacaacagggcaacacaggccggagagcggggaagaggaaaacgcgcgggaccgccccgacgaacagagcagcaagcggacgggcagagcaaagccccagggcagaaagggcaaacaccgcaggcaccgcagcacacgcgggcgccaaggcagcccaaagaacaggcgccaagaccaagagcaaccaccagagccacagcgccaagaacacaggaagcaggcagcgccagaaaccaccaaaccggaggaggcgccgacccacaccgagaaggggccggaaagcaagaacagccagacgcacaggaggaaacgcacccagacccaagacagggcaagagagcgcaccaagggggaagaggaggacagagagcaggaagaagggagaccaccgcggaaaacaaagcacgaaacagcaagagccggaagcgacacaccaccaaaggaacaggaaaggaaaaaggggaacaggaaacccaacggacaccccaaacacaaccaagagagcagaagcagagggggaagaaagggagagaagaaaaagcacagcagcaagcaacgcaaccaggcgccaagcgacccagccagagagcacaaggcaaacagccagaaccaaccaaccacgccggagcacgggagaagaccaccaaggcaaaaaaagcaaacacccagaccaaaacaaaaagagcggcagcagcaaaaacgaaaagaaggaaaaaaaaggccaaaaacgacaaagcaagcaacagaacaaagacaacccagcccaccgaaagcacaaaaaagaagcagcaagaaaaagcagacagaagagaaccaccggggaaagccgcaccgggggaaccacaaaccacaacaaaacgggcagcgcaaaagacgcacaccaagaccaaggacaacgaaccgacagaaaagaaaggcagcacacacacaaccaacacagcaggacacaggcagaagagggcgaacaaaaaggggcagcaaggagacgcaaaagagaaaaaaaaaaaaagcagggaagcaaaggaagcccacgccaacccagcacccacaccaagaaggggaacggcccaaggccaagggaaaggaaaccagacccagaacaacaaacaaagaaaagggcagagcagggacccgaaacaaaaaccagagagagagggagagcgacagcaagcccagacacaaaagaccgccacaggacgagccaggccaacagacagaaaaccccaacacacagaaaaaggaccaacaccaagcacccaaaaagccccccaacccccccccacacgaccccccaccccaccggcccggcgccccgacgaggcaaaaaggcaagaccaagggccccccacgaggccgacaggccaccgaacaagcagcagaaacgcgagccggggggaggggggacggagcaaggccacaaagggcacagacccagcccggggacccagcccccgggggccggaaccaccaaaggacggagcaccaccgggcaggcccggcaagccacaagagacagcaacagggcccagcaaaacgcaggagcaagggcagcgggaggcgaagggacgacccgggaggcagccagaggccacccgccagcccaaacgccgaacccccaggggggccaaaccccagcacaaccagcacaaaagaaaggagggccagagggccacaggcggcacacagccaagggaagggcaggaggaggcggggaagacagccaaaaccaaccacggagcacagggcccaaggaggagagagagaaaggacgaagaagcgaagggggcaaccccaaggaagaacaaacaaccaacgaaccccccagagcccagggacaaaccacaacaaggagacacaggagaaccaggcaccagccacaagagcagagcaggcgcgggcacagaggaggaggggcccggccggaaggccagcccaggaggggaaggagagcaggaggcaggaggggggggggggggggcggggggggggggggagcaccccaagaaggagagggaggagaggggaaaggagccccagggggcggggggacgaaaaggggaaacagaaagaaaaaagaaaaacaaaaaaaaaagaaaaaagaaaagaaagaaaacaaaaacaaaaaaccaggacgaggacccagaccagcaggcagccacaagccagaaccaaaccagaaacgaggcacacgacagaggcacgcacggcacacaggaacacaaacacaccaaaaaaaaaaaaaaccaagaaacacacaccgacaagacccccccccccccagccccccacaaccccccccgacccccccgccagggaaggaagcaccgggacgccccacccaggaacaagcacagcagggaaagcacacagaagaggaaaaccccagccaagacagagaaaaccagaaaggagcacacaaaaccagcacagagagcaacccacaaaacaagacaaaagaaagaacaaccggaaaagaggaagcaaaaacacgcagagaagaagaaaaaggacccaaaaacaccagagaacccaaaccgaaaacagccgggaagagcggaaaaaaaaaccaaacaagcaaggccccaacaaagaaaaacaggcgagaaagaaaagggaaacaacacccccaaagcacaaaaaaaaaaacggcggaccaacaaggaaggaaagacgagaaaaaaccaaaccgaagaaagaaaaaggaagaccagaagaggaaagaccccagccaggaggcaggacaacagaaaaaggcagccaaaagcaacacagacaagcaaccccacaaaaccaaccaaccaacgaaggaaggagcaagcaaagcggaaaacaaaaaaccaggaagcaaaaagcccaaggaaaaagaaccggcggaacaccagccagaccaaagcacacagagcaaggaaaaaacgcaggacggaagagacagacaagagaccaaggaaagaagaagacccagaaagaacccacacaccaggcacgaccgacaagggagcaaaaccaccagggaagaaagacagcacaacaagggcggcacaacgggacggagaagaagcgaacgaccaacacccgacaaggaaaacaagggacaaggaaccacaaaaaccagagacacgaaacaagaggagaaagggggaaaagccgaagaagggcacaggggaaaaaccgaacagaacagcaaggaggcgaagacgagaagacaaagggaccaagaaacccaaagcgcaaggcaaaagacaccgcaaaagacaaaaagaccaccaacagagggaaaggacaccaccaaacagaaggggacaaaccaacaaaaaagaaccaagaaggggaccagaaacaaaaaccccaaaaaaaggggccagaacgaacaaagaaccaccgaggaaaccgaaggcagagaagcacgaaaaaagcaacaccaacacagggaaagcaaacaaaacaacccgagaccacccacaccagagaaggcaagacaaaaacagggacagcagagcggcgggagggagaaagaggaacacccccaggggggaggcaggcgacaaccaccggaaacagcggcggcccagaaaacggacaagacaccggaggaccagcaaacccccgggcaaaccagaagagccccaacaggaagaaggacacagcccacagcaagcagccaaaaagccagaagcggaaagaaccagagcccccaacagaggaaggaacagaaaagggacacacacaaggagacaccagcaaaaaagaagaaagaaaccagccaaaggaggaccggagggcacaccgaggaggaacacacacaaagaaaccacacaaagacacgaaagggaaagccccaaaccaggaacccaagaaaagaaaagcaaacacagaaaccaagaagaagaagacgaaggggacacagcgccccagagggaacaaaacacccaggaaggagacagagacaaaggcagcgagagaaaggaggaccagagagacgccaaccagggacaccccaaacagcaccaaacgcgacaccagcaacacagcaagaagaaaggacccagagagcgccggagacagccagggccagcaaacacagaagggagccacagcagcaaggaggacaagggccccaaggaggagcagagaaagagccaaggagcaaagggacgcaacccaaggggaacaacaagaacaaccagaccccggagccgaccagcgcaagacaaaagaagccagcggccacacggaaagagaggcccaggacgcaaacaagccccagacaggggaacaccagggccaaaaagggggagggggggcaggggagggggggggggaagggggacgggaagcaggaaagaaagagaaaaccaaaaaaaaggaaaaaaaaaagaaccacaaagaaaaaaaaaaaaaaaaagaaagaacaaccaaccaaggaaaaacaaaaaccagaaagcaaaacaaccgcacaaaaaagaacccggaagaccccaccgaccaagcgacagaagcaaaggaaaaaaaaaagcaggagacagaaaagacaggacgaggagaaaaagaccaagaaaaagccaacaccaggacacgagaaaagaagccaaaaccacacaaggaaaaaaaacacaacaacaaaggccggaaacggagccacagagaagagaaaaaagaccaacacaccgcagaaaccaaacaagacaagacccaacaaaaaccaaacagccagcaggagcgacaggacccgaaagcgacggaggcagcaaggccggcaaaacagaagggagccacagcacaggaggaacacagggccccaaagaaggagcagagaaagaaccaaggagcaaaggggcgcaaccaaggaggacaacaaagaacaaccagacccacagaacggcaggcaagagcaggggaggccagggccacaggggaggagaggcccggcgcgaaggcaagccccaaacaggggaagccagggccgggaagcaggagggggggggagcagggcaggggagggaaggggacgagaaacaagaaagaaagaagaaacccaaaaaaaagaaaaaaaaccaaacaaaccaaaagaagagaaaggggaaacgccagaacacaggcacaggagacaacaaacagaacacaagccaggcagaagacaacagaacagggggacccagaaacgaaaagagcaagggaaggacaccacaaaggacaaaaggcagccacagaggagaaaagaccaccaacacacgacagaggacaaaccaaaaaaaagaacacaagaaacagacaccaacaaaccaaaggcacaaaaaaaaggacagagcaacagagaaccaacagaggaacgaaggcacagaagcacaagaaagagcagcaccgcaccggaaaagcaaaaaaaagagaagacacaaaccacagaacgcaagacaaaaccaaggacagacagggagaggagagaaagaggaacacccccggaaagccacacagcaacaaccgggaccagggcccaagagcgggccaccaaccagcaagcagaaggaggggaccagaccccagacagggcaaaaggcaacggcagcaggggcacaacaagggaggggaggagcgcgccggcgccaggacccccccccccggacgccgagggccaggagagaggaagacaacccgggacagagcccagggcagggggacccaagggagggcccccaggaggggaaagggggacaaaggggaggagaaagaaggacgggaagagaaaagggagggggcggagggaaaaacgaagaaagagggaagaaagaaagaaagaaagaaagaaagaaagaaagaaagaaagaaagaaagaaagaaagaaagaaagaaagaaagaaaggaaggaaggaaggaaggaaggaaggaaggaaggaagaaagaaagaaagaaagaaagaaagaaagaaagaaagaaagaaagaaagaaagaagagagaagagaagagaagagaagagaagagaagagaagagaagagaagagaagagaagagaagagaagagaagagagggaggaagggagggagggagggaaaagaaaagcgcaaaaaggcacacacacacaacacagggcaaagaaaaaaagagcaccacgaaagggaaagcccagaagcagaaacccaagaacaagcaaaccacagaaacaaaaagaaggaagaccaaaggggaacggccagaagggagaacaaaaacccagggaggaggcagagacaaagcggagcagagacgaaggaagaccaccagagacgacccaccggggaccaccaaaaaaacccaccaaacccagacacggggaagccaccaacaaagaaaacacagggggaccaggcagcgcaagagcagagaaggccaggccacagggaggagaggccaagccggaaggcagcccagaaggggaagccaggaccgaccaggaagggagggggggagagaacagggggaggaagcggggaaggggaggaggggaaacaaggaagggggaaacagaaagaagaaagaaaaaaaaaaaagggaaaaaaaagacagcaaaaagaaacggaaagaagaacaaaaccaggagagaacagccaccaaaccgccaggcccaaaagcgaagaaaagcggagaaaagggaaaaccaggcgagacacccaaagaaaaagagccacaacccaaccaaccaccaaaaaggagagcgaacagagaagagacgaaaagaaacacagcagcaaaaagggggagggagaagagaaagcaccccaaaagcacagcccggcgcggagccaacacaaaaaccagggcagccaaggaaagaacagaccacagagcaggcgagcgcaccgaagagacaggcaaaaaaccccgagcccaacaaaaaagaaaggcagaaggacaagccacgagaaccaaaagagaggaccaccgagcggccgacaaggagaaaagcccgagcccaccacacagagaagcaaaccgggcagcaggggggggggcccaggacagggggggggaggcgccgagagggagggcgacgagaggacgccacggaaccggagcaggccggagagcgcccagggaagagcccacagcagaccgggagacagaccccagcagggcagaggcgaaaggacccgaaagcgccggagacaggccggggccagcaaacacaaagggagccacagcagcaggagggcacagggcccccaaggaggagcagagaaagaccaaggagcaaagagacgcaacccgagggcaacaacaagagcaaccagaccccggagccgaccagcgcaagacaaaagaggccagggccacacggaaagagagacccaggacacgaaaacaagccccagacagggaaacaccagggccaaaaaggggaaggggggaggggaggggggaggagggagagggacgggaagcaggaaagaagaggaaaagcaaaaaaaaaaaaaaaaaaaaagaaccaacagaggcaggccagagggaagccccacaaagacaccccccccccccccccccccccccccccccccccccccccccccccccccccggcgcaaccaccagagcaagccgagcggagcccccagaacccacaaaacacagcaaaaaggcgcaaaccacaagggccgccagcaaagcagacgcaaaacaccgacaaacccccaagagcccaggggacgagagcaggaaggggacaaccaagaggcagggcacagaccccagaccccaaacggccccagccccaggcagaaccagacccagaagagagcccgccccccccccccccccccccccccccccccccccacccccccccccccacccccccacccccccccccccaccccccccccccccccccacgcacacacacacacacacacacccaccccgacaagcaagcgggaaaaacaggggcacagcagagaaaacacaccaggaagcgagaccaacagacagagaaggaaagcgccacagcaagcaccggaggccaggacccagagaaccaggccccggagagaaaaccggcaccgccgcagcacccgcaaagcgcccaaccacaccagcaaagccccgggacacacacccccccaaccccccagaccgcaggcagaaacagcacccccagcccccacagcagcagccagggcagccaccccagcgggaagccaggccagggcgggacgcacggacaccgaacacagagacacaagggaaccccgggacaaagcacagccacgacagggagagacaaaggggacacaaggaggaagacagcccccgccccccaagaggcaaggcaagaaaaaaaaaaaagacgaaagcagcgcggcagaaggggagacggagccccacccaagaaaaagaaggacggagccaaagggacgccagccccaccgaggaacagaacaaaagcaacaacacaaagaaaaaacaaaaaaaaaaaaaaaaaaaaggcgaacacaaaggcacggcccgggcagaaagggagcaagagaagaaggcaaaaaacacacgaaaaacagccagcgcacgccagcaggagccacgaacacaaacacaaagcccgacagggccgggccaaacgagaagacgaagcagaaaacaggcaaacaacccaaaaaacagcaaacgacacacggcaagaggcaaagagcaaacaacgaaagcaaacaaaaagcagaaacgaagcaacacgccacagaaggaggcaacgggaaacaaaagaaggcagcaacaaagccagagagcacaccaggacagacaccgggagcccaagcagacaagcaaaaagcaagggacagcccaagaacacggaaggaaaggcccaaggaaagagaacgacaaagccaaaaacacacaagcacagcaccacgaaggggaaacgcaaagccccaggaccagacggaaaagccagcaagaaaaccacccgcggcaccgccagggaaagacaaagcaagaccagaggaagcgagaaaaaggcaccgcaaccagaggcagaaagaaccaggaaggaaaggcagaccagggaagcagaaaacaaagagaccacagagcgaggggcacgcggcgcggcccacaccaaccaaaacaacaaagaaaggaacagggacaaaagaaagaaaaggccggaggcgccggcccaacaaagagcagccggaggaaaggcgggcacaccccaagagaaagccccacacaaagacagcaaaaaaaaaaaaggacccaacaccaagacccaaaagcccccaacccccccccccccccccaccaccccacggcccgggccccgacggggcaaaacagcaagccaagggccccgcaggaggcgacaggccacgaacaagcagcagagcaagagcccggggacggagcaaaggccaccaaggggcagacccaacccgggacccagccccaggggggccggaccaccaagaccccaaggaaagccccccacaaagacagcaaaaacaaaaaaaaaaaacaaagaaaaaaagagaaggaaagaacgaccggggaaggaaccagaaggacacaggaccggcgccccgacccaaaggaagggaagccccagaaccccccaagcgccagccccaggccccacgcagaccccaaaacaaaaccaaagggaaggccagcaaggagggaggggaggaacgcagggcgcaggaacccaagagcaccgaaccgagagggacacaggcgcaaagagagaacagggaagggccaaggaaacaaggcgggcgacaacggaagaggggcaagagaagggcaggggccagagggagcgaacagaggcgccaggaggacaaggaacaaaacaaagggagcagcagacagccaaggcgaaaagggaagcagggacgaacccaacaaaaaaaggaaaaaaaccgcagagacagcaaggagcaagcaacaaaaaggccaacaagaagggagcaaacaacaagggcacccaccaaagccgcagcaacaaacaagaggaaaaaaagggaagagccccagaaggcagagcgggaaagaagggaacaagaggaggaagagaaagacaaacaaggcacaaagagccaaaagggaggcaaagaggaaacaaaagagcccacagcaacccacccacaaccgaaacccaaacagcgaaagaacaccaaacacagcgaaagcacaggaaaagcaaccagggaagggggggggggaacgcccaacagcggaagcaaaaaggccaagcccaaaggaagaacgcccggaggacaggggcagggaaaacaaaaacccagggcaaagaacgaagccaaaaaccacagaaacagagaaggaaggcagcaacgccagagcacccccgagcaggaaaagcagacaaaaccagagaaaaccaagccaggcgacgacacaaacgagcacacaggcgagcaaacaagcagagacagaacaagcacaaagccaaaaaagcacgccggcggagaaagaaaacaaaggaagaaaagaaagaagaacccagggagaccccaaaagcacacccacgagaaggcaggaggaacccacgaaccccacacaaccccacacacagcaggccacagagccagccaccacagcacaagaacaaaacacgcaggagggagcgaggaccacacccagggccaccaccaccagagcacagaaaaaaacgacgcagggagagcaagaaggcagcagccaaaccaaaccggagccaaaccagaccaggaaagaacccccgacaccaggccacggcgagccccgagagcaccccacaagagaagcgaagaacagaaaacacaccgcaagacggcacccgcgacaagcagcagccaccccaaggccagcaacaccccagaacaaggccgacaaggcccaggccaaaggccagggaaaaagggaacgaagcaaaacgacccaggaagagacccaaccaggaaggaaacccagccagaaagccagggcccgggcaggaaggaaagccaggccaggcgccggacccccaccagggaagggacacaagaccccggacgacaaagcaccgccgagcagggagaaggagaaggccgcgaccccccccccaccagccaccagaaaaccaccagaacgcaaaggaagaacagcagacacaaaagggaagcccaaagacggagaacaacacaccaacacgaaaaaaacgaagacacaggccggcacgggaagccaggcaccggccaccaaggaagggcaaagaccaggggcagagaccagacccagcagggcaaaccagaagagacaaaagccgccaccggcccaacgacagcccaaccgcagaaagaaagccaacagccacgaaaccgcacccccaacagaggaacacagaagagagcagacaaaacaagaagcacaggagacaagcgagaaggaagaaaaacccaacaggggcaccacccacaccaaggacaccccaaggaaagacaaacacacaaccaagaagccaaacagacaaaagcgaccacgccagccccaacgaaccgagaaacaacaaccaccggcgcccaaaccacaaagcccggggagccagccagagcccagggcaccccgcgcaccacagaagccgccccgccgccacacccccacaagcaggggacaaccccgcccgaccggcccaagcccaggaaacgaaaacccacccgcgcccccagaggcgggcaaaccaacagaacaacggggacaggcccaaagcaggggggcaggggagagacacaaacagaaaaaaaccaccaaggcccgaagaacagggacacaaaaaacaccgaaaaaacgagcaaccaaacgggcaacaaaggaaggcggcagaagccacaacaccaaaccgcacagcaggcaacaagggaccgcacccaagacggccaaacccaaggcaccgcagaggcagaaacaagacgcaacaccaaagagagcccgccccgaaacacgaaaaaaaacaaagcaacaaacggcaaaagagcacagcacgaaggaagaaagaaaagaaaaaaaacgaggagcagaacccagaagaaaggcagaaaccgagcaagaggagaaacaaagcaaagcgaagcccgggagccaagccacacgagagcaaggcaccgaggagagcgggagcaggagagacccccccgggaagagcacaacagggcaggccaaaggcagccgaaaacaacacacaagagcagcacagggagcaaggaacagaaaaagcagcaagaacaacagaagaagaggccagggagagaagggagagggggagggagcaggaaaggaaagggagcaaaaaggaaaaaagcaaaaaaagagaagagagaggggagggaggcagggaaggagggaggagagacaaggacagggagaaaggcaaagcagaaagcagaggacacaaaacaaaagaaggacgggcaaaggaacaaaaaccagcagaaacccaaggacaaggagacaggggagacagaagaagaaagccaaggcaacagccgcaggagccagccccgcgggggcgcagccgcaggaaaccccagaaaagccacacacaaaccgcgggagggaacaagcgcagggccaagccaaccacggggcggaagaagaagaacaccggaagaggcacccggagcacaggaggcaaagcagggccccaggcggcagcaggacgacagccagcggacgagaagaggaaggaggaaagagaggggcccaacacgacccgaggagcgggggagacaggagcgcggcagcaaaagaagaccagagaaaaaggcgagcgccagaagggcacagaaacgacccgaacacacaggaaagaaaaacagggaaagaggaaccaggaacacacggcaacccgggaggcggcgaaacagaggaccgaggaccccagaagcacaaaaaaaaccggggggggcacgacccaggccaagaacagcagagacagcaacagagacaggggggaccgggaccacggggcaagccaaaccacgcccagagccggaaagacccgccaaaaacgagacaaagagcaacaagaaaaacaggaagagaaccgccccgggcagagaacaggacagaccacacacacacacacaaacggcgcgagcacacgacacaggcacaaaaagaagagaaaagcacagcacacaagaaagagggaaaggcggagagaggccagggaagaggcgggcgacacacagacccacccagcaccaacgggcagcacaaccaacaaagcagacaaaaaaaacaaaagcccgggacaccagcagcaccgccacacaacagaacagcaggcaaaacacccaacacgggcgacaggaggaaaaaaggccacagaggccagggggcaaacggggccacgaagaaagaggagggcgggccaagggagagcaacccgggcgggacggaccaaagaaggcaaggaagaacaaaggagcaagcaaccaacaccgccagggcccaccacagaccgccgagccgccgaccccaggagagacacaaggaaaggaaacaaacccccccacaaggcgggaaagagacagcaacaaaggaaccaaaaagacaacacaaaaaaaaaaacacaaagaaacaagggccggaagacacgaaaaccaacaaccagagcaagggagagaacaaagaccgcaaacgaacacaaagggcccacaccagcaggagaaacacaacgccacacacaagccagggaacccacagagaaggcggagaagggagaccaccaggcacaaaaacaccaacaggacagaagacacagacgagcacgaagggaggagaagcggagcaaacccccagaacgagaaaggccagaaagagaacccagcccacaacaaccacagaaacaacaacccggaaggagagccaacccgacccccaccacccacccgcccaagaaccgccgcaccccacccgccccccccacacacccccacacaccaccccccaacccgcccacccaaaaacccccccagaccgagaaaaagaacggaccaggaaaagaaaagagggccgaggacgaacagaagccagccaggggaccggggaagagaaggaacaaaaacgacgaaagcggcagaggcgaagacagaagggaggaaagaggaacacagccggagaaaacaaagggagaaaaagaaagaagagaaaaaaagggaaagggggaagccaacacagacgggacaggagggcggaaaggagaaagagagacaggggggggaggcacgcgaggcggaaaaacagcacacagcccacggcagaccacagacacgcccccaaccaccacccaaaagcgccggacgcacccggaccggcagaaccagaagccacggcagacacggcgggaagaaaaccacagccacaagacagacagcaccggcccaagaggaaaacaggggaaaagagaccgagccagggcaggaaccgaagagggagccagagagcccaaagccgggaaaacacagggccccccccaaaggcaacacgaccgagccccaaggcaaccaaggaagaaaaaccacaaaccaagggagggcacgggcacgccccagacccagaccgcagaggaaggggccccaaaagacacccaggcccagacccacaggacacaaaaccccaggggacagacaccaaaccaccaaccaacccagcagagaaggagccaccacaacagaccaaggcccacaggagaccccaccggaccgcagagaaagagcaagaaccccaacccccaaagagagcccccccaggggcccccagggacaacccaggaggaagagagggcagagaccgaacccaccagaaaacgccagaaaccccaagagaaagaacacagccagaagagagcccaacaaccaggggaggaacaaaagacaacccaaaccaccccaaggcaaccaaccacaaacacaaaggggcaaaaaaccagaaaggcaaagaaaacaaaaacaggaagaaaaaaacaaccaggggaacccaacaggccagaagaagaaaacgagagaaaaaaacagaaagaaaacaaggaaaaagaagaaaaaagcaaaaaagaagggaaggaaggggaagagacaaggaagagagaagaggaggaaaagagagggaagaggagagaaacacacagagaaaggagggaaacaaggcccagacgaagaggcacaggggacgagcgcagcacacacccccccaacgacaggaggaaggcgcagccacccagccgaagaggccagaaccccgcaagaaagggcgccacgacagcaaaccaaagagagaggcacaaacacgacacacagaaacgaaggaaaggacagaaaccagagaga

SEQ ID NO: 503 - RNA, 15061 nt, Mus musculus
gccaccgaccagcacacaaaacagcaacaaacaaggagccaagggagcacagggagagcacaaggcagacacaggccggcacaaaggaggcaaaggaaaaacaaaaaggacacagagaagaaagaccagcagacggagagagcagaggaggacacaccagagagacgcaggacccaaagagaaaaacacaccaaaaaaccccggggggcggagcccgcagccgcaacgcgggcgaggcagaggagcagcgaccagaccaacaggaggcaaaagaccaggcagaggcaagacaccgggagggagaccggggagacagggagggagggagaaaaaagaccaacagacaggacaagggcaggccgcgcaaagcagccaggcacggccaagcgcgagagaggcacagcgagaaccccggcaccggggccggccccgcgacggccaaggcgaggccggcgacgcgcaggccccggaaccaccgaacggcgcccacaaagaaaccagacacaggcagcaggcccaaccaggaaagaacaacagccaccagagcccgggcgagccacagaagcacggccacaaagacgaacgccacgccaggcgacgcgacagcgagccgccgccccggacgaaaacagagggcccgacacaccgacccgggcagggcgcgacacaagcacccaaaaggacaccacccagccagaggagggcaagaaacacaacgaaacccacggagggcccaagaaagggcgggggcagaggaagaaccgcccagaaagcggagacagagacagcacaaaagcaaaaaaaaaaaaagcacggagggaggagcagagggaagcgcacagggaaggagggcgaccaaaaaaacacaagccgggcgggaggcacaccaacccagcacgggaggcagaggcaggggacgagcgaggccagccggcacagagccaggacagccaacagagaaacccgccaaaaaaccaaaaacaaacaaaaaacagaaaaaacaacaacaaaacaaacaaacaaacaaaaagggcggaaagaggccagcggaagagcacgacgcccagaggccgagcaacccagcaaccacaggggcagcaagggagagcccccggggcgaagagagcacaggacaagaaaaaaaacaaaaaaaacacaaaaaaacaaaaaaaagcgcaaaaaacaaacccaccaggaacaaacaccaaacaaaaagagaagaaaaagaacgaagcaaaagaaaaaaaaagcgaccagcagggagcccacaagcccagcacgggaggcagacagaacgagcgaggccaccggcacaagagagcccaagaaaaaaaaagaaagaaagaaaggagagagagagagagagagagagagagagagccaggacagccagggcacacagagaaacccgccgaaaaacaaaaacaaacaaacaaaaaggaaaaccaaacaccccacggccacccaaacggaaaagggagagccacgcccccgccgaggaacccggaacaaggccaagaagcaggaacacgccacgccgcaaaaccggagcaggaccagaagaaacaccgccaccggaggcgcgccacgaggcacgggagccgggacgggcgggcggggcagccaagagccgaccccaagagagagagcacgcagcagagccggacagcagcagcccgcccccaggccggggaggcagggagagggaaaccggccagcaaacccaggcggaaaggcgagagcacagccccaaaggaacacagcacggacagacagacaaagagaaaggcaaaaaaaggaaggggaacgggagcgacagaaccaccggcgagagcagagcaagacaacaggccagagcccagaaagccccaaagcccccccgccccgggcggcagcgcgcgagcacacaggcccacaggccaggcaagcaacagggaggcaaaagaaaggggacagaaaagaggaaaacagaagacgaaaacaaaagagcccacacaacaaaaaaaaaaaaaaaaaacaaaaaacaaaaagccccggggggagagggacggacagccaaggggggcaacacgagcaggccggggaggcagccagcagaagagcgccgcaacagacacccggagcagacagagcacaggggggaacagcccaagccagcagcacgggaggcacagggacagaaaccacggaccagccgggagaccgggcgggacgaggcccacccacgagcacacaaaagggcaggggcacggccgccggcccccgaacccgagaccaaacggcccgaaccagaaacggaaaaggggaccccacgccagggaacaagagaaaagaaggaccaagacccagggggcaaaaccccaagcagacaggacaaagggaaggccagccccggaaaaggaagaacaaccggccaacaagggacgaaagacaaccaaaacacacccgcaacacaaacgaaaccaaacacggaggggccagaagaaacccacagcaggggccaacacgacagggacaggagaaagcaaacaagggaagggccccgggcaagcagaagagaccaccagaggggagaaaaagaccaaaaaaagaaacagccagaaaggcaggagccaccacacacaggcaagcgacgacaaagcgagccacagggccccagaacgggcgccggaaaagcaaaagccaccgcggcccggaagggcacaccccaaaagaccaagaaagaaacgacagacgagaaaacgagagaaacaggaccagagaagaccgggaagcaggcccagcccagagccagagccaagaccacaaggcgcaaggccaaaagcgcccccgccaacacaccacaggcacaacagaaccgcaagcaccacaagaacgcaccccaaccagggcagcgggccaaaccacacaaccgcagggcggcacagggcgcagggcggcgcggccgacggggccgcccgcaggggggcccacgcccagcgcacccacggaccccacacaccccccccccccccccgaccagaagcccgacggacagcccgaaacgagaccagcaacccaaccccagcaccaccgacccaaaagacaaacacaccccacacccaaaacgacaaacaaacaaaccaaagcaagaacacaacccgaccaccacacccaccacggaacaacaaaacgagaaagagagaacggggccccgacagcaagccaggggcagggacaggcgagaaggcacagggggcacacaccaggggcgccccagggaaaagcagcagagggagaagcagccaggcacggagccccggcgaggcacacagacacaccacaacaaacccacgaacagcaacaagagcaaaagcgaaaaaaaaggcaagcagagaaagaccagggagacaaaacgggaaaaacaaagaaaggaaaaacaagacaaaaacaaaagaggacagccagccaccagaacacgagcagagcacacagaaagaacaaaacagaccagccaaggccaaccaggaaggaaaaaaaagacaaggggagggacgaggaacaaccaggaaaaccaggcgagcacggaaaaaaggccaagaagggaaaacagcagaagaaagaacaaaagagaagacagagcaagcgaagacaaagcaagaaccgcaacagaacagcaggacaaagaaggaaaaaaaggaccagcggaggacaaacacacaaaaccagagaggaacccccagcagggcaaaaagcaaaaaaaagcccccccccaaaagaagagaccagcaagagagaaacaccaagcacacggaagcagggccagagcagaagaccaaggaccaaagaaacggaaagcggagaggcggaaagagccaggcgaaagccaacaacacccagaaacaaacaaaaaccaaagaaggaaaaaaaagacacagaaaaaaaaagagggaacgaccacaagcacgaagcagaaggaaccacagaaaagcaaaacaaagaaccacaaggccacaagaaagaaaaacagccaaaagagagaagaggagaaaaagaaccccaaaccacaaaacagcaagaaacaacaaaaaacaaaaaaagcaaaaaaccaaaaaagaccaaccccagcaaagacgagacggaacgaagaaacacggggcagaagcacaacaccgccgagaaccaggcaacccagcacgagccagggccacaaggcacggaacccagccaggaaacgagccccggcccaaagggccggcgggacacaagagacacaacaaccaaaaaccaaaaaaaagcaaaaagcaggcaaagaaggacaaaaaaaggagccacaaaacaaaagcaccaacacaaagcacgaaagccccaacccccccggcccgcccccaacccacccacccgcccggcccaggagccacaggcccaagaaacccagcacacaaagaagacaggcaggggaaaggagagaaaagcaaccaagccagggaacagaaaaacaggagcccaacgacaaaaagacgcacaccaaaaccagaacaacaaagggagcagcaacagccaagaagagacagaaaaacaaacaaaccacaacaagcagccagcaaaagcaagaacacacagggagcacagaaggagggagaacacagagagcaaggcgagaccagccaccaaaaggcacccaacaaagaaaacagcgaaaacgaaaggacacagcaagggacaacagacacgcagaggccaccaaacagcaaaaaccacagccagcgccaggaacaaggacacaaagcaagcacaaaggaaacgaaaacaacggacacggaccacaaaacaaagacacaaaaacagcaagaaaaacccagacaaagaaagaaacaaaaaaacagagcaagagggaacgaaaaaaagaaggaaaaaaaaacagaagaaggaaaaaaaacacaacaacaaaccacagaagaagaaagcagcgaagaggaaagcaggcaagacaaagaaaccagagagaaaccaggaggggggcacacaacccacaggggaccagaggcaagagaccggagagagaccagcagaccacacggagccaggagcggggaacacaggagacccgccaaaaggaaaaagaaaaagaaacaaaacagcagagaggaccagcagaaaaccgaaaaagaagcccaggcaaacccaaacagcaaaaaaaaaaacaaaaagggcagaaaaagcaaagaaagaaaaagggcggagagaggccagcggaagagcacgacgcccgaaggccgagcaaacccagcaaccacaggggccacaaccacccaaagagacgagcccgggggcgaagacagcacaggacacaaaaaaaaaaaaaaacaaaaaggggaaaaaaagaaagaaagaaacaaagaacaaggcacagagagcgaaaagacaaaaagacaaaaacccgagacaaggaaaaaccaaaagagagaaaaggaggcgacaagaagcaaaaagcaaaacacaaggcacgaaaacaaacccacaaacggaaaacaaaagaaaggaaacaccaggacacagagacaaaaaaaccaagaggagagcgacaaaaacggagaaacaggagaaaaagcaaaaaaagaagcccacaaaaaaagccaggcccagaggacacgggggaaacaggccaaagaagaccagccaagccccaaacaccaaacaagcaacagccagcccagagagcacaaagacacaacaacaaaaaagacgcgagaacaagcagaaaaccaagaaacacgaaccaaacaagaacacacaaaaagacacaccagacaagcacagaaagcagggcggaaaagaaacaaaaaagcacaaaagaaagggacaaggacacaaaacacggacaccccagagcagcgaaagaacaacacccagaaaaaccggagaaacaagaacaaaaggcaaggaacaaccaacaaaaaaaggaagacaaccacagcaacaaacaaaggggaaaagaagcacccacgaaaaaagaacaaaacaaagggcccacacccaccaacaaacagcacagaagcagccagagcggcaagacaagagaagaaaacaaagaggcaagagaaaggaagaagcgaaccacccagcagccgaagaccgaagagaccaagcaaaccaaaaccaaaagcagaaacaaaaacaagacaaccagcaaaggacagggcacaaacagaaccaaaaaaccacccagccaacccgcaaaagaccagaggaaaagaaaacagaagaaaaaaaagagaaagcaccagaacagaaagaccccacgggagaagaacaaaagaaaagagcaggcgaaaacaagcagacaagcaacacaacaaacaggacacccagaaaaaacaaaaaaacaaccaaggaagcacaagaaacgcaaacaaagcaaccgaaaaaagaaaggcagaaaccccacccgacaagaggcagaaccaaggaaagaccaaccagaccaagcagagaaaccaacgaaaagaacagaacacagcgcgaaccaacaaagaacaaaaacgcaccaagccgaacaaaggagggggaaaccagagagagcacagaaaccaaagccacagagccgcacaacccaaccacaggacaagaccccgacagaaagcgaaacaccagacgcggaggaggaagcagggaaagccaggaagagagagagcaggcagaaggcaacggggccggcaagaaaacaggacaagaccaaaaaggaaccagaaaaggagcacaaagcaaaggaaacgcagccacggaaaaacaccgacagaggggagaaaaaccgcagcacaaacaacaagacagaaagccaaaaaaacaagaaaagaaaaaaaagaaaacaaacaaccagaaaaaagagggccgggaaccaacacgcgaaaagaagaaaacaaggaggaaaacacaaggaggccaaacaggccacaggaaaagcaaaaaaaccgagaccaaaccccagcagaaggacacaaaagacaagaagaacacagcggcaaggaaaggggaagaagaaaccccgcacggcggggcggacgcagaaccgcgaacaggggagggccaaaaagcaaaagagcgcaggagaggacgccacccgaacaccccaaaggacccacagcccccagggaaagacccgcacacgccaagccccagagagcggaaaggaacagggcccaacgagagagacaggaaaacgaggacaacacaacagaaagcagcagaagaaacaagaaagaagccaggggcagcacacaccaaccagcaccaaggacagaggaacagaaccgggcaaggccagccagcacagagcaagcaggacagccagagcaccagagaaaccgcgaaaaacaaaaacaaaaacaaaacaaaacaaagacaaaacaacaaaaaaaccaaaaagaaagaaaaaaaaaggaaagcaagaaaaggggaacagaaaccaccaaggagaggccaggcagaaagacaaaacgcagaacgcccaaggaacgagcagaacagagggaaagagccaggaagagaaaggacccagagcggaaagaagaaaaaaaaaaaacaaggggagaggagaaagagaagcaaggaggaagcagaggagggggacacggagaagcagaggcagaggggagcaagcaaaagacccacggaaaccgccagcagacagagagggggccaaaacaaggagaggaaaaaccaacgaaagaacaaaaaacaaaaaaagaagggcaaacaagaagccgacgggagacaacccccagaaaacaaggacaaagaaaaccagagcaggagaaacccagagaagcagaagcccaaagcaacacaggaggcagcccaaagcaggggaggacccgggcgaagacacaaaaggggcaggacaagagaaacaaccagacccacgaagacccccgcggagccacagcccgaagagcggcaggggcgaggagaggagacagaggacaccgcagccaaccaggccaaggcgccacccaaaggaagccaacaccaagcaaccaaaagcccccacccacccacccccacccccacccacccaccccccccggcccggcgccccgaccggggcacacaaagcgcggccaagggccccccaggaggccgacaggccacgaacaagcagcagagcaagagccaggggacggagcaaaggccaccaaggggaagacccagcccgggaccagcccccagcagccaaccaaagcacacgaaccgccaagcaagaggaccaggccaaggcagaaggcggggccaaccaacgccggaagacggggccgaccaccggaaggaacaggcaggcaaaaacggccaaagccagaccggaggcaaggccacagggagaaagcgcaaagcccagaaccgcaaagacagcggccacggaagccccaggacagcagaacaagaaccaaacggcagacgccacaccagccagccaaagggaacaaaagcaacacccccccccgcgccccaaccgaggccaggggccaaggaggagggaggacagagggagaacaggaggaaaaggaggagcgcggaaggcgcggggacacaacaggcccggaccgggacacgggacagacaccgagggacaagcaacaaaacaggaacaccaacaggcagcaccaccacacaagagcaaaccagccgaacaaaagacccagggcggccacacagaaccaaaccggaggccgaggcaggaggacgggagccaaagcaagaacaaaagaagacccgccacaacaacagcaacaagacacaagaaagaacaacaacgaaagaagagccaggaagaaagacgcccgcacagccaccacccagcccgaagccccagcccccccacccacgcagcaagcccgcccaccagggccccagggaagcggccgagacgggcaaaagcaaagcaaaggaaggaagcaagggagcaaggagcgacgaggccccgccccgccccagaaggccccgccccagaacggccccgccccagaaggccccgccccagaacggccgccggaagggaaacagaggcaccaggagaaagcaaagaacccggcaagccgacagagcagagcaaagcagaaaaaaagacccaagcagcagggcaaacagcccgcggacagcggacgcgacacaagaaagacagacacaccaggaccccgacacgcagcacagaccagaacggagaaagaacaaaacaaaaaaaggaacccaaaggaagagagaaaaaaaagaaagaggaagggaagggagggaaggagaggggaggggaggggagaggggaggggaggggagggagggcgcggcacccaaagagaagggaacaggaggccaaaaggaagaacagccagacagcagggaccccaaaaaaacaggagagcggcgggagccagggagaggccgccaccaaggcaccgggccaaccccaaggagggaagcgggagggcagggaggaagcgaagagacagcccgcgccgcgcgacacgcagcacgcggaaggagcgcacaaagcccggggaaaaggccaacacaccagccacccggggaagccgcgcaggaaaagagacaaacggggaaaccgacggagcacagaacaaaaagcacgccagccccgacgggccacaggggcccaagggccagacccccagacaaacccccccccgaacggggaagccagacaggcccacagggcacgaagcagagggagcgaagcccacaagcgacccgcgggggcaaccccaagaagacagcaaacaggcccgagcaccgccccagggaaccaggggccagcccccaccagacggagaagaaaccacgagaggcgaggaccacccacaccggaaagcagggagggagagcacagccacgaagcaacaacgacaacaccaagaacacaacaagagacaggcaaaaaaaaacacaaaaggggaaaaagcaacaaacacagaagaaaagcaaagaaggccaacgcccaaggaaaaagccgcgaaaggggcggcagaagcccaaagcaaagaaaaaaacccagggacgggccaacacagaccagcgcgaacacgaaaaaaggaaaacgggggagggcacagaggcagggccacaggcgcaaaccggaagaggaccgggaagaaacgaacggccccaaagagcagagcacaggagcgcgagcacacaaagaacaaacagcgggcggggccacacccgggccggcaccaaggcgaacaccaaccacgaaccacagccagcccggggcagacaagacacgacaaagcggggagcaacagaaaccagggacacgagaacccgaagaggcccagaggccggggacaaacaggaggacacagaaggaggagggggggggggcaccacgggggggggggggcaccacgggggcgcgcgggggcaccaccggggggggggggaggggggcaccacgggggggggggcaccaccgggggggggggggggcacccacggggcggcacccgaagggggcccagggagaagcaagccgcagaggaccggccaacccgaccgcgagagccaaacgaaagagcaggaaagggaaagaaaagaaacgaaggccagaagaggcaggcacacgaaacccgcacgaaaaagaaccaaaggccacacagcgccacagggcaacgcacacacccaagacgggggagaaagccaagcaaggcccgccgaggagaggagccaaggcccagcaacgagcaaaacagcccagagagacagaaaaacagaaggccgggaagaggccagagaggaggccacagcccacaaaaacccaggcaaccaaaccaaccaccggaaccagcccggggaacaagcccgacccgcaggccgaacacaggaggcaaggccccccccccccccccccccccccccaggggggggggggccccacacacacagaagagagagagagagagagagagagagagagagagagagagagagagagagagagagaaagaaaaaaaagcaggaaggcaagagcagcagagcccaacagcagaggccccggaacccgcgaaaccagccacagcaggaggaggaggaacagcagcagcagagaggaagaggaacagcagcagcagcagaggaggaggaacagcagcagcagcagcagcaggaggaacagcagcagaggaggaggaaagaacagcagcagagaggaagaggaacagcagcagaggaggaggaggaggaacagcagcagcaggaggaacagcagcagcagagaggaagaggaacagcagcagcagcagaggaggaggaggaacagcagcagcagaggaggaggaacagcagcagcagcagaggaggaggaacagcagcagcaggaggaacagcagcagcagaggaggaggaggagcagcagcagcagcagaggaggaggaagaacagcagcagaggaggaggaagaacagagcagaggaggaggaagaacagagcagaggaggaggaagaacagagcagaggaggaggaagaacagagcagaggaggaggaagaagagagcagaggaggaggaagaacagagcagaggaggaggaggaacagagcagaggaggaggaggaacagcagcagaggaggaggaggaacagagcagaggaggaggaagaacagagcagaggaggaggaagaacagcagcagaggaggaggaagaacagagcagaggaggaggaagaacagagcagaggaggaggaagaacagcagcagaggaggaggaagaacagagcagaggaggaggaagaacagagcagaggaggaggaagaacagagcagaggaggaggaggaacagcagcagaggaggaggaagaacagagcagaggaggaggaagaacagagcagaggaggaggaagaacagagcagaggaggaggaagaacagcagcagaggaggaggaagaacagagcagaggaggaggaggaacagcagcagaggaggaacagcaagcggcggcagcagcaggaggaacagaggggaggcagcagcaaaccaccaagaaaacgaagaaaacaggaaacaagcaaagaaacgggaggcgagacaggggcggagcagcccggcgaaggaacccacgacaccagcagccccaaccacacagagcgccaccgcccgaagacggaaaaagccacaccaccagcggggccaaaggcaccagaaaacgccccaccccccaacgagagagagaaagaggaaagcagaaaaaacacagaaaacagaaacaagaaaaaaagaacccaaaacacggcacagccaaacaggacagccacacgaaaaaaagagcaacaaaaaaggacgaggccgaagggcaacaacaaaccaaagacagcagcaacgaaagcaaaaaagaggaccgaaaaagaagcaggcagaaccaaccccaaaacaacccgggcccccccaacccagggagcggacaccccagaaaggccgagcccagaaccgaggacaggccgggaccagaagggcggaaaaaaaaaaaaaaaggaacaggagccggcgaaagccagacagggcgagcaggcgcccccggaggcagggaagcgaaagcaggccaggggaccagagccaggagaccacgacaggcacacacaaggaagcgccccacgcaaggaagaaaaggccaagcgaaacaggggcgagcaaaaagcggcggaccgccaggagcacggcacgagcagagggccagagccaagggagggaggcggcagggcaccaccagccaagaaagaaaaccagaaggcacaacggccaggggcccaacacccccaagcaaccaaaaacacgggcgaacccaaacccagaaagcggagggagcagcgaaagagccagggccgccaaaacaagacccgaggacaccgggccgccagccccgaaagcccccccgaacccgagggggccagcccccccccgggccaccgacccaacgcaacccccggagcagcggggacaggagcgagcccccacccggccaccacacaccaacgcggggcgcagggccaccagcgaccagccggccggcccccaggaaagggcggcccggccccgagcgagccggcccacgccaggaaccggaacacagacagggaacgagaggaacaagcgccagcggaccggagcccgagacaggcaccaccccccagcccccccccagaggaggcagccgaaaccggcacccagagaaacagaaggaagaggacaggagcgaggcggccagggcagcaaggaggccagccaaacgagccaaacgcccaagaggcagagacagcacaaaaaacccaaaaaaaaaaaaaaaaagcggcgcgcacacaaagcagccaaacaaaacggaagaggcaaagccccaaacggcggaaacccgaagaaaaacaaaagcccaaacaaaagaagggaagcgccgagacagggccggaccggcgccggaaccacgagaccagccggcccgaaccagaaacgccgcccgcccccaaggccaccaccgcccggcgcaaaaaaaagccacaaaaaaaaaaaaaaagaagcggagaaagcggggggggagcacgccaacccagcacgggaggcagaggcaggcggacgagcgaggccagccggcacagaggagccaggacagccaggaaacacagagaaacccgccgaaaaacaaacaaacaaacaaacaaacaaacaaacaaacaaacaaaaaaaaaaaagaaaaagggaaagaaaagaaaaacaaaaaaaggagcggagagaccgcaggggaagagcacagcgcccagagaacggggcaacccagcaccaagcgccacaacgcgaacagcccaggagaccagcacacaaacaacagcaagcaaaaaaaccacaagaacaaaaaaaaagaaacccagaaaaacaaaaacaaacaagcaaagaggaggaaaaaccaacaccccaaccgacacagaacaaaaaaaacagagaaaaagagaagcaggcagagaaaagaccagggaggcaagagcaccaccaaccccaggacggacaggcaggaccacaggagaagaagagaacgcccacaaagcccgcaccacacacaagcgggcacagcacacaaagaacacacgaaagaaacaaaaaagacaagcaaccaaaaacaaaccaagaaaagaaagaccaagaacaaagaagcaaagaaaaacaacaagaaaccagaggagacaacacacccaagaaaagaacaaagcgacaagcaggcggaaaagagaggcaacgaaacgaagggccaggagcaaacgcaaacacgaagcacccagaaacacccccaaaaacacagcaaaaagcaaaagccaaaggggacaaccaaggcaaacaaaggacaacaaaggaaacaagcgggcgggagagacaggccgacaacaacccgggccggaaccacagcagaccaggcggcccgaaccagagacgccgcccgcgggaaaagagggaccaccagccagcaacagaagcagaaagaaagccagcacaaaaaagacaggagacccacgaggaaggcaaaggcagcaaagagccccggcaagaaaccagggacgagggagcagcacccgaggaagggaacgggaagcaaagcacacccagcgagagagagacacagcgaacaggccccacaaagggagagaaaaagaaccaacaagcagggcaagaaaaaaccagggaggcaaggcggagagaggggcaggcgagggcgcccggaggacacaacggcccagggaagcgaccggccccaaaccagcaggccccggaagacgaggaggcgggaaagggagggcgaagaaagagagcgccccgccaaaaccagagagccccaccacagaagggagaacgggagcagccgaaaaccacaccaggagccaacggggccgagccgagggaagaaagcggccaacccacgcgccccagcggaaaagccccgcgggacgggcaagcaccaaaaaaacaccaaaccaagggaaaagccaagcaaacacggaggaaagcccccaccagaaaagaccccccccccccaacggaa

SEQ ID NO: 504 - RNA, 6883 nt, Mus musculus
aacgagacaagaaaccaccgcggggggcacccaccaaccagcacgggaggcagaggcaggcagacgagcgaggccagccggcacacagagagccaggacagccaagacaacagagaaacccccaaacaaacaacaacaaaacaaaccaaggcccagagaagaacgacgcagacaaaaaacgggaaacaagccgggcccggagccagaagaggccgggacccggaacgaagacagaggggaagcgccagggggcgggaacgaaaggcccgaagagcgagggccaacagcgaccaccagacccgaaaaagcaaaaagaaaaacccaaacagaacaaagcaagaaaggacaagaccaaccaccccgaccagacagggcaccccagaaaggcaacaagcgcggccagaacaaggaagaaacagagagaaaagaacacagggcaaagacaacaacaagaagaggcaggggagggcggaaagggcagccagcccaaacgccaaagacaaaaacaaacccacacaaaaaccaacggagggaaagacagaacgacagacagccgaaaacagaaggccacgaaaccagacccccagcaaaacaagagcacacacaagaagaaaagcgcagaaaagaccaagaaggagaaacaggagcacagagaagaccagagcccaaaaaagaaaagagaccaaacaggaaaaaggcagaccccaagaaaggagcaaacgggagaaaacaaggaaaaacaagacacagcaccaaaccaaagaaacaagaaacaaacaaaagaaaacaaaaagcaagcaacaagccaaccaagaaaaaaaaaaaaggaccaggcacggaaagcaagaagagaagcgaaggcaagaagaaccaaaggaaaaacaaccaggacaaaaaggcggcaccaggggaaaagaaaaacagaaaacccaaacacggacaaaaagacagaaagaggaccgagaagacaagcacgaagaaaagaaaaagcaaaacccagagaaaacaagacagaaacagacacccagaggagccagagaccacagagcagggcccaagcccagcagggcggagccacaggccagcagcccccaagggagcagaggcggcaagaggacggaggacagcaaccaaacagagacaaacaacagaaaccgaaaccgagaacaagccgaaaaaaaaaagagaaaaaaaaggaaaaaaagaacaagccacagccaccccagaaacaaggagcgaggcaaagcccaggagggcaagaagagccaaagacacgcaaaaggacaccaggaagagaaaggaaaaccaacagacccccccccccccaacccccccccaaccaagaagaagcggaaaccaccacaccacacggcgcgggaccgcaccccaggcaacaacagaggagaaacaccagagaggaagaccagccacacacaccgaaaacggcagcaggacgcccacggaggaaggggaaggagagacacagagggaaagaaggccagaggcacggaagagccagcagagaaagaaacagaccaggccagcagccgggccggacaggagacaagcaagaagggggcggggcaaagaagaagacaaagaaaggaccacagaaggcaaaagagggcaaagagaacacagcaaaaagcggacaaaagggagggaaggcgggggagggaaacggggaggagcgcaaggagcggggcgagggggaggccagcggcacggagcaaaggcaccacaggagccggcccccccagaggaaggaaaaggcccggagaggagaaccgggcaaccaaccagacggggaaaggagcccggaccgacacacaccagcacaccacggaaaccgaacaaccagaaggcggggaaaccagcgcccccgggagccaggcagaggcccacccagccgcaaagaccacacacaccaagaaaccagagaaaggcacagcacggggggcaggggagggaggggagacccacgcagcaaagagcagaagaccccccagccgagccccggaagagcaagccccaaacgacaaagaaacaacacggaggaggcccgaaaccgccccccccccccacaaggaaaaccccgagaagccaagcaaggaaagggaacaaaagaaacaaagaaaggcagagcagcccagagacagcagaaacgcaccagagccagggggaggccagagaaaagggcagcccccagagaggagcgggagccagggggacagcgcgccccagggcaggaccaagacagcacggaggccacgcccccccccccccgagccgcgggcaccgggaaggccccccgccaccggcaacggaaggagaaacaggaccaaagcagcacaaaagccaacggcgcccgaagaaacacaggccaacaagccggcaaagggccggaccagaacccagcgcgccggaacagcaaagccaacagggacgagaccgcccccccagcacggaccagggcacacgaaaaggcaacagccgcaacagccccgagccggggaggaaagcaccccaaagccccccccgggaacaaagaccaaggcaacaaccaccgacaagaaagagaaccaagcaggaacccgaaggcacacccggcacagaaggggggggggcaaaacaaaaaggaccgggacggcagaggacgaggacaaccaaaagaacagaacaaaaaaaaaagaccacggggaagaaaacagaagggaaagaaaaaacaacaacacggaaagaaaagacaacaagcacaaagagaaaaggaaccccaagcaagaaacaaggcaacgccaacacccgagaagccagagacaaaggcaggaaccggagccagcccccaaaggaagcagagaggcgggagaaaaacaagccaaagcagaaaacaagacccagaaaggagcccgggaaagcacgcgagcgagaccgagcaacccagaacccagaagagaagagaacgaccagcaaagcccgacccaaaggggcaagcacacccccacacaggaacacacaacacacaagcaccagcaacacacgcaaaaaacaaaaagaaaaaagaaaaacaaagaagccacacaagaagagaggcaaaagccgccaaaaaccagcagcaagaaacaccaaaaaagccaaaaagaagacagggcgggcaacagcaacacccaccccccaccgaccccagccgaccaacccccgaccccccccccccaccccaacaagcaggcacagggagaagcccaaaccgacaacaagaacaaaggacccaaaacaccacgcgacgaaacgaacgagggacaaagcagaacagcaacccgaaaagaaaccacgaaaccaaaaggggggggcggagacacagaggaggacccgaggagcccagaagaggggccagacccgaagcggagaagggggggagcgcgaggaaacaggcaagaagaaagcgcaaccacgagccacccagaccccgaagcagggccagagcacagaacaagaagccaaagaaaggaaaggagaagagcaagggaaggaagccgaaaaacccgccccaacgccggcagagcggcaggaaagaaacccgacaagacacccccacaaaaccagaacggagacacaggcagagccggcggcccagaacggaccggccccagccgaggcgggaaagcaggcaccagccggcaagccacccccacccggcccccccccccccccccccccgccccccagccaggcacggagaaagacacaaagcccaagcaggcaggccgaaacagagacgcccccgaagacgggaaaaaaaagccccaccaaccggccgagcaacgacaggagcagaacgacacaaccagagccaggcaaaagcacagaggccccgcacagaacaggaccagggagccgccgaggggggcacggggacagcaggacccccacccagccagggaaacacaaccgagggacacccagccaagcgaaaaaaaaagacaagcaagcaaaaaaaaaacaaaccccccaaaaaaaggaaacacccccgcgggaacccccaagggacaggaaacgcccagagaaaagggcacagcaccggaccaacgcgggggggggaccagcaaagaaacaaaaaaaaaaaaggcaaccaggaagaaggagcaacccggggaccggggcacaaaaagaagggagagccggccggaacgaggaaaccaacaagaacaacggggcgcagagggaccaggaagagccaggcccacagccaggaaccgaagaacaggccaggccaacaaaaaaccacggacagcacagcgcccgagcccgccggccaagaaccccaagccaccccagggccacagaccagggccaccgaccagggccaggaccagggcacagaccagggccaccgaccagggccaccgaccagggccacagaccagggccacgaccagggccaccgaccagggccacagaccaggagccaccgaccagggccacagaccagggccacagaccaggagccaccgaccagggccacagaccagggccacgaccagggccaggaccagggccaccgaccagggccgcaagccccggacaggacccccgggaaaagaggacgcccccggcccgccaaggacaagacagcaccgggcaaggggaggggaagaggagcccaggcgcagccccaacaggagggacaggcacagcagcacccgggggcaagagagcgccaggaacccccgcaaagacgcaagaacacaagaaagacacaacccggcagaaggagcgaggagccggcaggagggaccggccgaccaccgcacgcaggcgccagccaacgccagcaaacgcagaacaagaacagaacagagcagggggcgcacaccaacccaacacgggaggcagaggagacagacccggagcgaggccagccagcacagaggagccaggacagccagggcacacagagaaacgccaaaacaaaacaaaacgaaaaaaaaagaaacagccggaaaacaccaagaaacggagcacaccagaccccgccaggcagagacaaaccccgcacgcccccccccacccccagagcgagcccaaaaggaaaaacaaaaacagacccaggacaccagcaaggaaaaaaaaaaaaaaaaaaaaaaaaggcagaccagccaaacaaaaacaaaaacgagaggccacaacgaccagccccccccagcaccccccccccacacacagaaaagcccacagccacaaacaggagcgacaaaccacaaggaagggggcagccaggcccgcccacagaccggcaaagccaggggcgccacaaaaggagcgcgcccccccccccgccgcccgccgccccccccacacccgacacaccccaccaagcacaccccccgcaaaaacacaacaacggggcaaacgcacagaagaaaacccagggccagagcaggggcgccacaagacgaacgggagaaagggggaggggccgagggggccgcccacccccacgcagcaagaaagagccggcaagacagccccccaaacaacagaggcacaaacggggcacaagccagcgaagcgagcccacagagccgcgccaaaagaagccagccccagcggacccaacaaggaggcaggcaggggagaaaaacagacgaaaaagaccaggacaaccagaagcagaaagaagagaaacggccaaacaacaccgaaaaaagacaggggggacgaaaaagaaaaaaaaccaaaaaaaaccccaagaagaagaagacgcccgaaaccgaaggaaaaggagcaggaagaaagccaggcaccaaaaagcccaaaggcacgcagccaaagaagggcagggacagggaaagggagagcgcacgggaagcaggaaggccgagagaccccaaaacgggcaccaaaccccagcgcggcgggggaggggaggcaagacaggaggagcagaggcgcggccagaagcagcgaaaaggccagccaagagagaccgccaaaaaaacaggaagaggaagccacgaggaccgcggaaggggcagcacgggggaacgggacaccggagggaaagggaaaaaaacagccacacagccaaaaggagacaacccacaacaaaaagaaaaagggcagggcgggggaccggggcagcacaggcgggcaagcagcacacagggaaaaaaagaaaggaagagccaggagggagaggcacagagggaggggaagggggggcccgcgggcccacacgagggccagcaaggaagcaaagacagagaaggacaggggaggggaggagggggagaggcaaagggagagggggggggggcggaacaagggagaggggggggaagaggaagaggagaggacaggaaggagacaagaggagaaggggcaaacagccccaaggagcaggccagaaggaaagcaacacacacacacacacacacacacacacacacacacacacacacacacacacacgaggcagagaacgcggagcaaaggagcaaccaaaaacacaggaagaagagcgcagacgcgcaggccaaaggaaaccaacccaagcgaaaaagcagccagcaccacaaagagccaaccgcacgaaaggacggcacaagaaaaagccagcacccaggaacagaaaccggcccaccaccaaaaggaggcgcccacccagcaggagcagggacaccgggcaacaaccaaacaaagccagcggcccaggccccccgacagccacaccgacacacccagagccaccaacccccccccccaaccccccccagccgggcccccccagcaccacccccagcccgcccccccaaagccgccccacgcgccagcccaccccgcgccccccagcagaagcccggccagccggcccaacgccgccacc

SEQ ID NO: 505 - RNA, 5528 nt, Mus musculus
gcacgggcaggcaaagcacgaggaaaacaagaaggcagaacaaagaccccaggggggaaaaacaccacaggagacagacggggaggaggaagaggagcccagagccccaggccgggaagaaaggggaagggcagagagggaacggaaagaagccgacccacgcaacccacagccagacgcggagacccgaaaagaggcacaccaggcacagacagggaaggcgccacagcccggacccgagacagaagaggaggaggaggaggaggaggaggaggaggaggaggaggaggaggaggaggaggagggccagcgcagagaggaccagccacacacagaaaaaagcccaaaaaagggaacaacaccacacacacacagagagagagagagagagagagagagagagagagagagagagagagaaaacagaacacagagacagacagacagacagaaagccagagagaaagagaagacacccacgccccggggggagggacacggccacagaggccccaagaggacaccgacggcgagcgacaaagccgccacagaaccgacaaggagcagacccccccgaggagcggagccccccggcaacggggggcccacaggcgggggaaaccacaaggcagcgagcaggcaccgcaggggagagggggcccccggccagccccggacagcgcacaggagaagcagagccaggaaggggcacacccggcacgaagcgaagacggaaaggaaaacccacccaccccccccccgccccccaagaagccggagcaaaaaggccacacgcacaggccgaggaagagcagcagaggggaccagaccaagacccccaggcaggggagcggggggggcagaagagggcaagccaggagggcaggcggggggagggcagaaggggacggagcagaggcagcgcagcgaagaggcgcggcaagaagcccccaccaccccacgggcccaggaggcggggggagcacccaacagcggggaccagaggcccccccggcacacaccaccccaacccgacccggccccaccccccaaccaggcacccccccccaacccccagcccccggccgcgaaaaggaacacacgagggaggcacccgcagcggccaaggcccccacccaaggaggacaagcaccggaccccaaccgacaaccgaacgagccggcggagggcacccagaaaaaggaaacgcacaaggcaagcagcagaagcaagggagaacgcccccaccaaggggcaacccgagcgcgagcaggagggacgaaggcgcagcgggcaacagaccacgcagaggccaagggagcaggccccgcccccacaccaagcacaagagcgagagaccagaccacaaccaagcggcaggaagaaccgacaggaaagagccaccaagcacaccgcggcagagaacaggcccgacaacccgcggcaggccgggcccaggccgagccgccagcgccaggcacagcccacagcagcacagccggccgcacagggccccaccgcgccccggggccccggggaagacaaggcgccggggacccacaccaagcaggacacgagcaggcagacgggggccagggcaagggacagagaaggaggcggcgccagggggccgagcacagcacagagccccgcaacaccggcggcccccccaggagagagcagacaagggcacgcagaccgccacaaacgcaacgaggaagacgaccaggcagacaaacccccggcacgggcaagccccagggccggggccacagaagcaaagcaaagaccagagaagcgaggcagcccggaacaccccaccagcaccggacacccacagccagagccgccgaccaaaacaagacagggagacgaggagaacgaaggaaccccagcgaagaagccccccccccaagagagcaaacgcgaagggaagcgcgccagggcccaccgaagcaccgcgcagaacacaccggcgcgagcccagagcccccacccgaaaaaacccccccaccaacacccggcggcgagaggaccaacaacacccccaggaaagcaaggggcaaaaccccgacgccaccccgccccgcacgcagccagaagaaaggaagaggacggggaggagagagcgccggggcaagcacaacaagagaaaaccccagccgggcccaccaaagcaccacaccaccccacccgcccagacggcaagggagcacagaccccaggcacccacagggagggcagagcgaggagggccgccacggccccaaagaggaaaagagagaagggcaccccaacaggggcagaaaaacaggagacgcaggcccgaccacggacccagaacgagaagggcaacgcagccaaaacaaagggaaaagccaggaaaaaaacaaacaacgaaaccaaagcgcacccgagaacgaccacgcaccaccaccggaacaaaacacccaccgcgcaccagaagagcaccccccggagacagaccacgacaccccaccggacaccaggccagcaccccccgagcacagagccacgaacaggcgaggagaccacaggcgaggaacaacagaacagcccgaaagcacaggagagggcgcaaagcagacacaagggcaaaaagaaccggacggggcaaaacacagggagaagggaaacacaaggaccagggcagccaacagcaccccagcggaccaaaaccgacaaggacaaaaaggaagaacacacggccaggcggaggaaagcccaaagcagaggacacagggcaagagagcggcaggagaggggcacagccacgagagagcaggaagcagcgagagacaggaagggggccagacaaaacccaagccgccgcaaaggccacccacgggccaccacccagaggccaaacccaaaccaaaaccaggagcaaacaaacaggaaccgaggggacacccgcaaacaaagcgcagggcaaacaacgcgggggagaagaaccgcagaggaggcacaaaacacgagccaggcgcaggggagcgcacacagcacacccagccccaacgacaaacacacggaggagagacgccaaagacaaccagacgaaaggggacaagaacaaagcaacaaaaccacaaaaacgcacaaaccaacaccgagagcgggggggggggaccggcacgaagcaccacacaagggcgaaaccaggagagagaggcagggaggacggggggcccaggcggcacacgggccaggaccccgcacaaacccaaaccaacgagaggaagcccaaaaagggaaaaaagaagccaacaggaagcaaacaagcacaaaaagaagacccacaagacccaccaccccaacgccaagggagcaccacagcaacccacagccccgggcagcaccggggcgaccaaaagcagggaaaaaaagaggagaaaaaagccacccccaccacagagaggagccggggaaaggacaccggaagccggagaccccccccccccccccaagaaaagaagaaaacacgagcgcagacaccccccagccccacgcgcgagcgaccagacaccccagaagaggcacagaccaacagaggggagccaccaggggcaggagcagcagccaacagaggagcacccaggagggccccccaaaaacccaaggcaaacgacaaaaacgaccggcacaggaaccaagggagagcagcccggcagaacaaaaccggaggcaacagcagaaagagaaaagggcggccacaggaaggggcgccagaacgccccgccgaagaggccacacaggagggaggcagcagaggaagccacaaaccagggccggaagaggaagagggaagaagccaagggagaaggcgagaggccccgagccccaggaggaagcagggagcacaggggaaacaacaggcccagcacacgccagggcgccagaggaacgaacccaaccgggaaagcaagggcacacggagcgggggaaaacaccgggcccacgagcagagcaggaacaacgcggagccggcaagaagcccagagggaagaagagcagagaagccgagggaggcgacgggggaagcagaaagaagagcaacccagggccgaacaggaggcggcaggcgcccgccaacaaagagaccgaccggccagaaaccaagcagcgccacccggaagcccaagagaccagggggaccaaaaaaaaaaaaaaaaaaaaaaaacacaccaggacagccgccacaggaaggagaagaaggaagagaacgcggaaacaaaccccacaacaaacaccccaggaaaaggacgggccaggaggaagacaaggagggagccagggggaggcggggcggagaagccagaaacggccgcggccagagggacagggaggcagaggagccccagcgcccacccggaaagacgcccgggcccgcgaggcgccagccaggggcgaaaggcaccccaaagggagagaggaggcagaggaccagggccgcaggaaggacacagaggggggagaggaaacagggaagggggggaaaaaggaggggaagaggaggcaaagaaagagaaagaaggacgaggcggagaagaggaaggagagagcaagggacagagaggaggggccgagggagggaggagaggggcacagcggaaacagacggcagcacacacgacgcaagcaggggaccaaaacagggaaaagggggccgaggggacaggacaaggccagggagcaagcacaccccaccgagcacccgagccagaaccaccccaaaagaccagcgaaacaggagcccggacaccgaaaacccaaggagcccaggcccaaggaccagcccacccaacaccagcaaagaggcgggggggccgaaaggccagacgacagccgcggccacccaccaccggggagcaagaagaggacaaagcgagcgcaggccgcccgcccggcacaccaaccggcaaggggcagagagagccaggcaccggacccgcagcagaacaagaccacagccaccgacgccaagccccagagagcagggcgaaaacacgagccaggccgagcccgcacccacaggcgagccaagggaagggcccccgccgagggcaccgccgagggcacccgccgagggcacccgccgccaccgccggacaacaagagaaggagaccaggcagcccgcgagccaaagccaagacaagcaaacgggcaaaacaacaaagggaccggcgccaggcccagcaccccagcccacgaacaggggagcggcaacacgccccacccgaacccagcccaggccgggcgccccccccgagaggcccccacaaaccagcaggaccgccccgacgggcccagagcgccgcccccacccccccaccccagccccccccacaaggcagggccagaccccccagaggcgcccggcaagccccacacaaaaacccccgccaacgggaacagcagcagccccccccccccccccccccaggacccggggagcagggaagacccagaggggggcggagccagccgcaccaggacaacgaaccga

SEQ ID NO: 506 - RNA, 1305 nt, Mus musculus
aaaacagacgagacaaacaggaaaaaaaccaagaaaagagcacaccaaaccaggccaacgagaaaacaagaagagaggccagaagaaaaggagagggagagagaaggacaagcggagcaggccagcagggaaaacgccggggaagacaaggcagacaaacagagcaaaaacagcagaagagcacaaaaagaaggggaggcacacaaccgagggacgaaaggggcacagcgaggaagacgagaaccacgaagcagagaagacaaaagggggaggcaagaaagaagcgaaagggacggggccaggcccccccaccggcaccaagccacaagggggcagcaccacgccagcccagcggggagcaccggcgcaggcccagaagaacaggaccaaaagccggggcccagaagggagcaaaaaaccggccagaacaagagcacaggaagacagaaagagccaagcaaaccgacagcagggcagcacccaggagaaacaaagggccagacagcagggaaacagggggaagaggagggaagaccaaacaccagggaaacgaggccaaggggcggacaccaagggagaagggacaagacaagcagcagcagaggcaaagcacaggccagaacgacagccaccaaccaacccacccaggaagaaacaacaggaccagcagagcagcaggaaaaaagaggcaggccggacagggacccacaagggcaagggagacgcaacagccaaggcgcgagaagagcagaaacacaaaaccacaagggaacaaccagagaccacagcgaggcagagaagcccccagggacagcgacaggcggggaacaggaggcgaccagagaaagagccaccaagaacaaggccccgggcaggaaaaaaaaaaaaaaaaaaaaaaacacgcgcaagaagaaaaaaacaaaaaaccgggcggcaagaagccaccaggaagagcacgaccaccccgaaggccgagcaaacccagcagccacaggggccacaaccaccagcaagagagagcccccggggccgaagaagcgcaggaaagaaaaaaagaaacgggccggagcaagcagagcaagccgaggccaaacaacccagcaaccacagaaggccacaaccacgaaacaaaaaaaaaaaaaaaaaaaaaaaaaaaaaaaacaaagaaacaaaaagccaggacagggcaacagcaaaacaccaggagacgacaggggcaagagagcaagcaggcgagaaaacgcaccccaagcccaggaccgccaggcaggaacacccccccaggcaaaaggagcacacacacac

SEQ ID NO: 507 - RNA, 321 nt, Mus musculus
ccagcaaaggacaagaacaaggaaacagggcagcacaaagcaggaggcaccgacccagggaggcacacacaccgcggccaccccgcaagggggggcggaccccccaccaggaggcccccaacccgaccagccagaaagggcgcggccaacccagcaccgggaggcagaggggagaacggagcaaggccagccagggcaagaggagacccccgaaaaaaaaagaacaacgacaaggggcaggggagaggccggggaagagcacgacgcccccagcggccgagcaacccacaaccacaggagcgcaaccacaaagggacgagc

SEQ ID NO: 508 - RNA, 2684 nt, Mus musculus
agacacgaacagaaaagaaagaaagcaggaaaggagagcagccccacaacacaaacgaccaaggcacgagaaaacgccacagagacagcaggaagaccggagaaaaacaccacagagggagaagacaacccaggggggagacaaaaaagagaaagcaaccgacccagacaaacaggaagccagaacaaacaaagcaaaaaagaccacggagcacaaaacaagcacaaaacagaggaagagcaacagccaaaggcaggaagacccagcaagggaaacagagcgcaaagaggaaacgaacccaccacaagagaaaaaaggcaaagaagaaaaacagcaccaacacccaaaaaagaacagaaaaaggaacacaaaaaaaaacagaagaggagagggaagaggggagaagacagagaaaaagagagagaaccggggggggcacgcgccagcccagcacgggaggcaaaggcaggcggacgagcgaggcagccggcacagaggagccaggacagccagggcacacagagaaaccaccgaaaaacaaacaaacaaacaaacaaacgggacaaaaagcacacaaaaacaaaaaaagaaagacaaagaagcaaccaaaaaaaggacaaaaaaagggccaggcaacaaccggcagaaaccacgcagaagagagaggcagcagcaaaaacaagcaacaaaagcggcagcacgccacgccgacaaggcccagaccagggaacaagaaagagcacagacacagcaaccaaggccacaacagggaaaagacagcacacagagggaggcaaacagcgcaaagggacaaaagagcgagagcccgggaagccgggcgcacacccagcggcagagaaaacggaacagaagaccagcgagacaacagagcaacgacaggcacaagcccgaagacagcgccccagaaacacagaagaaagagaacaacaaacccaccccagccaccagcaggccagggaaaccgagcaaaagaagcaggcaaaagggaggagcagcagcggagcagagagagaaacgccacgcgcacaacaaaccaccaagacgcacaacaacacagaaaaaaaaacagagaaaaggagaccaggaaccacaagcaaaagcagcccgggaaaaacaagcaaaaacgagcgcaacccagcaagagcaaaccccccggacaacgcagaacaggcgcgcaaagcaaggacagagagaaaaacgaacgggcaggcaaagggaaccacccaaagcagcgggcagcccgccaccgagccgcgcagcagcccacaccacaagaaagacagagcaaccagccccaacaagagcacacggccaagcgggccccgagacggacgcccgagagcacgaaaacaaagcgacacagaacaggcagacaacgcagcgcaaaaccaggagaagaaggcaccagacaaagaggacaaaaaccgcccagaaagcaagaagagcggaacaaccaagcaggaagcggccacaggagaaacacccagccgacgagcgcccgcaggggaggccagacggaaaggagaaaccccgggcccagcacaaagaggaccacggcgggaggccaccggaagacccaggacagaagaacaccaacaacagaggcacaccccaaaggaaggccaagaaaagggaacggcgacccaaagaaaagaaagccaagaagaaaaaacagaggcaagaaacccccccaaccgaaccccggagcagcccccaggagcaaccaacgaaggggaacagaagacacagaggaaaggaaaggaaaggaaaggaaaggaaaggaaaggaaaggaaaggaaaggaaagagcaggagcaaagccaccggagagcacaaggcaacagaaaaggagaaaaccgcggaaacagcggacaggagggaaacaggggcaaaaaaaagagcgagccaggacagccaaggccgcgcggcgccggaacacggagaggcgcagccagagccgcgacccacaccacgccagaggccccaccaaagaacgccagccagacgaaacaccgcccagcaaccaccagggagcccaggaacacagcaaaaacccacagggacacagaaagacggcccaggcgcaagcaaccgcgcccccacacacacagacaggacaccccacaacccacacaacaacgacaaacaacgcgaaagaccgccaggacagacacacccggggggcgggcagggggaccgggcccaggggggggaggacaaggcagccggcagcgaggcagcggggccagagcgagcgcacagggacaaagcccgaaacccagagagagcagcaaagcaccagccggcgagagcaggcccccaggaacgcggaaagggggcaagcgcaacacaaaaagccagaagcagaaccaggccccagggaaaacccacacaaggagcagcccaaaacaccagcagcaagggccacccaccccccaaagagagcgaccccccccgcaagacaagccagaagcaacagccgacaaacagggaagaacagggagagcacaggcgaagcaccaaaggaagcagacagaaccacaccccccgccgccaggcaacaaaggaaccaacacggcacgcccgcgacaggcagacggaaggaaggacagcgggaagggaaggcaagaagagggagaaagccaccccgccccgcccccacac

SEQ ID NO: 509 - RNA, 47252 nt, Mus musculus
ccagcgaacacccggcgaagccacaacaccgaaccccagaccaagggaagaccacggcccgggacccgaagcagccacaaagacccagacacacacacacacacaagcagagaaaaaaaacaaaggaaaaagaaaacagaacaaaaggagaagaagcagaaaaaaaaggaaaaaacgagcacccccaacaaaaccaaaacacccacaggaaggccaggaaagcaggaaacaaggcgcccaccgaaacggaggccgacgcagcgagacgaggaacagccccaaccagaccgcggacaggaaccacacgggccaccccgagaagcgcgaaagagggacaaaaagggagaaaaagcaacaacccaccaaaaaacacaaagacaacagggaagaaccacgacccagagaaagaaccagcacacaccccggagcagcaccagcaaacgaaggaggcccggggaaaggagaggagacaaaagcacgaaaacaaacaaagcaagccacaagccaggccccaagcaaacaccagccaaaagccggggaaaaagaaagccaagacaaagaaaacaaaaaggaccaaagagaaagcaaacaaaaagagaaaaccaccacaaacagaaaggcgaaacaggccacaggcaaaagcaccggaaaaaaacggcacagagaagggaaacacgaggaggaaagagaacgggagcccccaggcaagcgaccaagggggggcggcccaccccgcccaggcgcccgcagaccacacacccccccagcacccaaaaacacccaagacggagcgagcagaaaaaagaaggaagggaaaaccacaccccagagcaacaaagccacagggagggaggggcacaggaaggacagaagcacaaccggaaccaaacaaacaggaaagcaaaggaaaagagcaaagagaaacaaccaaagcccaccgaaagagccaaaaagcgcacaaaaaccaggccagggcacgagaaacacaggaggcagggggggcaagaacacaacggaaccaacggcaccacgcaggcaaaaccagccagaccagcgagagaagcagagaccaccaaccaagaaacagaaagacagaaagccagaacaggccaggccaaggcacgagcagacaaaaggaacaagggcgccacacaaacggacaagcccaaggaaaacaccccccaacaggcagaagaacccaagagaaaagaaaagccacaagaagggggaaacaacccccaaccccaccccaacagcagaacaccaggaccccaagccagccccacgaaaaggagacaaaaggagacccaaaggagaaaagaccccaaagacccacagaaagacaacgaaaagaagaaaagaagagcgaacgagcgaaacaagaaaagggggcacaacaaacacacccgacacaaacaaaaccaagaacccaccccagccagaccccccccagagcccagcgacccaaaaacacacagcaggcaaggaccaaaagacaacacgggaccagacaaaaacacacgaagaaagagcccaggaccaacaacgaacacaggaccaccaccacggagcaccagcagggagaaagggccagagccccgccccgaaaccagaagccccggacagacagggaagacaggaacgcggagaggagcaggcggcaggccaaagacagcagcacgcagcccacgccacaccacccacgcgccccccaacccccgccccacaagccgaaccagaggaaagagagcagaggacgaaccagagccaccccagcacgaagaagaagaccgaaaaccagacagcaaagagaggaccgaaaaacgggagaaaaaacaaaccagaagagagcaaaaaaggcaaagaaacaacagagcaagccccaggccagggaggacagggcacagcaggcaagacccccgggaggggccaaaccaacaccccagccggagaagaacaaaggaaaagaccccgccaaaaggaacacagagcaagcaacaaacaaaagccagggaaaaacaacagaacacgaagaccaagagagccaaagaacccgaaaacagaagccgcggcaagcgcacgacaagaacagaagcaagaacaaaagcagagggacgcccaaaaacaccagaggaagaaggaaaaaaaaagagcgccagacaagagccagcaacaaacaccgagaaaaagagccaagaaaacagcaaacaaaggacgggaaaaagacacaacaagaaagagaaacggagcccacacacccaaaaacaagccaaaggacaaaacaaaacacaaagaggaagaagagaggaagccaacaccagacaaggcaaggacggagcaggcccccgggcacagaaagcaagacaaagaaaaaaagggaccaaaagcgaaaagcgagcacaaaaaaaacgcaacaggggaggagcagcaaaaaagagaggaaaccaccaaccaagccagaaagaaagacaggcaccacaacccagcacggcagagaagacaggcaggcaggaagaacagggaaacgaagacaagccaggcacacaagaaacaaggagaaagcaggaagggggaggccacaaaacccaacaaaacgaaaacacaagcaaagcaaaaacacacaagcaaaaaaaaaaaaacaccagggcaccagagaagacaggaaagagcagagccccgcagaggaccgcccagcccagcaccgcggaggaccagccaccgaacccgacagaaacagagccagacccacaggcacgaacccgcagaacacacacacacaaacacacacaacacacacacaacaacacacagcagcacacacacacaaccaggcaacacacacaacacacacacacacacacacacaaggaaacaaaaaaaaaaaaaagaaagggccagaacaaacaaagagcaagggagacaacaaaacacaaacacaaaaaagcaacagcaaccccagggaaagcagaaaaagcacagacccacccaccagagaaggccaaacagacacaaagcagcaaggcgaggcaagagcaagggaaaccccacaacacgggaagcaaaacgcggacagacagaaaacagcggaggcccgagaagcagcaaacaaacacagacccacagcacccgggcaaacacaaacaggacccagccacagaccaccgcccacagccacgcgccgcccaaaagcagacacaacaaaagagaaaaaaaaagggcggcaacaaggaaacaggaaagaaaacaaaacaggaaaagcagacaaaggacagaacggagaaaaaccaggaggcaaccagacaggaacgggcgaacagagcgacagagcacaagaagcaaggaggcaaaaaagggccacggggaacaagaagaaggaagaaaaagaaaagaaagaggaagggggaagcggggacagaaaggcaaccaaagaggggaaggggaaggggaagaagaaaaaaaaagcccagggccagagaacacggccgcagggggcacaggagagggaggagcaggagcggaaccacacaacagaccggccggaaagagaaagacacaggccaaccagcccccaccaggggacaaccccaaaagaacgaagcaaaacaaccccgaaggcagccgaaaccgcaacaacagaaaagaacaaggggagacaaggaaaaagaaagagagaccaaagggacagaagaggaaacagggaggaaagggaagagagagaagaaaaccaaaagaaaagacagaaaaagaagaggagccagaccaaaagcaaaaaacagaggaaggagacccgcaggaaacacgagaacccagcaggggccaagcaaaaacagaccaggaggaaacccaggggagagcggcagccagcccagaaagaaccgagagccacaaaggggggcaaaagggaggggacagggaaccaagaagcaaaccaaagaaccggagcacgcacaaagggcgagcaggccggccagcgggcgaaagccaagcccgacaagaaaaacacaacccagccgcagagaacgggggaaagaggagaaaaggcgccaaggaacacaaagaaagaaaaaacacacaaaacaaagaccacgacggggaagacaggccccacacagagcggaaggcaacggcccggggcccaacaaggagcagggcaccgaccggccaccggaagacccccagcaggcgcagcggcccagggggagaggagggcagccgcgcaaccggcagagagggcccagggcagggcccaggaagaggaagggagagaggaggaaggagaacgggaggaggggggagggagcaggaacagaagcaaaggaaaaaagaaaaaaaccaacaaaccccaccagcccagggcgggacccacgagaacaaaaaggacccgacacaagcacccaaaagcccccaacccaccccccccaaccccacccacccaccccccgacccggagccccgacggggcaaaaaggcaagccaagggccccgcaggaggccgacaggccacgaacaagcagcagagacaagagccaggggacggagcaaggccaccaaggggcagcccagcccgggaaccagccccagggggcccggaccaccaaagcgacggacaccaccgggcaggccccggcaagcccacaagagacagcaacgggcccagcaaaacgcaggagcaagggcagcgggaagcgaagggaggacccgcgaggcaacacagaggccacccggcagcccaaagccgaacccccagagggcccacaagaaggggcaaaggccacacggcgccgaacagcgagcaaagaccacgggaccaagcgggcaaaccacacaggagacaaggcgagccggagggacccaccaggagagcccccaggccaccaggcaggaacaaaacacaaagcgagagacccaggaaagaccacacgaccacccggaggggcacgggcccagccggcaaaaaaaggcgcagaacaagggagcaggcccacccgggaacaccggaaagcccaggagaggagcgggaccccggagacagccaacgaggaaccgccagacgaccagaggggacaagcgcaaccaccaacaaggaggaggcccccccaaaccgccagcacgcgcaccgaagacagccacgacggaggaagggaaccagggggagcacccgagaaaggaggaacacagggcccagccacgacccagggagaacgcagccgagccccaaaggggagacggagccacccgagcaaaaggaaagccccaccaagggaaggaaagacccccaacgggggccgcagacgggcgcgcagaagcgcaaagaggcccaacgaccgacacagcacaagccagcgcacaggaaccccgaacccaaccgaggccccacccccaaagcagaaaaagccccagaacgggaaacacggggagaggcgaacccaacaggaagcagaacgcggccgcaggacaccaacccaggaacgcaccagcagcagccacaccaggccagcggaaaaacagcaccacacgcacccccaaagcacaccccaggcagacgacagcaacaagccccagagccccacgcagacacaggcaaccagccccagaacccacgcgcgagacacaccccagcaccccagagaccacccaccccaggacaccacgaacaggagcgccaagggagcagaagccagcccacgaaagccaagaagcacacaaacaagcaaacgaaaaccgagaaaagaaaagggacagagaacacacacaccacacaacaaacaaaaacagaacaaaaaagacaaagccaaaaaaaaaaagaaagcaaagaaaagaaaaacagagaaaaagggagaaaagcaaggcgcacaggggacagaaaaaaaacaaagaagaaaaacaggaaaaaaaaaagcacacaccagacacgaaacacagcacacaggaccaacaccaccacaaacgaacagcaaaaacagacaccaaggaagcgaaacaagacacaaacggacagccaacacgcacagccaccacaagacaaggacacgaaaagagaaggaacaaaagagaggaaaacaagcacaccaaagaggacaccaaaagcaaaagaaaagagagaggagaaagagaaaagaaagcaacagaaaaaggacacgacagcagaaaaacgcgaaagaaaaccaacacacaaggcaagaaaagagcagcggaggaaacaaacacaaggggaaggaaggcaagaaaaaagacaacaaagccaaaacacagccaccacaaagacccaagaaaaagcaaaacacaaaagcagagcgcacaccaagcagaaaagggaacaacgaagaaaggaaagaagaagaaaaagcaaaagccaagaggaaaagcagccccagcagacaaaaaacagaaagcaagaggcaaagcacagaacaaaaggaaggagaaggaaagcaccaggagaagaaaaaaaaaaacacacacacaacacaccaaaaaaaccacacagcagaacgacaaggaaaacgaaggaaaaaaaaaaaacaaagcagaaaaaaaaaaacacaaggaggaagggaaacccaaagaagaaaaagcgaaaacagaaacaaagaaagcaaacaaacccaaccccccacagaaccgcacaaggaagagaagccgaagcagaggccccaaaccaaggaaggggaagcaagccccaacaaaacaacgcacggagagggagccaggaaggagacagagggcgcccaccaaggaaagacgaaaagagcaaagccacaggagaacaccccagaagcaggaaaacaagccccgcaaaaaaagacaccacagcagagaccagaaggaccagagggccaacaaagccaccaggccaaaaagggcaggacacaagaagagaaaggacaagccgaaacccccccaccccccagaaaagcaaagaacagagacaaagaacgagcacaaacaaaacagcacgagacacaggacacgaaaagaggaaaaaaaaaacaaaggacagaggaaacgccggaagacaaaaaagaggaagaaacaaaaacagaaaaaaaaagagagagggggaaaggaagaggcaaaaaggaaagcacagggagcaagcggaggacagcggagaaaaggagaaccaaaggcacaaagaaaagccaggaaagaaaaaagaaaaacacaggccaaaaaaagagaacaacaaaagacacaaaaaacaaaagaacagacaaccaagagccaaaaaaagcaccccccagcccgaaaaccccaccccccccccccccgcccccaccccacccaccccaccaggcccagcaccccaacggggcaagaaccacaagaccaagggccccccccagagccaagaaggccaccgcacaaaacagcagagacacgagccgggggacggagcaacggccccaagggcacagacccccagcccggggcccagcccacggggacccggccaccaagagacggagcaccaccgagccaggcacggcaagcccacagggggcccagaaaaggacaagacaccagaagaccagcaaacccccgggaaacccagaagagccccaacggaaaaggacacagcccacagcaagcaggcaaaaagccagaagcggaaagaacccaagaaggaagaccagccaggggggcacgccaacccagcacgggaggcagaggcaggaagacgaggaggccaaccggcacaaaggagccaggacagccagggcaacagagaaacccgcgaaacaacaaaaccaaaaaaaaaaaaaaaaaaaaagaaagaccaaaggggacaccaacacccagaagagggaacaaaaacccagaaaggagacagaaacaaagcagagcgagacgaaggaaggaccaccagggacgccccaccacagcaaaccaacaagagcgacaggacccaaaacgacacacaaaggaagagagaagcccaaggaacggaaaaaagacggaaacacaacaccgacggaagagcagaaagaccccaggccaaagaaagaaaaggaaaaaaaacaaggcagcgccaccagcccagaagccggccaccccgggagagcacgggggcgccaggccgagagggggcacaggcgccggcgggagcccggcccgggacccgcggagggcaggcgcacggggaccggggaaacagaggccagccacgggacgggcgagagcgcagagcgggcggcgccaccagcccagacaaccagccacccccggcaagagccacagagccgaggcagcgccacccagcccagacggccagccccccggacaagagccacagagcccaggcggcgacaccgacccagacaacggccaccccggccaaagcaacacagccgggaaagaccggggcccacccagccaggaggaggccaaacaccagaaacgacacccccgaaagaggagagcgccacagagacgccgaccacgaaaccagagaagagagcgccccacgccgcgaagagggaacaaaacaacagaggaacaaccaacaaagacaacaaacaacaacccagagagccagaggcgaaaggaaacgaagaaccacaacagaagccaggaccaccaccacacagaacccagaacgcccaccgcccaaccaggacacccaacacaccgaaaaggagaccggaaaaagcaaccagagaggagaggacaaaagaaggaacaaaaccacaaagaaaacaggagaacacgcaaagagacaagccaaagaaaaacaggaaaacacgcaaagagacaagccaaagaaaaacaggaaaacacaaccaaacaggagaagccaagaaaaacaggaaaacacaccaaacagggaggaaagaacaaaaccaacagaccaaaaagggaagagacacaaaaagaaaacccaaaggaggcgacgcggagaagaaacccaggaaagaaacggaaccaagagccagcacagcaacagaaacaagagaggaagagagaaccagggcagaagacccaagagaacacggcacaacaacaaagaaaaggaaaagcaaaaagaccaaccaaaacaccaggaaaccaggacacaagagaagaccaaaccacggaaaaggagggagagaagaagacaaccaaaggaccagcaaacaccaacaaaaagaagaaaaccccaaacaaagaaagagagcccagaacaacaagaagccacagaacccaaaagacggaccagaaaagaaacccccgacacaaaaacagaacaacaaagcacaaaaaagaagaaacaaaagcagaagggaaaaaggcaagaacaaaaaggcaagccacagaaacaccagacaccagagacagaaagccagaagagccggacagagaacagacacaagagaacacaaagccagcccaggcacaacccagccaaacccaaaccaagaggagaaaccaaagaccacgacaaaacaaacacccaaccccacgaaccagccccaaaggaaaaacagaaaaaaaaccaaacaaggacgggaaccacgcccagaaaaaacaagaagaaaccccaacaaaccaaaagaagacagccacaagaacagaagcaacaacaacaaaaaaacaggaagcaacaaaccccaaaccaaacaaggaccaaccccaaaaaaagacaagacaacagacggcacacaaacaggacccaacacgcgcacaggaaacccaccagggaaaaagacagacacacccagaggaaaggcggaaaacaaccaagcaaaggcgaagaaacaggcggagagccacaaacggaaaaacgacccaacccaaagacaaaaaagacaaggagggacaccaaccacaaaggaaaaccccaagaggaacccaacgaaacacgcccaaagcaagggcagccacacaaaagacacagaaagccaaagcacacagcacccacacaaaaaggggagacccaacacaccaccacaaggacaacgggaaacagaaacaaacagggacacaggaaacaacagaagagaaacaaaggaccgacagaacacagaaaaaccaaaacaaaaggaaacccccagcacccacgggacccccaaaagaccaaaaggcacaaaaaggcccaacagaacaaaaaagaaagcccagaccacagaccaccaggccaagacgacccaaaacaacaaagaaggaaagccaacacacgggaaacgaacaacaccccaagaaccggcaaggaaggaaaaagaaagaaaaaagacagagaagaaaagaagccacaacgacccaaaccgggacacaagaaagcacaagagggaaaccaagccgagaccccaagaagaaacgggagagagcacaacagcagcgacaacacacaaaagccagaaaaaaaggaagcaaacacccaagaggagagacggcaggaaaaacaaaccagggggaaaaaccaagggaaacaagaagaacacaaagaaaaccaaacgaggagggcgagaaaacaacaagaagaaagcccagcagaccacaagagggcaaagggacaaaaccaacaacaaaacagaaagaaaagggagacaaacaacagaccgaagaaaccaaaacaccacagaccacaaaagcaaccaacaaaacggaaaaccggacgaaaggacaaacggacagaaccaggaccaaaggaacaggacaaggacccaaacagcccaaccccaaagaaaagaagcagaaaagccccagccaaaaaaagcccaggaccagagggaggcagagcacagacccaaagaagacaaccaggcacaaacacacaagaagaagagaaggaccacccaaccaagaagccacaaccgaaccaaaccacagaaagaccaacaaagaagagaaccagaccaaccagaaacgagcaaaaaccaaaaaaccgcaaccgaaccaagaacacaaaagaaacaccaccgaccaagaggaccagggagcagggaggaaaacgaaaaccacaagaaccaaaaaacaaaccaaagacaaaaaccacagacaccgagagcagaaaaagcagacaagaccaacacccacagaaaaagggaaagacaggaacaaggcccaaccaaacaaaaaaagcaacacagcaaaccagagccaacacaaagaaaggagagaagcggaagcaacccacaaaacagggacagacaagggcccacccccacccaacaagacgaagaagccagagcaacgacaacaaaaggagacaaggggaacaaaggaaaagaggaagcaaaaacacgcagagaagaagaaaaaggacccaaaaacaccagagaacccaaaccgaaaacagccgggaagagcggaaaaaaaaccaaacaagcaaggccccacacaaagaaaaacaggcgagaaagaaaagggaaacaacacccccaaagcacaaaaaaaaaaaccggcggaccaacaaggaagaaaagacgagaaaaaaccaagccgaagaaagaaaaaagaagaccagaagaggaaagaccccagccaggaggcaggacaacagaaaaaggcacgccaaaagcaacacagacaagcaaccccacaaaaccaaccaaccaacgaaagaaggagcaagcaaacacggaaaacaaaaaaccaggaagcaaaaaccccaaggaaaaagaacccggggaacaccagccgaccaaagcacacagggcaaggaaaaaacgcaggacggaagagacagacaagagaccaaggaaagaagaagacccagaaagaacccacacaccaggcacgaccgacaagggagcaaaaccaccagggaagaaagacagcacaacaagggcggcacaacgggacagagaagaagcgaacgaccaacacccgacaaggcaaacaagggacaaggaaccacaaaaaccagagacacgaaacaagaggagaaagggggaaaagccgaagaagggacaggggaaaaaccgaacagaacagcaaggcgccgaagacgagaagacaaagggaccaagaaacccaaagcgcaaagcaaaagacaccgcaaaagacaaaaagaccaccaacagagggaaaggacaccaccaaacagaaggggacaaaccaacaaaaaagaaccaagaaggggaccagaaaacaaaaaccccaaaaaaaggggccagaacgaacaaagaaccaccgaggaaaccgaaggcagagaagcaccgaaaaaagccaacaccaacacagggaaagcaaacaaaacaacccgagaccacccacaccagcagaaggcaagacaaaaacagggacagcagagcggcgggagggagaaagaggaacacccccaggggggagcaggcgacaaccacaggaaacagcggcggcccagaaaacggaaagacaccggaggaccagcaaacccccgggcaaaccagaagagccccaacggaagaaggacacagcccacagcaagcagccaaaaagccagaagcggaaggaacccagagcccccacagaggaaggaacagaaaagggacacacacaaggagacaccagcaaaaaagaagaaagaaaccagccaaaggaggaccggagggcacaccgaggaggaacacacacagaggaaccacacaaagaccacgaaagggaaagcccaaaaccaagaacccaagaaaagaacaaccaaacacagaaaccaagaaaaagaagacgaagggaacacagccccccagaagagggaacaaaacacccggaaggagacagagacaaagggagcgagaaaaaggaggaccagagacacagcaaccggggaccacccaaacagcccaaagcgacaccagcaacacagcaagaagcgaaaggacccgaaagcgccgcagagagccgggccagcaaacaagaagggagccacagcggcaggaggacacaggcccccaagaaggagcagagaaagaccaaagaagcaaagggacgcaaccaaggggaacaacaagaacaaccagaccccggagccgaccagcgcaagcacaaaagaggccagcggccacacggaaagagaggcccaggacagcaaacaagccccagacaggggaacgccagggccaaaaaggggagggggggaggggagaggggggggggcagggggacggaagcagcaaaaaagagcgaaaaccaaaaaaaaggaaaaaaaaaaacaaaacaaggcaaagaaaaaagaagaaaacacccagacagcagagcgcgaccgcaccagcgcggacaccaaaccaagaaaaaaaagacaacacacgaaaaacagaaaacccaaacaacagaaaacaaagggcacaacagcaccaaaaacaaaacagcaaccacggagaagcccaaaggaccgaccggagaacacgccacagcacacgcaggaaaaacagccaaaacccccaacagaaagaaagccaaaagggcacaaaacaaggaaaaacacagaaaaaaaagagccaaagacagggggagacagacacaacacgagcaaagaaccagacacagaaaggagacacaccacagccccagaaagcagacgaaccagagaagaaaaaaaagaggaggcacaggcagaacaaagcaagcacaacaaggcagacgggagggacagcccacaacacgaccaggacaaaagcaagaaagacaaaaggggggggagggagaaggaccaaaaagaaggacaccaaagcaaggggggacaccaacaaggcacgaaggcaagggaagcgagcgaaggggaaacgacaacaaagggaccccccaaagagaccacagcagccagcagaacaggagaaacagaggcacaaaaacccacaaacaccagcgaacaaccggaggagagcaaaggacaaaggagcgaacaagaagagcaaagggagcaaaacaacaaggcgacgcccacagacgcccaaaacaaacagaggaagaagccaacaaagccaggaggaagaaggaccgggagaaacagcaaagaagaccgaccagggcaaagcaaccgcgaggaacacgaggaaagccaccacccaaggacccacagcccagcagcagaaagggagaacagacggcccgcaaaaggcagaaaaaaggaaacagaacaacaaaaaaacccaggacccgaagggggaaaaaagcaacccgggcggcaggagcaacgacacagcagaaacagaaagaaggaaccgaggagaaaaagccccaaagacacagcaaagacagcaaacgagacagggaggcccaacccaagggggaggcaagaaggcaagcgaacaagccaggggcaagaagcagcaccccccaggcccgcacagagccgccccagggcgggggccgcccaacccgagaacggagggaagaaagccaaaaaaccccccaaccaggcagagccagcagaaagaaacccgcaagaaacacccgcaacgccaaaacaccagacacccagcacgaaagaaaggggcccaaagaagcaaggcacagaaggaagagagacacagagcaaagaggaagcagaaagagaagcaaacacagaggagaagaaagaaaggcacgaacgcccgagcaaggcaaaaaaaggcaaacgaaccacaacaaaagacagacgaggaagacaaaaacaacaaacaagaagcaaacgacaaaccaggaagcaagagcgcaaaacaacaaggcaaacaaccaagaagaagacccaaaggcacagcagggaaagacacaaaacacagagccacaagcgaaacagcacagaaaagcaaacagaaaggcaaaagagccaaacagccaccaggcagggcaaagaaacaccacaaaaagacaacaaaaaaaagaaaaaaaagaaacacagggaaagaacaaaaaaacggagagcaaaagacacagaaaagagaaaagccaagcaagacagagagagcaccaagaaaaaacagagaagaaaaggaaaggaacacaagggagccacagcaaaagaagaaaagaaggcaggaaaaggaggaaccagaacacacaagcaaagaaagacaggccaggaggcagagcacgcccaccggggagccagaagaaaaaaaaacacgaagcaagagacagaagaaaggggacggaaagaagaagggggagcagaagggggaaaacaagaaaaagggggggaaaacacgcaaaaagcaacggaggccacagaaccacagaaaaaacaagaaaaaaaaaaacaaaaaagaaaaaggcaacgagccagggcagaccaaggaaaaaaccgaagcaccccagacaagacagcagagagaaaaaaaacaagcagaaagccacacaacaagaaaagcaaacaagaccaagagaagaaaaacgacaacacaacaaaggaaagcaaaagcaagcaggggaaagcagcaggaaagaaagaccgaaaagaggagcagccagaaacaaacacaagaccagccagaagaaaacaagccaaagaaagacaggaaacacagcacacagccaaaagaagaggagaaaagaccacacaagaaaagagaaaaacaaaacgcggaaaaccagaaccaaacaaaaaacacaggaaaaaaaaaaaacaaggaaaaacaaaaaaagggccaacccacacaggcagaagagccagaaaaaaaaaagcacagagcaggaaaagagaaaccagacacgaacaaacagagacgagaaacaacacaggacagaaggcagagaagggccgagcccagagcgagggacccaacagagggcaaggggaaagacgaagacggcgacaaacagcaaaacaaagcaaagaggacagcagaaagagcaacaaaaagccccccaccacgaacaaacacaaaaaaaaccagaaggcgggaacaccaaggggggaaaaaagaaaaaaaaaaaggaagccacgaaaaaacaggccaacaccaacaagcaagcacggagcgagcaacgaccacaaagaaaccgggagaggggggcaaacagacccagagacaaaacagggcagaagaccgaacagaacagagacaaacggggagagcagagaggcagcagcccgaggcagaccaccaaaggcacacaggagagagagcacaggcagcgcgcaaccacaggaacgaagacacccaaaaggccacgaaagagcgccccacgggacaacacgcaggaagcaaaggcagcagaggcccagacggccgcaagcccaaacccaccaacaccaccacgaacgagagaaggggccgccggacgaacccagaggaagcagggaaggcgaaagaacagcgccccaccaacagccgcccaggggcaggagaaggcggggaggagccagccgcacgcagcaacagacgggagaaacccgagcgcagcacaagaaacagagaggaaggcacggacgcacagagccagggagggcaaagggacagggcaggagaccacaggcaagaaagggcagcggagcgcagccaaaaacagccaaaaaaaaggcccacagacaaaaagaagcagccgggacacagagcaagacaaagcccaggggcaaggagccagcaggaaaagcacacgccaagccgagagaagaagccccacaacacacagaaggagggggaaaaaccgaaacaggaccgaccgacccccacacaacacacaaaaaacagaaaaaaaaaaaacgagaaaaaaacacacggaacaaagagaggcagcggaaaccacgaaccaccaaaaaccgacggagagaggaaccagggggagcacccgagaagaaggaacacaggaccaccacggaccaggagaacagccgaccccaaaaggcaggcggagccgccgaacgaaaggaaagccccaggaagggggaaagacccccaacggggggcgcggacgggcggaaggcaggaacaaaccaccggaaacagggggccagaaacgaacaaaacaccggaagaccagcaaacccccggacaaacccagaagagccaacggaaaagaacagccacagacaagcagcaaaaagcgaagaacccagagcccaacagaggaaggaaccaaaaaagggacaacacaagggacaccagcaaaaaacaagaaagaaacaggcaaaggaggaccggaggaacacgaagaggaacccaacacaaaagaacacaaagaagcaccacgaaaggaaagcccagaaaccagaaacccagaaaagcaaaacaaagaaacacaagaaggaagaccgaagaagaacaacccagaaggggaagaaaacccaggaaggagacaaagggagcgagacagaaagaaggaccaccagagacgccccaccgggggccacccaaaaaaccaccaaacccagacacagcaagccaacaagggcgacaggacccgaaagcaccggaggcagccaggccggcaaaacagaagggagcacagaccaggaggaacacagggcccccaagaaggagaagaaaaagacccaaggagcaaggggcgcaggccaaggagaaaaaacaaaagaacaaccagacccacagagccggccagcgcaagagcagaggaggccagcggcccaagggaggagaggcccggcggaagaaagccccagacagaggaagccagggccaggaaggggaggggggagaggaacaggacagggggggagggaaggggaggggggaggaaacaggaaaagggaaccagaaagaaagaagaaaaacaaaaaaaaaaccacccccaaagaaaaaagaaccgaagaccacccaaaggggagaaaaggcagaaaaacggaaacaaaggaagcagaaacaaacccaaggagaggagaaggagccgggagaacaggaccaaccgcgagacaacaagaggacaaagccgaggcagcccaacgcgaccacaaaccgaaagaacaccaggaccagccacgagaaaccgaagacagcgccagacaaaacaccacggacagcagaggacaaacccaggcacaaagcagacccagccaagaaagacagggcaacagagcgggggacccagggacacaagcacgagagagagggagagagagaagagagagagagagagagggggggccagagccagagcgacccaaacacccaagaccacaaaaggaaccaaagggcacagaaggcaagggaccacaaggggacaaaaaggcaccaaagccaaaggaagaaaaacagggggggaaacaggcgggacaaggaccagcaaaacagcagacccaagaaaccagccagggacaacaccccagagaccagaagagaaaagagaacagcaaagcagccacagcagcaagcccacaacgacacaaggaaggagcagaacaacaccccgaaaagggccaacagacgaagacgacaagcacaacaaaaggaaagaaagaaggacccaaagagcccacaaagccgcaacccgccacaggggcaacacgaagcaaaaacacaaccaagaacagaagcggacgccccaaagaacaggcagccagcggacacccacccccgagcaaaaaacaagagcggcggcaccagaacagaagggagcaaaagcccaaaccgagcgcgcaaaccaagccgagacacaccacaacccagcagagccagaacaaaaggacagagaccgcggagcaaaggcccgaacccgaacaacgacccccgcaagaccacgcagccccaagagccgggagagccagagaaaccagccagagggaaagagagcgcccacaaggccgccaaggagccccacaaggaaccgaacggcaaggaggagaagggaggaaaaggcccaaaaagagcaaacaaaaagggagaaaggccaccagcaccgggggagcgagcgccgaaggagagaagcaagaagaaaaccccagggaaagaggacgccaggaaacagaggaacacccaaacaaacaaaaaagggggggagggaggaagggggacggagagacaggggggagagaagaggccaggaggaggaccaggcaaccacaaaaagagaacccaagccagggaaaagcaaagcagacagcgaacgacggacacagcgcacccaggagacaggggcagaacaaaaaggaaaaaaagaaaacccccacgcagacccaccagcaggaaagaagggcagaggaggaaggaagaagaaaacagacaggagaaacccaagcaggcagcacaaagcacggcacaaaaccagccccggcaaaaaaagaccagaccagaaagaaagggaaagaaaggggaccccagccccacaggaggacaggaaggaagcaaggcaaaaccaagcaggaaggaaccggaggcaggacaaagcagagaccacagaagaagggcacgaacggcccaagccacccacacacaacagcccaaccaccccagggcaggacccgccaacacaaagggcaggggaagccggagaacaggaaaaggaaagggagcaggagcgggagacagagaagcgcaggaggagaagccaacaggaggagccccccccccagccccaggccagacaccggaggagcgccgccaacacgccagcccacgcggaaccgccgcgcgcggagcaacacgggcacccgcacggccccaggacaggcgggaagccccccccccccccccaaacgggcgaaaaaaagagcgacagagggcgacggcccacccgccgagcccccagcccgagcgccaccaggaacgccgcgagcgcgcggcccgcaacagaggaggcaggaagaagaccgaccagggggaaacagccacaaggaacaagacacaaggagaaaaagggaaagcacaacaagcaccacagcacgggggacccacgggcccggacccgagacggcgcacagagaggagggaggacgcagacgcaacagccgggacaggcagaagccacagagccgagacagacgcacgggcacacacgcccgggcacccccgccaaaggagagaaccacccgccgggaggacgacacaacacgggggagcacagccgggacccgcaagacagcgcgcagggaaaggggacgcagaagcacacagacgggacaagccaacaggcccaccgccaggagacaggccgaagccagaacgccacccccgcaagaagagagcgccgcagagaggccaaccacgaaaccaggagagacagcaccaggcgcgaagaggcaacagaacacacaaggaacaagccaaccagagacaacaaacaacaacccagagacaccagggcaaaaggcaaagaagaacacaacagaaaccaagaccaccaccacacagaaccagcaccccacccagccagccgggcaccccaacacacccgaaaagcagaccggaaaaagcaaccagagagaaaagaacacaagaaggacagaaccacaaagaaaacaggagaacacgcaaagccgaccaaccacgaagaccacgagagaaaagaggacagagaaggagaggaacaggagggagagccagggaaaaacaagacacacgggagagagaccaaagaaagaagaaaaagaccaggccaacaacaaccaaggagcgagcagaaaaaaagagcacagccaacccacagaaccagagagacaaagaaagaggcaaagacaaggaagcagaggcccacaaggcccagggaaaaaggagcaggggaagaagggccaagcccccccccaaaagagggagacgcagagagcagccccagagacccacacacagggaaaacaaaagagaggggaggccagccacagacggcggcggggaacacaagggcacaaacgcaacaccgaagagcacgcagcccggcccaccgcagacaggccgaaagagccgggggcaaaagaacggccaagcccaaaaaaaaggaacacgccggaaagaacggaagggagagaagaagaaagacaagccagaagcaacagccggcgagcaccccccgcccccccaagaagaaaaacaccaggaccaaagcaccagacaacagcacaaccgccaaaaacggacgaagcagcgccggcaaaggaggacgcacaaaaaacagaggacgaacccacaccggccgccaggccaagagcaagaagaagacagacacagcaaagaaaggccccccagacacacacggagaccgcaggagaaccaccaccccacccaccgaccccccccccccccccccccccccccccccccccccccccgccccccccccccccccgcccccgagagcagaagaaaaagcaaagagacaaaccccaaaccacaaagaacggaagcggaagggcaacaggccaaaaaaccaaaccgacaggccaaaccagacgaacagccaaagacaccaaccaacaaggaccaacacgcacaagaggagaaacgaaccaaaagaagcacggacaaacacacagaagaaacaaacaggcaagaggaagaaaaaaggagagacagagcccaaaacccaaaagcaaaacagaagccacgagcaaaaaagaccaggaaagacggacccagacagaccaagcagggcaaccaagaagacaaggccaagcgggaaaaaaagaacacaaaggcaccaaaacgaaggcaacaaccgcaagcagagcagggggcaaaccacgacaacaagagaggaacagaagaagggcgaaaacaaacagaaaaacagcacggcccgcaccaggagccagagacagccgggagcaaaccaagcaaccacaagacgcagggaagccagagaggaaaagaccaccacagcaagcaacacagaagaccaacacggaaacccacccccccccccccccccccccccccccccccccccccccccccgcacaagcaaagaaaggcaccaagcaggacacggaagacaaagacagaaaagcaaacggaaggccagaagaagccagaaaggaaaaaaacagcaaaaacgaccaagcaaggagggggagaaacagcccgcaaacagggaagcaaggaaaaacgacaaaaaaaaacgaggagaaaccaagacgaaaagcgagccagagaacaagccaaggcacagaaccccggggaaggaagaaaccaaaagcaaacacgcaggaaagagaacaggaagaggggcgaaaggaccaagagacaagacgagcaaaaccaagaaagacccggaggggcaaggaagaggaaaagagagaaagcggggaaaagaggacccacaaagacgggagaggccaaaggccgaccgcacagcacaaagaggccgcggcgccacaaaacagcggagaaagcagaaacaaccagcgcccgggcaggcaacgacagcacagagaaggcaagaccaaaaacagagaagaagacagagccgggcgaccacaccccccacaacagccccagagaaaaaaggccccacacggccaccggaagaaaacccagcaacccccccccacccccaggagaaaacaagaaacaagcccaaaacagggcggaaacaggacggagaagagaaaccaaacgcacgaaccaaagagaagcagaacccaaggacagaaagggagaaaagcgcagggcggggagaacaagccgaaaaaaaggcagaaagcgcgcaggcaccaaggaaacacaaccccgaagcacaaggcgaccaggcaacagcggagggaaacaggcaaggaaaaaacaggcgggcccaaagaaaaaaggaaagacagacccccaaacccacaaggccgcgcaaaggagagcgaaacaccaaacaggacagaacagcaggcccgcgggcaaagacagggggaaaaggcgaaggcaaaagagagcaccaagagggagggccggaaaagcacagaaaaacggaaaacagaaccagccaagaagaaccagcgcaggagggcgacacaaacacagcacccgaaaaggcagggcaaacaagacagaggaggaaacaaagcaaggaaaaccaccgaaccaacaacagagacaaaagcccagaggaacgacaaaaaaaaaaaaaaacacaaccaggaaggcggaggcaaagaagacaaggagaagagccacacacccagaacaggacacaaaacaaaaccgggacgccccccaccagcaaggaacccaaaagccccacccaccagaaccaaacaaaaaaacaaaaacaaagcaacccacaaacccggggaagagggggcaaaaaaagaaaaaaaaacagcacaaaagagcaacaaaaacgaaaaacggaagacacacagcaaaaaagaaaaaggaggagagaaaacacaagagcaaagcgcaggagcggcacaaagaaaaaagaaaaaaccagaacacgaacacaggcagggagagcagggaagagggcaggaggggaggacacaacccgaagagaaaaaaggaccggaagagaggggagaagaggacagagaaaaaagccgaaacaggcgcgcaaaaggaacgagagagagaagggcggcggggaaacccacaaaaaacgcgagaccaaagaaacaaagacgaaccaggacagagagacggacgaaagaagggaagggcgacaacaaagagcaaagcaggaaaaaagccacccaaaccccagcagaggcaggccccaaacccgacccgggggcccacacaggaggcaggcgcccaacccccccaagccgggcacagcagcgccccccaagccaggcaacagaccgccagcaagccccacccaccagcagaagacagagaaggccgcaaaacacgaaagaacaagaagacccccaccgggaaaaggggacccacgagccaaccaccagaaccagaccaaagagagcacgcccaaggggcgccaacagggggagagcgacagcacagaagaaagaaagaaagaaagaaagaaagaaagaaagaagaaagaaaaaaccgaggcagaaagacaaacaacaaggaacaagacgcaaggcaaaaaaaccgaaggcccgcagcaccacggagcaggacaagagcacacaaggaaaaggaaagaaaaaacacagaaaaaaacaacagcaaaaaaggccaagggggcagaaaaccaggagcggcaggaacacgacaagcgaagaagggggagagggagaaaagaaagaagaaaaagggagagggaaaagaaacagaagagaaagggacggggagaaagcacagagacagaaggaagagaagggaaacaaccaaagaagaaaaagcaaagaaacccaacaagaagcaaaaacaagaaaggcaccgaaggggaacgggcccaacagacagccaggcagcccaaaaaccccaggccgagaacagaacacaagagaaggccagaagccaaagggccaaacacaaacaaacacgccgaaacccacaacgccaagacccgggaagaacacaacgagaagaacaaaaaaaaaagccaaaaggaagccccgaggcagccaagcgaaaaaaaaaagaaccgagagagaaaaggaacacaacacccagacaagcacccggagaaaaaagccaagccagcagaccaccgcaaagggcagaaacaaggacaaccaaccaccgaggaccaagacccaccccacaaggaaaccaacgacaacacacgggaccaagaaccgggcaaaggcagagccaagcgagaaccacacagacggaagaacaaaagaaccgacccaaacagaacaagaaggaaccccacagagaaggcaaaacaagcaacaacagcggcaagagaagagaaaagaaacacagagcaccgaaagggacaaaagcaaccccaaggcgggacagagaaagaacaagaaagaggaggacaaaggcagagaggcacaagcacggaccaaggggagcgcaccacaaaccacagaagaaaccacagcaaaaacagccaaggggaaccagacaaaacacgccgaaagacaggcaaagaagcggagaaggggagcagccagaagggccccggaacgaccagcccagggagacacacaccaagaggaagagagaaaaagagagaaagggggaagcagaccagcaccccaaggcgcaccgaagacccaaaagcccacgaaaagcacccaaagaccacacgaggccaagcggaaaaaaaaaaaaaagcaacaaaagacaaaagaaagaggggggggggaaaacacgcaccccagcccccacccccagccacacacagcaagagcaaggcaacaaaaaaaaaaaacaaaggcgagacaaaagaaagccaagaaaaacaccgaggaggaaccaaacccagaaagacacaaaagaaacagacaacgaggagaacaaggaagaaaccagcaagccacaaacccaaagaaacaggaaaaggagggccagaaaggaaggaaccaccagaaagggaagcaggagaccagcgagacccaccaggaggggaaaggaggcgaagggcaccccgagcaggaccaagagaggacagggggcacaacccacacacaaaaccaacaaaaagccgccacaagagacaaggaaaagaggagcagagagagagaacaaccaccaagaggcccaacgagacacaccagaagagaaccaaccgacacaaacgaagcagacagaagccagcaaagcccgagaggcccagaagcaggggaaacagagaaagagacccacagccagacacagacagcccagggagccgggaagaaggaggacagaacgagagaacggaggggcaaaaacaccacaaaagacccccagagaacaagggccagggggccagagacgaaccaccgaccaaaaaaacacaggaagggacaggccccacacagagcagaggcagcagccaggggccaacaaggagcaggggaaaccgaccgcaccgccccggacccccccaacagacgccacgggccaggggacagggggcagccacgcacggagcaaagggggagcagacccaaggagggccccccggggagaaggagaggaaggcgggagggaggaaggagaggaggaggcgggagggggggggagggagaaaggaaaaaaaaaaaaaaaagacaaagaaacagaaaaggagaaaacaacaagagaggggcccggaggcggagaaggccagcaacaagacgaggccgccagaacgcaaagcaaagaaaacgaccgaccggccgacaagcacaaacacacgaacacacaaagccccaaccgggggagcgaacagggccagagcaagcacccagaccaaaaggccaagaaagagacaggggcccagacgaagagacaggcagaccagggcggagaagcgcaaaggagacccacgcaggagacagggagaacaaaaacaacaacaacaacaacaacaacaacaacaacacaacacacaggcaacacgcaaagcacagacaaaacacaccacagcacacggcacacagacacacaaacacacagacacacaagcacacaacacacaacagacaaccacaaagaagcaaaccgacacaaaacacacaaaacacacaaaaagaaacacggcaggacacaccacgcacggagacagcccgaacacccacagacagagagacaccaacaagccacaggcccagcacaacaagccggcaaacaaaaaagaaaacgaggacaaagaggacacgacagagaagcaaaagaaacaaaacgaggacagagcggcaagacagaagcagaaacacaaccaaaggaggagacaaacagcagaacacacaaaagaacaaaaaaggagcaagaagaggccgcaaagaacacaaaaaaaaaaaagcaaaaacaagcaacaaacagaaaaccaacaacaaaaggcaaggcaaaaaagaggacgacgacaacacgccaaacggaaacgggcaaaaagaaaacacccaccccccacacacagagacaaaacgcacggaccaagaaaggaccaccaaggccagagccaaggaaagccaaaaggcgccgcggaaacaaaaaaaaacccccccagcacacagaacacaaaaggggcagaaagcgcacgagaaaaacagaaaaagcgaagaagaaagaagcgacacacaggagaaaagcaaagcccagcaaacagacacagaaggaaagaggccaaagagaaaaaccaaaagagggcaaaaaggcaaagcggggaggaaacagaacacaccgggggcccacacgaaggacggaaagaggggagaggcgcagggagccagcaagaagccaagaccgggaggcagcccgcgaacgaccggccgagaccaggaccggaggacacccacccacacagggcggggaacccgcaacaaaagggaaaaacagcccacggcacagaaccccacccgccaaacaaccagaagaaaagcgaccccacccccagcagaacaacccaccgggaggggaaacggcacagcacagacaccacccacggaaaccagagaaggagaggaacacagacacgagaaaagacaaaggaaaggaaaaaaaaaaaacagcaaaacaacaaaaaaacaccaaaagggagaccgacaaaaagcgaacaaccaaagcaaaaagcacaaaaaaccaacaagccaaaaaaaaaagagaaaacaggaaagggagacaccgagcaaaagccggagagacaaggacccagaagggacaaccaaaaaagggaaagcaggaagcaagcaaacgagcccacagcacccggacaaaagcaacgcaagaccccggagcaaaaccagcccacaaagcacacaaaacacaggcagcaaagcaagcgcgccgaaaaggaaaccacgagaccacccaagggaagcacgaccaaccaccaccacacacacacacacaacgaaacgcacaaggagggcacggaggacacaaaagaaaaccaggcggccaagaacgcgcacaacacaaacgaacaccgcccacacagagacgagcaaggggcgcggacagcccacagaccaaggcgccaaaaaaaagaaaaaacggacgaaagcgaggggcacaaaagaaaaggcacaaagagcgagcaccccggaaccccgggccacaaggagaccagccgaaaggcccccgcgacgaggcacaaccgacgaagggacaagagcgacgcagaccaagaccaaggagcccgaagccacaaaaccccagacaaaggccagacaaccaaagagggcagagaagaacaggggcaaggggggagaaaggcacaggcaaggccggagcccacaaaggacaaaaagcgacaccagggaaaaaaaaaaaaaaagcccgcaagccaaccccaaccccagcgaaaacaaaaaccaacacacccaacaggcaaacacaaacacacacacacacacacacacacacacacacacagaggcacagcaccagacacagcacaaaacacaacaccccacccgacaacccacagaaacgggacaagaaaaaaagagaaaaacacgaccagccaaaccagaaaaaacacaaaaacccagaaaggcaggagaaacacacacagcacggcccagggccccgagcagcagagacagaagccggacacggagccaaggaacaccagaaaaacgaggagacccacacacagcccaacaaaaagaccagagagcccgaggcccacaagcacagaaaaaggaaaacaacccacaccaacaggcaaaaaaaaaaagaacaacacaaagcacccaaaagcccaaccccccccgcccgcccccacccacccaccccaccggcccggcgccccgacggggcaaaaaggcagaccaaggggcccccccaagagccgacaggccaccggacaagcagcagagacacgagcgaagcaaggccccaaggggcagaccccagccgggacccagaccacaggaaaaagacacaacacacccgcagaccagaagacacaaaaaccacagggcaggaaaagaggcaggcccacccaccaggaggaggggagcagggcaacaaaccgacacacgggagccaggaaggaaagaccaagaccgcacccacacacaaccacccgaacaaaacccaacgcagcacccacacccacccagaccaagcccccgaaaaagacagacccagaaacaacgaaccagcaaacaagacagacaaaaccaacaaagcggacaaggcaacccagaggcccgaccaggaaagagcagagaaacccacccacgaggaaggagcagcaaaaacccaagcaaagaacacagcaaagcagaaggccgggaagacccagcaggcccacggcggccagcccacgagcccgcagcgcgggcggcaacccgggcaaccccgaccacaaccccccccaccccgcagagcccgaccgccaaggcggagccgcagcccaacacaggaggaaaccgagacgggcaggaaccacagagaagcagacaccaggaaacagacgcccagggcggggagacgggggggggggccagcgacaccccacccagagccaacagccggaaagaccaccaggcagcacccccaggggcaggaccaggagaccagcaggggccaccacaagccgagccacaacgccccaaacgcaggcagggcaggggggacaacgcgagacagcacaccagagaaccagccggaccagaagagaccgccacccaacagagcagcaaggccaggaagccgcgaagagggccaacaccccaaaaaccaccgccagagcccccaacacccccaccccccccacccaccagacccccgcccacccaccaccccagcacccacaaaaccacccccacgggagagacaaacaaagaccacaaagggcaaacaaaagaaaacacaaaccacagaccagacacgagaaaagaggaaaggcaagggagggaggggagcgggaccgaaccaaggccgagcggccaacaaaaaacacgaaaaacacccaaaaaagagacccaagaggcagaaaaacaaacccagccaagcaggaaagaaaagaagcccccaggaacaggcaaaagaaccaaagggagaaaacagagacacaaaaagcgagcaaacaagaaaaacacccagggccaccgaagcgagcagaaccaacaagaccacgaggggcacaaagcaaacgaaggaggaccccgacacagagagaagaaaccaaaaggaggacaggaagagcagccaagggacaaacaaagccagagaggaggacccagccgggcggcgagaacagcaaccggacacgaagggccacaaccaaaggaaaggaagagcacgacacggcaggagaaaaaacacagagagaagaaaagcgggcaacaacaacacaaagagccaaacgaaaagagggacaaacaggccgcggaggaaagccaaaccgaggcccacaccccacccggagcaccaaggaaccacgggaaagacacgcaaggccccaagcagggagcgggacgggggggccggggagaagcccggaagccaagcgggccacacacaccaaacacccagagagcagacaaaagagagaccaagagcaaggaaaaacagaaaaaacaaagcacagagcaacacgggaaagaacccaacccaaggaagaggacccccggccagcagagaagagaagaaaggcaaaggaaacaaacccccgaacagcaaaagcaaacaacaaagaagaggagcacaccaagccagccagaagagcaccagcagcaaaccagaacccagggagggaaagaggaggaggggccaaaagccaacagagaaaaaggaaaaagagaacagaggaagcaggaaaaaggaaagaccaccaaaggagggaaagaaggaagccacacaggaaagaggaaaaacaccaagccaaaagcaagggggcagggccgccgagccaaggcaaagcggcaaacggcaaaggggcagaaacaaaagaaaccaaagaaaagacacgaaaagaaccaagaacaaaaagaaaagaagaggaaaagaaagaaaagaaaaaaaggcaggcaggagacacacaccggaacccagcccaggaaggccacaagcacgaggacagccagggcgaagaagacagcccaaaaggaaggcagagaaggagaaagggaagaggaagaggcggggaggaggaaaaaaagaggcgggagagacggagccagaaacgaggccacaaaaccacccaccacacagagccgagcaaaaacacgcccagcccaacaaaaaagccacacagagcagagggccaagggagagaaacaaagaaagaaagaaagaaagaaagaaagaaagaaagaaaaaaaaaaaaaaaaaaaaaaaaaaaaaaaaaaaaaaaaaaacgcaaggaccggggaaagcagggagcagcccacccccagccgggagaaggcgcgcaccagcaggccaccaagcgaggaagggccgccggagcaccacggcaagcccaaaaaaggccgagaaaggaaccaggcccacacccaaggagacacggcgggcacagcgggcaacagcagccagaaccagccagaagccacccccccacccagggacccaagggcaggccaaacgccaccacgccgacagaaacccaaagaaaccaacccggcaagccgccaaaggacaggggaaaacgcaaaggccaccaacgcacaaaaaaagcaccaagcaagaaaaagcagagagaaaccagagccacaagaaaaggacaacagcgagaagcgagggaggcgcccagcgggaaaccagcaccaggaaaacaaaacaacccccccaaggaacaaaaaagacccaaagccagacaccggaggcgaagacccagaagcagggcaccacagaagcaaaagaagggggggggcaagaggaccagcccaagacaccaagcagagcaaccagaacacagacagcagaaacagacacaagacagcaaaccaacagaaaaccgacccgaaaagaaacaccggaccgaaaacgaacagcgaccaaggaagagaaacagcgaggacaagcaccagaggaaaggaagaagaaacaaagaaaacccagccccccagaaggggaacaaaacacccaggaaggagacagaaacaaagggagcgagagaaaggaggaccagagagacgccaaccagggaccaccccaaacagcaccaaacgcgacaccagcaaacagcaagaacgaaaggacccagagagcgccggagacagccggggccagcaaacacagaagggagccacagcagcaaggaggacacagggccccaaggaggagcagagaaagacccaaggagcaaagggaccaacccaaggggaacaacaagaacaaccagaccccgagccgaccagcgcaagacaaaagaggccagcggccacacggaaagagaggcccaggacacgcagacgggccccggacaggggaacgccagggccaaagggggggagggggggaggggaggggggggggggaagggggacggaagcagcaaagaaagagcaaaaccaaaaaaaaggaaaaaaaaaaaaaaaaaaaaaaaaaaaagaaaaccaacaccacaccacaccgacagagaaagacagagacgacgcaacccagaggacgggcagagcaaggaaacgaaaaggaacaaaaagcccaaaaaccacagcacaaacaggcacaccagaggggagaggacaccagagaacggcccacaaaacagcaaccaaggcacaggagccacagacaacaggcccacaaacaagggcaagcggcccagggacccaaaggggcaggagggccaccgccgcccaagaccccccacggggcccacccgccggagagggaggccagcagaaccaagcagccgggacagccgagaggccgccccggaagggaaacaggaggagggacgagggaaggggggggagaggggggaagagacggaggaagggaggggaaacgcagcagagaagagaagaacaaaaacaagagaagcaaagaagagcaaggaggaagaaggcaacccacagacaaacaaacagcccaagaacccacaaaaaaggccaagacagaaacccagaacacccagaagacgagccaaaaaccaggccacgggccaaaaaaaaaaaaaaaaaaacacgagagccagaagcacccgaaagacacaggagccagcacacacagaccacaggaagaagacgcagaaaagacccccacggggacagaaaagaaaggggaaggacaggccagagaagagcagaagaacgaagggagcccccgccccgaccccccaaaacacagaaaacgcaagagcgagagggaccccacaaacagcccgaacgacagaaaagaaacagcgagccccaacaagaaaaccaggcacagcggaaacgccgccaaaagaagcccccggggacagaagacagcaagagagagcaaacacaaggaagaacccacgaaacccaggaaacaaaaaaaagacagcaccggccagcccaccacagaaacggagaaccaccacaggcaccgaaaaacagaaaagaaaagacccgacaccaacgaggccccgaagacaaagaagcacagggacacaacacgaacagagaacaagggaagaaaacgaaaaacaagacggaagaagaaaacggaaggcaaacccccagccaaagacccaaaaaaaaggaaccagaaaaaaaccagcagagacagggcagaaggcaagggagacaaggccaacaaaacccaaacagcagagaggggagggcaggaggaaaaccagggaaaaaacgagaggaacgagcagaaagggaccagaaagaacaccaaggaaaaaggaggaccagacagaaaaagcagaaggaaaaaggggagaaaagccacaaacacacaaggagcaagagcaggaggagagagcggagccgcggcaggaacccagcccaaggccacgaaccaaaacccggaggggggccgcccagggagggcaaaaaagggggcccggagaagggcgggagagagcacggggggggcaagaccccaccagcgccggaaggacgcagcagcccaaagaagagagaagccagcacccagcaccagccaccggaggccagccgccgagaaaggagaacccgaacgaaaccagacccaagaaggccaaaggggccggcacaggcgacacagcagaaaaccaagacagaaaaaagcggcacaccccagcccacccgcgcaaacacgccccaacacggcccacaagaagaaagagacccacaaggaagggacaagcagaaagcgcaacagaccacaaacagaccgcaacaaagacccaggccaccccgcggcaaacaagagcccccccagacacgccagccgggaccccgaaacacaccacagccacacacaccgccacaacccggaaaccgcgaagaccaccacggccacgaggggacacaaagaagaagcagggggcaggaagaacagacaaaccagaaccaacacagggaagaccggaccagaagaaccaaccccccagggagccacgagagacggcgaaagcagccagacagagccaacacaagcaaaccccaacaaccgaggaaaggagaaccaaccaacagggacacgccaccgcccacccgccaggggacaaagcaaaggaaaggcgggaaagcaaaccccgagaaaagcccgggaagaagagcaaaagaacacggccgccccaccacgccagccagaggaacaccccagagccagacaggagagcgaaggcagaacccaagagaaaaaagagcagcaggacagaacaagagaaaccgcaagcggccaaacacgaaaagaaagacaaacaaaccgagaacagaaaaagcgaaggggagggaacgacgagcagcggggcccagaaacacccagagagaacacgaacagcgccacacggaacacaaaaggccgaagaaaacggcaagccccagcagcccccccgcaccaaggacagaggacaaagagacaagcacgcacaacaagaaggaaagagaacagagaaacaggcaggaagccggcagagagcaggggccgagaggaggacaccaggggagacccaggagccacccaccgggagccagggaagagccagagcaacgagcgccaagaaggaggacacgggaacaaagcagacagccagccgaaacaagaggaacaggagggagcccaggcacaggacaacgcggacaggacggcaccacaccaacagacagccccccacacacaaagagcaccaaagaagaagccagaggaccggaaaccgccaggcggcagaggggaaagggcaagacaggaagcccgcaccgagaagccagcaaaaaaaaaggcaccccagcagacacggccaaagcaaggccccagacccgcacaggcgccgcaaccaggcgaccccaagccccccaaaaaggaccagaaacgagaagccaaacaagagccacccaaacagcagcgcacagcaaaacagccaagccagacagcaaagcacaagaaggacaaaacagcagacccagcccaaagaggaacaaaaggacaagcaccaacagggcaccacacagaaaaagccaagaacagggacccgccgaggcaaaccaacgagaaaggagaagcaaagagacagaacacagaggacaggcaggaaggaggacgaaccagaaggccaaaagggggagcaaacacccccacggaagaacaacggccaccaaagacaaaggcaacccaaagaagaaagcgacaaacgagagacagagaaagaaacagaaaccaacaaacaagaagaaggaaggacgcaagcgaggcaaaagcaggcaaaagaaggaacacacgaagaaaccagcagggagaggaaaacacaacaccaaggaaacacaccaaaggacaaagcacgggcagcaggacaacagaaagagacacagaaggagaacggaaaaccagccagggaccacccaaacacaaggacccaaaaaaagaagcaaggcaacacaccccgccgcccaggcaggccaggagagacagacacaaaaaccagcaacagggaaaagaccgcaggagacagagggacccagagggaagggcccgaccacagcacaacaacaacacgcagaaagcagggaggaccacagcacagacaaacagaacaccgccagacagccaagcaggaccagccccaacaaaccccggagaaagccccccgcaccccggcggagacacccccagcacgcgcaagcaacccccagagcaagcacgcagggcagggccaagggcacgcccgacaaaaaaagcgacagaaaaagaacagaagaaggaacgcacccgggaagacacccgcagcgaacagaaacacaacagcaaaaagaagaagcaaacagacaggaaaacaaccaggagaaaaaaaaggcgaaaaaaacagaaaagaaaaaacgaaaaaaacaaaaaagaaaacaccgaacaaacaaacccacacaaacaggggggcagcacaaagggacaaagaaaggcaagacggagccacacaccaacaaaacaaggccaaccaaagcagaagaaggacaagcacacagaaaaagcaggacggagcccaaagcgacggagcaccaggaggagacagagcacaaaaagaaaggaaagaaaaagcagccgaagacacaaaacacccaagacagaaaggaagagaaaaaacaaggaccgccagaaagccacggcagaaaggaaagaacaaaagaccaagaagggagacaagacaaaaaaagagccacacgaaaaaaccccaaacaaaagaagaagaagaagaagaagaagaagaagaaagacggcagggcaacgacacagcggagacacagagaaaggagccaggaggaaagccccagagaccaacgaaggcacccaaaggacaagggggaaaggccccgggggggaccaccgggcggagcggcaaagagagcaggcgagcaagccaggagaagcaagccagaaagaacacccccaggcccgcacagccgccccgaccgcgagccagccgacccgggagaacagcagaggaaggaagcgaaaaacccccccccaaagccggcagagggcaggaaagaaacccaacaagacagaagaaagagagaaaaaccgcgcagaccaaaagacgaaaaaaaaacaccacacagcagcaaaaccggggcggaggcagcggcacagagaaaaggacaggaaagaacacaaaaccaagcccccagaaaaaagcaggcagcagggaagcaacacagaagcaccacacaaaagcaaggcgaaggaaaagcagacaggcgcaacaaggcgagccgacacaaaacagggggggggaaagcggcccagggagggcaaaaaggggcgagaagagaggcggggaggaagggcacggggaggggaccccgagcgccgaaaaacagagccccaggccagaacaagcgagaaccccagcccccagcacagccgccggagcgccagccgccagaaaacggacaaaccgaacgaagccacccacaaagcccaaagaggacagcaggacccaaggaggaaacccaagacaaaggcaagccaaaagagggagcaggaacagggaacaaagggcgagaaaaaaacaaggagggggggcgcgcgcgcgcgcagcaagcaagcccaacaagacaaagaccagacacgggggggcaggagcacagcaagagggcagacagaacaaaacagaacccacagagagccaggaagcaaagcagcaacagaaagagagaaaacccaagaaccaccagacccggaaaacagagccccgggccggaacaagagggaacccccacaaaccaaacccaaaaagaccagagacaagcaggagcgagggcaacagcagacaaaccaaacaagcagaagcggaaaggaaaacaaagaggagaaacaaagggcaagaccacacagagcgaaaggggaaagaagcgccggagaggacgcggggccaggacacaagcaagagcacagagaggaaggagcccaggaagaaagcccagagacagcaaaggcaaggacagggggcagggcccaacccaaggggggcacccgagccggccgggaaagaaagcaagcgagcaagccagaggaaaaagcccacaagcagcacccccagccccgcacagccgccccaggaccacggagcccgaacgaccgggaagaacagcaagggaaagaaacgaaaaacccacccccaacgcggcacgggggcagcaacacaaacccaacaagacaggaaggcagcaaagcccaacaccgccaaagcaaggccaagaacagcgagcggggaccgaacggagggaagccacagaacaagaagccggcagaggaagcagcgccgaggaggcccaggggcaaaggcagcacaggcgcacagcaaccacaaagccagggccaacggaagaaaaacgagaagcacgcagaggcagaagagcagaacaggagccgggcacaaagggaggacaacagaccacagggcccagaagagaagagcaccaaccccagagacgaagcccaagggagaccggagggacgggcacccgagaggggggagggaaaggaagagagaggaacgcggagggcagagggggagaaagacagacgaagaggaaaaaaaaaagaaaaaaaaaaaaaaaaaaagcccccacccacacaaccaaaaacggcgccggagaaacacaccccccccgacgcacagcgcccgcacaacacagcgcaaaaggccaaaagcagcagcccaggccgccaagcccgccgagccccggccccgcgaggacgaacccaagagaagaaacccccccagcaaaaaaaaaagaaaaaaaaaaaaaagaaaaaagaacaaggacacggaggcaggcaaaggaggaacagagaaacaccgaggaggaaccagacccaaaaggacagaagcagaccacaaaagggaaagccaaaaaaaaaaaaagacagaaacccaggaacaaccacagaaccaaagggccaagccaaagggcccaagaaggagcccaaacgggagggaacaaaaacaacaggggggggagggagaaagagagcggggggagaaggacagggaagaggaaaggggaacagacaggacgggggggggggaagggggaaacaggagaaagcccgagggccagcagaaagaagaaaacaggcaaccgggaggagaaagggggggaccccagaagaccagagaccaggaggcaagaccaaagggagggaccagagaaagcccaacagggggaaaggaaaagagagccaccccagagaaagcacaagggagggagggggccacccacagcaaaaaccgacccagaagccgaaaagaaccagagacaaaaaggagaagaaaggagagaaaggaagcaggcacgaggccgacaccaacgagcaggggcacagacaggagcggcaggcccccgagagcccaacaagcagggaaagagggaggaagggaggggacagggggaaaccgggaaaggggaaacagaaagaaaaaaaaaaacaaaaaaaagagcagagcagaacacaccaaccaaggacagaagcgggggaccccggggaacaagcgaagaagagggcaaccacaagaaaggccagaagccaaaaccaggaccccgagaccagacacgagccaccaacaaggcagcaacacagcgaagagccccgacacaaacagcagaggacgccggcggccaggagggaagaaacacaggggagacgagacccaaggagagagaagcgaggggggaggggggagggaacaccccgaagaggaagggggggagaggaacagcagaacaggaccggagggggaaaggaagcaggggggaaggaggagggaagggggcccgggaggggggaaaacgggaaaggggaaacagaaagaaaaaagagaaaccaagaaaaaagaaaagaaaaaaaaaaaagggggagggacaagggaggagaggagaaggagaagggagaaaaaaaacccaagacaaaaaacaaaaaaaagacaaaaagagacaagggaaaagaaagcaaggaaggcagacaaaacacaaagaagagaaaccaaagggagaaaaaggccagacaaaaaggaagccaaccgagaagaggagccacaggagacaaagcacaggcagaggggcaaagaccaccacgggcggaaaggggagagagagagagagagagagcagaacaggaacccaaagccaaaggcaaccaaagaccggccccaaagagccccccaagccaccacccaaaaaacagaaacgggaaagagaaacacaggagccaaggagaccccaacagcaaaggcaagaaagagccccaagcagaaaaccagacaaccgaggcaaacagaaacagaagaaaaacaggagagaaggaacgcaagcaaccaggaaaagacgaacgcagagaaggggcaaggacaagaaaccaccagcaccaggaccacaaaccaacaccccgccgaaaaccaccaaaagccacaaaggaaccgaaaaaaaccaagaccccagcacccccaagaggggcccaccacggcagccaaccccaacacagaaacaaggagaaaaccaccaaaagcgggggcaagagaagcggaggaagaaagaaaaacgcccccaacaaagggccaaggggccagacaagacgcagggaagagaacacccgagaaacaagggcagacgagaaaaagacaaagacaaggacgagagcaaagaaagagcaaaaacaacaacaacaaagaagcaaagacccacaaccaaagaaagcagaaaacaaaagcacagaaaaaaccaaagaaaagccccagacaggggaacgccagggccaaaaagggggagggggggaggggaggggggggggagggggaccgggaagcagaaaagaaagaggaaaaaccaaaaaaaaaaacgaaaagaaaaagaaaagccagcagccagaccccaccagacccagccacacaccacaggccgaggcaacagaacaacaacaaaacgacagcccagcccaccaaagaaagggccgagccaaaggaacaccaggcccaagacaccagaaaacaggggggaccaccaagagaaagacaacaacgaaaggaccccaggaggcacaaaccaagaaaacaaaccaacagaccaggaacaaaagcgacagggaaaaagaaaagccaccaggcaagacagggcacggacaaaaagccagccaaacgggaaacacaagaacagaaccgaccaaaaaaaaaaaaaaaaaaaaaaaggcacaacaacccccgagaagacgaggggggccacagacagagagacgcaagggaagccaggcggagccaaacgccaagaacaggaaaacgaaccacagcaccagagccaacagaggacagggaaccggggaagccggaaaaaacaaagcaaaggcaagaaaacaagcccaagaaaaagggaacggcacaaccgacacgaacacagggagccaaagcaagaggaaagcgaaaagaggaacaagaagaccacccaaagaaagagacaccgccaacaaccaggcgccacagaaaaaaaaagagaaaaaaaaggaagaaaaggaaaagaacagaaaaaagaccccagaaagcagaaacaagaagaagagaagagaagaagaagaagaagaagagaagacacagagaagaggaacaaaaaaagcaaggccacacacaaagagacagaacaaccaaacgacaaagaagaccaagaccaaaagccacgagccggcagcaggccagacagcagaccaaaaaaagaaaaagaaagacaaaaaagagccaaaccccccccccagacaaaccaacacaggggaagaacaacgcagcaaagggacaaagcaacgaaagaagccagcaagcaggccgggagccgggaaaaggacgcaaggggaaaaaaccagaacgggacaaagaaagaaaaagaggaaaaaaacccagccaaagcagccaaagcaacacaaaccaccacaagaacacacaaggagaaggaacagggaaccgaacgccagcgccaagaaacaaagaaccaaagaacaacaaaacaaaagccaaaaagggaaaggaaagaaaaaaaagggagagaggaaggaaggaaggaaggaaggaaggaaggaaggaaggaaggaaggaaggaaggaaggaaggaacacgcaagacggaaacaacaccaagcaaaagaggacggaggaacaccgaggaggaacccaacacaaaagaacacacagaagcacagaaagggaaagcccagaaacagaaacccaagaaaagaaaaaccagaaaccaagaaggaagaccaaagggaaaccaccagaaggggaagaaaaccaggaaggagaaaaagacaaagggagcgagacagaaggaaggaccaccagagaaacaaagaaaagaccgaagcaagaacggcggaaaaagaacagaccaaaaaaacgaagaaaggcagcgacacccacacagaaaggagcagggagggagccgaaggcagagacaaaacagagccaggaggacgacacacagcgcccgggcacagccgccaagccccaggacccgccagggcgggccacccacagagacgggcccccacacaagacacacacacacacacacacacacacacacacacacacgaaagaacaggaggagaaggaagaaaaaagagaaggaagacagagaagaagaagaagaagaagaagaaaggacggagaaaagaagagggggaagaaggagaagaagaagaagaagaaaaaaaaaaaaagaaaaaacaacgaaaaaagaaaaaaaaggacaccaagacacacacgaaacgccaagaagacaggcgaaaccgacgcaaagagaagaaagaagagaaacaaaacaaaaaagaaaaaaaaaaaaaaggcagagaacaaccaacaaggcaagaaaaccacccacaacaagcacggaggaaacacaagcaccggacccagaaaaaacccaaagaaaagcgagaacacacgggcccagaaagaccgcgaaaggagcaccagagggagcgccgcaacacccgaaaagaacagccgaccgagaccacaaagcaaggccaggacagaaaaccacacggaacaagaaaaacaccacggcagcacaccaggagaacagcgaaaacacaccaggaaaaaacccggaaaacaacaacagaaacaacagaacggagcacaacaacaaggagcccccaaccgacaaaaaggggggaacccaacacgaaagaagcacgaccacacccagcaccacaagcccaaaaaaaaaaaaacgcagcaaaagaccccaccaccccggccaccagagacgagcacagcagaccaaaacaccccccgaacacaaaaaccgccagaacaccccagcaccgaaacccaaacagggaacgccaaaccaggccacgaaccggaacaaacaacaacacggaacaccaacagcaacaacaacaacaacaacaccacacacacaacgaggagacaaagggaagaaaagcgacaaaagagaaaaaaaagagcccagcgaccaagaccaaggaagaggacgaaaaaagcagaagaacgaagacgagcgaaaacccaacacaagaaagacaaaaaaacaggcacggccgacacaacaaccaaacaccaccaagcacaccagcagaaggcaggggcaacagcaaaggcaacaggcagcaaaagggggcaacaaggaggcaggcacaaagccgggggaaaaggcaaaggcaacaacggccgcacgaagcagaaaacaacaaaaaaaaaacaggcagcgcaagagcagggagaagagagaggaacaaagggcaggagaggagccggaggagcgaacaagcacacacgaggccccacaggccagaccaggaccaaagacaggaaaagaaaagggaagagacagaacagcagaaccagaaccaaaaagcacccaagcgcacagaacaaccaccacagaagaaaagaacccaaaaaaaaaacaaacaaccccacagaaaagaagacaaaggaaaaaaaaaaaaaaaaaacaggaacgaaggcagcagccgaaaacccacaggcacgccacgaagcccaagagcacagcgacaacagccaaacccgacccagaacgggaccacccgcccaccacaaaaagccccgagggcgaggaaaggagcgggcaacggaagaagcaacagacaaaggaaaggaccacgcagaccaaggcgcaacccgaacaggagggagagcacgcgcaggcaaaaaaaaaaacaaaccaaaacgaaaaaacaaaggaggcccaacagaagcaacccccaagaacaccaccaaccaaagagaccgggcaccagggaagacgacaccaaggaaaagagaggcaggccacacagagaaccacccccccgcaaaaagaagacgaaacaaaacgcaaagccgaggcaagagccggccccccaccagggccgaaacacaggaagggagcagcccccaagcaagaagcaccaaagagccagaaacaggccacaagacaggcgaccaaccaccgacccaggagccccaagagagaaaagcaaggcgcccaccccaaaccaaaagaaggaagaagcaaagcagagaacaagaagccaaaggaccagagcccgagcacgacaaagaaaaagaagaaaggaaacagacagcacagggaacacagccagccccagacgccagagcaagacagagcaaaagcccggacagcaggacggaaaacaaagaagaagaacaaccaaaggaccagacagaacaaccagcgggcagaacgaagcaagccaagcaggccaacaacacaaaagaaaagcaccaaagagggaacgaacggaaagaggaaaaacaaaaaaaaaacaaaaccaacaaaaaccaggaaaaaagagaaaacagaaggaaccaagcagccgagacgaaaccggcaaaagcgaaaacaaaaaacgaaaaaaccgaaaaaagggcaacacaccaagagaaggcaaagaagaggagagaacacaaaagaaccaaccccgaaaaaaaagaaaaacagagacaaaaaaacaaggaaaaaacccacaagaaaaaacaaaaaaagcacaaagaaaaaacccagccagaaaagaaagagggacacagaaggcagaaacaaaggccggagaccaagagagccaggaaggagaggacgggcgaacaaaccaaaacacgggcaagcaaggacaaaaaccgcagagaagcggcacacaaacagacgaaaacacagaccacaaaaaaaccaaagagaaaaggcaaggaggagacgcaggagaaaacaaacaccaggagacaaggccggaggggaaggaagaaaagagaaagaagcaaaacaaccccccccggcccccccccccccccccccccccaccccccccccccccccccccccccccccccccccccccccccgccccacgccccacggggaaccacccccccaccccccccccccccaagcccgcgcccccccacccccgacaacaggaggaacagccccacggacgcagacccgaagggacaaccccaaagcagaacaagcgccacaaaacaaagcaagcaacaagaaagaaaccgcacaaggcaaaagaaaaccaggaacaaagcgcagcagaaaagcaacacagacagaagaaaacacaacaaaacaaaccacaacacgaaccacaccaaccgaccgagagacccaaaccaagccaagcaaaggcagggcgaagaaaacaaggggaagcagaaaaagaaaaaaagaagaaaagcaaggaaacgaagagaaagaaaaaaacgacggcccgcaagcccaaacccaagacaacagcaacaacaaagccaaacaccccaagaacacaccaacacaccgacaagagagcaaagcagggggcaggcgcaaaaaaggccaagacaggcaacaaggggcgaaaagcagaacaaaaacaacaacacaaggaaaccaacaacagaagaaaaagcaaaagagacggagaaacgagaaaacgccggaagagcagggccacaccagcaaaaaagagcagaggaaggcaacaccagccaacggaagaaacacaacaagaccaaaagcccccggaacccaagaccacccccagcagagaacaaggcaagaaacaaacgcagcaggaaaaagcacaagcagcacccccaaagaccccaacggaagagagaacacaacagggaaaccaaagaagaaccaggaacaagcgaagaaaaaggaagagaagaccaagaccgagcgcgcccggaggcacacaaacggaaaaggccaggacagacagagccgagaggagaacaaagccgacagagacgcacaaaacaagaaaaccagcaccaggagagcgagggagggaacccggccccgaaggagggggcgacaacaacagccaagaagcaagagacgaccacgaaggcgcacaaacaacacaagaaaaaaaacccaccagaaacccaagggggaaacagcaaagaagggcagaacggaacagccacaaagaggaaagaagagcacgaaacccaagaaaggggagaaggcaaagcaccaaacaggaacaagaagaggagcagccagacagaagcacaaacaaggaagccaaaccacaagaacagagggagcaccacccaaaagcaaagaaacccaaacaaacgcccgaccagaaccggcgaggaaacccagaagcccaaaaccccaccagggaaaagaggaaccccagaagccccccgccagggggccgcgcccgcaagcagaaaacaggagagaaggcagagggaaagccaccccgcgagcaccaagcacaagaacaccagaaaaggaaagaacccccccgcaaagagccgggacccccccacccccagaggagccagcacgcaaaaaacggacaaaaggcccagccacacacagagaaaaccccaacgcaaggaccgaaacaagagagggcagaaagaaagggccacacaccgccaaagcgaaggcagcacagcaaggaaacccggaccgccacaaaagaaagcaagaagacagaaggacagggaagagacagagcaggaaaaacggcgagcaacacaaagagcaagagcgcccaccacccaccaaaaccacaccgcccaccagacccagaggcacccacaagaccagaagcagcaagagacaagagcccaagacgcagcccccaggacaaccaccagccagccccagaaaagcaaagacaaaagaccaccagaggcggggacgagagagaggaaggcacacaaagcgagggacgagacagaagcacaaagcaagggacgagcgcaaggagagagcaagggccagcgggcaaacaagaccccaaaccacagccagacccgagagcagaacaccccccacaaagacaccgcgagagcacaaaggagcaccgaggc

SEQ ID NO: 510 - RNA, 5438 nt, Mus musculus
  misc_feature (3671)..(3770): n is a, c, g, or u
accacggcaggcagcgggggaggagcgccaccgcacccagcgacaggaaggcgaagcgccacggaaagacggcgcgccccagccacaggcgcccccgcgccgcccaacacgacgcaaccccgcgaccggggccacaacaacacaacaaaggagggaccacacaggcaagagaggagacacacgagaggaagagcgaaaaggggagcccacccccaaagaagacagaaacaccaacccgagggcccgggcccacccagccaacaccccagcggcagccgcccgagccgcacggagagagcgcccggacccaagggacacacagaaagccagcgcgccagggcacgagaagccaccagccaagcagcaaggccgggcaggacagagccccggagaagggccggcaggaaaaagacaaacacacagaagcaggcagacagggagccaaggacagaggacaaccacaggccgggcgacacgaggaggagccaggcacaaaggggggaagggcgggccggagccggaagccgcggacaggaaccaccacaggcggggcacggggcccacggacacagagggccccggaccaggaacacagcacagcgggggaggccgaccccagaaaacacgggagcgaggaacggggccccgagagaagaaacgaggaaacaaacaggaggaaaagaagggagacagggagagaacagagggaggcggaagagagagacaggagcgaaacgcggggggagagggcaaccggcaagggcacgggcaaggaagcagagggcaagcagggcaccgccccaccggaggcaggaccggagaacccgcgccccgcccacgcaagcacacgcagcaggcagcccacgcccacgccggcgcacccaggggccgaacgagacccagggcggcacagcaaggcgcccaggccaccgccccagccgaccagccacgagggccggaggcaaagcagcaaacgggccacgcaggcacggggaggaccgcgcacagagccccacgcccagaagcacccggacgagccgggacaggaaaaggcccacgccaaggccaaaaaagaagggcaggagaacacagaaaggaggacaagagcgcccaaacagaaaaacggaccaaagagacgacgggcaggagaacacaggccccaggccccgccaggggccgccgagccagcaacgcgcacaaagcccaagcgccccccccccccccccccccccccccccccccacacacacacacacagaaaaaaaaaaaaaaacaaacacaaaaccaaacccgccccgagaccagcccccaccacacaccaaacgcagagaaagagggggaacggcggagcacagagcaacagcccgaagggaacggcaaaagaaacagagagaagaaccagaaacagaggggggggggggaggaaacacaccagggaaaaaaccaggcaggaaaacgggcgaacacgacaaagacagaacagcaaaaaaaacaaacaaagaaaaaggaaagaggaaaagccaagagcaccacaggaaagcaagacaaaaaaaaacaggaaccggcacaaagcaagaaggaaaaaaaaccaaaaaaccaggggaggaacccgccaaaccaggggaaaagcagcacaaacacggccaaaaaaagggcggaaaaaaggccggggcagagccaccgccccaaaagaccgagcgaggcacaacccgaagcccaaccagggagccccggcccaacccgccccccggccccagggcaccacacaagggaaacacacacacacacacacacacacacacacacacaaaaaaaacacaaaaaggcaaagaagagcagcaccggcaaagaggaaccagcggaaaagagggaacagccgaacgacacaaagcaggcaacacaggaagagacaaagacgaaacacgcggcacaaccgagggcagcaccccggggaaggcagagaggaaggaggaagaagaaaaagggcgccgcaggggcgggcaggaagcaaagagaacagagggaaccagcccggcggacccagcccacccaagggacccaggcagcagccagccaagccacccaaaagcacccgacaccccaaaagcgcaccaacgggagcacaagccacacacggggccggcagaggagcaacaagaccaaaaggagcaaagcaaaagagacaaaaaaacaaaaaaaaagaaaaaaaaaaccacccaaaagcacaagaaacaacccgacaaaacgaaaaagaaccaaaaaaacaaacacaacaaagaacgacaaaggaaaagacccggacccgcggaagaggcaggcggcccgggcacggaccacaggacagaggggagcgaggacagagaaaggccgagcaaacccaaggcggacgacacaaggcacagccaggagggcaccagcagacagaagaacaaaccccagccggggcaggcagggagaacccgcacaacgaacgagaaggacacagaggaccaaagaaacgaccaagaaaccacgaaccacccaaaccacaaaacgagagcggagggaggggggaaggaggagccagaccggaagccaaggaacagggacgggcaggcggagcggagagcagcaaggaaggcacgggaagggcgaagagcgaggggggcaaaagcgcgcagaggccaaaaagggaggcgggggagcgcagggagaggaagccgaggaagaaggccagggcgggcacccccagcaccacagacaccagaggagggaaaagccagcaggcagcagaaaaggccaccagggaggggaggccaggcaacccagagggcccgggaggggaagggggccaccaggggcggagcagccccccagcggccggcccaagcgagcgcccacaggaagcacaaggaggccccaagggcacagcgcacagcccgagcgccacgcggcgcgccgaccggaggacccaagagcgcgcccacagcaccggcggggacagcgggaaggcgcaccccgacccaaccaacgcgaccgggccggggacaacagggcaagagccaaaaggcacacagccaggggcagagagcaccggggcagccaccaaccggaacaacaagagacaaaagacccaacggaaggacgaaggaggaagacccggggggcagacacagcaccaaacggaccaggaaggcgaacacaaggcaggagggggcagaggaggccacaagagggaagggggaggggagagagagagagagagagagagagagagagagagagagagagagagagagagagagagagaagcccggacaagaaccccaggccacccaggagaagccacgacaaccccaagccagcccaaaagcaacaccacgagggcaaggcaacggcaaaccagagccgggccacaaaccagggccccccggcagccccccaccagcccccaggcccggcgcccgccaagccggcccagcaaggacccagacagagagaagcgaacaacaggccaccccaccagccgccacggcaaccagacccagggcaggcgcagggaggccgcgggaaccaaccagcaagaccgaccccaggagcagagggggcaccacggcacagcccacagagagagacacgaccaaaggaggggaaaaagccgagagggggagagagaagggggggagggggannnnnnnnnnnnnnnnnnnnnnnnnnnnnnnnnnnnnnnnnnnnnnnnnnnnnnnnnnnnnnnnnnnnnnnnnnnnnnnnnnnnnnnnnnnnnnnnnnnnagggggaggaaggggagagagagagagagagagagagagagagagagagagagagacaaccccgcaccacccgaggacggacaaggaaagaacaggccaggccaggcagccccgcacagcccgagggcccaggagggggacaccgggccacaacacgaaaggagagagcaacccggcagcccagggcccaggagcccagggccccagggacagaggcgacccggggggcggagagaaccggacgaccccagagcccagggaagaccccaaccacacacagaggagagagagagacacccccgaggacagcagagcccaaggagagaagggagaagaggaggaaacagaacagcaggagggagggcccacaacaggagcaaagccgagggaggcggggggggggggggagggaggggacgacaacgaaccagaaaccagacacaaagaaaagcagggcgagccccgagacccagcgaggggccaggaagcacagcgcgggggcggggccggggggcccaggcgacaggggggccacgccagcagagaccagccagaaaaggcggggcagaggcccacgggggggccaggcacaggggaaccaccaccccagggccacagccagacagagccaaaacagagggccggcaaaccagccgcagccccggcaccccgggccgcaccaccggcggcgggcaggaggggacacgccccagaggagggcccccggggggggcagaaaacgcaagggaagagggcgaaggggggaagcgggggaacccgagagaggagcaggacgagggacaagccccgccgcgaacggcaggcgggggggaggcaaccaaagggaggagccaccacggggcaaggagaaaagggcaggaccagagcgaggcaaacaagacccaaggcgaaagcacagacggggaggagaaaccgccagagcccacacacaaaaggcaaagcaaagaaagggccgagacaggagacccaggcgcagccgcggaaggacagccaagggacagcaacgagccaccagcgggcgaagagggggcgaaagacccaccggaggccggaccccacgaccagagcgcccacccaccaccaccaccaccaccaccaccaccaacccacaccaacagaacgaaagcaaaggagcggagagcagggggagaggagagagagagagagagagagagagagagagggagagagagagagagagagagagagagagagagagaggaaagcacaggaggccagaggcccggcaggccagagacagcccacaggcggcccacacgggaggggagggaagacaggggaaacaggaagcagccagcacccgggcaggcaggagcacagagagacaacacacaccccgaggccccgagacagccgccaaggccaccccacaaagcccacccccaagagagccacaaaacccagcagagaaaccgaggcacaagaaaaacaccaacgcaccaccaccgcacagaagcgggaggagacggaaaacagagaaaaaaagagagcgccccagaaccgaaaggaaggcagaaggcagagcaccggccagggagagcgggcaaagcagaggcacaggcagccggggagaagcggagggagccgccggagggccaggagcgcacagaagagcgggcacacggg

SEQ ID NO: 511 - RNA, 1606 nt, Mus musculus
gaggaagcggcgagccggaaagaaggccagcccagccaggcggcagcacagggcagaagccagcagccccaccaaagccagcagagcagacccagcagagcccgcagggacccccaaccaggcgggcgcgacacagcagaaagccgcacgcagagagcggcaagacggagaagcccagccccccgaggaaggcggcaggcgcgggcccggcccgcgacccccagccgggggaaacccgagagcgcggcgcccaacgagccgggccaagaggcgaggcagagcgaccaaaaacccaaaacacggaggaagaagaagaagaagaagaagaagaagaagaagaagaagaagagagccggccgggaaaaagagaaagaaggcccggagaggggcaggaggcagggaggggagaggggaaagaggccagccagacacacggccggaggcccgcaggggaacaaagagggccaacacgaacgacagcaaaggaagggaccggcaggcaggaaggacgccagaaaccacgcccaagcaccacgcagaagggcagcccgccggaggcagcagcaacccacaaagaggcccaccagacggcaggcaggcaccaacaaggccacaaacaagaccccgacccagggaacgggggaggggcgccgaggcacagaaccccggggaccccgcgcgaccccaagcagaaaacccacagggcggaaggcaagacaaagcaaacccagcaagaaaaaaaaaagccacccgggaaaacccacaggcagaaaagagacaggcaagagggcgcccgaaccccagaggaaccagccacgcggggagaacacgaaacccacaccagcggaaaggaaaaggagcacagaaagcagacacaacgcccaaacccaccaccacaacaacacacacacacacacagagacacaacccgggcaaagaaggaaagggggacaaaagagcgcccaggcaccccgaaaagcagagcggggagaaaggaggggcccaggccaagccccaagacccaacccccaccaggagcacacccggaaaggggcccgggagagaggcaagcccaggacggagagaccaagccaaaagcacccgaaaccggggaggaagagagaagcaccggaaccagaaagaaggagaagagaccacggaagcgcaaaaaggccaaaagcacggcagcaggacaaccaaaaaagcgaaaccaggagccagggagcgggggcggggagggacagacacggaaaaggaacacgggggagccagccggccaggcgcgaggccacacccggcgacagcaacccgcaacccaggcccccaacaccaggcccacgggccagaagcagcaggaggacgccagagccagaggaaccgcgcagcgcacgggcccacgccccgccaccggaagcagagacaaaagcaagaaacaggccaaagaaaggaagagcccccaccacaaaaaagaacacgggggggaggggacaaggcaaaagacaagccaacacagggaacagaacacaccaggcagagcgcacacaccgggcagacccaccacaggcacaacaccagaaagaaagagaagacagaagcgagacaagaa

SEQ ID NO: 512 - RNA, 8531 nt, Mus musculus
cccacacccaccgccccagccgccagaagcaagagccagacccgccagaccggccgcccacaggaagcagcaggagggaaagacaggcaggccggccaaccggggaagcaggggagagaaggaaggccccccgcccgggccccggccgcccccgaggcggcggggaaccacgagccccacgggaacggcgggggaccacgcgaagggccgggagggcccagggccacgggagagagccccacacgccaggcaggaaacacaggggcagggagggacccagaccgcgaaccaggggccgagcccacccgagcgaaacgagccggacaacccacccccccaaggcgccgagcccacccagagagagaccagccgggcccccccccgaggcgccagcgggcccccccccagggggcaaggcaacgcaaccaggaggaaaaggacgaagaggcacccaccaccggcgccaccagggggcaggggcgagcgccccgccaggaaccccgaggggagccccgccgagggcgaagaccgagagcaggagagcccagcaaccgggggccaggcaccgggaagacccggagacaagcccgggaggacaagggggggaccagcaagcagagagggcacgaacagggacaaaagcacaggggaagggggcggggcagggcagcggcacaggggagccagaggacaacccaggaagcccaggaaacgccacccccgagcagggccccaccagcaggcagcggcggccaggaacccaacgcccccggccccacgcccaggcgggagccggcacccgacaggcaggaggaacccagcccaagcggaggaagcacacaacagagccaccgcagccccagaaccggcgggaagcgccaggcagcgcccaagaagcaggaccaggcaaggacaagaggagaaccaagggcggagagaggccgggaagagcacgggcgccccagaggccgagcaacccagcaaccaccggggccacaaccacgaaaggagagcccccggcccgcagcgacacgggcgaacagcaaaccaacaccacacacaacaaagaaagaaagagaaaagacgcaagacaggcaggaacacacagcccaagacaaagcagaagcaggaaagagcgcacagacaggacaagcaagaccgccaaagcccaacaaaagggcaggagcaggcagggcaagcccgcaaacaccagagaggggcgggggcgggccacggggcacgccggcaggaaggccggacagacagcagcaaaaaacagcgacaacacagacaaaccaacgggcaagacccaggcacaaagaaggggcagaggaagcagagaagccagacacaaaccagaaaggggggcgggcaggaaagaccaggcgggggacaagacggaggacagccggcaccccccagcccacgggccccccacggcaccggcaggggccggcagaggcccaagccagagggggccggcacagggcccaagccagagggggcggcacagggacaagccagagagggcggcacagggacaagccagagagggcggcacagggacaagccagagagggcggcacagggacaagccagaggggggccggccagggccaaagccagggggcgcggcacagggacaagccagagagggccggcacagggacaagccagagagggcggcacagggacaagccagaggggggccggcacagggcccaagccagagggggggccggcacagggacaagccagaggggggccggcacagggcccaagccagaggggggccggcacaggggcccaagccagagggggccggcacaggacccaagccagagaggggcggcacagggcccaagccagagggggccggcacaggacccaagccagagaggggccggcacagggcccaagccagaggggggccggcacaggacccaagccagagaggggcggcacaggacccaagccagagaggggcggcacagggacaagccagagaggggagagcccaacaaccgcaggagcagcccccaccagggaccagggagaccgggcgcagacggggcagggcgagacggaccagccgcggccagcaccaagagcaccaacacggaacgacaccaccacaccagagggccgaagagaccagccgggaagagaggccccccgccccccccccagcccccccccccccccccacccccgggaggcagaaagcaaagaaaccaagacggcaaaggagcccgcccaaaaccaacagcagccaaacgaaagagaacggcgcacaaagacagagcaggggcacgggcccgagagaagagaaaaaacgcaagcgcagagccaggcaggccagaggaccggcaggaggagcaaagcagcaaaagccggcagacggggcaagggcaggagccaggagggcaggagcggggaagcgagcggacgccaggcgagcggcgccccagggccgaccacagggcagcgcggggcaggccgcggggcgggggaaagggccggcccgggggacgaggccacaagggcccccccggcaggcaccgcccagaggagcagggggaggggagggaggacggggggaggcagcagccgcaaagagggggcggagagaaggggcagagacgaggcccaggccgagggaggagggggggggaacggagcagcaggggagccagccggcagaacccaggcgagagcaggcccccggccggccgcagaccaccggacagccagacacagaccacaggcgccccgagacccggaagcagcgggcagggcgcgccaagcgcgcccccccgggacccccaggagcggagggcaccccaggccacaccaccacagcacagagaccgccaaccccccgccaagggcagcacccaagacccaccgccccgacgccccaacccagagccgacccccagcacccgagaggacccgcccgcaccccgaacccgcgagccgagaccaacccgcgccgaggccacaggcgcccccccagaccggagccacagccgggacccgaggccagaggacaggaagccccacaggccagcggccagcgccgggccaggccgccgcaaggacgccaagcagccggcccagcagccccacagcccccccggggaccggcgcccagggggggcacaagagagcgcccccggccgggaggcgagcagccagggggaggggccagaaacccaacgacccccagccccaaccccgccccagagcaggcccgcgccgaggggagcagaccaggcaccggggcgggggggccagcacccgccgcaccccggaggcggcacccagagccccccggccgcaccgccaccccagcagccacccaacgccccagccgacaagggggggccagaggaccggggaggagggacacagagaccaggggcccaaagagccggggacagacgggaggaacccggggcggcaggccccgccccgaagccgagccgcacccagccccacgggagccaggcacgccaacgcgagcaacagggcacacgagacagaggcccaagggcccagcgcagaacccagcacgaaacagacccacagacccccggccccccggaggcaaaaggaacccagccagaggcccacaaaagaaaaaacgggaaaaacacaaaaacaaaagggagaacaagcgggcaagggcacacaccaacacaacccggcagcagaggcaggggaccggaggaggccagccggcacacaggggccaagacacccagagcaaagacaaaccccaaaacaaaacaaagaggacaaagccacaaacaagcagaaaccaagcccccacccccccgaacggccacggagcagcggggcagaggcgcaggacacgccacgagccagccgacagacaggccagggcccggcggcaggaaaagaccaagcggagggagaacacccggacccagcgccgggacgcagggcaggagaggagaccgaaaccaagacccgaccagaggagacccgccagaaacaaaacaaaaagccaaagagccagcaccacggggagaaggcaggcggcggaggaaggcagccaggaagcagagagggaaccgggccagcgcccggcagcggaccaccacaccacccggccaccagcgaggaccccacaaccgccaacgacgcaggggacagcaagcagggcacagaaacggcaacccccgcccccccccccggcccccagacggagacggcaggaccagccagcacccccaaaccaagcagccggggacagaagaggaagcgcgcggaggagacgggcgaagccaggccaaggaccccgcgccccgggaacgaacggcccccgcccgaaacaaaccagagcgaggcaggcccgaacgcagcagccgagacggcccaaaccgaggccccccccccccccccccccccccccccccccccccccccccccccccccccccccccccccccccccccccccgagacagggccggagcccggcgccggaaccaccgagaccaggcggcccgaaccagaaaccaccgcccgcccccaaggcgggaaaaggcgggccaccacgcccggcgacggccacccgagacaagcccgcgccgaccaccgccccagaacagaaaacaccaacgcaaagaacgcgcgcaaagaacaggagaaaggggcaggagcccaggcggcccaacccgcaaaaccccaaggaggcagaaacagggccccaagggcagcaaaccggcccgaagacacaaaaggccaggaggaacccaggcggcggacccagagcacaccggcaagcaagcagcggcggggcagggaacaggccagcggaagggcagcgggaaagaagggagcgcggacaaagagccaaaggcccagccaagcgaaagacaaagacgggggcgagccaccgccggaaccccaagaagaccaggcggcccgaaccacagcaacgccccccacagccaggaagggagggcaccaaccggcaggaagcaacagaaacggggacggaggcagaggacagcacgggaacgacgacccgggggaggccgggcgcaccaggcccaggcccacgggcaagcccgccccgaggcacgcggcccccggccgagaccgaagagaggggggggcccaaggagaaccgaaccgaaggcccagagggaagagggcaaggacaacagcccaccaacgccagcgggaaggggggccgcgccgggcgacggaccgaggggggacagggacagccaccacaagcagagagggacaacaacacccacccgggggacaggcccagccgaagacaacacaccgacacccagcccggagacagaggcccagcaccgaggccaccacccccgcgccaggaggaccaggcggcccggggcgaagagggcgggggccgggcccagcgcccagccggcccggaggccagaggcccgacacgagaacagggagggacagaacacgggggaggaaaagggaggaggaacagggcacggggaccagggcgggggacagggggagcacagacaggggccaccaaaggaagaaggggcgggggcagcagagcagacggggaggaaggggaggggaaaaagggaggacaaggcgacccgaggagaggggcaggggaggggaggcagccccaaagcaggaacccgaggccccccccgggaggaacggggcggagggagggagaccaaagaaggaaagagagagccgaggccaggccacgcacgcaggaggagggggacgcgggggccagcaggagaaggagacacggcgcgcagcgcccggccgacgccccccagccggggagaggcaacaagacgcggggagaccgaggccagccaacggccggcaggcccgggcaaggagccacccccggggacggacggaggccgggggcagggaggcagccccaaccgccaggcggcccagaccccagccccaagccaagcacaacaaaaaagcacgacgaccagccggacccacaacccaccaaaccaacagacaccaggcccgaaagaccaaccggaacagcagagggccgcgcgcagaaaggccacccgagcagcccccagcccccaccggagcaaggaaagggcccaccgagccagccccccagcccccacgggggacaggcaggggccaccacgagccacgcccccagcccccacgggggacaggcaggggccaccacgagccacgcccccagcccccagggggacaggcaggggccaccacgagccacgcccccagcccccacgggggacaggcaggggccaccacgagccacgcccccagcccccacgggggacaggcaggggccaccacgagccacgcccccagccccacgaaggacaagcaggggcacccccaagcccccccaaccccacggaccagacaaggcaccccgagcaaccaacccacccaacgccgccaacgaccccccagccgcgcacacgacccagccagagcccagacgggccccccccgcgaccgaaccccggagcgcagcacccaaaccaacgcagcccacccaaggaccgccccaagaccaacccgccacggccgcccaggagacccccccggagcccaccgcccggccgcaccccacccccgcgggcgccggcgacagggcgggcgggcccaacaggccaccgcaccgcgcaaggcagggcccacggaggagagggagcggcgagcccgcgggcgggccgccccgccaccggaggagcacggacgcagccgcacccagggccgcggagggagcgggagaaaggagacagacgcaggccgcagccccgcgggccaccccccccgccgagcgcggcagaggccggaccgcaggggagccacaggccccagacgccacacagcccaagcccgagccagcgcaacaagccggacggcccccaaggcgggacacgcagggccgaggcgggcccagcgggggaggcccgacgggccgaggcgggagagaaagccagcacaccggaccaaaggaaaacacccgccccacccgacagaagcaggagacagacagggcggcgaagggggcgcagaggcagcccgggaggaggggggcaagaaggcggaggcaggagggagaggcagcggggggcgagcgaccgccccaccccaggacccccggagggcacagagcaccaaccgcaaaggagagcagcggcagccggcgaggccggggccgaggcgccgaagaacccagaggaagccccccaccgcagccaggagccggcaggccaggcgggggggggcaggggggggcggaggaccggcccgcccacccccagacggcgaccggaggacgccggccaacccagccagggccgggccagcaccacaccgcccggcgccaccggcccggacccacagggggcgccgggcgggagacaggaacccaggcaggggccaaaggggccggcaggggggcccgggcgcgaccccagcacacaccgcagggcaccagagccacgggcaggagcgcggggcgacgcagaggcgcagagccacgagggggggggcaacgaagacaaccccaccgggacgggaggacgacgggcagggccccggccccccccgccccaagcccgccgacggacgcccgccccacgccacccgcagccccacccccgccgccgccggccccaccgcacgcccccggcgcccgccaggagaaacgaccccacacagggccacaaggggacccggaccccgggggggggaacgcccccggggggagagggccgggccgccgggcccccgcccgcgggcagcccgcgccagagggagaagcgccgggccggcgagggcacccacgggcaaccgccgaacacgccccagcagaggcagccagcgggcaccagggcgaggcacacacacgaaccgcacggaggacaggggccaggaaacgcgccagggcggaacaagccgaggccgggacacggaggggcccacagaaccagaccccagaggggggccacccgaagacaaggacccagggaagaacaggggcccaaggaacccagaaccaagaaacaggaacgccggagggggccaagcccagaagcgggagaagaggaagaggaccagagaaggggcacaggagcagggcaggagacagggacaccaccggagagggccggaaacacgacgcagcacagggccagaaagaggcagccagggagagggaggggggagacgcgggggccgaagaccgggccacccagccccccccccgccccacaggccccagggccggaagacgggccacgggggagcggccccggaccacgggggaccgggcggacccagaccgcccccacccacgccgccccaggacccccgcccccggcccgggacgggcgcagccaagccacgccgcaggcggggaccggcacggacgaggccagggaagcacggccgaggcgcgggccagccgggggacccccccccaggaccaggcccccgagaccccccaggag

SEQ ID NO: 513 - RNA, 2600 nt, Mus musculus
gcaggcgcaaagcgcaaggagccagcccccaggagcgcgggggcgggaccaagaggaaaaacaaaccgacacaaagcagaaaaacagcaaagagccccagaggacgaaacaacagacaaaacaacaaaaaaacaaaaagcaaaacacaacagggcacgaacaaccccaaacacgggacaagcccaaacaggaccagggcgggggaacacacgaaaccagaggaaaggcgaagcccaaggacccaggaccgccagcaggagacacaacagggccagcacacacacaaaagccaaacaagaacggccagaaaacacagaaaaaacacaccccgggggcacaacacagacacacaaggcaagagagaccagagccaaggagcaccccccagaaaaaaaaaaaagcacacaaggagggggagggcaggacagaggcagaagcaaagggcagagccccaccaggcccagggacaaaccaggcaaagccagagcaagaccaccagaggcaccaggacccagagacgaaagcgaacgcacagggccccgggacccagggcacacaggaacagggggaagggcgcccagaagcgccaaagcgggagccgggcagcaaaccagccgacaaccaggcagagcggggacacagggccaagaagggccaggcaccgggccccacgaagaacaaggaagcccccgaaggacgcccaaaggacccagccagggccagacagacaggccgccacccaccacccacccgacccccagaaacacgccgcagcccaccaaaggaggccggggagcgagagaaaaacagggagccggggaagaccagcaagaggcacagagccaacgaccccgcaggggcggacccaaacaaggagcaggggagcaacgaaaacccccaaacaacgaaaggggcagaaggacggaggaacacggagcggaagcaggggccaggcccccgcccccagcggaaaccacgcccaagagcaggggagagggggcagggagggacccgaggacaccacggcccaacacacgaggagaaagcagaccagaagccgccccccaagccccaccccagccaggaagccgggacgacgggcacggcccccacggccagacaccggccagccgcacagaccaaagcaggaagccaagaagacaccgagaaacaaagccccagaggagcagggagagaggccgggcagaccccacccaggcggggacacgcccaggagaaggagccggcggacgggggacaggaccagccccgccaacgacggagagggcccgcgaagacacacagcagaagccgggccagaagggcacagggagcaccaggcagacaaaggaaaggggggcggcaggaccaaagagccgccacaggaagcccccaacaagaagccaccccgggacaccccaagaggccaccccagcccgcagccacacaagagcccccaccccacccccgcgccaaagacaacggccaccaaacccaccggggcgaacgccggcagggcaccgggaagggccccccgcacgccaccggccggggagaaagacccacacccgagccaccaggacccgaagggccaaccccaagacgccgccaggcagccccgggagcgaggacagcccagcacagcgcaggggcccgggcccacaaggggacgaggcagacagggcgcgggagggagcgggaaaggagggggagaacccagccccccgagagcacacagacaacagaccgcccacacaggccaaggcagaccaggaggccaaggcccggagagcgggccgggccagggcccacggcccaggcgcggagccggggacggagccagagacagacgacccgcccccgacccacggagacacaccccgcgaggaacagaagggggcaaggacaccaggagaaccacacgacagccaggccaccagggcaggcgcacaggaccaggaccaagccggaaccccggacgagagccccaaggggcgggcccgaaggcagggagggcagggaagcgggagaacccgcagcgaagagcccaccacgcagaccgcccgccaaggccaggccaggcccaaacccgaccagaacaacgaagccagggggagacgagacaacaccaaccagccaggaacggacacaagaccaaagccagagcaaaggaggaggccaagccaagacccggcaggcggaaccaaagaaagagcacaaaagcgggggaagaagggagacgagaggggggggaggggggaccccggcgacacaggcgccgccggggaccgagccggggacacccaagcagggcaaagaacaaacagcagagccacggcaccaggaccccaggccaagggacgcaggccccagggcccaaccccaagagcccgagacagccggccgccggaacacaggacggccagaccggacgaagaccggccggcccacaccaccacaccacaccgcagcccagccggggaggggaaggagccagcagacgggggcaggggccagggccccgggccgagggcgccaaacagcggcagcagacaggcaaggagcccccccccggaagaccccagaggcaaccccccacg

SEQ ID NO: 514 - RNA, 3367 nt, Mus musculus
  misc_feature (2285)..(2384): n is a, c, g, or u
aagccccggcgcacccaaccacaaaaaaacagggagggaaggccacagcagagcacgagacacaaggaaggagacacggagcaaggaacagcagaaaaccagacaaaaaacccaaaggaaagaccagagcagaaagcaagagacaaccaacgcagcaaaagaaagaccgagaaagaaaccaacaaaaaaaagaacaaacacaaagcaccaaaagcccaaaccccccccaagcccccaacaaaacaggacgggggaagagaaggaggagggcggggagcacagggcacagcaacacaaggggcagggggaagccaagggcagccagaagaccagaggcagagaagaaagcgggagacaccagacggcaagaagaggcgggaggggaagccaggcaggacacgaagagaccagaggaggaaggaccaagcaccagcccaccaggaaacccagagagacgcgccggggaaggcggcacgcacacagacaaagcccaggacacccacacggagcaacccgagggagcggagggaaacaacaagacacaagaccaggaagaaagcagagccccaggaagcccgaaacgaccaggacaccaggccccccaccacccccagggaaaagcaacacagagcgagaggcacgcaaaccagacaaccagaagagagccgggacggagcaccgccagcaaaaggagcgcaggccagccggagggccagcgccagagagcacaaccgcagaacccaacccaacgcagagacagaggaacccaggccgcgcccaacaagggcaaaaggaacacaggcaggagagacccgcaaaaccaggggaacagacgagaaagaacaggggacccagccccacagcagggcacacaaaacagacaccacaacgggcaagcacaacgcacaaggaacaccaccacaacaacacaaccagaaaaaaagaaaaaacaaaacaaaacaaaacaaaaaacaaaacaaagggcacaaagaacagaaacaagaagggagccaaggcggagggacaacacaccagagacacaggagagagcacaaaggagaaaaagggggggagcaaggcaggccaggccccagcggaaaaacaaaaaccgcgcaagaccaaaagagcaaaccaaaaggacacgggaaagagcccacaccggcagaaaggcggaaggccggggccgacaaagcaggggaaaagagggcgcacacaccaggcaagaccacccacgcccccaaaaagcacagcccccaccccagcacagggacggggacaaacaggcccaacgcagaagcacaccccaagccaccccacccgcggaggcaggacacgccaaaaaaccacaaacagcacagaaccaaaacacaacaaccaacaaagccacaaagagagcaacaaaaggaccacgaaccacagagaacagaaacagaaaacaaaaccaaaaagcagcaaggacgcaggaaagagcaagaggggaacagggacgccccaaaaacagcggcaggcaaaagcccggggggcaccgacacaggccagccagggggcagaagacaggccggagaaggacacacccacccgaacgcgcaggggacgagagccagaggcagagggcgccggcccagccagggggcggccccccggcagcaggcgacaagcagcaggacgcccggccagccaggcaccggccacagcgagacgacagggacagagcacgagacgaaacgacgccccggcagggggcggcgccgcaagccggaccaaccaggcggcagcagcgcccgagagccgagcaggggggggggacaaggacccgggaccccagcgcggcggcccggcccgcgggcgcgccaacccgcgggcgggcgggggccgggcccaggcgaggcggcagaggaagcgagggcgcgccggcgcagaggaagcccggaggaggaagcggccagccgggcggacgggagaacggggacccgggggccaggcggaggagaaggcggcggcggagaaacaggaggagggaggaggagagggggggaggacgcggccaccgcccaggaggagccacccgcccgccgcacccagcaaagggcccggccacccccaggcgacagaccggcaaacaggcggaccgcaggcccaggacgcggcgagcgcggacccgccgggcccggcgcgcgggaccacaaccccgccgcaaacgcgcgcgcccggggcgcgggaggcgcccagcccggagcccccccgcaccgaggccccccccacacccccccgcccccccccccccnnnnnnnnnnnnnnnnnnnnnnnnnnnnnnnnnnnnnnnnnnnnnnnnnnnnnnnnnnnnnnnnnnnnnnnnnnnnnnnnnnnnnnnnnnnnnnnnnnnnagcgcccgccagacagccccagaaaacaccgccagaccagaagacggaggcaccgccagcacaggaaacacagaggccccaaaacaaaacccccccccccaaaagccaggaaggagaccacccgaaagccgagagagaaagaaggagaagcagccccgggcgaaaaaaccggcgaccaaagaagcaaagaagaaaaccgacggggaacccggcgcccaaaccgaaacacagcaggcacaaaagagaggacgggcgacaccacaaaaaagaaaaaaaccgcgccggagccggggcaccggagaccgggacaggccggcagcaaacaaacccacagcccaacagggaggcaaaacgaagcaaaacgagcaggccgcccccccacagacagcaaaacggaaaaaaagagaaaagaaaaacacaagaagagggcaagggaaagcacgaaaacaccaaacacaccaacaaaaaaaggaaggaaagccgaaaccaagaagggcacgagagagcagaagccagaaaaaaaagcaaaaaggaaaaaaaaaaaaaaagaggagaaagggggaaaagggaaaaccaccccgagagagaaagaaaaaaaacgaagcaggcgggaagggcggcgaaaggacaaacacagaggacaccccaacagaggaaagcaaaggcccggagaacacccagcaaacgccccacacagcgggggaagcaagaaaggacaaagagaaaggcagaagaggaacaccggcgcgacaccggcggcgggcagagaccgggcaccggccagccgaggggagagaacaacaaaaagcggccgagagcaggggcaccaagggccaaaacacgagaaaaaaaagaaaaacaagccgcaaccaggggcaagaaaggccgaggacccaaacggcgggcgaaagcaaggcaacgccagacacaagccagacaggggcagccccgcgggaaaagcgaggaacgaaagcaagcacaac

SEQ ID NO: 515 - RNA, 9917 nt, Mus musculus
acagagaggacagccagaggggaaggggggccggaccagcagccagaggaggggggggcaccgggggaggaggcgaccgaagcacgacgccccacgaagccgcagcgacaaccccccacacccggacccgccaaggcacggccagcccacgccgcccaggcccggcgcaccccaggggcacacagcccgggcccaagcagcgaacagaaggggacaacccaggccccgggacccccgacaagaacacccccgccagagcagcccgaacaaaggccggcccaaagcgagcgaggggccagggacggcgcgaagccgagacaagagaggggagcggcgccccacccgcagaaagcccagcccgaggaaagggagcccgagacgcgaggacgcggggaaaagaaagccaaaaacaagggcgcggcgcccggagcgggacgggcccggggcacaacacacagagccgcacgcaagaacgagcaaaagagcaccaggcgcgggggcacaagcacaacaaagggacacgacgggggaggcgcccgaggggaacaaagaccaagaaaaaaaaccaccaggggcagaacccaccggacaagaggaagaagaacacggaaagaaacagggacagccccaccaggggcacgcgcggggggggggggggggggggaggccagaggaggaggcagagcccaaacccgccgcacaaaaaagaaaacaaaaaagacacgggcgccagacacccagaagagggcacagaccaaggggggaagccaccaggggcgggagaaccaggacccggaaggccaaccgcgagccaccccagccccgcacaaaaaaaaacagcaaggcagcagccacccagcaccccgccgacacgcagccacggggaaggcacagggccaaccaccggagggagacagaccaccagaccgaaggagcgcccaccacgggccaccccacccgacccccacacaggaaaaaaacaaggagacacggcccaaaaaccggagacggaacacacaagaccaggaaccaggaccacagggacccccgcccgccccgagggccaccaggcccaggacaggggcacagccgaaccagcgccggaggcggagaggagagcgaagacgagcaggcaaagaagggcaacaaggagcgaggccagcggacagagcaaacccacccaaaacacaaaaaaggacggggagaagcaggagaaaaagcacagggagggcaggggccaaacccagagcccagggaccagacggcgggaaacacggggccagaagcaagcagaggaaagagaggccagagcgcaacacagcccacgaggagggaagcgagacaggaaccaaagaggaacgggggcaggaacgagcagagaccaggaggaggcgcacggcgccccgacgggggaaaaaccaggacacgcccaggagcaggcgcccgccgagcggcgcccacaccaacacacaagaaaagccccaagcgggcagggcgcacccaacccagcacgggaggcagaggcaggggacgagcaaggcaaccggcacaaaggagccaggacagcaaggcacacagagaaacccgccaaaaaaaccaaccaaaccaaaccaaaccaaaccaaaacaaaacaaaaacaaggcccccagaagcccacagacaaacagggaagaaccaaccagccccccagggaccccacggggaagcaacaaaacgaccagcacaccacgaagcacagcgggaggagagggaggcgaagccggaagcggaggggaaagcggggcacaacccccagcaacgggcaaacaaggcaggaacccagcgaccgcgggcaccacacaaaagaggcaacaaacaacgcgcacaacacagaacacaaaaaaaacaaagcacacccccaggaggaggggaagggagcaggcaagggcacaagccagggagagacgagggcgaggcaaaggcgcgaaaggcgaagccaccaaacgcacaagaaacagaagagggaagggggccgccgcgaaacgacggagacggaacagcgggccccccagaaaccgagaacaacgcacacaaaaagcccgaaacgcagacacaagaggagccggggagaaggacaaggccgaccccccaggggaggcccccagacgggaccagcccagaaaggaaaccacacagggcagcaggacaggaggcgcggaaggaacgggacagcacaggagccggccgaggaccagccacccgggaacacggcggccgcagggaccaggacaggaagcacacacgggagcacaccaaggccccggaaggcagcaggggcgcccaaggcagagcaaaaggagaggagggggagccagcgaaggggcggcaaggcaagacgaggagggacccagaaggccagacagaggaaccgaacgcaccaaaggggcccagcgagagggagcggcggggggcgaggagagccaggcgcagcaggagagaccgaggccaccccccagaagccgcgcccaccagcaaaaaggggaacaagcgggccacccccgcgggcgcacgggcaggaacgggagcgagcacgggcagagccgcggcccccaggggacacagagccgggcccacagcggcaaagggggcggggcggcccccagaccgggccaggccacccgggcacagggcaccccacggagcacagggggggggggcaggccagggaagagacgagagacggggcgagagagaacgaggacacaccccccaagggccaacggccccaaaggaaaccgagaagccaggagcccaagaccccacccccccccccccccccccccccccaaaaaggcccgagcccaggcggccccaaccaccacagccaagggggacccgagcgagcggcaggagcaggcgggggcacaacccaggaccaagcagcaggaagccgcacaaaagagcacaccccaaaccagaggacgcagaggcggaggaggggcccacacacacagaaggaagcaccacagagaccacccagggaggggaccaggggaacaaagccggacagcgggaagaagcaaaagaacaggggaaggaaaaagagaaggaacaggccaggcaggaggccacacccaccagcacggagaggcagaggcaagcacccgaaaaggcagccggcacacaggagccaggacaaccaggaaagagagacaaaaaaaagaaaaaagaaaaaaaaagagaaggaaagaaagcacagcgaagcaaagggggcgagaagagcgagaggagcacgggaggggacagacacaaaagaccgaggcggaggagagcgaacagagccagagggcggccccccaagcggacgaaaggagggaagaacgaacacgcccaccggcgccgccccccccccaggcacgcacgcacccccgaggggagacagggcacccacaagcaggaacaacagcccgggcccgaggacgcagccacccaacagcagccgccccacgaaaaggaaggaagacggcgggaggggaacgcccaggaggcagggcagaggaccgccagaggacgggcggcgcacggaggaccaaggcacggcgcaccaggaacccagcccacagaaaaagcgggccgggggcacacaggggaggcagagcaggacggccagggcgcagcccagggcgagccaacagggaacccagccaggagagacccgacagaaacaagcgcagacagaagaacaaggccgagggacacggccccaggccaagcaggcacacacacacacacacacacacacacacacaccacacacacacacacacacacacacacacaccacacacacacacaccacacacacacaccacacacacacaccacacacacacacaccacacacacacacaccacacacacaccacacacacaccacacacaaacaccaaacacaccacacacacaaccacacacacacacacaacacacacacacacacacacacacacaccagaaaacaaaaaaaagcacaccgacaccccccccagcagagacccggccggccacccccccaccccccgcaccagccagccaccccaacgagcaaggaaagaaccaaagcggcacggggcccagcacgcaccagcccaaccaagccagggaaggaccagacaagacaaggcacgaaagaagaaacgggccccacaaagccagacaggcccggccccagacccagcaacccagacaccgcaacccaaacaacagggcgaaaaaagcgagcacacacacacacacacacacacacacacgcacacacacgcacgcacacacgcacagcacacaacacaggcaacacacagcacacgcacagcacaggcacagcacacacacacaggcacacacaggaacagcacagcacagcaacacacacaacacaggcacacacaacacacacaacgcacagagcacaacagcacacacacaggcacacacacacaggcacacaaggcaacacacagcacaacacacacaacacaggcacacacaacacaggcacacacacacaggcacacacacacggacacacacaggcaacacacaggcaacacacagcacagcacagcacaaccgcacagcacacacacacacacacgcacgcgcacacacacacacagaggcacacacagccagccacgcaccgacaagagcgccagccacgagcagcaggccaccggggcacccaaaggaaaagcacacaaccaacaaacaaccacgggccaaaccaaacaccccccagaacacagcaaaaaaagacaggaccaaagaccagcaaacaaccagagccgccgaaaaaaacccaaggcaggcacaaaggcaaagaggcgcggcacaacgaacgcagacacagacgggagggccccggaaaccagaaagaaaccccgacaaccgcggccgcccccccccggaaacaccgaagccagcagaaaaccaaggcacacccaagcagccgagccaccccaaacaaaccgcacacgggcaaacccgcaagccaggccccggcgcgaacaaaaaccaaacgggaacaaaaggaaagaagggcaccaccaaagaaccaagggcaacacggcgcggccgggacagccaggagagacaccaggcgagcggccacacagcccagcaccggcaggagccgggaccgaaaaaagcgagccacaaaggaagagaagagacacacacacaaacagaaaggccagggggccgcgcgcacacagcaccccaacccagaggccggacgagcagcggggcaggaacacggggaggaggaagcggggcaggaaggacccaggcaggaccccccaagaccaagccagcacaaagagaagcagcagagaaacagagggcagggaaaagagacaaagacaggagaagaggagaaggagaggaaggcaacaaagggagagagggcagggaagcccgggggggggggagcggggggggggggggggggggacaaaggacgcccggaagagaggagacagaggccaaggcaaagacagaaaaaggggaacgggaaacgaaggaggagaggggcgagggaaaaaaggacagccaaaggggcgacgcgaaccaaacgaagcggaccggaagcccaggaggaggaagggccaaaaaggaaacagaccggggcagcaggaagcaacaagagcaaggcaaagagaaggggagaagggcaaggccgccagagcaggccggcgggcggccagagcccacagccagccacgcacacacggaaccaaaacacagacccggaggaaagcgccaccgcaagccccacccagaagcgccagcacccagcaggacccgggggcagcccagcagcggccacaacgcaaagccccccaaccacagcagcaccaacaacaaagaaagcggcacccccccccccccccccccccggagggggcaggagaaccacagccgccccgcgcaagcccccaccacgcaccgcagcagcccccgcccgggggccccccccgcccccccgcccccccacgcggggggaggaggcagcacgcgacgaccacgcagccgccacccccgccccggagcccgagcccgacgaacccccagccccacaagcacacgaggcagggcgccggggccggagacgcggccccacccgcgccgccccccagcgacggcagacagaggagggcacggcagagagaggaacccgacaaacaggcaagaggcaaggggggaggagccagggcgcggggagcagaacccgagagcgcgccgccccacaagaaagacgacccacgagaacccccccccacgccccagcgccggggggacagaagaaaacaaaaaaccgggggggagcaggggcggggccgggggggggcagagagggagagcccagaagggaggacccggagacagggagcaggcaaggggcggaaaccaaacggcccgaagacagaggccaacccgagccacgccccagacagcaagcagaaggaggagcacacaggaggcacaagggaggacaggggcaggagaggaggacaaccggggaccccaggaaaggccccccccgcccccgcccccgcccccccccccccccgagacaaagcaaaaacgacccaaacaccaaacacccaaaagcccccaaccccccccccacccccaccacccacccacggcccggcgccccgacggggcaaaaaggcggccaagggccccccaggaggccaacaggcacgaacaagcagcagagcaagagcccggggacggagcaaagggcaccacagggggagacaaagcaggcggaaccaccaaggggcagacgacggcagagagccgaggacccgacgccccccaacgcgccaagggcaaggcagcagccgggcaaggcaaacacaacaaggccgcccccagccccccccccccccccccacacacacacacacacacacacacacacacacacacacacacacacacacacgagcagggaggcgaaggacaagggagagccgcaccacacggaccgagcacaacgaagagggggggccaaaggccacccacgagccacacgacccgcgccgacacaggaaaccgcacccaggcgaccgggacacagagccagggccgaaccacagcccagaccgaggcgggaacaggggggacagccccgagggaaggcaacagccagcggagaaaaccagcaggcggaaggccacaccccagggggcccaggcaccaggcccccccaccgcgaaaggggaaccgccaccccccagccccacccccacccccagcccagggccccagcccggggccacacaacgcaccggacacagggcccaccagggcgaccaacacggcggcaccccccccccgccggccacccaggccgccgaccacgagcccagcccagcgagaaggcagcccccaggagaccagaccccagcaaggccagccaggacacacagagaggacaaacagggccgagccacccagggaggacggccccacaggggcacaggaaaggcacaccaacagagccgggaccccagcgggaccaggcagcccggcacagagaaggcgagaggggagagaaaggccagcccgcaggcagccccccccccccccccccccccccccccccccccccccccccccccccccccccccccccccccccccccccccccccccccccccccccccccccccccccccccccccccccccccccccccccccccccccccccggaaagaacaaagagcccacgcggccgaacgccacccagccccagccgggggcgacaccaagaagagggacagaggaagcagagcgcccaaggagcggccgcccggacgcggacaagggggcgggcgaaccgggagaccgagggaccagggccaaacgcagccacagacagagccgaaggcaggcaaacagcacagagagcaaaaggcggcaagaagcaggaaaagccacggcccccacaccccacgaagcgggaaagcaccggaccgcagccagaccaagacgacgcggggcgggccaggccacccggcaggcacgccaccggccgcgccccgccgcccacaagcaggaggcagcggggaagaacggacagagaggcaagccggcggagagccagcacagggcgggaccgacgcacaaagcagcgccacccgacgcaggccacaagccagagaacgcgcacacgaggccagccaagaacgccgaccgccaaccaaggcaaggcgacgcaaaagggcggaacgccgcagggagaccaccaacccagcgccgccgggccccggaaaaagaccgggcgaacgcaccgacggaacaacccagacaggacccggaagccagacgaccgcagacgcgccccggaagcaccaggccgggggaaacacagcaaccagaaggagagaaagaaagcaaaacccaccaggggaaagagaccaccgcaagccggcaacggaacaccaagaccaggcgccagaacagagaccaccccgcccgagcacggaaaaagacagggcacacagccggcagagaagacaaaagaaaaggaaccacgcagaaccgacccccaccaaccccaccccaaagcaccacgagaccaggcgccccacggaagccaccccgcccgaggcgggaaaagcgggccacaggccccccgcgccccccccccccaccaccccgccccccacccgggccagacccaggcaggccaaacgcgagagcggaaagacccaaccgacccacacaccccgaggcccggagagggggacacaccaccgcacagggcggggacgaccccagggccggcggaaacagaacacccaccaacgagcaaccccagaccagacagcagaaacaacagacagagcagaccgccggagccggggcagaagaggcgaggaacagacagggcaggccgggcagaaagggaaacagccacagaaaccagcagggcagccgaaaagaacagaagaacagcagcaggggggggaccgccagcccgaccaagaacccaggcagcccccaaacccacaaaagcccgaggcgaagcagacacccacgaagagaggaggacggaaggcccaagcccaaaagcaagcacagcaagcaaaacagggacagaaaggggaccagagcgcccaccagccaccaccaacaagagagcagagagggggggggggccgcaggccggagcccgagggaacgcccagggagcaggagcaaaacagagcacggaaaacagaagacaaccagacagccagggcacacagaaaaacccgcgaaaaaccaaaaccaaaccaaaccaaaccaaaccaaacaaccaacaacaacaacaacaaaaaaagaagccaggagcagagagggacggaaaggaggaagacacaaagcagggccagcacccaaagggggaagagcccccggggcaggagggcccgaggccaggaccccgggccaacgccacccagaaccgaacacacaggccaggagacaaggacaggagggaggaagacagcaaggaccgcgcaggagacaggggaagagagagcaggaagcggaggagaaagccacacaggcccacagagaagacccggggcggagaggcaaacaccagaggacccgaggaccagcaccaacaggcagccacaagcgaacgcacccggccgacgcaggcacggggcacaaaggaagggacgaccgaaggcagaacaccacacacggaaaaaaaaaaaagaaaagacccgcaggacacccaggacgaagccacaaggcccaaggcaacccccgcagccgcagcccagcccccgcagcccagcccccgcagccacagcccccgcagcgcagcagggggaccagacccccagagagggcagagacagcgg

SEQ ID NO: 516 - RNA, 6992 nt, Mus musculus
gcaaaaggaagaaaagagaccacagacaaagaaccagagaaaagggaggacccgggcagcaacggcaagaaagcgagcgagaaaaaaaaccaaaaaacaagaccggccaagaaacccacagccgacagagcgaaagaagcaacaaagaagcgagccggaagcagaggaggcaaggggggggagagcacagcgaggaggagaccagggccaggaaagaaagaggggagggggacagcgggggggaaccagagccagcaaaccaaaggcaaccagcagcccaaaagaggccccagcggggaccaagagcccagggaccgggcgggcagcgcaccagggacggcgagaccgaagagccggaccagacggggccagcacaggaacaaccaggacccgaacggccacaaaaggcaaaacagaaccaaccagggcagacccggaaacaccagcaaaaaaacaacaacaaaagagggagccaccacccccccacacagcaaccccccgaccagccacaagggaccaccaaagcaaggaggagagccagcacagcgggggagggaggggaagacaacccgcgaaccaggccaggacagcacacagaagaaaaaccccaacccagggggcgaccaagggaagccagcagggccacacgggcagaaggaaaccaaggaaaggagcacaaaacacaccaaacgccacaccaagaccaccaaggagccaagcaaccgaagaccgggggggccaaggaggggcacgccaacaacaaccaggccgcggaggcacacaaaccgccgcccgagggccggccaacaaacagcacaacgacaaccaaaaacaagagagcccagggcgcacagacccaagaggaaccgaggaagacgagaggaacccaaagaaagacagaagacaccagagggggccgaccgaaccagacagacgcagaagacggaggaacaagaggacccgcgggaacggaaccagagacggagccagaacggcccgaccgacagaagaggacaaaccgaggcgcaggaagaagcgcccgaggagcgcagaacagcgccaggcccggcagacaggcccagcacaggaggacggagggcaaggcacggacagaagaacacccccagggggcgccaggacagggacaccacccagggcaaaggccagaacagccccgccagaacaaaccgacccagacccaccacaaaggcccagagagacagagagcgagaacaaggacaaaccccccagagaggacccgacaaggaggcggaaaccaggagagggaacgaaggagggaggcacccgacagccagagggacagggaacgaaggaccaaaaaagggaacggaggagcgcacacaacagggagggaagacccaagcgggggaggccgaaccgcagaaggcaaaaaggcccacagccgaagcgcgcggcagaagggaagagaagaagcgagcccacaaaaggcgacgcagggaaacgcccgggaccaaagccccccaggggccgaggggggagagaggccccgggaggcagagcagaaaccagacaggcagggcagggggaaaaccccaagcagggaagcggccagacacacacagcacacagccccggcccgcaaaaggcaacccaaccagccgggccagagagccacaaaacgcgacaacacgggcagggggcgcccaacccccccccgaccgagcgcacccagcggaagaacaggaggaaagaagaaagaagaggaggaaagacgacaccgccagggcaacagacggagaccaccccaccccagagcgagccacagacaaggagcaggggagacacaggagaaaacaggaagcaggaaaaacaagcagaccccgggggaaaaagccgcaggggcaacgaaaaaagggacaggaaaaaagggcaaaaacgagggagcaccaaaaaaagaggggcagcaccacaacacaaggaacgcacaaagggggagcaaggaaggcgaggaccccggcaaagggccagcgccagcccgccgccaccccagccacaaggggaagccaccccgagccgacggccccgcaccgggagcacagcccagcaagaagacacggagcagggggcaacacaaaaaaaacaaggaaaccacagagcccagaggagcagaaaagagcggccagaggaaaaaaaaagccaaggaacgagagaaggaggaagagaaacccgagagaggccggcagggcccccaggcccagcgagcagaaacagcagcacacgcccgaaggggccgccgaggagacggcgcgagggaccggccaacaagcccacgaccacgaagccaagaggcacccgcaggagacgcacagcacccaccaccccaggagagagccggaggccacacggccccgccacagggagcccagaggccaagacaagaggaccgggaccaaacccgaggaacgggaacagcaagcggagagagaccagcccgagcggccgaacggggcccccccccagcccaaacaagaaggagagaaaaaagaagaggggaaaggggggacaacagggaccgcaaggggcgcaagccggggcaaggaccccaccagccacaaccgccaacccaaccaaaaaacgacagcagcaaccaaccaaccaacaaccaaccaaccaacagcccacccaccccagggccacaaaaacccaaaacgccccagaaccaaagcacacaggcagaaaaaccggggaggcaaaaccagcccgcacaaggcaaccaacagagcggcacaccgaagcagcccgacccacaccgggaaaaaggaaacaacaaaacgggggggcgagacaggaccgaagcccggcgccagaaccaccgagaccaggcggcccgaaccaggaacgccgccgccccgaggcgggaaaaggcggaccaccagccggccacggaaaagagacaaaaccaaaagcacacagcccagaccacaccagaacagaagcaagcaaaagagcacgaaaggggggaaggaaaaacaacgcaaaagacaaccccaggcggggggcgggaaaacagcccccagggcaggcacacaaaacaacagcaaaaagaaagcaaccgggagaaagaaagagagccagggaggagaccggccccagaggaccgggaacagcacccaccaggaccacagacacccgcacccaaccccagccaggggagcaacccccgcaccggacaccagcagcaggaacaaaaaaacacgcaaagacaacacaaaaaaagaaaaagaaagcaacagacagaagaccaccgcaaaccaaaccagccaggcacaacggaaaaaaaaaacaggggaaagacagaaagcaaaaaaaaaaaaaaaaacccaaggaccgaccaaaaaacaaaggaaggcaggggaggaaaaacagggaaggcaagacacgcgaaaggcgggagaaacagcccgcggaacagcaagcacccccacgagccaccccaccccgggaagaagccgagcggaaaccaaccccacggaaaaagggagacgacccaaaaaagccgccgcgaggcaaagacacaaaggaagcggaaaaagaaagcaaaaaagaaaaaacgaaaaaggggggaaaaacaaggagcagaacaaagggacccaagaccggcaacccaaaagagaaggaacaaagaaacgcaacgggacccaacaaccgacgcaaaacagacaaaaaacgcaccgaaaccgaccaggcccgaccggcgaaaagcggacacccggcgcccagggaaacaaaacccacagcaacgccccagcgcggggcgacgcacacgagcacaggacaagagagagaagaaaggcaaaagacacaccacaaaaagcaaggcagaagcccggggcccaggcaaaaagaagcagaaaaagaccccgcagagaacgaagaaagaaccaggaaaaaggaagcagaaagcaagggccaccgacgggcaaaacagcccacgggcaacagaggaaccagcgagcgaagcagacccgcaccaaaggccagcgcaaaaaaaaggaagaagggggagaagggaacaaacggaaaaacagccaaagaaaaaaccggaccaaccaacaaggaacaacaacaggcgccaggacgccaggagaaggggcacgggccacagccagacaaccaagggacagggaagcgggagaagccagcacagaaacaccgccacccaacccaaagcccacaaggcacggcagcgccagacaggcagagacaccccggcaggcgagaggcgcagggcgggggagaaaccaagcaaacaaacagaaaaaaaaaagggaaaacgaaaaaccggagaaaaaggaacgacaagagcaacagccaacaaacaaaacaaaacagccacacgcaccagacagacaggcgaacagaaacaagagcccacaacacaggcaaccaaaaaagaaaagagacccaaagcccgagggagggggagaaggagcaccaaaaaaagcagagcaagaccgacaaagggaaccaagaacaccaaaggcaccagaggcaccggaacagaaaccagcgcaaagggaagcaaagaaaaagaagaaaagcacaacaaagaggacaaggggccgaggcagaaagcaagccaacgaccagcagggggcaggaccaccggacgggacacacagcgaaggcccaaaaggcgggaacgacccacacccaaaaaagccggccaaccacgagcaccccagccagaaaaagacggcacccaaaagaagcaagaggagagaggggcagagagggcggggacccaagcagaccaagacacggaacaaaaggaaaagaaagcagaaaaagagagagagaaagaaaagaggaggacgagacggggccagagagggccagagccgagcacgcagcagccaacacggaccgcaaacaagaaaaacaaaaagaaagaggcgagcaagagaagaagcgcaaaaacagagcaaagagaaaggaggaaaaggaagagcaggcaagggaaagggggagagcggggacagagagccgagcacagcaagcacagccccaccgagaggcaaccaggaacaaacaaaccagaggacaaacaaaaaaaaaaaaaaaccaagccggaaaagaccacagcaggccaccaacacacagaagcaacaaaagaagacacacggaaacagacagcagcagacaaggacccaccaacaaagcaacgggcgacgacaacgcaaaggagcaaccagagggacagagggaaagccacaacgaagaaaagcgccacacggaaggccaccccacccaggggcgacgccaagggagaacaccagccagaggcacccagggggaggagccaaacgggccccggggaaaacaggggaggccggggaagccagggcagacaagagggcaggcacaagaggggaggggcggcaggagagaaacaacaaggcaggaaaccacccaggcccggacccaagagaagaagcacaagcgccccagcccgggaaacacacaacacacgaacaagaagaagaaaagcggaacacgagaacaaggaagaagcagacgaagcaaccaaaacaagaaaaaagacacacacaggggggggggggggggggggggaggaccccccccaggagaccaggcggagccaggccaagcggagaaagcagaccgaagccggcgggggggaggcccacagggaaagcaggccggccggaggcgaccaagcaccaaaacaggagcaccgaaagggccaacaccggcaagagaccagccgcaggaaagagggcaccagccggagcacagagggggaggaaaaacccaacggacagacccccggaaccggccaggagcagcccagagcaagcccgagccacagggccgcccaccgaacacacacccaaagcagcccacgaggggggagggggccccccccagcccccccccaccaggagcgccagcaagcagaccagccagacgagccccccacccaccccaggaagcgcgagacacgacccgcccgggagacaaagcacaaaagcaagccccggccaccccaaacacaaagagacagaaccccaaaggggaccccaaagcccccagacagggaacgggggacccaaaaaaaaacacacaaccgcgagacacaggaagaaaaaaaaaaacgaacaaaaaaccaccagacgcgggaaaaaagaaaagcagacccgaggaggacaagaacaaccaccaacagagacaagagagaagcagagagggaccgaaacagagcaaggcaaagccccaggaaggagcacgaacgcgagagaagacagagaaccaaacacagcgagcccggggaaagagaagggacacagcggaagagcgcggagagaaacacagagggaaagaaggagacaaacgaaagccggacaaggaagaggaacaacagaacgggacaagagagggggcagaaacggaaaccagagcccaaagaccgagagcacgaggaaagaaggggaggagggcggacaggaaacggaaaacaacccagcagcgaaagccaggccccccgccagcacccggcgcagagccagcacaaacagagacggcgccggcagcgcaggacccgaccaggaacaaaagacgcccaaaacaggcgcagccaaccgccaaacccaaaacaaggagcagcacagcgccaagcgcacagacaaagagcggaaggagccagaccaccaggccggaggcgcgggcccgagcacgaagcgggggcccgcaaaccgggcaaccaaaggagagggagaaaaacaaacaagacagagaaggaaagaggacccgagaccaaacgaaaaccaccaaggcaaagaggggggccccggaacgaagagaggggcagagaaaaaagaaccacagaaagcgcaacacacacagaacagggggcgcagaaacacgaccaagccaccaaccagcccagggaaaagcccgggaggacgaaaagacccaggccccccacg

SEQ ID NO: 517 - RNA, 1083 nt, Mus musculus
aagcgaaagcggacgggcgagaagggggggagggagagcacaaccaaacagaaaggcacccaacagcaaaaacagacaaaacaaaaaagggcccagacgaaagaagaggagagggaaaaagggaacacaggaagaacggaaaggaaggaacaagggaaacagaagcaaggacaagacggggaagacaaaaaaaaagaaaaaaagaaaaaaacaacgaaaaggcccaaggaagcgcaggagaaaaaaaaaaacgacaagagcggaaaaggggaaagggaagacaagaagaaggacccacgcgagcagagagaagaaagggagcgacagagaaaaaagcaagaaagcaaaaacacggacggagaaggggaagcaaccacccggccaaccaaagggaaacccccccccccgccagccgccaaagaggaaaacgaacagcccagagacggaagcaccgaagcccgcaaaggcgaaaaagcggaaaaccaaagaaagcgaaacccgcgcaagccccgacaacacagccggcggccgccccacggacagcccaggaacgggggccagccgccaagaggcggaaggggcgaggcacaggaaggaggggagggggaccccagggccccggagccccaccagaggcgaggcgccaagagcacacacagcaacaggccggcggggcgccccgccccccacccgccgaagacccccagaccgggccgccccagcagcccacgccgggagggaggggggggaccaagcagaaaacacggcggggcgcgcgaaggccccggccccaggaggaaagcaagggaccaccagcacaagggccgcgcccgcccccgaccgggacgccaccacgccacggaagaggagaggcaggcgcccgaggcgcaaagcccaacaacagaaaaaaaaaaaaacggaaaaaaaaaaaaaaacaggcggagggaagggaaaagggaaacaccaaaagcgaacagaaacggagaaaaacggggcacccagaccaagacaaagaagcggacccgaaagcagccaaaaagacgcaggacaaaaagcgaagagaggccccaccccccccgccca

SEQ ID NO: 518 - RNA, 17653 nt, Mus musculus
gagacaacaacaggcccaaaggaacacgagaaacaaccaaggaccaagagacagccaaggacacagggcaacgagggaacggggaacgcacccaagaaacggaaccgagaaccgaaacaggaaacgcggcaaagagaaagaggcagcaaggcaccacaacacaaccgaacacaaggccagagaagaaagccggcaggaaggccaccagcacacgaagcaaaacgccgcaggaacacaaaggggcaggacagacacggacaagaaccgcacggacaaaacaggagagggggggggggagcagccacaaacgggcccgccgcagggcaccacaagggcacagcggacacggcccggcccggagccagcacaaaccgcacacgagacagcggcacagaaaggcaccaagccggaagcaaccacaccaagagaagcaaacagacacccacagaagcgacagcaaaccacagacaaagccaaacagggcccgagaaggacaccggacccaaagccggggaccgagggcgggggggaaaggagcaggaaaggaaagagggccacccgaccaggcgcagcgcgagacccagccgacacacagagcgcgggaaggccggagaaagagacgcagacacaagggcccccagaaacccaggaccgaggaggagaccaggaacccccaaaaaagagggagcagacagacaggccccccccccccccccccccccccagcagacgccgccagggagcaaaccacagaaaggccgggacaaccaaaccacagcaccccgccacaaaacaaagcagccaggaagaagaagcacgcgacaagcagcaacggccagaacagggacggcaaagaaaacaaaccaacgggcacacccaacggacccaggcagaaagcacagacccagcccccacgaaaagggagccacaaagaagccgggaaagacggagaacggagacccaagccaagcacacagaaggcgagcaaagagcgggaagggcccagcccccccaagcaggagacccgccggagggcccaggccaacgcagcaaaaaacccagaaccaagcaacacacaggaagcagcaggaggagagaagagggggccagagagcgaagggcagggacagggagaaaaggagcaagggaaaccaagagacaaaagccaaccaaaacaagcgagaacaaagggggacacaggcgccccaaaggaaaaagggggcgcccaggcacagcggaccagaagaaagggaacagggccaaccccgagccgacgccccgggcacgccccccagccgcacgacgcagagggagagcggaggcccccaaaaccccaggcacgccacgaacaacccaaacaaaaggaaggcagcagaaaggccacccagccggagagagggcggcaggaccccagaagggaggaaagagagcagcccccaaagaaagaaaagaacaaaccagacaagaagagcccccagaggcagggaaggagccacgagcaccaaggggcaaccgcacaagcaaaaaccagcaaaaagaaaagagaaaaggcaggccaaaggacacggcccagccgaccgaagccggacaaggcaaaagcacccaaagacgacccccaagagcacccgggacaagccagaacacacaggcgagaggaaaacacccaagccacaacaccaaccccccccacacaaccagcccaagccacgcacggaagagagggccgggaggcggacgcaggacgcagccgggcgcacgcacagagggaagcaaacacgagcagccggcgccaggcgcgagcaaagagccccagcagagaccagcgcgcgccgcccccgcgggcggaggacaaccccagcagccgaggcgccacgggcagaaggagaaggagggaaagcaagggaaacagggccaaagcccccagagggcagaacggcgcaagagcaacccaaagcaggcgccggggaacccagcagaggcccagcagccccgccccacagggaggaagagcccaccagacaaccggcgcccacccccccagcgcgggcccgagccgccgccgggccccggccagcaaaggagcaagacaagcaaaacgggggggggcccccgagcagggaagagaccaaaaaggaccgaagcagcaaggaggcgggaaaagacggcaccccacagccggggcagccccgggaccccgccccgacggacccggcccagggcgagccaacacaccaagcagcgcgcaccccgagcgacaacccccgaccacgacccgaggccgccacaccagcacggaacaaaggcaaaaaccacggggcacaccaagaaccacgaagcacaccagaaggccaagaggagaggaaggagaaggaaaggagacagagacagaaaagagaaggcaaagggaaggagacacaccaaaaaagaacaggagggggcggagagaggccagggaagagcacggagccccacagaccgggcaacccagacccacaagcagcacaacgccgaaacaccagcggagacccaaccccaaacagacacacaaaaggcaaaaaccaagcacaaaaaaaaaaaaagccgagccaaccagagagcacagaagccaaagcaaggcagacagcaagaggggccaacccacaagacgcgcgacaacacgcggaaaaacacaggccaaaggcaacaagaagaaacagccaggggccagcaagagagagccaaaggagaggggaaggcaggcaaggcggagcaggaagcaggagacacagcaacgcagacacaagaagagccagagaaaagaaagcagaaacccaaagcccccccagagacacaccccagcaggacaaccccggagcccagacaccccaaacagcacgccaacgagagcaagcgacagaagggagcagggggcagaccaaacccaaagaacacgcgaaagaaagggagggagagaggaaggagagggagggagggagggagagagggagggagggagggagggagggagggagggagggagggagggagggaggaaaaagggagaggaggggagaaagggaccagagggaagaaggggggggggggaaggaagaagagaagacaagaggaagagagcgcaacagaagaaacaagaggggcaagaccccagccccccccgcccccaggcaccacaggacggccggcaagcgcccccacacaaaaaacaccaggagccgggaagagcggacccgggagggaggaagagaagggaaagagggagcagcgcccccgcaagaccaacaccaacaccgaaaaccaccacaaccagaaagggccaccgggcggaaaagacaaaaaaccagaaggggagcaggacgaagaagcagaaggaggaaggcaggaagaccagcagagaaagaccagcacagagcccggcaacacgcagccacggaaaggaagccagcccacggcaagcagaccagaacacagcagagagcagaaaagagaaaaccacaagcaacaagcaggaagccgccagggacaaagaaaaagaccaaggaacagggcgaccccggcgagagaaacaaaacgaaagccaggaaagagccacccagcacgggacagacccgggaaacccacccaccagcagaaacgaccccccgcagcccccacaaagaccaaccccagaccaaccgagagaacacggaccaaacggcccccaggccaaaggaccagagcaagagggaaaagcaacccggccccgacccagcacaggagggggcagagaccccaacacaagcccaagccccgcaccaagcagcacgagacagccaaaaaggagccaaagcagcgccagcgaaggcgcccaaccccaaccgaaggcaccggcaccaggccagcaggaccaggccccgcaccggaacagagaggagcggccggcggacaccgccccgagagagaaacaccgcccacagcacgacacagaccacccagccaagaagaaacgcgggaccaccgccagacccacaaaggcaagggacaggaaacaacagagcaagagcacgaagagcaggagggcggaccccggcaaacgaggaacccaaagaccacggccgcccagacccaagaaaaaaaaacagacaccgagacaaaaagggggcggagaccccccgaagggaaaaacaaagcaggcccaacacccaaagggaacgaagagcagcgaagaaaaacccacccaagccaggcagaacgagcaagcgcccccaacccaagaaccacccaggaagcaccccgccagcgaaaggaggggaagagagaagaggggcaccaaaagggaggcgaaaaagagaaacccccggaacggacaaccacacacgaccccaaagacaacagcaagcggacagccacccccaaagaaaaaaaacacagagggcgccgacagaggagacaggggacggaccaggacacccaaccaggcaaagggcccagagcagccaacagaagcagcaggcaacgagaaaacaaaaggcccaagccagacaacaagcagaaacaagggagggcaggaacggcaacaagccaccagagaccaacacagcaaggagaacccgccaaacacacagcccaccagcaccaggccagcccacggaaacaaacagaaagcagcaggggccagacgcagaaaagccccccgagagaccaagcgccgagccaagccgccaaaggcggcgagccgaagcacgagccacaccacccgaggaggaaccaagacagacaaaacaaacaggagcagagaaaagaaaagacaagcaaacgccggagccggagacacacggggaagaggcgcaacacagcgcacagaaaccaacacggagacaagggggaaggagaagagcagaaacaagagaacagaaaaacaaagaaacaggcaaaccaggccacaggcccgggccacgcaaaaaaaacaggacgacaaaaaccccaccccacagcagggcccagcgaggagccgaggaacaccgccagcccacgccgagcccgagcgcaagagaaaggagaagggaggacgagcaggaaccaccaggcacccaggcaagaaacagaaagaggccagcagacgaacacagcgccccagggccaccgacgagcgccccagcagagagcaggcaagcgggaagccaccaggccaaccccaagccgagccaaacagccagcagaccccaaccaaaaaaagcaggaagcacgcagaacaaagaaaacgaagcaggaacgaaggaacccccacaagggggacacgcagggagaaccacgccgaccagaaacccgaccaggaaggagaacaccaccagaacaccgcacacagaaggaagcacagccaaagggaagcccaccccacaggaagccccagacacacaaagggaacaagacaagcagccaacgcacacaacacaacccccccaccccccgacccccaccaccacaacccaaggccacggaaggggagaccagccacagccacagccacagccacagccacagccacagccacagccacagccacagccacagccaacccagaggaaaaggcgcccagagccgcaagacagaacaaaagaagggggcagagcggaggggagcaaacccagccacagaccccagaaagaaaaaaaaaaagcacaagaacggaaagagaccgagcagaaagacagcgcaaagagaggccggaagccggaaccaaaccaaagagccaggcacagcacaagccagcacgagaggaggagacaagcacaaccggggcgaagcagccagccagcagccagcagccagcagccagcagccagcagccagcagccagcagccagggccccacccaaaagaacaagacaaggcacagaaaagaacccaaggcgcccaaccccacaagaacaacaacagaaagaccccccccaacacacacacagagagagagagcgagagagagagagagagagagagagagagagagagagagcgagagagagagagagagagagagagagagagagagagagagagagagaggcaaaaaaggccgcgacccacgcccccccaggagccacagaaagcagaaagacgggccagaggaggagccccccaaagacaaaccgacccccgcccgggaaagacaaaggagcccggaaacccgggccagcacgcaacaggaaaagggcccggccgcggcaagagcaccgggaacaaaggacacagggagaacagcaaacaacaggccaaagccgaagcacaaagaaagaaacaggcaaccagccagaacacagaaccacaaaaggagaaaagaaacaagaaagccacaaggcaagaaaacaacaacaccaaaaaggagagagagagaaggccaccaaaagaaggagaggacggagaagaccaaacccacccaggacacaagcaccaaaagcagggggcagcgcacggggcacacaccaacccaggcgggaggcagaggcaggaggccggaaccgaggccagccggcaacaagcaagccaggaaccagggcacaagaaaaacccgccgaaaacaaaaacaaaaacaaaaacaacagggacaaaaaagaaggggggaacaaagcaaagaaggaaaaaaagaaacaagagcaaagaagccccaaaaaaagaagaggaccaagagaaaaaaaaaggccaaaagccggcacgggggggggggggggcgggggggggggagggagggacgaccaacaaagacaaaacagcagcagacaccaagggacagacgcagacaggcggacccaaccggggagacaaggaggcaaagcagcaccagcacacaggacacaagagcacacagcacacaaacacagacacagacacagacaccaacagagcaacacagacgaggcgggcgaaagcccgcggcacaaggccccgagacgaggcagccccaggccagagcccgccccccaggcccaacccccacccggacagcgaggaaggcagaaacagacgcagccccagcaggccgcaggcacccaagagggagacagaggagaagagagaccagcgggaccacaccgcaggccaccaggcccagccgcacccaggcccagccccccccaacgcgggcaggccgaacaggaagcaacagccccaaggcgagacggcccccacagcgagaacaagagcccaaaaaaccagaccaagaggcgcacgccgggcgcccaagcacaaggagaccaaaaggccaaacacccagccaccccacaggaaggcccgaaggacagggaggagggcggggcggaggacgggccccaaacccaaagcaccgacaggggcaaaaagaaaacgggcggagacagccccaaaaccaggaacaacggcggacagaaccgccccagaccccccagccccaacgccaggaaaaggccccccccaccagcaccaccacacagagaggaaggcccaagccccccagacaacaggcagggccaaccggggggacccccaaggggggcagacaaacacaacagagacaacaaagaccaaacaaaacaaaacaagagaagaacaacgaaaaacagggggggcaccacagcagaggaacgggaaaggcagcagaaagacaaggagaaccacgggcaaagggcaagaccagaacaaaaggaagggcaagccggaacagggccaacaaagcccaagagaaaaccccacaaacgacacaggaagggaggagccggcaggacaggcccgcgcaaggggggcagagagaggcaaagagcagaggcaacgaccagaaaagaaaacggcagacgaaggaagcagcagagaggaggaagaaagaaaacggagaagccaaggaaaagcaccagagagacaagacagagagaaaagagcaaaacacaaaagggggaaaaaaacaaaaaagcaagaagaacagaaacaaacaaacaaacaaacaaaaaacagaagagaaggaagagccccacacaggaggcaccaaagggagacaagacagccaggggaaaggaggagccggggcggccggcgcggcggagccacagacacacacaaagacggacggacgcgcccgagcagcccccaggcccgccgccccaccccgagcacgcgggaaaaagaaagccgcggacggggaagagccggggaaagccgaccgggggggaggagaggagaagaggagaagaggcggcacagcaacccagggcagcaaccgccaagcgaggccaggccacaggccaacccgcacagcaagccaccccccccaccgcccacccgcaccgcaccccaaccgccaacgcccacaccgccaaaccaccgcgcgcccccagaccgccgccacggccacaccccacaaaggcgacgaagccagacacccagccgcgcaccagcccccccccggcgccaacccaccccacccagcccccaagggcagaccccaccccaaaccaagcccaacacccagaaccacagcaaccccgccccgaggggccgacacaagcccccacgacaccccacccgggacggcagacccagggacccacaccaccaaccccagacacaaccccccccaaccccaccgccagcccccacccccaaagccacccaccaccaaaaccaacccggaccaccaccccacaacaggaaaacccacaagcaaccacaccagagccaccccacaacgacagcaacaacggcaccaacaacggaacaccacacccacaccaccaaaagaccccccaacgaaaaccaacccacccacaagcacaccccagcacccaaagcacccagaccaacacgcccaaccagcccccaagggaggccaacacagaaaaaggggggagaggagaaaagccaacagaacacacaaaaggaaacaaccaggcccggccggcacagcgggagggccagagcacaaaggaagcggacggagaaaaagggaaggggggaaaggccccacccgcaaggacgcggaaagaaacagccagccgacccacccagcaacggacagcacaggggaagcccaccccgcgacgcccggccgccaccgccaaaggacaccaggacacagcccccacgacccaagcaagccaaccaaagacccccagaggcaaagcaccaggggcaaagacgagcggaccagacccaagcacgcacgagacgcaacccgagcaccacagccgaaagcacaacaaacgggcaccgagggcaggaaaagcaaagagggcacaaacgcagcgagaccacaaaggccccgcccgcccaccccgggccacagcacccaaaaaaaagagccaagaagcccgccacgcaggaagagaaacaaagaacccaagagaagggccagcacaggagaccccaccaggggcagaaggcaaagccaccccgaaaaaggaacgcaaggcaacaccagccaagcaccagaaagcacccccacaacccaacacacacacacacacacacacacaccacaacgcaaaagaacaccacaaaacgcacaaggaacgaaaaccgaacaacagaggaacggcagaaccaaaacaaacccacaaaccaacccccagaccaaccagcacccagccagaaaagagcgacaaacaagaccagcagacaggagagggacagcaaggaccgcaagcccgaacagaaaagcaaaaggaaaaacggcacgaaaaaaaaaaaaaagaccccagaaggaacgcccaccgaggacacaaagccacaaacgaaaaccccgcaaccagcgggaggggggaaagcccacaggcggacgaacgaggcacagaaggaaggagcaagggagcggggaacacacacgcaccccgcgggaccggcggcggaagccagaagcgcacaagccggaggcccccgggccgcccagcgcccaggcccacccacccccaagagcagaacccgcaaggagcacagcagagcagaaccaggaccgagccggcggcgccggagcaaacccgcaaacccacccaaaaccaaaagagggccccggccccaccgcggaccagcggaaccgcacgccacaggcacacaggggcgaagcaccaaccaagaaccaggcagccaaaccacacaaaggggcagaaccaagaaagcacaggcaggaagaagacgaaacagaaaaagagcagacacgacgccagccaaggaaaaacaaacagcggggggggggggggggcgagacagggccgaagcccggcgccggaacacgagaccaggcggccgaaccagaaacgccgcccgcccccaaggcgggaaaaggcggcaccaccacgcccggccggaccgaagcaacaacgccgccaacccagggccagccacggacagaagaggccacaccaaaccaggcaccgcagcccgaagggggaccacagcagagcccccaggacgcaccccagcccaggcccggaccccacgacagccccgccccagcaccccgggacaaagcccaacccgaaacacccccaggcccacaaaaagcgaccaaacaccaccccgggcccacacgcaaggcacacaaggccagaggaggcggccagacccagcccaccccccgggccccaaccacccagcaggcccccaccggagacagccgacaaagagccaagagcgaaggcaacacccagagagaagcgccaaaacacgacaagcggacgccaaccggggggggggggggggggggggggcaacgcgccaaccagagcaccggacgacggccccaggagcaacacagcacccgccgaagcaaacccccaaaaacaagccccaccaccacaagcagcaacaggcaccccaccgggaaacaccaagccaggcaacaaaggcacaaagcaaggagggaaaaggggccaagagccaagagcggcacaacaccagccaccccgagcagaaagaagccacagaaaagcaaaacacagggggaagacggaccaaaaaacaacaagcacgcagaggccacacccagcaaagaaacaagaacaaaaacacagaagccaaaacaaaagagaaaacccaacacgaggagcacagagccacgggcaacgcgaaccgcgagcacaccagccagacccaaacaagaaggagagagcgcccaagccccgcgagaggcgggcgggccagccgccgaaagccccggaccaaccacacaaggcagagccagcccccaccagaggcccgcacggaccggaagcggccacccccccgcagccagggcgacacaagcacgggcgcagagggccagcgccaccaggccgggacccccaagcacaggggaaaccaaacgccaccggaggcagcacggcccccgagggcccacgaaaagagcgacgaacgggaacacagcaacagaaggggcgaggaacgaggggggggcacagaagcaaggaagaaaccaagaccccaaggcgagaagggccagggccaggcgagcacccccagggccaccgcggacaagacagacagacaacaacaacacacacacacacagagcaccccagaaccaacacaggcaacccccacacaaacgagacaacacacaggccacaaaaccccacccaaggcagaaaacacaagcaaaggcgacacacgacaccagccaaagaccaagagcacccaaggcagaagacaagcaacacacgccacggcaacacaaacacgaacgcccacacgaacaagcacacaaacagcgacaacaaacacagagaggcagcgaagcacaaaccacaaaaaccagcccccccacagccacaaggaagggccagcaaacccgcgcgaccaccacgagccccgcggccgcgccagccagccgggagggcacaggaagcccagccccgacgccaaaccagccacccgaccccagagggacagaagccccagcccgcaggccagccaagccggcccagcagagccccagggcaaagcagaaacgagaggcccaacaccagcccggcgagcggggcgcgaaggcaaagagacccaagccccccggggcggcggcagcgggggggccccagagaggaccggccagccaaggcgaagcccacgaaggccacgacaacccccccgcccccgcccaacacccaggaggcgaccgcccacgcgcagcagccaccacccaccgcggccacaaaccgcaagccacgccccggagagacaagaacagacaagacagaaaaagacaccacagccgcaaaaaggacaccgaggaacaagggagagaaggagaggggcccacaggagaaaaacagcccccacgcggacggggaccgcccagaagggccggaacagacgacccccccaaaggccagagacccggaccggcccaccacacacgacaaaaacacacaaacgcaccaggaacaacgcggcgcagggggcccggagccacccacacagacaaccacagcagaaggaccacacagacaagagcaggagcaaggacccccaccacagagcagccaccaaccaggaccaccccaaagcagagacacaagcaccgaccggagaagacaaagggaacacaggggaaagggcggagggaccggacaacagaccagggacgagccaacacagagggcccagcccagcccacgccaacccccagcgccacgaagaccagccaacgggccccagaaaccccaaacacacaacgccggcaacaggcccccccccgcagaccacccacgaggccgcaccgcccaaaccggcagcacagacagagagcgagccggcaagcccaggaacccacccacccaagagacgaagccacgaagaggaggaacgaagcacacagcgaaagacacaccgggccaagcacaaaaccaaccggaacccagccccccacagacgcccgccaggcggcccggacaggaggagcaggggagggagaaggaagaagaggagaggaggaaagacgagcagaggaggcagaggaagaggaaaggggagggcaacaaacaaaaccacaaggcacggaggggggcaccgagcaggggggggggggaaagaggacccgccaaggaacccagaaaagaaaggaaacagcaaaggaaaagcccggcggaacacacacaggccgcaacagcacggaccgccgccccagcgcaggcaacagaagagcccgcgcaggccaccaccgaggacaggccaagcgcacggaagcaaaaggggcggagacagagcagcgaggcccaggacggaagagagccaaaggacaaggcagccagccagcccgcacccagcaccccacggagaagagaggcccccggccccaaccccaggagggcaccaggagcccgggaccagggccaagcgggggcgggggccccaaggccgcggcacccagcagaggaaacagccagccgcggccagccccaaacgacaggaaacgccaggagggcacgggcagaaacacgagaaaggggggaaaaaagcgaggaagaaacaccacccagaaacgccacggggggagggaggggccaggaagacagaaaagcccaacaaccgacaagcaagcgagcgcggacaaacccccagaaggagaggccccccccagggaaacagaaacccaggccaacaccagcacgagccaccccaacagcccagaagagaaaccagacagagaccagccgggaaccagcccaggggagccaagcagaggggaggggcacgccgcccgacacacaccacggggacacacacaagcacacccccaggggccacacacggcggggagaaaagaacacaaaagccccccaagcaaccaaaacacagcaaacgcaacaaaaccgagaaagaaaaaaggacacgggacaaagacaccacagacagaaagacgagaagaaaggccagcagacacgcccaaacccagggaagaagcagagagaacggagagagccggccagaacagagagagcccagcaaccggagcaagcaagcagccggagcagagcacccccgccgccagcccagggccgccccgacacccccaggccgaggaaccgccaggaggcgagggaaccacaccaccgggggacagagaagggcagggacgacagggccgacaaaaggagaccaccccgcccgacaagcgcacagagcaaggaggccccagagcacaaacaaagacgacagcggcccggcccagcccaagcaccggcgacacacagacccacaacgcacccacagaccacagggcgaaccaccaacgaggcccgcacccggaacaccaggaagagggagaccgcaacacacaccacaagacaccacacagacgacaccacaacaccaccacaccagacaccaccacaccacaagccccgcacacaaggcagcacacacgacaagcaccggacgcggccccacacaggccacggaccagcgaccacacagccacaccagagacaacacacacacccccgccgcccccggggccccgcccgcccccgccgcccccccccccacacacacacacacacacacacacaagacagcaaggcaaccagagcaccagcccccacccacaccacccacacacagccagagagcccgcacacacacagcagagcagcccagaaccggcacccccacgcaggaggcaaagcagagcagcccacaccacaaccgagaacagcacacaacaccacaaaacagcaacagaaacaaaacacagaacgcacaaccagacacaaacaacaaaccaacaacgcaacaacacacagccaaaaacacaaccaaacacacaaccaacaccagagaacaacacacaacagaaccaaaacaaacaacaacagcacacagccaaaagccacagccccaacagccaaacaccagcaaacacacaaaccaacaacagagcaaccaaacaccacaacaaaacaccaccacacaagcacaaccacaacacacaacaacacaaaaccacacaggaacaaaacaaaacaacaaccaaacaaccacagagacaacacacacaaacaagacacagcaaacaccaaaaccacacaccaccagaagagcacaccaaaacacaacaacaacaaccacaacacaaaccagacaaccagacggaaacagaacaaccaccaaagacaaaaacacaaaaaaaaaaaacaaacaacagccaacaaaacaacacaccaaacagacagacaaacaccaccacaacccacaaccacacaaccccaaacaaccacacaaaaccacaacacaacacaaacacacaccacacagggaacagcaacacacaccgcagggaaggaaagaacaggaagaaagaaaccaaggcccaggaaggcccagaaagggaggaaacgccacagggggcggccccagacgggcagaggagcaagggcacagaaagcgcaccaaacaagccgagcacaacagggaggaccaaggaaaaaggagcgaacaggaaagggcccggccgaggaggccaaagaagggagacaaagggagcagggacagcaggaacaaagacaggggacagaacagaggcgacagggcaccgccccccgagggaaccaaggggcggccgagcaacaccacagcagcccccccacgaccgggccaccagaacaccgagggaagaagcagaagcagccagggaaggaccgcccgggcacgggaagcagaagcggacaagccaaagcaacacaacccagccacaaccaggcaggggaacaaagccgaagaacgccccgaaaagggaaagacagagcaaaggccaacaaggaacacgcccgcgcaagaaccgaacccaggaggggcgcgaagcaaaaccaaaggcagcgggaaaccggaggagagggaaaaaaggcccccaccagcggggccggaacacaaaacacaccccagacagcaggggcacacacacaggagcggagcagaaggaccaacccagacacagccgagaggggcacaagcacgcagcccgagcgggagaccaccccccaagagccgcccggaagaaaaccgacccagcacacgagggacccacagcaccacaaccaggacagcgccgcaccagagagacacacacggcccggacccaggccacagcggggacacggaggaacgcggaggacaacacaagaccgcccggcacaggagggaggaggcggcccccaggacacagccggggcaagacaacgaacacggcaggcaggcacagccacggccccacgggacacaccgcgagaccagaacaacccgggacaagacagccccaagaaaccccacccccccccacccccaccccagggcgagaacgcaggaacccccacgcaacagagcggggcagacaccagcagcgccaccagccacccacaacaaagccgccaccgcacccagcccggcgggcccggagagccaggacacaaagacacgcccccagaaccaaggccaaagggcaaaacaggagaggaacccgaggaggggcaggggccaggcaggaacaggcagacacagaacggggcagaccagccgcccccacgaaaccggcaagcgcgcccagcaaacccaaacgccggggagaggggaggggaaccaaccgggcggaaagaagcaccagcacgcgaaagcacgccaccagggcggaccccaaggcaccagagcaccagccaggcaacaaaggagagccacaggccgacgggaaaggggccaagcaagagaacccgacgggagccccgggagcagaggcaagacacaccaccgccagcaaagccgagagcccaaaggccgaggccagcacgaggggaaggacccacaagaggggcggaaaaaagacgcggacgggccaagaggggagcgggaagggagacccgagaacagaccaagcaccaaccaagcgagggcgaagacgaagaaaggggcacggaggaaggcaaaggaagcaaccgccagcggagaggcaagaaaggcccaggaggaggaggagaggagcaagaccaagcagagaaagacgggcgcccccaagccaagcaagggggaccaaaacagaaccgaacccaagcacaagaagagaggccaccagcagaccggcaccagaaacagaacacgcggccaggagcggaccaggaacagagcagcccaagaagccacccaaggcagccgagaggaaagaggcagaaaggcccgaaggggcccgagcacaagcagggagcgcacagggcagacaaaggcacaaggaccggccggagaggccaggaggcaaagcaaaagagaacagaacagcccaggccccagcaaccagcccacaaggacagcccacaaccagcagccaaagccaaggggaaccgggcgccgcccaacacggacacggcagaccaccagagggcgggccgcgggggaaaaaccaacacacaccccacccagagccccaggcgccgagccagccaagccccccccgaggggggcgccaggccacccacacccacacccaagcagacacccacacaccaggcccagccccgcccaccggcacgcccaaacagcgcaccaggaccacgaaggccgcccgcccggggaagcccggcgacaccacccaggaagccgaagcaaccacaccagggcagcggaccccagggcgaaaacagaccagcggaggcagcccgcaggacgacaaaacgcggcagggcag

SEQ ID NO: 519 - RNA, 1762 nt, Mus musculus
ccaagaacaagaacaggcccaaaaaaaaagcacagaagagccgaaagccaggcacaggcaagcccagaaaaagaaagcaggcggaacaaaccgacaagaaaaacacccggagaggagaccaacggaacaaaggcaaaaccgggaaggacaaaggacaaagagggcacggacaaaagaaaaagaagaacaaaaccaaaaaagacacaaggcagagagccaacaaaacggcaacggacaaaaaaacacaaacacggaaccaggagcagaacagaaaaaaagagcagaacagcaaggaaaggcagaaacaacgccaccaagcaccacagaagaacacgccaaacacagaaccaggaagaaaagaaaagaaaaagaaaagaaagaaaagaaaagagcagaacaaaccggaaagccaccgaaggagagggaaagaacaaacgagaacacaaaacgaaggggagccccccaccaaaggaggaggcgcaccccccacccccccggacaaagagaagagcccaaaccccaccggccggccaggggccgagccagagagcaaagagcccagcaaccgaaaccaccaacccccgcgcgaacagcagaagaagccagaaagcaacagcagaagaaaccagaaaccagcagagccacgaaagcaagagagaagccagaagcccagccggcccccagaacagaagagagaaaaagaccagaaagaagagagaaagagagaccagagaacagcggccgccaagcggcccggcccaacagcaccggaacgcggggcggcccagcgcggcgccccgaaagagggaaacgagaggcagaagagagggagaccaggggaggaggggaagccgggaaaacggaagcaaaaaagccggacaaagcaagagagaacggggggggggggggggggggcggagacgggcccgcccaaacaggaacacgcaaagacaccaaccaagaagaagacccccagaagggcaaaaaacaaagggaaaacgaaaaccaaacccaaagccagccaaacaaaccgagaaaacaggacccagaaggaaacgacaagcgaaaccagcgaaaccaaaaccacaaccagcaaagaagcaggcaggagaggaccagcgggcacggacacccgaccgcccagagaccaaaagacacgaaaaggaaggccccggcgcccggcgaacacagccacagagggggccgggggagaggggaacaacgaggagagccagcggcggcccgcccgggcagaccaaagagagaccggacacagcccggccccgcgaagagccaaagacaaacgaaacaacccaccggagaccccgaacggcggagagaagaaaagaacaaggcaggcgcacagagacccccacccaggagacaaaaggccaggcccagagcaaggccccgaagggagccaagagcaccccagcgcgacgccaccggagccggagcggagcggagcgagagacgggccgccagaaaccggcgcacgcgcagcacagcccgcaggaagcaggcacccacgccccagccagcccagagcggggcacgccagcgagccacgaccaaaaacccggggcaggacagacgaacagaggaggggggccccagcagcagagcagaaacccacaacacaggaccaaaacaagaaccacaacagcgaagcaagcgggacaccggccaccacagcgagaggccgcacgggaggaacagacccggggaaaacagcaacagcaccaaacacagcgcagaggaa

SEQ ID NO: 520 - RNA, 14171 nt, Mus musculus
aaaacagagcgcagacaagacccgacacacgacaggcaggcacaagcaggcccaagccgacccgagaacgggggggcagccaaggaggcggggagggagcaaagcaccccaccccaccgccaggccaagccagcaggggaggggcgcccaacgaggaaaaccaagagggccaagcacggaacgaacccaggaagaccccaggcccccacacagggacagaagcacacagaacgcaagaaaaaaaaaagaaagaagaaaacacgagaagaacaacaaaacgcacgcacaaacgagaggggagaagacacaaggacaggaaagaacgaacaaagacgaaccaaggagaccaaaggggcaacaccaagggaaaaaagaaaaaagaggggagggaggaacccggcaaggacgggaaaagggcaagaaggacccaagggaagagcgagcaaaaacagaacaaagggaagacgaagagagaggaacaccaccagcaagcccaccgcaggaggcaggggccacgacagccaagggaagcggagacagagggaaccaagaacgggacaaaccaaaacccaaagcccgggcacggacagccgcacgaccacagcacccaacggggccccacgcgagccgcgggagcaaacaccagccccgcaacccgggcacgcaaacgcagcggcgcggaaaaacgccggggccaagccagggaaaacccaacacccgcacaacagggcagaaggcacagggaagcgggcgcaggaaaacggggcgccaaaagcaccagccggcagcacggcccaaaccaggcgggggcaagccggggcaagaagggaccacaaacaggccaggaaaaaacacacggagagaaagcccgaggccgagcaaaaccaccaaaggaagcaccagggccagggagagccaggaaagagccgacaaaaaaaagcacaaacacccccccaggacgcaagaacgcgaaaagacagaaaacagcagcagcaccaaacccccaaaaaccacggaaaacaaaaaaagaggaaccgcaacaaaacagaaaacaaacaaacaagcaaacaaacccaaaacggaggaggaggaagaaaagaggaaggccaggagccaaccaggagggggaccagggcacggaacagacccagggacccaaaagccaacgcaacacacaacgagggcacagcagaacacgaggcacacagcaggaccaacacaggagcccaaagaacgcaaagaccgccggagcgcgcagaagggagccccaaaagaaccacagcgaaaacaaccagcaaagggcgggacaaaaaaccaaacagcaaccccaaacaaagacaaacgggcagggaaagaaaaggcaaacaaccaccacaaagccacaaaaaggaaaaggccgaagaaaggcacggcaggaccagaggcaagcccaagggacaaaagagccaaccacacacagaccggccccaggcccccagcacccagcccaccgacaggcgaggcggcaacccgcccacccgaacccagcccaggggcgggcgcacaccccccaaccccgcccccacacagccaggaccagcccccaacggcccggcgcaagggcccccccccccccccccccccacccccacaagcccagccagcggggcagcgaccccacaaccacaaaaccccccgccgaccaggagcagccgcaccccgcacccaccaaagagaccgaggggaaagaaagcacccaaagggaaacagcgggacgaaaaagcacaccccccaaagggcggggcagaagggcaaccaaaaggaggaagaagacgagaaaggacacaagaaaaaacagaaccgccaggaaccgacccaaaacgaaggaggaacagagccggcgggacacgaccagcagcaaaaggcaggaagaaccacaaggcaggcacccaccccaaaaccagaggacaaagggacgagccaaggaaccacgaaaacaaccacaaaacacagaaaaaaaagaaagcggacacaagaacaagccaaggggggggcgcacgccaaccaacaccaggaggcagaggcgggcagccggagcaaggccagccggcacagacgagcaagaacagccaggaccacacagagaaaacgccaaaaaacaaaaggaaaaaaaaaaacagaacaaaaaaagaaagaacaggcaaaagccccagaaaaaccccagcccacacaagaccccaggcccgccggacaagggcgggaacgagacccacgagcgcgggcgcgaagccacgagggcaagcacgaagaaagagcgaaggcacgccagaaagccggcaccggaggacccccccgaagagacccaacaaagcacacacaaaccagcacaggacgccaaccaccagggaaagaaagggccaaagccaaacaagacccaaaggggaaacgaggcccacaaacgaccacgagaagacgaaaacacagggggggccggaggcgcccgagagggcagaagagggcggaccccaggaacggagaacagggacagagcgccccacggggcgaaaaaaaccagacggaaaagcagcaagaaccaccgccaacccccaaagccaaaaagaccaaaagacaggagagaaacacaaaaaacaccaaacgacaagagcaaaagacaaaaaaaaaaaaaaaccacaaaacaggagaggaaaaaaaacagaggacccaaacagaacagacaccaggaaaaaacaagaaaaaaaaaaccgaacagggacaaaaaccaggaaaaaagacaacagcagcaaagaaaagagagcaacaaaggcaaccgaagaaaaaccaacaacccaacaggaggaaaaacaggcaaaaacaggcaaacagaaggaggggacaaaagaacaacaacagacggcacaaaacgggaaaacgcccagcaaacgccgacaccccacaaaaacaacaacaaaagaggagaggaaaaacacagaaaagacacggaaaaaaccgcacaagaacaagcggggggaaggcacaccaaccagcaccagaagcagaggcaggagaccgagccgaggccagccccccccccccccccccccccccccccccccccccccggggggggaaaccaccaggcaagaccaaccgacaaaccacgacagcacccacggaaccacaccccagaacccagccaaggacagcccaaccaaaagcaagaagccaggaccacaaaagcaaggaaaaaaaaaagacggcagaaggacaagaaacaaagggggccccacaacaaaccgacaaaaacgacccccccgggggaggcccagagggggggggggaccgggagaacgggaaggagggacgaggagcagagggaaaccaaaaacaccgaaaaaggaggcagaaaaaaaaagaagaaaaccaccacaccacacccaggaagcacaacccagaaagcccgggagggccgcggaggcaggggaggagcccagggggcaaccccggcccgccagaccccacccagagcgcagggccaccggccgcccggcccgggacgcaaaccgaccaggacaccggccacaggcacgagacgaaccggccgaagggggggaaacaaagcacgacagccgaacacggacacagaagccaaccaccccgaagaccgagcgaacgaagccccacagcgcaaggaacaccacagggaccgaacacgcacccgggccaggggaagcgaaagagaacgcgcagacccagggccgccaaacccgcaggccggcgacgacccgccgagagagagcaggcgcgggccgaaaaagcacacggggaacgaagaaagagacaggaagcaaaaacgcaacagcaagaaaagccggaccaaaacaaaaacgccaaaggaaaacagacaagacagacagcaacacaccaagcaaacgaaggagaagaagagccagaacagggcggaccgagccaggccccacgcacaccgccgagcgccaaccgacacaggagcgggaagcggcacagagcgcgacggggacggagggcacgccaacacgccaaaagcgagcaggaaggcccacaaggcaaccaggcgccggcccacaaggcacgcgcacacagcaaggggcccagcgcccgggaggcagggaccaccaggagggagccccgcacaagccagcccgccgcgaaccccagaaggccccacacagacagcagcccgccagcgggcacagacgcacacgccacccaccgccagcacggaaggaaacggccccccggcccgcaacacgggcccagcgcgacacggggggagcggggaaagcacacacggggccagaggggaacgcgaaaccccagggcgggcagagacagaacccaaccgccccaacagaggcccggcaggcgggaagagcaggagcccggcggccaccaccacaaagccccaagccagacccggcaccagcaaaaaacacaaaagcaagaagaaaccccaccgacaaaggcggaaaggggccaaccccacaaacaccagcgccaccccaaagcaagcccaaaacgaggacacgggcaagagaccagggcccgagaagacaggaagacagcggaaaacccgccagcccgagggcaaagaaggagaaacgggcgagccacggaaaccaggacgcgcaccaggaggccgcaccgaagagagaggccaccccaccaccaccacccacccccccccaacaacaaaggagcaagcgcaccacccaggcccgaaaaccagacaacagaacgcccccacaaaaccaagaaagagacgaaaacagccaccgccggcggcgccaccccaaagcaacagcgaggaccaccgacagcaccgacagggacccggagaagcaaagggcaccaccggcagaggaggcgcccggccacaacgcagggccacggcacccagcaagccggcacaccagacgggaaaaggagagcgagagccagcgggcaaccaacggagggaggcgcagcaagccggcaggggacacacccgcacccaacacaggagcggaagaccgaaagaggccagccaggcgccgggagacaggacacagggagacgacccacccacccacccccaaaaaaagacagaggaccgaggaacgaagcgccgccccgccccgccccggaccaggcacagacaaccgccaacacccagggcgcaccccaagaacacccaacacacaacaaccacagccgcgggcaccccagcagcgcccccggaagcccacaacaccgcgagcccaaacacagcacccgagcgggccaaccgccccaacccccgccagggcccaaagcaggcccagaccccagccaacagaggcggccccccgccacagccgccaccacacaagacagagagacacgacggcccgcccggcagccacccccaagccgccgagagccacgcgcagaccccccccgccccacccccccgccagcccacaagcccccaccgggacccccacccacggaccaccgccacacccacaggagccccacggagccgcgaccaggggccacgcacaacaggggggaagcggaccacgcaccgaggcagggacaaaacccaccccaccagaacacagaaaaacgaaaaaagaacccggcagagagagggggcagccacagcgcccaagggaggcagaggcaaccgaccacaagcccagcccaccaaggacagggcccccaggggcgcaagccacgcggcggccaccagccaaggcacccccaccacaagagagcagaacacagacacagcaccacaccagcgcgaggccacagagaccaaccaggccgcaacaccggaaggcaccgccccagccaaagcgggaggggccaggcgaacccagcacgagggggagaagcaggaagacccaagcaaggcgccaggcaacaggagacccgccaaaaaaaaaaggaaaaagagccaggcagggggcgcacgccaacccagcaccgggaggcagaggcaggcggacgagcgaggccagccggcacagaggagccagggcacacagagaaacacgccaaaagaaaaaaaaaaggcagaaaaggccgggaaaaggggagaccgcgcgagccagacccacacagcagccaagcaggggcggcacaacagaaagacaagacaaacggagcaaaggcgggaacaccacaaggaaaaacgaaaagggccaagcaaggcagggagaaccgccagggcaaacagcagcgcacaggcggaaaaacagaacaagaccgaacccagaacccgcccaccgacacgcgacgagagcgcgaaccaaggcacgccgaagcagaaggggcgcgcagcggccggcccacacaggcacagcacgaagcagcacagggagaggcccacaccccggacccaaccgacaggggacagagaaacacaaaacgacccacgaacccccggcaagccacccgccgggacgcgcacaaggcgagcgccggcacgcggggcgaaggcccccagccacggcccccacagggccaaccgcagagaccacagcaggcggcaacaaagcaccaacccacaaagaggccgccgacgcaaaggcaaaagcaacgagaaagaaaaagaagaaaagggaaaagcggaaaaagggcgcggacagcaggggggggagggaagaggagaacgaggccagcgcacaaaagaacaaggagccgcagaacagaagaacccccccaacacaaggagcacaaccacaaaaagcaaaacgacaacgcgcaagcccaccgggggggggggaggggcaggggggagaggggccggaggcaagggacaccgggcaccaaggagcaggacagaagcccccagcgcccagcaggagaacaagggcacagccacgcaccaaaaccagaccaccccccagaaaaccacagagacggagggagagggagacggccccacgcacaggagagaagggaccacaggcacagcagggcacacagaccaggacgggccaaaaccccagagccaaaaaccaaaacagacgccaggagaaccaccacccaggagacggcaaaccagcgcacaggacccaggagaagagcaaggaggcaaagacggccaaaaagagggagcagacagggcagacaggaaagaaaaaaaagagaaagagaaaaggcaccaagaacagccacaaaaccaaaaaggcaacaagcgaagggcccaaggaggacacccagccacggggaaagagaagaaagcaacacaagggggagggaaggagagaggggccgggagggaaagagaaaggggggggaaggggggggagaggggaaccgacggagaggagggaaaaggacaagacgaagcccgagggccagcaggaaaaaaaaaaacaggcaaccgggaggaggagggggggaacacccacccccccaagacccaccagagaccgggagggaaagacgcaggaccaaagggaggaccagagaaagccagagggagagggaacaagagcccacccacaggaagacagggcacaaagagggaggggggccaccaagcaaaaccgacccgaagccgcgaaagaacgcagggaggaaaggagaggagccgaggaaaagaaggccagcgacaggcccaaggggccagccaaggggaggcccaaggccgacaaacgaggcaggagcgccacaaaaagggaccagcagacaacaacccaaaagacccaacaagcagcgaaagcagagagaagcacccaaccaaggacagaagcagcgaccccggggaaagggaaggcgaaagaagcgaggaggagggcgacccgaggaggaccagcagccaaaaccggaccccgagacccaaacacggaccacaaccaggagcaacaccagcgaagaggcccccaacacacaacagcagaggaccacgggcgggaacagagagagcaccaacccaagagacggaggccccagggaccggaaaaaaaaaaagaaaaaacaaaaaaaagagaaaaagccgcacaagggagaacaagacagggacacaaaaggcaccaggcccggacaaaggcgaaaacgaaaacgaaagaacagcgcaaggccacgcaagaaaaaaaacaacacacagccaaggaaagagcacggcacagaagacacgaagcccaggcgggccaccacccacccaccacgcagcggagggcaaacaacagcgcgcgcggacaaacaacagcgcgcgcacgggaaaacgaccgcaggaaccgaaggccaccaacagccagacggagccggcaagcaccaaggagccccccccccgggccgggcacaggaaaaacaacagccagccccaggggcggggacgaaccgggcgccaggcaggagcaaacacggaccgagccccagcccgccgcgaggaaaaggggaaaaggaacaaacagaaaggccacagaacggagaagggagaaaacacaacgagggagagggagcgcgcggcaacagagccagaaaaccagggcaagagagcgagaaaacaagaccaaggaaaaacagaacaccgaaaaggcgaacgacaagcaaagaacacacgggcaaacacacacgcacgcaaaacagaagcaaaacagggaagacggcccaccagagcacacgcaccaagcaaaaacggcgagaaaacaaggagaacaaaagcaagcacagcagaaaaaccagcgacccaaagaccgaggaaagcacagaagcgaaaagaggagagagagccccccaggcacagccacaaggcgacaggcagaagagagggccggcaggaccgagacaaaacaccagccacgggcagccgcagacaggggagcaacaaagaaacaggcaaaagcacaccaagcaaggagaccccccaaagaccacagggcagcagcacaaaagcccaaaggacaccgcccaaaaaaacacaaaaaagcaagaaacaaaaaaaaaaacccaacgaaaaccacaggaaggagaaaacaagccaaggacaaggaacaaaaccgaggacacaaaaagcacaaacaacggaccaagaaagggcagaccgggagaaccgaccaggccccaccaaaacagccagacaagaccccgcaacgacacagcggagacacagagaaaggagccaggaggaaagccccagagaccaacgaaggcaccaaaggacaagggggaaaggccccgggggggaccaccagggcggagcggcaaagaaagcaggcgagcaagccaggaaagcaagccagaaagaacacccccaggcccgcacagcccgccccgaccgcgagccagccgacccgggagaacagcagcaggaaggaagccgaaaaacccccccccaacgccggcagagggcaggaaagcaacccgacaagacaccaccaaaaagcccaaaaaaccaacacaacggcaagaacgaaaagaacacaggagagagcagggaaggggggcaaaggaggcacaaaagggaagagagaaaacaggaaacgcgcaacaccagaagaaaaaacagaggaaccggacaaggagaaaagacccaccgcaacccacagaacagaccgggagacaggcagggacagaaaagacggaacacagcgcagaagagcagagaaggaaaaggaagagaggccccgccccccaagaggcaggaaccacccagcaaccaaccaacgaaaaacagcgcagaaaagaaaggaaaagaacaagacaaaagacgaggcggagagaggcggacgaagagcacacgcggcaaaggccgggccaccagccccacacaggcaaccacaagccgaacccagccagggacgaaccccggccgcaggcacgagcaggaagaaacaacaacaaccagaacacacacagcagacacacagcagcagcacacacacacagcacgacacacagcagcagcagcacacacacacacaaaaaaagaacaaaccaaaaagacgacaaaaacaaaacaaggaacaaaggaacgcacgagaaaaaagacaggaaaaaacggaaagacaacaacggacccagaaggaaagaaccaggaccaccacaacacaaacacgcaagaacaagacaggcacgaaagaccccaagcccccaaacaaagacgcgagacaacaagaagcaaaacaaaaaccaaaaagaagaaaagcaaaaaagaaaccagaaacaaacagaagacaaggacagcagaccaggaccacagcaacagccagccgacaacaaaggcaccagaaaagggaaaagaagaagagaaaccaaagcaaggccacaccacagaggcaagcacccgccgcaggcaacgacagcaaaagcgcgggaaccggacccccagccggacaagaaaaacgagcgcccaaccaagagagcaggcagcgaagagacggaagaaaacagcggcaccaagaagcacaaagccagaacaagccggcaaaagaaagaacgaaaacagaagggaaaaaacaaaaagcaacaaaaacggaaagcggagcacaaaacccccaccaaacaacagaagagagaccaacaaacaaaacccaccccccaccaccacaccaccaccaccccaacacagagaaacgaacagcaggagcacaacggcaggaaacacaacagggaaccaagcaaaagaaaaaaaaggaacgaaaaaaccacaaagcagacagcagcaagccgaccagcacaaagcacggaaaacccaggccgggaaacgggaggcccccgaagcagcgcggcccaacagccacagcagccccgaggggagaccgcaccaggcagacaaggaacccagacacagagaggcaggccacaacccaggcacacaccagggacggcacgggaccggaggagcgccccagggcagagcgcacgaacaaaaacaccggcagaggcccaacgcccgcagggcccgaggaaccaaaacgacaaaccaaaaaaaaagacaaagcgggcgggagaggacaaaggcagcgccaagccaccccaggcgacaggaaagcccccacccacaggcccgacccaagcacaccacagcagagagcagagcaaaacggaaaaaagaaaaacaaaaaaacaaaaaaaaaaaaccccaaacaaaaaaaaaaagacacaaacacacacacacacacaccacaagcgcgcacgcacaacacgacaaagccagcaaacgcaaccacaccgcgccagggagagggagaacacaggagagaggggcaggaaaaaaccagaaaaaaagacccaccacccacaggggaccgcaaaagacccagaaaagacccagcagaaaagacacaaagcccgaaacaagaagaaagagaaacacgagagaaaccaaaagacaaggaaaagacaaaaaccaggcaacagacccagaacgcaagggaacgacgggcaagggccgggcccgccgacaagaaggggggggggccaacgcagacagacaaaaagcacaagaaacagaaaaaaaacagcaagggccaaccaaaaaggacgggcaaaaacagaggagcaggaacaaagcccaaagcccaagaaaaaccaccaacccaaaagaaaaaaaaaaaaccaaaccaaaccaaaccaaaccaaaccaacaaacaaaacaaccaacaagcggacaaacagacgagaggacgcggcgcggaaggagggaacagagcagaacaacaggccaggcaagcacgcaccccggagcaccgccaccaaagcccaaaaagaaccacaacaagccccaccaaccaaaagggccaaacacccaccacacaaagaacaagggaaaaaaacacagacgcgagaacacaacagggagaaacgggacaagccacaaaaagaaaaaaaaaaccaaaacaaaaaaggaaaggcaagaagagacgcaccaagccgaaaagggggggccacagcgaagcaaaccacgggcggaagcggaaacaaaagaacacacccagccgcaagagaacccggagacccagaaccaaacgggcacagaaggggaaagggagggcaagcgccagacaagccaccacccaaggacgggaagcacccgccagccgccccaaaggcgaccgcagccgaacggagacggcagggcccagccccccaccaacacacccagaaccagagcacccccagcagaacgggacccaaaggcggggcacagaacgcgccagaagccgggagacaagaaaacagccagaaagaaccgaagcacgcacgccaggagacaaaagagcaagaaaaacagacaagaaaacacaaacaaacagaaaaacccaagcaagacaaaagaaccgggaggcagcagacaaaagcaggccaacacagggaccaacagagaaaaggacagggccgacagccacaaggcggcggagccaggaagaggacaccggaagggccaccagagcgacgacaggacccaaaagaggggccacgaagagccacggccagaaaggccccccccagcagagagaacaaccacaccaggacaaagaggaacccgggacaagacaggcccccccccaccccccagcaaaaaccaacaagccaagcaggagacgggaccaagcgcgcggaagaaaaaaaacaaaagaccacaaagccccccacaggcacggagcaaggcaaaccccacacaggcacccaccaacaccaggggacaagggagcagcacagagggcggaggaagcaggaagagacaggcaggggaggaggccaggagcaagagaccgcaggaagaagagggaccacccgggggcagccggccaccaaccggaggggccgcgcgggcccccgagccgggcccgcgccgggccccgccacgcccacgaacgcacccgacacaacgcccccccacccagcagcaacgccccccgcggccaagccccgggacaggcacgaccaaggagacacggacccccgagccccgccaagcccggggagccgcccccaccccggcggggccccggccagagacgagggaagccgcggcccccacccaccccgcgcccaagcccgcggccccaggccccgcgggcgcgcgcacgagggaacccgcaccgcgccccccccgcgccgcgcacgcagccccaggcgaccccaccggaccgaagcaccccggggcgccgccccccccacaccggaccccgccgcccggccccacaccgcagccccgcacaccgccgcagggcgcgcaggcggcggccagggcccccggagcgccccggcagcagccccgaggcggccggccgcccgcgcgcgccgcgcggcccgggaaccaccccgccagggggagcacgacgcggcggaagcggcgaggcggcggccaggggcggcggccgcggggccccccgaggcggcggcggcgggggcaggcggcccggcacaggcggcagcgggcgcgcagccccccgaggcaacggcggcagagcgggccgcacggcacggcaccggccgcaggaagccccggcagccaggcagcgagcagcccggccgcgcccgccgcggggccgcgcccagcgcagcccgggcggagccggagcgaacaccaggcagccacagcgacccgaggcgccgggccggccggggccccgcggcgcagcgcagccgcgaacgccccagcgcccccaggggccgcccagcgccagcagccccgcggcggagcagaagccccagcgccccgacccgcgcccgcgcgcccaaccgccgccgccgccgcccaccccacggcccgccggcccgcggccgccggacgcccccgacccgcccggggacgccccgccacggccggagaagacaggcccgcacagggcgccgccgccgccgcccgccgccacggccgggaaccccggggcgcgcggcccgcacgcggccggcgagcaggggggcgggcgcgcggacaggcggggcggcgcgcgcccggggagccccgggggcggggccacagaggaggggcgaggcagcgaggcggagcggggcgggccggccgcgcccggcccccgacagcggccggccccagcaccagagcggccggcggcccgccccgagccccccggagagggacggagacagagaccccagcggggacaaggcccgacgaggagggcggccggacgaacaaagcccgaagcccgggcggcccgagcgacacccgaaccgaggccaccccaggccaaacgggcgcggcagcg

SEQ ID NO: 521 - RNA, 5617 nt, Mus musculus
aaaaagaccaacaaccaacccaagacccaaagagcaccaacagagacacaaaacaagcaccgaaaagcccccccgcccacaccgcaccaccacagaaaccccaccgaaagccaagaaccagcagggccgaacccaggcacagggagaggagcccaggcaagcaacgaccacacacagaagaagaagcgagaaaagagcaccaaaaaaaaacaaaaaagcaagaaacaaaacacaaaaaaccaagccccccagacaaccagaaacccccagcggggcgaagacccagagccgaccaggacagaacgggaagagggccaggagagaacagccaggcagaaccgggggaaacaaaggcaccaaggagacgggccccgaaacgaaagaaacaaggccccccgccccaaacgaaacgaacccaccgacaagcaacagccaaccgagccggacaaagacgggaaaaagagacaaagccaggacagggggcggggacaggggagagcacagcccagccacagcccgggccgccccagcacgaaggaaaaccagggcacaacaaccagaaaaagggggacaggcccgcagcgacaggggaacgggagcaagacaaacgagcgggaacgaccccaacgccagcccccaacagccaaagcacagggaagacacccaaacaacacagagagagagccccaacaaaaccgaaacagaagaacacgagggacagggcggaacaacaaacacccacccggcccagccggggagcgccaagccccccgcgcgccagaggaagggacaaacggagcggggagccaagcaaggcccaaggacgggacaagaagaaaagcgaccccagccgggcggcgagcacaaagcaacacgccccaggcccgggagaacagacggcacacaaaccgacagaacagagggaacccacggggaaaggaaaggagccagaagcagcgcagaacagccaccaaggaggaaaagcccagcacagagcccccccgaccggacaggcagcgccccccagagacaagcccagacacaaagcaagcaagaacaccagaaccaaggaagccaagggacagaggagagccagaggcaagacgaggagagacacggagaaaaagcaaaaaacccccacggacgccaaaagcgcgccaaaacgcaggaacaccaacagcgccagaccgacacccaaacggacaggacgaaacaccaacagagaaagagagagccagcgaacggcacagaaaccgaccccggcagcaccaaggacacgaggcagcagccaggccccgagcaggcaggcaggcacagagcacagagcgggcaacggaaaggcaggaagaccaaaggccagaggggggagggccgaagaagcgcccaggcagacacgggcaggcccgcaacccaaaacggaggaccaaacacaaagagccagagagaggcaacggcaggggagagagacggggcccaccagacccagaaagcacaagccaggaagacacagcaaaggggcgggggggagggggggcagccggaacaagaaggcaggaaaggaaaccaaacagcaaacagggaaggagcggagagcaccaaggccacccaagaaagggagacaagagacaaaagcaggccagaagagaggaagacacaagacagcccacagagcacgagacgcgggccaaggaagcagaggacaagagaccaaggaagggacagcccagcgaagacacgggcgggagggagcccaaaggccacagcccacaggcacaaaaaaaccaggcaggggacaagggagcaggaagcacagcaggaggaacacagacccagccgggccgcagggcaggggagaggagcacacagggaaacgaggcccccaaagaaacgggagacaggacggggggccaggaggagccggggacaggcagaaccgacgacacacaggagaaaaggaaaaaagcaggccggggagaggggggggagagggcagcgcgggccgaagggcacaggagggcaggcaggaggcagcccggggcaccgccgggccggcacagcgcgccgcccaacgaagccggaggcagcagagcacgagccacacagaaggacccgagcccaacaggagagggaaagaggggacagcccacagcccgaccgcacggggagggggaagcacgagagggaagacgcacaccaagcacccccacggccacagggggacgggggccgacagcgccgcaaggcgaaaccacaacgccgcaggagcacagcaggccccccggagaaaacccgacagcccaaccaacagggaggaagaagaaagacgcaaaaaaacggccaaagaggaaggcggccacccacacccgagaaaaccaaggcgggggaccggcccccggcgccccgcagccacccgcgaccaaccacacccaaggccccccagaggaaggacgccaaggccacgcaaggaccaaaaaaaaaaaaaaaaaaaaaaaaaaaaaaaaaaacacccggacgaagagagcagacgaaaaagagggggaaaaccaagcacaacaaaccgaacgaaaacaaacgaaccaaaaccccacaggaaagcaggccccagaccgacagagaagcagggcccgcacgaaaaccgagagcagccccccggggcagcacaggagccaccagagaacacagcaaacagaccaaagagggcgaagcaaccgccaaaggcacaggggcagcaaaaggacaggacgaggagaacagcagcaaaaaggacacaagaaggaaacagaagcccagcagagaagcgaaaggaacaggacaaaagacgacaaaccaagaagccaagagaaagacagacaccaaagcggcaccaagaagcagaggcagagccgggcaagggcacacccaacccagcacgggaagagaggcaggcacgagccaggccagcaggcacagagaagccaggacagccagggaacagagaaacccgccaaaaaccgaagaagaagaagaagaagaagaagaagaagaagaagaagaagaagaagaagaagaagaagaagaagaagaagaagaagaagaagaagaagaagaagaagaggaggaggaggaggaggaggaggaggaggaggaggaggaggaggaggaggaggaggaggaggaggaggaggaggaggaggaggaggaggaggcggcagaggaccggcaccaaggccgccaagacaagcaagcaagacagccagagccaagggaccgccaaaaaagaacggcacaaaaacagggcaaagcgcaggagacgcgagaaaagaggacaaagccaaaaacgcacgggccccaggcccaggggggagcgccgagggaaggaagacagggacacagggcaagagcgcaccgaagaggcgcaaaagagcaagcagccaggaacggccgacagagccaaagcaacgggaacaaccaaggacccaggaccccgagccccgcccgggacagaagaacaccaggcagcggaggaccacagagcaggcacaacaggcaggagcaacacccgcaagaagcggccacgggcacgggaaaccggaaagcagcacccagggaccaacaggcaagaaacacaagcaggggggcacacaaggggaagcagggcaaaacacacacccaggccacaaccacccaaaagaaggcgcgcaaaaccgcgaaagagggcagaacagcgacaacgacggcaaacaccaaaaacaccacaacagcaaacacagcaagcaaagaagaccccggagcccaagacccacgccaaaacaggagggcacccaaagacccacaggcagcagaggcgccgggaaagcaggggcaccgacagacccacgaggcgcggagagacggaagcaagacggggggcggccgaaccacccacagaacaccaagaagcaagccagccagacgacaaccacacagccagacagaacagcaacgggcaagcaagcggagaggaaggagaaaaagcagagacgagaggagacaaagaaacgaaagggaccaacacagacccagcacaggcacaaaaagaaaaagaaacccaggcaggcaagaacaccgaaccccacagagcagagggagcaacaggcggcccaccccgagccggcagccaggcagggaggcaagacaaacaggagaagcccaccaaaagagagagggggcggagagaggacagcgggagacacgacgccccaggggccgagcaaccccaacaccaaaggggccacagccaccaggggacgagcccggggccaaagacagcacagaccaaacaggaagaagaagaagaagaagaagaagaagaagaagaagaaaaaaaaaaagagagggagagggagggaaagcagagcaaaaagaaacacagacggagcccacaagaccacacaacgcacagacaccacaacaaaagcacggggaaaaagggaaggcgggccaaacaaagagaaacagaacaagcaaaggaaacagcccgaagccacagccccgcgagcagaggacccagaagaaagccagcacggaacaacggcgacagggaaagaagcaggagcggcacccggggcagcagacaaacacacacagacacggacagagaaacaggcaggaaggaaccacaggaacggccgcgaaagacacaagcacggggcgggccacaaaggcaacacaagcaaacggaaacggagcccggagcagcaacccaccaacaggcagagggaaagaaccggaacaaaaagaaaagacaaaaaaaaaaaagcaaagaagaacggaggggcagacacccagaggaagcacacgaggcagacgggccccgggagacggagggccaagagcacaccagccagacacgaagggcaggcaggagcaggcggaggccgcggagcgccacagcagaggccgccgaggaggaccgagcgcgaagacaacaaaacaaaagcagcaacggggacaaaaacagccgaaagcagcacgccgcaccggccggagagacaaccggccgccccagcaggcaaggggcgaggcagggacagcaaaacccaaaccccgaagaagcgccagaaaacagagcacaggcagccacacacagacaccaccacgcagcccacaacaccccaaacgaaaggacaggacaaaggccacacaaaacacccagcaccagggcagaacaaaaaggcaaagacagaggggagggggggggccgaggcagggcccaaccggcggccagacgccgggagcccagaccacaaagcaagaaccgccgcccgccccgccccacccccccccgcccgcccccccccccccgcccgcccaccaaaaggacagaaggagaggaaaggggacgggaagcagaaagaaagaagaaaaaccaaaaaaaaggaaaaaagaaagagagagagaaagagagagagagaaagaaagaaagaaagaaagaaagaaagaaagaaagaaagaaagaaagaaagaaagaaagagagaaagaaagaaagaaagggaagaaagaacaagagccacagggggccacgggaggcgccagcagggccgaaaaacggacaacaacgggccagcccgcagcacaaacaaaccaacaccagaaacg

SEQ ID NO: 522 - RNA, 561 nt, Mus musculus
ggagggagagggaccaaagaacaacgaaaaaccacccgcacccggaaaaaaccacggcaggaggagagcaaggcgaacggagagagaagagaggagcacgaacaaaaagaaaggcgaagccacgggaccgggaggacagagaaagggccaaaaagaggggagagacccaccacggaaaaagggcagaacggaaagaccgaagggaagaaccgcacaaacccgcggccgggcgcgggagacaaaacgccacaggggaagggacgagaaggcaacgaccgacaaaggaccggacgccagaaagccacgccaggccagggagaaccgagaaggacgagggaaaacaaaaaccacaagaaccaaaaaacaaaccaaagacaaaaaccacagacaccgagagcagaaaaagcagacaagaccaacacccacacgaaaaagcggaaagacgggaacaaggcccaaccaaacagaaaaagcaacacagcaaaccagagccaacacaaagaaaggagagaagcggaagcaacccacaaaacagggacagacaaggcgcccacccccacc

SEQ ID NO: 523 - RNA, 1467 nt, Mus musculus
cccccgaggcgggaaaaggcgggccaccacgcccggcagccagcaagcaaggggcaaccagaaaacacacacacacacacacacacacacacacacacacacacacacacacacagagagagagagagagagagagagagagagagagagagagagcaaagaagaagaaggcagcaggaggacacagcacgcacgaacaaaagacagaaacaggggcaaaacaggaagcggaaagacagccaaaaacccaggccccagaagggggacagcaaacagcaaaccagggaccgcaccccagggccagcagaggaaaacacccaaacagagggcagcaaagggagcacagggcagccccagcggcccgaaaaaggaagccacagagccaaagccaaggccgaagggcgcggggagaagaacagccgccgggcacgccacaccccgccgcagacaagggcacaccggcgggccccgaggaacaccacacgcagcggcacgcaggcccgcggcaggcaccgcccagagaagggccgccccccagaagaccgaaacgacgcggccgaaaccaggcaggggagagaggccacgaagaagggggccgccagggacagaaaccggcccgagcacagggggggggcagggaagagggcagccaggaacagccggggaagggaacaacagaaagcaggacaaaacaagcggggggggggaacgacacgcaaacaaaaggcccccaagaaaagacaccaggaccagcgcgcagaacgcagccgcgaaaggcagaccccagaaaacacagccagccgaaaaacgaaacagacacaaccaaccgcccagcccgcacgcccgaagggcccgaacggccgggacccgcaacagagggggaccaggcgcccaggcaaagcagcaaaccgagcccaggaagaaacagcggcccccccacaaaggcagaggcagcccagccgcaaaaaaggggcgcacggaaaaaagcaaacccccacaaaccaaaagaaaaaaaggaaggccaaaggaccacaaggaaacaaccaggaaacacggcaagaccgaagcggaggccgcaccaccccccgaccggccgccaaacccccgccgagaggggcagccacggcagaaaagaagaaaaacgcgcgaacagaaagccaaacgcaaaggcggccagccacaggaaaaacacaaaacaaacagaccaaaagggaaggcgacccgccacaacaaaaagacagaaccggccccaggcaaccggacagagaggggaagaagagaaggggggaacaggcaccccccagggggggggaccggcaggagaggggagggacggagacccggcaagggacggagggggcagaagccagacgggacgagcacgccagcgccgaaaagaagcacggaagcacagcgggagagggcccagcacacaaaacagccagggacaccaggcacaaccccccc

SEQ ID NO: 524 - RNA, 6165 nt, Mus musculus
cagaaggaaaaaccaacacaaggcaaaggcagggagacgcaccggaaaaaaaaggggggggaccagccggagcagaagagggccccaacacgaaaaaaccgacgggagacagcgagcagcaccgagagggaaggcggaagagagaagagggacgggcaacagagagagccgccagccgggcaggaggcccgcaacaaagaaacagcggggaggaacggagcgaaccgcaagagccgacaccgcccaaggacgaagagagaagaaggaaccacacaacacaaaggcccaacccgaggaggccaaccacagcgcaggaaaggcagaacacagccgaccagcagaaccagcgggcgggaggagagaggagccggaaagcacggggcagccacgggcgaagaaagacggaaaaaaaagaaggggaaggaaggggcagacaaaagggggggggggcaggagacgaaccagggcacagcaaccaagaagcgccacggcacaccccccccgccaaaagaaacggcaagaggaaaggcagccacgagaaaaagccccaaggcgggacacagacacaccaccaggcccagcaacaggacaagagaaagagaacagggccacgacccacgccagccggaacacgaggagaaaacgaagaacccgagcccaccggggccgagaacagccagcacaccacaccagcaacggcacggaacaacccagggcgccaggcagcgcccaccaacgaagccacaccccagcccaaaacaggcccaggacacacaccagcaaacacagcgacaccacagaacaagaacccgggcgcccagaccaaagaacgcaagaagccgaaccaaaacccggggagaagcgccgggcccggaacacaggggacccagcaaggcaccggcgcgaggacccaggagccaaggcaggccccacgcggagccggagccccaggcccaaccgcccgaaacagccgggcgggggaggaccaggaaccacggacggcccccagcaaaaaaaaaaaagcaaagaaagccaggcaccaggacggaaaagggcaagagggcagaagcacggcaggaagaacaccgggacagcagggccaggggcaggaggcgcagagcgggaccagagggcgggacagggccacgggacgcaacccacccgaccgcaccgcgacagagagcgcccacagaggcaagggaccagcgaaccagcaggcccaacaccacaaaaccgcgggcagggccagaccggaagccggggacagcacagggcaagcggaaagagcggcccagggaggaaaggagaaggggcaaggaagagacacgcaggccaggcgcagagaagcaggcacagaaggaaggacagagagcggaggaaggccggcgcaagccgggggaccagagggcagccaggaaggcagggcaggagggagaaggcacagacccgggcggcacagacgaggcaaagacgcggagcaaccgggcggcgaagccagcacggggaccgaaggcgcaaggcccagaaaagaggaggccgaacgacagaggagaccaggacccaagagagaaaagagggcaggaaagggcggaaggagggaacaaaaggcagaggcagggaaccgaaggggaggcacgggacagaaggggaagggcaggggagcgggcacagggagggaccaaagccgccagccggcgaggccaggggagccacgacccgagcaaggacagcgcgagccagccacaggagccgggggccaaacagacagcagggaaaagggaaagggaaaaggagcgacagaacgagggggggcgaggcaaggggaagggaggaggggaggggggccaagccccagccgggcgccagaacgacacgcaagcggagaaaagcaagcaagggagaggccagaagagaaggcccgcgggggggggagacaaggcgagagccggcgcggaacggccgagacaggcgggaaccaagagacgcgccccccgagcgggaaaaggcagaccaccagcgggaaggcagggggcaagcggaccagcacaaaggaggcgaggcaggacaggagagaagcagaggagcccaacaaaaaagcaaaagcccaaaccaaccaaagaaacacaacaacaaacagacagacaaaaaacaaacaaacaaaaaacaaacaaacagaaaaacaacaacaaaaggagccgcacccagcccagcggggaagagcaggggagggacgcgagcagccacgaacccaacaccaagaagacagacagaggggaggagacacaagagggaagacgccgcaagcggaggggaaccaacccagcaccaacacaaagcaagggggggggcggaacccgggcgggagagagcggggacagggaaagcccggggccacagccagccagaacgaaagggagccaagccagagagagacgcggagaaacaaggagaacagcccgaaaagaaccgaggcagcccgacccacagcaggacaaacaggacaacacacacacacacacacacacacacacacacacacacgcacacagacacacacagacacacacacagacacacacacaacacacacacaacacacacacacacaagcagagagccagcgacacccagaccggaacaaggagaccgagagccgcgcaggggaagacacagcacagaaaccgacacaccgagcgcgcacaggagacaaaaggaccggagggcaaagggcccagaagccacaggcccaagcaggaacaaggcccaaccgcccgcaaagggaacaggaaagaccggcagccaagagagagcaagaaagcggggaagcacaagagccagacacaccacacaacacagcccgcaccaacccagacccagcacaacacgacgccgaaggccacacgggccccgaccgcacagggcagaagaccgaagaaacccaacacagacaaggggccagaaaaaaacaagacaacaagagagacaagggacagcacgcggagccaaggacagagggacagggagaccgggacacggggaacagggccagcacgcaaggcaaagccacgcaagggaggaaagcagacaggaacagcgaggccaacacaggggagaggagcaacggagcaaacagcagacacaggagggggaggcggacaagggaacgaacacagagccagagcccgggacccaagggccagcaggagaggacagacaccaacagggaggacagagagaacagaagcccgaggaaaggggaaaagaacacagcccggaacagagggccacaccccacagcggccacgcgcggaggcccgccccagcgcccacgaaagagcacggcaggcccaaaagaggcagagacagggagacaaggacaacagagagagagagagagagagagagagagagagagagagagagagagagagagagagagagagagagcagcaccccgcacaaggcagaagaagcagcacacacccgggccgggagcagggaagggaaggaaggagggcggcgggccgcccaggagcccgggaagaaggacgggaacggccaaggcccacgcagaccaaggccaccgaagcagaaagcgcagcagccgaagaggggcgcagacacaccagcagcacagaacacgcgagacccacggcagagaggggaacaaaccaaggcgaacccgaccaggaccagaccagaagaggggccaaggcagccagccaggagaaaggaagaccaagggcaggacaccaagaccggaacacccagcaaccagggaaaagcggggacagagcacagaccaggcaaagagaaccgaaaaaaccgcaacagccgggacccgcccaggggagagccagggaagccacacaaagagcagcacacagcacccaaccgaaggaagcacagggaacagcaggagagcggacccccccaagccagcggacccacaggagagcgggccacagccacgaacaagcaccccacaagaaaggccgcagaggcccccggaaaccggaaaccccaagacacaccagaaaaaaaacccaggaccaacccaacaagaacaccacaaccacacaaccaaaaaagcagagcaacccggagaggccaaagacccaaagccacacaggcaacagacggagacaccagacacagcaacaggcccagcccaagagccgcccaaccccaacccggcgagccccggaagaccagacgacaagaggcaacaagggagaaaggaagggagaaagaaggaaggcagaagagaaagcaagcagcaggaacacacagcaagcaccagggaccacgaagggagagggggcaggaaggggcaggacgaaacccaaggccgccccccagagaccaccccccagaggcccgagaccggcgaaaaacgcagaccaagcaccagaagaaaacaaggcaggcagaggacacaagaggaggaggagggaagacagccacagaccacaaccacgaggagaggaagaacacgggagcagaacccaaagccacccccaggaacaccccaacaaggccacacccccaaccccccaaacagcaccaagacaaaaaggagcccaaggggacacaaacaccacagcccaccaaaaggccagaaaccccagagagcaccagagcggagagcaaggcaaacacacaagccggggggacccagccaaccgaacaccaacaaccccgccccgcccagccgagacagccacggcggcccgggcaggagcaagaacagggaagagccacgccaagcgagggagaggcgccaggacaggacagcgcggccgaagcccaggagacaagccaaggcaggaggaaaccaacaaaggcacaagcacaacaagggcgcaacaccccggagcgaggcccccgcagagccaaccccaagacaagaccggggccaccaggaaacccacccagacaaggccgcggaggaggggaggcccggcaccgcagccacgcgcggcggaagccgcgccaaaggccacagggccaggcccaaacgggcccaggcggacagcaggagggaacagggcgcccacgagcccaggaggagaagagcagaaccgccccccacacacaagcagcaccagggagggagcaggggcccaggacagagcgacacaccgccaaaacaaggagaaagggagcagagacaggaaaggccaagggccgcccagagagagacaggccagccagcccgggagggaccgcagagcggggccccaggcaggccccaggcccacgacagaaaggaaacgaggcaaagaggaagaaccgccacagacacagacggagggacagaggagagcccggggcagaaccagaggcggcccacaccaggccaagacagagacagccaggaccaacaacccagacccccgggaaccaaccccgacgcgcagaagaaggggccccagcgccagagaggccagaggaaggcgcgccccggcagccggacaggcgggccccaaggccacgaggcaaggaaggaccgagggaaagcacaggcgcgggggaagccagcgacaaagaaaggcaggcaggggggcaccaggccggccacacgagccagaccccccaccgcaaagcccacaggcccaccccaggaacaacagccgacaccccacggccgggggaaaacggcaaagcccacaggaagagcaaaaaaggaccacgcaccggccccagcccagagaacagggagccacccacagcaccccccgcccagacggccaggaacgagaggagcagaccagcgaagcacgcgcaacccaagcaaagcccaggggcccagcaaggggaccaccgccccagggcagggcccgcaacccccacacagggaaggaaccacccgagccaggggcaccagacccgccccagaggcccccccccaagggacgcagccagccacaagcaagcgcagcgcacagcccggcccggcagcgcacaaagcgcgcacacaggaagcggggccacagccggcacccgccagggcggcccagaagaacccgggcacagggcaaaaagggaagcacaggaaaggacgaccaggggggcgcgaggcagcggccgggccagagaaggaccaaacacagggccagcaagcacccagcacggcccagggcagccagccccaccggcgcc

SEQ ID NO: 525 - RNA, 14377 nt, Mus musculus
agaagcccaaagcacccccccgaaaccagaaggacagcaaccacaaccagcacgacgccccagccacagagacaaagggcacaaagccaacacccaaccaaagccaaagcaaacgccaaaaggagcaggccagccgaagcaaaccccacccggaccaaccgaagcccgcacggaaaagaccaaccaaggcaacaaaaaaaaaaagaagagcagcaaaggagcagacacggcagggagcacggggcaaaaggaacagcaagagcacacgaccagggagagagaaaccgagcggcggggccgaaaccaaaggcaccccagccacacccccccaacaacccagccgacaaaaagccacccgggacaagcaaagaggagaggccacaaaacaaagaaacaaacaaacaaaacaaaaaaacaaagaaaagacaacgaacaaggaacaagggaacacacccccaaacaacacccaacacacgaccacacaccggacaagccaccaacacacaacacacaaacacgggaacaaagaaagaaaacaagacgaaacgacaaaacggagcacacaaaaaaaaagacaagcaagacaacaaaccacccaggagccaggcggcgggccaagggcaagcccaacaaccaccaaccagacaccaccacaagcagaaccgccccaacgccgcagacccccaaaacgccaccagaagcaggacaacccgcacgggaaaaacccaacagggaagggaccacaaacaagacacccgcccaaagcacgaaagacaggacaaacagaacaagaacaacaagacaaaccccacgggacacagcgcagggagaaggcccgggacacgcacccaggacagagagcgcgcaccaacgagaaggagaaaacaagagagaaaagaacaacggaggcacagcagcaggagcagcagaacaaaccacccaccaacaaagcacaaaaaccaaaccaagagaaaaaccgagaacacgacaacaagaagaaaaaaagcacaaagacccaacagagagaaaaggcaagcacagagacagaccaaggaagagcaaacacaaagccaagaacacgcgaagagggacaaccaacaccaagggaagggcagcacgacacaaaccagggaacggagagcaagccggagagaagagaaggccaagaggccgcaggccacgggccccgaagagaaacgcagaagagagaagccagaagggaaacagccccaggcagggcaaccaaaaaggaacgagacaccgagcaaaccggaaaaccacaggaaacggccaggcaaacaacagaggcgcacaacagaaacacaaccccagaaagagccagacaccaacccaaccccaacaggacgcaaaagagccagcgccccacgagcagcccaccaagggccgcgaaccagaagccccgaggacgcaaggaaccaggagaaggaagcaaaacaagcgaaccaacacaagcacaagccaaccagaaaccggagaccagacacaagccaaaagcaaagcgaccacggggcaggcgccagggaaagggaaacaggagaggaaaaaagcaccagaggaacgagcaaaaaggagcaacccggagggccgaggcaaggaaagaaacggaaacaggagacaaagggaaaacagaacagaagcaacacacacacacaacacacagcacacaacacacagcacacacacacacaaaacaacaacaagaaaagagaaagaacgacaaagaggaggaaaagaaaaaagcaccccccacccaaaaacaaaaaacaaaaacccagacggacaaaagcaagggagacgaagggaacacagcaggcccaaacacgcaagaaaggaacagaaaggaagacaagaacacaacccaagaccacggcagaaacacagccgagcgaaacagaaagaaacacacagaaaaacaaaacaaacaaccaaccaaacaagaaggaaacaaggagcaggaaaggggaagacaagagagaccggaacggggcgggaaaaaagcgggccaggcggaaggggagggagagacggacccccacgccaggccaaacgcccaggaaaagagcgggggcgaggcggcaaccccagccgcaagggaagcagccagccgcggaaggacgaacaaaacgggggacagacaaggcagcagaaaaaagcaacacaggagcgagcgacaaggacaaacgacgcagcgagccaacggaggagagcgacgaaacacaaaaacccgcgcagaagccgcccccacgaacggaaggcagggcaaccccaaggacgaggcagagcccagagccacagcagaaagacaaggcgagaagcggccagaggccaccagggacccgcgagggccaggaacgaagagaagcaaaagccaagcgccgggcgcgaaaaagcaagaaggaaaagggcaaaaccaggacaggaagacaggcccaggagcgaccgagcaggacaagggagaagggcacgagggaaccaggcgaggacgaacagcccccaacacagccacgagccgaacagaccagcacccacagcaggagcagggaagcggagagaaaagcgagaagggagggccaacagcaagcacgcccacagaaggcagaacggcccacgaagcagaagaagcgaaggagaaaccagcccggagagaagccaaacacccaaaagaacagaaaggaaaagagccagaacccaaagaaacagacaaaaaaaaacacaagaagagagcgggcacaacaccggggaaaacccaccaaagccaaaaacgaaggcaaaaaaccgagaggaaacaccgagaagcaagacagaaagagggggagaaggagagaagccgaaagaaaggcagggaccggccccaggggacgcacgaacaacaaaggcaaaaacagaagcgcgcaccaaagagaggcagacacaaaacaccaaccaagaaagcccgagaagaagagcagcaaagcaacaggaggagccagcagaagaaagccaagacacccgcacggcccagggcccgagacaagcaaagcgaggggcaagaaggggaaacagagagcaccgaaagacagcagaaaagggggaccaacaggggagaaacaggccagaaaggggggaacagagcaaaccaggagcacacagaaagccaagccggccagggaaacaccagccgcagccagagagaggcacaaaggcagggcaggaaacagcaaagacacgcaaaacaagaggcaaggacgggaagagccggagcaacaagaaaagacaagccccacagcacacacagaacaaccgaacaccacacacacaaagcacaaaggcacagaacagcacaaaaccacccaggacacacacaaagagaaaccagcgaacacagaaggcgaaagccagcccacgccccccccagcccccgcccggcgaaaagcaaccacagcaacagcagagggggaaaaaagaacacaaggaagcaaagcaaaagggaagaaccaggcggcaaaccaggagacgcgagcaccacaaagggcgggcagaaggaaagaaaccaggcaaaagagacaacagcaacacacgaaggcaaggaacagaagaacaaacaaaagcccaacccaggcaaagacaaacagaagaggcaggacaggcgaaagacaaaagcccgacccagcaccccccggccccacccgaggggagaaaagccccacagccgaggcagacccgccggggaggagccggcaggcacagaaccaagagggggccagaaagaagggcaggacaccgcaaaggacagcaggacaaaccgaccgcggccgcaagaaaaggaaacagcggaggcgccgcacaaagcaccggcacaacagacacacccaaaaagcccgaaggccacaagcaaagaaaccaaccaaaccaaccaaaccaaaaaccaagccaccccccacgccccccccccccccccccccccccccccccaaaaccagaccagggaacacacaacacgaaccaaaggaagacaaggcaaccaaggaggcagcgccagcagacgccaaacacaaacaggggaggacacaaggacgaaaaacacaagggagaaaaaacggcaaaggcaaccagccacagaaacccaaaagacgaaagaagccgaagaaaacaaagcgcccaccaaccaccgaagaaaagccagggccagggccgcccacccagcaacggagaaagcaagaagaccaaaaaagaaaaccaggaaggaaggggaagagaacggcaagaagcgagaacacgggcaaacgacaagcaggaagcccggaggacaaaaacggggcgcagaacgacaagaccccccacggccaggcgggagcccccgccgccacaggagaaaaaacagaaacaaaacgcgcgagggacacagcaaagcagaggccaaaagcgcccagccccacccacacggacagcaagaaccaccaagaccaagagcgggacaaaacaaccacccccccaaagaagagaaagggagaagacaaagaaacaaaaacaagagcaaaaaaacagaaacaaaaaggagacgaagagcaagaaaagccagccagcaaccccaaggacaacagaacaaaaggagagagcgagaaacaccacaacccaagcaagaaaaaaaaaaaaaaaaaaagaaaaaaaaaagaaaaaaagcaaaccaaggcccgacagcccaacgcgagccaaccacccaagccggcaagcccaccagccagggacggcacggccacccaagccgagcgcaaggcccggagggccggagccacaacaccgacaggcccagggccccgagcaaacccgcaaaccgaagagcaaggcccaggaaccgcacgggccccaggccccacaaaccccccccgcaacccaccagggcccaccagccagcaacagaccccgagggcacggaagaggccagcgaccccagagcccgggagaacccccggagacaggacacagcacgccacaccggggaacaggccagggagcccagggcgcccaccacgagagacagcggaccacggaggagggggggcagcagcccaagagggcccaggacgcagcaagcagacgcaccgaccccaacaccgaaaaaagccagaccacggagagcgcgcagggcaccagagcggcaggaaacaagccaaggggagacagccccgccgcccgaggcgaagcgcggccgggagggagggccgccgagggagggggcaggagacagcaaagggacagcagcaaccacccaggaggacacgaagcccccggcggggaaaagcagaccccgggccggggcccgagcagcagaggcgccgcaagaaaagcggagaagaaccgaccgggcccgccagccaagggggcgcaacaccacagaaagcacagaaaagagggacaaaaacgaggagaaccaaggaggagagccccaagcaaaccaccccaaaaacagagagcggaaggcaaccggaaaagcccaggcagaagaaagaaaacccaagcaagacagcccaggcccaccgcgcaacaaaacaaaaaggggaagaaaggagcagagcagaacccaccagccccaaaacaacaccagcaaggagcagggaagaaccaagaggaagaagacgggaaccaagacagaggaagccgaaagacaaagaaggccaggaagggcgagaaagcggcagaacccacacccgaaggaaaagacaaacagacgcaggcagaagagcacccgaaacgaaacgaccccccccccaaagaacacggcccgccacaggagcgcccgagaaaggaaagaaggagaagaggacggcacccagccacagaagggcaggcagccaaaaacggaacaggcaaaccaaaaagagcacgaaagaagaaaacagaagcgaaaaaccagaaaagcaggcacaaacaaaagacccggaacacaaaaagcaacacaccaacagaagcaccgggccaaagcacgggggccccagcaggaagaccacaccgacagacgagaggaaaggagccagagccgaaggcagcgggccgaacaggagccgggcgcaacgagcaccgcacacagacccaggacacgcggcaacagcacgccacagaaagagccgaccaaacggccacaagagcccacagaagagaaagaggccccccaggcccaccggcccgcgaccccccacccgccccccccgaccacccacaacaccgccgccacaacaaaggaacagcaggagggaaaggacagaaagagaaaaaggacggagaaacaacaagacaccaaggccgacaccagaaggaaacacagaagagaagggccgacagagacagaaagcagagacaagagccaccagcaagaagcaaggaccccggaagaaaaccaaaacccaggaaaagggcagggggaacggacaacaacggaagaaggggaaaaccagacgggcaaaaaaaacgcaccaaggaccacagaaacaaggcacacagaaaacgacaaagaaagcacacagaaaacgacaaagcgcaagagcccccaaaggcaagccaagcccgaacacggagcaaagccaaaccacccaagagcaaggaccacgagcagcaagggcaaagaccaggaaacccgccaaggggacgggggagggggcccgccgaggagagccccaaagccaagaagacgcaaaggcaacacgcagcgcagagaagagaggcaggcaagaaaaggagaggggaacaagcaggggagcagagacagggagccccccggggggccaaggcgccaggggcaagcgcaaaccggcgcgaggcgccaggaagcagacaaggccccacacggcgcaacgcacagagacagcgaaacagaaccaacaacaccacagggcagcacccaacacaaagaacgaaggcaagcagcaccgggcaaagagacagccacaagaagagcacgacaaaaacggggaggccgggaagccacaaaaaaaaaaaaaaaaaacaagagaaacaaccagcagacacaaggcaacaggaagcccgaacggcaaacaccaaaccgcaaaaacacacaacacaacacacacaagcaagaagcaggccgcacaagaaggaccccagcaaaacacacaaccaaagaagcaaccaaagggaaggcaaagaaaaaaagacccgccaggcagggggcgcagccaacccagcacgggaggcagaggcaggggacgagcaaggccagccagcacagaggagccaggacagccagggcacacagagaaaccgccgaaaaacaaaaaagaaaaacccaaggaaggcacaggaaaagaagcaagaaggacaaaagcacagacaggggaagaaagggaggacaaggagagaaggaaagagagagggagggaggacggagggacggagggagggaggacggagggagggggaaaagaagaggagaaggcagaaggggaaagccaggacaacaaacgagaacacaaaaccccaggacaaaacagaaaaggggcagcggaaacaaaaagacaaaccccagagcagggaagccagggagaaaaggagaagaggcggcacacagcgcacgggggcgggcggagaacgcgaagcccagacgggaaggacagccgaccacagcaggaggcagagccagaaacaccaaccagacaaaccagacacacaacaccccaaaagggaaacaaacaacgcacaaaggagccccgggggccgggaaccggaaccagcgggaacaaagaacaagcacacaggacacccagagaacagccccggaccaaagcccaacagcccagacaagaccaacacccaacaagaggcaacccccacaaaagcaaccaaacaaaaaaacccggaaccaagcagagaaggagaggccagaaaagccgcagcaagggaagaccgcaaagcagacggaggaagggaaccccccacaaaaccaaaagagaaaaaggggacaggacagggagacccgcccccgcacccccccacccccccccccccacccccaacccacccccccccccccccccccccccccccccccccccccccccccccccccccccccccccccccccccccccccccccccccccccccccgagagcaagcaggcgccagcacacaaccacgagcacacccaaacaccgaaaccgggaaagcaccaggaacaggcaagaaccccacggggggaaaaagacggcgacaggggaaaacacagaacaggggaggcacgaggaaaacaccaggacccaaaagggagcagcagaaagaaaaacaagcaaggggcgaagcgacagggacaggccacacaggagagggcagcaggaggacaaggaaggagagaaaaagccaagacccagaaagcacagcccagaaaaaacagcaccagaaccgcaaagagaggaaaaaggagagaggaaaagaaaggacgaagagagacacagacacgagagccaaaaaagaagggaccaggagggagagaagagaggaaaggcgagacacgagaagaccgacagacccagcacacgcacaccgccccccccccccccccccccccccccccccccccccccccccccccccccccccccccccccccccccccccccccccccccccccccccccccccccccccccccccccccccccccccccccccccccccccccccccccccccccccacaaagcggagcaaaggggccaaaacaagaccaaaagacgacagaggggaccccggagcgcggcaaccaaccagcaaaacaggggccaggacacgagagaaccccaaaagagggggagaaagaagaaaacaccagccacgacacaggaacgcccgccccacccccaccacgggagaacacggaagggagggagagggaaggccagggaggagaaggaacgccaggcaagcggggccaaggaccaggagaccaagggacccccagacagcaagacagcagcggcaaccaagggaaaaagggggaccccagacggagagaaaaagagaagcccggggaaggcagaacacaagcacaagcagcaaggccaggagcccacgaggagcacggaccccagggaggaagcggagcgcagaaagaacagccacacaccgacaacacggccccacagcagaacacaaggccacacaccaaaaagacagcccacacgggacccacaagggccccagcccagcagaagaaagggggaaaaacaagaaaaagaaggaaaacagagagagagcaaggacaagcaccagcaggagacaaaaacaaacacgcgaggcaagaggaaagccacccagaaaagaaccggagagaaaaacccaagaggaaggaagaaaaagcgggccaagagacaaaggaagaaaaagaaggcgaaaaacccaagcaaaaaaggcaaggagacgaccagggaccgggcaccgacaacacaggaaagcagaggacagaggaaacagacagcagccggcaaggagaccgagccccagggagcggaacgaaaacagagcccagaaagagaagcagggggacccacacccaaccacaaagcaggacccgagcacgaaggggcaaccacacagaaaagccaggcaaagagaacaagaggacagaacagaggcacaagcccaagcggagaaccaaaaggagaaaaagcacgaagacagacgggcaggagggcaggagcaacgcacaaagagcaaaagcacagcggcacacaaaggaaagaaaggcacaacgccacaggaaacggagaaaagaccccgaacccccaaaggacagccaaaaaagagcacaccgccgaacccaaggagggccacaaagaagcaccaaaacggccagcagaagaaaaaaagcccccccccccaggagaggaaccccaaaggggccgggaaaaaaagaaaggcacaagccagaacagacagccgcaagagaagagccacccggcccggaccgccgaaagcccaagcgagaaaaagcgacaagggaacacaaagaaaagaaaacaacagcagggccagcgggggggcggaagagcacgccacaagagcagaagcgagggagcagaggaacggggggcaaccagaagggcggacacggggccccccccgaccacgcccgaaagcgaccacaaccccccagcccagcaagggcgcacaaaccccccggcgaagacccagagagagcgagaagaggaagacggccaaggcagcccccacccgccccaaaaaacacaaggccgaccggaagacaggcgcaccaagccccaggaccggcagaaaaggacggcgcgcaaagaacaggacccggccagaccaaaaaaagaaaaagccgagcacccccccagccggcacccggcgagcccagagcgaaaaaccagggagcccgaagcgcgaccacgccacagggggaggaacacacaccagagcgcagaggaaacaagcgcagcaaagggaggaaaaaaccagaagaggaaacgagagccaggcgaacaaaagccagaggaaaaacggccccggacaaggacacagcgccgcaaagccaggaaagccacaaaagaaggccggagggggcagacccaaccaggacaaaacgacaaggcgaaacgcacaacagcacccgaaagcaagccaggggccaaaaaagagaagaagaaagggagaaaaaggagggcaaaaagaagcaaaaacaaaagaacagggaccacacccaggacacaggaaaaaaagacagggacaaaacccaacaaaaacaaaaaagacaagagcagagcacggggaagagaaaccggaaacagcacaaggagaaaggcgccaagaaaaacccagcgggggaaccgcccagaaccaaaacgggaggcagggggaggcccgggggggagaacgccccaagagggggcggacgcaggaagagcagggaccagggaacccccgaaaaaaaaggggaccaacacggggagaggggaaccgggggaaggaagaagagaggaagcagagagaggcccgaaagggaagcagaggacaagagagcacagggccggagggcggcaaggcagaccacaggagccacggaggaagagaaaagagaagaaagaaggggcccaggagagaccagcgaacaggggaccagaagggccacgcgccaagagagaaaggacgggcaaagcaggggccgagcaccacaaaggcaggggggaagcaggggcggccggacaacccccagaggaacaggagagggagagagaggagccgagcagagagcccacgagaaagaacgcgggcaagaccaccaggccagagagagcagcgaaggcaggaacggacaaagaccagaacagcaaagggagcagacaagccagcagaagaacacaagagaggccaacgggcacaaccaagaacgaccaaaaagccaagaaaaagaccgccaagcaggggcggaacaaagccgggaaaaaggccagcgagaggacaagacgcgcagaaacaacgagagaaggcacgaaggcgccggaacacacacacacacaagagagagaaagcaaaaaaaaaaaaaaaaaaaaaaaaaaacacagggagggggccagaaagagagaaaccagaaaaaaaaagaaaggcaacaaacaggaaaacacaaagacccccaagcccccacaagccccccccccccccccccgaccagaggagccccaccacccaccacccgcccagcaaccagccccacgggcacaagcccaggaaccaaggggcccccccaggagccagaaaagcaaccgcacaacccacggagccagggaccccaaacggggggagcccgggagcggggggcggggaagcccagaggcaaaccccagcccacaacccccaacacccaaggggcccggccagccaaggacggacaccacacgaggccgccggcagagccccaggggacagcaaccaggcccgagaagcaccggcacagcaaaggggggggcgcggggaggacccaggaggcagccgcaggcccccagccgcccaccgccagcacagaaaggaggaaacggaaaaagggggggggccccaccgaacgggggaggccaccacggaaggccaagacacccagggaaggcaaagcccccgggccgggacccgcgccggcacgggagcaggacaccccagcccccccacgaaaaaccaaaccgacccgaccccccaccccaaacgaacggcccccccccccgcccccccaccccccggcccagaaccccccaccccagagagacgcccacgagaggacgagcaccacacggggaccccgggcaagacggaggaggggacgagcgagaaaccacgcaggagacaaaccagggcggacgggacccaccagaagaacaagccaccacgccagaaagggaaaggcacgcaaaccacaaaaaagaaaacggggaacacaaccaagcaaggaaaacgagacaagaaccaagccgaagaaagaaagaagaaaacccagaagaggaaagaccacaccaggaggcaggaaacaagaaaaaaaggccaaaccaagcaacacagacaagcaaccccacaaaaccaaccaaaacacaggggaaaaaggcaaaccaaaaacggaaaagaaaaaacccaggaaccaaaaccaccagcaaaaaagaaccgacccaagcaacacagagcaaaggaaaacacgcaagaagaaagagacaggcagagacaaggaaagaagaagacccagaagaaccacacaccaggacgacgacaaaggagccaaaacaccagggaaaaaagagcaaaacaaagggcggcaacggggagaagagaagaagcaaagccacacccgaaaagcaagccaacggacaaggaccccacaaaaaccagaacacgaaacaaagaagagaaagggagaaggccaaaccagggaaacggacaaccgaacaaaacaccaaggcagccaagacaagaggacaaagggacccaaaaaaaaagccgaaggaaaggacacgcaacaggacagaaggcaaccgacagagggaaaaaacaccagccaacacgaagagggcaaaccaaaaaacaaagaaccaagaagagacacagagaaacaaaacaaaaaaggggaacagagcagaggaagaaccaaccgaggaacccaaggcgagaagcacaaagaaaacaacaccagacagggaaagaaacaaaacaacccgacacaacccacaccagcagaaggaaagcaaaaaccagggacagcagagcggcgagcagggaggaagaggaacacccccacgagaggaagcaaacggacaaccaccggaaacagcggggccagaaaggaaaggcaccgaggacccagcaacaccgggcaaacccaaaagagcccagaaaaaaggacacacacccaagaagaagccaaagagccagaaggggaaacaacccacagccccaacagagaaagaaacagaaaagggacagccacaaggagacaccagcaagggaaggagagaaaaacaccagagcacaaggacacaacccgagaagaggccgaaggccaggagacagagaagacggaagggggggggggggggggggcagagagagagagagagagagagagagagagagagagagagagacagacagacagacagacagacagagaggagagagagagagggggagggagcaaaaagaggcgaggagagacagagacgggcaaggacaaggaaagcaaacacaaagaaccagggaacggcaaaaaaccggcaaagcaagaagcacagaaacgagacccaccaaccccgagcccgaacaaaagaaccgcaagaagaggagagacaagagaagaagagaaaccaggacacagaaaccaccaccacgacacagcccgcaggcgcacaaaagcacaacgccgaaaacaagaaaaaggacccgggccgaagaacaggaggaaaaccaaggaacggggacacccccccaaagacgcaggggaagggcaaggaggaccaccacaggccccaagaaacaagggggcaggaacagacccccggagccacaggggacaaggggcagggacagccgccacacagacacaggggagaaaaccccacacccagccagaccccaaagcacagcccgcaccccacagaccgaggagcggccggccaaacccggcacccaagagagcccacaggaaaaaaagaaccacacacaaagcaccgaaagcaccaacccccccccgcccacccccagcccacccacccgcccggcccgcaccccgacggggcaagaccgcaagacaagggaccccaccagagaccgacaggccaccgcacaagcagcagagacagagcccaggagacggagcacaa

SEQ ID NO: 526 - RNA, 613 nt, Mus musculus
aaggagccagaagaaggaacagacacaggaacgacagagggagcaccggggggcggggaccagaccaggacaaccacgagcaccccagcgaaagcaaaggaaacaacaacacgaaccaaaaccaaacagggggggacacaacacgaggagcagaaagcgaaagacagcagagcagccaccgagcgcaggacgggggaagaaccccgcagaaggagagaacaccagccgacacagggaggcaccagaggaaccacgccacccagggggaagcgaaggaacggaaggaggggccagagacaaccgagcccagggggaaaagccggcgcaccccgcgggaggaggcagagaaacgggcgcagggaacagaggaaacagcacacgggcagaggagggagggcgggaagccccccaccccgaaaaacacaagacgagagagacacgaagacccaggccaaagggggaaaagagaccccacaggcgaggagaacaccacccagggggggcggaggaggagggccacccgcggaggaagacacccggggaccagcggcacaagggcaagcccccaccagaccgccccgccccgccgccagggggaaagagcaacccagcc

SEQ ID NO: 527 - RNA, 5710 nt, Mus musculus
cccaaagagaagcagagaaagaccaaggacaaagagacgcaacccgagggcaacagagaacaaccagaccccggagccgaccagcgcaagacaaaagaggccagcggaaagagaggccacggacaggaaacaaagccccagacaggggaacaccagggccaaaaaagggaaggggggaggggaggggggggggggagggggggagacgggaagcaggaaagaagaggaaaaacgaaaaaaaaaaaccaaaaaaacccgaaaccacagaggcagaggcccccccccagcgaaaccgcaacaggaacaccagaaacccaacgaagagaagcaaccccgggaagcaggagccaccaacagagagccaccgagacaccgcggagccacccagccaaaaaaacaaagagagaaacaaaaggccgagggggggggggaaagcaacccacaggaaaccaaaggaagccggaggaaaacgaaccccccgagaagcccgaacccacaccaggggcgacgccgagccccgccgagcaaagccagaaaagaaaagaagaaaaaaaaaacagaccaaaaaacgcaggaaggggagccgcagagcggaccccagagggacagccggcccaggagcagaaaaggaaccagcggaagggagagggggggcgccggggacagggacagaacaccagccacaagagcagcagggccaaacgggacacccggcccgagaaaaagggcgggggggggcaaggcgagggggcagagggggacccccgggcggagcacagacagcaagaaccacagcccaacgggcaagacacagcgagaaacccacccccagccgggagcacaccccccagcacgccccaaacccgaaaaaccgaagcccaaccaggaccaacaacgggagaagcacgcaggaaaaggcccgaagaaagacaagaggaaagggaaggcaggcgagcagcacaggaacggcccggccccacacccggaccacaaaacgagcaaagaggagcacgcagacaagcggaaaaacacccaacaacagcacggagaggaaaggacagcaacccaggaacaccacacgagggaagcagggcaggaacccagcagggcaggaaccggagacaggagcgagagaggcaggaggggccgcacggccacaccccaggcgccagcgcaagcacccaggcaccagcccaggggggcacacccacgggaggggcccccgcacaacacaacaagaaaagcccacaaggccccaggcaacgaggaggcaccaggaggccccccagaaggcacacgggagggaacaaagcccaaccaggacagggcggcagaagcggagagacaccaccacaacccacagagcagcacgggaccggggccacggggggaacagcagaagagagggcacagacgaacaggagacgacagcaccacaccaaaaggcaggcagcaacggggagaaggggggcagacaccgaaagaaggaagccagccggcccacagcgggagaggaacacacccagaccagaaccacaacgcaaagcgaggagacacccgagacgaaaaaggacaggccagaaaaaacacgcaggacaaggggagccgagagcacagcccaggggacggccggcacgggcacacagagccacgaccagaaaaaggacagggccaccccacccaggccccgccaccccgagccccaggccaccagcccagaccgaggcacaaaaaacaaaagcaggaggaagcggccaacaaagagaggaaggccgacgggggacccccggaccaggaagagggcaaggccggcccccccgggagcgagccggaagagaggggcaggaggagaaacgcgaaccaagggcagcccggaagccaagccaggggaacacaccagcccaccaggcaacccgagaagaagccagggacacaacccaaaaccaaaaacaaaagacagaggagcgcgggaggagagggggagggaggaagaaaggggcaggggaggcaaccaggaagccgcaagagagaaagccaaagacaaacaaaaagaagacaaaaaaacaagacagggagagaagagagaagggggggggggggagagagagagagagagagagagagagagagagagagcacggaaggcaaaggaggagagcagcccccaccagggccggggagagccaggcgcccagcaaggccaccacgagccacgcggcccaagagagaccggaaaaaaaagccaaagacaacggaagcgaaaagggacacaagaacaccaacacccagacaccaaggaaccaacagaagagaacagaggcgggggaggacaggagggccaacgggaacgacgaacagcaggcgccagcagaggagcaggagcgggagggcagccagagccaccgacaaagagaccgaaacgccagaacccccgacgccacgccacaagggacaccccgggagcggcccccaggcccgcccacaaagcgccacaggaacacaaagaggagcaccagcagcacaccggcaccaccccggggccccaaggcccggagaaaaaaggaagccccaggaagcggcccgacccccacagcaagcaggcgccccggccccccccagggaagcacccagagagaaggacagcgacaagcacacaagccgacgccaggacccgaccgacgagccaaccacagccccccacccagccgagggaaagagaagcgcaaaggcgacagcacggcacggcccgagggcagacgaaggaacaaggcaggaagagagggccagagcagcagcaagcaggccacaagggggccagccaacacgacaacgccagcgaaggggcgaaagcgcagaaacaggagccccagacaagccccaggcaaaaaggccgccaccccagaagagacacagggaaaccagggagagggaggccagcgccgcagcaaagggaggcacaggaccaccgcacaaaagacccagaaacaggcggcgagccggggagaggcacgcagagggagaggcagagaccagaacaaaccagagacaccaaggcggaccaggagaagcaggcaacacgcaaagcccaagggaagacaaggagcaggcagaagggcgcacaccgcaaagcagcgcagaccaggccgggaaaacccccacagcaagcagcgccgcgcaaacagccagaaacgcgcaagggagcggccagcagccccagcagaaaagagacgccaaaccacgcacaggagaccacaccagggacacgaaagaacccgaagccagccgacagcacaaggccccgaccgccccggcccggccccagccccccagaagcccgcacgaacagccagaaaacgccgcggcccaaacaaacgcacccccacagagcaaaaccaaccccgccaaagaaacacacacgaagaagccgaagcggaccggagccaggagaccacagggcagccgcgagcgcaggaaggccagcggccgagccacaaagcagccaccgacacagaggaaaacagcagcaggggcgcccaaacacacacacacacacacacacacacacacacacacacacacacagcaaagaaccggaaccaaagaaagggaagaaggccaaacagacacacagaggccgggagacacacaaagccacagaagacggccggaaaacacagccaaaggaaaggcccaaagaaacacacagcagaggggagagcggcaggccaagcccccacgggagagcaacccggccgcccaacccccgggcagcgaacaggcgcaagccgcaggcagcagcgaaacagggcccgaaaggacccaccaacagagcccaaaccaccagaccgcacaaccacgcaagagaaacggaaggcagggaaacacgcaaacaaaaaaaaaaggggagaggagagacagggggggggggggcagaccgaagagccagaagaggggggaccggagcagagacaggcaggagccaggacagggcgggggccaaaccagcccggaagaacagcacagccaaccacagaacaaacaaggccgacaaaaacgaaaaccaggccagcagacacagagaagaggacagaaccggacaccccaaaggaagaaggaacagggacaaaaccacaaccgccccaaaggaagaaggacagaaggagccaaagaggacaggccaggagaacagacgggacccaacagagggcaccgggcaacgacaaaggaagaacacaaccgaaaggaaggccaccaggacccacggaggcggagaccacggacgggaagacgagccaaggcaggaccagaagagaacccgagaaggaacacaccaacgggcacgcccacgggaaaagggggggaacacaccaacgggcacacccgcggagacaaaaaggacaggaagaagggagcagccgccgccccgccgcgcgcggagacgagaacgcagaccggacccacacagcgcgacgaacaagaggaacggcgccgacagaagcacaaaaaccacaagagacacaaagcggaccagagaacccgacaaacacaaccccaaagggaagccaacaccaagcaaccaaaagcccccaagccacccacccccacccccaaccacccacacccccggcccggcgccccgacggggcaaaaaggggccaagggccccccaggaggccgacaggccacgaacaagcagcagagcaagagcccggggacggagcaaaggccaccaaggggcagacccagcccggcaccacagcccccagggagcccggaccacaaagcgacggagcaccaccgggcaggcccggcaagccacaagagacagcacacgggcccgaaaaacgcaggagcaagggcagcgggagcgaaggggggacccggaaggcagccacaggccacccaccaacccaaacgccgaacccccaagggggcccaccaaggaggggcaaggccacaccagccacgagcaggagcaaagacaacgggcccagggggcaaaccacacaggagacaagggagccggaaggacccaccaggagagcccccaggccaccaggcaggaacaaaacacaaagcgagagacccaggagagaccaacgaccacccggaggggcacgagcccagccggcaaaaaaaggcgcagaacaagggagcaggcccaccagggggcaccggaaagcccaggagaggagcggaccccggagacagccaacgaggaaccgccagacgaccagaggggacaagccgcaacccaccaacaaggaggaggccccccacaccacaccagcacggcaccgaacacagccacgacggggaggggaaccagggggagcaccgagaaaggaggaacacaaggcccgccacggacccagggagaacgcagcgagccccaaaggggagacgaagccacccgagcaaagggaaagccccacgaaggaaggaaagacccccaacgggggcgcagacgggcgccgcagaaacggagcaaggcccagcaaccgacacagcacaagccagcgcgcaggaaccccggcccaaccaaggcccccacccccaaagcaggccggaggaagccgaccacagagaccagacaaggagaaagaggacgagcaccacagaaacaaccagggccagcaccaaggaaaagcgccccacggaggagccccgcgaagacaaggaccaagggggggcacgggccagcgccagg

SEQ ID NO: 528 - RNA, 2438 nt, Mus musculus
cacgccacccagcggccccccaggcgagcccccagccagggcagcaggcagaggggcgagcggaccccaggcagaaaccccagacaccaggagacggggacacacgcggccgcccggggcgcgcgccccccccccccgcggccgggagcgagccgccggacgcacgggccacccgccagccccgcgccaccaggcagagcgcggggccgccgagcacaggacccacggcaagcgggccggcaaggccaggagaagagaagcacgaacagcacccagagccccccgagggaaccgcgggaaaggagggcagccccgggacccggagcacggcggaccaccccgaagccaagaccccggaaaccggagcccagggagcagagcggaagaggaaagggcgcacccacgagcgcggaaccgcaccccacacagaccgagagccagagagggggggggagaaggggggcgagggagacccaggaggcccacaagaggaacggaagcacgacaagagcccacccaggcaaaagagagagacgcccccgcaacagcgcagaggggccgcgagggggaggcccaacgaaacggaagcgagcagcaggagccccccaccggccagcccccccgagacaccccccggggcagaaagaagggacccaaaaccccggcaggaaaccggcgagcgccggcgggaaggcccccacgcccaccgcaacggaagcggcaacagaggccccggcagacgcgaccagagggggggagaacggcagacccaggaagcgcagccagaagcacaggccaggagacacacaggacacagacagggggaaacgccgagccccagaacgcagaagcaaggagagaaacacaagagagaagggagaaggagggcccgccggaaggggggcagaccagagaaagccaaaggggggggggggggggggggggccgccgcgccgcgcgcggcgcgggcgggggggagggcaaggagcaggccggaaggcagggaggaggcaggccggcaagggcaggacaaggggcgcacgcacagccaggcaagcagcccaaagccagccaggggaaagcgggcaccggagcccaaggggaccaaaagaagaaggagcaaagcgcacgaaacagaaacgcacaggacccagacgggaaaaacccgggggccgcccaggcggagggcagacaccggagggaggaggccacggagaaccaacaggcagaggacgggagacaaaggcggaagacaggggcaggcgggacccccaccccaccgagggaggacgagggacgccgggccggaagggggcgcgcgcaccagaggcaggagcaaaaccagccccgaaaagagaagaaagagagaccccgaccaccggccggacagcagacagaacggaaagggcccggcggaagaagcccgaaagcgcgcgagcaccacccacggaccgacgccgaccgggaaggcggcaggcagccgccgggcgaggcccgcccagccgggacccgcgccgcccaacagcgcaccaggcacccagcggacccggacaaggaccgaccaggcaagagcccgaagcaaaagggcagaccagcaccggggaccgaggaccggaaggaaccacacacacacacacacacacacacacacacacagaaaaaccagagaggcagcacacacccccccccgcaacccgaggaccccaagcccccaaaccaaccaaacacacaaaacaaaaaaaaaaaggcagcaaacggcgggaaagcgaccacgaaaggaaaccacagggaccacccaggagaaaacgaccccaggcagccaagcagcccccgaggggaaggcggaagcgcacacacggacagaaacgggggggcccgcagagggagcgaaagccaagaggcaacagagaaagagccacaggccgcggcacggcgaggcccccaggggcagacaagcgcgcaggcaacacccccccccccccccccaaacagagaaacacaagagaccagaacgaccacaggcacagcaagaaaaaagagggcagaacaaacagaaaagaaagcaggcgggggcccgagacaagcgagacacgaaaccacgggcacaagagaaccaagccccaacagcgacccccaggcagaggcaacagcacacacacacacacacacacacacacacacacacacacacacaacggagcagggggggcagccaaaccaaggaagggaaggaagcaggaggaaagcggagcaaggccagccagcgaggccaggaacacagcgccaaaaaaaacagaaaaaaagaaaacaaacgaacaaacagaaaaacagaagcccagagacccgcgacaaagaaaagacagcgcaaaaggcggcgcaagggaaccgcgcaccagaacagccagccgaccgaacggagacagagcagaaagggagag

SEQ ID NO: 529 - RNA, 311 nt, Mus musculus
accgcagcggcaccaggaccaccacaggcccccgccgaggagcaaacgccaacaacaccaggagagaggccaggaggggcggccagggcacacaagggcacggaggacaacagcagggcagccgcaccgcccacaaaagcaggccagggcgaccagaagaggggcagacccggaacggagacagaagcggagcgacagccacagccggagaacagcaaggccaacacagagccaccagcccccagaacccgaaggaccagaccaggcgaccccagagagccaagaaccgaccgagccgaccagcgagcgag

SEQ ID NO: 530 - RNA, 6768 nt, Mus musculus
gagaggagacagaagcaaagaacaagaacgccagaagggagcgggaagaggggggggcagggacccgccgcaacgaagacgaggccagggaggcccaccccgccccccccagcgacccaaacgggccgcccaggcgggaccagagaacaacacgagaacccgccggccacagaacgccccgcagcaggcacaaacaaccgaaggaccaacgccgagaccaggggacggcgggggacacggagaaagaagccgcaacacaggccagaagcggcgcggcacagaccaagacggacgagcccgcagcacccggagcccacagagcacggcgcagacacaaaagacgcgccaaagcagcccggcgcacccaaccggggagcccacggcaaacaaccgcggcagcaaacaaggagacccgcgggcgacgaacaacccggagaagagaaacccaaccgggaagaggagaccgaagcggggagagagacgagagcgcagcgcgcaccccagcacgccaagcccaaaagcaaaggagaaagccaccaaaagcccaaccagagcaaagcggggaagcgaaagaaacacagccggggagaaaacagaacggggacgggccagccggagggaggcagccgaccgggaagccaagccgagcccagcggaagcaccgggccgggccaagaacgaaccccccagaaaagccagggagaggagggcccacggaacagaaaccagagaaaggggagaggagggggggcacagaaaaccgacacccaaaaaagagcaggcaacgcagaaaggggaccacagcccaacaccaccaagaagccccccgaagaagagacggaggcccacacagccggaacccggcaaccccagagcgccagaccggacaacagggaagagacccagagcgccagacacccagagcaagccagcccacgcgagagaaaggaccagccggaacccggaaccagggcggccgcccaaggagcccaggccccagacgagaaaccacgcgccaacagaggacgaaccaagcgaggagcccgcacggccgccaccggaaacaacagagccgccacgcgcagagcacacgcaagccaccagcagacgcacaacagccaaagaaaacaacaacgcacacaaacaaagaagcaagcgcaacaaaggggggggaaaaagaaaccgggaaaagaaaagacaaaacaagggaagccagcaaaagaaaaaacaggaaaggaaaaggagaaccagaagcaggccaggaagacacaagcacaccgagcggaggggagagagaggggcagagagagaaagagaaaagcagggaagcgaggaaggcaaaaaagagagacgaaggaggacaaagaaacagcaagagaaagaccagggagacaccgggagcgggggagagaaaaaggaaaggagaaggcaacgacaaaaaaaggcaggggcaggcccaagggggcacaaaaccaaagacaggcgaaagaaaccaacccaaccagacggggaagccacccacagccgggccacagggaagagagaggaccgccacaggacagaaagaacacacagcgggaccgacaggacacccggggacaagggaacaaacccgacaaagcaggaagacgggcacaagagcacccagaaaaaggagcaacagggggacaggggagcagcagagggaaaaacaaaaaaaagagagggacacaaagaagaggccacgaaaccacaggccaaacaaggacaaaagcagagaaaacagccaggaacaaggaccacagagacagcagcaccgcaagacagggccggagcccgggccggaaccaccgagaccaggcggcccgaaccagaaacgccgcccgcccccgaggcgggaaaagggggccaccacgcccccagcaccagcacagccacaccccaaccggaccaccggaggaaagggcaggagcacagaaacacaacacaaggacaaaaagggaacccacgcagaccccccgggaaaaacaggaagagaacgccacaaaaaccagaagagaccggccacgaagagggcggagagcccaaggggggcaggagaagaaccaaaaccagggcgcacagccccaaccacacacgcaggccgggagcggggcgccgaagccgcccaagaccagacagcgggcagacagcccaccgcagacagagacaccggagggcaagcccagccggcaagccacaaggcggagagcagcacagcccacccgagcacagggcaccccaggaccaacaccaacgcacacggggggagccaacaggggaagcagaagagaccaggggcggggggggcccccgggaagggcagaacacccgcagcaaaaacccacaagggacagcaaggagggagagggacaccggagagacaccccacaggagaagcaggcaacaggagcggaagcaacggccagcccaccacagacagcccagagagcacaagggagacaacaagccacggaaagaaggaggcaagaacagaacagaaaggaccacgggcggacaaacaggcgcggaggacaggccagaaacgcccgagaaggccaggggccggcgggaagccaacacgccaacaaaccagcagagcagacaggagacgcaccaccacaccagcccccccagggggccgaagaacagacacaacccgacagaagaaggagccagagcaccaaccggggccgacccgcagagcaaagcccacggggcacgacaaacaaaacagagcaagacaagaaaagagcaaggaaaaaaaggggagcaccaaacggcaaagacaacacgagaagggcggcagaaaaaaggcagagaggcaccagacagaaggaagccacgacagaaggaaggaccccaacagacccaggcaggcgaaaagagaccaggagacaggcggacacccagggaccacagcagagagaaaagagagagcaccccgccccgaaaggacagcgcaagggacaccagaaggggcaaacacccacagaggaaggaagggggaggccgagagggaaggggggcgcagggaggagcgaaagagcagccccagaccccaaaccggaccgaaggagggagagagaggggagaggccagcgcccgggacagcaacagccgccaacaaaaggacaccaggggaacaaagcagcacgcaggaaaacaccaggaaaagcagaacggacacagacacaacccgaaaacggggccaaaggaacacaaggaagagaaaaaaaagggaagagagcacagggaggcgggcacaccaacacggcgcacacaagacaggagaaaaccaacagcgaacccacgaggcgaaagccagcagccaagggcagaaggcaaaagaccggagagcgcaaccacacgaaacccaaagaaagcaaagggaaggaagccaagcaacagacagagaacgccagcaagaggaagggaagcaggcaaaaagcaaagccagcccacgaaagcagcagaagggccacccacaaggggaggaaacaagcaacgcaaagaaacagagaaaaagggcagagccaaagacggaaggccaagggcagggccgcaaggcgcgacaggagccaggcaaagacaggaacaagagaaaagagaaggaccacacagggaggcagggacgcggaacagacaccagacaaggcaaccaaaaggacaacacaggggggcacaggcagaggcagccaacacaaggcaggaacaggagcaccagacagacagggcaggaggagcgagagcacacccacgaaggcgcagcagaaacgacccaggaagcaggagagggcaaagccacacccacaggacagccacccaacagggccacacccagaggccaccccgggcgacaacaaaccagaagagcgggaccccaagacaagaccaacccaagaccccgggagccaacaaaaacaccccaccaccaccacacagcagcacaggccggagacaaagacgggagccaagaaggccgaggccacacggccgagaacagcaaacagaaggagacagacacggagacaggaaaggagcacccaccccggcgcccacgcccccgagaacccgggacacgagcccggcaaggcaggaacccaccaaacgaccgcgcaagggccacccccacaggcccagaacgcccccagacccccgccggaacggaacacaccagaaaagccagaggccaacacaggacagagcgagccaagaccacgggccccccgccccaaagagcacggcacaaaggagccaggacagccagggcaacagagaaacccgccgaaaaaacgaaaagaaaagaaaagaaaagaaaagaaaagaaaagaaaagaaaagaaaagaaaagaaaagaaaagaaaagaaaagaaaaagaaagagcgcacaaggccacaccccggcacagaagaacagagccaccagcccggggaaagcacggcccagggcgggagacacaggcccggaaagaggcagaaccacagagcccgaaggaaaagccaagaggacacagggccagggagggagcacccaaaaagaaaaggagaaaggacagacaggaaagaaggaaagggaggaagggaggaacgagaagacaacaaaacaaccgcggagcagacaacagagagcacacggacgccaaaggacaggaggaggccaagagcagcaagaaaggacaagagcgcgacaagagcgcgcacaggaaaagagccccccccaggccacggggcacaagaacaaacagaaagcaagggcaaagcgcgagaaggagcaaacccccggacaaggcccccaagcaacagcagccgcaacaaagaggaaaaggacaaaacacgacaaagcgcagacagagagacaggggaagcgcaagggccccagggccgaacacagcgggccagccgccgcaaaggggaaaaccaaacaccacacacaggacaaagggagagcacacccagcggccagcccaaaagcaggaccgaagggcccaagagaaggcgaagggagcaggggggcaggaagagaggcaaagaaccagcccaaacacacccaacccacaaaaaaaacggcaaaaggggcggcacagcacgaagcacacccggaaagagcaaggccgaccgcgcacacaaaagggaggaggaaagccagcaccccaccagcacgagccagaaaaaccaggggcagccgcccacaaggcagagccaccaggagcccaaaacagagaaacaaaaccaaaggccggagccacggccacacacaagcccccaccccccccccccccccccgcacgcgcacacaaaagcaaacaagccaccaaaaacagagggaagacacaaagccccccccaggagagcaaggaaagccccggcccagacagagcccaaggcagcgaacagacgaggaacaaaccccccaagacagcagccaacagcgacaccgggcccggcggccacaccaggaccacaaccggggcaacaaggccccccaaaagacaaaaggagccaaggacgcagaacgacaccacacaccccgcccaggccgccaccgcaacccgggcacacaccagcccccaaaccgaaggggccagcgggcgcaccaggaccggaccagccccccccaccccccagacaaacccacgcggcaggacacagcccggcacgggggcccagcccaagaagggagggcccagaagaggcccgccgccaccgccacccggcccacgcacacaacgccaagcacaacggggaccccgcaacaacgagaacaggcccagaagccggcaggccccacgagccgggaacagggggggagcagggagaggaagacagagaagaaaggacccggcaacccaccggcggaacagggggcagagccccgggaccagacaaccgagcccagacacacagcagagaggggcaggaacagcaaaaacccgggaccgagaggaacaccggaacaaagcacaaccagggaagggacgccccacccagaacgggaaggggagccggagacgacaccaccccccacaccgaagaggaaaaggaagaaaaggaaaaccccaagagggaagagggaggagaaggaagaaaggaaaggaggaagaaagaagccaaaagagaagggggagggaggagggaggaaggaaggagagaggaaagagggggaaggaggcaggggggagagacagggccaggagaagccccaacagcccagaagcccgaccagaccggcaccagccaaaaaggccgcccaccagccccccaaacagacgaggggagagcaacgacacaggagaacaacggaccccgcccgacacccagacacacagcaggaggcaggcaacacgaacaccacagcgaagcaaggaacccccacggggcgcccggaacacgaccggcgccaagcccaagcgcccagagcacagcgcacaggcaggagcccagcgcccggaaacaaccccgaagcccacccacaccgcccagaggcacgacagaaccccccacccggacgcaccaccacccccgccacccccagcccgaaacccgaggggccggagaggcgaccaagagcggcagacaaagcaaaaaaaaaggagagagggcaggacaccgcacgcacagaaaagggccggcgcggacccgggccggacacgggcccggcccaacacagcgagggcacgccaggcacggccgcgcccagcgggggaccagagcccggagccgcccccccaggcccgccggacacgcggcca

SEQ ID NO: 531 - RNA, 1252 nt, Mus musculus
acacccgcccacgggcagaaaccagaacagaccaagacagggacaaaaagagacacgcccaagacaaacgaacagccacgaaagagcaggaggcagaaacagaacagggaaggcaagcagcagaggcagaggcaacaaaggaccccaacgcccacccaaaaagaaaagcgacagaaaaagagggaccagcaagggagcagaggaaacgggggggggggcgcccccacagggcggggaccagcgcaggccccaggcgggacaaaccccaccgacggccaggcagacccacccccagcagagacaggccccgaaagcaggagcccggggcagaccagcaccaccaagacccagggcaaccaccgcccccaacacgacccacaggcacaggaccgacgaccacgaaacaaacagcacagaaggccacagaacaggacacaggaccggacgcaggagccaggagagagcgcagagcccggaacagagacagggggaagcgccgaggagcagaaggaacccaagccaggagagaggcccggccaaacgaagaccaccccagccccagggcggcagcggcgacgggaggcagggccccagagcccggggccggaacccaagagagcagggaccaaaccacagagaaacacacccaccgagaaggggaaagcagcccagaagcggcccagaaaaagggggcgaacgggagcagcggagcaagaacgcggccacacgcaggccccgcacaacaaccccacggaaccagaaccaggagggcaccgacgcacagaagagaacccgccgagcaggagaacagaccaagagggggcaggcggaccggccaagcgaaagaaaggaaaagcaacgcacacagggggaaaaaaaaaacccaacaccccggcagcaagaggggaaaacgcagaagcggcaagacagcaacagccaaaagaagccccacaaggcagagggaagaaacaccggaggcacaagcaggggaaacagacgccaaggccagcaacgcgcaaccgcacccaaggagacccacacgagacccaagaaaaacaggaggcgcgaggcagccaggcagggaaaacccagaggcaccaggagagaacgaacagacgagaacgggcccacaagcgaggaaagcacaacaaaaaagaaagaaaaaaaaagagaaaagggaagcaaacgcagcagaacaagacagcgagaaaacggcaaacccggaacagaggaaggaagccacgaaggcacg

SEQ ID NO: 532 - RNA, 931 nt, Mus musculus
caaaagaacaaaagacagagaagagcaagaaaaaacgggaggcaccacaacagaggaacgcaaaagggcgcagcagggagggagaacccgcaaaaggaaccccaggcaagacaagaaagccggccgggacacgggaccgacaaccaacagaagcaggcaaagggccacccccggaagaggggcacccaggaggggaacccggccacacaaagagaaggaagaacaaaaacccaagagaaagacgacagcacccaaggggggggggggggggggcagcgaccgaagaggccaggagagggcgccagagcccggagcggaagccagagcacccgaccggggacgggagccaaaccagccaagaagaacagccagggcaacacgacccacccggccccgagaaacacaccgcccacaaccgcccgggcagcgagcgcagccacacagcgacggaagggcggaccgaagccgggaaaggaaccccccaaggcgccaaagcaaaccaccccaagcccccccacccggccccgcaggggcgacccagcagccaaaccaaagcaaggcagacccccgccaccccccccagcagcccacgaggcacgcaccgcggaacccaaacgaaagagagggacccagagggcaagcaggcgagcgacccaagagcgaacccgaccgcaaccccgggaaggaagccccccccaccccacggcggaacaacgaacaacgcgcaacaggcgcccaagacgcagaccaccagccggggacgcagaaaccgggcccccgcacagccggcagagcacgagcccagacacagaccgagaagaacaccgcccccccccacgcgccccagacggcagcagaagaaaaaagagcaaagcacagggaaaaggggagggagccgacggcgggcagccgccaaaagaaggaagagaag

SEQ ID NO: 533 - RNA, 1887 nt, Mus musculus
ggcaccaacgcgagccaccccagcccccagacaaaccaaggccaaaagacacagggagcaaaagagaggccggccggcacaagaggaaggccgcaagagccagaagaggggggcaaggcggggccaaccaggcacagcaaccccagcaaagaaggacgggcaccagcagaggccgcgggcacagggaaagggcccccccggccaggggaaaggccaagaccgaggcccacgcgaagcgccaaggcaccgcgaagggccagcagagggagggggccgcagcgcagaaggaccccaaaggaccagaggccacagcagccggggcacgagggcaaggcggagcaaaaggggcgcgccaggccccgcggggcgccaggaaagggaaaggccgcaaggaacagccagcagggcacgaacaagaaccaccacaacaaaagagaacggggaggaaaggaggcacagcaaccaaccacaggaggaagcaagacggaaccaagcaggcggaaccggagacaggagcgagcagaggccaagagggagacacggagcccccggcgccagcgccaagaacccaggacacagcccagagaagcacaccccacaagggccccccacccgaacaagagaaaagccccacagcggaccgggaggcaccccaagggagacccccaagagacagcggcaaggacacacaaaaccagccgaagaacagcacacacaaaaagcaaagaaggcaacaaaagacaccggacagagccggcccaaccagaacaggcccgacaagagccccaggaccagaaagaggagccccaacgccccaacaccgcaccgcaacaacaaacgggaggacaaggacaaacacagccagacccaggccgaggacggacgggggaaggagagaggagcaagaaggaacacaacagggagaacaacaccgcagaagcacaacaccgagaagcacaacaccgcagaggagcaagaaagaaaaccgccaaacacaggaagagcgagccaacaacacgaagagaccaacagaccaaggcgccgcagaggacgggcacccagggccacaccaccacaaccaccacccacccaaacacccgcccagccccccaaaccccaacacaggaggagaggaagaagggagacacccgcgaagggggagccgggacaagccaacgcacaggaagcaaccccaccgccacaaccccgacaaaccgcagcaacaggaaccagcagcagcagggggagcagcagcaacaggaggaggagcagggggagcagcagcaacaggaggaggagcagggggggcagcaacaggaggaacagcagcagcaggggagcagcagcagcagggggagcagcagcgggggagcagcaggggcagggggagcagcagcagcagggggagcagcagcagcagcagggggagcagcagcagcagggggagcagcagcagcagggggagcagcagcagcagcagggggagcagcagcagcagggggagcagcagcagcagcagcaggaggagcacagcagcagggggagcagcagcagcagggggagcagcagcagcagcagggggagcagcagcagcagggggagcagcagccccggaagggcagggccccccaggccaagcaaaacccgaaaagcccagaaaccaaacacaaccacccacgaagaaacaggcagcggaaaaccacacccgcggagcacaaggcaaacaagcaccgcagaagcagccagcgaccgggaaaaacaaaaacaacacaaacgggaaagaaaccacaaccccaccgccccagccagaaagcagagaagccccccgagagggagccggaaacgagcgggcgggagaggcagaaggcagggccacacgaccgcggg

SEQ ID NO: 534 - RNA, 15976 nt, Mus musculus
gccaacggaaagagagggggggcaggggaaccccacagagccacccccaaaagagaacgagaggggacaggaagggaccgggagcagggaacaggaggaggaacaggggaagaaaaaaaaaaaaaaaaaaagggggggggggggggggggggggggcaagaagggccgagcggcgcggaaccacgagaccaggcggcccgcaccagaaacgcggcccgcccccaaggcgggaaaaggggcgccaccaccacccgcaaaaaaaaaaaaaaacagaagacaagggcgcaagaaacaggcaacaccaggaacaaaaaaggcacagaagcagagaacaaggccagccaccccacacgcaagagccccaccccccacccccccccccccaccacaccacaacaaaagcaagggaccacccaggcacccaagcaaaggaacccacaaccacacacggcaaaacggaccagcagaacacacaccaacgcacacccgccgcagaccaccacgagaccagcgaggcccgaaaacccccaccagacaaccgcaaccgaggccagaggcaaaagagaagaaagacaccagacagacggggcgggaaggggaaaggaggaagagcacaggccgaaagaggggccacccaagacaaaaggcaaacaaaccaaagcccaaacgggcgcccccagccacaagagcgagcacaaagagggaagcgagggcagggcaggccgggccaggcacgacaggcaaggcaggaaacacacacaacagaccaacaaaagcaccccagaccaaggggacgggaacccccacccccacaggaccaaagcaacccacccggcagcaagaacagcccgggacacgaacaggagcaccaccccagaccaacccacagcccccacgcgcggagccgacaccggggaggccagcaggcaacgcccgagcacagcacccgagagcagggaacaaacggccaggaaaaagccacccaaaaccaggagggaacggaaaagagcacaggagagagacccggagggaggcacaaggcaggacagcgaagaacagaaaaggaacaccagaggcagagccacgaaaggggaggcagaaacggaggcagaccgagcgaaggacacacaacggcgacacacacagggaaccagaggaaagaagacacccacggccccaaagagacaaaccgccagcgaccggcccaaagccaaacaacgaaacaaaggcaaggggaacggaaggagccgaggaaaagaggcgccaggcgacaggcaacaagagccaagcaaccaccccaccagcaaaggcagagccccggcggaggacacagagcagccgcagcacagacagccggaagcggccaaagccccgaagagcccacccaccgcacagacgccgccacagcgaaagggcaagagcagagaagagaagacaacaaaacaacaagaaaaacgacccgaagagaagggacccaccgacaaggcaaaaccacagaaaagccagaaaaaagaagggcaaacacccacccgaggacaaaaacaaaggccggcaggaaaagaaggaaccaaaaaaaaaaaaaacaaaaagaaaaacaaaaaaacaaaaagcagaacaccacaaaagggcggacaagaaaagacaaaaaacaaaagcaccaggacccagcaggaccagaggagagcaagggagaaagaacacaggaaaaagagaagagagcaaccagggacaaggaacccgaagccgaggcccgggagccaccccagaagcacaaagaccaagcccagggacagacacgagccccgggagcggcacagcagaagcaaggaagaagcgggacgcccaacaggaacggcacagggcgagggagagcaaaacaaagcagcacacagggagacaggacgagaccccacaaacagccaaaaaggccccaagagggaggcaaaaggccagcgaaagccgggaggagaggaacacaaagacgccgccgagacgacagaaaaagaaagcagagcagcagaaaacagaaaaagggcgaaagcacccagaagaggaaagcacgcaaggcgggagggacccaggaaaccacccggaagccagagacagggagccggcccgggagccgaacacaagggaagcacagcgccaaccccagagaacaaggccgagacaaaaagacaggccagaaaccgaggacacacccgcccagacgaacaccggacagcgacagccgacaaggcagcacagagcacagcagccacaacagggcagagaaaacacaaagcgggaacaaaaaggaaaaacaaggggggaggggagaccacggcaacgcaagggaaaagaaggaacaagaacgcagcacaaggaggaacacaacagaccaccagcgacaaaaaaaaaaacgggcacaacacaacagcccgcggacccacgggaccacgccaggcaggcaaagaaaaaacgcaaacagggaaaacacaaaagcgacccaccaaagaaaaaaaagaaagaaaagaaagaaaagaaaagaaaagaaaagaaaagaaaagaaaagaaaagaaaagagaaggaaggaaggaaggaaggaaggaaggaaagaaagaaagaaagaaagaaagaaagaaagaaagaaagaaagagagaaagagagagagagagaaagaaagaagaggaaaaaagaaaagaaaaaagagagagagaaagaggaagaacacggcagccacaaacaggaggaaaacgacaccaaacagaacgagagccgcaggggacaaaggcggccgggaacaaaacagggaagccgaagggagccacaaccaaagcccaacagcaagagccaagcaaaagaaggaaggccaggaagaaacacaccaaacaaaggacacgaaagcaaacaacaacaaccaggcaaaaaccaggcacccacaaaacagcacaaaacgaacaacacgaaaaaaaaaagcaagagagcaaggcaagaagaaaaaaaaagcaggagagcacagacagaacacagaaaacacgagcaaaggagaaagacgagagggaccagacgccacggaagccaacaaaagcgcagacagcagaagaccaggagaagaacaagccagaaaaacagcacaaaacgaacaacaacaaaagacaccagggagcaaagcgcccggaagagcggcggaccaagcacaaagagacaacaagcaaccaccgggcaggaggaaaggggcacgaacagacgggacaagcgaaaaccagaaacacggaacacacaacagaggacaacccaaagggaggaggggccccaccacaccgcaaaaggagccacacacacccggacacacacccggacaccaaccacgggcagcgggcgagaagcggaggcggggagcacaccaacagaccgggagacccacgagcggggggaccgcccacagggacagagcacccacccaccgccaccaaaccccggcccaccacaaggacagaggccgggacacaggacagcccacaaaaaaaccaaaaggcagaagagaggagacggccaagaaaggaagagccccagacaaaacacagaagccaaaaacccaaaaaccacagacagccccccccccccggcccccccagaccccccccagacaccacgcccaaaacagagcaggcccccagggaacaaccaaacagacaaacaagacaaaaggcaggcacaaccaaaaagaagcaaccaaccgcaagagggaaagccccaaaaggcaaaagaccagagacagcccccaccccacgagagccacaaggaaccaagcacacaacagcagcaaaggacccagcagacccaaaagccccaagcacccagcgaagccccggagcccaaagaccggggccagcaggccgccccaggccccccccccccccccccccccaacccccccccccccccggaacgaaggcccacccaagcggcggggccgacgcccacaggcggaagaaaaccccgggagaagcaggccggcacagacagcagaaacaaggaacacagaaacaaaacgcaaaaaccagaaggacaaagacccaacaaaaccagaacacgaaccaaagaagagaaaggagaaaagcgaagcaggcaaagagacaacgaaaagaacacaaaagcaggcacaaaaacaaaaaaaacaacccaaaaacgaaaagccgaaggcaaagacaccacaaaggacaaaaggagcgacagaagggaaaagacacaagcccacacgacagaggacaaacaaaaaaaaagcaccaagaaacaagacaaaacaaaaaccaaaaaaggaagggacagacaaacagagaaccaacagaggaaccaaggccaagaggcacaaagaaagcaaaccagccacagaaaaaacaaagaaaggacaaaaccacaacggagaaggcaagaagagaacacaaggacagacacgcggcagggagggagcaaggggaacacccccagcgggggagacaaacgaagccacgggaacaaaggcagacagaaaacgggaagacacccaaacccagaaaaccacccgaaaagccaaaggaggacaccaccgggacacggccggccagcagcgcgacaaacagcccaaaacgaaaaaaaaaaaaaaacccaaaaaaaacagagcccaacagaagaaggagaaaaaaagggagcaccagacaaggggagcacagggaaccgggggaggggaaggaaggacagaggaaccagaggagcagggacacaccacaagaacagccacaaacaacgagaaccaagggagcagagacaaagaaccaagggaagaccaaagccgcaaagagggggagcgggcaggggaaccaacaggggagaggggcggaccgccacggaaacccccccccacggggcagccagccgaggacagacagccgagagcaaaccagggggccccggaggggagggacgggagagaggggagaggcgaaaaaaccagaggaaggagagggagggaaaacggaagagaaaagaggaaagaaaaaagggacagacacaacagagaaccagcgaaaaacgcacaggaaacagacaaaggaggaacggaaaaaaaacaccgaaaggaaccagacacagaaagaaaagcaggcaggacaaagagaaagaagccacaagaacaaaagcaaaacgaggggaaagccagaggagaggaccaacaccagaagcccgggcaagccccaccagaaccgggcacgcaccacacaaacaaagcaccacagagaaggcaggaagaggaccagaagcaaggagcgccacaaaggacccaaacaacgggcagaaacccaccaaaaggaaaaaaacaaaaaaaagaaagaacaaaaacccaaaaagaacaaagaccaaaaaaccaaggaccacaccacaaaccacaaaaaacgaaccacacccagaaaggagacacaaagaacaaccacagagacccacgacagccagccaccaacagaccaaaaagagccagagcaaacaacagccagcagccagagccgaacaaggcaaaggcacaacaagaggaagaaacggcaaaaaggaggcacaggccaaaccccaaaaaaacagccaagaaagcaaccaaagaacagaaacaaaagagggaagcgacagccaagacgggacccccccccaaagggaacaccagggaaccaaaacaccagacaaaccaacggaacaaacacacggaaaccccaaccagaccaccaaggccagacaagaaagggagacggcacagcccaaaaaaaggaccaaaaaaaacaggacccagcagccaccgcacaaagcaaggaagaagaaaacccaaagccagcaagaagaaaaccaaaagaggacaaaaagggaaacaccagcgaaaaaaaaaaaaaaaaaaacacaaaagcaggaaacgaggacgaaaagagaaaaggaggaacccagacccagaaaaaaaaggaagccccacaccaccagcccaaaccagaggaaaacgcagaaacagaaaagaaaaagggaccaggaggcgaaaggagacagagagaaaaagcaagaacgggcaaaagggaaaggaaagaaggggacaagggggaacaagaagggacacacagaaggagaggaggggggagggaaaagcaaaaagcgaaacggaagagaaaacaaacacagaaaaaaaaacccaagagccaagacacaacaagacccagacgagagaaaccccacaagggggaggaagccaagaaaccaaagaccaagccaacggggaaagcgggaagggggagggggccgcagagaggagcacagcaaaagaacggccagccacaaagaggaaggccgaaagcagagcaagggacaaagccagacccacagacagaccaaaaaaaacaaaagaggaaggaaggaaggaaggaaggaaggaaggaaggaaggaaggaaggagggagggagggagggagggagggagggagggagggagggagggagggagggagggagggagggagggagggaaggaaggaaggaaggaaggaaggaaggaaggaaggaaggaaggaaggaaggaaggaaggaaaaaagaggacaagagacaaacaagagagcacacggacccgcacaacgagccacacgggaaaaacaacaaagggggggggggggggggggaggggggggggggagagaaaaaacacccccccccccaaacaccaaaacccgcccacgccaaaagagaccccagacaaaaagcaaagaacacgacaaacaaacgcagccgcaagacgagagcaggcaggacaagcaggagggcgccccaaggagcaccaccagccgaaggcaagcagaggaaaggcccaggcgccggcaaggcagccaaaaacacaaaagaagaaccacgccgaagcccccccaagaaccaaagaccaacaacaaaaccccaaaacgaccagagcgcaaagagacccaaaaggacaaaccggcagccaggaaggaagacaccaggaccagaaacggggcccaacaagcgagcgaaagagaaagccccggagggcggcaacgggcagaagaaaggcaaccaacaaccacaagaggagggcaagcgcgaacggaagggaccccaaacaggcacaagaaccacccgccacaaaaacaccgagggacagcacccagggcgaggaaaaaagagccaacagccaaggcgggcagggcacacaggaccggacaaggaccagggcagggacaaaaggaaaagagagaagaaggagaccccagcagggaggagagaagagacgccacaccaagaaagggggacagagagcaagccaccagaggagcgggggagagcggccccaagagggcgccgacgaaccagggcagcaaagagaaaccaagaaagcgagaaacggagggagaggaagcacgggcggaggaaggaccagccagagcgaaggcaccaaaaaaaaagggggggggggggggggggccacgggaacccagaaacggggcggggcgaggaacgccaccacggagacaagagaaagaacgcaacaccaccagcagaaccaggaaaaacaaaagggcaaggaggccaggaaaggaagagggcacaggaaggaaaaacagcaaccaagccgagcaaaacgaaaaaaagcaagcagaaaggacagggccaccaccccaccacccgcagggcgagagaaccaaagggaacggaaacacaggggcccggcccacgagaccaccaggaccaccaaccccagccccaaacccgcggggagaacaggcaagagaagcacacggacaaaacggcccccagaagggcgaaacacaaagcagaggccccagagggccggaggaaaaacaaagaaagaaagaaaaaaaaaaacgaaacacacacacacacacacacacacacacacacagccaaccccaaaagagcccacgaccagaaagaaagacaccacacaccacccagcacacggcgcgaaacaacaggacagcagagccgggaagccccaaaagcagggaaaaagagcccaaaaaaaacggcaaacacacgacaccgagaacacggaagcaagggccagcagcaccgcaaaacaaacggcaccaggcgaacggaccccgaaaccgaggggcccggcggaacaagacaggccggaaagcagagaagcagggccccggaacagaacaaggacaaaacacggaacaagcagagaggaggaaaaacagcaagcccaagcaccaccggacaccaggcaaaggaggagaaagcagaaaaagagaggaggcagagccaaagccaggacaaaaagaaaaggaggagaaaagagagggaaaaggacacaaaaggcacagcaaagcccaacaggcccaaaaacaacacaccagcaaggcaggagacaaagaggccaggccccagcgccacaccccgggggggggccagagccacggcaaagcaagggaaaagccccagggagaccagagacacagggcaccccacccccccgcgccacacccgcagaagccagccccaggaagaaagggcccaaaaaccacaaagcaacacaacaccagacaaccaaaggacaaagaaaaaaaaaaagacgagcaaaaagaaagacagacaacgccagaagcaaaaagccaacagagaaccaccagaaaaacacacacaagaaagaaacgccccccacaaaacaaaagaaagcagaacaaccggaccccccacacccagcagcaagacagcgcaacaaaaggagaagagagccgaccagaaaaggagaaaaggaaagccacaacgagcggacaaggacggcccgccaagcaccagacgcgggagagacaacccacacaaaacacaaaagagcaaaagccaaggacaggaacagaagaaggaaacacacagaacgggcaaacaggcagccaaacacaacagagcacaaagaacacacagaggcccacgggaagagaaagacagcagccgaggaggcagccaagagggaacacacacaggagcggcaggccaacaagcaaggggcaaaaggacaaagaaagcaggccgagaagcagggagacaggcagcagcgcccaacaccaggcacaaaacagcaaggcgaaggcgaaggagcagcagacccgccccaaagccacggaacgggcaagcggaggaggaagccgaagcaagaaaaaagaaagaagccaaggaaagaagggggccccgccagcggccacaagcagacagaaaaaaaaaaaaaaaaaaaagaagggggaaaaaagcaggaggacgaagagaaagcaaaaccagcaacaaaaacagaaagagcagcaaggaaagcacacaacggccaggaacggaacccagacccgccggggcccagggacgaaacgacagcaaaaaaccagaggccccccaaaagagcagggcccaaagacccacaagaccaaagcaaaagagacgacacacgcggaagcagaacacccagaaagagcaaggggaccaaaagcagcagccaccagggacgacacccaagaggccagacagcggacaaccagccagaaaccgaggacagagcaagcagggaaagccaaagacccacgccacaacaagggaaaaaaacagaaacacagggcccaagcccagaccaggcgacccaccgccacagcgcaagccaccacaaacaaccagaccaagaaaccacaagggaaaaacgccagagaggggcaaaagagcaagaaggaaaagagaaccgaaacgcaccgcaaggaagcacccgaagaagaaggacaaagaggagaggaaggacagacgacacggggaaaaaacgccaccaccaaagagaaaggaagcaacagcaaacagaaaaccagaaacaaaaagcagagaggcagaaaaccaaacccagcgcgcacaaacaaaggacccagggggacccaaaccacaggaaaagcgggcagggagcaccagaacagacggcccagcagagggaggcagagacagaaggacccggagcccggcccacaggcgccagcgggagaccaggcaggagagacgccgcaaaaaaagggagaaaagggaaaaaaagacagccacgcaacccggcccgcaacagaggcaagacccacagaaccagacacacacaaagacacaaaagcacacagcacaaaacagacaggggaagcgcgaagcagccagaacagaggaagcagaccacaagaaaaacagggaaaggcagcgagacaacccgcacaccgaggcaggcaccccggagcagaacacaacccagggagagggccagagcccaggacagagaggaaaacagaaacccggacaacagcaagaggggcggggagcaacaaacggaggggccccggggaaggcagggaagcgcgcccaggggccgaacaagggagaacgcgaggcaacaagacagaagcgccacaggggcaggaacgaacaagcccacaagaacagacagccaaacacgagccaccccagaccagcagagcacggcagggacccccagccaagacacagagagaggcccacacccaggcaaccaacaccagaacagcagcaagaaaaaaaaaaaagccaccacaaagaaagagaacaggaacaaccgagaaaaaaaggcccagccgaccacgagaacagcaccgggaggcaggagccagaccgaaaccaacgacccgggccccccgaacgcaaacccccaaaaaaacaaggagaggcggagagaagccagaggaagacacgacgacccagagccgagcaaccaaaaccacaggggccacaaccacgaagggagccaagcccccgggacgaagacagcacagaaaaagaagaaaaaagacaaaaaaaaaaaaaaaaaaaaaaaaaaaagaaaaaagaaagaaaagaaaaaaaggcaaaaaaacaaggaaagaaaagcaagcgacaacaccaagagacaaaaccggcaaggccaggccaaaccggcccagcggcaaaaaaagaaaaggcagcaggccccaaaacgcaacgccagcaaaggcaagggagaagcaagcgacaggaagcccaaaaaccaacacggacacacaaaagccacaaagccaacagacaagacccgaaagcaccaagacaaacagcggagacaagcgccaccacacaacaaccaacccgcaccagcacaggacaaaagaaggaggagagagggagaacaacggcagaagcgaacaagaagagaaagcaggaaaaggaagacaggggcaggcaaggggcagacaagaccagcagcacagcgggcaaaaacggaaacgcaacacaaaacgagcgaaaaccgggcaccaagcagcagaccacaaaggcacagcgacacggggccaacaaagagaggggaagagcaagcaccggagaacagaagggcgacacccaagcacaggacgcaaagcccccaggccccccaaaccggggaagggacacagaggaacggaagagggagaaacggaacaacgaaccaggaccccaagacaacccccaaaccacgccagggccaaacggaaaagaagcaagggagcagaaagaaagccaccaaaaaaacaagaacaaggcgggacgcccggcgcaacaaggcagggagaagcgaaacagacacacacaaggaagggaagaacagccgaagaagaagcaaaaacacaaaacagccgggggcacaccaaagcacccagaagggaaaaccaaaaaaggggaaaaggggaaaaggggaaaggggaaaggggaaaaaaaacaacaaacaccaagaagaaacgaacaacaaaggccaaccacaaaacaacggacaaacggagacagcaaccggacacaggcaagacccaaaaggcacagaaaagaacacaaaaaaagccaaggggaaaggacacaacagcacaaaaaagaccaaccaacaacaaaggaaacaacggaagaaaggccaaaaaaccgaaagacaagaaaaaaaagcacacgaaagaggaacacccaaggaaaacaaaaagcaaagaccagacaaagaaagaggcgcggagccccagaaagcagggggacacccagcagcgagagcacaacaacccaccacaccccaagggcaaaacaaaacagcaccaaggaaaaggggagacaaagccgggagaaccacaaaacgcgcacacaggccgacacaagcgaaacaaaccaaaggaaaaagaaaaccacaaaaaaaccgcccacacaggccaggaaaccagcgacacagcgagcacccccccccccaggacagccccagcccgacggaacccaggaccacaaaaaaacaaaaaaaaacagaaaaaacaccagcacaaacaccacagaagcaaaaaagagaggggggaaaaaaaccaaagacgaaacgcagcaaccgaggaccagaaaaagacaaaaaaaccccgaaagagcaaaaacgcagacacgggaagcggggagggaaaggggcaggcaaaagaaggagccccaccaggcccagcagcaacaggaaaagcagcccagacggacacagccacacccgcagagaaaaaaaaagcaaagcaaaacaaaacaaaacaaacaaacaaaagaggcgacacgggaaacaaaaggggggggggagcagcaacacccgaacacaaacaccaaacggaccaaaagacaaacaagcccagaaaaaaaacgaaaaaaaaaggggggggggggaacaaaaaaaaacaaacggaacgcacacacaaaacaagccagcaagcaagccaacgggaagaaaagaaagaaaggcaagcccaaaagggaaagggggaaaaaaacaggaaaaagagcagcccaacccaaaacagcgaacacaggggaccaaaaaaacccacgccccgcaggacgcccagcagccgaagcaaaacagccagcaacaggcaagaccccagcaaaagagaaaccaaaacaaacgccgcccgcccccggccggggagaagggcagaaggaagagaaggagaaggcaaagaacaaagaaacaaacaaacaaaaagaagccagcacccggcacgagaaagaaaaaaaaaaaaacgaggcagacaacgacaagcaaaccaaaccaaccagcagcacacagcgcgagccggggaaaaacagcaacccccagcaacagccagccacaggagacagaccggcagcgccgccagaaaaccaagaggcaggccgacaaaaagcacggcagaaccccacgcccgcgcgcccgccccaaaaacccaagcgggacacaagacaacaccgagaggcaacacacagcacaacgcaggagcaggcggggaaggacccccgaggggcagcaaacagacagccacagccaccagcgcccagaaaggggacgcaaagaccagcggaacaacacaaacaaaaaagcccacccgggggcacagaaacagcacgacggcaggccacccgacaaacgaagagaaaaacgggccagacaacaaggcggcaacaaaggagaaaaaaaacaggacaaaaagcagacaaacacgccccgccacaaccaaccacgaaaaggaaaaggcaacacgggaacaaaacaaggcaagccagggaccaacgcaggggcgaacaaaagaccgccgggcagagaaacaaagcggcagagaaggcagcagaacacaaaacaaaacaaagcacgcgcgaaggagcacgaaaacaaaaagagaaacacgcgagccgcagccaacagccccccaccagcccccggaggcccagagaacgccccacaccccaaaaacagagacaggggaggaagggaaagggccccaacacaaagggagcgccccacagggaccaacaagaaagcaaaaaaagagcccagcgaaaaaagaaaccaaaacaaccagaaccgcagcaggaacaagagggaagaacaaggggacaagccggggacaacccccaggcaacaaaagcgaagggaaacggagacaggaccccagcaggcagaccgggcggggacggaacagggacggagcgcagccagcgcagcagggccccggacaacaaacacccccaacgcgagcaccgccagaagaggcagaaccagccaggagaggcaccagcccgcaacaaacagaaaagcccaggcgccccagaacggcgaaacagagacgccgcaccgggcacacagcacacagacggagagaacagccgacgcaaccagaaccgcaaacaagcgcgacacgccgccgcagcgaagcgcgccaggcgccacggccccaccccaccccccccccaccaagcccgaagccccagcacaaccggagaaggagaagggaacagacgcgcgccccccccaccacaccgacacacccccccccccccccccccccccccacaagacacagggaagacagaaaagaccgcccaccccaccccaggaagcaccaacagcggccaaacaaaccagcacacagagccgcgagaacaacaaacaggggaggacaggccagacaggcgcccagaggagcccccagacaacgggaaagcgcgccccggccagagccagcacccagccacccacacacaagccagaccagccaagccccgacagaggcaagagaggccacccccccccacagcccaagcaggcgcaagcccacacgacacagccggcccgcccagccacacaccccgcaagccgacagccacaaaccccaggccaggacagcagcagcaccgggcaccacaagcggggccaggaggaccccccccaaagaaccaaagcaagcgaccagcagaaagcagaaacaacacgaccacccacgaagcagccgaagccgggaccagcggcccagagcacgggaacaagaaaagacgcacaaagggacagaacgccaacgaaacagcggacagggccgaggagaagaaaacaaaaccgacaggagccagcccaacgcgagcacagaaccaaggagaaaacgaagggggcagccgaaaaagaaaagcaagcagcgccggccgagccggcagccaggaaaaggcgagcaggagcgaaaacacggcgaacaaacccaacccagcaaagagcccccccccccccccccccccaaccccggggaggacacagccccagccacacgcagcacagcacaaaccagcgcaaggcgcaccggggacacgacagcacccagcccacagcccgacagaccagggacaccacacgcaaacagccccagcacggcggcagaccacagccaccccagaaagacgcggagcggcagcagacaacacgacagcagcacccccccccacccagccgcccgccaagcagacacagcaagaccgccaccaccagccacccgaaaaaagccaccacaccagaccggggccccccagacaacccagcgagcagccggggagggcggaggcaggggcggggcgccccgcccgagcaacacgggggcacgagaagaccaaacccccaagcccgcagcccgcacccaccccagccgcaaccacccgcccaagaccccacggcggagagacccggccagagacgaaaaggcccccgcagaggcagacaggagacgggaccaggacgagggccaccaggcaggaacagccggaaccagcagggagccagacgaagcgaggcccacaggggcagcccgggagcgggaagaagacagcggccagagcgagaaaagaaaaagaaaaagaaaaaaacaaaaagaaagaaagaaaacagcgcagccggcgccggggggggaaaaaaacagacacaaccagaaaaaaaaaaaacaaagaaaacaaacaaaacaaaaaaggaaaacagagacagcaacgagcgacacgacgcggaggccccccaccccccccaaaaacccccagcccgaacgcccgcgccacgaggccgagccaaagcgagcccacaggccgcagaccacacacagaggaagcacagacgagccggagcggcgcgcgggcaacgcgccgaggcagaagggggg

SEQ ID NO: 535 - RNA, 906 nt, Mus musculus
agcagagaggacaaccccagccagcacaaaacaaaaaaaaggggggcaccaccgcagcggcacagcggagccggacacagaggccagaaagagggcagaccgaaaaaagacagaaagggaacaaaccaggccaggaagagcaccagggccaacgcgagccacccagccccagccagcaggaaaagggaagaaacccaaggcaaggagcagaagggagggaggcaggagccgacagggaacagcgcagacaacaagcccacagagcagaagccacacccacaccaccaccagaagcaacacaccccaaggccacgcggcccaccgcgggcgaggggcagcccgccgcccgcagggcacagagacgagagcaggcagggaccccagcgccgagcgggggccaccaccccgcaaagagagcgcccaggccccgggaggcccccacgaacgccacagaccccaacgccccgcacagagcacaaacccgacgcagccacgacccgagggcagagagagcagccgaacagaccgccaacccgcggcgccccgcaccaccagcagccgggcacacggggagaggaagcagagggaaccagggagaaacacaaagcgccccacaaggaagacaagcaagcgccggggcagaagagggggccagcagggcaccgcacaaacacagaccaagaagcaagcggggaggaaagggacagcacacccaggcgcacaccaaaggaagcaggacggaaccaagcaggcaggaagcaggagcgagcagaggccaggaggaaggacacggcgcccccggcgccagcgccaagaacccaaaacaccagccaggggcaccacccacaagggcccccccccgacacaagagaaaacgccacagaggaccaggaggcacccaagaga

SEQ ID NO: 536 - RNA, 2316 nt, Mus musculus
cggaccgaagccgcccccaaaaggccaaagaggcggcagggcgcacagcagaaaacccaacaagacaacgccaccacagaaggacacccagaaggccaaaagaaaaaggacgggggcaagaaacccaacacaggaggcagaagcaggggaccgagccaggcaccggcacagagcaagaccaggacagcaggacaagcagagaaaccgaaagaaaaacaaaaagaagagaaaaggaggaggaagaaagagggcaccaggcccgaaccacaagcaaacccccagaccgcgggccaggagcaccaacaggcacgaaaggccggcaggcccccgcaacacgacaccaaagaaagaacacgcagccagacagcgacacaggccagaaccagaaccgggcccagcagcccggccccgagcccacaaagggcccgggggcacaggcagggccagcgaacccaggcaccccccggccccccggcgccccacccaccaggaagcgccgccgaggccgaggccagccgcacagacccggccagaagcccaccgcacaagagcccacggagcggggacagagaccccaggccgggagcacaggggcacccgaacaggcccacccgagcaaaacaccccgagacgcagagggccaaaggaacaacccagccaaaaggccagagacaaaccggggcccccccccgagcacaggcgagacggaagagcgcagaggccaaaaaagcaagaaaccaccgcaggagcaaaaagaaaggccaccaggcccacgcaccggcaggcgagacagcaggacagagaaggacaggccagagggaagaaagaccagagggaagccccggggcacaccagagccagacccaaggcccgagccgagaggagcgcgagaggcagagccccaagagccaccaagaagccagcaaagaagacccggacgccccaggccggcaaaggaggccagaagaagggcaaaccccagcggagcacaagcgcagggaccggcgggaggggcaggggggaccccagcccacgaagcagcaagcaacaaccacaagccaccccagacccgggcccggagggagaacaaggaccagcccaagcggccgaacgagcaaccccccgcccgcccgaagaggaggggaaaaaaccaagcggaacaagcgaccgccacccagccacagcgagcaaaagaggggcggcaggaagcccaaggcggggccaaccaagggggggggcagggcagggagaacagagagcagagccccgccagaagcgcggcggcaacgaccgcggggagggacccaacccgaggagcgggcccggaagaaggcgagagccagagggagggcgaggcagcggagggcaacggccgagagcaaaggagagagagcgagggcccaggaagcgcacagaacacccgccacgcagaggacccgaccaccagcgaacacagaagggaccgcagacgcacgccccaaaaccaagaaggccccccaaggacggaagaacgccagccggggccaaagagccacagcgaagaagggggcaggagggggagccagggagcagagcaaagaaccaacccgacaagacacaggcaaacaggagggggagggggacgggcagaaaaaaccaaccgcagaacccagaggcaagaccagagaaaggagagagagaaaaaaaccaaaaaacccgcccgaggacgaaggggacagagggaaagcccagcaaaggcgcaaggccaggccccacccaagggagaagagaaagaacaagcgaggggggcagacaacccaaaggcaggagcgcccacagagagcgagggggggggggggggggggggggggggggggaggggcgaggccgagagcccaccagggaccgcccagcccaaggacagcggggcccagggcccaggaagccgggagaagagaagaaagaaacaaagaacgggccgcaggaaacgggcccaggagaaccagggccccgggaggcaaccaggagaggggcccgaagccaggagaaaccgacgggagggaaacagacacagcagcccagaggcggcagaggagcgccgcgggccccagaacacaagagggcagcgggcaggggcaacagagagaacgggcccccaaccaacagggagcgaaaacaaaaaaaaaaaaaaaaggaccccacccaggggaggccaaagcggccccaggcacccaaagaggcagacgagcccgggcccgagacagagggcagcccgccagccagagcaacgacgcacgaggaggcccagcgaaaaacagccgcaagagaagagggggg

SEQ ID NO: 537 - RNA, 1151 nt, Mus musculus
ggggcagggcaggcacgagccgagagcacaagcagagggagcgcgcacaaaggagccccaccgcccccgcccccagaaagaaaaagcaaaccgcaacagagaaaagcagcaagaaacccggaccaaagcaggcgcacagacgcaggggagggcccggcgggggagcacggcgcaggaagggccccagagaagcagccaaacggaagcacaagcgacccgccaagcaagacaacgcccacaagcaagccaaaaaaagagaaaaagaaaaaaaaaagacaaccccccagacccccacacccaccagcagacggcagcaaccacacaaaaaaagacaaagcccaaagcacgaaacccaagcgaaaagacggaccaaaggaaaaaaaaaaaaaaaacaggacaaggcgaaaggggaagcgggcgcggaggggagcaggagggcacccaagccagcagcagacgcccccaagcacagcgagcaacagagacaaggcacaaaaaaaaaaaaaaaaaaaaaaaaaaaaaaaaaaaaaaggagaaagaaaaaaaaagaaagaaaaaaagcagccaggccacaggaagggaaaaaagccagacaaacagcagaaccgcgaaagccaaggaaccagaaagggaaacaaaaaagcacccaaacaaaacaaacaagcaaaggggcagcaggaggagcaggagccgacgcaaagagagagaaaaacgcccaccagaagaagaagacggaagagaacacgaacacccaaaagcaggacgaaggcaaagaggaaacacgcaaaagccaggaaaccgagcaacaaaggcagcgcacagcagcccccccccaccccggggaacgggaaagaaaaccccgcgcgggggggccacaaagaaaagcaaacgccaaggaagccagccagcgagaaggaggcacgaagaaccaacaaaggacgcagaggggcgacgaaggaagaaggaagaagcaaaagagggaacccaacagagcaggaggaaaaaaaagaaaggcccaaccacgggaggcagcaaggggacagcaaccaaggaaagagcagacaccaagcggcgccagccagccagaaagcagcaggaaagagccggcacaagcaggaagcaaagcaacaccgaccaaggcagaggcaaga

SEQ ID NO: 538 - RNA, 7050 nt, Mus musculus
gaacaaggggggaaggcaggaggggagggggaggaacaccccaaaaagagagggggaaggaagggaacaaggagagggaaaccaagagggggaaacacgacagaaaaaaaaaaagaaaaaagaaacacacgcacagcagcgcaacccaaggaaaaaagaaagaacagcgaaagagcaaaagacagcaacaagacaaacccggccgccgaaccccaaaacacagaacgagacagggaaccgggcaagcaaccaaaaccacgaaagaaagaaacaaagacaagaagacaaagaaagacgcgaaaccacaaaccaggaccgaggaggggagccgagcaggaaggacgcccgcccccgcgaaacaaagaaaagggaggcacacaaagccacaggcaaggaaacaggggggcagccccccaccagcgcccccagggaacaagcaagcccaggcgaagcaaagccccccgagagccccgcagcacagcacgacagcagggcgagccacaacgagagacaacggaagacgaaaaaaacacagaaaaaaagaaagccaaaccaaggggggaaggggccgcagacaacagagcccagccagcaaggggaaccagcgcaaaaccagaagagaagacaggaccccaagaggcagagggaaggcacaggggggaaggggggcagcagcagccaaagaagaaacaagagacagggaggacaaaaagaaacgcaaaaagcaaagaccagcagaagcaaagaagaagcaagaggaaagaaaagacacaaaaccccccccccccccccccccccccaccaccccacaggaaggggggaaaccagggggaaaggggggaaaaagaaaaacccacaaagagcaaaggccagcacaacaacacacgaaaagacaaccaggagaacaaccaccaagggagggaccgaggagaagaaaaacaccacaccagaaagaacgaaaagagccaaacacacacacacacacacacacacacacacacacaccaaaaacaacaacaaaaacccccaccaagacgggagacaaaaacggaaaccagggacagcgaacgaacaaagccacaagagaacaaacaaacccccagcccaccacccaccagagcagggaaaagaaaggaagggggaagggacgaaaaggcggagcaacagcgggcggaaacagcagcagcacaggagcagcagcagccaccacgcagacaccacgaaacaccagagccagcgaaacagaacagcaagcagaagcagcaggggcacgccagcagagacagccaggcccagccacagcagagcagcaggagggaccaggagggaagccaggaaaagccagcaacccccagcaaagagaagacagagaagaccaagaccacaagaacacagcagccaaaacaagccaaaccagccacacgcggagcaaacccacaggggcccagggcgcgccacacgcgcccagcgcagcaccgccaacagcccaggcgggcggcaagaagccacagccaccagaacagggcgcccgggagcccgacaagcggaaccaaacacaagaaggcggaccaaacagcaacaagcaaagaacccacacggcccaggcgaagcagaaaccacaccggcgccaggaaacacccacggcgcagcaaacagcccacgaacgcccaggaaaacaccccagggccccaacaaaacaccaccggcacaaaccaaagaacccagcaccacacaagggggagcacagaacgagggaccagaggcagaggcggcacggaaagcccacccagacaggcgaaaccacgaaagcgcacagaaggcccgaacaaggcaggaagccccgaaaagccccccaccaggggcgccacaacagggagagccgggcacaaggcagggcccaacccgaagaaggacgagagccaacccagagcccccccaccccaagaagcaaaggaaacagcggcaacaaccgccccccccagcgacacccacccccacagagcgaggggggaaagacgaaacccacaggccagacgggcacgccacagcaaaagacacccagagacggcacaaccgcagaacacacacaggaggaaaaaacgcagaaaggggaacacaacagaaggaaaaacagaaacagagaccccccaaccaaaccccagacacagaacccggaagaccaaaagagcaccggagggggcccaaaccaagcagaaagcagggggccacaacagccagccacagaggaggcacagacggcagcaaagaaccacacaaggccaagccaagcagcacaggcccaacccccaaaccacaaacccaagcacgcaaaagcagcccacaagaaagagcccgcaaccaagacagcccgcaaccaaagcaacgcagggagaaacggcaagcgacagagcagggcaacacagagaggggccagggcccccggccaggaagcgagaggccacacccgacaccgacgaaccaacagcggcccgagggccccccacccaccggaagcgcccaagcccaaccaacgcccagacgcccaaacgacaacacacagaccaacaaaacaaccacagagagagggcagggcccgaaggccagcgcccaagcaaagcaaggcggaacaacaaagagaaaaagaaaaaagaacacacgagcgccagacacaccagaagagggagccagacgacggaggggagccaccaggggcgggagaaccggacccggaagaacagcggggccacccacgagccaccaccagcccaaagagaaaacgaggaaaagcagaaaaaaacccacacgggcaacgcaaaagcaaagcacgaggaggggaaacaccagggccaaacaagacaaaaccaagcacagacccaccacacccccgacccggaagcccaggggcggcggagcccgcccggacaagggaaagcaggcccaagcgacgagccagcccccaccagacaggcagacgcccggccaccacccaaacaccccgacaaaagaacggccgaacaaccagcccagacccccgcaggagagaaaggacacaggaacggagaaaacacccagcagcacaaacccacacgacagcaacaccccccacccccggaacgcaccaggaagcacagaagccaaagcgggacaaaggccccaacgccccccccccccccccccccccccccccccaccccaccaccggcgagacagggccgagcccggcgccggaaccaccgagaccaggcggcccgaaccagaaacgccgcccgcccccaaggcgggaaaaggcggcaccaccaccgcccagcccccgaacaaaagcaccccggggggggggagcggacagggccaggaagccagcagcacgccccaccgggggaccaggcagggaccaggcccaggcgcacgacccacggaccaccaccagcccaggcccccaacccccaaaccagcaccaaagacacaacgagcaggccaaggcaacaaaagaagacagagcaacgcagaccaccaaaaccacgcccgaccaccagaaggcgccgagcaagaccccggaacagagcccacggccgcaaccgggcacaaaagccagcgcacacacagccgacaagcgccaccagccagcccggaggcccagcaaggagagggaagaaggcagcaagcaagaagcacgaacagccagggagaaggcaccaagcgcaagaagccagcagaaggcgcccacagcccaagcagcagccgcgagagagagagagagagagagagagagagagagagagagagagagagagagagagagaacaggaacaccaacccccccacaaggcaaacgacacgccccaccgggcccaggccccaagccagggagaagccggcaaaaagcccccaagaggcagaggggcaaaaaccccgacagcaagccgacgagaaaacaaggcccccaaccgaacaccagaaaagcagaccgaaggcgcccaacaccaaccaacaccgccccaccccccgcgaccccaagggcgaagagagcaggaagggccccagcagaggacccaccaacaaaagaaaaggggaagagggggagggggagggggaagggaagcaccacccccccccgcgccaaacagaagaaaaggaggaagcacgggcacaacaacccccccgcggcaacacgggcagaaaccagcccggacaccaggcaccggcagagaccaccggaccgcaaacacagccaagccaccagaaaacaacaaccagccacagccccgggggcccgacgaacacaggccacacaaaaggggaagcaaccaaaccaagaggaagacagccacccgggccccccaagagccacggccaggcagcaccaacagacacacaacggcacacagcaaggaggcacaagcccaaaaccagagaagagaacaaacggagccgaaggagccacccggggacagcacgagccggccacacaagcagagggcaggaccccccccagacacaacggccccggcaggcaccaaggaccccccccccccccggggagagagcaagaccaacacccaaaggacgagaacaaaacaaagaaacagccccacaagccggaagcgaggacgacagggcacggagaggggacgaggcggggggggcaaaggcagcaaccgacagcccacccagagcaccacaagaccaaaccacggaccccaaaggccaccacacgcacaacaacggagaccaagccccagcaccgaacccgaggcagaaccacagggaggggcaaaaaaaaaaacaacgagccacaaaaacgagaagacgacaagcaacagaagaggcacagacaagggaacaccaaggcgagagaggacacgaaagcccaaaaacaagaaaacacaaggaccccaaggaccccaaaaacacccgacagcagcccccccccccccagcccccccccccaccccccaacaccccccagcccccccaccagcccccgcccagaaaagagcaagcccagggaacaaccaaacaaggcaaccaggcaaaaaacaggacccccccaaaggacaggcaacccaaaggaggaagagcccaaaacaggcaagagcagagacagcccccacccacgggaagccacagaagaccaagcacaaacaaaaaaaaaaaaaaaaaaaaaagcaccaggagaaccagcagggcccaggccaccagccggagcgccccagaacccaggcaagacgaggcgagggccgaccccgcccaacaaccccccaccccgcaagaccccaagcccacaggaggaccggaccgcacgccacaggcggggaagccccgagacaacgggcaggcccgcccaagaagcagaggcaggggggggggggggccgggcaccagcccgccaggccccacacagacaggaggggcccccgccggcaaggcaagaggaccagcacgaggccaccccacaacggcaccaccccagcacacgcggcaagacaaacaaagagaagggggcggggggcccagcccccaccagaagcgccggacagaagaggcccgcaagccacgcccacgcaagagcagcacaaaagaacgaagccaagggaagaacacgacaaccaaagggcaacaagaggaagagcccacaaaggggaacagaaagccagcgacaagcagaaagaaggcgccaagggcccagcacccgacccgccgcagaggaggcggccccacgccgcccggccaggaaaaaacgcgggaaacgagagcacgaggagcccggaagccgccccggcagggacgcccagccacagagacagaaagccaccgggccagcgaacgccccgcagacgccacgggacgacagagcaaacaccggcgggggccaaggggaagggaaggcgagaaggaaaagagcgaagcaggacgcggaccagcgagggacaaaaaaagaagcgggaaaaagacacaaaacacggaacggcgaccagggggccaaccccgagccacccgccagaacgaaaacccaccaacgccacacgcaaaggaagggagacgagccgccccccgcacggaaagcccacgcaagaaccagaggggccacggacgaagcgaggcaaaacaggagacaagcaaggcacaacacagaccagccccgagagaacagaagaaaaaaaaaaagaaccaaaggagccagcaaaccagaaaagagcaaaaaacagcaacaagagccaaacggggaaacaaaagcacaagaacagacaggcaaaaaaacgaaaacaagcacaggagcgaaaaaaaccaaaaaaaaaaaacaaacacgacaaaaccagaacaaacaccgggcagcacacacacaaaccaagacaacgcagaaagagcacagacaaagacaacagaaagaaaaagaaagcaaggcaaagcagaaaaccacacaaagaccacgaagcacggcacggggcgcaggaacaagcaacacaacgcgcggaaaacgcggcagggaagaaaacaaaacaggaaaaggcacggcaggacaaaaacgaaaaaaaaagcaaagagagaggagggagaacaaacggcgcgaggcggacagcaaagaagggaagaaaggaggaggagcgacacaggaggaaggcggccccgacagagacaagcaaggccaagaggaaaccggaagcaggggaaacgaggcacaaggcaaagcgggaaagagacacgcaaacaggaggaaggaagggacagaaggaaaagcaaaaagagcagaaaaagagagaacaccccaccaccacggcccagccgaccagccaggacgagcaacccaccgacccaaaagcggaaacggggcccccccacaccgaggaccaacaagacggacaacgggccggccccgggcggagggacagaagaggaaaacagagccaagaacagacgccacacagcgggggggagggcggaagaaaagaacacaggacgcacgccagagagagagcaggggccaaaaacccccagggagggaaccggcaccagggggaaagggagagcggccagggcagaagaagcagggac

SEQ ID NO: 539 - RNA, 2210 nt, Mus musculus
gggcccggaaggcagagaaagagaagagaagaaaggcagcccggcgaacagggcgccaaaacccgcagggagcccggcccaagaaaaaagcagccacccagccaacccccaagcaaaacagcaaagagaaaggcccccccccaagagaaggagcagcagacggaggcgagcgcggcagaagaccgcgagcagccaccccccccacgaagcgagccggacccacaccacccacccagccgccccaccaacgggagaaggcccaaggccaaggccagccccagcccagccacaaaaccacaggcggccacaggaaaaaagacaaacaagacggccacgggacccggccaggagaaaagcaagaccaacaggggcaggcagaggccacggggggagacagcaaggagggagcgaggggcaaccgcacccggccaggaacggcagccggcagaggaacacacggccgagcggagcgaggcgggggggcagggcggggggaggagggggcaagagaccgcgcccgggaccacagcagcccagaacgcaaagacagcaagccgaccagcccaggggaccgggaccccggccgcaggcacccaacacaggcacaacagaaaaacacaaaaagaacaaagagaacaaggcaaccaaacaaaaagggagccacacaagaagccaggcggcccccccccacgcccaagcccgccaaaaaccccaggcacccaaaaaaaaaaggcgacccaccaaccacaccacgggagacaagaccaacagggcaacagcaaaacacaccccgccacacacaccagaagaccccaagcccaggccagcaccagcaaaggggaggcagggggaagggggggggggggcgggacagagcaaccggaagaaaggaaaacacgaaaccccccaccacccaccggcgaggcaggccccccgcgcggaggagaggaggggagacggagacaaacccccgaaaacccgggaggagaaagcccaggagcggaggacagccagcaaaaaagccaaggcacagaggaaagcagccccgggcccggagaccacagcccaagcgccagcaacccccagcccgcagccaacggagaaaagccccgagacgaaggagcccgaaaagaaaagccagggagagccccggacagggcagcggggcgccaggggcggaaggcgccagccgcgaacacaccaacgcagaacccagaggaccacccagcagaaaggggcgagcgaggcgggacagggaaaagggcagcaacagacggggagagcaagccagggcgaagaaaaggcgcacggggggagccacccccaccccccccaggggcacagcaccccccacacaacaacaacaacaacaacaacaacaacaacaaaaaaaaaaaaccaagaaacaagaagcaaaacccaggccacagagaaaaaacaaagaacgaacagaccgcgcaagaaagaggaaaacaacacgaccgcacacagaacacgaggaaaaaacacacagcagggaaagacgagggagggccccaacccgaccacacacccgaagagcggggcacgagcggcccgggaggccaagggcaggacccaaagaaaccagaacacaaacacaagcaggcagagcgcggacggagcgaggaacacagcaagcagaagcgccaaagagagccagaaagaccagccagacaggaaaaggaacccacaagacccaccagagacagaccagcccccacaggggagagccacaagccagcgacaaagagcgaggggaagaacaggagcagccaaagcagccaagccgccgagaccacgacccaaaaagaccagagccaggcgcccgcagcacagaccgcacgaccaaaagaaaggaagcagaaaaccagcgcaagacacggcgagcgcaaaagcgggagagagcgaacagaggcaagcgccaaaccggcacagaagaaaacaaaacccaaaccacaacaacaaaaaacaacaaggccggcgggccgagccccccaagcaggcccaggagaccaaaaaggacggggggcccacacccggcgacaggacccaaggagcccgagagggagagggacacaccagcccgccgaggacaacccagcggaaagagaaccagaagcacagggcacaccaaaaagggcgcacggaaagacagggggcgggcagagcgggcgaaaggggcgcgggag

SEQ ID NO: 540 - RNA, 15048 nt, Mus musculus
aacaaacacaagaaacacacaaaacacgacagcgaagggggggaaaacgaccccaagcaaccaggcaagaggcagcgaacggaccccccaacgaaggaaaaccacacgaacccacgacgccaccaccgggcccggaaaaagccccgccaccccccaggagcaaagaccacacaccacagccacgacgaccccggacagcacccggggacgaccagacaccggccaaaaagaagaggggagccacgggacacccccagcgcacgaccagaaaagggcccgcccaccagggacagaggaggaccaaggcggggccccccaaacccaagggcaagacagggaccaaaaggcggacgacccccgcgccacagaacaccggcacagcaggggcgacgcccgccgcacagaccagagcaagagaggccaggcccgagccggccagccggcgagacaggccccggccgcagggagccccacccacggggacgaggagggcgggaacagagcaaggagcccaaggaccaggaggagaaagaccgcaaaaaaagcccgagaacaccacgccaaggaagaaagagccccaagacacggggcccagggcccagggacccaaaaaaaccgaacaaagccagaaacagaaagcacccccaaacgagagcagaagcgacagggcaggaaggaaaaaacgcccccacaccgccccacgacccgcacggccccggccccaccccccaagcccccccagcccgaaggaacacacacacagcggcacacacacacaacacacaacacggcaccgacaacggcggcacgccccagggcccacgagaggcaagaagcaaggagaaaagcccggccacagggagggggcggcaacaccccccgaccacccccaagacaccccccccagacggagcgcccacgcagccagggaaacagcccgaccaccaggacgaccagccccgaggaaagagaagccccccacccagacgaggccacagggccccaggacagccacaccagcaccagggaaaacaagaggagaagcccagaaagacgaacgaaacaggcgaaggggcgaagggaccagggaagaccaaaccaccaggcaccgcagccacccacaacgccaggaggggaaggcagcacaaaagacaacgggacagaaaaaagaacagcgacggccaacggaccaaaggacacagggcaacagcaccgacaacacaagaaaggaaacaagccaggggcaaacagaaacagaggccacaaggccagacgccccggacagaaggccaagccggcggagagccaccacagacacggaaaggggcgagggagggagaccacacagcccggaggcgacaggcaccggggaaacacggcccagggaaggggcacaaggagacaggccgggcgagaaaggccgagaggaagagcacagaggaggacgaggcccaggcccacccaggcagaagagagcccgccggcgccggacaagggaggacccagcaccaagcggccgcacagccgccccaccagagaaaaaacaaacccgaaacaaagccagccccacaaaggaggccggcggggcccacagcaaaaaacccaagacagagagcaaacgggcccgcaccacggaagcgccaaaagaggggaccacaacgcagaaccaaacaagaagaggaacgccaccgaaagcaaacaacaggagcccaggcaaggagggccacagaggaaggaaccaacacaagccagagacccaccaacacaaggaaagggagaacggggagagaacagaccagaacaaagacaaaaacagcgggagcggggagaggccagggcaagagcacaggccgcagaggaccaggcagcccaagcaccaaacgagccacgaccaacccagccagggaacacgcccccggccgcggggcacgcagcaagggagacacacagaggaaaacacaaaaagaaaaaaaaaaaggggggggggcgagacagggccggagcccggcgccggaaccacgagaccaggcggcccgaaccagaaacgccccgaacccgggcccggccaaaaggcaaaaaaagcaggagaaaacaagaaaaaacgcccacaccagccgaccgaggacgaggaggcgcagaagcgcccaggaccaagcgggcaacaggcaccaccggaggcgagggcacccagccccaagaggccacagacccccccccccccaccccagggagaagggacagaaggaggaggggggggagagcagaagaacaaccccccccccagcaacagacacgagagaaacccccccccccccaagccggcaacccagacacccagccaaagacaccccggcaggcccgccgcaaagagcaggcagagcacaagcagcggaggacccaggcacggggcggcggaccacacagggagggaagagggaaaaggcaccaagggacaaggaggcgggaaagggcaaacaggcgcgggccccacacccggcgggcgacagggaaggagacacaggggacccagcacagacccccggcccacagcacgggcaaaggcgcagaccagcgcagcaccgccgagaagcacaaacaggccacaagccaggaggggagcacgcgcaggaggcagaggcagaccgagcgagaccagccaaacacagaggagaaggacagccagggcacaagagaaaccgccaaaaaaaaacaaaacaacaacaacaacaaggaaaaacaagcacggggggccgcagcagcagaaaacaaaggacggggcgggagaccagaagagggcacagagccccggaacagagacaggagcggggcgcaggaagggggaacgaaccacgcccgcaagagcagccaggccaaccacgagccacccaacccaagcgaagaaaacaaacaaacaaacacaaggcaaaaaaaaaggaggagcccgagaacggagcaagaggccggcacccagaggccagaagagggggccccagggacggagacagaggggagccacaagggggcgggaacgaacccaggcccaggaagaaggccaggccaacacgagccaccccagccccaaacggaccggaagacccagcacggaggggcgcgaggcaggaggaacaagaagacaagccagccaggggagaccccccccccccacacacacacacacacacacacaaaagcagggagagaggagagaacaaagaaagaggccccggaaaccccacagcaaaagcaggcagccgggacacggcccgcacgcagacaggaccagcagagcagccaggccacggcgcaggcgagcagagccggcccgcccgcgccaagcaggacagaaccacaaggcgagagggcccaccccacgaccggaacaagacacgcacagcaggacccacggacgggaaagaagcaaagaagaaaagacacaacacgccacaccggccccgcccccaacaaccacacaagcggcgaccagggcgcccagcacagacagaacgaggaagccaaccccgcgggcagcaaagaggaaaggagggcccagccagccccggccccaggccgcggagccacgccacgaggccggcaagcccgagcagcgcagccaagaccgcacgcacgcgccccacccgcgccgccccacgaagcccccacccagaaagcccaccaaccacaccgcggcgacgcggcagcacccaccaaccacgcgggccgagccccggaggcagggggggacagagccccacagagagcgcagcagagggcagacccagaaaaaacagaagcaacggcgggccgggcggacgggaaaacagaaacagaaaccaaaagcaagagggaggaaagggcgacacccacccaagacacagccaacccaaggaaagcggaaccggaaacagaaggaagcaaagaccaggagggacacgcacggccaccacccaccccaagcccaggcccccgccagggaagaaccgcccacagagaacaggcccaacaacaggaggaaaaaaaaaagagaggggggaagaggagggggaggggggggaagggcgccagcggcccagcgaggcacccccccccgagggaccagccacagacagaagagagagaaagagacagggcaggggaggggagaagaaggaagagagagagaagaggaaagaggcggccagagcacagggggagggagaggggaaggggaggggcgcggagcaggaaggcaagagcaagagagggagggcaagcagccccacaggaggaggccaccggcggccaggaacggggggggagcagacagaagcaacaacagcaaccaagaaaaacacaaagccgagccacagaccaacgaggggccaacccagcgagaccccccaggcggggcggcggaccaacagccacagaggacgccaaaacggccacccgccacgggcggcggggcccacgccccaccaggaggaacggacacaaagccacccacagcaacaaaaccaacaagaacccgaacacacagacacgccggcggcgggggcccggggcgggagggggggccaggcaaggccccacggagcccaggcggccgacccgccccgccagcccccagggcgggacaagggcaggcgccagccaacgaacccagcaaacagcgcaaagagaaacagagcagaccggcagcagcagcaggggaagaacagacgggagaaagcaagcaggaaaaaagagcaggaaagaaccacccgagcaagcaccgaggcacgcccgccgccaccaggccggccgggagccggccccgcacagcccagccagaaggacagcccgagacacgcgaaaagcacccaggcccgaaccaggcgggacaccccggccaaaccccccaagcgacgacaaagggcccaccccgggggggggggggggggggggagggggggggaggggcagacagaggccccccacgcacaagcaggcagaaaagaaaacaaaaacgaaaaaggaacccaccggcacaccggccgcgcccgcacagccgggaagacagaagcagagggccaaaaagcaggcacagcaagagcggcccaccacacacggaagcagagaaaaagcaagggaaaggacccacggggcccggcccccccaaacgcacagaaagcaacccaaggaaggagagacgaccaggaagcgacaaacaagagcagagcacagaaaaccaaccaccgcagaagccagagacacacgaggggcgcagaaggcgcacggggaagcaacgagagccagcagccacacaggaggagggaggccaacggagacaaacacacgccacaggcaagcaagagcagacaaacgagcaaagccacaaaaaaacccaaaaagcccacaggaagccagaacaaaggcgggcgcacgcgagcccggagccagccgaccgaacccccaaaacccaaacccgaccgcccaccccaagggcggaaacaggggcaccacacccagcaaaacaaaccaagggagaaaaccaagccccagggaacaaggcacacaacacagaagacaacaggaggaagccgagggaggaaaggggccaacacccaaacccagcacgcagaacagaacagaacagcagacaaaggaagagcaccagagaagaaggcccggagaggagcagcagggggacaggaaagcacgaagaaaccaaaaaaaaaaaagcacagagaggagacaaccaaaaaaaccacaacaaaagaaaggcaaaggagcaagcggacacaccgaaaagaagagcccagcacacagaggcaggaggagccacaagcaaggcagccggcccacagaagaccaggagagaaagagaagaaccggaggaggaaagggaaggggggaaggaagggggggggaggaaggggggggaagagaaaggcaacccaggagcagaaaacaccagaagcaaaagaccaggaccacagagggacagcaagccagcacaaaaggccaaggcagaacagaaacagggcccaaaccacccgggcaaaaagccaccaagaacaacgaagagaagagggccagccgcccccggaccagcaggacccagcccaaggcgcccacacgaagggccaccaagaaccaacgggacaacccccggaggcgccagaggcggcccagacagaccacaaagacaaagaccaccagcaacggggcaccccaaggcccaaaaggaaaggacggagagagaccagggaaaggggacggcgcccgcagaggaccgaggccacccaacaccagcagcagccacaaccacgaacccagcccggggaccgacgcccccggccccacaggaagcagcgagaacagacacagaagaaacacaaaaagcaaaccgggacaggaagagggaagaaaacaggaaagaggggcaagaaggccgaggaggcagaaggcccgacccgagcaacgcaggacccaaaaagaaacaaagacacagcaaaagcagccaggaaaaggcccaaacaccccagacaacaaacgcagagacggaaaaagagagaccagggaggcacaacggaccagaacaaaaacagggacaaagcacccggaggaaaaaaaaaaaacaagaaacaggaaacgaaacccgcccggccgcacaggaagaaacaggcgggaaacaaagagacccaccaggcgagccgacaggcccgccccaggagggaagaagccaggcgccgggacaagcagcacccagcccgcggcaccaggggcagccgaccgccccagagacaaccgcagcacgggggaaagcgaaaccgcagcggcagaagagcccaggaccagccggggagaggaaggaagccggcggggccagcagaggggagccccccgcagacaccgcagcagcggcagaagcaggcccgggccagaggagagcccagcaccccaccccccacgcagagaggcacgacgcagcccagagagagcacccgcgcgggaaccacggacaaagaagggcccgcacagcggcaccgcgagggcgggcggccgcaaaggcgcgcagcccgggcccaccggggccacacccccaggcccacggccagcccacgggggaccaggggcggggggagggggggggggaggagggggaagcgaggagcgcaggggggcggggggggggggggggccgcccacggagccggcaggagcgccacaccccccagcacgccaaggccagccgcggccagcaggggacccgggaagcgggccccgccccggcaggagccgggagggcaggcccgcagaagaaaaacagccccggacaacgaaagcgacccgcagaaacccccccccaagaggccccccagcccacgcgcgggcaacacaacgcccaccccagacccaccgggaggggggcaaaggacaccagcagcagagggagagaggcccggcgcccaggccgagaaaaccgcaaccggcacagaggccgggagcccaaaacaaccagggcagaagaccccagaccaacccccgccccggggcacaggcccccagcaagaaagaggggacgcgccccacggggggagcgcccggaagagacagccccacccaccaccagagggcgcagaagaccagggaaaccccacacaagccaaggcggccacaaagagaaaaacggcccgcgcacgggcagggcgagcaaaacaggaaaagccaggaaagacagacagcagggagagaaaaggaccgaccgagcagcaagccggcagcacgggcggcaggcagcaaggcagggagcgagcgcagcaagacagaacaggaggcgcagcaggcacccaccccccccacccaccaccacaccccacccaccagcacacccacccacgcgcgcccgcaaacacacacacacacacacagaaaaaaaaacccaagagggccgggaggagacccacaacgagggggggggcaccgagccggcacggagaggcgaggcccccgaggaccgagcccaggggccaggcagacgggaggcagggagggggggggaagagaggggaaagggagagacgaaagaaggaaggcaaggaagccgggccagcccaacaccacaagaagaagacagaagcggggccggaagagcacggcccccccagaggaccccagccaccagcacccacaagggccacaaacacaaaccagccaagagagaacccgaccccacagaaccacacacacaacacagcaggcaaaacacccagcaagaaaagggggggggaagacagggccggagcccggcgccggaaccaccgagaccaggcggcccgaaccagagacgccgcccgccccgaggccgggaaaaagccacaagccaccacacaagcgaagaaagaaacgaaacaccaaagggggccccaacaaggacgccacagaagagcagccacgcaacacaacggccccccccccccccccccccccccccccccccccccccccccccccccccccaaaaaaaaagaaaaaaaaaaaaaggaagagacacgagggacagagggcgagccacaggggcggaagaaccaggacccgccacccgcccagccggcccaaagaaaaaaaagacacgagcgcaagacgcaccagaagaaggcacagcgggccaccagcggcgggagaaccgaacccagaagaaagcaggccaacgcgagccacccccagccccccaaaaaagaacaagacccgcagaagcggaaaagaaggccaagcgccgcacacgcccccccaggagaaggcagaaaggaacaccagaaaggggggacagccaggagaggccccccaaagcccacaccgaaggcccccaaagcacagaaggaagcccaagcaggacaacaggacacgcagaccacacgcccgagcagcccaacgcaagacaaaagaaaaacaagggcggagggaaggccagcagccagcccacgccccagaggacccaggcagcccagcacccagagaagcgccaagcgacccaacccagccagaggacgacacccggacccagagacgcaccaggcacaaaccccacacacacacacacacacacacacacgcacacacacacacacacaaagcaaacaaaaacaaaaaacacaggcgaaacaacagagaaaaaggaaagccaaacgaaagcccagggacaaaaaagccaggaaagacaagagggggaacacgaaggaagcagagggagcggccgaagaacacacccagcaggacccgaaggggcacaccaacaaaaggacacccacaggcacggacagcagaccaagaggggcgggaagggagggggccccacaccgccaccacacgccacacggaacccacaaggaaaaggccggggcagagggccacccaggccgagcagcacacgaaaccagaggcacagcgagcaccgcacgggccacgggccgcaccaaggcaaagaacacaaaccccagggaaccaagccccacaagcggcaccgcggaagaccagcagaacaggcaaagaaaaccgcccccaagagaacgaggaaaaggcgcagagaggacaggagcgggcgcggaggccagaagggggccaggcccggaacagaaacagggcggagaacgggagggcacaaacgaaccgggacccgcaagagcagccagaccaaccagagccccgaagcaggcagccgaaccagacccccgcccccgcgggccacacgggaccacccggccgcacgaagccccggcagcagaaaacagaaacaaacgcgccggagagaggccaagacaaggacagccggcaaacagcccagccccccggcacagccagccgcaaacggaaacgcacagcccgcggaccccaagcagaaacaccccgggaaagaaaggagaaaagccaccacaggaagcacggggacaacaaacacggggaaccaaaccgaaagagacaagcaagacccaaaggccacgggcccgcacccggaccaagagaaagggaacaaaacacaggaaagagagaccccccaagaggcagagaacaccaccccggcccagcccaagaaccagcccacccccagaaaaccagaaagagccacaggcaccaaaaaaagaaccacggagccagagacgcaacaacaacacaggccgacaagaccacggggcaagccggagagcccaagccccaccacgcgagggacgcggaacagacaccagaccgaggcaagcaaaggacaacaaacggggcggcacaggcagaggcagccagacacaaggcaggaacaggcacaccaggcaggcagggaaggaggagcgagagcaacaccacgaaggcgcagcagaaaccaggcagcaggagagggcaaaggccacacccacaggacacaccacccaacagggccacacccaaaggacacccgcacaaagaagcaaaccgcacacggacagcaacgacaacgccaccgaggcacagcccacacaaacgcaaagggcggagagaggcccagaagcaagagagcgcccagagggccgcgggcccagagcacagaggaccgaacccaccggaacccagccccagaggacccacaccccccggcccagaggacccacagaaggcaacacaggagagacagggggagaaaacaaacaaagaaaacaagacaaaacacaggggggagccaggcagggacaaaccgaaccggcgcccaggaggcgaggcaggggagaacggacaaggccaggcgggcacaacaagcgccaaaacagaagcaaccacagcccaaagaaagaaccccacacaaggaacccaagcacaaagaggagcgaagaggcaaccgcagccaaagccaagagaagaaaaagaccccacccccaggagacagccgagagacacggggggcaggcaccagagaccaaaggccgggaggaaaggggaggagaaaaggggcaccaaaggcaagccacccgcagaggcccagccagaccccaggcacaagaacaaaccaagaagagggccacgaggcgagggcagaaaagaggaagagcaagaacaagaaacacccccaggcaggcaacaccgcccagaaccaagccggccgcaagcccgggaggacagcccagggaaggggacacaacagagggaacggcagggggaaaaaaagacagagaaaggagaaaaaggacaaaaagacacgcaaggggccacccgaggcaggaaacccccaacaacccgacagagccccgacgaacgcggaaacagcaagcgcagcacgagagagaaacaccccccccaacaacgcacggcagagaagagcagaaagcaccaaaaaaaagagaacaaaacgagaccacccagagcccccgaagagaccccgagcaacccgcgcaaccaccaggaccacaaaaaacgacggaacccccagcgacaggaccgccgcaggacgggccgggaccaaaggcaagcagaagaggcgcgccccccaccgaaccagagaaaagccaggaggccccgccccacgaaaacccccaagagagcgaaagggccgggggggggcccacgcggcgcgagcacgccagccgggcaaacgccaacaccaaggggggaaaaaaacagggaacccaggggaaaaagaaaaaaaaaacaagcaaaccaaaaaccacaagagcacagccagccacacgaggggcgccaagagccaggaggcccccagcgccagcgagcacagccgccgcccgaaacccccccagccagcgccgggacaacccacaggaaagacccaggcggcaggaagaccccaaccgcgccccggcacgacccccaggcaagcaacccccggcacccgcgggccgagccggagaaacccccacagcgcccacagccggcccccccggaaaccaaccagccgcagcagccgcaccagggcccaaaaagaaaacacgccccaagggaagccgaggcaaaacccacagcacaaccagcccaaacgcccagaaggcgggcagaaaaaagaaaggcaacaggaaccacccacccggccggcacaacaagcacgacccacaggcaaaacacaaaagccaaagcaggaaagggcaccaccaaaaaaggccccaaagaaggaaagaacgggcaggaagaggaccaggacggggccgcgaaaacagcagaaagaggcagacacacaaggccaagaacagcgcagggcagagagaggccagcgaacacaagacccgcaccaaccccagcaccgaggggggaaaagaaagacagaaggccgggccaggggacggcagagggcaccccacaagcggggacgagacgggagaagaacccccaggagaccgccgacaaagagccaccgcaaagagcacccaagccaaaaccacacggccagcaagccgaaaaagacacggagcagcagccgagagacggcccgccccggcacaggcggaacccgcgggcccccaacaagccaaaaggcagcaccaaggccggcccagcagccgcacccaacaaaaaggaccacaggcccccaaggaagaccccccaaaacaaaagcccccaccaggggcgcagaaagccacgcagaaggggaacaccccaccggcaaaggaacgggccccaaacacagacaggcagagaagcacagccgaggaccccagcccagccacaaacccccccccggcccacaacccgccagccccccggccccgccccaggaggggcccgcagggaaaaacccccaacacccacgaagacaggcacgcaccacaccgggcccacagccagacagcagaggcgggaagccaggccagaaccgggcggaaaggcagccagcggcgcggacccgcggcagagaaacccacaaccagaagcggcggcgcggggcagcaggaaaaggggaaacggagaaaggaaaggcaagaacgcagaacgaagaaggccaagaggaggggggacgaacagaaagccaagggaggaaagccggaggcccagggagggggcccgggggcccacgcgagacaccccccccaaggaccaccaacgacgggcagaagaaagagaggggaacagggaagggagagagggaagagaggcagagagagagagagagagagagaaagagagagagagagagagagagagaggagggggagagggggaggagaagggaagggaggagagaaagagagaaagaggaagaggaagaggaagaggaagagaagaagcgccgggaacaagggagagcgggggggggggaagggaagagagggaaaaagggcagagaagaaagcgagagaggaaagggcagagagaagaagagagaccaaagggccaagcaagccaaccaccggcggcaggaacgcaaggcggagccagaaggaagcaccagacagggagaaccagggcagccacacccgcaaccagcaggggaacaagcccccggaacgcagcgccggcacaacaacacggaggcaaaacaccagacacaacacacacacacacacacacacacaagcagaagaaaacaagggccaaaaggggaccgcggagaacacaccagacacagagcagagagacacaacgacagggcccccccgcacgcccgcgacacggggggcaaacagccaccaggccccagcaccacaagagaaggcccacgcccccgacaccacagaccaaaacgccagaccccgcgacacaaacccaagacccccaagcacagcaacggcacaagaaaaacaacaccaagcggcccaccccagaaccggcacccaacacaacgaggacaaaggcacggaaaagaagaagaagaagaagaagaaaaaaaaaaaaaaaaaacccgaacaacagaaaacacgagacccgaacccaaggaccagacaaacccagaagcgaaccaaacccaagggagaaaaaaaaaaaaaaaaaaaaaagaagaagaagaaaagccacgggcgccgggggggggcacccagaagcagaaacaggcccagaaccccaagggaaaggccgggggggggcagccaacccagcaccggaggcgaggcaggcgaacgagccaaagccagccggcacaaagagccaggcaccagggaaaacagagaaaccccgggggggaagggggccacaacacaacacggacacgcccagcacgaaccacagagcgcaaaaaaaacgccccggacgacacacagggcggcggaaaaaacgcaagccaggagggaaaaggcccagaaaaaagaaccaagagccggagacagagaggggcgcccggacaccgagcccccaacgaggacgaacagcacccaccccccacaggcagcagaggagccagacccgaccggaggaaggagagggaggcagcccccagccagccccagaccacccgagcaaggaccaaggaaagcgccaagcccgaagagcagccccacacgagccagacgagaacccagcgccaggcagagcagcagcaaacccaacccgcgagcccagaaagcggcagaacgcccgagcacagcggcggaaagagaccccaaagaccaagcagcacacacacacacacacacacacacacacacacacacacacacacacacacacacacacacaacacacagccccaaaacaaaaccacccggccagccgcaccacaaccaggaaggaagagccggaagcacgggagcgggagcaagcggcacaagagcccggggagcagcgccacggaccccagcgcagcgccaagagagcaggaagaagggccgaaggagggcaggaacaggggcaggccaagagcagccgcgcggcagccccacagcggcgcacacacgggcccccccgagaacgccgcaccaccccacccccccagaacgacccgaacccccacccacgcccgggcaacccggccccccgcgccggcggcaacggacacgcggacccaccagcgggaaccggcgacaacagggggaggggggggcgagacaccgggggggggggggggggaacgacgacacagagaggaaccaaggaccaaaccccagagcagaacacgccacaaagcaacca

SEQ ID NO: 541 - RNA, 2719 nt, Mus musculus
ggcgagcccccgggcgcggaaaagagcaagggaccaaaaaaaaaaaaaaacaaaaaaaacaaacaagccgaacccacaggcaacaaccaggaaccccccaaccacccacgccaaacgcggaacagacaacgcgcaaagccacaaagaaaacaaagccagagaagggcaaacaaaaagaaaaacaaagaaagaaaaagaacccagccccagggggaaaaagcgcgaaaaggacaacaccaaaacaccaaacaaagccaaaaaacacacacaaacagacaaaccaggggaaccgaccgcacacacaaaaaccgggggagcaacacgacccggcgcagcgagagccaagcaggacaagcacggcaagggcggaaagcacagaaggaacaaggggggagaggccgagacagagagcccagggaccgacaccaagcaacccccacgaagagcaggccagcagaaaacaaaacaggaagccccccaccccccagcccccacgcccgcccccaaccgccacaccccgaccaccaagaaacaaacagacacaagaaggaaaaaaaaaaaacaaaaacagaaaaaacaaaacaaccaaacaaaaagagagccaaagaaaaaaaagcacaagaaaccacagggcagagaccgacccacacaggaacccaaacacacacaaaaccagaagccaaaagaacacaaaggaccgaaggaaagcaaaccaaagaagccgacaacaaaagacaaagagcccaaaagaaacggaagagggcacaccgggcaggggacgagagggcgcccccaaagacccagagaaaacaaccacggcaagcaacgagacagccgggagggggggcaggccacccggccaggaccccagagcaggcccaggcagcgcgccccggaccagagccagcccagggcagaaggccgacgggcccccaccccgccccgcacccagccccccgcaaagcccgagccagagaggagggaaggagacgccccaagggaggcgcggcccaccgcaaaccggccggaccacgccaccggaacaggaagcccgaaagacgagcaaggcaagagcccggcacaggcgaagacccagagcggcggaaagacaaccaagccggacaacgacaagacgaaaacagaagacaagcccaaacccaggaggggaagacgagaccccggaggagccggagggaaagaagagaagaagagccaccaaaagagggggcaccccccgggaggccggaccagcaaaggagaaaggagcggcgcacgcgccccacggcgcgccgaggcagggccagcagcccaagcccagcagacccccagagaacaaacccgaacggagccaaaacaaccaagccaggccaacaaaaacaggggaaaaaaccggaggcaaaggagagaggcggaagacacgagacgaaggcaaagcccggaaggagcgagcacagaaacaccacgcccaggaaagacgagcagggggcgacagcccccaccagcaccccccccacagagacaagagaagaaggaaacccaggacaccaagacgaggagagcaaagaggagcccaaagcacagggcacaccaaccccacaacaaaagcaaaaagccagaaacagcagcagcaaacaagcccaacccagaagagacccaacagcgggacagaggcagccccacaaggaccgagccccacaaaagacaagccaaaagaccaaggccaacccacccggaagaaacgcagacagggaggaaacaaccgcgggaggacaaaagaacaccaccccggcaaagaggcaagaaagcacaggcaaaaaaagggagaggggcaaagaaggaggcaccgcacaacgaaaaagcagccaaacacccagcagaccagcaaaggaaagccacaacaaaaccacggcccaaaagagacgggaaacacgcggcaaccggcccaagccaaaaggggcccagagcccaaacagcagcaagcacagcccccaaccgaccaccaaacaggaaagaaacaagagcacagcagcaagaaccaccaggaggcaaaggagccgccccaaccggaggaggaagccaacaagcagcacgcaaccgacacaacggacaagaaagaggaggagggacaccgacagggaccagaacgggaggaaagaaaaaggcaaggaagaccaagcccacgaggcagcacacccaggcagggaccagaccaaggagagagggggcaagacaagaagcaaaaccacccggagacacaaccacaaagccggcagccggaacgccgacacaggcggccaccagagagccaccgcccgcccaaacggaggaaggaggccacaagggcccccgacgagagagacgagcgccaagccacgccccaaagacagcggaccggaaaaacaaaaaccccccccaaaggcaagaaacagagcaacagaaagaaaagaacacacacaaccaacagaccccccgggccagcagccacgccaccccacccccacccaagccggcagacagaaggcccagaggccaaccaggccaggccggagacagagcacccagcgaagaacgaacacaggcgacagaaaacccaggaacagccagagcggggaacacacagaccccagagaggcccccccaggccagaccgccagcccgaaaaacacaagagaaaccgaaaaccaaaagcacggcccgcagacggacaccgagcaaagga

SEQ ID NO: 542 - RNA, 11140 nt, Mus musculus
cggggaaaccgagcaagcgcgacgcgccccaacgaaacccgggagcgcgcgccgcgcaaaggggcggagagcaaagagcgagccagagcgcccgaggccggagccccccaccccccccccccccgaaaccgagccgccaaaaacccaagcaaaaaaccgaagcaaaagcacgaaagaaagggccgcacacaggcaccccccaaaagaagcagcgcagagcaggagcagacaaagggacaacggaacaaacaagccccaaacagaaccgccaaaaacgaaagaaggaagggcccaacagaaaaaacaaaagccggcggcagacaagaacagcgaagcgcaaccacgaggagaaagacccgcaccaacaacacggcgacaaaaccccgaaaaaaggaaagccgaaaaggccaggggggccgggcccaacagcgaaaaacaggcgagaaaccgcccaaaaaccagcccccccacaggaacgggggacgggaaaaaagccaccacaggggaagcagaggcgcaaaagcccagaaacagaagcaaccagcagccgaacgcccgggccaccggcaacccaaaccaggacaacagaagggagggaaaaaccgcagcagcacaacaaaggaacgaggacaacagcacgagggaggaaagccccccaaccccaccgccacggaacggccccagaggggcgcgaccgggaggggacaccggaaggaagagccacgcggaggaagggaacggggaggcaggccgaggcacagccgaccgcccggcccccgcaccacaaagaggagcagcccccgacaagcccaggcacagccaggaacacccggcacgggacaacaacaaagcagagcgagaaaaaccccccgaggcccagggcagcgaaagaaacagacaaaaccccacaaccggagaggggacccgagggagaaaagcaggaaccgacccacccaagaggacgcagacagccgcccaggcacgacgaaggcgggggccccaggcacacccagcgagaagcacgcaggcaaaggggaaccgagcgaaggagcaaagacacccaacacacagagccacaacccagacggaaaccagacgaagaaagcagacaggaggaggccaacccaaaccccaggcaccgcaccaaaaccacaacaagacgggaaacggagggacccccaaagcagccagcccaaaagggaacaggaccacaaagaggaaaacaacagcggacacaggggaccggaaaaagaaaagacgaaaaacagcggcagaaaggagggccccaggaggccgcacggcacccggagcgagcccacaagcggcaggaccgccaaaaagaagccccgccaagcagagggagggaaagaaggaccgccacgagcaccggcacacaaacagcaaaacagaaacagagacaaaggaaacagggccaggcaaaacccaaggcccaaggggagggcacgccccgggggggaacgggggcaagccagcaggcacacagccacccgcgccagcccaggagacccgggaaagaaagccagaagcaaaagaccgcaagaaggacagggaaaaggaagaaaaagggcggcgacaaagaagaagaacgcaccacacgaggccggcaccagacgccggacaggcagagaccaaaaaggagccagccccggaacgggaaacagggagcgccagggagcggcagcaaacccggggaagcagacagcaaccacgagccacccaggccgagacgagaaaagcggagagccgggcggccagaacgggcccagcccccaagccgaaacagaagccacacagcagccgaagaagaagaacagggcaaccccccaccggcaaaaccaggacacaccccgaagaggaaaacgagggcaacggagaccagccaggcaaagaaccccacgggacgaaggcaggcccgggacaggagcgggcgagccccacccagcgcaaaacacaaaaggcagcaagcagggccaaccggccaacaaagggcaggcaggagcgggagaccaggggccacagagaagccagcagcgcacccgaccacaggcgccagccaccacaccacgacacacacacaggcaacaccgagaaaggaagggcccaggacagccaggacccaacgcgacagaaggacggaagcgggccgccccagggcagaagccaggcacacaggagcggcggggccacgaaaaaaacaagcccacaggccaaccagcagagaaaccggagacagaagagaaaaagcccccccaggcaccaacaaaccggcacaaccagaaagcccccggccgcggaaaggaacagaggcagcagcggaccccaacacccacacagcacggccaggcacacacaaagccagcagacagcggcgacaggagggagacggggaagacgaagcaaacaaggcggaagaggagagccggcccggcacagccaggcgccaaggcacaccgcgccacgcccagagcggccacaaacgcaagagaagaacaaggaacagaccgaccgggagcccgcgggccacccgcccgacgacgacagacagagcgcaagcccgcggagcccagcccgaccgccacaccgacggccaagcgcaacaccggcaccaacgccaacccccaggaagccggccaccccgggaagcacccacgggagcccagaagggccgaacacaggacaagccaccacagacccaaaggcccagaaaagccgcacgagagagaggcggaaaggacggagaggcaaaaacacaggccagggggagcgcgagcacacacacacacacccgacagacacacaacgaccccgagcaaaagccaaaaaaacaaagaaacacaggcaaccgaacagaaaaggcaacaaagagcacggcccccagagggaaacaaaagcaccaacagaacaagagacagaagaaacagccaaaaccagagcggcaagaagagagggacccagaagacaagggagaggagaaaagagagagagaggaaagaggcacaaaggcaagaaagagagggcagcgggaggagaggggagaaagggaaaggagccccccccaaaaaaaaaaaacaaaccagacgaaaaacaaaaaaaacaggaaggaaggggaggaaacacacggaggcaggaaaccagccccccacaaggaaagcaaggcccaggaggaggagcagccgccacaggagagaaagggcgggcgccccagggaaacagacccggacacaggcagcagcgcaggaccaaacaaggagaggaaagacaggccaggggcaccagacaaagcccaacgaaaaaaaaagagaaagaggggggcgaggggggggggaagaacgccaaggagcaaaacaaagccacaacgaaaggcccaagcccccaggcacccaggcacccaggcacccaggcgcacaaccccaaacaccaaagagaacagaagggggggggacgacaaaagaagagaaagccccagaaacgcgaacaagacagaaagaaaggggggggagcacgacaacggaaaacagaaaaccaagagcaggcacagagaggaggaggaagggaacgagggagcgagggcggaggaccgcgcccagaacggaacacagccgcaccaaagcagggacaacaggacagcccaggagaccgcgccaagacaaaagaagcaagaggaaaccaaccccagcccaaccaggcaaggaaaggggccaagcggcagaaggcggcagcaaacgacagaaaggaaggccagacagcaaaacaggaccagaaggggaagagcagcaaagcccacaagaccacgaaggcgaacccacacagcaaacacagaacaaaacacaccaaggagagaaaacacaaggaaaaaaacaccaaaacagaagaaggaggccgggggaccaaaaaacgcgaaaaaccccgaagcgaggaaaagaggcaaaagagagcacccaagaagcagacccacgaggggaacagggccaccagcaagagggcaagaagaaggccaagccaaggacagaaccaaagaccaaaggagccagggagcacggcacacaggacgaccggagagagcacacggccgaaaggggaagcgagcaacgaggccaagggaggcgaacacgagccgcccacacaggccccacccacacagcaaaaaagaaaggccgggcggcaggaaagacacggcacaaggcgccaagagccccacccggccagccgaaccaccgcccaggagggacagacccaagcccgcacaggagaaagaaaagcaacagaagcacccaagggccaccccaacagccagcacagagggcaaaagccgagcccagaaccacaccgaaaaccgaagcagaccaccccccaaccaccgacacaccagccccagcagcccagggccacgcgcccaagacaagccaccagaccgccaaaagaacgcaagacgaacagcccagggaaaccccaaacacaccgggagccgggaaaacaccaaaagcagaggaggagccaggcccacagcagcgaacgagcacccaccggggcaaacgcagggcacgcgaaggcaggacacaggggaagcgggaacccgaacccagaagacaaccgccggcagagcaggaaggggaggacacaaaccaagcacccagaggcagaggcaggaggagacaccaggcagccgggaccacagggccgggcggccgggccgagaccgccgcgggcagaggaacccacaccaccagacaccgagaggaccacacgccccagcccagacagggccgaaccagcaccccccccgcgccccccccaccgcagccaccggggggagggggggcacgccaggggacgcacaaagagcaaggcggcagggggccgcgggaaaagcccacccagccccaaccccaaggggcagacacgaggaaagccaaaaacaaccccagaaacgcacggaaaggaacccaaccggccaccaacagcaagacagggaaggaaacgccagaagaaaaggaaaaagagcccagagagagagagagagaggacaaccagacacagaaacaagaagagggcaggacacagagcgcagacgggagcgccgagggggcgggaaccaaaccaagcccggaaggacacacaccgcacagcaacccccagccccaagggcacacaaaaaaaaaaaggaagccacagcagcaacacgaaaccaggccagaaagacaaaagaggggacaaaccccagaacagaggaggaggcgaagccagaggggcgggaacaaaccaggcccaggaagagcacagaagaaccccgaccacaccagcccccaaagagcagggccagggcccagcgacgccccccagggagcaagacgcaagcccagccccgcccccccccaaggccggggaggaggccccaaccccacagaagaaaggcgaccaagcaacagcgacacacgacgaggcccagccaagaagccgcaacccaaagccacaaagcgcaccccgaagacaaggcaagcgcaggaccaccgcccgagaagaaagggcacagggcaaaccaccccagggaacaagccagcacacgaaaaagaaccccccccacccccaccgaaaaacccaaaccacggaccacagccgcgagagcacagagaggccgacaacgggaagccgagccacccacgggaagcacagcagcacacacacacacacacacacagcacacacacccacccacaacacagcacacaaaaaagcaaacaggaaaaaaagaagacaaaacagacaaaagcagggccagaaccagacagacagcaagacaagaaagaggagcggggcagccaacaggagggcgcaacacacacacacacacacacacacacacacacaccacacacacacacacacacacacacccccaacacaacaccacacacacacacaccaccaacacaacaccacacacacacacccacacacgcacacccacacagcacacccacacacacacacacccccaacacaacacacccccaacacaacaccacacacacacacccacacacacacacacccccaacacaacacaacaccacacacacacacccacacacacaacccacacacacacccacacacgcacccccacacacacacccccacacacacacacacccacacacacacacccacacacacacacccacacacacacacccacacacacacacagaggccagcacagcacgaaacagaacacaacaaaagaggagcgaaagaacagacaggaaggcggaaagaggccagggcaggaagacgacacccagaggacccaagccacccaacacccagcagacagccacaacgcacacccacccagggaacaacccccgacccgcagccaaggaaaaacacaccagacccacacacagcaaagaaaagaaaaagaaaaacaaagagaaggcagacacacacacacacaagggagccaaagggcgacggggacgcaaagggagcaaacacgagaaaagaagccagcccccacagagaaaagaaagcaagccgagggagagcagaggagcccagagacaaggccagacgaccacacgcagcgaaaaaaaaagagagaaaaaagaacaaaggaaagaggccaaagcaacagagaagacaaacgcaaacacagacaaaaagccccagcaccgagacaagaaggaaaacaaaaagcaaagaccaagccaaaagcagagcacaacccggacaccgagcaccacacaagacaacgaaccccggccaacgaaagaaaaggagagagagggaagaggaggggaggggagaggagggcaagggaggggaggggaggggagggagggaagaagaagggaggggaggggaggggagaggaggggaggcagaaaaggagagaacagaaagaaaccaacaagccccgacagacgacacaaaaaagaaagagaagaacacacagaggcaaagagaaaaaagacagcagaaaaggagcaccgcgggcgggggccacaccaccccagcacgagaggcagaagcaggcagaccggagcaaggccagccagcacagagagggcccaggggacagcagggcacacagaaaaagaaggaaagaaagaaagaaagaaagaaaaaagaaagaaagaaagaaagaaagaaagaaagaaagaagagacaaccccagaccaacaaggccaagagaaaaaaaagcaagcaaaaaagagaacaaaaagaaagaaacgcgaccgccccaaccggccccccccccccccccccaagccgccgccgccgccgccgccgccgccgccgccgccgccgccgccccacccccaagacccgccaggagcccgggcagaaagaccaagaacgaccgcccagccaggaagcaggcagaccaagaagaggcacccgggagaacaagaaagcggggaaaggagagggccaccacaaggggccagaaggcaagcagagccccacagggcagggcagcagaccgggggggcagagccccccccacagccacacgaacagaaccacaagacagaaccgccgcaggaaaaaggaacaaccaagacgggggggggcagaccgggaaaaggcagagcaggcagaccgacaaggccagccgacacaagagagcccaggaagccagggcacacagagaaaccccgccaaaaaaccaaaagaaagaaagaaacaaggagaccacggccacagagggaacccagaaaaaaggaaggagcacggagagaaagcccccagcaaagcacggaacaacacggccaacacccaggaggaacgggaaagagaacaaagacggaaaccgcaacagacacaaaaaaaagcgggggggggggggggaccacaacgcaaggagaaaccggcaaagacagccaccccagcaagaggaggcaaacgagcgcaggcacacagagcacacagcagacaccacagccaaaaaaaacacagaagggcgaaaccgaacagaaaacggaggagaacacaaaagggaacaaaaaaaaaaaaacaaaagcagcaacaacagacggagccggacaacagaacagacaggggaagaaaacaaccaaaccgaggaggcacagaaaacccccaaaaggagcaccacaaaaagcagggacaaccccagcacccacaggacgaacaagcgacaggcagagaaacccagagcagcccagaaggcggaggcgaggaccagagaaaggcacgcgagccggagaaggccgggcagagagccgaggacaggacaccaaaaacgggaaggggacacggagccgcgcaggagcaggcacagacaccccaacaccccgacccggggcacacgggggaaagggaacagcggggaaaccacaaggcggaaagagcaaaagaagagcaaaaaaagaaaacaaagaacagagacagaacacagaccagaacacaccgcggggaagcaaaaaagcccaaccgcaaagacacaaaccaaccaaccacagagcaaggacaaaggccggaacaaggggggagacagggccggagcccggcgccgaaaccacgagaccaggcggccgaaccagaaaccaccgcccgcccccaaggcgggaaaaggcaggccaccacgccagccaaaagaagcaaacagccaaggacccaaccccacccccaccccccaaacccccacccccggagaacgccccccccccacagaacagggcgccagcaggggaagggagccgccggagggcaaccaccgacgcacaaaaaaggaaaggacacaccgagcagcagcaaagcaaagcaccacagccacggggggaggcccacccccaaagaaaagagaaaaaaaaaaaacagaccaggagaagagaaacagccgaaaaaagggagaagccgcagaggaagacaaaaaccgagcccgacggccgcgcccgaacagaacaaagaagggaacaccgagcaccgaagacccggacacggggcgcacgcgggcccgccggggacgacagaagcacgaacccagggccagacaaggacgaaccccccaccaggggcaaaacgggcaagccacgggagccggggcggggaagagaacagaagcacggggggcagccaccggacaacacgcacagccggggaccccaaaagcaaaccgagggaaaaaaaaaacaagaggcaaacaaaagccaaacgacaccacgcgcaaaaacaggcggcgcaaaaaaacagcgagaaacagagaaacaaggcacgcaaaacacagcacggggcgccgcgggagggcggggcgggaggcgaggagaaaggagagggacgcagccagacagaagcaccaggaagaggccagagcaggagaaagagcagccaaccaaagagcaaaggaaagccgggccgagggaagcgaaagcaggggcgggcccaccgagggcaggggggagccagaccacaaccggacaccccaaagccagcccgcacggacccaagggaggccaagccagaaggggaaagaggaaaggacacccgaggagccccagccagcggcgccaccccaggaccgcccacaagcgcacccaggaaacggagcagagcccagggcccccgcggcaccggcgccaccagagcccaaccaccagcacacaaacaagaggggagccgacgagaaaaaccagggggaacacacagcgaaacccgagggaaaaggggagaggacacaacacagagcgaagggggacaggcaaacgcgggaaaaaaaaagggagagaagggcccgaaggaaaaggacagaagagcaagaaggccccagacagaggggggcgaggaaacccaaggagacaggaaggcacggaagagccaaaacagagcgagaggaaaagaaacgaaaccacccccggcagaccgccccggaacccccccaccccacagcagggaaaacaaggaagacgagaacagcaaaagaggagaaaagggggggggggggcagaaggaaaaacacccccccagccgcgagaacgcagaaggggcgaggggcccagggagaacggccaaccagagcaagaaagcccagacgagcaacgagaccaagaggagagagcaggagaaaaacaaccggcccccaaccccgggcggccaccaccagggaaacagccgcccccgccgccccacggccagaagggggaagaaaaggcagagcagaaaaacccaaaaacaaggcccccccaaaaggaaaaaaaaacgcaaacaaaggcaaaaaacaaaacgcagcaccaacaccaccacacagggcgacgcccccccccccgccccccgcccccaagcagaacgagacacagagaggcaacccacaaagggcaacggccgacaaccaggggccgagccaggaaagcagacggaaggaaaggcaagggaacggggccacggcacgacgaagcagaccccacacccgacgacaccaagacaaaagaaaacagcgcggaaagcgaggaccagaagcaaagcagaggggccgccccacccccagcagggcaacgggcaacccaccccgccccggcccagacgggacaaaggaaagcggccggaggcggggacccagccccgcaagagcaggaggcgcagccgggcgcagccaagccccggccacacggggaccacaagggaaccccgcgagggggcgcacacacaaaggggccaccgagccaagaaagcccacgcaggcgccaacccaggcccgcggcgaggaagaggaggcacaaaaccaagaggaagacccacggaggagaggcgcagaagagcagagcgcaacaggcagggccccccccacacgcagcagggcccgggagcggggacagaccaagagcaacggacacagggcgcaggaaacaggcgaaccgggacgggggggggagggcgcagcggaccgggcgaccccccagccgagacagcggagaaagggaagcagccccccccagacaggcaaaaaacagggggcaaacacacaagagagaacacaaaaccgcaaaaacagccgagaccacccccagacaaaaagcggaaccaaaggccccgcaaacaaaaacaccacaaaagacccacacagcagaaagcagaccacaggaccacacaaacaggcaaa

SEQ ID NO: 543 - RNA, 55944 nt, Mus musculus
  misc_feature (1430)..(1529): n is a, c, g, or u
  misc_feature (4481)..(4580): n is a, c, g, or u
  misc_feature (22411)..(22517): n is a, c, g, or u
  misc_feature (24541)..(24640): n is a, c, g, or u
ggcaggagccgaaagccaagcggggcagggccgcacaggacaggcgcagagggccagagcccaacacaacccccccaaccacccccaccaaccaaacagccaagaaaaaccggaccgcaacagacacacgaggggaaccgggggagcacagcgagcccgagcacgccacccccaccccgcagcccggacccaggcagggccagagcaggcagagacaagggcgggagcgcgagccggggacaaggcccgcccgggcccacgcccgacacgcagagagagagaaacaggccgcccaccccgaggaacagcccaccccagcagagagaggggaaaggcaggaacgcacagaacagaggccagggaagccgaagaaggagaaaaacccaccgagggaacaaaacccaaagcccgcgccagcaacacgagcaaagaacggcggacagccgggcgggggcgcacgccaacccagcaccgggaggcagaggcaggcagacgagcaaggccagccggcacaaaggagccaggacgcaagggcaacagggaaacccgcacgaaaaaccaaacaaccaaacaaacaaacaacgacacggacaaagcaaagaacgagaacaagggacagaaccaagcaagagaaggaggagagcaagcaaagaggggaagggggggaacgagaccccgagaggccggcgaccaaggacaacgaaagcccggaggaggcacggacgagccacgcaccccacaccaacaaaagcaaccaaagcagcagaaaagccagaccacacgccacggacaaaccaccacgaggaacgggggcaagaaagcccagcaaggcacaaccaacaccagaaaaacaaaggcaccggccgagaaacaagcagagggaaaaacaggaagaggggccgcgaagccagagggagacagaagaaaccccagccccggcaggggacaaggaagcgaaaggaaacaaagcgcgagaccgcaacacgcaagagaaacccccgcagcgcaaggcccacacagcagccggcacaccggagacaggaaaaaaggcagccgccccacgaaagaagaggaaacgacaggggccacccagaggcaagcgcgcgacagaacgacgaggggcaagccgcgagcccagggccacaaagcagcaagcccgcccacgccagcacccccgggggggggggaggcaagacagggccgaagcccggcgccggaaccacgggaccaggcggccgaacccagaaaccgccgcccgcccccaaggcgggaaaaggcagcaccaccaccgccaggcaaccacaaaaaaagcaagggccgaacaggaggcccccccagaacaaaggagagggagcccagcaagagacagagccgagggcgaaaaagagacggcccacgcggaaggcagacagggccccgacgggagaagnnnnnnnnnnnnnnnnnnnnnnnnnnnnnnnnnnnnnnnnnnnnnnnnnnnnnnnnnnnnnnnnnnnnnnnnnnnnnnnnnnnnnnnnnnnnnnnnnnnnggagcccaggaggaaccacgggagggacggggcaccgagcaagggaaggaggcccggggcacacaagccaggcagggggacgggcggaaggaggagcgaaggagccgaaagcaagccaggcccaccgccaggcacgcccgagcccgcgaaacaaccccccccacggcggccgaaacacagcaagagaaagcaaaccaaacacaaaggagcaccgaccaacccccccagccacaaagaagcaggcaacgcaagaaaacacgaaacggacaaagaagaccgaaaaaagaaaccaacccaaacaaaaaaagacacaaaccagccacgcccgggaagccacgaagcacaaaaaaagaaagaaaaggggccacggacaacaaggcacagccacagcagcaagaccacggacaacagcaaaaaaaaacgccacaaaaggaccagggcagggcaacagaaacacagcaagaacaacaaaaagaccggggcagaccgaccccaaaagagaaaaagaacaggcgcaagcaacacaaagaaaagaaccgggacagaccaaaaagaacccacgggacagcaaaaccagacgacagagcaaaagccaagagccagagacaaagaagacgaaaaacaagcaaaggacggaagacaaaacaaccaggaacaagaccaggaacaagaaacaggaagacagggcggcgaaggaaacaggaaagaggccgaggggcaagagaaacaggaaggacggaaggcaagccccaaacacaaggaagacaacacagaggcagaagaaaaagcaaggaagggaagggagaaagccaggaaaaaaagagagagaggagagagaagacaagcaggggcagagccagacagaaagggcgcaggcaccggagcagcagcaggaaagaacacacagccagaaaagcacgggagcgagaacacaaacacccaagcgaaacaaaccacacgaacaggacgcgaggcacaagacgagccagccaggaaggaaaaacccaggccaagaggaaacccgccaaaagaagaagggggggaagagagggagaaaaaccagcacccagaaaacgcaggggagcaaaaaagggaggaaaaaacgaagaggaggaaaaagcaggaccagagcggaacggagccgcacgagaagacaaaaagagaagcacaccgcacaaaaccaagccaaaggacaaagacccaacaaaacccaacagaagcgaacgaccagagaaaggggcaaaaccgaagcaggcacaggaggcaacgaacagaacacaaaggcaagcacagacaacaggaaaagggacccaggaacgaaaagccgaaagcaacagaacaaagggcaaaacaacaaacacagaaaggaaaaaaaacaccaacccacaccaacaaaaggcaaaccaaaaaaaaagaacaaaagaaacaagcacaacgcacaaaaaccaaaaaaggagagacaaaaagaaccaacaacaacaaaaaaccaaaagcgagaaaagcagagaaagacaacaccagccacgaggaaagcaaacaaacaacgagaccacacaccgcaaaaggcaagacaaaacacaaggacagcacgcggcgaggaggagagaggggcacacccccagcgggggaggcaaacggcgcccacggaaaaaaaaggcagcccaacagaacagggaacaaaacccagaccagccaacccccgggaaaacccaaagcagccaccgccacaaggacgcccagcagcaagcagcacaagagccagaaacggaagcaaccgagagcccaacaaagaaggaagcaaagaaacaacacaaggagaaacagagaaaagaaaggcacagaaacaggcaaaggaacaagagaaaaaaacaaaaacaaaaacaaaaaccaacccgagaaagagcagacccaacaggacaaacagagcaccacacacaagaaagcgaaaggaaacaggaaaccacagaccagagaggcaccacacacagcaaaccacagacaagaaggggaaggacccgggaaggggaaaagaaaggcgaaggaccggggcgcggggggagaggagggaagggcaggggaagaaggagagaagacgggagagacgacggaagagggccacagggaccaggaaaaacaggcaaggaaacccgggagcacggggacaggagaaggccccagaaggggggccagagccgagccagcacacgagcaggcagagcccaagggacccagccacagacccccaaccacagcagccacaggaggcgggaccagagccagcaaacacacaaagagacccaccagaaacgagggagcagagcagagccccacagccaaacgggggagcgaggagccgggaggaggggaggaagaacggaggagccagagggaccaaggacaccacaagagcacagcacacagaaaacgaccaggaccaaggggccacagagacagggagccgcaggggcgaccaggccaaacacgagggaggcgggcggcgaccaaaaggggagcagagacgccgaccgccgcagaacccgaccacggggcccaccagagggggaaaaggggcagagcgagccaagggagcccagagggcgccgagggggagaaggggaacaggaccagggaaaggaggagagaaggggagagagggggaggagggaagaaacagcaaaaggaaaggggagaacaaaaaaaaaagggaaaaaagcacaggcacagagaaagccagcaaaccgaagaaaaaagaaagaaaagggagaaaagggagacaacgcccgcccgccaggaagaacacccggagagcaaaacggagaaagaagaccagaggcggaggaaagccggggcaggagagccgggggggaagcccagcgaggccaagggagagcagcaaagaagaggggaagggggaaaggggaaaagccaaaaacagagagcacccaggaagannnnnnnnnnnnnnnnnnnnnnnnnnnnnnnnnnnnnnnnnnnnnnnnnnnnnnnnnnnnnnnnnnnnnnnnnnnnnnnnnnnnnnnnnnnnnnnnnnnngacgggaaaacccccaaaaacagagagcacccaggaagaggacagccagagcacggaaggagcagagacagaaaagcaaggggcagagccaggacccagaagcgaggggagagaggaaagaggcgaagggcaacagcacacagcccagccagaagccaagagggcgggagagaggcacgggagcgaaaaggcgcaagggcggagggcagaagaaaaagagcagaggaagccagaagggaggcaagagaaagcacacaggaaaaaaaggggggggggggggggggggggggaaggggggaaccaggagagccgggggggggaaagacaccggagcaaagaggcccggcagaaagagagagagagagagagagagagagagagagagcgagcacaaagaaacagaaggagggacaacaggcaagggaaagcacgaaaggacacggggcaaagaacaagagaaacagagcaaagaacaagagaaagcagaaaaggagagagaccaaaacaaaaaacgagagccaccgaaggggagcagcagcgggaacgacacaggcggccagggagcggaagagagacaaaaaccagacagagaaagggagggcagaagaggaggaacgggggaggccaagagggggaagcggccagaaacagaaaagagaaccggaagcaagggggacgcaccgggagcccacaggagcgaccgacgcgagaaggaagcccacagaagcccgggagacaacagccgcgcgagggcaagggagcgaggaagagacacggccaccagaggggcgccagaacagaaaggggagcccgggggaaagagagggagagagaggagggcagaggagggcggaagggaaggacccagcaacacgagggcagccggagccacccgccaggagccacaagcccgggccccccccacaaggaaaccacacggccccggacccgccagacagaaaccccacaggcgcgcagcagccaagccagacccagaccgggaggcaacgcggcgggcaggaaagaaccccgacagcgagaggagacgggcggggcaccccgggcaagcagaggagggcccccccggaccggccccgggaagcacccagcccaaacgaggccacacagacgagagaggcaaagcaaacccacagggaggaacaggaggcagggaaagaccagagggccgacaccaccaaggagggcgagcgcgaacgaaggcacggggagggacaaagcaggaaaaggcaccacggcccaaagcaaccgccaaaagagaaacgagaaaccacaaggaaaagcagagcgcaacacggcagggaagcacaagccggcaagaccagcagcccgcagccagcacaggaagcgcaggcgcgaggcccaacacaggaggggacgacggacacccccaaccccaggccgcccaaccccagcaccacgcgcaaagggggagaagcccccccagcaaccccacagggagagagaaggaagagacaaaaaaagaaggaaaacgagccgaaaagggcagcacaaaaggaaggcaccacaaaagggaggcaaccccacccccaccgcccagggcacagggaggcgggggacaggcaaaaacccaccggaaacaaggccgcgccagccaaagagagaaaaagaccgcaggcggccgggggggagcagcggcccgagcaagagccgcgaacacgaagggggagagcccccacaggcgaaagagcaagccccacgggcaggcacccaagagcaaccggcaaggagagacacaaaccaagccgaagaaaagcagagggggagcagaacccagcgaggcgacagcggacaccaggcaaaaacgaaaaaacagaccacacgaaaacaggaggcccggcggggcaaaaaagaaaccaccacccacgcccggggccagacgcgcagaagcaacggggagcggcggcaacaaaagggcagcaaacaagaacccaaagggacaaccgccagcggggcgaacccagaccccgccccggcagcaggaggaccccagcaccaagcacccaagaaaagaaaggacaacccgggggcagacgccacacacagagagacccagcggccccaaacgcccagccggcgaaaacacaggccaaaaaaagaaacacaagaaaacccaaaaccggaagcaacagcaagccaccaccacaaagccagaaaccacagcgaaaaaccagggaaaaacacgccaccaccagcggaaggcacgggcgaccagaacgcacaaagaggggaaaaacgagaggggggggccgcaggccgaggaccccaggggcaacggggaggagcagcgacaacgaagccagccggacaggaacccaaccaccaaaggcggacaacgcacccagcaacagcccagaagcccgcccacacccagcacaggcccagaaggaccagccacccgccagggacacagcccagcacaagccccaccacggagacaccaaacccggaaagaacgagcgccggggagaagaaaaggcaaaagcacgcccagaacaaggaccggacagaaaaaggaggggggaaaaaccccggaaagaaaacggaccacaaccgccccgcccccccaccgcccccccacccccccccccgaaagacaggaccaagcccggcaaagagaagaaggcagaagcggagacaacacacacgacaaaagggcaacaagagaggcgagaaaggcaggggagcagcccaggaaaagacaaacaagaagaaaaagagggagggaacaaccggaggaccaacaagagcaccagcggagagggacccccaggacccagccaagaagccaagcaggaggacaaaacacaaccccagcaaagacagccccagaaacagaggaagagggggcggaccccaccaaacagcgcgcccagacgggaaaagccaggagagcaggaggggagagggcaagggacagggcaacaaaggaagcaaagaaccaggcagaaccagggccaggaaacccagaagcaagacccaccaccaaccgaccagaggcccacccagaagcgggaacgagcacaagacaaagccggggaaggaggaaacagacaaaccaaaggccccgggccaaagggcacgccaccgaagaaaacgcacaaagaacaagagcccaacacacggccaagagcaaaagccaacaacgcagacacaaaacccaacggagccggaaaggggcaagacacaccccaagaacagcggcacaagcaccaccaaacaggaggaaccagccaggaaagaccagaccaaagcaagacgaaacagcaggacacacaaaaccgaggcccaggagaacaggacaaggcagcacaacgaacccaacagcaagcagcgcagacacaagaccccagggagcagacccggcagacacccacaggcggcacccaacacgaggccgggcaacgaacgacaacgacaaagcccaggggccccaagacacgaccagcccacaaccggcgaagccccggaccagcaagcacagagcccacaaccacagagaggcagcaccaaccaccccccggacaacccgcccacaagacgaaagccaacagaaacaagaaggaggaagaaagggcacagcagggggccaggagaaggacagcagaaccacaggggggaaagagcagggaacgcgagccaccacaagaagccgaaccaaagcagaaacgaaaggccaaccccagcgacccacccaaagccggcccaccccagacccacaaacaaaaagagcacaagcggaaccaagacaaacgaagccagggagggggggaccccacacaagccagcaagccagaccaggaagggcaggagaagccagccgaccgcgggaccaagaaaaccaaaagcacggggggaggagacagcaaccaggaggccgggcaacacacagcaccaggccgaccaaacggaccaaaaggacaggaaccgggagcgacagacacaacaggggggggggggggggggggggggggaaacagacgcagagcacccaacacagaaagaaagaggcaggggccaccaagaaaaacccggacagaaaaagcgccggcaagcaagcccccccgacaagaaagcagggggccaacaccagacggcagaggagacacagccgaaaaggaacaaagcacacgcagcaccaagcgaggcccgcgcacaaaaaaccccggaaaccagagccgacacacgccacaacaacaacacacccgagcccgagcccgggccccgggccgggccgggcccggggcggcagaagcaggaaaagaccggacccagaccgacgccaaaggagcgcgggaccgggaaggccacaaccagaacagggcacaaaacaagggggggagcgaagacaaggccagagaagagacagacgggggggcaggggaacagcacaggaggcaggaagacaggccacccacggggagacgaacagaggcacacgaagggcccagccagaaggagggggagcagcggggcggaagggagcagagaggaggacgaggagagcaggcgggagaagaccgcagacagcaaacgcccagcgggaacacggacgcaaagggaaagggcccacaaacgaaagagaaaaccggagggggggagggcacaagcacacaacccaaggcacagagaccacggaagcaaagacagaaagaacagaaggggcaaaaagcgcagaaagaaccaaagcgaagaccaccagagacaccccaccggggcacccaaacaaaaccaaacacagaaacagggagccaaaagacgcgacaccgccaagccaacaaaacagaagggagcaaaccaccaggacgagcacagggccccaagaaggagcagagaaaggacccaaggagcgaagggggagccccaaggaggaacaacaaaggaaccaaccagacgccaagccccaaggacaaaaccaaagaaaacacaggggaaccaagcccaacgcaagagcagagaaggccagcggcacaaggggagaagaggcccggcggaaggccaagcccggaggggaagcagggccaggaagaggaggggaggcagagcaggggaggagggaaggggaggggcagaggggaaaccaggaaaggggaaacagaaagaaaaaagaagaacaaaaaaagaggaaacagaaaaaaaaaaaaaaaaaaaacaaagccaaggcagagccaaaggagcagcgcaggccccgagaaccgcaacacacagcccaaagccagccgggaaaaaaggcaggaagaccccaccaggggagaaaacaagagcaacggccgagccacggcaaaaacccaggagggagaaaggcgggagcccagaaccccacgcacccggaacaccgacacagccccaggcaccacgcccaggacaacaccagcccggcagccagccgaaggccggacagggcaggccccaagccccagacgaaggagggcaagacacccagagcagcaggagagcccgggacagcgaccgccaccgacggcggcccgagccgggagccagagcggcaaaagagccgggaaccccccgaccaccagagacggcacaaaaaccaaagagaccacaggccacgccacagacggaaggaaaggaagccaccacaaccgcaccacggccaagggggcagaacagcagggacccaagccaaccaaccgaaaagccagagggacaaagcagaaagaaaggacggccagagcaccagccgacccagcaggaaaacgcaggaaagcccaacaaacagcgcgggcagaacaaggcggggggggggcaagaagggaagcggaccaagcgggcagagaggcccaagcacgagagaaggaccaaaaacacaaggccccaaacagcgaaacggaacacagaaaaccaagcaccaacagggaacaaaagggacacccccggcagaaagcgaaagggggcaaacacccccaagcagagagcaccccgcaaagccaagacgggaaccccaaaggcgcagacgcccagcgccgacagcagccaacccaggcagcgagcaaggaggacagcaaggcgagggaaggaagcagcgggagaggcagggcacagaacgcggaagcgaagaggccaaggccaccgccacgcaaggcccgacggggagcagcacacccgcagacccccaccaaggagagaaggcacgccccaggacacagaaacgaaaggagagggccagcagaccgcaagcccacagcacacagaggacaaagggaaacccacagcagagcaaaggcagaggaaagaacccacaaagaaggcaccaggagacgggagaggccaaaaccaaccgaagagagccgacacagacagagaacagggaccaggggccaggccaaaggcagcggggccgggaaagcaacaacgcacagggaaaaaaaaaaaaaaaaaaaaaagaggcgaagagcaccacagcgcagaggccacaaacagaacacggggaaggaaaaaaggcccacagcggcccacacggaagacagccagacaggccgcccccacagaaacacgaaagaagggacaagacgaaagcccacgaccagccaccgagaacaaacaaagccgcccagccccaaagccaaagagaacgacaaaacgccggcaggcagagaacaacggcgcaaaagggccaaaccacaagccgacaggcgagggggaggaggggggagggcaggggaacccggcaaacaaggacgaagaggacaaacaggaaggaggaacagacagggaagaggagaaaagcgggaccgaaagcagccagcgggacacgacgggggccgcgaggcccagacacgaaaagggaaggcccgccgcccaccccagcgcacaacggagacaagcgcagcgcaggggcaggagcgaaaccagcaaccggggcgaacggaaacggaaaaccaaacaggagaccagccagaacgagaaagaggaccggcggggcagacaagcccgccccgcaaccaaaccacggaggcgggccccgagaggcgcagcaagaagcggccaagaagggcgaagacccacagaacagccccgagggcgaagggaagcggacgcccagggcaagggccagggaacgcgcccacaagcccgcaccagcaggaccggaaggaaaaaaacaagcaacccaaaccgcagacaggacacacaacaccaagagcgggcagggcccagccaacagaaaagcaaggggaccgggaacgaaaaaagccaacaacacaagcagacgaacaaaaaaagaaaaaaaaagcccgggcagaaaccgaggagagaccgaaagaaagaccagaggcgcaaacaccaggagaagcaagccggggggagacccgccggccgggaaccccaaacacacgcagacaggccgcccacacagcagagaggccgccacccagccacacacaaggggcaagccagggaggcaagcgaccggaaggaccccgcgccagcaccaagcgccccgagagacaaaggacacacacaaaacacgccacacgagccgcggcaccagaggaaagcgaacaagcaaggaaccaccaacagacaccgccaaaacgcaacccagggggggagggagcacagccaaaccacaaccggaggccacgcaggcagaccggagcaaggccagccggcacaagaagcagggcagccagggcgagagagacccgcaaaaacaaacagacaaaaaacaaacaagcaagcaaacaaaaaacgggacacgcccaacaggcaaccaggcccagcacagagacagaaaagagcggcaagggacacggacagaaacccagcggagagaaacaacaaagagcaccgcagcgggagaagacgagaacacacaggccgagagcacacaggccgagacgcagaggcagaagaccaccaacggggcagcacaggacgagcaaggcccagaaaggagaaccaagggcaagagaagaggaaccccagcacaagaaacacagggcaaggcaggcccaggccaaacagggagggaggagcacagacgagggcacagagccgcaacgaaacagaagaagggaaagcagcagagaggccagggaaggcccagcacagcacgaggagaccccgaaagcaagggcagccggaagagccagagccagagcaagagaggggcccagaacgagcagagaggcagggagccaggggaaaacaaggcaagcgagaaggcaggccaaggggggagcgagacagggccgagcgcagcagagggagggcgacagcagggaaggcgcaagaagaagcagcgcccaggaacacgggagggcacgaggcagagcaagagcaagagcagcggggggacacaagacacgacaacggggcggaccacagaggggagaacaaagcacggaaagcaggagaggacgggaaaagcgaagacagccagaccaaaagaggcagccaaaaagcgagcagaaaacccagagccaaggggcaacagaaggagacccagcccgcgccccaaccaacccaagaaggccgcccaagacgaagcaagcaagacacaggcagccgagaagggcggaagccgaggacggggaacccaggcgggggcccggaaggggcagaaacaagccacaaagagaaaagagaaaagaccgacgccaggcgccagggacgagacacccacaggacaggccaaggaagaggccccaggagaccagagccagagggaaggaagcaacacgagaaggcagcaaccccgaaccagagcggccaccccacaacagccgaccccacaaagccccaaagcaacgggagaagacaccccaacacagaacagacaccgaacccagggacgcgcaaaacaaaacaaaacaaaacaaaacaaacaaacaaaacccggccccgcccggcagagacagggggcgaggggaaccccaagaggccagcacagaagcccagacccagaaggaggccccaccaggcccaacaacacacggcagggagagcaagacaaagccacaaaggcaggcagcaagagacccccgcaagagcggccacggcccaccaagcagcccggggggagcccccccccgaagaacacgcgggcagaaaagacaagagccgaaagcaggcagccaaaagagcacagaggcaagaacagcaagaaggccccaaagcacaccaagcaggaccagaggaaccacgaagcccgagacacagcacgcaaaaagggcagaacggcccaccaagccacacagacagacagaaggcgaagaccagagcggggcaagcacggaggggcaggcgaccgccaaccgcaccaaggggcagaaaccgagggaacagaggagacacacagcccagggacaggaaccgagcgcaacgacccagccgacaggacaaaagagagacagcggcagggacagccacaacaccaaggcccccacaaacaccagggacaaacacagaaaaacagagaaacaccccaagaacaaagccccggaccggggaagaaaagggcaaccgaacaacaacaacaaacccgaaacagcagagagaaaacgcaaacacaaggaaagggacagacagaagaggagggaaagggggagcaaacaacggaagagaacacgcccaaagaggagagagcacagacaaaggggccaaaaacccaaaggccccacggccccaccacagcacgcagaaaaggaaaccagaccaaaaagaagggccgcccaaaaccacaaggagggaaacaagccacggacgcccccagcagccacaggagcgacgacgcaccacacggcggggaaagaggaggaaacgagaaccacaccagggcagaaaaacgaaagccagaccccagcacagaggaggcaaccagaaacagagcacgcacagcaagagaaaagggaacagccgaggggcagagaagaccgaccaggaggagagggcaaacaggcagcagaagagcaccaggcaaggggacggagaagccaaagccagggagagaagaacaagggaggaaagcccaacacaagggaaacagcgggggggaagacagaccgcagaacacccggagcaaaggccagcgccacccccacccaggcacgccccagggcaggcccggccaccaagggccaaacgacaccggccaaggcgaggcaggagggcaagaaccgaagagagaggcgggagggagaaaagaagccaccaaggagcaacggaacagaaggggccggccccgggccgggcccggcgcccaaccagacagcggggcaccccccggggccacagggccacgggaacacaggccaggagcccaagccacagagccgggcacccggcccgcagaccaacaaagacccagagccgcccacaacccaggccaaagggaggaggcacaggggcccccagcggagcaccgacacacagcacccccccgccccccggggacagaggaggacaggcaacaggcgcaaaaagcacacaccaaagcaccccggagccggccccccgagcgacccggggaagcgaggcacccagagaaaaacaaacccaaaggacccccgcaaagggaaggcaaagcccgcgaccacccggggcgagcccaggcacaggaccccggaagagccaggaggaccacgagccgacaaccaggaccacgaaaggcaggccacaaaggaaaaaaagaaaacacccagacaaacggccaggagcacggacaagggaaaccaccacaaccacagagccacgagcagcccaaacaaccccaagacaaggccacacacggggccacacacacgaagcaaacaagagccgagcagggaaagcagcccccggccccgcaaggacacggccccgcacgcggagcagaacaggaaacaacacaaggcccaaagcacagcccaagcaaccaccccggaggcagaccagagagcaaaggggcagggccagcgacagccgcaagggaaggacgggcaggaaccaaacaaaaaccaagcagaacaggggagcaaacaacgggggcgacaaaggacaagacccggcaaaggaggaaaacaacggagccaagggagaaagaaaaggaagggaccacacaaacacagggcaaaaccggaaagaaggggccaagcacaacaacagccgagggaaacaccaaggaaaagccagagaccacacagaagcaccggccaaaagaagcgacaggggagaaccagaaaagacaacagaaagcggaagaacagcgaaaagaaaaaaccagggggagagcagcaagcccacaaagggaagcagcacacccaccagaagccaaccacccacgacaagggaggaaacccgcacaaaaacaaagagccaaaggacaccgcacacgccaagagggaaagacaccgaagccaccagacagaaccaagaaggacgagcccaaagagagaggggagaagaaaggaagaaccaggcaagcaggacaaagccagccaaagaaacaaggaaaaggggggaaaaagacagaaaagcagaaacaccgaaaggaaacaaaaacaagccacagccgggacaggaggaaagaaccaaacgggacaggacagaccacaaaacacacaacgggagaaagcacggagggagggggaagagagaaagagagagagagagagcgaggagcaagcaagcgcaggaagagagaccacaagcaccgcagggccaaagaacgaaggggcagaagaaagcggcaggaaaagccagaggcaggaaaaagcagggcaagcagcccaccaccgcgggcacgcacagaagccacaccacaggaggcggacaccccccaaacaggagcaagcaagcgcaagcgcgacccgcgacagcccggggagaagagacaagagggaaaacgaaaggagacaagaaaacccgaaacaagcccaaggcaacaagccagggccgcacgcaaaccgcaccgggcaaaagaacccgggcacaccacgaaaaggggacaacaaaagaggccgaacagggaaagcaaagacagaaaacgcgaagaaccgcagcagaggcacacaaagaccggaacgcaaaggaaaccggggcagaacacggcgacaggaccaacaaccccccggagcaccggcgagaaaacaggccaggcacacccgggaacgcgaaaagcaggccgggcagggagcgagagcagggagcgagcacagcgcaagccccggagaggcaagagaagggcgaccaccacagggagccagggagcagacccgcccaggaccacacccaccccccccaggaggaggagaaaaggcagcagacaaaagcccgaggcagagcaggagcgaaaccaggaaaggcaaaaagagacccccccaacagcagaaagggggaccaggggccaacaaccagagcaaccaggacaagcccacgcaagcgcggccgagcaagggcgggaaaaccgaccccgaggcaaaccacgacgaagagcaccaaggaacaaaaagcaaagagccccaaagcacccgaccaggagggcggggggcccggaagcccaacccgaaggcacaaaccaaaaggagaaggaccccaccagccacccgcccaccagaaaaccccccgccacagaccgccgggacaggcccccaaagaccagggcagcaaagcacaggaaacagagggcagaaaagagcccaagcaccccaggggacggcgaaaggcaaacacgcgaaacaccccagagacaagaaagcacacagcagacaacaaaggaagcgacaggcacccgagaagggaggagggaccaaaccgccagcaccaaaggccggacccgaggcgacaccccggggcacaacgccaaacaacacccagacagagaaaagcaagcccagcccaagaaggggggccggagccgcagcgcaagacagagaggccccagccgcagccgaccggcagaacgaagaagcaaggaaaggacaccccaggcaaagaacccgccacaggaaggggagaacaggagccccgagaccagccccaccgcaacgaaggcacaggaaaagacaggacaagagggggccaaaacccgccaaacaaaggagcaacagccgccccgcccaggaaacagaggacaagagaacaggaagcagagcaacaacagcaggcacagcagccagcacaaagccggggaccccccggaccccacgcaccccccacgggccagccagagaagaagaggaggacaggcaaagcaagcaaaggccagaggaaccccgcgaccgacagggccagcacagaacagcgccaaagagggccaaccggggcgagccgggaacagaacgcaacaaaccaacgaccacacagagcaaaaaagagaagagcaacaaaaagaacagagggggcaccacagcagaggaagaaaagggcgcaggaggaagacgagagccgcgccaaagggacaaaggcggcgggagaacagaaacaccgacgagaaccaaggggccaaggagagggccccagaaggcagagaagaaccgggagaggaggcagaagcaggcccaccagacgcccagacagaacaaaaggaggaccacaggcaggcagaacagacaaccccgaaagaaccaccagcccagcccacccgaccagccggaccgaaccccccgccgggccaagcaccaggaagcggcaaaaaaaaaaaccaccccaccaagaacaaaccaggcgccagagaggccccccaaccccagccaggccagaaccgcccagagaggacagaccaaaccccaaaaccagcccaggcggccgcccgcaacccagcacgcaagccaacacaaacaacgcagcaccgcccagaggaacgcacgaggagcagagacagcaccgaagagaccagacacaaaccaacagacaggagacggaaaacgccaaaaaaccacaacgcagaaccccgcccaaacacacacacacacacacacacacacagaagacaagcagaacacagaggaagaaggagaagcaggggaagagcaccacaacaccaaacaccaagaaggaaaaggaacgggaccaaaagaaggaacaaagacacaccacccagagccaccaggacgcagggacaacaaaggccccggcccgcagcacaaggagaagacccaaagacagaagccacgggccccaaaagaacacgaagaaacagaaagcaagccaggcagccgaggaacagaggccccccggagcacgagggacgaccggaaggaccgccacgcacagagggccggccaggaccagcagaaacgggacagaaacaagaggacacccacgggaccagagcccaaggaccagagcagagggggggggggggggagaaagcagaagaaaaacgaagcccacaaacgagaagagcaagcagacggagaggaaggggacgggaaaagaaagacaagaggggccaagaacacaagggagcaccggccagagaaacggccacggcaagaacaacaaagcaggaaccaggagcaaagaccccaccacaagagcggaggcgggcccaggagggcacggagccaagcgaccggaagcgccacaacacagacgaagagacgcccaaaacccagccagagccagggggggggggggcgcacgaagccaccaagacagaggcacggacaaaaccgccagaaccagaaagggccaaaggggcagagaaaacgacggagccagaggaaagccaccagagggcaacacaaagaaggcaaggaaagcccacgcagggggcagcaggcacccacgaacgggcccagagcaaccagaagcaaaggcagcagacggagcaacggccgaacgcggaagacaagacaacaacacagcaggcgacgggcagggagaggcaggcgacagcgcaccagagggcgagaaacccggcagcaccacacaggggggccagggggggagacagggcccggagcccggcaccaaaaccaccgcagaccagacggcgaagcacaaagaaaccgacgacccccgagcaccaggccagacacgggcaggaaagcaaggaaagacaagaagagaccaagaggggaggagaaggaaaacacaaaacaccagcacgggaagacacacaaccccacaggcgcccagcacgaagcagagacacccgcgaaccaaccaaagaacaacaaggccagagagaagcacacaaaagagagcaaccaaggaaaagcagaacaaacagacaagcaacagacggcacaggcgagggaaaaacagacagagacaaaacaagcaaaccaacggcaggggaaccacaggcccggggagggaaacacggaccggaggaaaagggaaagaacagcgggggccagcagcagacaccacacccggcaagcccacagaacgcacccaggacaacagcgagcacgcgccgaaacaaacaaaggcaagagcagaggcccaccaaccacaaagcaaagggcagaaggcacccagaaagacaggcgaaagggaggcgaaagggcaagcgaaaggggagaacacgcaggggccagagcagagccagaagaaaagagcagacccccagccacagagagacagccagcaccaccaacaaccgagccacaacaacgacccaaaaccaaagcgcccacggcccggagagggggcccagcagcgacaccaacgcgaggcagaaacaaggggcccaaggggaaaaggcagccaaggcaccagacaaacacaagaaaccaagacaaagaacccgaccagagcgggccgcagcacaccaaccccgagaaggcagagacaaaagccagaagggaccccgagaccaggggaacacagcagaaagcgaagaaccaacggccggccgcaaacaaaggggaaagcccggcgggagccccaaaaggcacaagaggcagaacagacacacccacgaacacgaccgaagagacggcccagcgaagacggaaccccggaaggcaggccagaaagaagaaaaggaggaacccaccaaagccgcagaaagaggcaggaaagaaagccacacagccacagagacagcaacccgggcggggcaagacaggcagaaagcacaacacccccaacacaacacccaggcgggcggcaggcaagagagcaaggccaggccgaccggggcaggcaacccaggagaagacgcgagcagaaggccaaacaaaaaacaaaaaacaaaaaacaaaaaacaaaaaacaaaaacaaaacccaagaagaaaaacgagaaaaccaaagaccagggccagcaggccaggagaaccaagggcagacccaacaacgagccaagggagggggaaaggggcggcccagaccacgccgagccggcacacacgacccgaaggcacacgaaacaacggcgcccccggccacaccccaacacacacacacacacacacacacacacacaccagacacagacagccaacacaacccaaagggcccaccaccccccaaaaaaccagccaccaccaggacacccaccaccaggacacacaaaaccacaagaccccccgcgagccaccccccaacaaagccagcaacacggaaccaagaaacaacaaccgaaacgacacggcgaagaacaagacaaaacgagcaacaccgagcaggccaaaagccccaacacacaacgccgcgccccagcaaccggcaggacagcccacagccccacaagcaagagaccgagccgccccagaccagacaaaagccacacgcaagagacaaaaaaacgagaaccccgaaccacgagcacagacccacgccagagcaccaagccagaagccccggccaccaccaaacaccccaggagacccccaaagagaggccagacagagaaggaaagggggacccaagggagcgagcaagaacaagccacagaaacccccaacccagaggggcgcacagaggaccacagaagcgaaaaccacccccgggggaaaaggaggcaaagaaaaaacaccacggcgaacgaaacagcaacaacggagcgaggaaaggcaaaaccccacgaggaaaaccacgccaaggccagagaagggagccgagcgacaagcgcagcgagcccacaaaacagacgacccacacaccccagccaagaacaggacaccaaccgagaaccaaaggcaaagggaagaacccagagagagaccgcagccccagcagccacaagaaaaaccagcccgccacccccaaaccggcacccgaggaggaaaggggccagaacgcccaagagaccagcgggacaaggcgaggaggaccgaaggggaagcagggggggcgaagaggaaagaggcacacgaccgcaacaagcccaacacaaagagacgacggaccagggccgaaccacacagacagacaggggccggggccggggcgcccaccaaggacccaagccccgaccaagcaagcacccgccggggcagagaaggaggacacgcggaggacggaaagacaccgacccccaagcagggacgcaggcccaggcgcccccccaggcacacgacacccgagcaggcaagcagcacagagcacaaggaccggcaacaccacacagccccgcggaacggccaccagcaccaacagcacccaagcagaaaccaggagaagccacacccggcaggcaccgagccagacgaacacaggccaggaccaacccgccccccccgcagcaaaagacacggccacacgcccaggcgccccccccacaccccgccccggccccccgacgcagacacacagaaacaaacacaaacaaaacgccagccagggccccccagccacaggaggccagacaggcacaaaaccagcacccccgccgnnnnnnnnnnnnnnnnnnnnnnnnnnnnnnnnnnnnnnnnnnnnnnnnnnnnnnnnnnnnnnnnnnnnnnnnnnnnnnnnnnnnnnnnnnnnnnnnnnnnnnnnnnncagcacacaagcacgcagccagacccgcgagccaaacagacaggcacacccgcccaaccagcaggggaacgcggggaacccaaggaagggggggccaccccacagcaaaaagcgcccagaaaccgggaagcaccaaacgccaaaaacaggccagagcaggcaggccaccagaacaggacccagcccgcacggcaagcaggcgcccacccacggggccgaaggcaccacccaaggagccacagcccagacaggcagaggggaacacgcgcaaagaaagccacccacagagccaccccaggcaccgccacaaccaccccccccagaccacccacaccgagggccacccacaagcgcccgcccgccgggggggggccgccccaccccccgccgcccccgccccgccccccgccccccccacagaaccccccccccacaacacacacggcacgcccagccgcgcgcagaccaacaagcacacacacacaacagccaaagagaagcgggagcagcgaaggccagcccaggcagcacagccgcccccacgaacggccgcagaggaagaccgagcagccacagacccggccccgccaaaggagcacgaggacgccacaacacccagcaacaagagcaaagacagggcgcaaaggcccaagaggcaggacaagaaacaaaagacaaggaaaaaggcagggacaccacaaaagccaacgcaccaagaaacagagcccaaaaaaaaagaacaacaaaaccaacagagagagcaaaggaaagagacaccacagcaagcgaggaaacaaaaaagacaaagccacacagcaaaagagggagcacaccacaaaagaaaagaaacacagccggacagaggacagagagaaaacaacacgccaggagcaggaaaaagcaaacaaaagagaggcggaggaaaaaaacaacaacaaaaaagaggacaaaccgacaccacaccgaggggaaaaaagaacagccaaccccaaaaaaagaaagaaaagaagaacccaaggccgaaagacaaaaaacacagcaaaaaaaagagcagagggggcccagagcagcagcccccggccccccccccccccccccacggcacaagggggcccggggcacggcgacccggagaggccccaccagggacagggggcccgaggacccggaccgccagacggagccggaacaacaaaccaagcagggcggaggaacaagagcggagccaaggggaagccccgcagccagcacaccgcccaaggcaccccgaacggccaggccccccaaaccaaacagggcccagagaccacaaacaggaagcccaggcagcgcgggcccacgagccccgagcgggcgcgccaggcccggggccggcccaaagccggggaggacggaacccgacaccgcacaccagcccgagcagcgccaccccccacaccaccccaccccaccccgccgcccacccccacccacgcacgaaagcagcgccggccccgaaagggggcaaccaaagggacaggacacccgggccccggcgagccagcccaggaagccccgagcagagccgggcgccaggaaagagccacgcaagaggaaaaaaaaaaagaaacgaccacaaaaaagaccacagcagaagacacggccgagaaagccccccccgaaaacaaaaaaagaaaagaaaaggaggggcggggcccagacgaccaccccccccaaagaaaaccaaacaaacaaaaagcacagcggcccaaaggagggggaccagaaaccccagaaacaagagacagagaagaaagacaagaagcccccaccagcagcacacgccccagaaaccagcccaggcagaaagaagccgacaaccggcccacacagaaaaaacacaaacgagccaagaaacccccggcgacccagagagaaggggggagcagggaccggcaaaacgacagaaagagaagcgaaacccccaaacccccacacaaacccaaccccccccaacacgccccgcccggcccgccccgaaggcnnnnnnnnnnnnnnnnnnnnnnnnnnnnnnnnnnnnnnnnnnnnnnnnnnnnnnnnnnnnnnnnnnnnnnnnnnnnnnnnnnnnnnnnnnnnnnnnnnnnccccccccaccccccgcagagcacacagcggcgagcccaggccgcccccgggaccggcacacaggcccacagccgcagacagggcaccccgaacaaacacagggcaaggggaggcaaaccccgagggcccaagcccgagagaggaccgccacaaccccacgaaccggagcagaaacaaaccccccagccccaccgcgacagaggcccccgaggccagcccacgacccacccccgacgccggagggcagcagccaccacagcagccacccccggccggccccgacgcagccagcacccagccgggcccagcacacgaagggcccagggccccccaccaacgcacacgccacgcccacacacgcaaaccagcgcgagagcggaacaacagcagggcacgacccacacaaaacacagcagcccccgcagccgcgcggaaaagacaccaacgaaaagcaacgcaggaaaaaaagggcccccaggcaggacaaaaagcacaagcacacacagaaacacaacacaccagacagaaacaacacaaacagccagcgaggcccacgcaaacaccccaagagagcggccgacccaaccaccacccccccaccgagccaggagcaaggggcccgggaaggcacggagcaggcggcccgcagccccgagcaggcacccccaccaccgccggaagggacagacacagacagggaggagggacggcggcccacagcggggcaggcagaaccagcccacgccaccgcaaccaaagggcaacggccaggcaggaccccccgggaaggaaaccaaaagaggacggcaagagcaggaagcccccagccgaaaaccggagaccaaaaaaacaaaggcaacaggccaaagcccagccgcggcaggcgggaaggaaacagcgggaagccagcgggggccccccccccccccccaaagacccacaccaggccccaggcagacacccagcacgggcgcgacccccagccgcaccacggaacccagagcaggggaaccacaacaaagggaacagaaaaaacagagcaacgccccggaaaaaccaaccaccccaggcccaggaacagagaaaagcacacgcagaccagagccagcagcaacgccgccacccacaccgggaccaggaaggggaaaggcacgcaaaaaccagaaggacaggaagcaaagacagcggagggcacccggaccagagggcacacgaacgcgccaccaccccgcacaaccaaagcagaggcgacacaggcagagagagcgacagaagacccaggcgaggccagccgaaacacgaaaaaaccaacaccggacaagggggccaagagaaccgagcccccacccgggcaaaccaggacggaggagcagagaacaggacaggaaggggcagaaaaaacagaacacagaacaaagaaaaagaaaacacacaagaacaaaaaaaaaaaaacacgaaaaacaaagaaaaagccaaaaaaaagaaaaaagccaggcgggaagggaaccaggaaagagaacagcgcgaaaacacacaagccaccgcccgcaaagcaagcagaaacccaggagagaaacaaagcacagagcagggcgagaaagacaagaaaaaagaggccgggcaccaggacaggaggggagggaaggaccaaacccagccgacaaagaagggagagcaggacacagccccccaacagcaagcaccaccccgcccgaagaggacaagagaaaagcgaagaaagcagaccaacaggaggaggccccgaggacgcccggaagggaaaaacagggcaaagacaaagaaaaggcaaaggagagcagcacaggaggggggagccgccgggagggaaagcaacaggggcaaaccgaacagagcccagaacgaacagacaggaaaacaaaaacccccacagcggcgacacccagcaccaaagcaggcaaagcaaacaccagcagaaccaggcaccgcagaagaagaggcaggaaccccacaggaagaagggaagaagaaagcaacagacgccacagacagccaggagaaggaaaagcagacagcaaaggcagcaagcaaacgacaaagaaggacagaaacacgcaagaggaggccagagagacagcagaagggaagcacggccaaggaggagagaggagcaaagggggccccaaaagaagcgagcaggagcagggacaaccgggaagccccgaggcggaaagagagggccacacaggggagaaagggcaggcaaaaaagaaggacagaagaaaaaggagcggggacagcggaggcgcccagaacggagaaaccaagaaaggcagaagaaaaaaaacggaagaggggaggggcgacagaacccaagccagggaggaaccgaacccacaagggaagaaaacaggggaagccacagaaagcaaacagggaggacgacaaaacaagcgcacagacgcacgccaaaacagaggaggaacaaggaaacggcgagcccacaggaaggcgagggagccagacggacaaaggacgaaaaccacaggcccccaaacaaaaaacagcgagaaaaagcaaaacacacacagacagggcacaaaagagggaaaaaaagacggggaggcaaaaagagagccgggccccccccccagaaccaagaaggaggaagaggagcagacagagaggacaaaaaggcacgcacgagcccacacagcccaacccacacacagaaacagcaacaaagcagggcaggaagacagaacgagaagaaaaccacaccaccaaacccagagcacacacaacgggggaccaggggggggggggaggggcccacaaaccaaaggacaagcagcacaaaacaacagcccccacagcgacccagaagagggcgaagggaagaaaagaaaggagggagaaaacaggacgccagcacaaagcgagcacggacggcgaggcagacacagagaaagaacaaccagggcacaggcaaaaagaccgcaagcaaaaaacaaggaacaggaaaacaaccaaacgaaggacgggacaggaccccacccaaccacccacaaaggcgacacggaaaaaaaaaaaaaaaacggacaaagcaacagcagacagccagcccagggcacagcaagggagcacacacacagagaacggagacggaaacccacacaaaggcccagaagccgcccaagacacagacacaggacgggaagccaccaggcccaagaaacaccgaagacgaaaagcccacagcaacacagagcaggacaaccaagaagcaagcaaccgccaacacagacgaaccaagcaccagaaaagagaggaaggaaaaaaaaaaaaaagcaaacaaagacaaccccaacaaacccagcccgggcggcggaacaaaaaagcaccagcacacaaccaggccgacaaaacacaaggaagccacaaccaccaggacagagcacagggccccaagaaagacccaaggagcgaagggcacagcccaaggaagaacaacaaagaacaccagacccagagcccgggacagaccaccaaccaaagaaaacacagaaggaccaggccgcgcaagagcagaggaggcagcggcacaagggaggagaggcccggccggaaggcagccccagaaggagacgccagggcaggaagcaggaggggggggggagcaggggaagggggagggaagggggacgaggggaaacaggaaaggggaaacacagaaagaaaaaagaaaaacaaaaaaaggaaagaagaaagaggaacaaggggagacagccaaacaggacgagaagagcacaccccaagaacgacccgcgcagaagagaagaagacccgcacggaagagacaacgaccgaacaagcacgagaggacagaacccacgagaaaaagccccacaacaggacagaggcaagccgaagagcacaaggagaaaaggcgaccacccgggcagggccagcaaaaaaaaaaaaaaagcaggcgagcaagcaaaggacaagccagaagcagcaccccaggcccgcacagccccgcccaggccacccaggaaaccaccgaccccgagaacgggaagaagcaaaaaacccccccccaagggggcagggcacagagcaaagcaaaccgacaagaccgaaacaaaccaggaggggacggacagacgaccaggccagagacggaaaggacggaacgagcagagaaaccagaagaacagcaggggcagggaagagcgagaagaaagaaggagggcaagcaggcaggggaagccagagggaagcaacccacagccaacagagaagagggcccaggggcggagaaaagccggacaaaagacagcaccagaaggaaaccacagaggacaacgaagggagggagcgagaaacaggcaagaagaagaaccagaacaggaagggaaacggaaagagccccaggccagcccacagagcggaccacaggggccaagggaccggcggcagccaaacacagagaggaaaaagccgggggaaggagaaggcaggagggcagagaacaacggagcgagccggggcgggggagcagaggccaggcaaggacagccggagaaggaagacaaaggagaaggggcagaagaggggaggcggaccagaacagagcaaggagaagcagggaagcagcccagggaaacagaagaccccagaagacaccagaaagacgccaaggccaagaacaaacaccacagccgcaaggagccaaccggaacaggagccagcgagaaagcagagggggagcagagcagggacccgagcccggaggagcccagaagacaggaggaacacacagaacagaaacacaggagggggacgagcagcgacccaggccgggcaaagaaagacggacccacaggagagacgaacgcgaagaaggaacacagagagcaaaaagagacggaacaaagagaggaaagaaggcaggaacacaagcgaaaaaacaagcaaggaaaaggcacaggggagaacaagaaacaaagaagcaccagagaggaggcaagacaagaggaaagcggcagacgcaggacacaagcaagcagagagggagagcaaagagaaaaaaaaccccaaaaggggcaggagaggccggggcacgaaggcagcggagggcccggcggggcgggcaaaaaagcaagcgagcaagccagaggagcgaagccagaggcagcaccccggcccgacagcccaccccaggcgccgcgagcccgccggccccaagagcggccgggagcaaagccaaagaaacccgagacgacggcacacagcacaggacccgacaaacagaaaacagacgaccagggcgagagccaggaaacgagcaaaaacaagaaaaaaggaaagcgggccaagccgaaaggagcagagaacacccaaaggagaagacacagacagcaagccacccaccagcgcggggacaccaaggccggcaaagaccgaagccaaacagcaacagagaccacgagaacccagggccaaggcacaggagaacaaggacaggacaggacgaagccaccagcccacagcaggggccaaaaccaacagaccgagcagcccacaaagcacccgcgacgaaagagcacagcaaccagaaaaaagacccaagagaccgagaaggccaagagcacaaagagagcgcccggaaccccacgggaaaaaaaaaaaaaaaacaaacaagaagaaggaaacaaacagaaccgaaaagacacacggaacaagagaaaccaaaaaaaacagccgcccgagcccacaccaaaggcgaaggcgagggcgacagacaccaaagacaaacacggaaaaccagacgcaaggccacgaaaagagaccccgaaaagggcagcaggggaagggcagagccagagcaggccagacggccacaagcccagagacaaccagcgcccgccagaagaagaaaaagcggcaccggggacagcccagagaacggggggcggagccaccgagcgaagcacacaacacccaacggagccaagagcggcagaaggagaccgaccaaaccccaacgaagagaaaacagaacaagacaaacacaagagccaacaacaggagaagaggacaggggccccgcccccaaaaagaagggaccagcaagggccgggagcagaggaaagccacaagggaacagccaaaacaaaagcagcgccccacacacccgcccaagccacaccaggcgggacagcacgaccacggaccaaacaacccaggccaaagaaaaaggaagacacgccagggacagggaaagcacaaggcgccccggccggaaccggaccaggaccacaggccaggaggagaaaggacacagggaggcacccagaagaccggaaggacagcacacagcacccagcagggaggagggggaggaccggaccagaggcaaccggcacaaggagaggcgaaaaagaaaggaggcccgccaaacaaaagcaaagaacgccgcccaggggccgaaagagcccggccggggagcagaggagagaagcaggagaggggaagcgaaaccagagcaacgagaggagggcgggaacacgcagaagcccgggcgagaagaggccacagccacagcaagccacggaggagcccaggaacagcacgcagccagccgaagaacgaaggggaaaaaaaacagaaaacgcgcccaaagaggcaaagaccaggaacgaagagacagcccagcaagcaaagccaggagcccgcaagcagccggcccccaaagcgcacgcgcgaaggagggaaaaggaaggccgccgggcacacagcaggacccccggcaggaggcacaggggggaaaagcaccgagaacggacaccccaagaagccagagcgaaaagcccgaagaaagaaagacaagaagggggcgaagccaaccggaacggggccagcccccaagcaaagcagaaaaaaaggacggagcaaaagaccgaagaagcccggccacgagcgccgggagagccaggacggggccgccccacacaggcggcgacggaggggacgaagagagaaaaggccagagggcccaagccccccccccgcaagcaaacaagcaaaccccaccgccccccaggggagcaaggccagaggaaacagagacacagaggcaggacagcccggcggcagccgaggcccgccgcccggcaggaccagggcaagcccagagcccccgcacagaggagcggcggagaggccccgaggaaccggcaggcaaaagaaaggacaaaaagcccagccaggccggcacaggaaagcccaaaaaaaggaaaaggcagcaaaacacgagaggcagaaaacaaaaacccaagacaccccaaccggaaagaagcgcgagagcaggcagaaagaagggaaagaggagaacaacgagaacaggaagagggagagaacaagaagggaagaaagaaaaggcaggccagcggaaaggggcgcaacacacacagccacaacacagagcgcccacacacaggcagggcaccgcaagcaagacaggcccaaagaaggaaaggaggagaggaaggggcggggaagagagacggaaaaagcccacacgcccaaaagaaccaaggcaaacaaacagaagcacaaacacacagccccagggaggcagccgaaagcccaggaagaggagacagggaagacccacagaaaggcagcaacgaccaaggcagagaggaggcacgagaccggccaagggaggcaggagcccccacacacccacggacccaaaaaagaacaccgggcgcggccgcacaaaacgaaaacacaagggggaaaaaggaagagaaaaaaagcaaacggaaagcaaagaccagcaagagcagcggggagcacagagcaacccgagcccagagcgagacaaagaagaaaccacacccagcgaaaaccacgacccaagcaagacaaaacaggcaaggccacaggaacgacgccaaggacaagaaaaggcagggaggagggaagggcggaaccacgggcaagcagggagcacacacacacacacacacacacacacacacaaaaaaaaagcaccaaaaaaacacaagcggggcgcgcgggccagaaacgccagggagaaagcaagcgcacagaagcaaacggcaacaaaggaaagacaaccaaaaggaacaacagacacgcccaggcaaacaacaacgcgcccacggggccgacgcccaggaccggaacgcacgcccagccgcccaagggaggaacaggagaagaacgccaagacaaaacaaagagagcgcaagggaccaccgggaaccaccaggggcgccacgacgagaagggcaagaagggaacaaagaccaggcgcacgagccggaaagacagcgagcggcagaagcaacacagaagagccagggaaagccgaaagaagccaaaaggcaccagaaagcccaggagcgaagaggaagagcagaaagaaagaaagaaaagaaggaagaggaagaagaaaaaaaaaaaaaagagagagagagacacggagagcacgccccgcaaaggccgggcaacccggcaacacaggggccaaaaacacgaagggacgagcccccggggcgaagagaacaaagaccacaacgggggggggggggaaaagagaaagaaaaggcaagccagggagaaggaccacaggaggcaaggcgcaagcacagcccccgccagggccccgagagaaccccagccagggaaggaagcccccccaggccaggcggacagacagccccgcacggccagccaaggcacacacgcagacaggccgccgcgaccagagcggcaccgaacagaaagggcagggggagcgggcaggggcaggaaggagagaaggaagcacaggccagacagagaagaggaggcggccaagaggcgaagcgggagaggccgcccggagcagcagggcaggaagccacaggagggggcccaacacacccccagggcagggaagccaaaggggcacaaggccggccaggcagcggccggcggggccccgaccccacagagaggaacccacagacagcacagcaccaaagaaaacaacccacccaacaaggcgaaccaaggccacaaagacacaaggagcaccccaccagaaaggaaaaagaaaagaaggccgcccacaagacagggcccggggagagaagggaaccgaagccaccgccagccaggaaagaaggagagcaagcacggcccacaacagaaccagcggccaaaaacacgagggccaagagggagccagaggaaaacgcgcacagggagagccacagcagcgcagaagaaccgcaacagcagcaaggcgccagcccaggaagcgccagcgggggccccgggcaggggggcaccccaaaaagaaacgaagcccgcgcggacaaccgcccacgcacccgcgagagcccaagcggggcacggacccacacacccagccgagggccaaccgcccaggagcagcgccacgccacccagcaccagagccagaggcaaggaccgggacacgcagagcgaagggcaaagcggggacaaagaacaccagcacaaccaacagagaaacaccaggacaggaggccacgcgccagcaccaggcagcagagcccaaagagcagaagagagccagagagccacgcaaccgagacagacagggagcaccgaggggcgggaagaaaagagcgggaacaaacaaggcaaccgagccacccgccacccgggccaaaaaaacaaacaacagagcaagacaggccaggcgaagaagcagagacacaccccccccccccccccccacacacaaaaagaggacaccagcagccagccgaggagggggaaaaaccccacacccaaacggcacaggcacaagcacaagaagagggaggggaagacaaacagggcccgagccggggccaggggggggcgccacacaacaaccccccccccccaagcccacgggccaacaagaggaaacaaggacgcaaaaccaacagcaaaacaggaaaagcaaagaaaaagaacaaaaccccgggagggccggggcccagaggaacccacaacccaagagagcccccgacgaaaaagggcgcgcccagcagacccaagcccccaggaccaccccccacacccagcaaccggcccacgagcgcgcacaccccccccccccaccagccaccgagacagcggaccagcccaacaagccaggaaaaggcgggccaaagaaaacaaacaagcaaccggacccaaggcccagaccaacaggaagaagagaggaagcagaacagagcaccacaaggcccccccaaaaagcaacgcccgaagaacagacaaacagaggcggcacagaaagacaaagcgagccaccagaacgaggccaccgccgggcaagaagaaaagaaggacagagcagcaccgagacccaccgagccacgcagcccacggcccaccaaccacaacccgcgaacaccaggaagccagcgggccagcagcccacccccagcccagcggcagaaggccacagaccccagacgaacaacacgcgccaagacagagacccagaggggcaaccccagaaaacaagaaggaaaacgacccagagagcgagaagacaaggaaagaaacacgaagcagcggagagcggaaacccaagaagccacaaagaacagacggaacgggccagcaggggggcccacaccacgacgcgacaccccacccaaacacaaagacaccacaaccacaccgagcccccccgccccacggcggacggacgaccgaccagcggagggcagggaccagcagagaacaggccagcacccccaaccagggcaacaagggagcgaaagagccaggaaccgaacaacacaaaagaaaacaaagaagaacaccagaaagccccgccccaagaggggacagacaggccacaggacagccacacacgaacaccgggaaccacggcgaaccacagacacgcacaggaggaggccagaacgaaccaagcagcccgcagggaaaaacaaccccagaaacggcgcagaggaaccaccggagagggaaaaggaggggagcgagggggagaacacggcagcaggggggccgagcaaccccggcagagaaaagaaaggaaacacccaacaggaaaccagaaggcaaaagagccagaaccaggaagcccccgcaacaccgcccacgcagaccaccagcacagccaagacccccggaggccccccgaggacgcagcccgggccacgggccccgagcacgaggaagcccaagcccaggcgccagccccgggaagaccgcaccgcccggaaaagccggcgaaaaacgaagaagaagagaaccgcccgaacaggaagccccacccccaccggggaaaagcagacgacacacaggcaagggaggcaccagggagccaaaccgaagggaccggaggagcggagggcaagcgagagagggcccccccacgcaggcaggaaggcgccacgaggaccagagaaaggacaagcaagccgggccaggccagcagcaccaacccccgaagaaagacgacaaggagaaaaagggggacacggaggggggggggaaaggaaaaccaaaaagaagcgccggcggaacaaaaacccagaaggagcggcgcagggacgaaggcaaaggaacagacgggagagaggaagcaggcagaggccgcacgagggcagagcaagaacagcccgccccacgacgaacaacacccagaaaaaaaaaaaaaccagaagaccacagaacaacacaaaaaggacccaacacaagcacccaaaggcccccaacccaccccccaaccccacccacccacccccccggcccggcgccccgacggggcaaaaaggcggccaagggccccgcaggaggccgacaggccacgaacaagcagcaaagacaagagcccggggacggagcaaaggccaccaaggggcagagaaaacaggaaaaaaacccgaacagcaaaaacagcaggaacagcgcgccaaaacaggagcaagaagcacagagacaggaccaggaaagccccccaccccgaccgccgggccaccaggaggaaaaggccggagacaggcaacaacaacaaaacaaaaaacaaaaacaaaaaacaaacccggaaaacacaggaacagaaacgggcaacgaaacggccggccaggcacaaaaggaagaaaaaacaccgacaagagagagcaagcaggaacaggggaagagggagggccagaggacacccggggcgaggcgagccgcgcgggaacccgcgcaagagcagagccccgagaagccgccgcgacgaaaccagggaaaaccgccaaaaaccaaaccggccacccgcacccccacccccacccccacggccacaaacccaccaacccaccacaacgaacgcgggaagcaaacgcccccacccagccccccacaaacccgccggacagaccccaaaccggcacagagcagcccaggggaaggagagcacccacaggaaaaaacagaaaaccaagacaaggaagggagaaaggcaggagccccagcgaccgccacaccgaccacacgcacgcgagcagccccaaccccccccaccccccccggggcaagacccgccacaggacccaggcgaaacaagcagaaggagagcacaccccagagacccccaagcgcaagccgccgccagggccgcacggggcagaccccgggacaggaacgagggacaccccacccccccacccagccggccagaccagaccccccacggacacaggaagccaagcaccagacggaccagggacccacaaggccaaagccaggcggagcggccggccagagaaagggccacccaggacggccacgcacccccaaggcccagccgccccagccccaaagccaaggcacaaaaaccccaccccacgcaacagaggaaccagagagaaaccccaacgaagcgccaaccagaacagccaaagagacagaaaacacaccgaaacggaaccacacaggccaacagaggccccacaaacagccacccgcagcaggaggagacagaaacagaacacagcagacccagaaagggcgcccaggcgagccgggccgagcaagaagcccgacacagcggcagcagaaaaaacacaggaaaaagaacgaacacgggagaacagaacacagaccacaagaggccccaggaaaaaaagaaaagacagcgccacgacgcgaaacggcggccaaccagcgggccagggagaaagccacgacgaccccgggcaaccaagaaacaaagaagaggacacaagagggcaagggagccaaaaacccgcaaagaacggggcacaggaggaacaggagcgcggagcggaaggacgcaaagccacaaggaaacaccccacaaaaggaaagaaaaaagaaggaagcagagcgggcccaaagcagaacagcggcagagccaaggggaggaggacaggggccaacacgggccaggggccagcaggcagggaacagaggagccaggcacagaggggaaaacaagggcccagggagagcgggcagccaggggccagcggggagcaagcaggaagcaagggagagggcggaaaggagaaggcagagcagaaaggcccagagaggcagggaggagcgggccagggaaaggaccacggcaagcgagggggccgcccccccagacggccggggcaggcccagagcaggacagggcagcaacggcagggaggggcggcagcccaccaagcgccaccaggaaacaaggccgaacagacccagaacagcacccgcaaaaacacagcaagagacgcaccagcacggagcgaggggaaggaagaaagcaaggaaaccagacaagcggcccgccccgcccccgaacgccgcaaaagcaccacagccaagacccagccagccccccggaagacaaggcacacaacaccgccccacccaagagccacacaggaagccaccgccagccacggggcaacaggaaccacgcaggggacgccggagcgacccaggaaggcacgaaaacccaaaaccacaaggccacagggagcggcaagcaccacagagagacacggaggagaaagcggccgcagcgacaagaagccagaccgacgggcccaaacacagacaggggacacagaacagagcaggaggcacaaaaacacaaaccacgcaagaagaggaggcgagaacgaaaaaaaagaacaacagagaaaaagacgcgacaagcgacacagaaagaacaacgcccacccaacagccagaccgccaaaagacaaaagcccgcccccaaaagcagcggccaccggcagacaagaacaagaggagagaagcgcagggacacgggagacagcagagagcagagagaagaagaggagggcagcacacacggccgagagggacgggccgaaaacgggaaagcaagccccgaaagcaaagaagacggggccagggggcaagggagcagcaccagaaacacagcaggggccgagacagacccaggaagccaaaaaaagaaaaaaagcaagaaacaagaagaccagcaggagagagaacgggggaaggaaggaggcagagcagaggggagcggagcaacagagaaggcacaccacaaaaaaaagaaagagaaaaagcaagaacagcagaggaaaacaaccaccacaaaaaaaggaaggacacagaaggcaaagaagacaggaaaaggaaaggcaagggggaggaaagaaagaagaaagcagagcgccccacccgacccccagccagagcaaccggcgggcgcaaacccggaacccagccccagcccccgcaggaacggaaggaaaggccgcagagggccccgacgaggcagcccagcaggcagcccagaggccccaggaccgcaaacaccgcaggggccaggccaaaagaaaaccaaccaccgacccccacccagaccaggaacacaccggaggacaacccagcaagcagcaggcaagagacccaagaggagcagggacaacagcagcccacacaaaggccacccaagcgcgccgcgagccgacacccgaggggagcaagcaggagggggggaggaacaggggaacaacagagaggaacaaggccgcagaagccaagccccaccgcccagaaaacccgggcccacaggcaagccaacccaacccaacacccacccaacccccccaccgaagaaagaaagaaacggggcccaaacgaccaccagggggcagcgccccgagcgcagacagagcaggcaaagccacacagcaaggagcagggaagcccccccgacacagcaaggagcagggaagaagcccccccagccccacggcaaggagaagggagggagccgcgcccccagaggccgagagcaccagcagccagaagaagaccagggagagaaaaggaagagagaaccagcccagccgccacgccccccaccgcgccccccagagcggccaccgccgccacagaaagaaaaacgaacaaaaaaaaaaaaacaaggaagaaggaacaaaagacagggggccggaccgcaccacccaaagaaacagcaaaacaaaacacaacacaacaaacgagcgaaagccgacaaggaacagccgcgagggcccagacgcaagggcaccgaccccaccccaacccggcaacgaccccaggacaccaaacaaaaagaaggaggaaaacgaggaacaagaacagccccccaaagggaaacaacaagagaccacaaagaacagagaaccagcccagcaaaaaaaggccaagaacaagggaacaggccaacagggagaccgggaagcccaggaggggaaggggcccaggagagcaacgaggaacgcaaacgacccagaggggaccagcgcaaccacagcaaggaggaggccccccacaacccaccagcacgcgcccgagcgacagccacgacggagagaggaaccgcgggagcaccgagacaaggagcgagcacagggcacaagccacggacccaggagaaaaagggacggcggagcaaccgaccgaaaggaaagcaaaaagggaggcggagcaaccgaaccgaaaggaaagcccccggaggggaggaaagaccccaacggggccagccagacaggccgccacagaagcgcaaagaggaccagaaccgacagagcacaagccagggcgcaggaaacccggccaggccaaggccccccacacaaacaggacggggggaggacaacacaaggagagaccagcaaaaaacaagaaagaaacaggcaaaggagggacagaaaaacaccgaggaggacccaacacaaaagaacacacagaagcaccacaaaggaaagcccagaagccagaaacccaagaaaacacaaaacacacaaaccaagaagaaggaagaccaaaggggaaccaacccagaagggggagcaaaaacccgggaaggagacagagacaaaggggagcaaagacaaggaaaggccaccagagacaccccaccggggaccacccaaacaacaccaaacccagacacggagccagaaggcacacagaagccgaagcgccagaaaggccaccaggccgacaaaacagaggggaccgcagccaccaggacgagcacagggccccaaagaaggagcagagaaaggaccaaggagcaaagggaagcaacccaaggaggaaaacaaagaacaacaagacccagagccccagagacaaacgccaaaaaaaaaaaaaaaaagagacacagggggaccaggcccagcaagggcagaggagccagcagcacaagggaaaagaggccggaccggaaggccagccccaggagagaggaagggggcagggcgggagcaaggggaggggaggggaggggggcagaggggaaaccaggaaagaggacaacagaaagaaaaaagaaaacaaaaaaaaaaagaacggagaagcagcaaaagagcaccccgccccaaagaccgagagcccagcacccacacgggacacaaaccaccggaaccaaaccaggacccacaacccacggccgggggcaccaaacacacaggcagcaccacacagaacacagacacacccaacacacccagacacacccacacaaacacacacacgaacccaagcacaaaaaaaaccaaaagaaaggacaagaacagagcaccagaacacaacagagcggcaaacgcgacaaaaaacggcacaaagcacccagaaccacgaaagacaccagcccagcgggcaagaaaagagccgaagcgcaaagccacaagaccagagcacagagcccaccccaaggaaaaacgaagcaacgcgaacgagaaaaggagcggcacaagaaacagaagcacggacgcccgggaacaagaaagggggaggacagccaggaaccagaggcacagcacccgaagaggcaaaccaccgacaggggcgagaaccaagcacgccccgggagagcagcccaaacaaacacgagacacccagcacccgcccgccaaagacaccacaaccccaaaggaacggcgacaccacaggcaagggagggagccaccgccaggacagggcgcaagcaggggggggggggggggacaccccagcacgaaccccaaacagaaacaggaagcccagcgaaccaccggaacggggagaccaagacacagagaggggagcccagaagcgagaaaagagacaagcagcccccccccagccccccagacccccccccacccgcccaccaacgacagaaaaaaacaaaccgagagcgcacgaccgaaagggccccacggagcaggcagcccaccaggggccagccaaggaccgaagaccccgcccgcaacacaccccgacaggccaaggacgggacagcccacccaacccaggcacgcaaggcagcagcgcacaacgcgacaagggccgaacaccagaaggcagaccgaggcaaaccccggcccaaaccgccccccacaaacccgagacaagggaaggggaaaaaagagccgcaagacagcccaccgcacaaaccagggaaccggaacagcaccgccaagaagccccagagagggcgaaagaagcacaagcagaaaaagcacaggagaaaaccagcaaaagagagaaaaagaggccccagcaccaggccaaccagccacaggacaaccccaaaaaaggcgaggcaaagccaggagagccaaccaaaaagaaagcagaggccaaacaacagccacgcccaggacacccaggcggcagagaaaaagggaaaagaggagcgaagcaaacgagcgagaaccagacccaggaggaaacaagcccaagaagagcaagaagcaacgcaggaaaacccaacaagacaaaaaagaagggagagcaaggagggggaagagagcaggggaacgaagagggaaacaggggaggagaaggagggggggaagggagaagagcgaacaaagaaagagggaaacaaacgaagacccgagaaagccacgggaaaacaagagaagcccaaaaaagcaaacaaaaaaaggagaaacagaaccacccgaacaggagagcaggccccccagacacaaggcgcaaaaaaaagcagggcagaggagaccccgagcggagaagggaccaaagcacccaaacaaggaagacagcacgaacccgcagaacgagaagacacacaagcaaccaaggaaggagacacgaacggacaccagagcaacgcgacacccagggccagaaggccaaacacaggagaaaaaagacaacaccagcggaagccgagagcacaaaagacggccggcgacacaggccaccagcagcaggacacaaagggggagaaccaaccaccgagaaaaggcccccacaaggaggacggcggaccaacgggcaagaacccagaggacaggcacagccggaagaacacgcacacagcaaggggacaaaagggaaaagcagagacccccaaggcaacggcagagaaagagacccacaagggacacgacccccaacaaggcagacacaggaagagagggggaagaacaagaccagaagaggaaagacgaagaaaaaggcgggcaagacaacaccaaacaaaagccaaaaagcgaaacagcaaagaccccgacaagagaagccagccaaaagccagcacggagggggaccacccacggaacgaggcaacgcgcagaaagagccagagcgcagcgcgagagggcccagcaagagaaccaacccacgccagacaggcaacaccaagagacaacaggaaaaaaaaagaaacagaaaagggaaaagggggggggaaggaaggaagaaaagaagaagaaaaggaagaaggggcaaaacagaacacaagcagcggaaggcaaaaaaaaaagaaagagcacaaaaggagcacggagagcacaaaaaagaagagccaagaacaaaaaagaaaacaaaacaaaagcagcacaaaaaaagcacaaaagagcacacaaggcagcacaagaacaaggaaaacacaagaagcaaccaaaaagacccgcaaccacgcagcaaaagcaaaagaccccccagacgaaggaaccagagggcgcaaacagcaagaccgggcggccagcagcaggaagcaagcaacaccgaaacgggagggggaggcaaaagggcacccggcgaagacgcgagcaggagacccgccacaaaacaaaagcagagagggccgaacaggacaaccacggccacacaaaggggaaccaagacaacagaacaacaacaaaaagagaaccacaccacacagacagagccgacgaccgaaccacagagagcaaccccgccccagggggacacagggcgacacacaagaccaaagaccaaaccaaaccaggaacaacaaccaaacaagcaacagcaaaaaagaacaaagaaggcacacccaggaaccgcccgaccaaaaggccagagcaaagggacagacaacacgaaaacaccaaaaaaaaaaaccaccaggacacacaaacaaaacaaaaaaaagccaagaagaaaggccccgcacgcacccccagaggggaagagaaagcgcccgggacaacccagcacaagggaaggcggcaggcaggcgccaacggaacgaccccaagcaagcccgcacaccccgaaagaagcggggcgccaggagcagcgcggccacacagcccgagccccgcgcgcccaaggcggcacacggcagaccccagccagccacccgcacgagaaggcaacccccaccacaagggaggacgcgcggacagggagcagacagccccagaacgacacaacaggcgcccagccggggcgggggaaacgccagggggccccacagcaaggagggccccggcccaaagacgccagaaagagagaacgcggaggacaaaaagacgggcagaccggcgaaaccgcgccaaaggggggcgaccggagggcaaacagggaaaagaagacgggccagaccaagaaaccagggggcaggccgaaacaaaagagaagccccaacgcgagcagaagggagccgccgggacagaacgcacaaaaccccaggcaagaggaaggaacccgaggggccacaacaccaccaagggagggcccaccagagagcaaagcgagcccagcaggaaggagcaagcccagagagacccgccacagcgaaagccagagcagacagcaaggccaccgcaaagggaccccaccaaggcaacagcagaagcgagagggagagaacaaaggaaacagacaaagcaaaggcccaccccaacggagacggggccccagccgagagccaggcccaaaagggcaaaaaaacaacccaaagggaaggaggagggccaggagacagagcaagcgcgagacacagaacaacccgacccccaagccacgaggaggccagggcccggcaagaccaaagccgagcaaggaaagggaagcagcgaagagaagcggggggaggaaggccacccaggacaacgcacagaaggaaaggcggccgccgagaaacggggggaggaagagaccaagccgaagccagaaaagccaaccagggcggcggcagggcaccccgagcaagagaagaacccaaagcgccaggcgagaacacacccaccccagggagaacgcgccaaggagaaggccacgaggccacaccagcagagaggagacgaaagagacagccagcggggcccgcaagacacacccgcccaccggacccaacccacacaagagcgaaaaggggccaaggaaaaggcaggagacccaccagagacgaaacccgcgccaagccacacaaaaaaagcggcaccagaaagcacgacagcagcagaacaaggccaacaaaaggcccccccccccggggaaggaccaagccggccccggccaggaaaggacagaaaaaggagacaccagggggggaaaaaaggagaaggaacacacaaaaaccaccccccaagacacaaaagcagaagacacaggcgcgagagagaaaagaagagagggaaagaggggagcagaggaaaggagaaagaaacagggccaagacaaccaccagccaaagccacaaccgaccccccccccacaaagcccagaaagccagcagaccgcagcaaggccaaaagaggaaaaagcaagaccagaaggcccacccacccccaaggcccaaaagaaaagacacaaagcagcccgccgcgcccagagaccccagcaccagaaagaacaagccacaagcaagcgagaaacacgaccacagagacacacaaccccccaaccacacaaaaagaagcagcacccaccccgaagggggaaacaggggcccccaacagccgaacgccaaccagaggaaacacgaccacagcccagagaagagaacggccagcaaagggagggcacaggggacggccagcccaagcgcggcagaagcggcccagaacaaacgcggcaaaaaaaaaaagcagaacgcccgaaaggggaaggccccaaaaagggaagcaacccagacccagacagaccggaaacggccggggaagagagaagaagcacaaaggggcccgaagccaggccaaaaaaggaaagacggagccaagaggcacacacagagagagaaagagagaagcaaacagaacgggagcccaacccaaggaaggccaagacaaaacaccaaaaccaaagggagccgggacacagccccagagggccaagcggacacgaacagaccgaccgcagacaaagagaggaaggcaaaccacccagcaaggcgcaacaaggccaaccagcgggaaacagaaaacccaagacaaccaaacagacgagcccagaaagccccgaaacccgcaacaaaccaagacaaagacaagaaaagcacagaaagaaaaagacgacaaagacaaaaacaagcccaaggagaagagggcagggaagaaaagagagaaacagaaacaaaggccacaggaagggaggagggaacaaggaaggggaggaacaaagcaccaggccaggaaaagaagagggaaagaggaaacaaggcagcaagcggcagaaaagacaccagggccacagcaaccaaaaagaaagcaaagggacgggcagagagagagacaacacaggcaaaagcacagggcagcaggcaggcaggacgaagaagagcgagagcacaccagaccacaggcagaaggaagagagaaacgggcaaaaagggaaacccaaagcccaccccaaaaaggccacaccccaaccaaaaagcaccccaggaccaagcacaaaaagagccaggggaccacacaaaccaccacacaggagggaaagcagcaaagaaacaggcacagacaaaaaaaaagaaggaagagcagagaagagcaaccccaaccaaaaaaacaaacgaaaccggggagaaagagaagagccaaaacaacgacaggacaggggaagcaaagcaggacaagcagagcaagaagcagaacccaaggcccaaaaaggaaaaccaggccccacaacagggacaccgagcacaagacacaggccgaggaacagaacacggagcaccacccacaaccagagaagaacacaacagccaaagaaaagagagacagaagaaaaacaaaaaaaggggggagcgaagcaagggacaccgacacaccgggaagagagagaagaagacgccccaccgcaaccagcgaagcaggggcgacgccagggaagaagggccagcccacgcaggcagaacaaccacaaagggggccgggcaccaagaaagaagccgaaggagccggaaacaagccgcagggcagcgcccagggggcgagaccgcccagcgccggaccaacagggacgaaccaaacacagagaaaacccccccaaaaccggacagaacaagcaacagacagaaaaccaggacaaacaccggaccccacgcaaaagaccgggagcacacaggacccaggacaagaaagcacggaacagcacgaggaggaaggcaccgaagaaccagaagcccagagaaaagagaaaccggaaaagaacaacaaccaaacccagccaaccaaccgagcgccacccggagcaagacgagcaacccaaaaaacaaaacccagaagaaaaaaggaaaccagacggggagcaccagaggagcccccacagaccagcccagacccacagaacaccgggcccaagaagagcccaggcccgcacacaacggcccaggggcacggaacaaagaccaccggacaacgccggccaccaaaagaagacagaccaccacaccagcgaccccgagcaaaaacaaaagcaaaagaccaaacaggcaaaacaaagcccagaagcccaaagcaacaccaagaaccagacccaacagaaaagccaaagcagcccaagaggaggaaggaaaaaaaaagacagcccaggacccacacacgggccagaaagagcgggcaaccacgccacaggagcccagacgcaaggccaggggagggaaaaagcccacaccaaacccaaagagaagaaagcggaggagaaggcaaaaaacggaccagaggaggcgcacaagcagaaacaagggccccagcgcaaagggccaaaggaggccaagaagggaagggcaaacaggagaggcgacgcacggaagacgagaaacaacacaccaggccaggacaccaaggggagaaagaaaaagggaaggagagacgaagcaagcagacaaacacccccaaaggagcccagagagggagagaagaacgcaacgaggccccaaggcccagaccacacaggcagcaggaaaaagcaaaaacacgaacaacaaaacaacaagcagcaaaggaaaaaccacaaaaagacacaaaaaaaagaaaaggaccaccggacagagacaggaaaaaagaccggggagacaaagaggcaaccgaaaggcagggcaaaaccaaaaggcacaaagcaaaccgacccacacccggagaacccgggagcaaagggagaaagggagaaaagaaaccagaagaagaaacacaaacagcagcaacagaaaaagacaaaagcaacaaaccaaagcaaacgacacaaacaagagagagaggcaaggaaggggggcgagacaggaccgaagcccggcgccggaaccacgagaccaggcggcccgaaccaccgcccgcccccgaggcggcaaaaggcgggccaccacacccggcaggaagacgaagaaaacacgagagaaaaaggggcgcgaggaaacagggaagcaaaaaacaagaacagcaaaacacaacaaagcagaaaagaagaaaagcagagcccaaagggggcggggcccaccagcccgaaccaaagagaaaaagcaaaaagaagaaaaagaaaaaacaaaccgccaagaaacaaacccggaagaaccaccaagaaaaagagacaaccgcaccaaaagacccgagcccacccaacccggaccgaccgggggcgagacacgcaccacgcgggaagccacaccaccaagggacgagcaacacggcggacgaccaagaaaggcacacagagaaaaagagcacaaaaggaagcaaggcaaaaaaaaccacacagcaaaaccaaagagaaacggaggagaaaaccccgagcgcaagacaagaagaccagcaaagacaccagccagggggcagcaccagcgacacggggacccagaacagaaccaaggcaccggaggaaaaaccaccaaggcagagggccgcaagccacaaaaacgccacaaaaacggcccccacgggagccccaggcaacaaaaccaaggcaagcagaaagggcagaaacaaacacaaagagaggcgaaaggggacaaaagcaagcaagccaacaaacaacgacgccagaggaacagaagggcagccgccccgggaaaaaaaaccaccaaacccacaaacaaggcaacaggccccgccaggccaccgacgcgcagcagcaaaggccacccgccgcacaaggcaacgcacaaccacaccggcacacaagacccaggcaaaacgaacggccccgagagcaacaccggaacgaccaggggccccaggcccgaggccgccacggggcccacggcaaacagccaaggcaccaccccgcccaacacccgggggggggggcagagcacagggcgggaggggggggcacgcaggagcaaagcgcccacccacacagacggccgcacaagaaagaaaagaaagaaccaaggaacaaacccaccgcccaggaccgagcgccccccacagcggggccaccagaaccaccgcagacacagcacggccacccaggcaaggcaggaacgggacagaacacagacgccaccacggccacacccaaagacgcgcacaaacggcaaaccccagaaagcgaacagacggacgcaaccccccaaagaggacagcggcaacggagcaaagcccacgaggcgggcgacgaaccacccaaaaacaggaaccagaacccaggagaggaaccacgcgaccccgacgccgaacaccagagcaacaaggagcccaaacacgagggagaccgcccgcacggccccggccagcacagacaagcccccgacgccacagaccacagcacagcccccagcccaccagcagcgggcgccccagaggacaggagaggcccagacgcgcccacgggcgacagcccacacgcagaaaggggacaaaaaaaaaagcaaaaggccaccaggccaccaggagaccccaaaggaagaaaaaacagaaagaaagagcacaacggaagcacgcaaaggggagagaaaaacacggaagaaaaaccagcgaagagcaggggaggggggggggggggggagacaggaccggagccaggcaccgaaaccaccgggaccagacaaaccagagacagcgcccagccccgggcgggaaaaggaaggcagcacgccagcaacacaacaaaaaaaaaaggaaacagggggcaaccaccgaagcccagggccacagagccaggcaacccaaacagaaaccaagccgccccgagcggggacagaagcaccacaaggcaaaagaacacaaaaaaaagaaaaaggacccagaaaaaaaacaaagcaaagaaacgcacaaaggaaccacaaaagaccacgaaagggaaagcccagaaaaggaacccaagaaaagaacaagcaaacgcagaaaccaagaagaacaaagaccaaaggggacacgcccccagaaagggagcaaaacacccaggaaggagacagagacaaaaggagcggacgaaagaggaccacaggaagccaaccagggaccacccaaaccagcccaaacgcgacaccagcaacacagcaagagcgaaaggaccagaaagcgccggagacagccggggccagcaaacacagaagggagacacagcagcaggagggcacacggcccccaaggaggagcagagaaagacccaaggagcaaagggaacgcaacccaaggggaacaacaaagaacaagcagaccccggagccgaccagcgcaagacaaaagaggccagcggccacacgccagagaggcccaggacgcaaacaagcccagacaggggaacgccagggccaaaaagggggaggggggggggaggggagggggggggagggggacgggaagcaggaaagaaacgaggaaaaaccaaaaaaaaaaaaaaagaaacgcaaggcggaaaagcaagggagcagaaaccaaaacaaaacaagagagaaacggggaggagcaccggacaaggacgaaaaaccagacagacgagagaaagcaaaaacacaaggccccaggcaaaagacacacaggaggccacgacgaaaacccaaggcaacaaggcaaaaaggagaaaagaaccagcaaagcagaccacaacacgcaccaaaaacaaaccaaaagggcgagaaaaacgaacagaagaaaaaacaaagaaaggaaaaaaaagaaccaagcaaagaaaccagaaaaaccaagagagaagagcaaggaaagaacagagaccgcagcaacaagaaggcacgcgcaaaaagaacaccagaaccaggagaagaagcgcaagcaaaagaccacacagaaaaggcagcacagaagagcaggaggcaagcaagacagggagccaaggaaggaaaacaaagcacacggggcggcagagcaaaaggaaacagaaaagcaacaaagcaaagcgacaagaaccaaacacgcccccgaaggccgagggaagaaagggaaggcacccaacaccaaaagcccaagcggcacgccgcacagaaaaacccaacagaagaaggagcgagacaggcccgagagaaaacaccgagcaaaagaaaaaccaacagcgaaggccggggacaaaaccagcagcagcgacacagacaaacacagggaaggggaaaaggcagcaagaacccaaaccagggcaggccaggaacaaggccacagacccaaccgcagcccaagggagagggagacacggcgacggggggcacacaaacacaccgaccaaccccccccccccgggccaagacagggccgggagccgacgcccagaaccaccagaggccaggcagccccaaacagagcccacggaccaggcccgaggcgggaaaagggacagaccacagccccgccccaggcaggcccagggcccaacgaagaccaccggagacccacaaacagaacaaccaagaaacacggcgccacaaaaaggggccgcacagacgcaaaaacagacaaaagaaaaggggcacaggggaaagacgagaagaaaaagaacaccgggaaaagcacaaaacaaaccaaagaggccgccggaccagagacacaggagggggggagggggggggccccccccccaagcaggcccccagacgccaagagaaaagcgaaaagcaagaacccagaaaaaaagggcaaacagccagaagcagggaggcccagcccccgagccgccagcaaaacggaccaagaacagccccaaaacccccaacagcaggggaagacgaaagcaaaaaacccaagaccgagaagcaaaacaagcggccacagagaagcaggaaaacaaaacccaacaggcaaggccaaaagaaaaccgagacgacaagcaaaacaaaccaccacgaagcggacccaaaaaacaacacagaaaaacaaaaacaaaagcaaacaagaccaaaaaaagaaaagaaaacccaacaggccaagagaaaaaagggcacgcaacggcaaaaggaagcagaaagaaacagaacgcccaccccaaaagaggggcacacaagaagaaagcgagagccaagggaggcgagacacggaccacaggcgcccagagcaaggccaccaggaaagggcaagagggcacacacggaggggaagcgacagggagagagccccaaagagggaagacagcgaggacacagaggcccgcaagaagaaaacaaaaaaggaccgccccgaggaagcccccccccgccccacagagcagcaacccacaggagcggcacagagaggccggcgggggacaacgacaccgcaggggacggggggcgcccggaagaaagccgggacaaggacacacacgccagcaaagcaagccaagcaaagggaaagacacccagacagaaggcgaaccagcaaggcgcaagaccagacgcggggggggggggggggggggggggagggaggagccacaccggcgaaagcccagaaaccagggccgaaccacagagaggcccgccgacgagcaaaggcagacacaccacagcagacggaccaaaaagaaacccaccagagaagacaagaaacccaagaccgacccccgagcaaggacccagaagacggagccgccgccggcgcgcggaccaagaaccagaaagaaggggccaggccagcccagcagaagaagcagccaggcaggagacccacagcgagaccaccaccagaccgccaaaggcaggaggaaagaagggggaaaagaagaaaagaaaacaagaaaacaacaccacaaaggacacaaaaaacaagagcgcagaaggaccccgccgggaaaaggcaggagggaaacacccagacaaggggaccccccacagccacaggaaaagacaggcggcgcggaccacaagaaaccagcaccaacacgaagaagacaaaccaaaaaaaacaaacagaaaacaaccaggacaagaaaacaaacccaaaaaaacggggacagacaaacaaaccaaaagagaaaaccaaaggcgagaaagaaagaaggcagaccagcacaggggaagaaaacaaaacacgcaacaacaccaccagaaggcaagacaaaacacaaagacagccagcgcagaacaacagaaggggaacaccaccagagggggacgcaacgacaggcagagacaacagggggagcacaggagaggaaaagacacacaagacccagcgggcacgggccaagccaaaagagccccaccacagacacacgccaaccagcgcccacaaaagccagcaaagaaacacccagagcccaacaaaagaaaaagaaaagcagagagcccagggaaaaccacccagcaaaccaaaaacagaagaaaaaagaaccaacaaaggagggcaagcaccaagaggagaaccgccaccacccggaaacaggagaccgacacacaggcaaaaccaggacacaaagccccaaacgccccaccagacaccgcgcccaccagagacaccaaaccacagcccagggcaggagcaccacgcccggaccgccagcacaaggagcaagggcaaggcccgagcccgcccccccagccaacagccaggcaaccgcacccaaagaaaaggcagagcaccaacgccaacaaggagacagacccaggaaacggcaacggccgaccccaagcggaagaacaggcagggaggcaaggaagccacgagcgacacaaaagaagccgggaaaaaaaagagccaggaaccacccaggcagcaaggcagggggacccacaaaacccggcgaagcaacagaacacaagcgaacaggagaagagagcgggccgcaagagccaccccacaaaaaacaggaacaaggcacaagcaccagagaagaaaaaaacacaaacccagcacaaaccccgcacaagggaccgccgcaagaagcgggcaggagagcgcaaagcgggagaaccaacaaaaccgaggaaggcccacccacaagagaaaccaaagaacgcggaggccaagaaagagacaaaggaagagacaaggaaaaaaaaaacaaaaacgcaggaacaaagaaaaggagcaaaaaagacccaagaacgcaaccacagaggcaccggagccaacacagagagccccccgccagcgaagcaaaaaaaaaaaaaaaaaaaaaaaaaaaaaaacccacagagacccacaggagacaaacacagagagaaagagaacgaaagaccagcccagagggagcccagcaaaccccccggagccaggcaaccgcagaggaggagagggaagaggaaggaccgagcgagagacaccaaggaacggccccagacaccagggcggggcaagagcccaaagacgggcggcagcacagagcagcagccacaacagaagagcagggcgaaaagaaacgggacaacaccccacccaacccagaaacagcaagaacgcgcgcaaaaagaaaagcccaagggagcaaagggaaaccaaccccaaagaaggcccacgccagcagagaacccaacaggaaacaacaccacagcgcagggcccaagaacggggccgcgcggaaacacaaggaacgagggccaagcggcaaagaccgggggaccggcaagcaaaggggccggacgggacaccccaaccagggaaac

SEQ ID NO: 544 - RNA, 1053 nt, Mus musculus
ggaggcgcaagggcgagcacaaagcaggaagggcgccgaggagcaagaacagaagagagcccggaggaaccgagagaagaaggcccccgcgagacgggggaagcaacacagaaaggaggcacccgcgccaaccagcggaaaagccagcccacgaggaggcacccgagagagccgaagcagcaaaaggggcgggagccaggagcagcaggcgaggagaccagagaagagaaaaggaaaagaaggcccgaaggaaaggggcacgcgggcgccaggggagggaacccgcagggcggcccgcgaggcgaaccgaagggcggacgggagagaaagcggaagggcgggaaacggcccccagaaagagagggcgggaagagccgggcgcagggccaggcgaaacacgccaggcccggccaagccgggaaaaacgggaacgaaggcgccaagacgacccccacgcagacacaaggcagagcgacaaggcgggaggaaccggccagcaggagcgaggccgagcaagcaccacagagggaagccaaaaggaagaggcggaccgaggaaaaccaccaccacccaaccgacgggccaggccggaccggaagagaggacgcaccacgagggccgagccaggaaccgcaccgagacccccaccgacggcgagccaaacaggccagacccagggcaccagaggcccgcgagcaggcaccccaggcagagggcaccacaccggagccccgaaggaccaccggaggccgcaaggacgaaccagcaggcccgacaaggaaaaagcccgagcccaccacacagagaagcaaacaggcaggccaggggggggcccggacgggcgaaggggggcgggcgggagggagggcggccgagaagaccccgacccgccacggaaccggagagagaaggaacaagagagccgggacgaccgcacagcagaccgggagacagacccccgagcaggccagagcacccgcggcaagcccacagggaagggcgcagaacgaggaccccccggccgaagaagaaggcccaaaacaggaccccaga

SEQ ID NO: 545 - RNA, 2313 nt, Mus musculus
aaaagaccccgaggaacaccacccgaacaaacgaacagaacaaaggaaaaaacggaggaggacagagacaggcagggagaccaaggagagaaagaaggccagaaagaaccacacaccaggcccgaggacaaaggagcaaaaccaccagggaaaagagacaagcaaagggcggcaacggggcaccagagaagaagcacacaacaaccacacccgacaaagcccaagggacaaggaccccagaaaacagaaacacgaaacaaagaaaaggaagggggaagagcccaagaacagggcacggggcagaagccgaacagaacaaaaaaaaaaagaagcagacagcgaaaaagggaaccacaggacaagggaaaagcaggggaccacaaaccagagcaggccaagaaaacccggcgggagacggcgaagcggccgggaagcacagaagccaggaggggaggccagagggagaacaccagagagaaaaacggaggcagaacgaccggacaaccagagcgagcaccaggaggcgggggaaaagaacaaagcaaggccaagcagaacgagccagacagggcccaggcacggaaacggggggacgcaagaagaagcgagagaggggagggcaaagaaaggaacagcggagaaagcaaaggcaaccggcacaggcgaggagggaaaagcgagagaaagaggacaaggagcaaaggaaaacaaaaggggacaggaaaaagccaaaaggggagggcgcgaaaccaagggaagggaggccaaaagaaaagaagacaaaaacgacaaagagaagaacaaacagagaaagacaaaggaagagaggcgaaaccaaagggggcgacccccaacacaaggggcccgaaggggaggggagggcagccagaagcacaaaggaggcaagaacgaaacccggaagcaaaggccccaaaaaaagacagagagaacagcgaggaaaaaagaccaagaagagacaggcagaggaagcagcgggagcgagagcgcgggaccgaaaggccaggaaaggagggaagaagagaccccacgaacagaggcgaaggggcgccaggcacagggaaagccgaaaaaagggaacaggaagaaccgcagaagcaaacacgccccagaagaacaaaggaaagggcacacaagagacggaagcacgagcaagggagagggaagaacaaccggaggccaccaacgaaaaagaaaaaaagccaaagccaagaagcggagacaaaaccccggaggggcaagcagcaaaacgacaccggaggaagcgaaaaagggcgagaaagaagccaggcacaccaaccacggaaaggggggccaacaaaaagccaggaagccaaggacaagccaacaccaaagccgaaaggcccggagagaagaacacaggaaaaaccaaaccgggaggaaagaaaaaaccggagccaaagaacagaacagggggagagaagggccccccccagcgggacaaagaaagggagggcggcgagagaagaagccgcggcagacggaggaaaaggagaagacggcgaaaagacggacagacaaaagggaggaaggaggcggaggcaggaaaggggaaaaaaaagcaccaaaaagacgacaccccagcaaagaagggagaaaagaggcacgagcccgcagggcagaccggcagagggggagacgcaccgccgcccgccacagagagcaggagaaggagaaagaggggaagagcaaaaacaaaacggggaagcaacggggcccgaaaggggacaagcagccaaagccccgaaaggaacagaagaaaaaaacaaaaacagggcagacgaaacagaaaggcacccaaaaggcaccgggaccaacgccgaaaaaaacaggcagaccacacccgccaggcccgaaagcagaaagggccgaacggagggagaaaacaacgaaagaacaaggaaaaggcgagaagcaagacgaaacaaacacagaggaaacccaccagaggcaagggaacagcgaagcaaacgaagggagagaaacccacaagaccaccgccacggcggagaagagagaagccagaaagggaagcgaacaaacgaggaaccgccaacaggaggcagcaaaaagcaagagcacaaagaggggagaagccacagccacagaagaaacgggcagggcgaaggccgcggacagaaccaaaccagaaaagggggggcaggggagggagacagacagcagggggaaaaaagggggagggggagaagagagggggaaaagaggaagggaaaaaaggcgagaaaaagaaaggaggagggcaagcagagggca

SEQ ID NO: 546 - RNA, 25318 nt, Mus musculus
gaagagggaaccagagggaaggcccccagagagggcaagagggaaaggggggcccaagacagggaaggaaccagggccacggcagccaggcgcccaacaagaagccggagagggacccgagggggaagagaagggcggcggcaagaagggagggcgcacaagggggaaaggaggaacagccaaagggccaggcaaacgggcaaaagagccacaaaaagacagaaaacaagaacaaccagggaggaaccaacgccaaagacagcaaagggcccaaggacgaccccgagagccacaaaaagacccaacacaaagaccaagagacggcccccaaggaccagcacggcagcaccacgcacccacccgaacaggggaagggggcacaagggggccccccggggcgccgccaggccccacagaagcacaggacagccaaagcccggggggcccggcacgcaagcccggcccgacacggccagaccagcaagcccgcccccaacccggcccgcccgcccacccaaggcagcaacaaccggccaccgccaggcccagcgagcccgcccgcgacgaaggagaccacaagcccccacccgcccccgcgcccggagaccaaacacgccccaccgcacccacccccccaagcacccgcccggaccgccacgcaaccgacgaccggccgcgagcgccgcgagcgccgggcccaccaccgcgcccgccacagcccacaaagcaacccccccccccaccagaccccccaacccccaccaccaccccccacgaaccccagccacgcaccaccccgagcgcgaagcgccccacccgagacccgcccagaccagggaaagccccagaaccacgacacacgccccacccccccccaccagccaccagcagcagaccccccccgccccccccaaacgacgccgcaaccccaacgaaccccccggcagagagaagacccaccaagagccggcaaagaccagggccccacccggaacccagcccagcaaaggcagcgagagggcccccaccgcgccgggacaaccagcccaagagaaccggcccccgggaaaagaaccgcaacaaaggcaacgcccacggggcgcgaagggggggcaccaggaccaacccgcagccagggccgggaaaccacccaccgcagacacagacagaggacgcacccagagcaggcggcagggccgcggccggcagcaggcagcacaggcacagccagagggagcagagggggagggaacaggggggggccacccaaggaggcagggagccgcgccggggcacacgggcgacggccagaacccccagcccgggccacaggcgggacaggagccaccgggaccaaggacggcagaagcgccgaacaccaccagcgcccggagggagagacggggcagggcagccaggagaacgaaaggaggaggcagcacagggcgacaggacaggcccagagggcaaaaaccacaaaccggagggaaccgggagggagaaaagggcgggcccagagggagggagacgccagaccaaaaacagcacggccagcggaacacagagacacacaagacacacacagaaacgccccaggcgacgccacagaaaaaaacaaaaacgaacagaggcggggacaaacccccgccagaggagagacccccaacggcccccagcaggagaaagagcgccgaaccccggcgcaggcagcacacgcccacgccggcaacacagacaaacgaaagcaaaaagagcagaaacagacaggaacccacaccgccgagcagcccgagcacggcacgggccgaggaccggcaagcaccaaagggagcgcaaaagaccccgccacaaaaaccacagagaagacaccgcaaaccacaagaggggggacaacacgggggaaccccccagcagcaggcaagaggaaaaaccccagacaaaaaagaacacacaaccgaagcggagaaggcaacaaggcaacggcacaagggagcaagaaccccaggcagggggcaagggggaacggccacccaccgccgcccacagccagcaaagcagccagcccacggccgcacggccacagaaggcaaagccccagagggggaagggacgagggcgaacaggagacaacccccgccaacacccagaacaacggggcagagcacccaaagggagaaagagaacccgaggacccaggcacccaccacagaaagaccagggagaaaggacaggagagaagaagcgcgggagcaccacccaaccggaaaacaaaccacccacggggacaaaagcaacaggcacccagaaagccagagggccaaggcaacggccgccgagccaggaaaaggccacggaggggagaagaagagagaagaccaaaaagggaacgaaacacagccgagagcaacagcaacgaggcaggaaaaaccggggaacccacggcggcccagcggcccccaacccacaggagaacagggaccagacccaggggcaaggagggcaggggacaaacagaggaacacaagggagggacgaagaacaaagccagcacagaaaaacaaaagaaaaaaggaagagcgacaaacagccaaggacagaagacagagcaagacacacacaaaacaggaagcaacaaaagacggcagaaacaggcgagaacaacggacaaagccgccacaggcagcaacagaggccaggggagggaacgccccagggcaagggcagccgagggcaccgggcaacgacaaaggaagaacacaaccggaaggaaggccaccaggacccacggaggcggagaccacggacgggaagacgagccaagggcaggaccagaagagaacccgagaaggaacacaccaacgggcacacccgcggagacaaaaaggacaggaagaagggagcagccgccgccccgccgcgcgcggagacgagaacgcagaccggacccacacagcgcgacgaacaggggaagggcgccgacgaagcacaaaaaccacacagagacaccaaagcggaccagagaacccgacaaacaacgcccaagccaagccaaagggagcgccagcaacccagaaaaggcagaccagcccccaaaccacagccgacccaaaccaaaaccgaaaggggaaagcgacgaggaggggggacccaaagaagagcaccaaaacagaaaggccgagaggagcccccgccaggcccaggacaaagcggacacccaagaaccacgacagaccgagcggcaaaccacagaggcacggggaaagccagagccggggacgaccaacccacgcaggggagaggagcgcccgaggggaaagagcccagaaggccccaggggggaaaggagaagggggagagaggagaccagacaaacaagcaccaagaaagggagggaggggacaaggaaagagcaagaagggcagcaagggcacacaccggcagaacaggcagacacacaggcaaggagggccagagcaggcacccacaaacaggaagcagcgcaacacgacacacgccaacagggccggccacaagccaggaccaccccacccagcagcaacagaacaaacgcaacccaaggcgcagagacggaggcaaacagagcggacagaccaacccccacaaaggcaagaaaagaaaggggccacacgcagcagaagagcaaaaaagagggcacagagagaaagagagggcaaccaagggggaccaggagccgcacggaaaggcagcgagagccccgacagcaggggggggcagagcacgagcaagagccaacaaggcagaccagccgagcgcagacgagaacgcaccccaccggaacgggggacacaagcccggcgaggcccgagcgcccaggcgggcgaccaccagggcagcagaaacaagaaggaccagggaaaaaaggacaacacccacaggagcgggggagccccccccccaacaggaaaggagaagcaaaccggggccaacacggaacaaagcaaagggaaggagggcgccagaaccgccggccaagaaaagcaagcccaccagccgaaccggggcaaaacacaagaacaacaaccccaaggaggccagcccgacaccgggcaacagagggggcagcagacccaaccaggacaaaccgaggaaaaaaggaaaacacaacaggcagcgggaggccccacccaccgaaaaggacacaaaaaccacaggaaacgcccgcggaccagggaacaccggccacggcggcacgagacacgcgggcaggggagaaagcaggaggaacaaacacgacccacagcagcaacagaccggaggagcacaggcagcaccacggcgagggcgacggaaagccaagagagggggggcacacagagcgcccagagaagcagcaccaacgagagggcacgagcaacggccaaacgggggccaccacggccacgggccagccagacaaaagccaccagccccccacggcccagagccgagaaagaacccggccacccccgcccccacaacaagaggagaagggcggagacggcaggccaaggcggcgcagcagcagggcccccaaacccacccggcagacaggggggcagccagggaaacccaggaccaaagcgcagaacccagcaggcccaagaacccaccgcggagagccggagggagagcacagcccagcccgcagccaccgcacccggagggaaccaggagaccacccacgacaagcgggcagcagaggcccggaacccaaccacccagcgcagcaaccggcccgccagcaccccggggcagcaaggagcaagcacaacaagaagcagagaccgggagcagccggaaggaggcaaaccgagagagcccacaaaaaggggggggaggaacccggggaccacaccaggcaagcccggccaggcaggaccccaccaaaggcgaaagggcggcggagggagaaccaggcaaaagaaagcacaaacaagacgaaccagcccggagggaggagcgaggaggaagggaaggaacagggggaaacggaccccagacccccaggcggacggcagagcaccggccaggcaccgacagaaaggagaccaggggacggcaaggaccaaaaaccaagaaagccgaaagggccgaccaccgcacggccaggaaggcacccaagggggcaccgccagcccacaaccacagggggaaccgacagccaccagccgcagccgcccagccagggaaagcagcaaccagcaggcggcacccggcagcccagcaacggaccccaagcgcagggcaagacacggagggggagacccaagacccggccccaggaaaccgacgggccaaagcagaccccagaagcggggggacaccaggaagaccaagaaggaagaccacggccccccagacacaggcagcagggccaggggagcgaccagggcccaacacaggcaaaccagggagcaacacagaagcgccccggcaaaaaaaaccaggagcccaccacagggacccaggccggggaggggcccgagccccgcccaacaccagagcaggaccaggggcccccccgggcaccggcccagccccgcaaaggcacaggccccaaaaccggacagacccaggcgggccggcccaggacccgcacaccggcccgcccacaccccacacgaggccaaaaccgcaaacccccgccccccaccccgggaacacccggccccaacaaacgaaagccaggcagaacaaaagccaagcaaccgcggcgaaccccagaggcgggaaaagaagaagacaaagccacaaccaaaaaaacagagggggccgaaggcccgcacacccaccagccaaaggggggcgccacgccccagacagagcccggccagaaacgcaacccccaccggcgggagcaacggccggccagagggaacccagcgcaagacagacagcgagaaaaaggccaaaagagggcgcagagacgccgcgggacagggcccacagccacaaaggaaaaggcagaaggggcaagagccacgcgggggaccgggcgcggcccgggcccagcgaggcccggcccagacggccagcaaccagagccagggcagggacgcagggcagaaagcgaggcacggcgacccaccgaggcagggagcaccgggggagggccgagaggcagggggaacccagggaaggcgggaacgaagaggaaggcggaccagggggacccaggccaccgaaaaacaaggcaaccaaagaaagagaaaccaaaagcccccaggaccaacaaaaagcggcaccggaggcgcagaaagcgccaaggcccccaacacgaaaggagggcccgacaaccagccagggcaaagcaaacaggggggcgacagccgccagaccacggaaaacacaaaacaaacacagaaaacacacacacacgacaaaaccgaaaacagacacaaaaaacaaaacacacgacaaagccgaaaacagacacaaaaaacaaaacacacgacaaagccgaaaacagacacaaaaaacaaacacacacgacagagccgccacaaacagacaaaaccaaccagaaagcagacggcgagggagacacccccgcccagacggacccagagcccccccgccagggccagaaaacagaggcgagggagacacccccgcccacaggacccagagcccccccgccagggccagaaaacagaggcgagggagacacccccgcccagaggacccagagccccccgccagggccagaaaacagaggcgagggagacacccccgcccagaggacccagagcccccccgccagggcgcccccagagcagcagcagccgggaccagcacgcgcgcacaccaggcccacccgaggcaaaggccgccacgaaacacgcggcgcaaacagcacagaaccagccagcacagaaaaggacaaaaaacaccccaaggggccggagacggggggcacgcaacccgggacgagcccccaaagaaagacccgagaggagcccccgccaggcccaggacagagcggacacccaagaaccagacagagcggacacccaagaaccagacagaccgagcggcaaaccacagaggcacggggaaagccagagccgggacgaccaacccacgcaggggagaggagcgcccgaggggaaagagcccagaaggccccaggggggaaaggagaagggggagagaggagaccagacaaacaagcaccaagaaagggagggaggggacaaggaaagagcaagaagggcagcaagggcacacaccggcagaacaggcagacacacaggcaaggagggccagagcaggcacccacaaacaggaagcagcgcaacacgacacacgccaacagggccggccacaagccaggaccacagaaagaacaaacagcaagcgcccgaaacaaccagagagaacacccacaaacggaggaacgaagagaaaggaacagagaaccaagcccagggcagccaaggacgccaggacagggaaggccaggaagcaaagcaagcgcgagagaaacagcgaaagcccaaaaaaacaaacgaaagaaaggacacagaccacgccgaaaagcagagacaagggaacacggcaagagccaaggccagaggagacaagcaggaaacgcccgggaccgccaagcgggccgccacacagacggagggggggcagggaaccccacaacgaaagggaacagacacggccccccacccacccccgccgaggaggcaggcacagggcccccggaaaaacagaacaagcgacagaagggacaccccaacagcgaaaggccgacaagacacgagaccacagacaaaaaagggggaaaggccccaagcaaacaaaaaagggcaaacccaaggagaccagggcccaccaaacccccaacaacggaacgagggagagaaagacgaaccaagggggaaccagggagacggacaaagacagaagagccaaggacgaaagaggggagcgaaccccggggcgacgagaagaccgaagaggagaggcacaccagcacaaacccagaacagggagcccagaaaacagaaagaaaagaggaacgggcacaacaggaggaaacaaggaaagcaaaagacaaagggagagaagagccagcccgaggaagaagagccacagccaagcggaccccgaaagcacgaaaaggcaaaccacaacacggggcaggggaggggaagaaacacaaacaaggcagagaaggaagaaaggcaggaaccaagggagcccagaggcagaaaaaccacaacacagcaaaacaacccaaaaccaacccaaccgaagcaacaagagcaagacacaaaaggcgaaagaaaggaggaaaacaaaagaacaacacaaagcacccaaaagccccaccccccccgaccgcccccaccaaccaagcccaccggcccggcacccgacggggcaaaaacagcaaaccagggaccccccccaagaggccaacaggccaccgcacaagcagcagagacacgagccgggggacgcagcaagccaccaagggggagacgcccaggccgggacccaagcccccagggggccccggccaccaacagaaacagaccaccaccaggccagacacggccagccacaagagacagcaacacggcccagcaaaagcggcaagcaaagggcaggggcgaagggaggacccgggggggcagccgcccaaacagcccaaccccaagggaccacaagaaaaagaagaccggcaggcccccaccgggcaaagacggaacaaaccacacagaggcaacaggagcggaggggacccaccaggagaaccccagaacaccagccaagaacaaaacagaaagcgagagacccaggaaagaccacacgaccacccggagggacacgggcccagccggcaaaaaaagagcggaacaaagagaacaggccaaccaggacacacgggaagcccagagaggagcggaccggagacagccaacgggaaccaccagacgaccagagggggacaagcgcaacccaccagaaggaggaggcccccaaccgccagacgcgcaccgaagacagccacgacggggaggagaaccacggggagcacccgagaaaggaggaacacagggcccagccccggacccaggagaacgacccaaccccaaagggagaacggagccagcccagccgaaaagaaagccccacagaaggaggaaaaaccccaccgggggccgcagacaggcgccacgaagccgaaaagaggcccagcaacgacacagaacaagcagcgcgcagaccccccggcccaacgaggccccacccaaaacaggccggaggggagcgaccacagggagcagacaaggagaaagaaggacaacacaccacagaaaccgccagggccagcaccaggaaaagcgcgccacggaagagcccgcgaagacaaggaccaaggcggagcacgggccagcacaaaaccgcgggcgaccagaccacagacacaagccgagaagcgaggcaggcagggaccaccagacacagagaaaggcaccaggagaccagagaagcaaagccccaaccagcaagaacgagggaagaggggagcagaacgagagcggcaggaagccaaaccgccaaccagagcagggagaacccaccgaggcggaagcacaacagaccaaaccagagggcacaccaaggaaaaggacaggaaggggggcccaacccaccgaccggagagaaagggcagaggagcaaaaccagcacgcacgaagccgacaggaggagcccgcggaaagggcaaaaacaccaacaccgcaaaaggaacgacccccaagaccccgacccggcaaagccggcaggagcaagacaaaagaggagggagcaaggagcagccacagcccgaaggggagcaaggccccaaggagggcacggacaaccccggggccacccagaggccccgggcggcaaccccgagacgaaaggcaaccaaaccgggggccgaacaaagggagcagagcagaccgaaaagggaggccacaaggccaccgagccggcccgaaaggagaaacccaaaacccaccagcacagagaagaaaacgaacgccggggggggggccaggacggcaagggggagggcgggcgagagggagggggcgagaagagacgcccgccacggaaccggcaaggaagcgccggcggagcgcccccggccgagcccgcaagcacccgggagcagcccccgagccagggaagagcaccgcaggccaccccccgacgggaaaggagccagagcggagccagacgccgggaagaggaggccgaaaggggccgaacagaaggaggcacagcggcgcgcgccgcacagacggccgagggaccgggaacaaggggccccccagcccagaggcagaccaccacgccagccaccccccgcggggaaggagcccagagcggagccagacgcccggcgaagagaaaccgaaacggccgcccagaagcacgaaaacgaggggaaggccacgcgaccagagggacccaagagccaacgaggcagaggggcgagcagggccccagaagggggaggcggaagagcggaccccaaaaggaggcaccaaaggaaaccccccggcaaaggcccggcccaggcccaggcaaggcaggccaggaagaaaacccagcccacaaggacaccccaggaagagcgggagcccagcaacacagggggccaccaaaccacgaaccaggacaaccaggcgccagcaacagcccaagagagccccccaggccagaagcgagggccgggacagcgccaggaaggaggaaccccacccaacgggacagccccaggcaggaggaacgaagacccaaggagagcacgagacaaccgagaaaggggagaaccagagggcccgacgcgaccccaaacaggaaggggacagacccagggagaaaggcgcccccaagacaaacggagaagccggcccaaggaacccacgcaacggacaagggggggggcaggccacaccagaaggaccgggacaccaaggggggcccacgaaaggccccgagggaaagggaggagggaagaagggggaggaaaagccgcgccagccagagcccggccgggaaggagacgcaggaggcgccaacgcccacccgccccagggggcacaagccacgaccccacgaggggggacaaggggcagccccgaaccagggccccagaggacaccccggcccagggacgggaaagagggcacagggagagaggccagcaggaagagccagccggccggggagggcacaggaaggccccagggagaagaaacggcgagcagaaagccaccacagccaagcacagcaggccgagaacagacagcaagagagcagagaaaggcagagggaaagagaaaagggagagagagagagagggagagaggggagagaaggccagccaagaggagagaaggggaaaaggagagaagaaaggcagaaaagaggagaagaggaggggaaagaagagaggagaggaggagggagaagcagcccccacggggcggcgagagccaaccgcgcacaagaaacggggacaccgggaggcagacggagcgaaagagaacagacccgagagaaaaaggagcaagcaaggccgacaaagccaaagagagcaaggcggaaggggggggggcacccgccaaccacgggccgaaaccagcgcagggacaaggcaggaaggggagccggaaaccaggggacccagcaggagcaagcgaaggagaacagcggcagggcgaacaaagagcacaggcgaaggcccacccaggaacccagggcagcaaggcaaagcggacagccgcaggcggaggaggaacccccagcaaaaaaaaaagcggaccgaggcaaaaaagcaagccaccgggagaggggcggggccgcgccgacaggaaacagaggaggaaggcagcggcgagccaggagaggcagcaggggacgggcagcaggcaagggcagaccgagagagaacagagggcaaaacccagcagggagcgcgcaagggggagagcaaacaacaccgcaacagcaggagcaaccggccggggagggaggaagaaaaacagaagacgggaggcagaggccaaaaggaaacggagaaaggaggagacgaaccaaaggaacacacaagaaaaaaaggacacaaagaagcgagagaaaaaagaaaaaaagaagcaagaaaaggggaaaaagcacgaagggccgagggaacacagcacacggcagcggagggggaggagggcacagaccccaggccccccccgcaggaaagcagaagggaaaaaacagaggggaggagggccagccagcagaccacaaccgggcagccggaaaggcaggaaaccggaagagaagaggggcaggggcgagagaaagaaagaaccaagacagacgacaaagccaaaaggcgacacagagaaggaagggggaggggaccgacccgccgaaaaccaggccagagaaagggagcacgggggcccaaacagcaaagcagcaggccagcaggggcgggcagaacgaagagcaggaagcccaccccgagcaagcaggcaggcggaggaggggagacacacccccaaacaaaaaaaaaaagaaaaagcggccgagggggaaaaaaacagcaagagccggaacagggcaaggaaaaaccgcccggggacaaccaggaaacgaccggcaagacgcccacagaaacaacaacgaaaagcgggagcgcaggccgacgaaagcaaagacgagaggaaccagggaaaagagggcgggaaccggcaaggacgaacaaagaaagcacaaaaggaaacaaaggaaccccgcaggagaagggggaaacagggagaaggggagacggcccgagacaaggccaaggcagggggggaggcaggaagacagaggccgagcccccccccaaaaagaaaaaggcaacgcaacgagagaacaaaagaccacagagagaggggcaaccggcgggggacagacccgacccccgggagcgcacgacccacaccgggcccggacggggaggggaggcagagccgaaaaaggagccaaaagaaccaacccccaaaccgggaccacaggaaaccagaaaggcaagcggaccccccgcagagcccgcaccaagcgaacccaacgaagacgacaaaccagagcacagcgaggcggcagcccaaaggagaaacaacccagaagcaaggccaggcaagaaagcaagaacaccacgacgggcaaaaaggagcggaagcgccccacccgaccacagccaaggagcaaggacaccgcagaacagcaaggggaaaagccagaggcagcaagggacaagccgcacaaaaaaaaaccaacaaaaagaaaacacagccccggaaaccaaaaccagacgaaagccacggcggaagcggaccggagaaacagcgcaccggcccaaggggggcggggagcacccgcggccggccgagaaggaaccgcgaaagacaaaaccaacaggagaaagaggaaagcagaaccggggaagccaggacacaaagcaaagaaagcgaggcagcccggccccgcagggagcggccagagagagcgggagccgagcccaagcgacaagcaaaagaggaaagcccaagggaacagaagaagaacggcacgagaaaacacggcagccaccgagccacaccggaaaaaacacaaacgagccccaccccaaaagaacggacggacccccagagcaggggcccaaccaggaaaggaccaagccaaagcccacagcgaaggccagcaacccgaggagggacagggaaggggggaggccgaaaacgcaggaaagaaaaggaaccaacaggacgaaaagaccagcaagaagaagacggcacacgaagaaaagagaaaaacaagaccaaaagacaaacaagcagaaaacagccgagacagcaaaagaaaaggcgagaagcagcaaacggaaaaagacaagaaggaggacaaaacagaacaaagagcaacaacaagacagagcaacaccgccagccacacacgaaaacaaagccgcagcgcgggagaaaaccgccccaaaaggagcgaggacaacaaagccaaaagagacaagaacaaaagcagaaaccgacaaaaaaaaagaaaaaaaggaagacaaaagggcgggaagcacaaaagagcacggggaacaaccgcaagaagaaagaaaaacaaaccaaacgaaaaaacaggacaaaaaaaaacggcgaaaggggcaggacaagcacaacaacaaggacgggaacagaaggcgcaaagaagagcaggaaaaaaaacagaaaagcaaagcaagaaagagaaaaagacgagggagaacaaaagcaagcgagccagagaaggcagacaaaaacaaaaagggagcagcaaaaacaccacaagcacacaacagacacggcggaacaggggaaacggcaagacgccccacagaagcaggggcccacgggaccaacgaggcgggaggagaggaaaagacacaaaacggccaaagaaggggcacaaccaaaaaccaaaaaacaaaaaaagccagaaaacgagaaacaaaacccaagaaaaaaggaagcgaacggggagagcaaggaaaggaaaccaagaagcaagaaaaaaaccacaggaaacaaaacacgaaagaaaaaccggccgaagaagagaaacaaaaaacacaaagaaagacaagccaaccagaggcaaaacagaaaccagcacagaagcaaaaccgaaaagcaaaaacacgaaagacgcaacacgaaaaagaaaccgaacacagggaaaaaacccaggcacggcaaaacaaaagaaaggccacaagccgccggggcgcccagagccagagaccaaacgaaaaacaacgagcaccggcccccgcaaaaggaccgacagagaaacaaaaacgcagcccaaagaacccaagagacacagaaaacgcacaacaggggaaaaacgcccgacgcagcgccaggcagcaacaaaccaaacggcaacaacaaagacaaacaaacagaaacgcacaggagaaggagcgagagcgcgccaaagagaaccgaaacaaacagaaagggaaaaagacaaagaaacaaacgcaagcgcagcaaggaacaaggcagaaccaaaaagcgggaggaggaaaaccacaaccgggaaagcaaaacccaagaaaacaaaacaaaacaaaagaagcaacacaaagaagggagcaaaaaccagaaaccaaaagcaagcaagcaaaaagaggcagcaaacacaaaacaaggacgaaccaaaaaacaaacagaaaacagagacccagcccggccgcagccacggcggaaggaccaaacgagacaaaaacacaaccacgagaagaacaaaaacgaccaacagcagagcgaaggaagacagcagagcacacaaaaaaaagaaccaaggaagcagaagaccaacagagaaaaagagcacaacaagaaaaaaacacaccagcaaacacaagcacaaaccaaagcaaccgaaacaagaggcggcaccgcccaccaaaagaacagcagcaggggcccccgccacggcgacggcgaaacacgggcagcccggcgcagaaaaagaaccacaaccaacacaaaacaagaacacacaaagacggacacgaacaacagaagaacacgagaacagagggcaccggacaagacaagacaaaaaagggaacagagacccgcaaaggcccagagagaaacccgcgggacacccccagagcgaaaaggggcaaccgccgccaaaaaccccccaagcccagagccggagaaccacggccaccgacgacccagccccacgcgaaccaaggaaccagcaccaggaacgcgccagcagcccaacccccggagaaccaccaaggagcccgaaccagcaggcccaaaaaccgccgccagcccacgggcgccaagggccggccagcagaccacaaccgggcagccggaaaggcaggaaaccggaagagaagaggggcaggggcgagagaaagaaagagccaagacagacgacaaagccaaaaggagacacagaagaaggaagggggaggggacgacccgccaaaaaccaggccagagaaagggagcacgggggcccaaacagcaaagcagcaggccagcaggggcgggcagaacgaagagcaggaagcccaccccgagcaagcaggcaagcgggggaggggagacacagaggagcgacaggcagcgccacccgcccgcgcccgcccgccgcccgcgcccgcgccgccggcagcacgcggcagaccgggcggggcagggccggggcagcagcacggcagagcgcacccccgggacgggcggggcgggacgaaggagccagagcaaacgcaggaagaggcagagagaggcaacgcgagccagcagagacgaccacaagcaagacacagacaaagcgagagcaagggaggaggggcgcagagccggagaacccgcgaagaaaccgagagagagagagagggagccgggaggaagcggccagaaacacgggagagagggggggagggagagagggaggggggcaggagggagggggaggggcaggaacagaaaaccacagcgggaaacggagccgaaggcgggggaacacacagcggcgccgcaggacccaaacacccgcaccagggggaaagaggggggggaaggaggggagggaaagaccgcgccagccagagcccggccgggcaggagacacaggaggcgccaacgcccaccggcccacggggcacaagccacgaccccccaaggggggcggacaaggggccgccccgaaccagggccccaggggacaccccgccccgggagggagagagggcacagggagagagggcacagggagagaggcccacaaggcaagagccgagcggcccggcggagcaaggaaggccccagggagaagaaacggccaaggagaaagccacagcgccaagcacagaccgagaacagagacaacggagaacagagaaaggcagagggaaagagaagagaaaagagaagagagagcgggcacgaggaggagcaagcagacaaccaagaggagagaagggggaaaaggagagagaagaaaggagaaaagaggagaggaggaggagaaagaaaagagaggagaggagggggagcagcccccgcaggggcaaagggcaggaacgggagagcagccgaaggcagaagcggaacaggaggacaaaagccagccccgggggcgaggggggaaccaacggagccagggccaggagacagagacgccagagggaaaaccaccgggcccaggaccacacccagccgacggagaccagccgcggaaagcccagcccacaacccccggccaagcgaaggaagcccccaacagggcaaagggcggggagaaaggaccccagcccccggccccaagggacgaggccaagccaggaaaggaagagaggacccacaccaggggccaccacaaccaggcagcgagcaacgggcagccacccagaccaagcagaaacgggcgagccccgcggaaacgaaagcccacccacaggaaagaggcaaggcgcagggccgagacccagaaaaggggacaggggcccccacagccccaggcagccaagccagcacccaccgcggagggagggcacacgggggaccagcaggaaagagcaacaccaccgccccaagcaggacaggaacacagcagcaagcaggaaaggaaacccccccccccaacaacccggggcgcaccaaaacccacgaccccccaacacccagcacgaaaggcagccaaggcacagcaaggagacacccaggggagcgccgaggcacgcgcaggcaggcggcgggagggcaagcgaggaagaggaagcaggcacaggcaaagaccggcagccacccggcgccacgggggggcggcgcacccgccccacggggagggggaacggcgccgggaggccgggagaaagaggccagagaacaccagaagaaagggagggccgggaagggagacaaggaacaggggacgggagaacagccggccgcccagcccgggagaagcaaggggggcaaggccccagggaggccacccaggggaagggggccacccgccaggcgaggccaaggcaggcccagggaaccaagcgccagcaggccaacacggaacacgacagaaagaggaggaagcgcgcccgcccgaccagcaagaacgacgcgaccaccagcccaacagcagacagccgaccgaaccccccgaacccgggccccacccaacccccaccacgcaccgcaggccacgcccccgccagcacgaggccagcaacagggcagcaggggcaaacccaccaaaggacaccgaccggacaccgcgcagcaccaagaggcagaggaagcagggcaagcaagacagcgcagcccggcgccgggacgccgccacagccgcccccacaggaagcccgggccagccccacacccccaaagggcagggcgcagaaggagaggccgggagggacaggacaggaagggcagggggggccgagaacacgcaaagggacgagaaggagaggggccagggggggagaccggaaagagcgccaaaggaggacaccccaacacaaggcccacagcgcccacgggggggggagcccacaaggggcgccagcgccagcccggggccaaaagagcagggggaggccagcggaggagaaaaacaccccgggaggagcgcaaagcaggaaccacagaacagcgaaaggggaggaagagggggagggggggagagagcagggaggaggaaccaggggccaaagaaagacccacagcagagcacgcagagacagcaaacaggccaaaacgagcaaaggccaggccccaaggcccagacggccgaaaaacccaacacgaggggccacaaggaggaaaaaaagaggaaggaaaacaggcacgagcccggccaggcgcaccgaggggagccgaaccaacaaacagagaccagaacgaaaagccgggaagccacacgagggccccgcccgaggacgagagggaccaggacagccccaaaggaggcagagaggcaggaagaggagggcagaggcccaagagggagaagagggcaaccgacgaagggaagaaggggcagcaaaagccccacaagggacgcaagggaaagaacccaggaagaagccagaacccagcaagaagaaccaagcaaaaggaagggggcacgaggcaagcccggaggcgccagcaggagggcggcggccagggccgcagcagaagggacaagaggacacggaggacaggggacccggccacagagaggacaaaaaagagggccaccccgggaaacgaaccccgaggacagggccacacgcaaacgcaaaagagccgcgggagccagggaaggaagaagcaacaagaccagcggacaaggaggggcgggcaccagggggaccagacagcaagagcgccggcccagcacagcagccccagcccaaggaacgagccaggccacacgaagagggggaaagcgcgggaggcaagagacagagaagcgccggcaaccaagagcaaaagaggaagagggaagaccacccaggacagccgacagccaagcaagaacgggcagggacagcggacaggagggacagggcccagaagggggacaacaaagccaaaaggcggacacagcggagaagaaggggcagacagggagaacagacccggccacaaaaacccgccccgagggggggggacccagcaacagggcaaaaagaaccaggccagagaccccaggaagggagcaacgggggggcgccagccccaagaggggccggaggacccaggagggagcgagaccacgaagaaggaaagacccccgaagggagaccccacccagccgggaaagcgcgcacccaggagacacgagaccgaacgcgaacacacgaggaagaaacagcgaaaagacaggacaagaccaaaccagcagcggggccgagaccaacaccacgcaggggagaggaggacccccacccacagcaggcaaaaggcaaaaaccacaaacagggggaggagagagaggaaaaggggaagcaggggcagaagccaaggcaccgggacagaaacacgcggacgagaagccaaaagccagggaaggccacggcagggggccggggcgcggggaaagcagccagggcagcagacacccaccccacaccggagagccaacagagcgacccccccggcaaagcggacgcggagaccacaccgacagcaaacccgcacaaaagccacaacaaagaagcaaggccaaaaggagcaaaagcaaaagaagaaggggaccggcaagggagaaacaagggggaaaccaaggagacaaaaccaacaaaccaaccgcaccccccggcgcaacggcccgagagacaagaacaaacccagaaggcacaagaagcaacacccagggcgcacaaagcccccgggaaaaggaggcaaccccccagcagacacccgacagggaggcaaggaccagagaggacgccaggcccccagacaggccaggcagacgcaacacaaagacaaggggcgaaaaggcgggaccggccaaccccagccggcaccccagacccaggaagacgccaaagcaggaagggcccgcaggggaccgaggcgaacacgacaaaagagcgcacaggacaggagccagggacaagcgaacagaaacagaacagaagaaaaaacagaagagaacacagggaggagaccagggcaagcccacacggcaaggggggcacaggacgaccacgcggaaaacggaagggggcggacagagggccgcgccagggcacgacccaagcaaagccaccccgaaacagcgccagagcagcgcccccaaggcagagaaggcgagaaaggccgacgggcgaccccaaaagggggcacagaggcaagcacagcagcaagacgagaaggggaagagggaggaccaggaagcccccgaccaggcgaacaggcgaccggcgggggcgacggagggggggcagacagggaaggaggaagcacagaggaccaccaaagaggcccggggagggaggcggagggggccgaggccaacaagacggggaggccccacgacgggcggaggaccaccagccgaaccaaaaggaaccagagccgcccgcacaaaaacaggccccacgcccccaccaaccgcccccccgagaaaaggagaaagaacaggcccaccccggacacacaaaagacccagcagaggaaggggccaaaaggaccagggcacaccccacgacacagaagaagccccgccccccgcaccggcgagcccaccaccgggacaggcaaaaagggcccgacggcgccccgagaccacacacagccggaacgcaagacgccccgggaacacccccggaagaccgccggagaacccgcccggggcacgcaggacccagggaacccaagcgcaaccagccacaaggcacagacagagaacagaaggggcaaccagaaaggggggacaccgaagacccaacggacccggcgagaaagaccccagcagggcagggagcagaggaacacccaaggggggcacgggaagggcagcaaaaggaacagggcgccaccaccagcaccccacggggggccacagggaggcaggaccaggcagcaacccgcaccacgcggggggagcaccagaaaggccccaccggggccaagcagccagcggagcgcgaccaagaccgagcccgaccggaacccaggggcacgcgggccccggggaggccgacggccagacggcgacaaccaaggccaaggggaaacagagcagaggggaggaaagcagggggaccaaacccaccgaccagaaggggggcagcccccaacagaaccaaggggggaggccgaaacgccaggaggcagacccgagaagcgcaaagggaaggagagcacccagcccgacccccggccaaggcaaagaagggccagggcaccaccaccgccgagcggggccgaagcacaagaaccaaagccccagggggccaaccgacaccgggcaacaaaaggggcccagcgagccgaaccgggaacccaaacgaggcaggacccaagaacagacaccgagcgcgaagagggaaagcccacccaccgaaaagggcaaaaaacagaaggagaccaaccccggcaacaggaaacacccagaagacccggggcaccccagccccgacagaaggggcggccgcagcagagcacaagccacaaggcaacgccagcgaggaggcaggacacaaaagggaagagaacaagcacaaaccgccagagagcaaccgaggagcgcacaagcccccccgacggcaaagacccaggcacaccagagacgaacccccgagccagccgaccccagccaaagcaagcgagggaacaaaaaaacccggggccaggggccacaagacccaacggccagaggacgcccccgggccgccggcgaccagcagccacggcccgcaccgggcacgccgggcccaggacagggacaaagcgaccgggcagagaagccaggagagccaagaccccaaacccccgcgacagagcagccccgaccgagaggccccagaggggcaggcaaaggcaacggcacaggagaagaggccacccgccagcaaggcgggcaacaccggaggccgcgccgaagcccggaaacgcggccaaaacggcccgccaccaccgcgcccgccaccccaccacgaagcgcacgccccgcgaccagaggaaccggccaagggacagcaggcccggccggcccggccaggagccaccgccgggcacggggggagcacgcggggagcagggggcaggggaggagcaggcggagcaaaagacggcaaacaacgagccggacggcaccaggcggcaccagcgcggggggcgccacacaacccaaagcaggggagcaaacagcacagacccaagaagcgcagcgcgacaagagggcacgcagcaaggccaggcaagagggccaaccacggcgaccgggcagcggacaggggccaccggcgcccagggccccagagcgagcaggaccgcgggcacgagcccgccacaacgaaggggaaaggcagccaaacggcaaggccaaagcagggccgcaagcaggcagccagccgcaaaggcgggcccgccagggaacgggacacaggaggggacagagaggccacccgcgggaaccccggacagagcgcaaaaaccgcgcccccaaaaccacgacggcggaggggggggcgggacgcacacagcccgagccaggagccaccgccccggaggggaccaggaggcacccgggcggcaagcgagccagcagaacccggaccccaaccacccagcacaagacggcccgcgaagcacagcgaggaggcgcaagagaagcacacaacgcaagagagaaacgagggcggcccgaagggcgcaaggcaggggagcgccacaaaaagggaggggaagaacccgggcaccggccaggcagcggccgagcccccccgggcccaccaaagcgaaagggcggcggggggcaacggaggcagaaaaaggcacaaacagggcaggaccaagccgccgggggagagaacaaagggaaggagagaacaaggggaaggacccaaaccccaagcgcacgggcgaagcaagcccgggcggcacaggcaggagaggggaccaaggcacgcgggcgcgaccggccaggaaagacgcaacaagccagaaccgcgcaaagcagcaccaggagcaagagaggaagagagagagagagagagacgcagagagagaggcagagagcagaggaagagagagagaggcagagagcagaggaagagagcagaggaaaagacgaagagaaagagacgaagagagggaggccagaaccccacccaaggagaaaccccgccaggacggcaccccgaggcgcagcccacggcccaggcacacgagaaaggcagagcacaggcgggaaaacgcccgcacaggcagaaacacagaacacagcgcagcgccacaaaggcaaaggaggcggcccccacaccccccccaaaagagcaaaggccacccaaaagagagggagaagaggcaaacccagggcaggaaaggagcgacacaaaccccccaggccacacccagaggggccggcggccggcgccggggagaaggacacggacaccaacccgaaagagacagccccagaaaggccaaggcgcagagcccacgcaggcagccggaaaccgggcgcgaagcacaccagcacccgggcaagagacagcccggggggcaagagcgagggccagcgacagcaagcaagaaacaggggaagcaccagcagagcgcaaggcgggcaaaaccaccgccccaggggccaagcacagaccaaccaaagaagcaacacaaccacagcaaaggacccaaaaaccacccccacccacaaagaaggaaaagcgaggagaccaagggaaccggcagggacaggccaagcgcgggaggaccgaagaggcaacccgaaggacgcaaacagccgccaacgaacaaacgagaaagacaacaaaagcgcccagaaaccaacgaaggaagaacgcaccacccggaaacgcacacccagcgagcagccaaaacacaggccggacaagacagcggacacgcccaggagcacgggaggaggaggcggccacgagccgcagggagaggcccccaacccccgacaaacccgagccagcgaaaccgccgaggcaggccgccagcacgcgggcgccaaaagagcgcaccagagggcgggccgaacgcaaaaagcgccgcgcccgcaggccacgagggcaccgggcaacgacaaggaagaacacaaccagaaggaaggccaccaggacccacggaggcggagaccacggacgggaagacgagccaagggcaggaccagaagagaacccgagaaggaacacaccaacgggcagcccacgggaaaaaggggggaacacaccaacgggcacacccgcggagacaaaaaggacaggaagaagggagcagccagccgccgcaccgccgcgcgcagagacgagaacgcagaccggacccacacagcgcgacgaaccaggggaagggcgccgacgaagcacaaaaaccacacagagacaccaaagcggaccagagaacccgacaaacagccacaaaacgagaaggaccggggcggacgacgaggccagggcaccgccgggagaggccccaggcccaaagcgggaggaaagggcaaagcccccaggaag

SEQ ID NO: 547 - RNA, 3504 nt, Mus musculus
acggcccagaccgcaagacccccaccaacccaccacgccccgccgcacacgacggcccaaaccccccaaacaaggcgcccgcacccagacgccccagccggggaggaggggaaggcaggcgcacgaagaggaaggaacggggagagggcgggggaggggggcgaagcacgaagggagcgaggcaggaaggcagaagcaggcacgggaggagaaaggcgggggcagggaggggcggggcgggaggggccagggaaaggggccgaaaggacgcggagggggcagagggagggacagaaggggaggagagagaagggagggggaggggcgggggggccgggccccgcaccaccgcggcccaggcggcggccccgcccgcgcagcgcggcccagaggggaggggaggggggggagggggcggggagcccgagccccggacggccccggccggcagcaggaagcgccgccgccgccgccgccgcggacaccgagcggcccccgcgcagcgccaaggggccaggggcagcccggggaccgcccagaaggcaccgcgcaggcgcaccgccgccgccgcgcgccgccgccaccgccgcagccgccgccgccgccgccgccgcgcccggacgggagaggggcggggccgggcccccgcccagcggacagcagcgagccaacaggaggggacgcaggcgcagcgggagcgcgccacccccccccacaaccccccaaaccccaagagaacaaacaccccacgcggcccccccccacccgcccccgcggaaggacgggccccccaggccacggggccaacccagccccccgggaggggccccccgaagccacaacggggggagcaggaagcaggccgggaggggccagcccaaaagagaaagcgcgacgcccgccccgccccaaaggccccgggagggcagagacgacccgcccccaggcaacagcacaacacgacccagccgcaagcacagacccgccgcacgacaaccggcgcaggccaggagagaccacggccaacccaccccccacccacaacagaaggggaaagaaggcggagcgaaggagcagcggccaaggaccgcaccgcgcaccaccaaagcaaccggcggcagcacaaaccggcgcccccgagcacgacagacagaaaggccaccacaggcccgcaggcacaaaaaaaaaaaaaacggcaagagacaccaagcccacagagcgcaccacggaaacaaagagaaggagaaccggacaaaaaacagaacggcccgagacccagccagggcaacagcgcaaggcagcacgcccaggccacgaggcggaaccagacagcagaggcaggaggccagccccagcagggagcacaggaccgcaccggagaaggaagagggggaacgggcaggaagggcgaagagcacacacaaagcagggggggagaggaggaggcagcaacacaccgaaagaaccaaccagcacgaaggacgacagaaacaagcgaaagggccccgagagaagcgggggacacaaggaaccagcgggacgcaagaaggcaaaagaggaggagagccaaaagacgaggagagcaaccagggaacaaaggaaacaaagaggccagagccccgggcccaagcgggaggggccagggaaaagggagcccaggaggagaagaaagggagggagggggcagacaagcaggaaggacagccgggggccgggacacgggagcggcgcccgcccccccccccccaagcccccccccgcacccccaccaccacgacgccccgcgcggcgcgcgcggacaccgggccaaacagcacaccccgcccccccaccccccccgccgcgccccccgcgcgcgcgcagaccaccaccccccgcgaagccgcggacccaaagccacccgggccgagacaacgagacccaagccagagggcgcgagggggggggccggagacccgagggcggagaagggagaggcggagccaggccagcggccgccgaggaggcccggacccgccccccccccaggaggggccggacagcaaaaggaaccgccccgccgaggcagacgagccaacacgcgaaacaggaagagagcgggggcagcgacagagccagaaaacagccggaaccgaggagagaggcgagacggcccgcaacccacccccaccggccagcaagcaaaaagggagacaacgcggaggagagccccaccccccacgaagcgagacgggaaggggaaggccgggaacccgacaggaagggcacaggcccccgcagggcgagcacccgcccgccgagggccccaccgcagagggacccgggcccgggaacgccgaggcgaacgcgggccagcaggccgggcagcgcaggaaaggcggggcagcaggacacacccccaaagcggggaccggcgccagccccaccagcccaccccccaacccaagcgaagcgcccagcaaggggccaacaggccacgagagcgacccaagcaagagaacgcgaagacgacagacgcgagggggggcgggggaggagcaagagggcccccccagaggcaggccaacaagagagcagccggaccaacagggaaaagggaccccagggccgcccccagggcgagaccgcccccagcccgcccaacaaacggaaccagcgcaggccagcccacggccgcaccccaggccggggccccgcgagaaagccaggcccacacacggaagaccaagggagcccagaggacaacccgcagagaaacaccagggcaaagcacgcagccccagagacagccagcccgccgccaggccaggggcaaccaaagggaacgggggaggggcccccacaccaacaaagccaaaagcacccacagaccaagacggggacccagggaaaggagcaaaagaaaaacgccaaaaaacacacagaaaagcaaaagggaaaaaaaaaacaaaagcagggcagaaagcagggcgggacagagggcacagaagccaagccggagccaagccccgggagagcaagaagggagaggcgagcaacagagaagaaagcagccagccggacaggaacaggacagagaagcaggagaggggagaaaggaaaccaagcagccggccaagagccgcaagcaccccagagcaacaacaacagaaacaggaagccagggggacgagcagaggaagacaagcacagcaaaccagcaccagagaggcagaccgagcccaggccagccagggcacaagagacccgaccaaaaaaaacaaaaacaaagggaggagagccaaagacacgcgccggagagaggacccaggcaacccacagccggaaaaaaagaaaagacaagaaagaaacaggaggccagcgaacaagggcacagccaacccagcacgaaaggcaggcagacaaacaaagccagagagcacaaagcaagccaggacagcaaaagcacaaggagacccgcaaaagagaaagaaaggaaaggaaaggaagaaagaaaggagagac

SEQ ID NO: 548 - RNA, 35595 nt, Mus musculus
gagaaaaggaaagaaacaagcaagagaaaaaacaaaaagaaaagacccaagagaagaggacacgaaaaaggacacaagaccagacacgcagagcgacagacaaagcagcacccaggacaaagacagcggaagacaccagcaggccagggcccagcacacgaggccagccccccaaccaagagaaagcagggcagggaccacggggagaaagccaacagacacgagagccaggggacaggagaacggcaaaagcagcacagaagcaggaaaagcccacagaagaaggcacgggggagcaaggaggaagcgcagcagcaacacacggaaaaagagaacggcagaacagaaaagaagcagccaaagaacacgagcagaccagagggaacagaacaggaaaaggaagaaaaaacacacagcgcaggaaaggagcgaaggggaccagagcagaaagcacaaacccacgaagcgaacgccagagaccgcaagggcagaacacaggggagggcagacaacgaggcaaggagagaaccaaacggaacgagcaggacccaggcaggcgggaaccgacgccacagaagacgagagaagccacagagaccccacgacgggagacccagcaacaccaggacacggacgacaaacaggggcagccggaggaagaacccgagagcagagacagcagagaccggcagaggagaggaaagaagcgaaggacaagcacaagcacccaacagcacagaacaaaggcgggagccaggaggccgggaaagggcagccgagggagacgaggaggcgcaacaccaccgggcaacaaaacagaccagaaagcaggagagaaccacaaaaaaaaccgaaagaacaggaaaacaaggcaccaaaggccagcacgaaaaacgaccaaagaaaaaaaacaagcagcacagacccaaccaagacaaaagcccacaccgaaacagaaacaaaggaagagaaaaaccagcaaaaaaaccaaacgccacaacgacgaagaagacgacagaccgggaaaagcagcagaggcaaaggccggagaacggagaaaaaaaaaagggaaaaaacaccaacgcagaagcagcaaacagaaagaacggcaccccaacaaggagccgccaggcgcagcaccaaaaccaggaaaggaaaagaaaaaaagaaggcagcaggaaagcggcagaaccccacccagcccccagaacaggaaaagagaaacgagaagccaaaagcacagcaaaacaagaagcaaagacccaaaaaaggcggaaaccaaaccaaagaggagaagaggcaaaaagaagaccaaaaacagccccgcagaccaacagaagggacccaagaaaaggaaaccaaagggacccaaagcaagaaaaacaaaaaaaaaaaaggggaaaagccaaacagcaaaggaagaaagaaagaaaaacaaacaacaaagacaaaaaaaaaagcgcaaacaagagacgaacaaacgcaagaagaaacgcaaggccgaaaacggaaagaggagcagaagcaaaaaaaccgcgaaaaaacagaccgggcagccgcggcgcgggcagaggcagagcgacacaaagcccacgggcacaacagacgaacgaaaacacaagggacacacgcaaacacacagaaccacaaagagaaagaaagagacaaccacaaaaagagggagaggaaaaacacaaagcgaacaaaagagagcggcacccgcccaaacaaggaacacaaaccaccacaggaaagaagcaaaaaaaaccgagcccaggcaagaaaaagcaccaagaggaccacaaagcacagcgcaaaccgcaacaaaaacggacaaaacccagacaaaaaagcccaaagcacaaccgagcgagagcaccacccaaagccaacaaagcacgagaggcccgggagaaggagcgggggaccagcgcacccagaaaagaagagaggggaagaggacaagaaagaagccggcagcagcacggcgaccccgcagaggaagcccaacccccgagagcgggaacaacaacagaacaaacagaacaaaacagccgaaagaggagcagcagaagcaagcagccgcaggaaacgaggcaggggagcagaaaacagcggggggaaagaacacgaggcgggaacaacaaagcagcagcgggacagggggccaagggacaaaccacgaggggaaaggcaggagaccaaggaccaagcacgaacaacaagggccgcaggacaacacaaagacaaagaagcacaacggccgggcggggggcacaccaacccagcacggggagcagaggaggcagacgagcgaggccagccggcacaaaggagccaggacagccagggcacacagagaaacccgccgaaaaaccaaaaaaaaaaaaaaaaaaaaaaaagcacaacgcgggggcaaaaaaaacgaaacccaggcaccgcacccaagaaggaagaccgaaggcaccagaaaaaaaaaaaagggggagaggacggagggggcagggagggggagggaagcaggggaaaaccggaaaaaccaccaggggccggggaaaccaggcaccaggcaacagcaagcccccgcgagccaccccaaccacccagaaaaaagaaaccaaacaacaaaaaaaaaacccgaaaaaaaaagggggggggcgcacgccacacacacacaccggcgacacacaaaaggaagaaaacaaacccaccagcacgcaaggaacaagccaggaccgagccaacggcgcgaagcggcgcacacaccacaaacaacagcacaaaaccagaaaaagcgcaaccaggcgggggggcacaccccaacccagcacgggaagcagaggcaggcggacgaggaggccagccagcacagaggagcaggacagccagggcacacagagaaacccgccgaaaaaaaaaaagaaagaaaaaagcgcagaaaccagggagaagacagcaacacacagagaacaaggaacaaagacacaaaaaagaaaaaggaaagacacaaaaccgcccccagcaaacccacccacccccacccgcgagggccacccacccaccccaccacgcccagcacccacacgggacacaagcccacaggaccaagggcccccccccagagccgaaaggccccagcccccacaacccccaggggcccgggcagcccaggggcgcaagcacccagaggcaggacgcagcaagcacggcacagcagaggcgaggggcgcaagggaggacccaggggggcaaccggaggcccccagcgcgggaacaaagacaaccagccacggaggcaggagcagaggcaaaagaacccaggagcgaagaaggaggacaagccaagccaaccaaacccaagaagaacgccacaaaaaacagccgaagaagaaaaaacccggaagaagcaaaggagacaccaaggggagaggagcaaaaaacagaaaagaaggagaaacacaaacgagagaaacacagcacaagcagcgaaaaagagggaacagaacagcccacaaaacgcccgaggcccaacaaaaagcacgcgcacacggggaaaagagagaccaacagccacaagggagggggcagcagcagaaccagcaccagcagaggacagagagggccccaacggagcggcagggacagccaaacaacaagccgggccaagagagacccggcccccacacagggcagcacccacacacaaacagcggcggaccacaccacagcacacacaggccgaccaagaccaacacaacagaaacaggcacggaaagcaaaaaaggaacaaacacacacagacaacaagcaggcccagcaaaacaccgcaaagagaagaaacgcaaggggggcccagaaccaggagcggagcacggaccaggaggaacacaaggaaaggcggaggggggcgggaacaaacgggccccagacagcagcagaaacgcgagaagggaccagagcagaaggccgccacaggaggggaaaaaaaacagaagcgcccaccagcccgaagagggagcagcgacagcaacaggggccccacacgcgagaaagaaccaggacaagaagcagaacagacaagacacgcaacgaggagcagccagaaccccgcaagcaggccacaacggggcggcacaaaacgaaggagaagcgaagaaagacgcaggagggcaagcacaacacgccgggggacaagccgaaacagcccaagaaacccacaccccgaccccaaggacacaaaacaacccggaacaaagaaaaaaagacacgagcaccagacacaccagaagagggcacagaccaaaggggagagcaccaggggcgggagaaccagacccggaagagcagcaggccaaccgcgagccaccccagcccacaaaaagaaaaaaaaaggaaacgcaacaggaaaccagcaaaaggagcaaggaaaagcacaagggacaggggcaacccacccagcccagaccagccaaaggaaaaccaagccaacccgcagcccccccagcggagaccaccgagagcgggggggggggggggggagacagggcggagaccggaaccaccgagaccaggcggcccccagaaacaccacccgcccccaaggcgccaccacgccggcagagccacgggagcacagaacaagagcaggacagggcaaggcacacgcagccagccccaacacaaaaagggaaagaaccggggcaacagccccaaaacaaagagagaaacccagccaaaccaagacaaaaaaaagaacaaaaacagaagaagcacagaacggaagcacagcggagcaagaaacaaagaagaagcaaaccccaaagaaaaacagagacagccagaaaacacaacaggaaaagaaccacaggcaaggaaagagaaccaaaagaaacacgcacacacgcagcgacccagaagagacaagaaacacaacagggaaaaacccagaaaccagcgaaaaaggaaccaggcaaaagaagaaaggaccgaccacacaaggcaaacccccgaggcacacagcagaaaaccaagcaaaaacgcgaaccaccccagcccggacaaaacaaaaaggaacgagagaaacgaacaaagacaccaggaaagaaaggcaaacaacaacggcggaggcaacgagacaaccagaaaacaaagagaagaccagaacagagcagaaggaccggagcagcgggagaggcgaaggggaacgcccacgggggacaccacccgagcaagggagcagacaggagaagccagcagcacacaagcaggaagcacaacacccaccgacgggagaaaaaaagcaagccaggcacgacagccaaaagaagaaccaaacggagccaaagaggcacccaaaacgaaaagaaagagaacagaccaacacaagaacagagcaaaaaaccaaaccagaaaccaaaccaagaacacacaaaaacacacaccagacaaaggcaacccaggagcagggggggcaaaacaaaaaacaaacaaaccaccaaaaacaaaacgaagaaacccccccaaaaaaaagagagagagagagagaagcgggcgggggcacagccaacccagcaccgggaggcagaggcaggcggacgagcgaggccagccggcacagaggagccaggacagccagggcacacagagaaacccgcgaaaacaacaacacaacaacaacaaagaacaaacaacaaggacaaacaaaaaacccaggagaaaaaccgacagccacgacggggaagaggaagcaggccgcaccccgagacaaggagcgaacaccgaaggccggccacaacccacgagaaccgagccggaccccaaaagggacagcagacaaaaaagaaccggaggacacacccgacgaagcgacccaaagcaaacaaaaaaaacgcaggaggaagaaacagacagagacaaggaaggaacaacgaagacccgaaagagcccacgaccacagacacgagacaaagaaagcaaaacaacaaggaaaaaagcaccagcaaagagcggcaacggaacgcacaacaagaacgcaagagaccagacacccacacaaaaaagaaagagacaaaaaaaaaaaaaagacccaacaaaaacggaacacaaacaaaaaagagaaaaccaaaggacaccacagaggacaaacagcagccacagagggaaaagaccaccaacccagcaacagaggacaaacaaaaacagaaagaaccaagaagaagacgccaaaaaccaagcaacccaaaaaaaggggccagagcaaacagagaaccagagaggaagaaaggccaagaagcacacagaggcagcaccagcacagggaaggcagagcaaaacgcaccacacaccgcagaagccaaggacagcacagcggcaagaagggagcaaggggaacacccacagggggggggaaacgacaacacggaaacaaggggccaggaaacgggaaagcaccaagacccagcaaccacccgggcaaacccaaaagaacccacaaccacagggacagccaaagaagcagcacaaaagccagaaacggaaaaaccaaagcccaacgaaggaagagaagaaaagggacagcacacaaggaaacacaaagacacagaagcaggcaaaagaaaaaaagaaacaccgaggaggaaacacagagccagaaagacacaaggagaccaccaaggacaaccaaaaggcagaaaaccagcacaaccacagaccaaagaaacgggaaaaggaggcacagagaggaccaggaaccacagaaaaggaaagaccacggagagagagaaaagggagcaggaggagaagagggaagagggcacggggaggcaacaggaggggagggggcagcgaggacgggaggaagaggaaaagggggggcaccgggaccagcgaaggccgggaggggaaggaacagggagcaaggcacccacagaggagcaaagagacgaagggccaccccaccaggcagaacaagggagaaggggacacaaccacccacagaaccacaacccaaaaggcccgccacaagaggcagaaaacggagaagcagaaacaagagaacagcaaccaagacgccccaacgagaccacccacaagagagcgccaaccccgacacaaggaaccgcagcgcagacaggaacagcaaacgcccgagaggccaccagcagcagaggaaacagaagagagaccgcagccaaacacagacagagccagaacgcgaggaagagggggaagaagagccagcgcagggcaagaacacacaagaagacacagagcaacaaccgggaccacagggccacggagacaggcccccaagcagggacagcaggggcggacagaaccacacaaacaaagcagcggcaggacccccaaaagggagcggggcgccggccgcccagaaccccccaccggacgccgggggcccaggggagaggaacaccagccgcgggacagagcccagagggggggacccaagggggccccccgagaagaaggggaggggacaagggggagcagcaaggggggacgggaggagaggagggaggggcggaggaaaaggaaaaaaaaaaacacgaaaaaaacgcagaggcacaacaacaggaaacacaccagacacacagggaaagcaaacagagccacagaggaacccaacgggggaaaggaagacgacaaagaagagaaaagaaaaagaaccgaacccgggaggaacaagccagaaaaacagaggaacccaaaacaagaaacaaaccaccgcagaaccaacaccaccgagagacaacaaagccacaaagccaaggcgagagcaacacccggccaggacagagcgcagagcagagacaggggcaaccaaagccaacgacagagaaggaaaaaaaggggaaagaggcggagagaggcagcagaagagcacgacacccccagaagccgagcaacccagcaaccacaggggccacaaacacggaagggcgagcccccgggaacagaagacaggacaacaaaaaaaaaacaaaacggcaaaaaaacagaaaagagccaaaaaaaaaaagaacgagcacggagagagcaggaaaggcacgcgaaagccgagacccaggcagcagaagcacaaaggagaaggagagaacggacaacaaaacccgaccaccaccgcacaggcgaggcagcacaaacacacaaccccgaaaaggcaaaagaaagaaccagcagggagagagcagccaagcccagcacggaaacagaggcaggcagaccgagcgaggccagccgacacacaaagcaagcccaggacagccagggcaacacaggcgaaagaaagaaagaaagaaagaaagaaagaaagaaagaaagaaagaaagaaagaaagaaagaaagaaaggaaggaaggaaggaaggaaggaaggaaggaaagaaagaaagaaagaaagaaagaaagaaagaaagaaagaaagaaagaaagaaagaaaagaaagaaaagaaggaaggaagaaagaaaggaagaaaggaaaggaaaggaagaaaggagagagggaggaaggaaggaaggaacagggcaaagcaccacaagagggcaggccggaccaacacccaaaaaaaggagagagagagagagacgaacagagaacacgagaagcgaggagacaaaccagcacaaggcacaaaggacaacaaaacaaagcccagacacagaggagccccgcaaccgaaagcgaagccaaaaggccaaagcaggggcgcgaagacggaggaagcacaacgagcaacaaaagagacgccacagcaggccaacacccccaaaggaaaaaggccccggcccacagcgcaacaacaagggaaagaaaggcaaaaggaaaaaccccacccgagcaaaaaaaaaaaaagaaaaaaaaaaaagaaacaaaggaacagccacccaagagcagcaacaaagaaaaccggcccaagcacgaagggacacacagacgacaggaacaaaaccagggaagaggaacgcagagaagacacaggcccagaggagaaagagccaacaggccaacgccaaagccaaaaaccagaaaggccagaaggagacaagagaacaacaccgcacagaaagcacccagcggcaacccaaggaaacaaaacaggacaaagcagcacaacacacaaacccaacaaagagcaacagacgcaggggccaggggcaaacacccaacccacaaggaaacaggacgaggcaccccaacaaaggacaagacgagagaggggcgcgcacagggcacagcagagcacagaaggcagccgcagggggcagaagagagcacgaagccggagcggacacaggcgagaaccaaacccagacccacaaggacagggaacaccagccacgagccacccccagcaccacaacagacccgaaaagaaaaagacagaggaaagcgaccgggcgcaaccaaggagagcaaagacaaaagccagcgagaaagcagggggggaagaaaagagcccaacagcgggccgggacacaggacggacaaagcagccggagacaaaagagccaggccagccaaggcgaacagagaaaaaaccaccaaaaaaaaaaaaaaaaagaaaagaaaagaaagaaagaaagaaagaaaaaagaaaaggaaaggaaaggaaaggaaaagaaagagaaacagaaaaaaagaaaaaggaaaagagaaagaaaaaaagaaaagggaaaaggaaaagagaaagaaagaaagaaagaaaaaggaaaaaagaaaagggaaaaggaaaagaaaaagagaaagaaagaaaaagaaaaaaagaaaaagaaaaaagggagcaggggagggaaggacccaaggccaagaggcgcgggcccaggggcagaagacagaggaagggggggccggggggacacgccagcaggagcaaaagcccacagcagaccaaagcccccccccccccccccccccccccccccgccccccccccccccccccaccccccccccgccggaacaggagcaagcccagcacgcccgagcagccacgccgccgccaccagcccccaccagagaaggcaccgaaacgaagcaagccgcaaaaggccaaaagagccggagggccccacagcaaaaggaagaaaagacagcagcacaaagaacaaaacagagcgacgcggcaaaaacaagagggagcagaaaaggcaggcaagaagcaggaaaaagaaaaaaggaacaaaggaaaaaccgggggggggggaggagagagagagagagagagagagaaagagccacccagcacacaagcaggaagccaaaggacacacaaccggccccccaccacggagacaggcaaaacgcagggcccacagccggcgacgaccaggagcccgaccggcgacccagcaccgagggacaggcagaccggggacgaaccagccccagacaacaaacacgcgacaccgagccacccaggccggaaaaacagggacagccagcgagcaggcacaccaaccagcacgggagaagaagcaggggcccggagcaaaggcagccgacacagagaagcagggcgccaggaccacaaagaaacgagcgaaaaaaaaaccaaaaacaaccaaacaaaaaaaggaaaagcagcgagagaaagaaacaagaaagcaggaaagaacagaaaaggcaggacaaaaaaaggaagagcaaaaagagaaaagggacaaaagaacaaaaaaaaaaaaaacacacacacacacaaaccacaaagaaaaaagcaaagcaaggcaccggccacaaacccccaagacaaacaggcaggcccagagcagaaaagccacaaagaaaccccacggcgccacagccagcgagaaccaaggcccgacaaggagggaaaacggaacgcgaggacaaaggcaaggcagaaaagagaaaaaaaagcgaagggggggagggcaggaagcagggccaagcagagcagaggagggaccagacccggagcggagacagggcgggaagcagcgagcgggagcacgagagcacgggagcacgagagcagggagggagcaagacgcgcagagccggcgggggacgcacgccaacccagcacgggaggcagaggcaggcagaggagcgaggcagccggcacaaaggagccaggacaaccagggcaacagagaaacccgccgaaaaaccaaaacaaaacaaaacaaaggacccgcagagcagagcacgaaccagaaggacccagcccggcagaggcacaaaggaaaagagacagagcagacagggaaaggaaacagaggaagagaacagagaagccagaacagaggcaaccagaaggaaagaccaaaaacaaaacaaaaacaccaaaacaagcggggacaagaaagagacaacagcccaagaaaacgccacaaacaaaaaaaaacgcagggcccaagcagcaaaacccagcgaggggggaaaccgggagcacagaaaagaagcaccaggcggacgagcacaccaagaccacgcgcaggcgacaagaaaaaccaacgaaaaaaaacgaagaagccacaacccacaaaaaacaacaacgacccggaaggaagagcccaaacaagcggaggaaccggccgcggcaaggagacccacccaccagagaacgagaagacgaccacacagaagcgagaaaggaacaccaccagcagaaggcgagccgcacacacggcgccaaccagagcaccaccaaaccgaccacccacacagggcagaaggcacagggacacacacagagacgaagcccacgggaagcaacgaaaaaagagccaaaaaaaaaaaaagacacacaaaaaaggaagagaagcaagaggacgcaccaaaggcaggaaacacaaaaccgcagaaccggacccaaaggaagggagggaagagaccgaacgacccccaaccccacccccaaagcaggaacaggggacaccaaacccagaggggcggggcggaaccccaagccagcgaaagcaagcaccaccaacgacacaacaacagccccagagacagcaagggcccaggcgacagcagcaaccccccgaacagcacccaaaccaacaagcaaacggaacaacgaaccgaggcgaccaaaagggagaagaaaaaaccaagccaaaccaaagaagggaagagaagccaaggcgaggcaccgaagagaaggaccacacagccacaacgggagacaggaccggagccggcgcccggaaccaccgagaccaggcggcccgaaccagaaacgccgccgcccccgaggcgggaaaaggcggcgccaccacacccggcgccacaacaagcgggccaggagcagcagcggggagcaagggacaccgggagaaggagaaaaggaggccgcccagccggccagagcgacccagaaagaaagcccagggaagcgcgaggcagccagccaacgacgaacgcgggcagagcgacccagacaagaaccgagaaaaagacccaaccgaagcccggcagggaccaaaacgacacacaaacaaaccggggaacccaagagaaaagccgaaagccagcgagcccgaagaggcgagagggaggacacagcccaggaggaccccccaccccaccccacccggggggggccccgagaaagacagcaagcgagaaaccagagaaagcaagccagaagcagcaccccgggccgacagcccgccccaggccgccggagccgcccgacccaagagaacaggcaggaaggaagggaaaaacccccccaaggcacggccaggcagcccgaacagggcgaggacagcaaggggccacacacagcccaagggagagagggcccacagcggcaaaagcgagagaaggaccaagggggagggccccaagcgaccgacggagacgaacagcagacacgacaaaccagggaggccaaaccacaaaacacaggaagagaaaaaccacagaagaaaaccaccaaaaggcggcagggagaagcagaaaagagaagcaagaccaccagccggggagcaaagacaaacgaagaaaaacccaagagaagagccagagcggagcacgcgccgcaggcggacggcccagcacaagccgaaccgagggcggacaccccggccccgcgcacgcaaacaggcacacaaacaacagcgggaaacaccaccacaaaaaaaaagagaagaaacaccagcccgacccccccaggaagaggaacccagaggggcgggcggcgaaaggaaagaccacccccaaaggcaagaagacaacggcgccagaaggcaggcacagacccagacccaacggaaaaggcggggacaaaaaacagaaaaccgccagagcaaaacaaagcacaggcaggggacaaaggcgaacagccccacgaaacccaaaaagaacggcagagaaaccccccgccacgaacccgacagagcccccacgggagggcgaaagcgaagaagaccccagaccagagcaaaaacaacacgacgagaaacaaccagcggcagggccaaccacgaaagggaccccagaaaaggcacgaaggccaagggaacgggggaacccaaagaaggaacaaacagggggagcaggggggggcacagggacagcaccaccagcaaagggaacagggaaagaaaaaaccaacgaaaaaagacaaacccagacccccaccagcccagcaagccaacacaaggagagcagagggacaggggcaaccccccaccgaaaggggcaaagcacaaagagaaggccaggggcaaaaccaagggaagccacagccacgcagggcaaagaagcagaaagccaagcaggggcgcagccagcccagcaccgggagacagaggcaggcagacgagcgaggccagccggcacaaaggagccagggcagccagggaacagacaaacccgccgaaaaccccccccacccaaaaaaaaaaaaagaagcaggaggacaaagaaagcccagagagaaagacgaagcagaggaacaacaaagcaaaaaaaaaaaaaaaaaaaaacaagagagagagaggaaagaaaaaaagcacgcgccccagacgacaaacagccagcaccacagggcaaccacaaccaccgaaccagcccaggggacgagccccgaccccaaggcacagacaagaagcagacacaacaaaagcagacaaaaacccagacacaaaaaagccccaccaaaaaaaagaaaagaggaaaaggacaggcaagcagcagagccaggacgaaacagaaaggaagaaaaagaaacccaagcaacagaaaaacaaccacaaacaacaaaccaacaaccacaaacaaacaaacaacaaccacaaacaacaaaccaacaacaacaaacaaacaacaaccacaaacaacaaaccaacaaccaccaacaaaccaacaaccacaaacaacaaaccaacaaccacaaacaaaccaacaggcaaaaaaagcaaacaaaggggaaaggacgaagggaaagaaacacaacagagaagaaggccagaagacggaaaacacaaagagcaaggaacaaaagagcagaagaaaaaagaacgaagacagggacccacagggcaaggccaagggaacagggccagagagagagccgggcgcaggagccagggaaagacgccggggagggacaagcggcacagcgagggcacaagggggccggagagggggccaaggagaagggcaaggggcagggccagacccacaacgccggaagccacccccgccggaacaagaaccccagccccagccaccggagcgccagccccaggagaaagaccggaacccgaaccgaaccagcccaaaaaggccaacgagccggcaggcgcacagcagaaacccaagacaccagcaagcacgaagccgggcacaccacagcacgcacaagacaggaggggcaacaccgaacccagcacgggaggagcagaaggaagagaaagcaagacgcgcagaacaaaacagccgggcacggagacccgcacaaaaaaccacgccaaaaaaaaaacaacaaacccaaacagcagaaccagacaaaaacccagccaacccaaaaaaacaagacccagggcccaagcacccacccagacagaggaagaaaaggaggaaggaacaacggacaaagcgcccgggcacaacaacgaaaagggccaagggcacacgaaagcacaccggagaacagagcaggagccacgccccggaagaaccaaagggcgaagcaacagagaagcacagcgcacaaaacaaaaccaccaccggaggggaccaaaaaaagacaaagggagggaaaggcaagcaaaaacaaaaaagcccgccaccaggcaggcggcgcaggacaaaggccccacaccgggcgacagcgcgagagagacaacagacagaaaaaggaaaagagaaacgaaggagaggcgcagagcaaaacaaagcgggccaagaggggacacacaccaaccagccacccaggggcaaaggcaaacagaccaccaggcaaagccagccgcacacagcaagcaaggccaccagggcacagaagagacgagcaaaaaaaaaaagaaaaagaaagaaagagagacagagagagagagagagagaaaagggaagggaagaagggaagggaagggaagggaagggaagggaagggaagggaagggaagggaaagggaaagggaaagggaaagggaaagggaaagggaaagggaaagggaagggaagggaaaggaaaggaaaggaaaggaaaggaaaggaaaggaaaggaaaggaagacaagcaagcgagaaacccagccaaagagagcagaagaaaagaggcacaccaacaacagagaaaaaccaaacagaagaaaaggagagaaggcagcccacaaaaggcccacaaaagggagagaaggacaagagggaaaaagaaaagacagagcccaggaagcgacaggcaaccagccagccaacgacggagaaaaccagagaaagacgaaacaggaagaaacaggcacacaagccacggagaaagaggcccaaggcagaaaccagagcacccaagagagagaacaagagaagagacagcaaaagagcccggagaacaccgagcccggcccggagaaaccccccacaaaaacccgcgagaacggccaacgcaaagcaggcagagcacggagagacaacacccaagcacccggagccgaacccagccccaaagagcaacaacaccgaggcccaagggcacagacaaacgcagacaaaaaaaggaaagaaaccggggcgagggaggccgggaagagcacggcgcccggaggacggcagcaccacacggggggggccccaacagaaccgagcagaggaccagcccccggccggaaagccgcaacccagggggcaagcacaccaggcacaaacacaaagcaaagaaggaaaagggaagaacagaaaaagaaaaaggcagaaaaaaaaacaccaaagagaaagaaaaaaaacgacaaaggaacccaaagcaaaaagaacaaagaagaggggggaagacaccaggcacccaaaggcaacgagcaacaaagcagaaacaacaaaagcaacaacccaaaaaaggacaacaaacaccaaaaaaaaaaagaacaaaacacaggagaacccaacaaggcaaaaggacaggggcgaaaacaggaaggcagacacaccaagagcaggcgcaggccgacgaagcggaacccagccaccaccccggagacgcaggaaccggcacaacagcagcaagaggagaagcaggagaccagaaaaagggaaagagaagcgaacaggaaaacaacaagaccagacacagaaaggagagccagaaacacagaaaaacacgagggcgacaacggcaaagccaaccaagaacggaggccccaaagcgaggaacgaagggcacccaagggaagcaagagccagcccagacacaaaagcaaaaagcagaaggaacaccgcaaaagacagcccggcgcagccagaagccacagcccacaaccacaaagaaccgccaccaggaggcacgcgcgggagacaagaagcacaggcacgggccagcaccacccacgcaggaacgaaaccaaccacaaaaagcacccagcaaaaagcagggcaaccagaaccgagccccgcccgaggggaagaggcgggggaggacagggcagacccccggaaaacggcggcaggccgaaaaaggaacagccaaagcccaaccgggagagccggcaaccccagagaagaagaaggcccggcaacacaacccacgcgcagaaaaacggcagagccgccagagagcccagcgaccgcgcgacagaagagcacgagggcggggagaccccaggcgcgacccagcacaggaagccaaagggcgggacacagaagaacgcccgccaacccggggccaacgggaaaacacgagggacacagcacgaccaaccgggagcgccacggacccgaacggagaagcagcagccccaacgaagccaaagaaaagaaaaagaccaagcacacagcccgcaggcaaaggcaaaaggcgccaggaaaaacaggagagaagaacgccagggaaagagaaggaggggcccggccgcccccgcggacgcacagccggagagaaccacacaaaaccaaacaaaggaaaaagaagaaaacacccaaaacagaagcagcaaggaaagaaaaccagggcgagacagccagaccaggggagcgaggcaaccaagcacaaacaggaaggcaggacacaccgccaccagcgcgggggaaggcgagcaggaggacaaagcaagccacccccaggccagcccccaccgcggcccagggggggccggagcgcaggcccaagcagagggacacgaaaaagaaagacccccaccaccaccaccccgaagaaccaacccccgaaagaacccagggaacaaaaaagcaaaaaaaaaagagcaagaagcaggagcaaggcaagacaagacaacaaccaagggcgcagagagaggcacacggggcccagcaagcccgagcaggcagagggcaacagggaggaacggcccccaccacggggccaggccaaacaagccagaccgggcacaagccagccaacccagacacccgccccacaaaccaaaacccaagaacaaaaaagcaaaaaaaaccaaaaaaaacccacacaaagcaaaagacaaaacaggaacagaagaggagaccaggaaaacaaaccccgcagggaaaaagcgagaaccaaggagcccaacccacacagaagggaggcgagggcagaggcaaacccccaaaaaaaacaagagcaacaaagcccgaaagaccagcagaaagagcaggcaaacgaaaaaagaagaaaagaaaagcacaaaaagcaaacaagccgaaacaaaaaaaaagaaaaaaaaacaagacaaagaagagcaaagcagaggcccaacaccgaagacacacaaaagcagaaacaagcaaggagaaggaagagaagagaccaggaaaggaagagacagccagaaaagacggagacccaggagagcaccaaaaaacaaccgggcaaaggggcccccaaagagaggaacgagacgcgcgcacacggccccccaggcaaagaacagagccacccacaccacacacaaaacacccaaaggagcagaggccgcagcaaaacaaagcgggaccaagaagggagcacagacaggcgcaacgagaggcaaaggcacaggagacagcaaagcacagacaaaacgacacacggagcccagcacgggaggcagaggcaggggaggagcgaggccagccggcacagaggagccaggacagccagggcacacaagaaacccgccaaaagaccaaaaaaaagaaaaaagaaaaaaaagaccacagggccaaagacccaaaaaacacagaagaaacaaaaagggccagcagggggcacaaaccagcccagcacgggaggcaggaggacagaaggcagccggcacgagcagcaggaagccaggacacacagaaaaacgcacaaaaaacaaacaaaagacaaacaaacaaaaaacaaaaaagcaaacaaaaccacccacaaacgggcaaaaacaagaaacaaagacagacaaaaaaaccaaagcagaagaacagaacaaaaaaagaagcaaagaagaagaaaggacaaggcagaaaaagcaagagcccgggagaaagaaaaccagacacacacccaccaaggggaaaaaaacagacaaacgaaaaccagcagccaaagacggagaggaacgcggcaacagccaagagaggcccaaaccacggcaaaaaagcgaccaacccgaccccgcccagccccagggacagggaacaagcagagccaggcaaaaaggacacaaaaagaaaaggggaaccacacgggccaacacgaacagaagaaaacaggaacacgcccaaaacacaccacccgagagaaaacacaaaagaaagaaagaaggccgaaggagcaggaccacagggccggcccgcagaggaaagaacagaaaaaaggcggagcccagaggcaggagaaccgggcccacaagagcagccggcccgaaccacgagcaccccagcgcaccagggggagcgaaaagaccacagcaacaggcaccagcaacagaaaccagaacccacccccaacaacaccaggacaggccggagagggggacagaggcgacccacggcagcaaccaagaaggacaagaacacacagagacggaaacagagagagcagccaacaagccccacagggacagccgaaggcagccaagccaaagaaggagcgaaaaaaaaaaaggaagcggccagacagaggcacccagcacagcccacaacgccaaaccgaaacaccacccgccgaagcgagacaggcaaccaagcaaaacaggcaaaaacgagagacagcccccaccccagggaacgagccccgccacggaagagagaccaaagcggcaccaaccgcgaggcgcaggggcagcgggagaccaggcgcggcgcgggcccggggcagccagaccccgaggccaaccagaagagaaagaagcagaacagcagaaaggccccacagcccgagcaaagggagcggaccacccaaaagcaggcagccgagaagaacaagcaggcgagacgaggaacgaaacacgaaggcgaggaagagagccgcccacccagagcacaggagcgacaacacgggcgggggggggcgccacccacggcagaggcgggaagagagaaaggggagcccccaccagaggcacgaggcaacgcaaaagggaggccgaggccacggagccaggcgcaacagcggcgggacaaccgggacaccccaccggagcccccgcccgaggcgcacccggggaacaacaggaaagggacgccccacagccaggcggagaaagcaccagcccaccacgcaaaggagcgacacaggaacgcccccaccccgccccaaagagagccgccgcgcaaacacagaagggaagcacaagcgcccgagagagccaaagcgcccacagaacgaagcaagacgaaaggaggccagggcaaagagaaaaacaaagcaaccaaagacaacgaccgggagcacgcgggaggacgaagagcccgaaagaccaaaaacaacccgaagacacacacacacccccccccccccccccccccccccccccccccccccccccccccccccaaaggcagcacaacagggagagaaaaacaaaagcggaagggaacgagccacccccaaacaagcagccaggaggagaagcagacaaaggacccgagaagaggagagcacacaggggaagacagagcaaagaggaagggagaccccgcgcagaaccgaggccccacccgggaggggccagcacccagcgcaaagcgggagaacacgcagcaacagcagagagcaagacgagacaagaggaaaccgcacccgcggagcagggcgaagcaaggggaaggccacaagagaagcagcagccaggggagaggaaacacacccaacgcagggcccagccccccgggcgccaggcaagcccgcaggcagagccgacaggaaaggaaggaaggggagaacacagggaggaaaaacgaaccccggagaaagaagggagcggaagcaagcaaacccacgaaacgaaccgcccacaaagggcaacggggggcggggagagacacagcagacacgcgcagacacagaggacagggcaccccagcaccccacaaaggccggcaggcacacgaacagcagaggcggagaaggcgagccggaacggggccagccaaacagccaaacagcacacgagaaccacaggcccgcaaacccaagcagaacgagcagcaggacaggcgcaaaggaaaggcgcagcaagcagaagaccgagggggccccagcaccagaaaagagagacaggacagaccaaccccaggggggacagaccaggaggcgcgaccagccagcagcaaacaggcggaccaggaaggcaaccccacggaaaacaagcagagcaacgacaagcggacacgacggcacacaggacaaacacaacacacgcacaaccaacaaacacacaaagagcagaaagcccggggaggcggaggggaggcgccagcagacagaagcccgggagcccaggcacagaaacggcggaggccaaccgaaccccagcacggaaggagacacaggaaaaccagaagcaaagcaccccaacacaaacaaaccacacaaccacaaaaacacgaagaagggccaagcgagaaaaagagaaagaacgagaaaaaaacgaggaacacgaacaaggagaaaaaagagaaccccaggaacggagaagaccccagcaagacccagcaagggggacaggagccagaaacggcaccccgaccgggcagggcccagggagaaacgggccaacccagccacaaaaccccggccacaagccgcacaggaggcggggaaagaggagcagaaaggcaggaccgagacccagccagagagagcacgccgacacgaagacccgcacgcagacaagagccggcaaccacacaaagaggccacccagcaacgagggaacagagcagagacccgagccgaacaaggcagagcggggaaccggggaaagggggaggacgaaggggagccagaggcaaggacaccacaagaaaaaaaacaaaaacaacaacgggccaaagggccacagagacgaacggccaaccagggagccgaagggacggccggcccggcacgaaacacaggacagcggcaaggggacccaagaggggagcaagggcagccgagcgcgccgccgggacccccccacggggcccgcagcccaaggagaagagccagcaacgaacgaagccagagcggccagggagacccccccgaagaagggggagcagcagggggaggacgggagagagggggagagaagacacaaggacagaaacaaaaaaaaagcaaagagaaagaagagagccaagagagcacagcaggcagaaggggagaacagggcccacaccgccacgacaacccaaacaaacccaggggccagaggagcgagaccaacccgaccgagcaaagaagagaagaaccagaagaacgagcggccagagcagcaggagaaccaggccaggcaagcagaaaacagagggaacacaacgcaggaaacgacccgcgggccggggcagaggggaggcacaagaagaaagagcaaagccgacgcagaagcagaaccgggccaagaagagaaacagcccagcgggcccagggaccaaggcgaagaaaaggagcggccccccccggcgccagcccccaccaagaaaggaagaaaacgacccaaacgagggcgcaagagcaaagggcggagaagacaaaaaaccccaaacaggccccagagaaacacaacggagcagcggggggagcgggacagaaaggccgagacagcaggaggcagagggagaacaacgcaggccgaaggggcgagccaccccagcagcgggaagaagcggaagcggcagaccgccccgagaagaagcggcccccgaacgagcccccacgacaggcggacaggagaaccagcagcaccggggaagaaaagccaaacgggacgcgggaccaggaagcgaccacgcgacggggcaggccgcaacaggcagacccaacaagcagcgggagggcggagcggaaggcggccaaagcaaggacaacggcccgggacccgcggcaacaagcagaagaacgcgacagcgcgagggccgccacccaacccaggcgcgccgggaagacagcaaaggaaaaggagaccggaagagcccaccgaaaggcaaccagaaagcaccgaaagaagaacaacgagccaaacaccccgcccgaagcaagagagccagcaagaaaacagagggaaaaaccccaaggcacgcagaaagccgcgacagcgaccaagcgaggagggcgcgagccaaaacacgggacagcgacaccgcaccgcgagggaagacacacaaaacaaaaaaaaaaaaaaaaaaaaaaaaaaaaaaaggaaaagaaagaaacgcagggcgcgggggggagagagcccagccagccagaagcccagggagcagaggacaggcacgagcgaaacaaccgagagggaaacagacaaggcccgagggcaccacacggaccggcaagcacacaccagaggagagccacacaggacagcaaggaaaacggaaggacgggcaagccggaacagcagagccccagcaaaaagccagcaaacagaggagccagggaaacgacagaaaccaccagaagagagaggcgcagccacgccagagggcgggacacacccaagaccaggaggcgcccgcagccagaagagaccaaggccgggggccggccgcacagaacaaacaaaggagggcagccacacaccggacagcacccaccgcgaaccagaccggcacgcagggccccgcacgagaggacgcccaagacaccagggaagcgagcaagagccacagacacaggacaacccagaaaaggacgcaaaaaagaagcacagcgaaccaggggggggccgaggcaggagacaggagaaccagggcaaggaccaaagacccacccaaagcagagaaagccaacaacgaagaccccaagaccagagagaccacccccccaccaacgcaaccgacacgacaggcgggaacagaaaacccaggacgcaccggccgaacaacccccacaagccagagcagacagagccaaagcacaagggcagaaagcagcaacagaaaacaaaaaacaaccacaaaccaaagcggggaaagccgcaggcggcaacaaaaacccagcccaggaggcgcagcggaggggaggagccagccgccccacagacgaaagccacaaaaaagacaaaccagacgccgcgacaaacgcgaaggacgaccgcccaccgaaccaacacaaaggcgaccagcgccaagaacagcaaaagcgcaaaagcaacgacacgcaaccccccacacaaaaagggcagacaccgacaaccaccgacgacgccgaaccccgagcaccaaaccccacggaaaccccaccgagcacaaaacccacccacaccaagccgacccaaacccgccagggggaggcagcccagacacaaacaaaaaagcagcaaaaggccaaaggcgggggggccccccaccgggagacaaagccagagcaagagcaccgagcaccagcaaccaggcacacaacaagaccggcccaaaaaaaaaaaaaaaaaaaaaaagggagggaaagaggacagagaaaagaagagggagaagggaaggagagagaggaagaaaagccggggaacccccaagacagggcgggaagaggaccgaaacagcccaccaaacaccagagacacagaaaacacccccccccccccccccccccccccccccccccccccagcaaaacccaaggcaaggccgggacagcaggccaacccagcagcggccgggagacgggcgggccgcccagggcccggagcggaacagcaagagaacgagagagcaggaagcgacagagacagccagcaaaagacccaccggacccagcggagaggcggacagccggccccggcacgccgccaagccacacaaacaccccccccacagcccaacaggaagaaccgccacgcaggccccccacacacgcaccagggcaacccgcaaacagacacgccacggagcaaggggcccccgagacccagacgcagcacacacacggggaaaacacagacgggagacgaacagacccagaagggccgggcaggcagggcacaaaaagaagggagaagcccggacagacaggagggaacacgaaagacacgggaagcagagcccgagccacaccacacgacggacgcagagggccccacccggggggaaagacaggcgaccaaaaggccaaaagcagcgccccagcagcagagccacaggcagcaggcggccgggaggcagcccccaggaggccgggcggagcagggcacgacgaccgagcagagaagaacggaggagccagacgcagccccgccccgccccaggccccaccccgccaaaggccggacacacaggccagagaagagaagaaggcaaggaggaagggccgcaaacaagacgcagcccagaacaggccacaaggaaaggacgggggacagaaaggggcagagcacaggcagacaccagaggccggcgaaaggcggcacacggggggagggggagaagggggagcaggggggggggggggacgcgcgccagcggagcgcaccaaccacacagggcaaggcaccagcagcccggccaaggggccacaaaccggcggaggcacccagaacccaggggagccagggccccacccagagaggcacagggagcaaaagcaggcccgggcggcaccgacagccagagggggggcgcccagaaagagccaacgcgaacgaagcagcgcgacgcccacagcagccccaagaccaacgcgagagcccaggagaggcggagagggggacaccagcgagcaccaggcaccgccgccccccccaccaccaggcagaaggccggcgcagggggggaggacgaggagggagaggacaaagccacagcagcaggagaaggccacaaagggacgggacagggggggcagaggccccaaaagacacggcagacacacagggagaggaggcgggaccagagggaaagcacaacacacaggacacaggcaacacgggcccgaagggagaggcagagccacaggcggaaagagcagacagccgcccgggagaaggacagccacacagaaaccccgggggagcgccaagagaggaccggcacaagcaccccggaggggaaggaagccccgcgaggccaggacccgaccccacgagaaagacacgaaacaagacgagcgacccagaggggaggaaagggaaaggggggacgggggggagccggggggcccccaaaccagaaccgagaagggcaacaccgagaagaccaaggaccagagaggacagcagacgaacaggggaggagcagggcccagaaagccaggcggacaacaaccgcagcgcggcaaaagacacaacgagacagagcgcgccagaaagagcgcggaaaagcacagaaagaggcagaggccaccccccacccgcccgcacgagagggaaaggagagggcgccaccccccaaacgaaaaggaccgcagcagcagcgcacagagcaggccaagggaagccagaagaggggcagaccccgggagaggcaaacacaaagcgccagggggcgggaagaaccccggcccagaagagaagccaggccaacccgagccaccccaccccagcggacaggccgagggacaggggggaaaaaaaccagcaaccggaacacccagggacccccaaaccggagcccacggaagaacaacaaaggggaggggaaagcagagaagagaaggagggaagcaagcaggagagagagggcgccgcacggagccagccagcacggagaccagcaagggagcaggcagcaagggagcaggcagcaagggagcaggcagcaagggagcaggcagcaagggagcaggcagcaagggagcaggcagcaagggagcaggcagcgagggagcaggcagcaagggagcaggcagcaagggccaggagggagcagcgaaggacgagccagggaacggacaaagagaagagaggccgggggacgaaagcgacagcggaccaggaaaaggaaagcaaccaagaaggaaagaccaagaaaagacaggaagggaccccggggcaccgaaaagcacacaggcaggacgggagcggagagccggggggaaaccggcaaacgacagacgggacggaaggcaaaacccacagcaggcaaacaagagaggacacaccccccagccagcaaagagacggggcggggaccgcagcagagcgcccaacgggggaggagggcacagacaaaagccccacagagaagaccagagagcgaccagagcccaggaagaggagccgggccacaggagccaggcgccagggcgccagagccaggggccggcggggccccagggcaccacagaaccacagcgggaggagacaggaaagcggacagggaaggaaccccccccacgcccccaccaagagggacaaggcccggggcaagacggcccaccaggacgcccggcagccaggaggcgaagaggaggcacaaggcaccggccagagaccacagggcggagggagcccgaccaccgagaaaacccccaggaaaagagcagggggaagagaagggggcgggggagagacccacaacccacgaaacccacacgcggggagaaaggcccccgaagcccccaccacacccagcaaagagcaacagccgggagccggagaagcagaacacaggcaagagggcaacgaagggcacagggagagagaacagaagagagagccgacacgagagcgggcccagacgaaaaacagccaaagggaagaagaacaaaacgggaaaaaaaaaagccaggggacgacaccgcaagacagcacgagacaaacgcagacaacccccgccaggaacaaccacagcccccgacacacgggagagcagcaaagagcccagaaggaagcgaccacaaagggaagaagaaacacaaacccaaaccaccgggaagaaaggaaaaggcaaaagagggcagcacaaaaaaccaggagaaaccagcccgccgaagcagagccgaaagccgcaaggcccaaaaacagagacaaaagagaaagggaagaggaaaacggcaccagacaggagcgccacccaccgcacaagcggcgcacaacggagcagggccgaaggcccaaaggagcggggagaacgacagcagggacagagagggaggcgcgcgaccccagcagcacaagggggccacagcgccccaacccaacccggccccgcacacaacacacacacacacacacacacacacacacacacacacacacaggcacagcacacacccacacacacaaaggagcagcccacagaccgagccgaccacgccaaaagcagcgacaccaggaggaagagcaacccaaacgcaaagaacacgggagaagaggcaggcagaccaaacacggagaagaacggcagggagaccccagcgccacgagaacccaggaagagcagacgccgacccgagcccccaggggggaaggacagaaagggggaacgcaacggagcagaggcggggggaaaggaagaggaacagcaacagaaccaagaagccgacaaggccaagccgggcagggggcacgccaacccagcacgagaggcagaggaggcagacgaggagccagccggcagaaaggagccaggacagccagggcaacagagaaacccgccaaaaaaccaaacaaacaaacaaacaaaaaggcccacaaccaacaagcgccaaacacacagggaacaaaaaacccacacaaacgacagcaagcgacagggcaacaacagaagcacagcaagcagcaagggccccacagggcgggaccaggagggaagcacacgcgagccacaagccgcaagcccccgcagaaaggggcggcaaaaaaagaaaaaaaaggaaacacgagcggcagaggggagcccaggggggaaagaaaggacccgcgcccagcagcccgccccccggaacccaccgcagcccgcgcccagcgcaaacacgccgccgaagagggcacagacccccgagaggggagccaccgggggcgggagaaccaggaccggaagagcagcaggccacccacgagccaccacaagcccaccggcagacacaaagggccccgcaccaggggggccacgcgaaaaaaaaaaccagaaaaccacacagagcaaagaccgacacacccccaacccccccagaaaaaacccccaaggcaaccccgcaccccagaagagcacaagcacaaccccaaccggagagagccagaggcccggggccacaacagaggggggagggcgggcagacaggagacaggcccccaaggcgcaagcaagcagagaaacaaggccgggaacaggcccccgcgagcaggaggaaaagagaaagaagacacaaagagaggagcaaaaggaaagaagcaggggggcagcaccgaacagacaagcgcagaggcaggaggaaccaccagccacacaggagccggccagccaggcagagagcgcaaaaaccagcaacagacaaaaggcagcccaaggcaagcaaagaaagcccaaggcggggggggggcgaacgaaagggccgggacaaaagcaaaccagagaggcagagaaaacacggcgacagggaggagggaccggaagcggaccacccaacaaggagcgcgacacgagagccccgaaggaggggacaggcgggacagaggggaagaaggagaggacgaagccccagggggcaagggaaaaaaaaaggacgggggggggcgcgcgcgcgcggggggggggggggggggcgcacgcacggccagcacaggggcaacaggggaggggggggcccccgccccacacaggaagcagcaggcagaggcaggcaggagggcgggacgaaccggcccagacgcaggacaagcacaagccaccaccacggcccaccaagaaaggccaaaaggcggaaaagacgggcaacacagcggagagagacgaacgcaggaaggaggagagcaaggagggaagagcccggagcaaaacaggagggcaccacaaagcacgcaggaggcacagcagacagccgaggagagggaagagaacgcccgcacccgaagccgaaggaagaaagccgagacgggggcggggggggagcaccgcacaccaacagcgccggaacaaccaaaccaccagaaaggcagagaaggcaacgacagcggggggcggccgaagcaagaaacccaggcaacccgggaccgagacaagagaggacggcaaagaagaccggaaaaggaggaggagggcccagggccagccggcaaaacaaaaggcaggggaggggcaaagacccaagagaagggaaaaaaaagaaaaccaaaacacaggggagggcaaaccgcaggcacaacaacacaccacacaggaaacaaaaaaaaaaaaggcaacacccacagccaggaagaaggaaaacacgaagaggaggacacccgcagcccgcacaggcgcagcaacagggaagaccaaacaaagagcaaaggaaagccaaagagacacacacgagcacaggaaagggagcaaagagcaagccgaggaccggcggccaaaccacacggcagcgaaggagcaaaagcaaacccccacacagcggcagcagaacagaaaaggggcggcgacggggaggcggaaaaaaaaagggcaaggcggcaaaagaaaaacgccaaggcaaaacccagcgcggcccaacgccggacgagggaggagggcgaggggcccggcagcacagagccgggccacccagcaccacacaaacgagcggggggcaacgcaccagcccgggggggaagagaaggaccaggagcaaggcgaaggcacaagcaaggaggcaaccgggaaggaaaagccaggaaagaaagagaaaggaaggaggaggaaggagggaagcgggggggaaaagaagagggaaggaaggagagagaggaggggagagggaggggagagggagcgagagagagaaagagagagagagagagagacggaacgaggccccacagggacacccccgcaccggaacccccacgcacaaccaggcacagccccaggccacaagcaccaccacacggaggagggaagagaaggaacaccaggcagcaaccaggggccaggacagcaggggagaaccgacccaagggggcaaggcgagaggccaaaggccgggccggcagcccgccaccccacccacagacccacagacacgcgacgcagacaaacaaacccccccagcaagccccacgcccgaaggaagccaccgggagcacccccagacagagagcgcgcgaggcgaccccagaccagcagcccaaaaaggccccccgccagaagaggggaagccagggcccgaggaagcccaagaaaagacccaccagccaaagcacaagcacaaaccagagcaaaacgcgaccgggccgaggggcggaagcagggcccagcacaggcaagggcaccgcaagccacagggaccagaaaccccgagagaaggacccgggcccaagcccccagacaccacggccacccaccgggacgaaaagggggccacgcgaaacggagcccaccccgcagcgaacacaccagagaggccggccaaagcccacgagggcccagaaccagaacaggcaacccaaccacagcggcgagggaggaaggaagcccgggagaaaaagcccggagaaagcgcgacacacagcccagacaaggacccaagccagccccagggaaaagcaaagcccccccagcccaggaggcccaagggaggcaaagcccggcaggcagaggaaggggcacaaaagccacccagaggaaaaccggcaccaaaacgaaacagcccgaccagcgaaccacaaacccgcccggggcggacaaagccccacccgcaagaagaaacaaacacacgagcaagaaagaggcggcagcccacagaaagaacgagcccacacgacccagcccgaacgagcgccaccccccggagccccacggcagccccgaaccagcagaggacaccacgccgggacccgcgcaagaggaaaaaaacaacacacacagggcgcaggcaagcagaggaccgacgagacccaggaccggagaaacgccgggaggcggcacacaccgaaaccagccgaagagacagacacaggaagacccgcacgcgaacagagccaacagcaagccggggcaggagccccggaaaaacaaaaagggagggggggagaggcagcaccgcgcaaggcagagagcagaagacggggacccacaggggaaggagagaagagacacgaaaagccggccccacagcacagccagaaaaaaagaagacagaggaaaacaagaaagagcgagcacgaccgggccccaacaccaacaacagcggggccaggcggcacacacacacagagacagacacacacaagacacaacagagagacacacaagacaccagacacggcacgcacacacagcacagagacacagacagcaacgaacacacacacacagacacacacaagcaccacacacacacacaacacacacaagcacgcagcacgcggccacacaacacacgcggcacacagacgccccaaaagacaagacacgaaaggacagaaccacagccgaagagagagggaacaccccgcgggagggacagagaggagccacagcagcaggacacacagccaccgggaaccgaccccccgcccccgcacaacacgcggaacaaaacagaggaagcgaaacccgcgcccccagacagaaaacagaaaagccagacccccagacggcaccaggaagaccacccccccaccccgccccccccgccaccccgcacacacacacacaccaagaagcccgaaaaaaaagggaaccccgcagagcgggcacagcagccggacccacgaggagaagacaggcggaaccggagaagagaaggagggagccaccggagcaccgggagagccgggacgcaacggcgcaccacccacccgcccgccccaggcaaagggaagccccccacacgcgggcccccaagagcgccaagccccccccaacccccagcgagcgccaggccccaagagcaccgaaggggacaggcgcgcccggaccgacgcccgaacaaaaaaacacagacagaacacaaaaacagaaagcggaagccacacacaaaaacaacagaagaggggaggcagccagaaagaggaaacagaggaacaacaacaaaaaaaaaaacccacaagcagccagaagacacaaaaaaaaaaaaaaaaaaaaaaaaaaaagcagagaaaaaaaagaaaacgaagacgcaaccaaccgcaccaaaaacaaaaaaaagcaagacaaaacggcgacgcgcccccgccccaccacgagaggaagccggcgcccggagcagcccccagggcgccagagcagacccagaagccaccccacacaacccggccacaaagcccggaagccaccgcccagaagcgcccggagcccagccgcgcaccagagaaggcaggaagcagcccccagaaaggcccgccggaccaccgaccccgggcacgggagcgcaaagggacacgaggcggcacgagcaaaagcaaaggacccggaacgacacgggacaccggacagaagcaggccgcagcccccgaaccagaaccgggagggagagcacgggcggacggagcgccaccacggacagggaaagacgcagcacagggcgcccagggccaggcacacacaacaacaccagcacgaagcaaccccaggaaaagacgcagaaggcacagcaacagaccaccagaaaagacaccaaaagaaacacaaaggggggggaaaaaaagaaagaaaaaccggaccaggaagaagaaaggcacccagagggccgagggaaccggacgcacggcggcaaaacaggaaaaagaccaaaaacaacacgaaagaggaaccaaaacagcgggaaggaccgagaaagcccaagaagggcaaaagaagacagcggggcgaccaggacagcacccgaagacccccgcagaacagccacgagccacaaacacccgagaggggaagccgggcagaagcagagaaacagcaaccaacccaaaaggagcacagaaaaaccaacccacaacaacccaacagaaaacaagggagagaaaaaaaaacaacagaaggcccaaacgagagaaaaccgcgcacacggggcccgagggaaacaggacaagcgaccaaacagagagccccccaacagagaccgccagcggcagagagccccaaccagcagagagggagccagaacgcacggcgcgacaacccgacgccaaaagcaacccacagggcagacgcaccgagccggcccaccgcgcgcgccccagagagcggcgaccgaaaacagacgcgagccaggcaggacgaacggacgaaccaagggaaaagaagacaaaaggcgcccccccacaccccacagcagaagcaggcagggccaccccaaggggagagcccaaaagccgcccagacgcgaaggagaagagggacacgacgggggcacgaggccccagggccagcgagcacacgccaggccccccgggacagacacagaagcgcccgaagaggcaccccgcaggaacgcagacaaagaacgcggagaccccaagccgaccacacgcagacacccagcacccaagacaacagagaaagcaagaaaggcgaagcggacccccagaacacagaagccaggaggaacaccccacccaaagggcaccgggcccggccaccgcagccagggaagagcaaggaagggagacagccagcagagaaaaagcgccccagccgcggggggggggggggcagcccgcagagcccccacgccaaaagccagcccacccaccgggcagggccccgacccacgaccgcggccaggagaaagcacacccacaaaagaagaagaggggcagaaccaagaggggaaaggagcagcccaaggggacaggggaggacgaggaagcccggggcgcgggagacgaagaccgagagggaggacaggcccgagcagacaaagaggacaggaggccccaaaggaagaaccccaagggagcggccagagagagcagggggggaagcgcaggcaggagggacgggaaggcaacagggcacgaaccagcagaaggggggccggacaggaacgaacagcaagagcgagaaaccaccaaaacaaaagcacaaaagaggaggcaagagcacagaagggaagcaaaacaggcagaaacaagccggagcaaaacaacggacaagacaagcaccaacacaacaaccaacaaagcaagagccacaagaaagaagagaaacgagagagcggcgaga

SEQ ID NO: 549 - RNA, 10077 nt, Mus musculus
agccaaaaaaaaggccacaaacaaaacaaaaaaccagaaaaacaaacaagcaacgcagaagaaaagaacgccccccaaaaggaagaacacaggcggggcaacaggggaggggaaggcaaaagaaagcagaaaacagcagggaaacagagcaacgagcaaaccaaaaaaccagcacagggccacaagagcaaacaccaacagaaaagagcgagccaaggccccaccgaggggaggggcaaacagcaagagcggaggggcaaacagcaggaggaagaggacccacccgggcgaagaacagccgcgcaagcggaaaacagacaaagccagccgcgaggccacggccaggccacaaagacccacagacacacgggagaggagacccagagaaccagccaaacagcgacaacggcaggcgcgaaaagaaggccaaccaaggaagcggaaccaacaacacaggagcgaaaagcaagcaagagggccaggccacaggggccgcccgaggagccagagccagccacacgccacagcccgacagaaacagacagagaggggccccacccgaacacgagccagagacaaggaacaaacaacgaagaaacgcgggccagaccaccaggccaaaacaagcaggaccagccaaaggaaagaggaagcacaccccggaaaaacacgggggggcaacagcagggcagagcagagacaacccgcaccagcgagccggaggggccaaagcgggccaggacaccaaaaccaacaaggaaacaaaccaggagcacagccaggaggaggaagacagaaagaccgccaaccaccagccacccacaaaccgcacccagagcaaggcacaggcggaccaagacacccacgcagccacaccacacagagcagagaaggaggcacccagggacccaccagccacaggccaaccgagaaggagccaccacaaggcgagcagggggcaagggagagaaagaggagcagagcagcacggaggagagaggagcggagacaagggggagagcagagccacggaggaccaaacccaccaccggccagggagacccagccgagcgccacgagggccacgagccaagcacacgcagcagggggaacaaaaaccacagaaaagggggcacccacagggcagcggggaccagggaaagcagaggcggcagaacggccccccccacgcgcaggccggaaaacggccacacccacacacgcagcacgggagagagaccagccaccaccgcacagcacaccaaagcgacccagggagggacagggagcggccgggagagcggcccgcaccacgccgccacggaggggaggaggagcccccgcaccaccccgccagcgacaggagagagaaggaaacaaggaaagggaaaggggaggggcgggacaaacaggaaggaagagcgaagcacacacagggaaagaaggcagaccaagaaggaacaagcgaagcgacagaggagaaaggagcgcgaagcaagcacgaaaggacacaagagaaggaccccaaggacagacagcagaggcaccacacgagagagagaaacacaccaaaaaacgcggggggccagcaccaccagggcgggcgaggcgaggaacagcgagacagacacaagcgaggaagacaggcaaggcaggcccaggaggaaggaaggagagagaaaaaaggacgaccaacaggaggagacagagcggcgaagaacagcggcaaccgaggcggaacgcgaccaccccgagagaggcacagcgagaaccccggcacacccggcccccgacggccaaggcgaggccggcgccgaggagggaccacgcgacgggcaccgaccaccgacaggacgcggggccaagaggggagggagagcgcgcagccaaccgaaacaacacagacaagagaccaaaaagcgaaacagggcacccccgacccacacccggagggggagcacaagggagaaaaacaaaaaaaccacaaaaaaggcaaaggggcgggagaggccaggggaagagcacccgacgccccgaaggccagagcaaacccagcaaccacaggggccacaaccaccgaacaagacgaccccccggggcgaagacagcacaggacacaaaaaaaaaaaacaaaaaaaaaaaaggcaaaaaaaaaaccaacagggaagggcccgggcacgcagcacgggagacgggcccacaccgcacggggagcacagagggcgcccggaggaagggcagggggaacagccccaagggaagaggcaggagagcggcccgccagagggacagggcaccccccccccaacaccgggaggggagaccgaccccaagggcacgagagaggagagcccgcccccacaacgacaccaagggagcagacccgcacccaccaggcaacacagggaggggcccgaggcaaaggcacgggagccagcccaggcagcaagcaggagaacggcagcccccacaggccagcacgggaaaggggccccagcgacgggcagcaagagacggccggaggcaggggcaggggagcaacccgagggagagagcaggagaggacccaccccgagcggcagcacacagggcagaaacaggcggagccaccgggagaagaaagggagagcggaggcgaccagccagcaccacccaacccagacagaggcgagggcccacccaaaacaacacgcaaagggggaccggaaagagccagccgcgacaaagcgcaggacccaaacacagggcaacaacagaaaacgggaggagccaggaggaccaaagggggcacagaagccagagacccaaacagacccaaaccagcaagaacagcaaggaagggagggacagaggacagggggacacacggacaaccagaagggagggacagaggcaaacggggacacacggacaaccaacccagaagagagccaacggggggggggggggggggcacacaggagggggacaagagggcagaaagaaaggacagggagaaagcaggaagggggcagaggaaacagagaacaacaaaacccaaaaacccgcaaaagaaaggggagaccccaaaccggagaaacggcagggagagggagggcaggagaggaaggccgggagaggccaagagaggaccagcacggcagggagaagaagggaggcacaggagcgagacagaggaaaagcccaagcgacccaccaaacccagcgccgcggagaggacaccacccagcacaccaccagcgaaccaaggacagccaagaaacccagagaacggccaaaccagcacaggcccgcaccccaaaacgagagcacagaaagcccaaaaggcaccacgagacaaaagaaaaccaaagcacaaacaagaaaagcacagaaaaacaaacaaaaggagacaaaaccccacaaagcaaaaacaaagcaaaacacaaagggacaccaaaaagaaacaaaaaaccggaacacacaaaccaagaaaaaacaagcaccgggcaggggcacaccaacccagcacgggaggcagaggcaggcagacgagcgaggccagccggcacaaaggagccaggacagccaggacaacagagaaacccgcgaaaaacaaaacaaaacaaaaaacaaacaaacaaaaacaaagcaaaccaagcaagaggagaaaaaagaaaagacccccggggagggacacgcccaagccacgggaggcgacgaggagaagcaaggagggcagccagacacagacaaggaggaacaggcacacaggaaacccgccaaagacaaaaaccgaccaaaaagcaagaaagcgaacaaacagggacacaaaacagaaaacacgaaaggaccagggaagaagaaaaaagcaggaaaaaacaacacaacagaacgaggcaagcaaaaaagaccggcaggcacacaaagaaaaggagagccaagagaaaggagcacacggaggaagcggggacaaagagcaggccaacaggacagcagaagaacaaaaagacaaacgacaagaaaaaaaacggcaagaaaacgacaagcgaacagaaccgcacaaaggagaaaaaggaacaggaccaagccacacaggcgcacgaaaaccagcagacagccaaaaggcgcaaggaaaggagcgggggagaagaaagcccgaaagacggcccagccgagacggggaggcaaggggagagaaccagagacagagcccagggaagaagacaacccggggcagccagaagaagcaggacgaaccacccccgaacccaccaagcgagaacacgcccccgccaagccacaccaagaggccgcaagccaaaggcagggagacaaggacaagacagagaaaagcagcccaaaccacccccacccaggccaccgggaggaccgacacagcagggaaagagaaacgaaacgaaacaacgagagaaacaaaagcaaacaacacaggccaccccagagcaggcgcagaaaaaaaaggaccaaaccacacaccaagaggagacaacaacaccaaacgaagaaccgagaaagcacacaaacaaaggaacaaagaagaaacagggggagagaagccagggggaagacccgacacccccaaggaaccagaccacccagcacaacggcagccgaacgaaaccagccagggaaccaaacccggccccagggaccaagagcaggagcacagaaacagaagcaaaaaccaacacaaaaaaaaaaaaaaagaaacgaaaaggagaaacaagagaaaagagaagagggccggacagggggcagggagaacaacagagagacaccacccgagcgaccaaccagggcagcacagagaacaaacacaaccccagggaccgaggaagcggccccaggcgccaaagaacgagaggccaccagaagcaaccagaccgccccggacaggcagccgagaagcacagagacacacaagccagagacaaaggcacagacaacgcccacagagacgcccaagaacagcgccccggggcagacgggaaagggaaggaaagaaacagcgccaagcccaaggcgcaacaaaaccagacgaagccccaaaacacgaacaaagagaagggaaaaacaaaagaaggcaaacagccagaaacaggaacacagcaagaaggcaggacaaacaagacagacgaagcaccaaaacccacccaccgaggagaccaccacaaccccgaaggcgccaagggaaccgaagccgccacccgagaggaaggccagaaaagagggggcacccagaacccaaaaaaagacaaaacccaaaaagcaaaagacagagcgagcagaaaacccagcagcaccccgcaaaacacaaaagcacgcagacaccgggcgcgccacccaacaggcggacccgggcaggccaagaccacccccccacgggccccccccccccccccccggcgagacccaagccggaaacccaccgcagagcccgcccagcccaggcgaagcacaaaccaacagagagcagcaaacaaccaaagcaggagcagaggacgcgcgagagcgcgggacagaagcagaaacaagcacaaaccagacagaaaaagaaaaaaaaaaagccaacaaaaccaaagagcagaaggaaagaaagacaaagaacggaaacacggcagaaaccaaggaaaccagacaaccagacaaaagaacgcccacaggccgagcggcgaaaagggaaaaaagagaaagaagcagggaccgaaagggggaacaaaacagcacaaggaagacacacagacaaaacagacccccgacaaccgaggcgcagggggaaaagaaaaaaacaagcgcacaaaacagacagagacccaaacaggacagaaaacaggaggaaaagagagccaaaaacgggacagcccaagaagagagggggaacagagaaaggcaaccacaaaacaaccaaagggggaaaaagcacacaaaggaaagaacaagccgccaacccccgagcggaccacgaaacccacaaaagaaagagaaagggaggaaccagaaaagcaagcaaacacccacggagcccacaaccgcccggaccaaaaaaaggcagacaggcgagaggaaaacaaaaaaacagagagagcaacccagacacgcggacagaagaggaaaagagaaaagaaggccagggaaggaccagcaggccacggaaaggggcaggaacaggggggggagaggacaaaaagcacacccagggggacaggaagcagaagaacagacaggaggaacagagcaagacacacacccagggaccaaccccaaacccaaaaaccacagcgacacaaggcagcaaacgagaaagcagcccaacaggcaccaggagaacccagcagcaaagaccaaaccaagagggcggggaaagaggcacaaacaaccaaacacaaccagggaaagagacaccaaaaacaagaaacagcggaacaacagaagccaaggggaggcagaagacgcacaaacgaggaagcaacccggccagcacgaccgggccaccagaaaaacggagagcaggccccagccccagaaacacccaaaccccaagaagcgagcaaccgcgccaccaaaccaagcaagccacgcccagaagaccaccacaaggacagccccaggaaccagcccaccaaccacaccccagaccacaaaccagcgaccagaccaaaaggaacccaccacagagcacccggcacccagcacgcaggcacaacagaaaaaacacagcccagccacagaaaagcaagaccggagcaggacgcagccaagaagagcaaacaggcgacgaggcgcccggaaagaggaagaaggaagcaggaggaggaaagggggaagccagacaagagaagagagccaggaaggaagggcacaagaagagaaggaaagaggcggagaaaggcgcaacaaaaaagcgccacaccccccgcaccagcaaaaggacccaccgacggggcaaagagacccacagagaagcagcaaggcaagcagagacagacagcaagccaacaagacaccaagccggggccgcgggccaaaagaagcaacgggaaggcacacacaaggacggaaaaccgccaaagcaaggacaaacccacgcagagacacagaacaacaaagaaagaaacagagcaccaaagagacagcagaaaccgaagacgcacagcagcgagaaggagccaggaagaagagaaaagcaaaaaaaccaggccagaaacacaaaagcacaggcaaaaagaagcccgagccagagagggccacagaagagcacgcgccccaggagaccaagcagcccaccacacaggcagccacaccaacgaaccaagccaggggagcaacgccccaccccaagggaaccaagcaaacgcagcacaccacagcacgcacacacacaacacacacacacacacacacacacacacacacacacacacacacaaagccaaaagagggcgcaaaagaaagaaagaaagagagagaaagagagacaaagagacacacacaaaacacagcacacaacaggagaacacaaacacacacacagaaaaaggggagagagagaagacaggagaaaagagagcgaggaaaaaaaaaaaagaacagaagaaaacaaaagaaaaaagaaaaacaaagcgagcagacggaaaaagaagacaaaaagggagccccgaagcagaacgaagacacacagccagaccaggcagaagaaaaaacagcaaaagagagagagagagagagagagagagagagagagagagagagagagagagagagaggaaacccacaaaacaggggagggccaagaggcagcgacaggaacagacagaaaaaggggacagaaaagaagaagccgacgccggggggggggggggggggggggggggggggggggggggggggaagagaacacccgacaaacgccagaggaaaaagagaccacacgcagagcccacacaggaaaacagcccgaccgcccagcaaacggaagcgcagaaacaaaaagccccacacaaagagacaccgggggaaaccggaaaccggcaaaagccccagaggaaacccaggaaagagagagagggaccagagacaaacacagaacaaccaacgggaggaacacggacacagaaagagcagcaaggcgaagccagagccacgcgagaggccgaggcggcgccagcgcagcggaagcgagcaaggacgaccccaaagaaaacccggaggcaacaacagacgagcggcccagacccgaaacacacacaaacaagaaaaaaagacaagagggaagacaaggcagcggcacccagaagacggaagcaaccagagaggggggggaggaggggccgagcaaggaaaaacccccaaggagggggagagcagaaaaagcgggagcagccaacgggaaaagcagcggccaccacaggagccgcacagccgccgagcgaagcaagagaccgcaggcacggcgaagcaccacggacagagcacaccacagccaagcaagacagagaagggcaaccacacacgggggaggaggccgacccaggaaggggaccggggggccgacggagaacaaaaccaacagagcaacaacaagcaaggaagcacacagaacaaccccggggggcagggcccccgagaaagccagaagaaacacaacgcccaaaaacccaccacccccaggaccagggagaagagcgaggagagcaaacacaaaacaggagcgcgccagggagaaccagaacagccaacagcagaagggggaacagacggaaccgcccggaacacaaacagaaggggagcagaagcagcccccccaggcacagccgcaggaggagagagacagacaaaaacagggcccgcaagcccgacggcccagggcgacgagcaggcgcccgaagacagcgcgccccccccccccccccccccccccccccccccccccccacccccccccccccccccccccccccccccccccccccccccccgggagacagggcgaagcccggcgccggaaccaccgagaccaggaggccgaaccagaaaccaccgcccgccccaaggcgggaaaaggcggcgccaccacacccagccccaaaggaccccggggaagaaaagagaaagagaggaaccaaagcccaaaaagccagccgccagcacacagaaccaaaaagaaacaaagaaaggcacacagaggacgagaagcagagagccagaaaaaaggcacgggaaaagagccacaaagcaacagaaaaaagaaaaaaacaacgaaaaaaaacaaccaaaagaagaaaccgaggcccaacagaaccaaaaaccagaggcaaaggagaaaggaagagccagacaacaaaggacaagaaggaggggccaccaggccaagagccacaggagcggccaaacaacaaccaggacaaacagccccgagccccagaacaaaaaggggcagcccgaagagaaaacgggaagagagcacaagacccaaacgagcacacgacaaacagcagggacccagccgaagcccggacccagcgcgaaaacgaagaggaggcaaagaggaacacagggccacaaggagaagcagagaaagacccaagagcgaaggggcgcaacacaaggggaacaacaaagaacaaccagacccccagagcggccagcgcaagagcagaagagcccagggccacacggaaggaggccccggaacaaacaagccccagacaggggaagccagggccaggaagcaggagggggggaggggagcagggcggggaaagggaagggaaccaggaagcagaagacaaaagaaaaacaaaaaaaaaaaaaaaaaaaaaaagaaaggacaggcgagaaaaagcacaaccacaaaaccggccaagcggggccgggaacacgcaacacaaagacaccgacccccccacggaagcaccacagacaacaggaccagcccccgccacgagaacgaaagccccaaaaccaaaaaccccccaaaaggcgagacagccagagcgaaaagagcaccacgcaccccagccagcaccggcagggagccaacacaagcaggggaacgagaagagaagaaaaccaaca

SEQ ID NO: 550 - RNA, 376 nt, Mus musculus
gcccagaaaaaccaggcccacacacagagcagacaaacgaacagaaagcaggacagaggagagaacagccacaaagggacccaaccgaccaagggacaacgaacccagaaagaaaaaagaagacacgagcgccagacacaccagaagagggcgcagaccgacggaggggagccaccaggggcgggagaacccggaccggaagagcagcggggccacccacgagccacccaccagcccagaacccagaagaccgcgagaaagcaacccagaagaaaaggcagcaccccacacacagcaaaggaagcgcgcccaggaaaaaaaaaaaacaccaacaccaccagcaaggaaggcaacaggacgcccggggcagcaggac

SEQ ID NO: 551 - RNA, 794 nt, Mus musculus
cggaacccgacccaggaagcggcgccccacgggcccgccaccggggacgggcccacaagccgccccacacccgggacagccccccgcccagccaccccaggggccccccgccccggagaagcgacaggcgccgacaaggaaagacgaaaacgcaaacagaaaagcaaaaccgcacgggaagggccgagaaccggggacgaacacaggcccacccacgagacaggcaaggaaggggcacagcccacgcgggccagcgcccgacaagcacccccagacacgaccagggaagacagaagcgaaaacagaaccagaggggcgcgcgccacccacgaccagccgcacgcaggccccagcccaacccagcgccccgagacgaacccccacccagcagggaaggagaggagcccagaggcaagggcaccccaagaccagcaggaagcccaaaaaaaaagaagaagacgagggggcgagaggccgcgggaaaggccggccggagagcgacgagcacaggacccacagaagggagagaacagaccgaaagcgaggccccccagccccaacaagcccccacagaaaacaaaaaaaaaaaaagcagcaggacaggccgccccgccaacccagcacgggagcagaggcaggaggacgagcgagacaaccggcacagaggagcccaggacagccagggcacacagagaaacccgccgaaaagcaaccaaaaagcaggcacacacaccagccacacaaaagccccgccgaagggaaaggagccaacagaggaaaacaaggacgaaacc

SEQ ID NO: 552 - RNA, 2442 nt, Mus musculus
  misc_feature (1613)..(2036): n is a, c, g, or u
accacacgcccagaacaaaaaccgcacagagaaaagaacaacaagaaaaacagagaaaagaaaaccgaggccacaggaccagacggaaaccacccagccaccagaggaacaccacacaggaacaggcaacacacacaagaaaaacaacccaaacgaagaaagacaaaaacagaggcaaaacgcacggccggaagacgaaaaacgggcaaaacccaaaacaaccacaggagagaaaagacacggagaaaggaagaaaccacagaagaaaccaaaacaacgccaaaggccaccagaagagcgacccagaaagaggagaccaccagacggccgggcccgaacagaaccgaacacacacccgcccacacgaaaagacccgaccgaacacagcaaaaacagaagggcccaacgggaaaaacaacaaaaacaaagaagaaagaaagaccacaccccaaaaggcaccaccgaaaccagagaacaacagacaaggagaaaggacaacacccgcccaaaaaaacaaacaaacagggaaacaggagagggcggagagagggaaagaggaaacaacaaaaacacacagcaaaaacccaaagaaaaagaaaaaggaaaaacacaaaaaaaccaagacgaaccagagcccaaaggacaggcaggcagggcccgaggcgaccaggacagagagcacaacaagagaacagccccccaggacaggcccaaggccgcacaaaccagaaaggggcccccaggcccaccaggcccagcgccagcccagagcagccgaggagcccagcagaaccccaggagagcagaggacgaggaagacaacgcgacccgcagccacacccagaagagcaggaagcgaaaagagcaaaacaaaccccaagagcggaaagcgcccaacagcgcggcgaagccccccaacccccaccaaagaaaaccgaaaaacagagcaaggcagcagcccggaaccgcgaagcggaagcggcggaagaggacagcggcccggccgcgcagaagcaggagcgcgagcgggccccaccaggaggcagcaggaaagacgacccgccggaggggggagaaccaccaccagccgggacagagggcagggccacggcgacgaggacaccacaacccgcgccggaccccagaaggaaccccaacggccacaaggacccagaaagacaaggcacccacaccaagccgccaggccagaacacaagacaccaagaccacccagaaagcagccacacaaggaaccacccaccaaggcaaagacacagggagagaagaaaccagggccagacacgggggagcgcagccagcaccgccacccacaccacaccacaccacaccagccaccgagccgggaaccccgccacacccggaccgcagagagcgcgaggcaaccacgaagggaggcggacagcagcaaggaaaagaacgcagcagagagacgggaagcccagaagaaaaagcgacacagcccccccagaagaaaagcccaagaacccaggcgaaacaggcacaaggaggccacaggcaaaacagagcaacaagaagaacgccacgcaacacagagaagaggaaccaacacaggacaaggcccagaaaaaggnnnnnnnnnnnnnnnnnnnnnnnnnnnnnnnnnnnnnnnnnnnnnnnnnnnnnnnnnnnnnnnnnnnnnnnnnnnnnnnnnnnnnnnnnnnnnnnnnnnnnnnnnnnnnnnnnnnnnnnnnnnnnnnnnnnnnnnnnnnnnnnnnnnnnnnnnnnnnnnnnnnnnnnnnnnnnnnnnnnnnnnnnnnnnnnnnnnnnnnnnnnnnnnnnnnnnnnnnnnnnnnnnnnnnnnnnnnnnnnnnnnnnnnnnnnnnnnnnnnnnnnnnnnnnnnnnnnnnnnnnnnnnnnnnnnnnnnnnnnnnnnnnnnnnnnnnnnnnnnnnnnnnnnnnnnnnnnnnnnnnnnnnnnnnnnnnnnnnnnnnnnnnnnnnnnnnnnnnnnnnnnnnnnnnnnnnnnnnnnnnnnnnnnnnnnnnnnnnnnnnnnnaggcaccacgcagacacccaggacgaaggggagggagcacaggacgaccaaaaagacgaaaacaagaacacaagaaggaacgagagaggaggcaacgggggaacgcgcacagaggggaaccaggcagagaaagaagacaagaaagagacaccacgccaccagaaggcggaaaacaggcgcgccgcacaggccacaaagagacacaggaccacaagaaccaaagccagagagggaaagcacaacagagcgccaccgagagcgccgggaccccccacggcaaacagcacgcccagccagcagagaccacccagaagaggcggacaaggagacaaggcagaagagcacccaacgcacgcaaacgcagggcccagaccagaaacacaggggaagaggccgcagaggagca

SEQ ID NO: 553 - RNA, 466 nt, Mus musculus
aaagcgggccagccagccgggaagcccgagacggccaccacccgcacagagcgcggacggcggcgggaccggaaacggaccccagagcgcccgcccgacaggaagcagacccagcagcacgcgggcagggagggaacagacgagacaccagaacagaaccgacaaacgggcaaaagccagcccaaaaaacgaaaagaacagccaaagcacagcaggggacagcaccaccacagaaagccaggcgccggcccggagggaggaccgccacgaccccaggaagcaagcagaaacgagagcgcagccgccgaggccggccccacccaagcaaccccacagcgacccagccgaccaagccgacccagcacagagggccaaaaccgccacaggccgcaccaaacccgaggaggggagccgcacaggccacggccaggacagcacagcacccagcccaggggcagcaaacaac

SEQ ID NO: 554 - RNA, 3652 nt, Mus musculus
agcaccccaccggagaacaaaaacgcccaggagccaaggccccaggaggggagaggagggcagaagacacagccaagacccacgcccccagagaaggcacccaggagcgggggagcacgagggcccaagcacaaccacaggacacacgggaaaggcgaaagcaagcaggccgaggaaacccaggaaaggggggaaagccgacacaaacccaaggagccaagaagaccgcagccaaacgcacaccccacccaagcccacagaaagagacaaccagagggaggggcgaggcaggggaaagggccaagcaagcaaaggacccaagcaaacacaccaggcaaacacccagaggggagcacacacaaaacccaggcgagaagagaagacgagagaaccgcagcgccagcaggaagagagcagaccgggaagagagaaccgccaaaaaaaaggaagaagagagaaagacacaacaaacaggcccggcccacacgccgacacacaaacacacagaggagaaaggggagggggggagagggagaggggagagagagagagaggcacagcaaccccccccccccccccccacacacacacacacacacaacacacacacagagggggaaagggaggaggggggagagggaggagggggagagagagaggggcgcagcaacccccccacacacacacacacacacacacacacagagggggaagggaagaggggggagagggagagggggaaagagagagaggccagcaaccccccccccccccacacacacacacacacacacacacacacacacacacggagggggagagagagggcaagcacacgggaaccgccaaacaccaccagcgcgcgcgcgccgggcccaagcagccacccgacacagaaccagcccaagcccaacaggacgaagccagggccgcagggcccagccagacaagacgggacagcaaggcaccacggggaggaggagagccgccagaacggggaagacagcgggggacaccacgccaaaagaagccaacgaaaaccgcaaaacaagcagaaaaacaaaagacaccccacagacccgacgcacagcccccgggccccggcaaggaggaaagaaagacagacaagcagaacaaggaagagcagcaaggggccacaggaagaaggcgggcgcccaccccagggcgccaggggagccaccaccccccccaccccccaaccacgcgggacccggccgccaggcagccagcaagggagcacaaccgcacggcagcaggccagagaacccccgcaagccaaaggagaaagaaccaaacccaggagaaacccggacacggacagcaacagcgcccccggggaaaacccagaaaggaccacccccgccaagaggcacaaaacacacgaccccaccaccagaaaaagccgaaaagccagcacaaccacgcagcaaacaacaacgaaaaggcaaaaccacgggcagcaaaaacacggcgacggggaaaagcccagccaaggagcaaacaagcaaacaaccgcgaagggcggcagagagacaggggccaaagagccccagagcaggcacacgaaaaggaaacagcagcagcccaagcccgcgccaccgcccgcccaggcgacgaggaccgcaggaaccaagcgcaccaggcggaagcggccgagggaagagaagccgggggagaccaaaaccaaagcggaggagccacagaacaaaaagacagaacagcggcagaagaagaggaaaaagagagacacgaccccccggcacagacaacagaccaaagaaaaagggcaaggcagagaggccagggaaggaaaagaaggagcccgcagagggccccgagcagccccagcaacaccaggagcgcaaccccacccggccgagaacgaggcccgaaccacagcagcacacacacaaagacacacacaggcaaaaaaaaaacaacaaaaaaagaaacacaaaaaaagaaaacaaaagcaaaagcccagaacccaacgggaaaagggaaaggcgggccggggccaaccacagaggaacggcccaggaagagacaaacagccgaaagggacgacgcaggagggacggaacaaagacagaaggcgggaggcacaaacagaccggacggaacgccagcagcaaccgcccaccaacaaacccgcaggacccaagaggacggggcgggcccagggggggaccaagagccagagaaagacccccgccaaccaaaaggcaaaggacaagaggcgagccgcaagggcaccagagcccagacgacccggaacccagacaacaagagaagaccggaaaacagacccaaccagggccagaaaccaacacacggggagagcagaaccaaaggacaggcaaaaaccggcaaagccagaggcgacagcaccagaaggggaagagggggcccgcacaaaagaaaacgacgccaaaacaaagacaacaccagaccaccaccacggggaagaacagcacacagcaggccgggaacacgagcaaagaggcccgcccgacccacaaacacagggcaggccaggccgaaaggaaagcagaggcgagcagaagccgcgacagacaggaaggggggagagcccagggagggcacccggagagccaggcagggccacccggagagccaggcagggcgaggagaccacacggagggaagaggcaaacagaggaacgccaaggagagaggcaagaggaacaagaggacagcagcgggaaaaggaaaaggcaagaacagggagccagcaggcagcaggaggaggaacgagagaggggcccgaggagacaaaccgaacagagacgaacaagcacaggacccgacccacggccccaaagggaagggggaaacacagcacaggaacgaaccccaaacccccggaaaaaaaccgcaagcaccccaacacagaaggccgagcggggcacagcccagggcaaaggacacaggcaaggggccccaaggggagccaggcacagcgccagccccacaaaaaccgccaaggaaagcaaacccacaggagacggaggccgaggggggaaaagacaggacgcgcaccacaggaggccacggcaccaagacggggcggcagccagaaaagcagcgcagaaaaaggcccgcgagcaggaggccggggaggccaaagcaggaagagggagggagcgagaggacgggacagcacccagaagcgcccccccccccccccccccccccccccccccgacgacaggaacgaggccccagagagccgcaagcgccccagaggaacggcaagggagcaaaaggcccaagcaaggacaggaaagcccaggaccggggcggcagaggcccacgcccacccacgagcccggagggacgacggaccagcagccacacccacaccagcagaggcagacaagcgacaagccaaggggcaggaaaacgcaagcccccgcaccgggacagccaccgccacccagccacgcacgagagacaagagccccccaggcacagccaaaccacaggaagaaggggaggggggacagaagggcagagggagaacagaaagagaaggagacacccacagccggcccagaggaccaccacccgggacccaaacaacacaaccccgagaggaaacaagcac

SEQ ID NO: 555 - RNA, 6585 nt, Mus musculus
accaggcccagcgggcccccccccccccccccccccccccccccccccccccccccccccccccccccccccccccccccccccccccccccccccccccccccccccccccccccgaaaacgagacacaccccggcaacaaggccaaccacagccgccacaagcaacaaaccccgagaccgagagagaggacgaacagcaggcggaagggaagagaacagaagcaaagagaaagaagagggaccaaacgagcaaacaaagcagggggaggcccagacaaaggcccccagagcacgggggcagggcaggcgggggaaggggaccaccaggcccgggggcggagcgagggggacacacagggcagaacccagaaggacagaaaccggaaaggcaggagccaaccaggacccccccccacacacacacacaagcaagaaagagagagaaaggaaacaggggagaaagcaagcaggaggaagcagaggggcaagaggcaagaacgaaaaaagcaaggccaaaaaaagggaaagaaggcagaaaaagagccaagacacaacaggccgggggaaccagggaagacggaccgagaaagagcagagcagagccgcaccccggcagagccgccaccccgggacccacagaacagcgcggcaccaaaagaaggaagcgggcggggggcgcacgccaaccccagcacgggaggcagagacaggcagacgagcaaggccagccggcacaaaggagccaggacagccagggcacacagagaaacccgccgaaaaaaaaaccaaaaaaaaaaaaggggacacacacacacacacacacacacacacacacacacacacagcaagcagacgacgcaaggaaccaccgagaccaggcagcgaaccacagagacggcgccccgccccgaggcaggaaaaggggaccaccaccacagcacagacaaaaaaaggagaaaccccagaaccaaccagggagaccgcacaaagaagagccacaaaaaaaacaaaacaagagaaacacaaaagccaaaaagcgaaaaggcaacaccagcacagggaacgcaaaaacacccgcgaggcgccaggcagaagccagcacaagaaaacaaaggcggggaggaggggggaaagaggaccagccaacaggggggaagaaacggggcccaggaaacaggccggaagcccaacagagaaaaagaacgccaaagccccagcaaccacggggcaaaccgaaggaccaggacagaggaacgagcacagcgagaaacagggacgagccagaaaagagcagcaaagagaccacaacagagaaggaaaaaagggacaagcacaaagagccaagcagccgggggaaaagaaggcagacagcagggggaggacggaaccaacgaaccaaagaagccagaccagaaaggaagagccacacagcgggggcacaaaaaggggaggggggggggggggggggggggggggggaaaggcaggcacccccggaacacacagaaaacgaaaagcaccagcagaaccgagacaggaagaggaagcaaaaaggcaccgaaggcaaggccaagacacaggcaaaagggcagaaagcaaacagaggacgacaggcgaccagccgaaggagagacagggagggggcccaggggcaccaaaaaggagcaaccaagaggccgccccggggcacaaaacccaaagcgacgggagacccaagggaaaaacaccagacgcgaaagaagcaagacggccacaggcgccccccaagcggagcagagaacagcccccacggcgcaagggaagggagagcgaagagaacagcggggagaggcgagcaccagccagaaagagcaggagcacagggggccaaggcggggggagaagagcaggaaacacgggggaagggagccaccagaggccaggaaagcaaggcaaggggggggcaccaaggggacaggcagcaagggaaaacaggcagggcaggaggaaacagaagcgagcggaagggggaggagaacaagaaacaagggcccggcaggagcaagcacaggcaaccaccgggggggcaaagcgcaaggagcagaagggaaaagggagggccagggccagggccaagccacccgggggaaaggcagcagcaggagcgcgaggcagcggccgcaggcccgaaagaagcgacagagagaacacggaccagccacccgccaagccagcccagaggcggcgcccacacaggagggccccccaagcacacaccacacaacaacaggaagaaaaagaggcagaccacagggcggggggcacaaaccgaacccaggagcgaggcaggagcgagacagagaagcccacgccgaaacaagaaacacgaggaagaaacaaagaaggaaccccccccccccccaggccagccagcaccggaacgaaaccaggagccagaagcagagagcgcccgccgaaaaaggggccacacaccggcgcagaaccaagcagggacaaccagagccccagaacacgaccaccaagaacaacacccccaaacacagacaagacccacgaaaagccaacaaggacccccccaacccaaaacccacacaggaggggcccgccgacacgaaggcagggccaaacggaccgccaaagagggccagggcagggaccaagccaacaaggaaggaacagggaggacgagacaccggacccgcaccacgcgcaccggcaaaagaaaaaggaccaccacaggaaggaaggcagacacgggaggggggacagagggcaagggaacacgagcgaccacacccacacaggaaaacccggaaagagcaacccagcagaaggggagagcaaacccagaaagcagaaaaaggagaaacagcggaaaggaaacggagacggcaagggaggccgaggcaggaagccacaggcaaagcagcccagaaacaacggccgaagaggaacgccagggcccagaaaagacccaccggaagggaaaaggaaaacaggggagggagggagagggacaccggcagacaggagaggccaaagcaaacagacccaagagaaccgaccaaggaaccaggagacaacaggcggaccagcaagccaaggccacaacaaaaccgagccagcccagccaggaaccccaacaagaccagcacccaggacccccaacaaaccgcacccccaggacaagcccaccaagcagaggggagcagaaacaagagcgaccccagcaccagccaaagaaagaccacacaaccaaagagcgacacacccggcgcacaaaagccgcccaagaacaggggccccacaccaaaacgccgggaggggagggggccccaaacacccaaagaaaaagcccgaggacgacagacggccgcgggagggggggggggggccaaccccccggcacacaagggcacgacccggcgaggcggagccacgggggcgggaagaaccaggacccggaagagcagcaggacaacggagccaccccagccccaggaaaacaaagcaaacagaagccaacaagagaggagaggggacaggaaagaggagaaagaggacgggggggggggcccaaaacagcgccccgggcgccggcaacacacaagcagccaggggcgccacaccgcagccccagccagccacagaacacagcccgaagcagacccacaccgacagacgaagggagaaaaaaaaccggaaacccgggccagacccgaccagccaaccaacccagggcccacacaccgcaccgaaacggggcaaggcagcacaaccaaaacaacgcaggacaaacacccaggagggagaaagacaagcccaggcccgcagcgagaacccccaaacccagcaaccccaagcaccccccccggcaagaccccccgcccgcgccccgggaaaaaacagccgcgcgaggcagaggcccgcccaagccacccagaagcaacaaagccacagcgcggaaaagacaaaaagggccgagcacagagcaggcagaaaggccaaggccaggggggcaggaagcccgagagccgcgggggcaagacaggcgggaaagggacacaaacaagagaccgagccaaacccaagaccgcccgagagaagcaagcccacagcaaagaaaagcagagaccccgaagcccccgggagcagggagagggccaccgaggagcacggcgcgcagaggacggggccagaaccgcaggggcacaaaaaaaaagaagacacgagcgcccagaacccagaagagggcacagacgacggaggggagccaccaggggcgggagaacgggacccagaagagcacggcgccaaccacgagccaccgcagcccagcaaaaaggaaaggaaaggaacaaacacaaaaccccaaaagggcaccagaggcaagaggcggcgcaaggcacggggaaggcgccgggggggggcagagccagggaagcggagggaggacaggaggcacggggaaacagagcccacgggacaggcacgacacaggcggcgaccaggaaccccaggggacgcgccgcccaacgacagaagcaaagcaccaggccaaccccggggagcgggggcaagccaggccacaggcaaccacgagagccacgcagaaagcaagcggaggcggcgcgggggggaggcgaagaccaaagcgggccagcaaccagacaagcgcgcaggagaaaccagcccacagagccggagcggacacgaaacaagggcaaaaagacagaaaagaaaaaaaaagaccaaaaagcaaaaaaaacacacccgaaagccccaccaccgggagcacggccgaggggaggcggcagccgcggggacacaggaccagaccaacaggggaacccagcgggcgccgggcccggccaggcagaaagacgcagcgggcaggaggccacaggcccaggccaggaaccagggggaggcgacgcaaaagcaaagggaaggaaggcaaaaagccccacaggcggagaggaagcgagcagaaaagcaagccgccccagagaaccccgaggcccgagggcggggaacaggcccggacccagcggcccgaaacaacaggagacaggggccgaagcacaacaccccgcccaagaccagagcagcaaagccaaacaggcagcaacagcgcccagggaccagcacaacgacacaaacaaaaaaaaaaaaaacaaaaaaaggacaggaaaagagaacacacaacccaggccagaggcagaaccagggggccggagccaaggccaaccggcaaaggaaccaggaaccagggcaaagagagaccgccaaaaacaaacaaacaaacaaacaaacaaaccaccccacacaacagagcagggggaccagggaaggcgccgcacagaagccgggcaggcagcacagggagggagggggcggagacgcgacgaaaaaagagacagggggagcgcaccggaggacagagcagcgggagacaagcccgagaggccggagggacagagacaccgcagccacaggaacgaggcagcaagacaaggaaaggggggagggggaggaggcagacgacagggggcaagaaccggggaaaaaaaaaaccacgaaggcaacaagagcaaaaagagagggaacaaacccaagggaacggagagcccgaacaaggagcgcgcagggaggaaccgaggggacaccccggggggcggagaagcgggaggagacggcaggcgccagagccgaaggagacagggaagagcacagagacgaccaaccgaacacgcaagaaagacacacacacacacaaaaagagaaagcagccgaaccggacagagagaaaacaggaaggagaccagagcagaggggagaccaaaacagagaccagccaagacccagcagcaggccacgaaaacaccaacggacaggaaaaggaagaaaacggagaaccaaagcagaggcccagcgggaggagggaaccggggcaaggggcccccgcaacagcgaagaagacaccagccccaaacaagaaacgcgcaacaggcagaggccgacaacccagacccaacccagaaacacgcagggcgcgggaaagcccgacccacagcagcccaaaggagaaagcaacgacgcccgaaggcgaccgaggcgacccgccaaggacagccgggaagacacaacgcgcccagggggggcagaaacgaacggaaacgggaggagggacagaaagaaggcaccaacaggggcagaagagggcccgcgggagggcggggccggcggggagacccagacacaggcaacgcgggcccgcccacccgccgcccgcgcgggcacccagagacgcaggcagacccccaaggcgcccggaaacaccgaaccgcgggcgcggcagaacggggccacaggaaagcccccgagcccccaaaaacgacagccaggaggcagaccagccccaaaaagcagccgccagcggaagagcacgaccccccacccgaccgaccggacacacgggggcggcgccagcaaaacccggccccgacaccgcgaggacagcaggaggcgcagccaggcaggggcaccaggcagcaggccaggagcaagccagcagacccacc

SEQ ID NO: 556 - RNA, 5549 nt, Mus musculus
gccggaggggcaagcacacagaacacaggcaggaggcccgcaccagcagagaaggcaaaccaggcccgcccgccggccagcccgcacagcgccacccacacaggcccccccgacccacaaacaacacccaccccgagcgagggaccacagcaccccgcacaccgagacgccagcggggaggccggccgaagcagacagccccgagcaagaggacacagcgcagcgggagagggggaagcagggggggcgaacagggaggcaaggccagcgggaggagcaggagagaggagcccaaaagggaggcgcgaaggccgcaaggagcgaggccagagaaccaacagccaggaggggcagagcaaaaagggccgggaaggagaccaaaggcaccagaacgacagaaggcagaaggaaagagcgacaaaaaaaaggcccgaccacgcgcaggcacacacagacccccaaaaaaaaaaaaaaaaaaaaaaaccgaaaacccaggcagggcggcccaaaccccagccagaaggcgaggagggggcaggcggagcccaggcccaggccagccgggcacacaggagagagcaagggggggggagggagaaagagaccaggagcaaagcaagggacgcccagacgcccgaaggagccaggcggcacagggcgggacaaggaaaacggcgcagaccacagagccgccagaaaaccggggagcagcaggccaagaggggggggggggaaacacacagccggggcccacgccaacagaaggggccaggccgaacaagacaggcgagaaaaggacacaagccacagggaggggggcggcgggggaggggagacacgcccggcccggacccaggaaaggcccccccggccggcgcccaccgaacaccgccggggcacggacacagaggaagagggggagccaacaaaggagcacccagccaggacgggaacaaggaagcggccgcccggggcgcagccaggcagcggggggggaccgggcagcagggggaacacagagccgggcaggcgagccgaagcagggcccaggggagcacaccggcccgagcacccaagcaggggcgcaggcgcgagaaaaaccagccagccgccaccccccggcagggcccccagagcccggcagacaggagaacagccaaacgccacagcagaggaaaaagccacagcacccaaaaccggagaaagcgaagccggcgccggaacgccgagacaggggccgaaccagagaccccgcccccaaggcgggaaaagggggcagcacgccaggcccaaccgacaaaaggcaggccaggagagagggacagggaagagcgggaagcgccgggcggggcacacgccaacccagcaccggaggcagaggcaggcgaacgagcgaggccagccggcacaaaggagccaggacagcagggcacgcagagaaacccgcgaaaacaaaaacaacaaaaaaaccccaaaaaacaaacaaacaaaaaaagagcgggaggccccggagacaggagccagccccagcaccacgcgacgacacaaccgaacccagcccagaaccagcacccgccccgcaggcaccgagccgagccggagacacacagcaggaaagggggggggggcggaaaaaaaagaaaagggaacccagagaccgggacgggaagaggagcacaggcgggaggccacgggccaccaccacaagcaagcgaagaaagagcccggggcagcagagaacacccaagccgagccaaccgaacgaagcacccacgaaaccaggggaacgaaccccacgcagacaggaacggcacagggggggggggggggcggggggggggggcggagcacacgaccgagagagaacgcagcagacagcgcaacagccgggaaaagaaagagccacaccacggcagagaggggagcaccgccccagggcaaggcgagggcagggcaggaccacagaaggccacagggagaggccagcagcagggaagggggcacccacccggcgagccaccagccagcccagcccggcccccgcccgcccaaccggccaacgagaccggaaggacgcagagacacagcaaagcaccgccagaacccggcggagcacgaggagccgcacacacgggacccagcaaccacacagacaggaaaccgaggccaaagacacggggggcgcagacccgcaacagaaggacgagccccaagccccgggacgagacccgcagcaacgaacagagccccccaacaccccagccagcgccgcaacccgagggcaaggcccacacccagggagagaggacggccaccagggcagcggagcccgaacagagccaaaaggccccggaagagaggggggaggccagcaggggagagaagaaaacacgagccccagacaggcacaaagagacaaggaggggcgaaaaggccgccgagcccgcgcgcagcaccagggaccccccgccccgaggagggccaaggagcggcggacgccggccgggacacgaaccaacccacccacccaacaggcccgggggcggcaagcagcccagcaccccccacggcaacaaccacacgccaaaacaggccgggccacccggggcacacccccggaaggagggcaaacaaacacacagaggcacggacaggaccgcaaccagaaacaagcaaacagagcaaaacacagacgaagagcaaggaaaaaaaggagggacagcacagcagaggaaccacagcacgggaaggcgagaaccacgcccaggcaagcaaagaggcccccgccccgacacggaacacagcagcaacagagcacccaggaggcacgaagaagcccaggccacacccacccaaacccgaccgggggagccacgaacagcagcaaaggcagcccccacccccagaaacaaccagaaaacccccacccagagcccccccccccaggccggccacgcacaaaagagcgagcagagaacacggacccacggcagcccacagccgcgcccaccccacgccagacaggaggcggcaccggccaccggccccccagccccccaacagccgccccacagccaccacacggaccaggggcacggcccccagcacaacccaggggccacaccccgacccggcccccgcggggaagaaccaccaagccacgggagccgagaaacaaagcccacagccaggaagacccacccgaggaaccacaggagaaccagcggcaccaaacacacgaggggacgagccagggaagagaggacagaggaggagcgccgcccccgccaggcagcggccgggccagaagcacccgcaaaaacagagcgccccggcccagaaaggaagggagcaagaagaccagaagagcgcggggaaagaacagaaagcagaggacgggaccaggggaaaaaggagccccacgcacaccaacaagccgaccagacagacagcggggaggggaggacccaggaagagggcccgagcccgaccccagagcagcagagacacggccgggcacggccccagcccccgccaagcacggagaaaacgagaccgcaccagccggagacccgcacccacaggacagaaagaaaggggggaggaggcgaacaagaaacaaagacccaccggaaaaacagcagccgacacaaggagcccccagagaagacaggcacggaacacaccacgggaccccgcggccgcacgccacaccaagcccccgccagaaagcagggcccaagcaccagagcaaagccaaaccccaacccacggaaagacagacaacgacacagccaaaaacgagaggaaccgccacgggagacgggaaaacggaccagaccacaaagcacccaccagcagagacaaggggagggaacgagggggcagggggggggggaaacacaccagggaaagaggcaagggccacaaaacagacgagggaaagcggaggaagacaaccagggaaaacaccaagagagggacaaggacagcaacagaaccgaaaggcgagacaggaggcggggagggcacacagaagacccgccaaaacacaacagcagcacaacacaacacaaaacaacacagcaacagagcagcaacacagccaaaacaacacaccgcaaaacacaacacagcaaaagcaacaacaaaaacacagcagcaacaacaaaaacacagcagcaacaacaacaaacacagcagcaaaacaacagcacacacagcagcaacaacaaacgaaggaaagaaaggagggaagaagacccaagcggcacccggcgccagaacgaaagagggcccacacgccgccaaacgacccacccaagaccacgagcgagaagagacgccccagcacaaggaaggaaccaaggcgagaggcagccagagggccccggggacaccacaggcagcgccaccagcagggaggccggcccagggcacccagacaccaggccgagacaagagcaacaaccccaaacaccccaaaacgccagagccacggccgcgcccaccaggaccaaccaccaggcgcacacgccagaaagagaggagggggagaccgagaaccaaagagagaagcacaacgccacgggcccaggggggacacacacggcccaggcccgcaagaagaggaggagagccagagccggaccacggagcaaagcaagggcagccgggcccaggaagccgcacaaagcagcaacagcaacagcaacagcaacagcaacagcaaagcagcaacaacagcaagaacaaaaacacccacaagagccacacaacccaggccacaggcaaaccaaggggaggggcccagagaggagcggaaggggaggagcacaggagagcaggaggccaggggacacagagggacaggggaacccccgagcgagagaaggaaggccaaggaaacaaggagaaagcagcacgccagcccagcgggggacacaagacccgacccacgccccgagagcacggaaagcacgccaggacccggcccagacccggagcgggagaagacaggcccgaggggggggggggggcgacagagcggggcccaacagccaccccagggggcacaacaaccggcaagaggaaacaaaagcccgcggaaacacaaggaaaggacaccccggaggcacaagcaaggcaggagacacgcccaaaagacaaagcggaggcaaggaccccaggccgccggccgcccagccaggaagagcccacgggccccaaggacaacggcaacccccaggccccaaccaccaagggcccagcggcccagccggcaacacaaaggggcgggcccccaggagagggaagagaggacagaagagccccaccagcaacacgccccgcagcacagagggcaggaaaccacgaacgcgaagaaaaaaaaaaccaaaaaacgaaggggggggaccagagcaaaaggcacagaaacaagcccacagaggccagagggaaaacccggaagcggagacagggacagcaccgagggggccaggagcaaaccaggccccgaaagggcaggcagacagccagaaccacccagc

SEQ ID NO: 557 - RNA, 633 nt, Mus musculus
gggggggggcgcgcgcgcgcacacacacacacacgcagcacgcacagcagacacagcccagggcgccccccgcagcgacaacagcacaggggaaacgcccccccccccacgcaccccagcccgccccaacgcccccgaccaccccccccgccaagacaacaggaggagaaccaagccagacaggcaggccccacaggggcagaacaaggggcagccacaccgacgcgagagcagagaggcgaagacaccagcccaagcgacacgggaggccacagaaggccacggaaccaaacccaccccccacccgagacagacaccagcacaaggcaggcaagcaggggaggaggaagaaacggcacgaacagaagagaagagccgaaccaaagccccagaaggaaaagcaacaaccgggaagggaccggccggcagaaagcaaaaagcaagccaagaaaaggcccagaagccgcccgaagcagaacacccaacacaagcaaaaggaaaggaagaaaagggcccggcaagaagcgagagccagccgggacacggcgcgcagagccagccggaacacgacgcagacaaaacccccgccagcccccccacgcccccaggcagaccagagcgaaggaaaaacaa

SEQ ID NO: 558 - RNA, 6719 nt, Mus musculus
aaacagagaccaaggcacaaaggaggccgacgaaccggaaagaggcccaagcaagcaaaaaaaaaccaaggaggccaagcaacacacacacacacacacacacacacacacacaggaaccggggggcgggagaacaaaagcaagcacaagccagggggggagccgagcaagacgggggccggcagacagcagccgggccggaaaaaaacagacaacggggacaaacgaagccagaacccaggcccaccagagacaggaagggaacaagccccagggagagaaggccacgggggaaaacacaggacgacaagcagacccgagcaacggcaacagagagagccaaacaacgcaggcacaccgacccagcagacacccccacccaagccccaccgagcaaggagccagggcgccaccagccccgggcaagcagagacgagcacaaccccccggccccagccgccaggaggagcccaggagcaggaccgagcggggccacggccccagagcccacagagcaacgcccagcaagaagcccggcgcaggcccgcgccgcgcgcgcgccccccaccaaggagagaacacaccccagagaaagaacgcagcccaggaacgcaaagcccaagacaagggacaaaaggagccagagagcgccgcggcccacggaagaaaacaagcccagggccagaagggaccagcccaccaaaagaggaggcccacgacagccacccccacgggcccaccccccagacgcaggggagaaagcagagaggcgagggggggagacaagcaccaaacccaagagaacaccgccaccgagcgcgcccccaaccgccaggaagaacaagcgcaacaggacccgcacacgacagccgcccaaccccgaaccccgaaccccgaaccccgaaccccgaacccccgaaccccccgaacccccgaaccccccgaacccgggccccacccaacccagcccaccacgcacagcaggccacgccgcccaccaggcacgcagccagcaacagggcagcaggggcaaacccacaaacggacaccgaccggacaccgcgcagcaccaagagggcaagaggaagcagggaaagcaagacagcgcagccggcgccgggacgccgccacacccgcccccacaaccccccggcagagagaagcgagaagccccccgcagccagccccacccgccggggacaaacagcagggacccgcagggggacagcccagggagcacacgacacccaagccaagccacaccggggagagggcgcggcagggcacaaaaggccaggaggaaacacagccagacaagcgcaagcaagcccaggggaaggagaggcgaccccagggcaagcaaggggcccacacaaaaccaccaggccacacccagagaggcggccagccccggcgccgggggaagggaacaggacacgaacccagcaacagacggccccacaggagccaacagcaagcacccggcaggcagcccgcaccccacggcaaacgcagcaaacagagcggcaaaccaaacgaggagagcccgccccacgcagcaaaagccacgcaccaggcaaaaggcggaccgcacaccgcaccaacacaggccaaacacaaaacacacacacacaaacaagcaacacccagggcccaccccaccaccccgaagcaagggaagaagccagaggggcaccaaggggaacagggacaaaaaggcaggaaaaaggaacgcagcgagcggacggccggaaaccgaaaggaccccaccggcccaccggcggggacaccaccacaccacaggggcaacggacaggagcccacgcagcgccaccaacccggcacccaaagaggccgcggccgggaaacacacaaacagacccccgcccacacaacaccgaccggcgaccccagggagaggacacaaacccggggagagaccaaacccaacaccgggccacggggagcaaagagagcaagcacagccccccggggcaaaaccggccaggcaacgacaccgcaaacaccgcacggaaccgcggggcaaacgaccgacaagcagcaaccacccagcaaaagcgacaggaaaaaggacacccagcaaggagaacacccccagaccccggacagaaggcgccacaggggcgcgaggaggcaagggaggcggcaaaaaagcaacgcccccccgcccaaccagcccgcaccgaaacacggcccccccaagcccccccgacaaccggccaaaggacgaccgcgacgcccacacaccgcaaacagaacagagccaaacagaacaaacaagaccaaaacacagaccacccacaaagggcaaggggagaaaaaagcaaacacacagcgaggaccgacacacacgaggacaagccaacgcccaaaaccaggaaccaacgcccaaagccgggaacccgaccggccgcgcggcaacagccacccacaccgaggcccccaaacccgggacggccacccggcaacagccacccaaccgaggcccccaaacccgggggcaagcaccaccggaacacccgccggcaaccacgacgcgaaagcgaaccggcgggggaagcagcccagacgggccaccaagcacgcccacccgaccagcaagaagagcaccaccagcccaacagcagaagcccacccccaaaaaacccccaacccggcgacaagggagacaccagaccgccccagcgaagagcgaaccacaccagaccccaacagcgacaggaacaccaaaccaccccccccggagcagcgaacccccgagagggggccgccggacgaagagccccgggcagcaccaacccgagcgcgcccccaacggccaggaagaacgagcgcaacaggacccgcacacgacagccgcccaaccccgaaccccgaaccccgaaccccgaaccccgaacccccgaaccccccgaacccccgaaccccccgaacccgggccccacccaacccagcccaccacgcacagcaggccacgcagcccaccaggcacgcagccagcaacagggcagcaggggcaacccacaaacggacaccgaccggacaccgcgcagcaccaagagggcaagaggaagcagggaaagcaagacagcgcagccggcgccgggacgccgccacacccgcccccacagccaccagggaggaggaaccgcagcgacccagaccaaaaggcgggccccccccagaaggcagcggcccccagaccaaccaccacaaaaacccaaagccccggcgcccagccacacaccggggacgggagggacaacacacacacacacacacacacacacacacacacacacacacgagaaagaaaaccaaagcagcgccaacaggccaagagccacaggagggagacaggccagggaggaagaggacagcgagaggagaaaaccaggccccgcagcggagagcagcccgaggccagaagaacaaaccgaagcccaggagcgagggcggaaccacagggccccgggggagggccccacccaacggccccacgaagagcccacggaagccaaagccagcaagcgcccgaaagcaggccgaaggcacaccccaggaagaagcccgccccgaggccaggggggggaaccggagaggggcagcccgggacccaaagcacccggagcgaagggggagacaggagaaggccaaacaggagcaggaacggaacgcagggaacaaaaggaccggaagcgaggagaggcagcccaggacccagccccaacaggccaaaaggagaccgccccagaagggcagcggccacccaccaaccccgacaacgacccaacaggaacccccagcgggccggccgcccagggaccaggccccgggagcccccccccgccgaaagggccagcggcgagagccgggccccccccgacgcaggccgaaccccagaccagcaaacaccccagcagcccagccgccgcaagaagcggacagcccggagacaacgggacagacccagaccgaccaggggggaaggagaccgggacagggagggagaaggcagcggaccagggcacaggcagagcacaccgagacggaccccagagccccacccaggaacagcgagccccacccagggcaccggccaggaaaggccagggccgaggcaggaagccagggggcggagaacaggaaggagcgcagacgcgccccaagcccgcagcgcccagccaaaggcaagaggcagggaagcgcccgcgggaaagcaaagggaggcaccaaggggccacggaacaaggaagggacagggcgcgcaccagagccagccaagagccacagcaaagacaccacggaccgagagccaaagccaaggcagacaagaagggcagaggcagagaaggcgagggacagagaaagccagcggcacgagcggcagagagccaagcgccagaacgaaggaaagcagggcccgagcaaggccgggaaggagaggccagaaccgaacacaaagcggaagagggccagaagagagcaaccagaacaggagaagcacacagaaggcccccccccccgccccaacacgcaacgacacacgggagagggccagaaccagcaggcggagccggaagcaggccaggaggcaacaaggggcgggagggcgcagagcaacccagagccagggagacagacgaagcagcacgcgggacaaaagccgagaaaaaacaaggcagggcggcccagggaggggaagccagcaggggcaagagcagaggggcggcacagcacacgcaggaaggagacagggagacggggcagccagcagaagggaccccagcccagagacccgcagagaccccaggacccaaggaaagcaggagggagggacggagccaaaagcgagacagcaagaacccgcacggcccaaaagcggcaaaaccgaagaagacagagcgggcccgagagggccccacggccaggccagaggcggaggaaccggagccagagagaaaagaaaagaaagaagagaaagcagacacacagacacagacacagcacccggggaagcagaaaagggcacacaagccaagccagaaaggagacaaaaagccagaagaaaaaaaacccacagaaaaagacacaaaaaggaaaacagaaggaggaagaagcaaagcaggcacaaagccaaaagcaaagcaaagcacaggccgacaaggggcaccgagccacccggaccgaccagaagcagccgacacaagcgcccaagcaccaccaggcaaaaaaagccggacccaacgcagccaaacaccacagagagggggcacgccacgaccaacaacacccggcaaaacaacaaaaccacccaaacacaaaaagaacaaacagggcaaaagcaaacacaaacagcaaaaagaaagcaccacacacaggaaaggcccaaaggggggcacacccaggaagaacacagaaggcaaggcaggagggccccaggccacacaccaagcacaaaacgaggagcgggaaaacaaacagagaaagacaccagagcaagaaggacgggacaagcgggaccagcccgccaaggcacccacacagagaggaggcaacaggcgcccagggagcccacgcagggaccaacgccacgcagccccgcagcgccaccaagcacccacacaggcaggccccacgaaaaacagaaaaccaaagcacacaagaggcagccgggcaagagccagaaggacaagaagagcaccacacagacagcggccacccccccccccccccgcccacacaccaccaagaccgccacaaccagcaccccagaggcccaccaaaacacacagaaaagagcaagagaaggggacgcaaacaagccaacaagaagaaaggcccgagggggacaagcaacaggggaagcaacccagaaagacaggggagggcgggcccgagaggccgagcagagacggcagaggggccccccccacaaagaccagggcaaggcaaggacagaggggacgcagggagggaggaaggaaggaaaaccaaagggaacggaggcaagacaggggaaaaacagcgccaaccagaaaagaggccagcaacaggaacgagggagccaccaggaggcaggaacccagggagccaccgggaggcaggaacccagggagccaccgggaggcaggaacccagggggccaccgggaggcaggaacccagggagccacgggaggcaggaacccagggagccaccgggaggcaggaacaggggccgggcagaaacagccccaggggcaagaaggagggagcaaccacgcggcgggaagaaaacagaccaggacagaaagaaacgaggcccgggcccagcaagcgagggagaaggcgagacccaaagcaggaggagacaaaaaaaaggcgagggacaacccaacaagcaaggagggagagcaccccggcaccacaacgaacaggaaacaaacaacagcaaacagacaagccccccccccccccaaacaaaccaaaaacaaagcccacccaacccaaaggccggaagaccccgggggcaggggcccgccacaggaggggaaggaagaagagacgaaccagagcaagggaacgaagcaccagccggcacccccgccaggggacgcgcagggaggcggacgcgcagggaggcggacgcgcagggaggcggacgcgcagggaggagaacgcgcagggaggcagaacgacaaagcaggagcgggggcg

SEQ ID NO: 559 - RNA, 964 nt, Mus musculus
accggagccgcaaccaagagcccaggcccgcagaaaacagccccgaacgcccaggagcagggagaaggaggcagccgcaagccgcagggagaggcccccaagccccgacaaacccgagccagcgaaaccgccggggcaggcgccggcacccgggcgccaagaagcgcacagaggcgcagcgccgaccccaaaaaacgccgcgcccgcacggccacaaaacgagaaggaccgaggcccggaacgaacgaccagggcaccgccgagagagcgccccaggcccaaagccgggaagaaacgggcaaagcccccaaggaggcgacagcagaaaagccccgacccgaacaagcaaaagccaacccgccggagcaaagcagcgcggccgggccgcgcggcagccggccaaagcgccccaccaaagcccaacagggagagcggcacaaccggccaacaccaggagcaagcggacgcaagccccacggcaaggaaaagcacgacccaagacggaccgaccggcaagccaacgaaacgcaccggagcgggacacgcccaccccggccccaaagaccggaaagccggaccgccccggaagaacgagcggcagccccgccagccccgcgcagggcgagcacacgcagggcgggggccagcaagggggagggcacagaccgaagccgacgccaagaggccaagcagcaagcggccgccagccgcggcccaacgaagcagcacaccggcggacccccaaagagcgcccccccagcgccagaggagaaccacgccagagcacaagagcggcccccgagcccaccagcgagagcacaggcccccagagaccccgcaagacccccccccccaacccccaggaccaccaaccaaccccgggcaagacccggaaaggccgaacaggaccaacccgcccaccccccccacaccgaagagacaacgcagaacgcccgccaaccac

SEQ ID NO: 560 - RNA, 2238 nt, Mus musculus
gaaggaacccgaagcaaaagaccaggggccggcgcacgcgggagcccgggcaagcaccaaacaacggcgggccccagacccacaacccggcagcggccaccccaagcagcccccgaggcaggcccaccccaggagcaggccacagggaagacggcggcccgggcgagcccgaacacaacgcccagcccaggccaacgggcggcaacgagagaaggagacaaggggcgggggcccggagaaccagcccgccaccgggggagcccagaggagagaaggccccaggcccccggcagcacaacacagaaggccagcggagcgcgcagagccgaaggcccccaggcccagcaaaggcagggagcccgggccaaacccagaaggaaacccaaggggagacaccccaacccccaccccgccaaagccaaagaaaaagaagccaagccaccaaacaaggcaaggccacaagcaaagacggcccagaaaccacagccaagggagaaccaagcaaaacacaaagcgagccagaggccagcagaggcacacaggcagcagggaacgggaaccgccacccggccagccgggaaacagccggaggccagcaggacgagaagaaaacgaacaaccaagaaaaccaggaacaagaacaggccccaccaagaaccgacagaacacaagagcaggcccaggggaaagggccacgccccgcaggagaggagaggaggcacgcaggaggaaccgccaaggaggaaggagcgaagcacgggaagccaccgaggcagaggcaaggagcacagagaagaaagagggaaaggcgagaggcggaggcggccaagcacggccgcgggcacgcggcccccagcccaggcacaaaaccacccgcgggcgggaacaggccgggaacaagcagcggcggcccgcccccgaggccgggcccaccaaaaggcccccccccgccgcagaaaaaaggcccggacaggacagaaagcaaacacggccaagaccaccccaggcaccccccgaggcaagagcggagccgcacaggccaaacgccccaggccggggcccgggaaagcgccagggcgcaggaccaggcacaaagagaggagagagcaccgggaggagacaccagagggaacaaagggaacaacgccggagaaagcacagcgaaggcaggacagcggaaaacggcaaagcagaaagccccaaaaaccagcccacgggcgggccacagccagccagcagagcaccgggccgagcacaagacaccagcagcaggccaacaccgccaacaaaagagcaagaacaacggcgagggccgggagaggcaggggcgggaagaggacggggccgggaccaaggaagcagaagagagccagacccgggaacggagcacacagggagcgcggggagcgggaaccaaccggaaaagaacaagacccacccacgagcccccggggcccaacgccaagcggacccccaaagaaggcaccaaaacgaagcgcgagaagaaaaaaacggccaaggcagggaccccggaaacaacccagggagaaccccgccagaagggcaagagaaggaggggaagcaaaaaccaccacaaaccccaggaaagggaaacacgaacaagggggccagaagcagaccaacacgccaacgagaacgggggcggagagagcaacggcccagagacgacggcccagccccacacaggaggccaccaaccgaagacaaaggaggagaccaaggccacgcacaaggagcccgagggaccgaaaacggcacaaacgcacccgaggggccaggggcgcccacaagggaaaggaaacagcacaaagagggccaggacaaggcgcaccgcacggggagaaagcacgggaaaccacggaacgggcagagcgcacccagaggaacaaagagcccccaagaaccaaggacaaaaaacagagggggcggccgagaagaccggcgaccaacacgcggcaagagagagagaagcgcaagagagagagaagcgccaacaaaccagaaaacagggggccacccacagccagaaagaggggccaaagagcggagggaaaaaaagcacaccccccagagggaaaagagaaagacggagccaaaagacagacccgagaacacaaaaggacgcaaaaccagccagggaacagccagagggggggccgagacaagccgaagcccggacccggaacgccgagaccaggcggccgaaccagaggcagc

SEQ ID NO: 561 - RNA, 1145 nt, Mus musculus
caacacccaaaaccccaaagaacagccaccccacaccagacacccaaagaacagcagaaaaggagcagagacgaagaggggagaaaaagccggagaagagacagaaaaagaagggaacagaagggggacaagacagagacacaaaacaaacaaacaaaaaaccaaaggcaaaaggcaacacaagacaaaccccaaacaacaggccggccccacgccaagaagcaacacggacgacagaacccaaaaaccaagagaagaaaacaaaacaggcccggaaaggggcagggaagcacggagccagcaagacaccaagcaccacaaaacaaacccaaaagcaaagacaaaggcacgcccaaagccaaggaagggaggaacgaccaaaaacacaagaaaaagaaaccaagggccacaagaaaacaagcccaaggaaaacagaagaagccagaaggagcaaagaaaaaccgcccccacaaagcaagagaagcagggggggggaggggggaaccgccaggacccggcgccaagaaaaccagccaaccccgcgcccccacaggagccagcccgcccggggaaggccggccaacgcgcgcggggccaggccggagagacgcaaccaggcgagaaaaacccgcccccacaccgaggcccaaggaccgacggaggcagcaaggaaaacccaaggccaaggccgccagcaaagccggcaaggcagccacagaaccgcaaggaaaaacacccgccccaggccaggcggcccgacccgcgcggcccccacgcgcgccacccccccccccaccagcagcggccacacgacaaaaccgggcaagggagcgggcaagaccgacgggagacgagaccgccacacccaagacaaaggacaccacgcaaggccgcacggcccgggaaagcggcaccacaagccaccgcaccgccgcccgcgcaagccaaccgcccgccaaaacggacccccgcgccgcgcaaccaaccgggcggacccccgcccaaaacgccgcgcaaaacggacgcggcccgccacacgcaggcgccaggcacaacccccccgcccgccacacggccaggcagcaggcggaacacgaggcgccggcggaaccgccaaacacagcgccaagggagggcgggaaaag

SEQ ID NO: 562 - RNA, 2532 nt, Mus musculus
ccccacgcaaaaacacgaaaacagcaggcacgaccacgagagaggagaggaaagaaaggcaaagcccaggaaagaaaaaaaggcaaaaaggagccccccccaaaaacgacaaaagaaaaaggaacgggggaggggagggagagaacaaaacccccaagcccaacagagcccagcgaaggcaggagagcggcaggaggagagggaaggcagcaggaggccaggaacaaggccaaacgccaagaggggggagaggggggagggagggagggagggagggaaagccagggaaaggcccagccccaaggcaaaaaacaccacgcagagaaggaaaagcaagaaacggagagcccccgagcccacgaaaaaggaagccggaagcagagaacaggcaggaaagaaaaagcagggccagagaacaaggcgccccggaaaaggaagagaagagccaagggaggaaccaaggggccgagaacggcccaggacccagcgccggaacacaagcagccaagcccaaggggcagaaaggccaaccgaggaccgggcccccgcagccccaaaccggcaaaaaccaagcccgcgaggccccacagacaccccaaacaccaaaaggacgagagaggccagagacaggaaggaccaaagccccgagaacaaggcagggaggcacccagcagcgcccgcaggacaagcagccgggaggagccccagggacacggaaagaagagaaggggggaagaaggaggaacaaacccaagaaaacaaaaggagaagaaaagaaggcaagggaaccaggaggcagagcagagacagagaaaaagacaacgaacagggaagagaaaagacaggaagacaagcaaacgaaggaacccgggaagaagaacacccgccgaccccacccacaccaggcccagcacgaggccacccccaggccagacaaaccaacccaagaaagaggagaacagcagaggaagcagcagggagacgggggagagcgccacgacgccaagggccaaacccacagagaccaaaaaaacgggaaggaaggaaacaacaacccccccccacacacacacacacaaaaaccgacgacgaacaccacaaaaaggcaaacgcaggggcagggcggggaaggccaccaaggccagggaggggaaagccagaacaaggcccagaggacggacagagaccccccaaagacacagcagagcaaagggcaggcaaccaggaagacggagcaccgaggccaaccccacacgaggggggagggaggggacaaaagggaaaccagcccggggcaagccagagccacggagacacgcacccaaccgccacaaaaaccccacaggccggagcgaccccgccacccaccaggaacgcccccacaagccaccagggccacaggcaagacaagaaaccaccagaaaaaaaagggaaagcaagcccaccccccgcgcgagccaccccccacaaggcaagaacaaaagaaccccccccagcccgggaaccccacacgaaagaggagaaacaggacaagaagagggagaagagaaagggggagggaggcaggagacagaagcccgaaacacggaaaaacacagggggggggacaagagaaggcacgcgcaccagaacacaaggaagaaggggaaggaaggccggggaaaggaccccaagccccaggaagggcaagagggcaacagcgccggggggcgaagcaaaaaaggccagaggagcgcaggaggcagcccgggagccagggccagggcgaccgagggacgggcgaggggggggaggaggacagcccggcaacccaacaagccgagccacccccaggcacaacacggccgcgcgggacgccagaagaccacgccccgaccggccgccgcaccccccagacggggcaccggcaaccgcagccaggaagagacacacgcaagcagcagcgaagcccaaaaaaaagcggcacgcaagccgagccccaacccaccagcgcgggcaaggcagcgcccgccaaggcaaaacaagcggggcggcgccgcgagccacccagcgcccgagcaaacgccgaagaaacaagaccacgagcagccgggcaccccgagacaaggggcaaacgggacgcccgcccagcaggcccagaccaaacgacgggcacagacacacggaggggaggaaggccgcccaagggcccggacaggaacgccgacaaaacgaacaccaggcagacccccacgcagacccccagcaggaccaagaacggcaagcggccgggggcccagggccggcgaccgcagcaagccaggacaaagaggagaaggagagggaggggaagccacaaagggcaaagggggaaggggaaggagagggacccaggcccaacagccggggcccaacccccaagggcccaagccggggaacagacaaacagcgcagccaaccaaaccccaccacacagaccaccggagggcacgcgcccagccggcaaaaaaaggcacagaacaagggagcaggccccacgggggagcaccggaa

SEQ ID NO: 563 - RNA, 11591 nt, Mus musculus
agcggggggccacggcgaggggccgcaagaaggacacaagacaccagcaccggcaggggaacggcccacggagcccagcccaacccagcagccagaggaaaagcgagggggggaggagcccacgggccccccagccccggcaccgcaccccacgcgccggaacgaagcccccgacgccaggcagagcggccaggccagcaccggggcgcgaaggcgggcagcaagacaggaagcagaggggcccaggcaggaagacccggaaagagagagcaccaaaggaagagagcagacgggacccaggcaggaggagaccaggagacaaggaggaaacgacagaggccgaaggaggaagaagaggaggaagggagggaggaagaaaagaacacgagggaggcggaaaacaagaaggggggcaagggggggggcagccagggggacaggcccagcacaaagaagacaaccgggaaggaagggaggaaggggaacgagaagggagggccgagagcgaggaggcaggcaccgcccccaacccggacagacaggacggaaacacccgagcaccgcagaccccagcaccagcccaccccggcagccaaaaaggaagccggagccaagagcaacccaccccacccacgcccccaccccagagcacccccacccggcgagaagcagccacccaccccaccccgcggaggacagggaacagaacgcaccaagagggccagccagacaggggggccgcgacccagcccgcgggagccccgccggccgaggccagaaacagaccagcacccagggacagcccccggaagcccaggacggggccggggcccacagccaggcaaggcgaggcggagagggaagggacaaagagaaggagaggggagggcgcaggcccgggggggccaaggaacacacaccggcgcccagcccggccaggagaggccccagaagggacgaaaacccccacgggcgcccgcccggaggagcaaagaggcaaagcaagaggagaaggccccgagggagggagcccggagacccacaagggagaccccccccgccccaaggagaccaaggagaaccacaggccagagggacgaggagagggaagcggccaggagcaaggaggaaggcaaaagagaacacaaccaagagcagaggagagagggacacccaaggagcacacacccgaacagacccggacagccaaagcagcgcagggggcgcacgccacgcacaaaagaaaaaggagacacaagccacacgccagacccagagaggaaagaagcaggacagacggccagaccaggaccgggcgggcagaagagggacccccaacagaaagagagggaccaaaaccccaggagcagagaagaggagccccgggagggagccgaaggggagcaggcagggacgggcccaggaggagaccggagaaccccacagagaaggaagcagggagccggcccccagcaccacagaggggaagccccaccagcccccaaccccggccacccgagaagcaaagagagacccaggaaagcacagcccccccagaagggacgggaagggaagaggacgccgcggggaggggaggggaggagaagaaagcagcacagccgaggcgcgaccagccccccagcccaggggcagaccgccgcagggggaggccggaccgggaacgaggcgagccacggggggcggaggacgggcgaggagacccaaggaagggccccagaacaaagagcccagggaaggggcggcaaggcaggggggcagggcgccaggagggggggggggcaaggagaaacaaaagcaaagacagaagacaagagacccagagaggggaccccggagagcagggacagaaccaaaagagccacccaccgacccagaagggaaggggcaaacccaggaaccagggccacccaggggccagagacgagaaaaaagaacaaacagggagaaagcaaaaaaaacaaaagagaggagagagcacagggaggccagggaagaggggcgccccagaggacccgagcagcccagcacccacacagaggcgcacaaaccaccgaccccagccagggaggacaccccaccgacccccaggcaccgcaccacaggcaacccacgccagggcacacccaacacaaaaaaaaagagggggaaaaggacaaaaagaacagcggcccaggaaaaccagaaagggaccaagggggcaaaccaaggagaggccccgcacagagagaggaaagacaaaaaagccgcgaaggcacccaaggacggacggaccgaacgaccccaccgcgcagagccacccccaggccgaaccgacaccaacgcggagagagccgcggcggaacacgaggaggacagagcaggaaccgcgcagcagagaggggagaaaggaacagggcgaggggagggcagcggggcacggagaagcagaggccgagagaggcacccaagccaggagaagcacaggccaggagcagcgggcaaaagcaagcagccaacccgacacgagacagcccgggaccaaccggcaaagagaaaaagcaaccagacccgacaaccccggccgacccgacaaaaagcacacaagcccaaagcccccgggaaggggcaggaagagagccacgcccagagcagaacgcaagggcaagacagagccaagagaaacagccgcaaagaccacagggcacccggggccgaaggggggaaaagggagagaacacacaagcaagcgggcccacggcgccgaaagaacagaggggcaccgggccccgcccagaccacccgaggggagccagccagggaggggagccaggaacccccacacacgcccccgccacacgggaaccagcggcgagggcacaggggaccaagagccagacagcacccaggcccaccaagaagccaaaacaggcgaaaccagagggagcgcagcgaagagcaaccagacagcgagggggcagggggaacgggcaacgacccaggaggcaacgaggaaaggggggggggggggcaggggagggagcggcaggaagagaggaaggcccaccccaaacgaggaccagaaaaaggaggggaaccagaaaaaggaggccaagaggagaagcggcccggccgccccacgcgcagccacagggcacgcggcccgagcacggcaccccggccacagccccaccgacagagaagcagcccagccgcaaacaggacgaagaccaggggccccgggaccccgggcccgggaccaacgggacgcgaggcaccagcggcgcgagcagggccaggaagcaggagaggagaggccaagcgccggaacgaggaggaacaagcaccccaccagaccaggcacccagagacagggaccccgagagggagccaccaggaccggagacccacgagggcacccaaggcccgccacccggcacgcccggagaggaacaggcccggcacacaagcccacaaggggccgcccggcagaccgaaaggccgccgaaacaaacacaagagaaccaaccacagaacaaagcagaagaacgaggcaagacaggaccggaggccaccccagacaccccggcacggaaaagaacggggggaacagggccagaagacgaaagaacacaaggaccgggagggcaaaccggcaacccagggcccgaccacacgacgccaagccagcagagagacaagccccacggcaaagcccgccgccccgacagcgccaaaacaacaaacaaaagaaacagcagcagcagccacagagccacagggggacccagcccaggaacgaaaaaacaagaaaagagacgacgagcacacagagacccgagagcccaaaccagaaaacagaaccagcacacacagaaggaccaaagaccggagaagaaagcaaaggggccagggcaggcaaaaaaccagcaggagggacagagcaccccaggaccacgagggacagggaacccaccagggagcgagaacaacggccgaaagcgccacagcacaccagaccagcaggcagagcaggcccaaacgaagccgggaagcagagcggccgacaaggagagggaagcacgggacagggaagggcaggaagcaacgccggcccgaacagagaagaagggaagggagaagccaaccgcgacaacaaaccaaaaaaaaaaaaaaaaaaagaacgggagaacggcggcgcaagccaaggaggaagggaaaaccgccaagaaagccaccacgggccagacacgaggacgagcggcacgggagccccgagaaccgaaagccacagcaccaggcccaaagaaaggcaggacaggcgaccccaccaccaggcgggaggaacggcccgggccccaggcccagccggaacccccagcacaaggcaacaacccgcagccaagaccagaaagggcggccccaccgagcccagccagaggccggagaggcgggccacaagcccagagacgggacgggaggagccgggaggggccgggcagacacccagagaaagacagccagagggggcccacaaaccgccagacaagacccggcgcagggccgccagaggggacagaggggagacccagagagcccccagaggaaaagccacagccgagaaggagcgggcagggaaacccagaaaagcggaagaacaaggagcaaggccgagcagcggggaaaccaggacggggcgcgcgagccccgcggccgagcagggggcaggggggggccccgcagcaccacacgccccacgggcaggagggggcggggagcaccgccgggcggcccaggccacaggggcagccagcaccagcggacgaaggggcaggcaggaacgggcaggagcaggggggaggagcagaaggggccaagggggcagagggacagagcgacaccccaaggcccccccccaaagagccgacaggaaagcacagacaaagaaagcgcaccccaggaacgcagggggggcacaaacgggccgagagaagagagcgcggccaagagacacaccgcaaaagagggacgacccccgcccgacgagggagaaagccacacggaccgggcaggaaagcaggccccaggggaggaaggcacagagcagaagcagaagagaagaagagaagaggggcagggcgagcaggcgcgcagaggacaagggggaaggaaagacacacagagaccacggacagggggcccaacaaagacagacaaccaaacgggcggaaaaccagagagaggacgcagggcgacaaggcagagaggagcggaggagacgccgcgggacgaagggggaaggagaccgcaaggaagcgagaaggggaagggcaggccgaggggcaagcgagcaaacaccggggggcaggagcaccggggaggcccagcggggaggcaggcgcgaaggagaggggcagggggaaggacgggagccgaaggaacggaaagagccccccccgaccggccaccgccccccccccccccccccccccccccaagaaagcgcgaagaaggcggggaggagggaagaagcagagaggaccgggcgcccccaaagaagcagaggacggcccggcgggccgacgcacaaacaggagaaccaagcacaaaacacaaccagaaggagccgcgaggagcgcacagccggcacacaaggaagagccagacaacaaaagggccaaagcacaacgaaaaaaggacagaagcaagccgccaagccagaaaaaacgcggaaggagccccacacaaacacgcacaggaaaaggaccaacacaaagcacccaaaagcccccaagcccccccccccccaccccacccaccacccagccggcccggcaccccgacgaggcaaaaagagcaagaccaaggggcccccaagaggccgacagggaggcacaggaccccaggcagcggccccacacgccccacccccaccccgcccgcccccgaagacagccggggccgccccgaccgcagggccagccaaaccgcaagggacaaaacacggagaagcaacagagggaaacacgacggcacggggcagaggggggacacacgggcgaaggaaggcgggcccgcccacggagggggaagggcgccccaccaccacgggggaggacggagcggcccacacacggacgagagcagagagcaacacggaaccaaagcagcaaaccggcaaacccgagccgcggacccgaccacaccaggccccccaggggccgagcacccgaacagcaccaggggcagagacacagccggagggccaagggggaggcacagaacccaacagccacaggggagggccacggagggggcgaaagagcgagggaacgggaaaaccgggagagacgagagcagcccagagccaccaggccccaagaaaacgaaacaggcacgccacccaggggcgagccgaagcaggaccggcccaaagcgccccagcaagggccaccgacagaggaaggaagggcaacaaagcagagccagccagcagaaacccggaacagggaccggaagagagccccgacaagcaagaaacaccaggacaggagccgaaggggagggggcggggagggggggagcccgaaaagccaaacacgcagagcagacgcaaaccacacaaagacacaaggaagcaccggaggggaggcgccacagacgggcaaggagcgaagccagacccggcgggaacagggggaagagacccagagcaagcagcagcgccaccccagaggggacaccacaggcacccccaacaaaagcagcggagccccaagaaagaggaagggcaagacagcaccgagaccagagcccccgcgcacccccacccgcccacaaaaacaagaccagggcccagcccccgagagaaccacgcccacgcgaaaaaaaaccacaccaaaggcaaccagcggcgacaacgcaagcacacccgaaccaaacggacccaaaacaccgaggaccagcagcgggaagacagacaggccagcggaaggcagccaggaaagagaaaaacccgaccaaggcaagaagaagaggcgggaagggggcagcgcaacccagccgggggggggggagggcagaggcaagagaacacaagcaaggccgcagagacccgcaaaaacacagaaaaggggacagccgagcagagagcagaagcaggaggcagacgggagagcccccacccggaccaaaacaaaaaggaacacacgcggaccgagcaacaccaaaaacgaagccgagagcagcggaaaaccggcccagcagaccagggccaggccacacaagagaccaggggacagaagagcaagccgccgaacaagacaacagaacccccacgacaacacacagggaaggagcacgcccaagcaaaacacacaaaaaagaagaggagaaagccaaccgacaaaaaaaaaaagaaacccagaaaaccccaagcaacaagggaggggggggggagaaacaaaagaaaaagcccaccgaggggggagcggccccgcggcgcgggggagaccccagaggccagaagggggccccgagcccagagccaggcagccgccagccgcccacgggagcggggaccagacccaggcccacacgcacggggaagaagccacaagcaacccccagacccgacgaaccaacaagggacagacacgaggccgggaccaaagcaccgccaagaggagagagggcacacccaaagagggccgggcccccccacaaaaaaaaacagcacggagaaaacaaccaccagggcacacagggggccagcaggggagaggccacccgaaccgcggaacaggaagaccacaccccccacgccaaagagcccgccccgcccggagccagaaccccagagaaccgcaagccaagacagcaaaacgagacgaagaagagaaaaaacaaaaaccaggaagccgagcggaggcgacgacaaaccagcacaggcaaaggcccacagacaccggaagagaagacgcaggcaaagcgagggccccagcccgaggcagaacaggaagcggcaggaagcagaggcaaaggcagaagaggcgaaagggagcaaccaagacagaccgggagcgcgggcaggaccacgagaaaccccccccaccgccgacggccaacgggggcggaagacccagccggcaggagacacaggcacaacgcaaccacacaacgcaccacgaaagacccaggaaacaccaaaaacacccgaggaagcgcagccagcgcccggcccgcaccgggaaggcaccggagacaaggccacgcagccaaaagccacgcagccagaagcacagcgccacgggggcagacccgcgcgggagcacccgggcacaaaaccaccccagaacagggccggggcacagaaaggcagcccggggccacggagggacagagacagccggggccccaggccggcccccaaggccaggcaccacagccagagccaaacacacagcgcgccaggacacaggcccaggccccggccaggggcacacaagaaagcgcccccgggagcccgacaccaccccccgacacgccggcagccaggccagggagcccagggccgcagaaaaagggagacccccaggggcaccgccaggaagccaggggaacccggggaaggggccccaggggaacggggccccgcccggaaaggacagagaagcagggggaggccgcccagagacaacaggcaaggccagagcagacgccagcggacccacgggcccacaggaagaccgcacccggggcgccgagcgagcacccccccaggggcaggcgaccacgccgggaagacagccaaccccaccagggagggaccaccgagggagcggagaccgaggcacacccaagacaagacaaagcaagggagggcaaagaaccacaaaccaccgggcgggaggaacccagggaggcagccaacacgcacgaagaccgggccacccgacacgaaacgccaggcacgacgggcacaccggacccagcacggggagggggagggaggaagacagaagcaaagccaccagacaacacagcgagcgccagagacaccagaacgaaagaaagcaaaccagaccacccccccccacccgaaccccacccccgcagcaggaaaaggcaccacccgggccgcagacacaaggccaaggaccgagcaaggggaccagacccagcccccaacaccgcacaaacagcccaggcaaacaaccgccccaaaaggcccccagggggggaaacaggcaaaggacaccacgacaagagaaagggcacagaaaaagcaagaaaacaagaacgacaggccgcacaaaaaaaacaaggggcagcacaggcagggggacaggcgcagaggcagaaaaagggggccccaggaacggagacaaaccacagagcaccaggggaaccgaaccgggcccgcaagagcagccaggccaaccacagcagccccagcccgcgaaggaagaacggcaaccgaggcaagggaccaagagcgcgcggagcaacaccgaagagggggggcaggccgccgggggcccaaacaggagacagaaagacaccccacccccaaagaagcggaggccacagggggaaccaggagcagggagggaaggggacaccaagcggcggaaggcagaaacggccggagaagaacacgaaaagacaaaaccaagggggaagcgaccaagcacaggcccaagaaggagccccagccagccggccacaagggacaggccaaaaagaaccgggacaaaccacgagcagggacagagaagcaggcacaccaggcggaaggaagcggcacggggacagggcacaggaccacagacaccgagaggagcacagcagagaaggcgcggagaagacagagaaaggaacggcaacaaagccaccggagaacgagaagggaaggacccccaacagggggagggcagagaggcacggcaccggcggcgggaccaccgcacccccaagagacccaagcgggaccaagcacgccaacccggacggcagaggaaaggcacagacccgcccggggcgccgcaggaccccacggacggggagcggcgggcacagcgccccgggggggaccagggcagcaaagaaggcaggacggccacacacaaaagacccaagcaaaaccaaccaccacagcggggaaccgcacgagcacaaagccccgagccgcgcccgggaaaggaagaaccgccacgcaccaaacggaacaagccaaaggaaacgagcaggcaggcgcagggcaaacgacaaagagacgagcaaaaaaaaaagaaggcacccgggcccagaagagcgccccccaaacaccacaccgacaagcaaacaaagcaggggcaaagaggaaccgaccagaaggcaacagcccaaaagagagggacggaggagccaccccccggcccaaaccacgcccaaacggagacagaagacgcccacgcgggagaagaaagaaaacaaaccgggagagcgggaagacaccagaagccacgaaagaacgggagggcagccccgcgacaggaggcgcaggagagcggagaggggccagggaagcccagagggcgcagagaacaggaacaagccaacacgcacacagcggcacacagcgaagccaaggcccggagacagcgcaaggaaccaagccggccagcaggggcaccggcacacaggcacagacacacccacgaaaaaaaaaaaaaaaccaaaagccgggcaggggacacacaccgaaccgcaccagaagcagaggcaggggaccgaggccagccggcacagaggagccaggacagccagggcacccagagaaacccgcccaaaaaccaagaggcagggaggggaggaaaaagaaccaaaagaaaagcaaaacccacccaggaacgcccaaggccgggcagccaccaggcccaggccgcggacccgagagaccccagcagccggaaggcccagccgcgcacaccccgcccggccggcaaccggaaggcccggccaacgaagggggccccaaaaccacgaaagccgcagacccaagaggcgggcagagacgggccccaaaggagaaccgaggaaagggccggcccagaaagcaaaggagagccaagagagacaggaggagccacggcccagcccccacacgggcaggcagccacgggcccgagccagaacgagagaaaagcacgcggaagccaccgggggggaaggggagcagagcgacaaaacccccccccaggcccaagccaagagcacccacaaggcagaccacgcccacagaccccaggagaaagaaggcgcgcacgcccagccccaacagcccccccaccccagccccccacgccaccgaaagacaccgcccccaagggagcaaagagcaacaaggacacccgggaagcaccccaacagacaccaggccgggaacaagcagcaggaaaaaggcaccggggcgacgggagggccggaaccggcccaagaagggggacaggggagaagagcccccggaggcggccacacaaccaccccccccccagggacccacccaggccaccccagcaggggccagcccaaccccacgcagggcaacggca

SEQ ID NO: 564 - RNA, 2621 nt, Mus musculus
gcagacaaagggagagccccacacccccaaagccgcccaccccccccccaacccccccggaggcacaccaagacaaagagagccccaagcaccaacagcagcccggcccaggaaggggcggggcccaacacggcaagcgaaggacccaaccggcaggggccagcgcgcgcacacagggcaaagaacacgaccaaacagccgcaccacaacgccccgccccgccccccggccacgggcgaggaagaagcggccaggaaagagcgacgcggccaaccggagcccccgccgcccagcgacacgcccacgggccaccccccccacggcgacccccgcccggaccccaagaaaccagccgcccagagccccgggcgcgagcggagcgagggaccagccccccaaagcgcccaaccccccgaaccagaaggacgcccagcccccaccaacccccagcagaaagaaccccaggaagagagaaccgggcccccccccgccgagagagaggggcccgagaggacgaggagagagcaagccccggcgagccacccacgcccgggagaccccaaaacccgagcccccgccccgaaagcggggaggcaccgcgggacagacacaggcacaggacgacagcgggccgcaggaaaaacaccacgcccccccccaggacacgagagaggcgagagaaaaagcccgaacaagagagagcccaaaagcagagacagccagaacccgacggggaccaaggaaacggccagaccccaggagccggggcccgcacgggcaacagaggggaaaaacacaggcagagcccgcaaagcgaacaacaagcagaaacggcaggcgggcggcgcgaccccagcaccaaaggaagccaccgaaacaaacgagggcaacgccagccaacccgaaagaagagagacagaaaacacacacacacacacacacacacacacacagagagagagagagagagagagagagcaggcaggcaggcaggaaaaggcaggcagccgcccccagccaccggcacagagagcagggaggaaccagggcgagaagagcaggccccggacgagaagcagagaaacaagccggggcagcgcaaagagagagcaggccgggcgggcccacccaggaccaagcgcaccaagacaggaagcggcgaaacagggccgccccgaggagagcgggaacccccccgagcagccggggcacagggcaacagcaggaaagcaaaagagcccgggaaggacacgggaaagccgccccgccaggacggaggcagccagcggcagcccaagcaggcaacacacacacgggaggaaccaggcgagccagaaagggccaccagccaccagaccaggcgcgaagaggaaggcagcggacgccgacagcccacgggccgggccggcacagcagccagaggcccggggaggagccagaggccgagaccaaccagacccgaagcagagacacgaaacacagccacacacccagcacgcagcaacagccgcccccgcccgggagaaaccgaagcacaggagagaccgaaggagagcgggggaccagccggagaacacaaggcagccaaaaaagcagaaacagagggcagcaagcagaagagagaccaagagccagccagaccagcagacaaggcaagaaggggggggaaccagaacaggacgggccaagcagaagaacacacccagaggagggacccgccgcaacaccgaccagcagacgaggcccacaccagaaaaaacacaaagacagggcacagggccgacccaagcagagaaacgaccagcaggaaaggcgggacagagcccagaccaggaagggaaggcacgcccgaccgggaggggccaaacccagcacagcagacaacacagagagcaaggggcacgagacccccaaggccaaaaacaagcagagcgagagacggacaggcgcagaggccaaaccacaagaaggggagcagccaaggcccaaagagagcaagagccaaggccggagaagccaaggggcgcaaaaaaaacaggcgcaagaagcgaggggccggaacagaggggggggaaggcacaccagcacacacacacaagcagaggaacccagaagacaggagaaaggcagccacccacgcccccaaaggccccccgccaggcagagaaaggggcgcagccgaaagagcagaaacgccaaggacgaccgccagcaaagcagaaagacagcgagcacccgaccacaggggaggcccacacacgcggcccagcaccccagcaggcacggaagccagcaggaagagggcacagagaggaccaaaggcccaggggggccaagcacagacccgccgacaaaccgccgcccaacacagcccacaggcggcaccacgcgccggaagggagaaaagaacgggacaagaaggcaggagagagcaagccagacggaagaggagacaagcagggaacagaaggcgagaagcagagaaaaagaagacagccccacgaaaacaagcaagagcgaaaggaaaacgggagcagaagaaaacagggaaaaaaacaagaacacaacacggcggacaaaaaaaaagaaacagaaacaagaccaaaagcccaaaaagacca

SEQ ID NO: 565 - RNA, 1606 nt, Mus musculus
agagccgggcccacaccaggccaccacacccagaccaagcaccagcacagaagcccagcacagggcaccgaaaaccaccagaaacaagaccccgaaccacaaagaagcagagaaccgacaagaggggggcccaggcccacacaaccaaaaaagggcccaaacaaaaggggcaacagaacgaaaaagaagcaaggaaaaacacgaaacaaggaaagggaaaacaaacacgagcccagaccaggcagaaaagcagcaaagagcagcagccagcacacaccgagccgcacaacacaccacaaacagaggcaacagcacacaccaccacagcaccacaacacaccaacagccaaaccacaacagcacacaccacacacccaacacacacaccacacacacacacacaaccaacagcgcggaccacaccacagaccacacagcacgccagcaccacacacagcaccacacaggacacagagcagcaaccacaacacacacaaccacgcacacggccacaccaccaccaacaggaagagaaaggggccagggaagaagggccaccccagaccacacgaggcccgggccccagaaccgcaagaacccaacccaaggcggaaaggacagaaccaggcgacgggaagaagaaagaggcagcggaggagcggaccggcacaaaccccagggagcaagggaacccaggaggcccaaaaccagcgagcaaggacacaaaaggaaagaagaaggggccaaacgcccccacacaccacagcgaagcaccagggcgacaagagaaggcaaagacaccgcgccgcccgggccacaagagggcggggggggagaggcaggcggcccccccgcacccacccagagccaggcccggcccacacgcaggggggcccaggaaacagaagacagaacgaaacaccggggagagccccgccggcccgcccagcaacgggacaccaacccagcgacagacccaacgcaacaagaacaagccaacgaaagccagcaacagagcaccccgagaacagaggaccaacggaacaacaacaaacgaaaagcagccaggagaaagcacagaaaaaaagcaacaacaagcagcggacaaaaccaaagcaggagcagaggaagagaaggagcaagaccagcgggcccacgaaccgcccaaaaacagcccggggagcacccgcaaaaagcagcggcagcacgacagaaccgggccggacacagggaacagaccagggcccacaacgcaaaaaggaggaacagaaccacagcgcaaaggcacgagggcaaccaaaaaccaaagccagaaacgagccgacggcacggccaacgccagaagcgggcgcaagcaacgaaaacaggaagacagagcaagaagggccaggaagaggggccagggaagaggggcagcgggcaaccagcaccaaagaaagagagagcaaacaaagacgggcaacagcaaaggcgccaccacacaaagcccgggccaacggagaccacaaaagggggggggacagaccgcagcacaacagcaggggggggagaggagaggcaggagcaaggggcgcagcaaagggaggaggccagccgggcacagaga

SEQ ID NO: 566 - RNA, 739 nt, Mus musculus
agggaaggaagaagcagccacacacacacacacacgcagcagaggacaaacccagggcagcggcaggcaacaccaggagccaaagcccaacccgcgaaaccagaccaaaaagaccgaagcagaaagaagaagaccagcaaagaggcaaaaaagacaaagggaaaaaaaacacgcaaaaaagagagagaagcaacaaacaggcagccacaagacaaacagggagaaaacaagcaggcaaacaacagaacgaaccaggaaaaaccggggggggggagaaacagacaaccaaagcaaggccaggccgggacccacaaaccccgccccagggagagcgaaacaggaggcagcaccaggagggacgagaaagaccacagaccaccgccggaagacgaggagacgaggaaaggcgcgaagaaacccaagaaagagcccaggggaagaaagcaccacccccgagcgcggaccaagaacgaagaccaggagccacacggcccaggccaagaagggagccagcacacagacacgggacagagagggagaaagaagagggccccgcgacagccagcgccaacccacccaccaacaacccggggggaaaagcccaagaggccgcaccacaggccaaagcccaggcaaagcaacagcagggagaaaaagaaacccaacgaggggagacgcaggcgccagaaacgccccaacagccaaccggcccaccgcaccaaaccacaggcacgccccc

SEQ ID NO: 567 - RNA, 5020 nt, Mus musculus
cccaagaaaacaggcggaaaggagaagagagcgaaacgcacagcgggggaaagcggccaacgggaagggacaagaagggggcccggggaagggggccagggaggaagggcacggggagggagaccaagcccacccccgcagcaaagagccgccagcgcgggacaacagagaacccagccccccagcacagcgccggagcgccgcgccgccaaaaaggagaacccaaaaagaagcggcccaaaaggcccacagggcaaggcccacagcaaaaaacccaagaaaggacaggcacaaagccacggaacaagcaagaaacgagccgagggcaaaggccacccacaccaagacaacgggcaaaggcacaggccaaaaagcggggaaaaggagcaaacgaacaagcgaacaagaacaggcgaacaagaacagggggcacacaaacgcgaacaagcgaaaagaacaagcaaaaaggagggcccaggacagaaagacacaaggaaagagaaaagcccacaaaagcagcaggcgccgagcggcaacccacaaccacccgggaaggaaagagcggaaacacacaccccccccagccaaaagccgacagggccccacaaccgaaacccccaaccccaaaaacaaaaagccgcaaagaccaccagaaaagaagaaggaagaggcagagaaaaagagaaggcagaggagagacacaaacaagaaccagcacagggaacaaaggaagggggcccaaagaggcagccggcgcaaaggagccaggacagcggggcacacagagaaaccgcaaaacaaccaaaaaccaaaccaaacaaaaaaacacacacacacacacacacaacacaaaaacaaaaaaagcaaagcccgggccaaaaaagaaaacacagcacgagggggaaaaggggcacaaagccagcgaaaaagggcagggaggccaccccagcagcaggaaacccgccagacaacaagcgagggagaaaggggaacccacagggccccagcaggaaccagccccaccacgaggaccccagaggggcagcccacccagacaccggggaaggagacaggagccaccaccccgggccccaccggccaccacccgaccaagaacacccccaggacagagcaacaacagccaggagcggaggaccaaggacccagagacagcaccaaagggagcagggaaaccaaagaaaaggacaaacccagaagacagacaaagaggagccgagcccgcaggaacggccccagggaggaccaagaggacccaggggaggaccgaggagcgccacccacagcacgcgagaagagggggaaggcagacgaggcaaacacagcaggggaagaacaccgggccagacagaggcgagacacacaggcgaggaccaacagaagccacagcaggcgcacaaggcagcggccaggcaagcaacaccaagcacagaagaaccgaccgccggcgggagccccccgcgagcccacccaaagccaccagaaggccaggcccggaaagcaccaagccacagcaccaagagccgggaggagagcaacccagcagggcagcagccaaccgagcagaaccggcagagcagcagaggcgacaggacacgacgacagagcaccaacggagacgacgagcgccgagagacaaaaagcggccgggccgaccccaccccacccaccggagcgcgcaggcgagagagcagcaagggggacagaagagcccccccagaacagcagcggaccgaaagcagaccaaggcccgagccaagccagaaagcagaggcagcccagagcacgacaagaaccccaagcggaggaccaacagggggcagacgcccgcaacacccaggcaacgaagaggagcacgagggcaggagagacacagcgggggaaggagaccagcccaaaggggcaaccagcccacggcggggcccagaaaaaaggcggggcggggagggccagggaaacggcgcccccccccccccgggaaaggacgcacacgcgccaccacagccggaaggcccgccccaagcgccaggagacaaaaaaacagcccccacagacgcggaggacagggggagaacagcaaagaacccgagcccacaggccaaggggccagacaggcgggggaagacaggggccaccacaggagccacagaaaaccgcacacccagccaaaggggcacgcagccacaccaagcaggcacagcagcgcacaggcagagcggcccagcaccgcaagcaaaggggacaaggcaccaggacaagaaacagggcgacaggagaacaggaaacagggcgacaggagaacaggaaacagggcgacaggagaacaggaaacaggacgaaggagaacaggaaacagggcgaaggagaacaggaaacaggacgaaggagaacaggaaacagggcgaaggaaacaggaaacagggcgaagcgagaaccggaaacaggccaagcgagaaccggaaacagggcgaacgagagacggaagaggaggagaggagagagagagaggccccgaacaaccgccacaagaagagggcaaaagaaacaacaagcgcggacgccacccacagacaacaaaaaaaggaccgacacagaaagaaaaaacaaaagaaaaagaacaaagagacaacgggggggggggggggggggggggcacagaggcaagggaggagggcagaggcacagaccgaagcgggcacgagggagcaggccaaccaccaagcaccacaaccacaagccacccccgacccggagaaagaacaaagcggaacacgccaaaaccacccaaagcccaagagcagagaaaaccacccacaaggcagccacagggggagcacaagccaaagacccggcaccaggaaacaacacaagagagaccgccaacccacaagaggaaaccccggggcacgagcaccaccaaagagacaaacgaagcaacccaccaacacggacaggaccacaaaacagaggaacgaccacacacacccggcagcccgcacagaaggaaagacccaccgccagaaagaggaggcagcagaaaaagacaaggcccaacacagcgcgaagagccgagaagagaaccaccaaagagacgccagagcagaaagcaagaggaagacaccaaaagcaagggccaagagagcgaggccaggcagagagagcagcgaggccagagcaccggagccaaagcaaaaacggaaaaaccgaagacagcccaggagccagagcagacaaagcccacggcccacaacgcgaaaagaacgccacagcgagaaaaaggaagaaacagcaacacaaacagcacacggggggccagacgaacacagaagaacgacccggcccagaagggagcacaaacaaggaagccgaaaagcaccccagaaaaacgaccaccaagcaaaccggcgagagacgaggacacaaagggaagaacccccaaagcacacaagcagccaggggacagaaaacaaagggcggaggaggaaagcccccaaacaaagccaagaaaaaaacagaaacgccagcaaagagaaaccgacaacagcacacccccccaaacgaacaaaaaaccgcgggggcggagagaggcagggaagaacacgcccagaggccgagcaacccaacaaccacgggggccaaaacaccaacaggaggagcccccggggcgaagacagcacagagccacaaaaaaacaaacaacaagaaaaaaaaaaacaaacacccgccaggggaagcaggagggccaacacacagaaacaaaggacacaaggcaacacacaaaagacaaaggagcaaagaaagaaaaaaaaaaaagaggggggcagggggccacgagggggcacgggcgggggagcacaaagagggcacaggggggagcacaaagagggcaaaggggagccggaggccagaagaggggcagaacgggagcggaggcggcagcggaacagaacggccgcaagaacagcggccagcgggagccgagcccacaggcaaggccagaccaagcaacgccaccagaggaaggacaaggaccgggaagcaggacccagggcagcgggcggagcgaagacggcgcacggaacagcgcagcccacacccgagggggaggaggggcccaacgacagggaccaaagcgccaccccgggagggaccagggagggaacaccaagcaacaagagaacaaacgcgaagaaccggcagaaaaaccggacaaagacgagcaaaacagaacagggagggggggggagaaagacgaggaggaggaagaacaaaaagcccagagcgaaggaaaagcaacgcaaggcacacgacccaaaacagggccaaacaggagaagaagggagggggacagggaccacccaagaaaacaaggacccccacgcacccacgcgaagaaaagacacggaaagaaaaagaggaggaggcccagaagcgcagccccccccaggggcccacaaccccagcaccgacaaagagcgaaagggaccacaaggcaggccgcgcggcacaccccacccccggagagaagggcaaaacaagccagggggcacacggagaaggcaggggccgcggggggagcgccggggaacggccaaaggcccggcccgggcggaagcagccccagcccggcgaggcggggcgccagcaccgcggagccaggcgggcgaggcaccgggcggccgcaggcgggcccgggaggggcagcgcgcgggcagcaggaggggagcaccggcccccgcggcgcccaaggccgggggacccgggccgggggcggagcgaccgggaagggcggccggaggcggcgcgcgcgccccggccccgccgcgcagccgcgcagcccgcgcgcccgcccccccgcgcgcgaacagcagcggcgcgccgccgcgcgcccaggccggccgcgcgcgccgcgcacaaggagcggcccggggcggcgagccgggcagcgccggggccccgcgagccgcagccgccggaggcgggcgccggccgccagccgccc

SEQ ID NO: 568 - RNA, 3722 nt, Mus musculus
aggaaaagaaaggcccaaaaaacaccccccccccaggcacccccacacaaccccccacccccgagcaggaaccccacccccagggacaccccacccggcaccaagccgcaaggccagaaggagaaggcaggagacggcgcagaaaggcgggaggaaggggggggagaagcagcagaggagagagccggcagccaagcggggacacagagagaggcggaagaagggagcgccggagggcacccgaagccggcacaccagggaacgaggcagccgccacagcgggggaagggaccgcgcacgcagagcgaggggccggagggacacccacagccagggacaagccaggaacagaggagcccacacccaaaacaggcgcgccggccaaagcaacagaaggccaaaaggccggcccaccccagaaaacagacacgagcccggggggggggggggggagcaaggagaggagcagaaacacaccccaccggcccagcaggcccccgacaccacacacccgaggaggagcccggaccgcaccagcaccgcagcccgccgggcagcacagaagcagcccgggagggaggaaggcagcaaggcccccccaaggcccaggaggaccaggacagggcgggcggcagagacaggaggaaaggggagagggcaacgggcaggggcgaaggagccaggagaccacgggagagggcgagggaggcacccggggccagcgcggccgcgccccgccccagcaaagacacgaggacgagagagggcccccacacggaccaagccagacggcacaacagcgaccagcccacgggccaggcgcccaagaaagagaagagcgcggcagacaaaaaccaggagaagccaaaaccacacaccggccccaagacgagaccgaacccagacccacccgggacccagggagcggggggagcgccgcccgggcccgccccccgcggacacacaccgagccccgccacaggaccggacacagcgaccacagagagaccagcggcggaccgacgaccgccccacccagaggcccaacccacggcacggaggagcaccgccgccaggcgggagccggggagggaccgccagaaggcgcacgcccggcccgggcaggcgaggagacagaggaggagcaggggaggggacgaaacccacgcaacaaaggagacaaggacggcgaggggcagggagccgggggagggccagggccgcgcggggagggaacccgagcccaccagcccaccccgccgccccacccaccgccacccagcaccaaccaccgccgggacagggggccccaggaagaaaggccggggcaaccccccccccgacccagcaaaaccacacgaccaaacacggccaggcgcacccaggggcgcagggagggcgggacaggggaggccacagcccccaacacacccacgacagaaaaacagggccaaagccaggcggccaaagccacaggaggcgacagacagaaagggaaacagggaacgacagacccagagcagaacgaaagcgggccggcaccaagggcagcacgggacgacccaaccaacagccacccccccaaagaggagccgggcaggcggggagacacaaacgaagcccagcccacggccgccagcaacgccggacccacggcagacacccgcagcccagcaggagccccggaacagggccccaaggcagaggccagcagaacagcaaaacagggcgcgagacaccccccaccagcgcacagcggagggagggagcgacgaccaggcaccgggcagcagaggccggggggacgccaagacacagcagggaagaaaaggggaacgacccccacgaaggacacgagacaggcaggagggacaggcaggcgccccaacgagagcacacccacagggaaaagaaaggcccaaaccaacacaagaagagaccaaccagaccggggcgcagagaaagaccacaacagcacaagggaggaagagagaaaggaaaacagccacagcagacccccggcccgaccccggcagcgggcaggcaggaagggaccgagccaggagacgaagcggaaagagaccacgagagcgcagaaaagcacccaaaagcccagagcagcgccaggcaggcgggcacccagccagccaagggccggccaagaagagacacagggaaagaggagaggccggccacaggcggccacacccacggacccccaccccgccggcgggacagggccacgacagcagcacccacacaccccaagggcgaagggaaacacaccccagccggaaggaaaagagcgcacacgggccgcagcggcagagacacgaaacggccggggacccccagggcccaccaagcccagaagggcgggaccgaaagaggccgacgcgcaagacagcaggccccacccaagagaacaggcagggacgggaagagccacacggagccgcacaagggaccagcacggagaacacagggggaggcgccgaacaaccccgccgaggccccagaggccgcaccaacaggcccaccaccccagacggcccacaagcccccaccaaagggcccagagccaggccccccccgagcagaagaaaccgggaaagacacacacaaagaggagcagggacacgaacccagaaccagagcccaggccggcaagagcaacaacaaagcaacagaccagcccgggagggaagcagccaccacggcggcacagccagcagcgcacagaggaccagccagccagcagcgcacagaggacccagccaacaccaaggaagaggagaccgggcaggcaaggcaggcaagcaccgcacaaggccagagcaccccgcacgcgaccaagggaaaggcaaaaagaaaaagaggaaacaggcacaccagagcccacagccaggcaaagccaaaccacgagccacaccccagcccgacgacacagagcgccccgggagaggcaccagggccggcaagggaggacgccgaagagggggccagggaggagcccgcgcaacggaggggcagggggcaggaaggagaagcgcgcagcagacccaagcgcggggaggcagaggaagagggacaccaagggacaccgcccaaagagcccaaaagcaaagacaaaacaccccacaaaccggagccagggggggccaccggggggagcgggaggaggacgggccaggaggagacgacgggcaggcaggagaccaccagaagaagccaagggaaacaaagaagcggcaacacagaccaggcggggcgcggagggggcccaagcaagagccaggcgcagaggcccaggcagccagcaccacagaggcaacggaacccaggcagaggacgacaccccggcgggcacaaagcacagagcacagacaaaacacccaaccaagaaaaaaaaagaagcaaaaaacaaaaaaagccgggagggggcgcacaccaacccagcacgggaggcagaggcaggggacgagcgaggacagccggcacaaaggagcaggacagccagaggacacagagaaacccgacgaaaaaccaaaccaaaccaaaccaaaccaaacaaaacaaagaacaaaaaaagacccaagcaagcccccagcaggagaaagaacaggcagaggaggccagggaaggcagggacccagagccggcagcagcacccgagccccgagacgcgccgcacaggagcgaagaaccgggaggacaccccc

SEQ ID NO: 569 - RNA, 3013 nt, Mus musculus
gcaccccgagcaaccaaggcccgccccggcccagcaggcgcgggcagaggacaagaaccaaggggaacaggaccgagcacagcaccaacccacaggaccagcaaaacacccccgagggccaccaggagcgcacaggagggacaacaagcaagccacgcacccaaaaccaccccagacaggcacagggcgggacaacacagaggggacgccaccacagggccgcggggcacgaccgggggcagacacggcaaggaccggggagaggccggccacccaaccgggcagccgggacccgggcacccccgggcgcaagcaggccccaccgagcgcccagaccgacacacgccaggcggcaccccaccagcagcacagagcaacgggccccaggaggcccaggaggagagagagagagagagagagaggacacagaaccagacaccccagacaagagggggcagaaggcggcccagagagaaacgggacagcacccaccaggcgcaaaggcggccgcccgcagacacgggaacgagaacacgccgcccacgggaacaaagaccaaaagggggggcagggaaggagagacaaaagaaaaccaccccacccaaaggggaaagaaaaccacaaagcaaacgcgacaggacaaagcaaaaacaaaggaaggaggaggcgcaggcaaacgagggccacagaaggagaggccggggaagcacggaccaaagagaaccgcaggacgcccaaagggaaggagggcaagcacaaagaccacacaaaaacacacacagggcgccgagcaagccgcggaaacaaaaggcaggcggccagaccaggcaaccacgcagcccccaagggaagcaccgcaccaccagacacacaggcaaaggcgggcagaaaggggggcgaagggcggaacgaagggagccaacgaaaggaacacaaggcaaacgcagcacccagcaaccaaagcaacgcagggcagggcgcaccccagaccccaacgaaggacacacaccgggacgaccagaccccaacgaaggacacacaccgggacgaagaaggcagaacaaggacagggaaggggggacgagagcagacccgggaaaaagcgaaggcaagcaaacaaaccaacaggcaaaggcaagggcacccagccagcaccaaccccgacagacccggcgaaaaaagacacgggaaaccgaccccccagggacgacgcgacgcccaagaaagagaaaaacgcccaagaaagagaggaggggcgaaggggggcgaggcacacagacacgccgcgcgccgccacacaaaaacaaacaagcagacaaagcccagccaaggaagggcaaaacacacaggagagccgacccccccagaaagaaggaagaagggggcagaggaggaaacgcagggaggggaggccagcccaagaccgccccccgaagagaggaagagaggccaccgggcgccacgcaccgcccagaggacagacagcaggaaggccgccagcgcgagcagagcgacaccagacacagaccagcccgaacggaggaacgaaccccacaaacacccagcggaaacaacaaaagaacaaaacaaaaaaaaaagacaggaaacacaacacaaaaacacaacaaaacaaccaaacaacacaggcaggccagcaagaggccagagaaagacgcacaaggccaaagaccagagcaagacccagggccacaggggaaagacagacgacagcaagccgacccccacacagcacggaaaccccccaaaagaaaagagaaagaaaagagaaaggaaggaagaaagaaaagaaaagaaaagaaaagaaaaggcaagccgccacaacaaggaccccacagaaagaacccaaaaagaccgaccccagaaaccaccagaacagcacaaagcagagcaacagaacacagggggcaagaaagcaaacagcaaggagaggagacaccacaaggggagaaaaccgaaggggagccggaagacgaagaagcgaccaacaaggcccacccccaggcagaacccgggcccaggaccaaggggaagagagaggcccacacgacccaagccaccccaaagaagacgcgccagacagagagccgcaggggacaaacagagaagcacccacgggacaaacgcgcccgcggacagggaaaccaacagcggcacaggggccgaccagaagagcaggagggaaggaagccggcagcccacaggagagaaacaacccacaagccggccaagggaccgacgaacgagaagaggaaaagagcaggcacagcgaagcccaaggcggacgcggagcagaaagggccgaaaccggcgagagccaaagggaaagcgggaagaaagcaccccagccaaacgccaccgaccggggaagcggaggcccgccacagcgggcaaacgccaggaacccccgggcagggacgcgggaacgacaccagaccaaggcaaccaaaggacaacacaggggcggcacaggagagacagccaacacaagcaggaacaggcagcaccaaacaggacaacaggaggagcgagaacacaccacgaggcccaggagaaacgaccccaggcaggaggacaagggcaaagcccagcccacaggacacacccacccaacaaagccaccggcccaaaaggccaccccgggacaagcagaacaaaccacacaccgggcacaacaggcacacgagcacacacgaaccgcgaaaggcgacaaaggccccccaagcaccaggggagggaccccagcacacggcgcgaggagcggaccacgacccccagccccaccggaagaaccccaggagacgccacgagacacacgccagcacaacccccgaagcacaaggcccgcccaaagagcgggaagcgggaagaaaagaaaaggagagcaaagacaccaaacaggaacgggagaccaggaagaccgcaaagcaacaaaaaggcccccgaggaggagaaaagaagaacaaccaccaaacaaacacacagggaaagcaca

SEQ ID NO: 570 - RNA, 2917 nt, Mus musculus
aagaaaaaaagaagaaaaggaaaagaagacacacaggaccacacaggaccacaacgaccacacaagaaacacaacaacaagacaaacacaggcacgagacggcaaccagccaagaacacacaacgaccaccaagcaggagcacggggcaaggggggaggagggccgggggcagaagggcaggaggcacggccagcagaaacgcccgagccagaggacgagccagaggagaggagcagacggaggcagccaagggcacgaaggccaggaggacacgggaggccagcaagggcacgggcagcacgagggcaggaagccacggaggccagccacagagcacggaagaggaggaagaagaagaagaagaagacagaaaaaaagacaaccaaaaaaagaaggaacagaggcaacaagaacaaaaccagaaagacaacagagaaaaaaggggaacagaaacagagcacgggacaaaaagcagcacaggagggacaacagagaagcgcggggggcagaggcagagcaacagccaggaaggagcaggagaggcaggcgggagggggaagacaggaagcagaaccagacagaggccgaacacgcaggaacagccaggggccggcacaccaccccagcccagcacaccacaacgaaaaccaaaccccaagaacacaggaagagagggaagggaacagcaagggaggggagacgaacacaggcgcccgagggaaccaaaaaggacagcgggccgaggaggcagggacacggagagagaagcagaaagaaaggaaaggcaacccccggccagaaacagcaggaaagcagagacgacaggagggcacagaaacacagaaaaggcaaaagagaagggcgggagaggagcggccgggccagacagcaagaccggagggaaacaagaagaggagacagggacaaagacaaacaacaaaagcccccaaacaagaaagaaagaagaaacaacagaaaaagacaaaacagaaaggaagaggcgaggcgcaacgacacaagcggagcacgagaggagggaacacaagagaaaagcgcaaggagagggagagggcccaaccaggggggaccaccccgagggggccgggcaaaaaaaagcaggccgagcaagcaggggagcaagccagcaagcagcacccccaggcccgcacagcccgacccaggcgcccgcggagcgcccaacccccagagaaaggagggaagaaagcgaaagacccccccccaagggcaggaacacagcaaaaaaccagcaagacagagaggaaggaaacaaggcacccacaagaaaagaccagagacagagcaggagaagaaaaagaacaagagaaaaggagcagccgaaaacggggcacaaaacagagaacggaaaaagggaaacaacaaaacaagaggggaaaacaggaaagaggcgagaaaagagaaacaagggaggcaaaagaaagggccgcaaaagcacgggacaaagggggcagacagcgcccggggcacaacagccgaggcagcagagagcccggccacccgaaaaccaaagccaccgggcccaccacccgggcccagcaccagccacaaccagcgccaaaaacaaagcggaaacacaggcccggggcccgcccaaggccgagagccccacccgagccccacaagacagagcaggcgaaaccaagcccacacgggcaccacgcagacaaaacaaacgcacggagagacacaacaaggagggcaggagaaggaagaaccacaaaagggaaagaccagaggagagccaccgaaagacacggaggcacaaggggagcggagggggcaaaaaaaaaccgcaaagggcagagaagcagaacagaagggcagggggcccagcgagcccaaaaggagcgaaaggcagaggaaacgacaagcacaacagggggacgagcgcccagggcagaaaaaggggcaaaaagcaggcacgggcaggaccgggcaaaaagaaaacagacggcagcaggaaggagggcacagccccagcacaggagagaaaccgaaaccaacccccacccgcgagcagggagcacgacgaggaccaggccccggagcagacccaagaccaggaaaaagcgaaaaccagggcacacgcaacccagggagggagcagaaacagcaagaccggagccaccagcagcaggcaagcaagcccaggccagcgagagaccgggcaaaagaaacaagaagagcaagagaggaggaaccgagacagacacaacacgcagacagcacacacacaacacacagacagcacacacacacacacaacaagcccccaggccccagcagaagcaaagccgaaacggaccaacacagccgaccacacacaaccaaaaaagcaaaaggaagaaaaaaaaaagggcaaaaaaacacagaacgcaaggcccagacggagaccaagaaaacaaaaaacaagcagaagacaagcaaagagaaacaaggcccgcgaaaaaaaaaaagacacagcggcaggggacacagcacaacacacagaacaaaaggcgacaaacaaaggcacaagcaaaaaacaggcagaccagaaagacgaccagcccaacgaaccgccaaacccgcgaggaccgagcaccggcgaggcaagcagcaccacgccggggcccccccgcccccccacgccgcagccgccccacgcgaacccgagcacagacccaggacgccacccggccgggagaaaagaacagcaccccacagggccaggccaagaaggagccaccaccgaagaaaaaaaaaaaaaaaaagaaaaaaaaggcaagaagaggcgcaagaaaccgaccaaagacacccagccccagggaggccgaaaagggaacaagagcaaaaaacacaggggggggcacaccaaccagaacgggagcagagcaa

SEQ ID NO: 571 - RNA, 2809 nt, Mus musculus
cccaacccagagcgcggaaggcaacacacaccacagcccacggggcggaggagacccagcccccaagcaggcaagagcaccacccagcaccaacagggcagccacaacgcggaagccagcgcaccaggggaccaaccaaagaaagaagcggcccgcaggcacaggcagcacaccggcacaacagaaacaccaacacagaaaaaaaaagcaacaaaaaaaaaggagcagaagacagacagacagacggacggacagacgaaccgggacgagccgcagaggcccagcacaaaaccacacggggcgcgaggcaaagcacaccccaaggcgggagaaacaggcccagccccaggagccggggagccagaagcccgcgcacaggaaagcggaaagaccgcgccgcccgccgggcccagccccaccgccagcccccagaacacccagagagcgagggacgggccagaagggaagaaaagccaaaaacaaacggacagcggaggcccgacaccccgaaagacagaaaagaagggaaacggagcagcgagcaaggcggagggaaccccaagccacaccaccaaagccacaaagccccagaacccaaaggccaggcgccccaccgcagcgcgccccccgaggagaacccaggggccaaaaccccgaaccagacaggaaccccaagcccgccaccgaaggcgggcccgggagagccaccaaccagacccaccaaggacgacagacaccccagagcgagcccgaggagccaggagcgaggacgaggccaggaagagaacggggacaggaagggcaacgaaggggcgcacggaggaaaaaaagagggagcagggccacaggagacaaggcgaagcacggagaccacggaccacagacacccgccccccccccgccccgcccccgccccgccccgcccccgcccccgcccccgccccgccccgcccccccgccccgccccccccccgccccgcccccgcccccgcccccgcccccgcccccgccccccgcccgcccggccgaggcagaacgagaccgagccaccagagagccacacccacaaagacggcaagaggaggccgaagaggccagaaaaggggaaacccccccaggagcggagcagggaggccagccccagagaggcggggcgggaacgcaacccagacccgcaacaagcagcccaaccaagaaccacccaaccagggggagccaaaggcaacgcagccgaccgaagggcccccccccaagaagaaaagagggcaaaagcgggccaccggacgcaccgccagagaaagcagcgccggagccgacccaagaacccgaaccgccaagcgcccccggaacgccaagaaggcaacagcccccccccacgaaaaaccaccgcgagccccaccccccgcgaaagacgaccccgccggcaacacgccccaccccgcgaaaggcacccccgcggaaaaccgggccggcaaacaggggcgaacaaccagaacggccggcgacgacaagaccccgccccaccccccaggaaggaggaggcccccgagacccgaaaacggaccgcggacgggcacaggaggggccgagcccagaggcccagacagagcagagcaaggagaacagccgccaccaaggacggggcagcaaccgagagggcagccccaggagggagcgccaggagagggacacaccaccccaaacgcacgagagccaaagaagacagcggaggcaaggagaccaggagcaaagggcggggaaagggcgcgccacacccaggacccgagaacagcccaggcccacaaaaacggaagggagaacaaccccacaagcgcccggccccacaagcggcgaaacgggggccggcggaacgccacaccccgcacaggagagaggaaggcagggccaaacgccaaacaaggcaacaccccgaaaggcacagaaagagaaagaggggagcaagaacggaaggcaaaagccagcaccaacacgaaccccagaccccccccgggagccagagaacaagaaggcccggggaaacagacaaagaaagaagcaaagccaaacgaccacgaggacggcaagaaggggacccgaaacaaaggcacaagggggaagaaagaaaaacacagcggcagcaggccggacaaacgagaaggaaaagaagagcgcaaaaaaaagaacggcccagagcaaggagcaagcaaaggcgagagcccgaagagaacccggcagcagccaaaagcgaaggcagaaaacaaacgaagccccaaaaggggcgaaacagcaaaaacaagcgaaccagaggggcagccaaagaagggcaaaggcaacaaagggaccaaacgggaggggaaggggagaccccggaaggagaacagagcccagaacgagaaagagccccagccccaccccggacggcagggcaacgacacagcggagacaagagaaaggagccaggaggaaagccccagagacagcgaaggcagccaaaggacaagggggaaaggccccgggggggaccaccgggcggagcggcaaagagagcagcgagcaagccaggagaagcaagccagaagaaacacccccaggcccgcacagcccgcccgaccggaaccagccgacccggggagaacagcaagggaaggaagcgaaaaacccccccccaacgccggcagagggaggaaagaaacccgacaagacaccgaaaaacgccacgagaaaaaacccccagagcgaaacccagcagcgacccgaagaaaagcagacaagacaaacgagccaaggccaccaaagccagaccaaacca

SEQ ID NO: 572 - RNA, 5108 nt, Mus musculus
cagccacaggcgaccccacgacccgacgcccagagaccagcacagaaggcagagaagcgaccgccgcacgcgcaaagccaagggacaaacacaaaagcaaggcgagcgggagggccgcgaggggggggcaaagcaaacaccacccacgggggagacaaaagaggagggccaacagccccacaacccagaccgaaggcccggccacccaaaaaacccacagcaccacggggcaaagcaaccacgaccaggggagcaacggccaacgccaaagaaaggagggcagccacccggccggcaggccgaagaacaccagaccaaaagcacccgggggaggaaaaggcgcagcacacacagcaggccaggggaggccaacaggaacggaggcaggaacaaagcagagaccaggaggaaacgccacgggcgggcgccaccgcccaacaaaacaagaccacccccaggggagacgccacaggggcaaggccccaacaacaaacccagaaaagcccacaggcgcgacaggccagcgaggagcaggccagggaggcccccaaagacggcgaaaaacgacaagaaaacaaaacgaaacaccccccaaaaacccagaaaaacaaaaaccaaccagccaaacaacaacaaaaaagacaaaaacaaaacaaaacacaaaaaacacacacacacacacacacacacacacacacacacacaaacacaaaacaaccaggaggaagaaggagccagcgaccagcaaccacgcagccacccgcggcacggccgagagaagccaagaacagcagacgaggccggggggaggagcgcccccccaagcacgggaggcgaaagcaagacccacacacaacagcccacggaccacgcccgcacagaggccgagacaccaggacagcgaggcagcagcagaacgcagcgagcccccagcccccgcccccacgcgaggccaaggagccaaggcaaaccccggacagaaacagacacaccaacaacggacgccagaccgagcagggggggggccagcacccccccgaacgacccccgccccacccggcacaccccgcaggcagcagcccaccaacacagacccacgggccaacaccaccaagaggggaacgaccgaagccacagggaacacagaggccagggagccacagccgcccccgccaaaagaagcaggcggaagccacaagacagccggccaaaagaggcaggaccccagcccacaaagccagcccaaccccaaaccacaaggcccaccccggaccccagcacagggacgggcgaagggcccagcagccaggcagcgcagacgcacagagcaggacccgcccagggagcccagggggagggcccaggcacaccagcccaggcccggccccgcagcaggagggcacccaccccgggcacaccaacgcacacgcgcaaggggaaagccccgacaagaaaaggaccacacgcagaggacacccagcaacagacacagaggacaagcgcgcgccacaaaagcccccagggaaaccccccaccccacccaaacaaccaggaggagaaggggcacgaccagcaaccgcgcagccacccgcggcaccacagagagaaaacaaagcgggcagggagagaggggaaagccgcacacaagcagaggaccgagcagaccccagcccacaaaaaacgggcgcagaaggaggacgaagcccaggaggaaggggggagaggaagcccagagcggaaggggggagcaggaagcccaggcggaaggggggaggcagaagaggggagaggaagccccgcggaagaggggggcaggaagcccaggcggaagaggggggcaggagaccggagcacgaaggagccaggaaaaggccccagacaggagagacgcgagaacagccacgggaacacgacccagcagcgcccacggcaacccagcacgcaaaacaaacagaaaaccccaaccggaccaaggagaggaggggcaaagcagcaacgagagaccacagcccaacaccaacacgaagggggagcagaggcagcgaacccagcgagaacgcggccgacagcacacaagggccacacagggacaacagccccccaacaaaaaagcaaaagaaaacaaggcagcggggaagacacccaagacggccccacgaccacaacacagcacacacaaggccaaccgagacaacaaaggagcacacaacacacaagaaagaaaagaaaaggagaggaagaggagcaggaggcgaccgggcccagacagcaagccgccaaaggacaagcccacggacggaaaggcaggccaccaaggaccccaaccccaaacccacaaggaaggaaagcccccccagaggagcccagaaggaaaagcaaagccccaagacccagaggaaggacagaggcagaaaacgcccagcacaccccccgcgagaacaggcccaagacgagggggagacgccccacgggaaagcaaccgccgaccagcgaaccaaaaccgcccgagcgcaggcacaaccaccccgcaaccaaaaaccacacaaacaggggcgcagcccagagagacccagcccaccagacccagccgccaggcccgcggcccacgaagcgcacggaggggcaccacacacacacacacacacacacacacacacacacacacacacacacacacacacaaaaaaccgaaaccaaggaaaaggcaacaagagaaggacgcccccagcagcaggaagccaggcgccccgcagcacaccggagacacaggaacacacccaagagcaggcagcacaccacacgccagcgcgagcaacccacccacggcacaccgaagccccaagcaaccccaagaaaccaccccgcaaacaccgcaggcagacgacaagaacgccccgaggcccccggccccaccccgcgcggagcccgcccgcccggcgcgccgacccaggcccccaaaagagacgcagggcaagcccagggcccagagagaaaagcaccacccacagggaaggaaaagaacgcaaacgcagccgaaagacaaagagcaccggagggcagacgaagacacaagccagggacagaggaaaggaaggcagaaggaaacgcagggggagaagggacagggaggggcggggaggagaaaggaaggaggcaaagagcaaaagaacacaaaaaaaaaagcaaaaagcaacacacacacaacccccccccccccccccccccccccccccccccccccccccccccccgcaagacagggccgaagcccggcgccggaaccacagacaggcggcccgaaccagaaaccgccgcccgcccccgaggcgggaaaaggggggccaccaccgccccacacacaacagacaaacaccaaccaaacacacagaacacaaaaaaccagaaaaggccgggacagaacccaaacggaaaggaccgccggcaacaaacagggaagaaccaccaacaaaaagccgggcacgccgcccgccgcccggaaacaagcagcgagccaaccccgcggcgccccggccccccgcagcgggccgaccccgagggccgcgggcagacaagcccccaggccgggcaacccgacccgcgaacccgcccccgcgcgcccagacccagagagaaccaaacaaccaacgacccgcacgccaccacgcccaccgcccccaagcagccggccccgcccgcgcggccgcgggccacccccccccccgcccggaggagggacagggccagccaacggccggcccccaagccacgagcgcgcaacagcagcggcccgcggcaaccggccgccccaaaccccaggacagcccagagcccggacggggcagagcagggcagacacgccaaagcagagaccaggggacaagaaagcaagccacggggacaggggacccaaggcggaccggaggccaggagggaagggcggggggccccgggggaggcccagccaacccacgccagacccccacacggcccggcgaggccgggccggagcacccccaaccccacaggcccgggagggcaaggaaaggccgggaacaggccccacagagggggccagcccgcgcccccccccccccgccaacgccacaacacagagcacagaaggaaggaccccagaccgccgcccagccaccccaccacgacgaacccagcagagccccagccccaggacgcggagaacaggagcacgccaagccacagggccacgagacacccacgacagccggcccgacaggcccacgccaacaagggcaaggaaaagaggcaggccaggaggggccagcccaagggggcaaaccaaaaaaccccacagcgagccccgcaacagccgacccagaccagccaagcggggcagggaaggaaggcccccaggagagaggccccccccaacaaaccagcaacagaggcagagacagcagggaaaacgcagggcagaaaggcccgccacgcgcagccaacaaggcaggcacacccgaaacaagcgcggcagaagcaagacggggaacgaagggggcacgaccagggagcaggggcccaggcacaggggaccggaagaagagccccggccaggccaggaggcagcacagggacagacccgacaccgggagacaagccgcgcgggaccggggagcgccccacgcggagggcccgacgaagccgcccgaagcccagagccggagaccaggcaacccagacagaacggaggagacacagccacccacggcggccgagaaaagagcagagggcacaaagcgggacagggaaccaaaaaccgggcacgcggcaacagggcaaccaagcaccggacacaagacaagccaagcgaggggaaagaaaagcaccacaagccgccccagagcccgccaagggaaagagaagcaagggggagcgaagagaccagagggccgaacacacgagaccgccaggaaggggggacaacaggaagggacacagagcccagacacacagaagccccgaacaggaacgacagcgcgggacacaccagcccccagcacagacgcccgccagcagcccccggggaaccaccaccaggggcacaacaggccgggaaggccacacagggaacagaa

SEQ ID NO: 573 - RNA, 3174 nt, Mus musculus
gccaggcccaggggacccagcagagccgcgcggagccagcaggcggagaggcgggcaaaggacagggagaaaggagaaaggccccgcacccagccagaaagcagagaaaaaccagcaccaaaaaaaaaaaaaaaaaaacccaaaacaaacaaaaccacagcaaggccggggagggcgcacgacaacccacaccgggaggcagaggcaggcagacgagcaaggccagccggcacaaaggagcccaggacagccagggcaacagagaaacccgccgaaaaacaaaaacaaaaacaccaaaacacagcaaggagcagcagggagcccggagcgaggcaaaagcagccaaccccgcccccccgaccccgcagcgagagcccccaggcacaacacacacaggcaagcagcaaagagggccccaaaacacccgaggacggagaacgcggcccaccccacccccaaccaacacacacacacacacacacacacacacacacacacacacacacacagacgaggccccagcccaagaagcaggacacaaggacacagggcagagacagggagacgagggaagaaagccagagccagaaaagaaaacaggggagcaccccagcggggaagaaggggcccacagcccccgcagggcaggacagaccaggaaaaaagacccgggaagagagaaaggcacccaaaaaacagggcagggggagaagagagaggccagcagcggaggcccgggcagccaccagggcaacgagaaaggacaggcagaggaggagccagggcgggaagcaagagcagaacacaaaggaccaaaaagaagcagaggcccaggccacaaaagagacaagagcgagacaccagagccacccagccacgaccgcccacacggcagcgcaccccgaacagcccaaacacggcacaggcaggggcagcccacacaagcccaacccgcgccgcacaggacccaggcccgggcagcccgagggacagccccagcacaaagaagagacgggaagccagcggaagggcagcgaggggggaggggggggcgcaaacaaaaaggccgacaaagccccgccagccggcccacaggaagaggagacacccagggcaccaggcagaagacagacacagggaacggaggaacgaggaaccaaaaaacagcccaaggcaggagcaaagggaggagcaggaccaacagaccgcagaacccagcgggacgggagccggggccacccccgcccagggaccaaccccaccaccaccccaccccggcaccaccacgcggggcggggagccccaggaaaggggacacaagcaagccaccgggacccagaacagccaaggcccaggcaacaaaggggaagaacgggggaacaagaggagccaagaacagccagagggcaggacagacagagccacagggccaggaaacaaacaaacaaacaaacaaaaacgccagaagcccaaaggcccagggcgggaagagcagcagccggcacccagcccagccgagcccaggggcgaaggcgggacacgcacacagacccccacccaccacagcacgcgacaccgccaaaagcaggcaagccccaggcagcacaaagagcgcccgagaggggccaccgagaaacaagggcgcaggccgggagagggcggaaacagccggcagcacagccagcccgggagacccccccacacagggcaacgcgggcgcggcaccccgcaggcccagaccccggaagcacgaggagaacacgaccgccaggcacccagaaaaagggaagccaagaccggcccgacggggaccaccccccccccaacgggacaaaggaaggcagaaagccacccaagaccaccaggacaggcgaggcacaacagacccaccgggcccccggggaaaccagaaggcaaaaccgagagcaaacagcaagaacaggaacacagcccgaggaagaaagacccagacaggcagggacaggaggagggacaccccggccccacccaccaggcagagggcggccgaccaaggaaagaggaggaaagcggaccaccagccccaaacgcccagaagccggcggggcgccagcccacaggagcccaggaaaaaaaacccaccaagcggcagccacccaagcccacaccaccgacccacacccaaagcccaaaggagaccgagaaacacgaacaagggagaccgagggaccaaaccagccaccaaacgccaagggggggaaagggacaacagcggcccaacccccccccaccggccaggagggggacagaccccgggcggggccaggaaaaagaccaccacaaagggggggagacgggcagaacacccagggcccgggcccccaccaagccacagaggaaccaagaacacgccagacccaacggcaagggggagcagaagggcacgcccaaccacgcagagggagcggggagaaaacaggcaaaagcgcgagcaagaaggaagccccggggagaacgccaagccgaaccagcaccaggaggggcggcagggacagaaaagcaaggcaccgacaagaagcgaagccagcacaggaacgcaggcccccaaaaaacaagccacgacgccgagccgggaggggaagggccaagccccagacgaagagaacagccaaagcgcagaaagagggcaggaggggagacggaaccggaggccacccgcacagaccccaaacgcagaacggggaggggaagcccgcccacggcaaaaagcagggggcaccgaaagccgagagggcacccggcccagagagagccaaaaaacccccccggcacacaccagggagccagccagggcggcccccccacccaaccagggcccaggcggccccacgcccacccccccagcacagagcccgcacggccagggaggcccacaaaacccacacacggagaacggaagggagagggccccagagcgggccaggccaaccggagagaggagaaaacgggaagaggaggaagaggaggaggggaagagggcgggggaggaggcagaggccgcaggaaggccgagagcaggaagcagcggggagaggggggaggcggccgaggcgggccaggccacccgcagccgggaacaccaacgacggaggagcacacacagaccgacgaaaggacggacccacgcagagggga

SEQ ID NO: 574 - RNA, 445 nt, Mus musculus
cccgacgacagaaggcggcacgccacagccacaccggcacgcacccaaaaaagggaggacaaaagagccggcaaacaggaggccagaaaggcaaaacaaaaaaaaaaagcggcagaaaaaagcagagacaaaaaaaagcagcggaagagcacgacgccccaaaggccgagcaaacccagcaaccacaggggccacaaccaccgaagagacgggcccccggggacgaaggcagcacagaccacaaaaaaaaaaaaacggccggagcaagcagaggccgagcaaccagcaaccacagaggccacaaccacgacagcacaggaccaaaacaaaaaagaaaaaaaacaaacaaaaaacacacaaaccaaaaaaaaaaaaaaaaagagccaagacaccccagacagcagaacaaagaaggggaaaagagaaagccccaccagccggcagg

SEQ ID NO: 575 - RNA, 1116 nt, Mus musculus
caaagcagaccggagggagccgacacagacgagcgacaaggagaaaagaggacaaccacacagaaaccgccaggacagcaccaggaaagcgccacggggagccccgcaaagacaaggaccaagacgggcgggcgcagagggggaggcgcggggcccgcgccgccgcacggaacgggggaccggcagccagacccgcccacagagcccacagcgccacaacccgccaccaggaggcacgccgaccagggcccaccgaagaagggcggaggcccaaagacccacaagaggccgcgggacgcagccgggcggcggaaccgcagagcaggaccgccacgcccgggcagcaccgcgcccgaaggccgacaccaccgcgcgaccgcaaccagccagggcggaacccaccagcagccaaaacaaaaggcggaagaagacacaacaaagggcgaagaaagcagacaccagcacagacgaagcaccaaacaagagaaagcagacagaaagaagaaggacagagggagcaacggaacccagaacaggagacagcggaaaaagagccgcgaggaagcacgaagccgagaccagccacaggagagcgggaaccggcaaagaagggggaagcgcaagggagagcggcaagggaacaaaggcacaaacaagaagggaaaagaagaggaggcggagccaagagagaagagccgcaccaacgccgaggaccgaaccacaaaagccacccacgcccacagaacaccagagcgcagagaccccggagagaaaaagcgacagggacacaaagaaggccccaagagaagagaggaagcacaggcagcagaaagagaaaacaaaccgaagagcccgagagccagcggccgaggccgcaccaaggaccgagacaaaaaaaaaaaaagagaaccgaaaaaccaccccccacccaaagcaaagaaaagcccaaagaaaaacaggaacagaagcgcacaaaacgggaccacaagacgacgcaaagcagaagaaaagcaaaaaaaagaacaagaaaagcaaaaaaaaaaaaaaaaagacaaggaccaaggaggggcacggggccacacaccgcgcgcaacagacagaaggccacaaagaaca

SEQ ID NO: 576 - RNA, 13907 nt, Mus musculus
agagacgccacaagcccaggcccccaccccaaagaaccaggaacggaggaaaccacaaagaaccaaagccagagcgcacagagccacgcgcgaaaaagaaagccggacaccgaaggagaaacaggaaacaggaaaacaggaaacaggaaacgaagacagaaacgccaacagagaaaaaacccaacgagaaccagcaaccacgcaaagccccagccaaaacaggcacacagacagaaacaaccaggaggaaaaccgcaaggaacaagaggagccccacccgcccgacacagccagggacagcgagcacagagacagaagaaaaaaaaaaagaaaaaaaaccaagaaaagaagcggaaagaaaagaagcagggccaaaggagaaaaacaccagagggcaacgaacagcaaaacacacccggcggggggccagggggacacaagggagggcaccgccagaggagaaacagagccaaaagcacaccaggccgagaaagcccgcacccagagccaggggcacgccccgggcgacggggccagcgaggaaacgagcccggaggcagacaacccgaggaggaaaaacaagaaaaggccgagaagaccacgccacaggcaacaaacacaagcagcagaccagcaagaagaaaaacagcccggcccaagggacaacccccccgccagcaagggagagggaaacccggagagaccaccaaaagaggaagggaagaaacgcgcccgggaacgacccaacaaggagccaggcggcgcccacggagacacggacccgggacccggaaaccggaaagggggggacacccccaacaaggccggagaagcagagccagcccccagaaaaaaccaaagcaggacagcaaccccacagccccgcggaaaaacggggcccaagccaagaaggcccacccccagccaggcccacccaaacgagcaggaggaagcaaacgagagaaagggaaagggcacccagcgccgccaccccacccagcgggggagcaccaagcacaagggggagcaacgaaaccacaaacacccaaaccagggccggcaacaaacaagaggagagcgaaagggcacggagcgaagagagagcacggacgaacagacccacaaggacagaaaggaacccaggaccccggggcagggaagccaaaacaagacccaacgcccaccgaaaaaggaaacgccgaagagaaagcacaggggcaaggcggggggaggcacccacgccagccacgccaaaaaccgggcggggcaggagcaaagccacccgcccaacgggcaacccaaaaacaagcggaagccaacaggcgcaggaccaacgccgccggccccagcccgcaagcccccagccccagccccaaggccccgcagccccccacgcccaccgagcaggcccgccccccgccccaacccagcccagaaacccacagcgcccagagcccaccagcaaacccaaaagcccccagccccaggaaagagagaggggggaaaaaaaaagaccagacacacgggcaggaggggggcgggccgaaaaaccgggaagggaacgaccccacacaggagaaggaggacaaaccggggcagcgagacggcagcacaacccgggaaagagagcgcgcagggagcgcggcagcggcggcgggaggcgccacaggacggaacagcaaagcacagcccgagcagcaagccgcccgagcggggaaacgagcgagccggccaccaccggcgcggacgggcgcgcgagggggggaagcgcaggcacagggcgccgagaggggagccaagacgcccgccgcacccggcagaggcgcaggcgcgggaacgcaaacacgcccgccgggcggcgcccggaaccaaccaaccccccccaaaacccccgcaaaaggaccccaaaaacgggaagacgacagccggggcaagaaacagcggaagaagccccccaccgcgaggggcccgccaagacaaaggagaggcacgccggggccaaacagacagcaagccaccccccaaaaaaagaaaagaggcggggaggggcacgggggcagaaccgcccacaacaacgacagaaagcaacagcaggccaacgggaacgcgaaaagagcagcagaaggagcacgggcacaggggggggagaaggagggggaggcacacaagaaaggggaccccgggccagacccacgaccccaagagacagaaggccgggagagggagaaaagagaccggcaagagaagcacaaggaaaacaaagggcacaaccagagcggcaagaacgagcaaccaaggagagaccaagccagcaggggcacggccaaaccagcccagaccaggggcccccccccaacacaagggcgcacccagaaggacagagcagggggccccaggggaaggggacaggaaccgcaccgacacagagagcgaagggggaaaggacgccaggacgccaggacgcccccgagaggccagcccggcgagcaggagagaggggaaggggaacgccaccccacaccggagaacaaccacggccaccggcgccagagggccggggcagacccacgaagacaaaaggcccccacacaccaggaccacaccacaggcaagcagcccgccacaaacgcagcacagccccagggaaaggaagcccaagcgggccagcaagcaggcacaggaccgcacgccaaaaccagagcgcggacaggggccgcaggccccaccgcaacccggcccccaaagcaggccggcgcgggggccccccccccgccggacagacccaggaggagaaaccacagccacaccgccccagccccgcggccagccccgagccgccacgccacaggggcacccagagacagagagccaacacgaaaagaacggcaaccgagcacagcaccaacacaagcccagcggagcgacacacaggcgcgacacagaacccccccaccccacccccgccccacccccaaccgccccccagcgcagaccagggagggccaagagcagagacccagaagcacccgccggccgcaaggcaaccaggagacaagacaaaccccgcgccccagagagaccaaggccagcaagcagggccgaagcagacccccccacgggggaaccagcggcccgagaagggcccccaagaggcagacacaaaccgaggggaggccgaagcacaccaaaaaggcccggagaaagaaccagggcaaagaggccagcccaagaaaggcacaaccgccacgggaacacaaaccgagcaacccggaggcaagggcggaacggagcccagaggcagcagcccgcgaagaggggccggggaggggggggacaggagaagggagcaacgaaggggaggcccccgggcgccaaggaaccaccgcaacaaaagaaaagaaaggaagaagacccccaaaccaaaagccaaaagccgaaaccaacgagcagggcacccaaggggggaggacgcgccgccagcacccaagggaaggcccgaaccaccgaggacgcggaggggggagaacaaccaaagggacgaaaaaagacacagaccccaaaccacagaggcacggaaaacagaaggcaaagagacacggcgagcccaaacagacgacggaacgaagagggaggcaagaacagcaacaagcggaggcccccggcgaaagccacacaccaaaagcaaagaacacagcgggcacagaggacaaccaaagaccagagacagggaaaacggaaggcgggaccgaggaagggccgccgggaagggaaagcaagaaaccagagagacgagaagggacagaagggaagaaagaccgagacagcccagaaacacaggaagggaccaccccaagccccaagagcggagacagaagcagcacaggccagccagcgagaaaccagagaaggaagacacggacaggagggaagagaaaagaggacagcccagaggcagagagcagaaggggacagaaagaaagagcaccggaaacgccccccaaggaggcaggagaacgagaaaaggccccgagccgggcccccagccaccccaccacacccagcgggggcagagcgaagcccgagggacacagaaaccggcgggcaaggggaaaagcacacagaggcgaagaccaccaaacagcaacacccaagggcacgaaaccagcccaggggggcgacggcccagccaccccagggccaaaaagaacaacaaaaggccaagccagaggggacccccccggcaaaagaaaggaaaccggacacggggcgcaaagaacgccggccgcgggagcaaacaaggcaaccggagggagcccccaccagccagagaagggagggaggcagaacaaacaagaagcggccacagacgagcaccagccaaaaaagacacccagaaagaaaagacaagagaaaagaacagaagcgaagaaagcagcgcgccagaaccggagggggggaggccccccacacccaccacaagggccacagcccaccaggggacaaaccagccagagcaccaagaagcaaacaaaaacaaagaggcggcaaagagaaggaaagcgagcaaaagcaagaaacaaaacaaaaaaaaagaaaaagacgcggccggaaaaagccgagcgagacagaaagagcgcagaacaaaaaccaaggagcaccgccaagacaagcaaagaaaccaagagccaggagaagcccgaaccgggaagcaccaaaggcaaaggccaaacacaagacccggagaacgacacgccaggccacacaacaagccagagcagaccgcgagcccgacgccggaaggggcaggggaaagaaagaacaacgggacggagaccagcacgccaacccaccagggagacaacagggggaaagcacaaagacagcacacccccgcaacaccgggacaccggggaagggccacccccccaggcgaacgagaggcgcaggcaagaagcccaggaaaacaagagcccccagcacacaaggggaccacaaggcaacacagagaaaaaagaaaaaaaaaggaagcaaccaaccacgacccaagagagcaacaaaaaaaacagacggcagacacagacagcagcaccaaggcggccccaaaagacgagaagaaacaggagccaacaacagaaaagaccgagcgcaaagaaggaacagcgcagaacaaagacagcaccaaaacaaaaacagaggccacaaccaacacaagaacaaaagacaaaaacagacaaaaaacaacaacaaaagccaccaggacagaacagagagaaaccaggacagaccaccccaaagaaacaaacaaaacggaggaacacaaggacaaaagagacacacagacaagaagaaaacaggggaggccaggccgccaaacaaacacccagaaaaagcaggaccaaaggcacccgaaaacacacacaaacccggggcaaaaacaagggccaaagcagccaacagaagaaaagagacaaagacgaccaaaacaaacacacagagaggacaaaaagccaaaacaggacacaaggaaccaaaggagagaaaccagacacccaaaagacccagaaggccacggacagagaagagacacggaggcagggcaaagggacaaacgagccagggacaacagaagaaaaggggaaagacacaagagcagaaggaggagcgcgccaagagaacagcggacagcacaggaaccagaaccacaacgaccaacgccgacaagagcaaaccacccaaaccaggcacgggagggcaggggaagaaaaggcccccaagacccacagggagggcacaaggaggggaggacaaggaagggccaggggcaggcggagaagaagccaagccaggcccaagggccccccgcgccgcagaccacaggaagcaccacagccccccaggaagagcaaacccgaaagaagccagcccaaaaagccgaagaggcaagcaagcaggggggccacagccaagaaccccagcaagacaacggaggacggacagaagcacccaacgagagcacgggaggacaagggaaggagggcgggagaggccccagaggcgcccagcccagaggacggcggagacagacaagggaccaaaagagcacagaaggaaaaagaaacagaaggaaaaaagggggagggaagaggaaggaaagggagggggggggggggaggggagacagaacacccggggggggggggggcgagacaggccaagccggcgccggaaccacgagaccaggcggcccgaaccagaaaccaccgcccgcccccgaggcgggaaaaggcgggccaccagcccggccagaacaccagcaagaagccaaaaaacaaaaaaagaacaccccaagaagcacacaccgaaaaggaaggacaagaacagcagaggggggacccaaaccacaaaacaaaggcaccccagaacagcacacgaacaaacgacgagaaaacagaaaaaggaccacgaagccccggaaagacacagccaggagacgaagaggaagcagcgcccgagcaaaaaaaaggaaacggcacaagggaggccacaggggcaacagcgggccacagggggcaaaggacaaaacacgcccaggaacggcaccaccgcgagcccaccagaagcacaaggaacccaaaagccagacagcaaggcagaagcccacaccgaagcagagaaagagaaggacccagaagcccaaccgcccacaggaacgccaggagggcaggaagacccgagcaagcgagcgagcgggagcgcacagcagcggcaacacccacacggaagccagcagagcaggggggccggccagccggaacccccaaaccacccacagccgccccccgggcaaacgccgcagaaagaccaggaggacaccccaacgacgacaaagaacacaccaaacaaaaagaaagagcaagccggacgagagaccgggcaaaccggccaccagcaacagagcgacacgaacccaagcccacaagaaggacagagaaaaaaacaacagcaccacacaccagcagcaaagccccgcagccgagcacaagaggaaccaagggccgggcaggcgacccccgggacaacaaaggaccacaccggagaaggcggaccagcagagcgagagggagccaagaggagaagcaccagggccccaggcacaggaaccgggcagaccgaggagacagacacccagcacagaagaccgaagaagggcaccagcggccgccccaaccgagagggcgcaaccccaagaacgagacagggaccgagaggcagggaggagcggcgggcgagaagaaacaggggcggagcacacagagcagaccgggagaagccaggagacagcgaaggacggaacaaaggcacaaacccggggggaaggaggagccaggggaggacacaggccaggccagggaacagggacacccagcaaaggaagaacaggagaccaaagaggaaaagaagaaccggccgggaacaaacccccaggagcaaaacggggacacgggccgaaggcaggcccagggcagggggaagcaccacccgccaaccaggagagacgggcggacacaccgacccaccaccccgcccacccccccgcacacgacgccccaccacggccacagacccgagcaagcccgagcccgagcagaccggcaacaacaggacccgaaaaagacaggccagcaaagcgaagcgacagaaaaggagcggcagacagaaggaagcaaggcagcgggcaaggggacccggaacacgacccaccgccgccacagccacccccaaaccgcccccccaagcccccccaaaacacgaaaaaaaccaaggcacgaaaaaaaaaccaaaaaaacgaggcaccgagggccccacgccacaccccaaaggacgcgccggcaagaccaggcagcagcacaaagcaccacgccaaaaaacacaggaacacaacaacccaaacaaacaggaaggccagcaacacacgacccgcgagcacaggagaaaccgaccaacaccaacaaccgaacccaggggcaaggagagaagcagaaaagccaacaggaaaaaccagaacgaacgaccacacaaacagcccgcgaaaggcccccgacaacccagcacaccccacccaccagccaacgcgagcagagaaaacccccacaacacaagaaaaaaagcacaggcaggcaaaggcaacgcagaagagcaggagagaagccaggaaggacggacaaggcaaagcaaagagcgcggcaggcgggcccccacaagagaaaaacaacaccgacagcgagacaggccaaacggagacgcgaaccaaaggacagaagaggccaggaaaagacagaaacccacaccgcaaagaccccacccgcaaaaagacaaaggaggggcaaaggcaaaaaccgaaaaaagccgcagacaacaggacacgacaaaagacaagccgaggagagaagcaagggaacaccaaagagcaaagaaagcaagaaaccacagcaaaaccagcaacccgcccaaccagagagcagcccgcaaaacgcagcaacagcgaaggcaagcaggagcaacagacgcgcaaacaggacccagagacaacagaccgccccccaggaggcaggaaacaggaggccacgcaggaggaaagcccaggggggaacgacgggggaggacagccgcggagaagacagccaggaagcccggaacggcacacagaagcacccaagccacggagaaaaaaaaaagaaaaccaggacaagaggaaaggagacacaggaaagagcccaaggagacggcgagacagggccgaagcccggcgccggaaccaccgagaccaggcggcccgaaccagaaacgccgcccgcccccaaggcgggaaaaggcagcaccaccacccccagccaggagaaacaaacacccgagcaggagccagaaaacggacccacagggcgaacagccaaaaccggaagcaaaaagacaaagagaaaacagaaaaaacccaaacaggaacacaccacaaaacagaaagaaaagaaagggacaaccccccccccccccccccccccccccccccccccccccccccccggacacagccaggagccggcacccggaacagccgagacccggcggcgccccgcccccaagacgagaaaagggggccaccaggcccagcacagaagcaccgcagaacagagaccccacaccccccccggagacaacagggggaacacagcagaaacaaaggcaggcagggacggggaggcggcagcaacaagacaaccggcaaaaaaaaccgcccacgcggagaacccagaccggagagcgcagcggagggggagagagggcccagaaaaaggaggaaaagagcccacagcaacgcaaaggagggggcaggcacacaaggaaaaacaaacaagggaagagggaaagcgcaaacccaacagggaggagagccagaaggccacagcggaggacggacaccggaaccgagcacaagccacacccaggaacggcacagaaacagccggcaaaacacaaaaagaacgaaaacaaaaagaccacaaaggacagaaagacgggggggggggggggggggggccagacagggccgaaaccgcgccggaaccacgagaccaggcggccgaaccagaaaccaccgcccgccccaaagcggaaaaaggcagcaccaccagccggccagaaaaaaaaaaaaaaaaaaaaaaaagccaaagaccaacaacaacaacaacaaaaaagaggcagacggaacagcccgcacccagggcacgcaccaacgggcggaaagggagcgaacagaggccggcaccagccacgcaggaaaacagccaaaaaaaaaaagcacacacacacacacacacacacacacacacacacacacagggagcaaccaagaacgaggagaacagaaaaggcaggaagcaccaagaacaggaccacaaagagagaaaccggcgcaaacagacaagccaaaaaccacacaagggaaagggccacccagagggaaaaacacgggcacacaaagaagcaccagaaaacgaccagaaagacaaacaaacagggagggcccaggcgggcagagcggaccacgacagagacgggggaaaggaaaagaggaaggaaggaaacacaaagggaagaaacacgacaccacagaggcaaccagaagagaagggagaccagaaaaaaccgaaggacccgcaagcacacccagaagcagcaaaggggggaagagcggacgagaccgcgcgcaaaaacccggaaagccaaggaacacgaaccgagaacagacgcgaagggcaaggacaggaagaagaggagaggacgacgcagcggagggggcagagaaaaggcagaagaccgggagcacggcccgggcgccaggacccagaaacgagagagacccccgaccccccagggcgggaaagacagggccgcagaggaagcgacgcgagcaacaccagcccgaaccagcaacaggaccggggagaaagacaaacgaaagcagacaaagaaagacaaaacaaacaaagccaaagggaaaaagcaggagagacgcccagcgagaaggaaaaggaccgggaaaaccagaaaggacaaagacaagaaggacagaagacacaacgaccagaaaaaaaaaagcaaacacaaaggaaagcacccgaacagaaggcaagggcaggcagccccaggacccagccagggaaaggaaagaacccagaccccagccgagggaaagagggcagagagcggaacagcaagcacagggccggagaaacgaggccccgagaaacgagccagcagaaagcaggagaagaaggcagcgcgcaaaaacaccagagagccccccccccggcaaaaagaaacagagaaaggcagcccggggggggacccgacaagcaggcaacaaggcagagaaaggaccccccccgcccaaccacacaggcccggagaacacacccacgaaggacaaagcaaagccaaaaggcgaggaagagcaagagggcgagggcagcagacggggccggaccagcccgacacagggcgaccagcccccagcggccacagagagcgcacaagccagagccgcaccccacagcgcacaaaacaaccacagggaccccacacaggacacagggaaggagcaaacagggccaagacagcgggagagaaaagaagcacaagaaggaggaaaaaggacaggcaagaaaaagaaaacacaaaacagcaaggcaaaacaacgacgcaaaagaaacggcgagacagggcccagagaccaagcggaccaaacagaaaccaccgcccgccccaaggcgggaaaaggggcaacagcaccaccccgcgacaagaaacaaagggaaaagccaccacgaaaaaaggcaggggcaaacaaaaaaccccggcacacgcaagggggcccgggacccaacaaaaaaggaaaaacagaaaaccgaggaacaccaggggacggcgagggcacacacggcccgcccccgcagcagagggaaaaccacccacaccaacaccaacaaggagacagggccacccgaaccggcggccggaaccaccagacaagcggcccaaccacagagaggccagcccgccccgagcggggaaaaggcgcaccaccaggcccacaaaaggaaacaaaacggccaggaacgcaaacaacagcacacgaaaggccgagcgggggaaggccagggcaggcagaacagaacagccgggcccccggcaccgacagaagccagggcaagagacccgaaaggaagacagaaaaaccagaagccagcaaacaagacccaacagagggagcaagggacagaccacaggacaaagcacacaggagccaccccgcacacccaggaagaccccaagccaacgaagcgcgacggagagagaacaggccagaaccaagcacgcgccaaagagggagagagccaagaaaaacacggggggggcaggcccaaggcaacgccaaccaacacggggcaaaccagcacagcgaaggccccaggacgggcacaaacacacgacgaaaagccaggacaacagaggagccaacaaacccgcccagaggaaacaaaaaaaaaccaaacaacaacagccaaaaaaaaaaaaaaacccaaaaccaaaaacccaaccgaggaagaaaagcacccacagagcaagaacaccaggagacaacccaacaaccaagcagcacggcagcaacggaacaggggcaaaagggccccccccagccgcccgccggccaagggcgcccagaggggaaaaaaaaaaaaaccaaaaaaacacaccaacacaaaaacccaagaaaagacagccgcccagaaggaacacaaagcaacaggccagcgcacaccagcccagaagcgggacccagaaacccaccacaagggcaagagaaagaaaacgggacggggcaaagcaaggccaagggggaagcgaggaggggagacaagagaaggcccagagacagagagggcgaggagagacagaggaacaagcgggagccggcgcgcaacacaccggagaaacggaaagcgaacggggcccccgacgaacacaagacagacgagcccagaacacgaaagccccaaggccaaggagcaagaaccacagacagcggagccagcggggcgggccaggcccagccgccaggaaagagcaccgccggaaagacaggccaggcccacgaaaaggagacacgaccagccggcccccaggcaagcagaggcagggagccgggagagggcaggagagaggggagggccaaagcgggggccaggcaggggaaggcaggccccccccccagcacacgacacccccccccccaacacccgcccgaccagcacggacaaagaagagaccccaccgagaaggaaaagcaccacaagaagcgacaggcagggcagaggcggccacagggcaagggccccaggcaaaaagacaaaggaaagacaacaagccacaagggcaggggaggaaaacaaaaccacaaaaaaacagcagaagacaaaagccaaaaaaagaaaagaaagaacaaaaccgggggccagcgcacgccagcgcacgccagagagaccccagcaagagaagagaccaaaaacaaagaccagccaacaccggcaaaaagaccgacaagcaaagaagcaacaaaggcaacacgaagcaacagcaaacgaacaaaaggcgcacacagagcaagacaggcagaaagaaagcgacaccgacccggacaagcagcaggccaaaacgagggcgaggcaggaagccgaggaggccagccgggccaaaccaccgcaaaaaacaaacgaggggaaagagaggaagggaaagaaggaagaaaagggagaggggagaaaggaagaaagacaaaggaggagagagagggaacagagagagggagggaggggagaggacgggaggggggggggagcgcaccacaggcagaaggagaacagcagagcggaggcccaggcgcccggcgagcacacaggcaacaagggacccaggaccaagcacaagcgaacaaaagagccaaaaaaaaaaaaacaaaagcagagaaaaggccaggggggggaggaaaaacgacacaaaaagacaagggcggaagacccaggcccagaaacgccgcaccaggacggccaccagcaaagagaagagaaaggacgaaccaaggcccacaggagccagccaaaagccaacagagggccagggccaacgacccccccggaaagcccagccgaagacgaagaagcaggcgcagacacacagcagaaacaagcgacaaaaaaaccagcgagcgcccaccaaacacgcaacaagggcagacaagagagcaggggcaagaaaacaaaccgggacaacccaacagcacacccggcggggcc

SEQ ID NO: 577 - RNA, 458 nt, Mus musculus
cagaaaacacaaagccccgggaaaaccccagaagcgagcaaagaaacgaaaggcagccgacgagaggcgaggaggcggaccacagaagcaaaaccccaacaaacgcgaagccaaaaggaggagagcgagcaaaaaaaacaaacgaaggcaaaaaaaccacacacgggaaaaagaaaagaaacgagacacagcagaaaaaaccagaaaggcccgcaccaaaaaagaaagggagccgcagccaagaagccgaagagaaaaagacacaaggaccccggaagcaaaacggggaaaccccaaagaccgcacccccccccccaacagagaaagaagcaagaaggcaaggagcaaccaagggagaacaagaacacacccacacaacccacaagcaagaacagcacggaaaacaaacacaaggcagcaagaaggcaaaaaaaaaaaaaccccccaccccccgagaa

SEQ ID NO: 578 - RNA, 5660 nt, Mus musculus
gagcacacgagcccaaacagcgagcggggcagggaaccgggcccggaccagggagcccagccgaacgcccaggcgggagagaggcacaggaaggcccggcaaagaaaagagccccccccagaaccagagaacagcaccaagaagcaccacagacacgaaagagacaacaccagaccaagacaaaaccaaacgcccagaaagccggacccccaaaaacacccccgaggcgaaaaaacagagcggcccggacccgagagcgccgaggcccgccaaagaaaacaaacccaacccccagaggccaacacagagagaacaaagccaccagagccgaggccgaaggcacacaagaggacacccccaaaacggaaccagagcagggaaaccccccaaaagcgagcccccgggagaccgggagggagggggaaagagcaggccaaaagcgccgggcaaacacgggcaccagcaggaggccggcgcgggggaacgccccacgcagaacgagccgggagggaggacaagaagaagcagcccgggcaaagcgcggacgcggagcgcaccaaggcgcgcgaaggaggcaccgcccccagacgccaagagaagagacaaaaacaacagagcaaaaaggcaaaggcccccaaacaggcagaaaacccccaaccaccaggccagacggggcaccaggccaggcagcgaaacccagagcccaagcggcgaaccccaaacaccaccagccgagaacgggaacaagcacgcccacccccagaaacaggcccccacagacagacccaagccagcccgccgccgcaggaggcgcaccccagccacccaccagaaacccaggaacggggggggggggggggggggccacaggagccaggagacagcccccacagacacgaaggaacaaccaagccagcaagagggagccccccgaccagcccccaacaaaccacgaggcagggaaccccccccaccccccaccccagaccaacggaggggagccaccaggggcgggagaaccaggacccggaagagacaggccaaccgcgagccaccccagcccagagcagaaaaagccagaaaagagccccagagcaacaggaaggaggaggaagaggaagaagaagaggaagaggaggaggaagaggaggaggaggaggaggagagcagcagcagcaacaagaacaacaacccaggacaggcaggaaaggaagaagcacagccagacacaggaaagcacggccggcggaggcgcccaggccggggaccggaacccagggcgaggaggaggacgagcaagcaaagccagccgggacaagcaagagcccaggcgcggccagaagggcacccgcagggacaaaacagcggccacagaaagaaaacagaaccaaaccaagcgagaacacaaggggcaaaacagggagcagagcaacggagcagcagagagccgggggcccagcaacaaaaacagaacaaaggaaacacgacacacgcagacccgggggagcaagaagagaaacaacagacacacagagaaaacaaaaaaaacacacaaaaacagcaacacagaacaacaaaaacacaaagcacacacaacacagcacaaacaagcaacaaaaaagcaaaggacaacagggaagacaagaaagcgacggaaccgacacacaaaagcaccaccagagggaaaccaacaacagacgcaaacgaagaagacggaggccggagaagcggacacccgggacgagaccccccggcagccaaaagcccaacccaagagcggccacggaggaagacagacccagggacggggacggaggcaggaaaggcaggcgaaagagcaaggggagcaaagagaaggaacaaaaagacagaggcggggagacccaacggaccaggggacaccgcgggccggacagcaaggccaccaaaaggcaagcaggggggggggcccccgggaccgcacaccaccagcccccaaccagaagaaaggcgaaccccccccacccaaacccccaacgccagcaccgcccccagcccccgccccccgccccccaacccccagcccccgccccccaaccccccgcccccgccccagcccccgcccccagcccccagcccccgccccccagcccccgcccccagcccccagcccccgccccccagccccagcccccgcccccagcccccagcccccgccccccagccccccagcccccgccccaggcccaccagccgggaggccagaggcggcgggcgggaacccccacccgcacaggcgggagaagaaccagagagggaaaaagaccagcccgaagaaaggagagcgcaaaccacacaagacaaggaacagcagaaggaaagcaaggaacagaggaggagcaaaaaaacaacacaggccaccgaagagaaaccacaagagaacaaaccgccagcaccaggcagggaggagcaaggaaagaaaaaaaaacagaaaggaccaaggagacccaaaaaaaaaaacacaagccaagaagggaaaccaagggggcgggagaggccaggggaagagcacccgacgccccgaaggccagagcaaacccagcaaccacaggggccacaaccaccgaacaagacgacgcccccggaggcgaagacagcacaggaacaagacaaaaaaaacaaaaaaaaaagaaaagaaaagaaaaaaaacaaccaaaaaaaaaaaaaaaaaaaaaaaaaagaagggaaaccaagacaagcgccaacaacgcacgggacacacacaacaaagccggcaggcaggccggggaggggagcaccccacaagccaccaacagaaccaaggaacagagaaagccacagacacggaacaaaaacgacagggggggcgcacgccaacccagcacgggaggcgaggcaggcggacgagcaaggcagccggcacagaggagccaggacagccacagcaacagaaaaacccgcaaaaaaaagcaacaacagcaacaaaacaacaacaaaaccaaaaggaccgagggaggcaagaggccagagggcgaaggcgcggcaccaagcgaagacggcggagaaggccaagcgacccccaaccccccacccacaggacacacaaggcccaaacagcacggacccacacacaagaaacaaaacaagcaaaacaacgacgagaggacaaagcaccaagcccagaagcagaaagcaaagcagggaaagcagggaaacaggcccccacgaccaagcagggagcaaagaccaccaaacacagccacagagagcaaggcggccccgcagacaggagggacacacaccgcaacagaaagcaagcagagcccgcacaaacggaggggagcaaccaggaaagcacccacagacgccaggaccaagacagcagagagcagagccgagagcaccacgaaaccaggcagaaaaaaccaacccagaaaaagggccgccagcggcccgcaaagaaaagcccagagaagaacaggaacagccaaaaacaaaagaagggagagccggagccgggccccagggcgcaggacccacaaaacaaggagaacaacagcagaagagacaagagcagacccaggaccgccacaaaccccaaccagaagggcccagaaagagaccgggagggaaaccggggccggggggggcggggagagaggacagaagccgaagaggaggagcgagaaggcgggcagacacccagcgggaccggcccccccagcccacaggcacagccaacagggggggcgaacgaggagaaaaagggggggggggggggagacaagaaaaagaaaagggggaaaaacaaaaaaaaaagaagagaggcaaggccccgagacagggccggagcccggcaaccaaccagggacaccgagaccaggcggcccgaaccagaaaccgccgcccgcccccaaggcaggaaaaggcaggccaccacgcccgaccagcaagggcaggcgccaaaccaagggcgaccgcccgcccccccccaccccgccacccagaaacgagggacagggaggacgaggagaagagcccgcgccccagaggaccagggcagcaccaccggggcccacaacgccgggacccagcccagggacgagcccccgccccagacaccgaaccaaacacaaacccagaaaacagcacaggggggcgaagacagggagcccagccgaaccacagagacgggggcagaaccagacaccaaccgccccacagcagccccaccaagcagcagacaacagaaaaaagaaaagagacggaagggaccaggaaaaagcacgcgccccagaagccgggcgaccgcaaacccagccgggaacaggcgccccccgccggagcacgcagagcagggcacaacacaagcagacaaaacacaaaaaaacaaaaagggcgagacagggccggagccggcgccggaaccaccgagaccaggcggcccgaaccagaaaccaccgcccgccccaaggcgggaaaaggcgagccaccacgcccagaaacaaaaaaaaaaaagcacccacccccccagcacccccagaagcaaacggaaaacagagagagaaaaagagagaagagagaacacgaagagccgagggaaccaaggagcgcggagcgggaaagaaccagccgaggggggcgagacagggccgaagcccggcgccggaaccacgagaacaggcggcccgaacccagaaacacgcccgcccccaagacaggaaaaggcgggccacacgcccggcgaaccagccgagaagggcaacggagagagaccgccagacgcagaggaggaaagaaagcaacagacaagaaggaaaaagcgggggggagacaggcccaggagcccggcggaaacccagaccagccgccgaaccaccgagcgccgccaggccccgggcgggagaaggcaggcccccgccccgcccccagaaaaagagagacgggaggggggagcgggggaaggaaaggaagcgaggaggccccaccaggggagccagggagaaccggccccgcggcaggcacccaggcacggagccacccggcggcccgagagcgccaacaaccaacacagacccaaaaaacaggagcccggcaaaagaggccagcagcacaaccagacaaggaaaacccccaaagccaaaaaggccgcaggcggacgccaccaaagggaacacccagggggagggggcggggaggggagaggagggagggaaaggggggggaaggggggaaggggagaggggggggggggaggaacaaacagcagaagacacaacacccacaagcgcccggacacgagggacaaccaggccgacggaaaaaaaaacacgaaggaaggaacgccacggccccggggcgccggccgcacccacaggggccaggacgcaggaaccgggacccgggagcgaggaggagcaggaggaggaggaggagcaggaggaggaggaggagcaggaggaggaggagcgagcggagggccggcccccgcacagcccacacccaaagggccccagggcaaggagacgcgcaacgcgcagccgcagcacagcagcaaacgggggagggaggggacggcgggagagaggagagagggggggagggaggcgggcgccacggacggaaggaacccggccacgaaggcagaaacaacccccaga

SEQ ID NO: 579 - RNA, 1333 nt, Mus musculus
gcccgcccaagaccaggcagagacagaagcgcagagccgacgagaccaccgaccaaagaccaaagaacacccccaagcagccccccccaccagaggcaaccgaaacaccgcagagagcccggcgcaacaaaggaacagaacaggagaagggaaagcacacaagcacagagaacgaacaaccaggcagcagcgcacccacacggagccgcaggcccgacaccaacccacccacagaaccggccgcagagggcgagcccgacagaacaggaagccagaacggcacaagcaagccagacaccagaaagcgaggcaacccaaagccccggggacaaacacaggagaaaccggagcacccgaaaagcgcaagaaaggcaaagagacagaaaaaaaacgagccaggcaggcggagcacaccgacccagcaccaggaaacagaggcaggggaccgagcaaggccagccgacacagagcagcccagaacagccaaggcacacagagaaacccgccaaaaaaaaaaaaagaggaggaggacggaagaagaggaggaaggagaggaggagggagaggaggaggaagaggaggaggaggaaggagaggaggaggggagaacggaagaaagccaaggagcaagaacacaaggaagaagaaaaagggaaaaagaagagggcgaaacaaggaccaagggcaggccggaagggcagaaggagccagacccaaacggagcagggagccaccagggggcgaaaaccgaacggggccgaagagaacaaagacaacccccggccaccccagacccgggaaaagcaaacagcgccacagagaacagcagagcaccgaaggacgagggaaaaacgagcaaaaaagcaacgaagaagaccggggacaccgaagcccgaggagaggaccaagcccagggacccaagaaaacaccaccgggaggcaacaccaagggagcgagcccaacacgaacagaaccgcccaaacccagccaacggacaagcaacagaaaaaccaaaggcaccaagcagcagagacaacgggcgacgcagcaacaaaccacaccacccccacgacaaaaccacagagccaggcaggcccccaaaggaacaaggcagggggacccaacaaaacaaacggaaaaaaaaagaggaaacccaggaaaacacggcggcaaaaacccgggagaagcacaagagaaaaggcggagcgcaccagcggcaacaacgaacagagaaaaagaccaggaaacgcggaagggagaaagacggagggaggcagcaggcaggcagggagaccgagcaggccgggggcagagcaagccacacagcgacag

SEQ ID NO: 580 - RNA, 533 nt, Mus musculus
gaacaacaggcacaaagacagggaagcaaggaaccggaagcccgggcaaaggcaaacagacagaaccgcgaggggaaaggccacaacggaaaggcaaaccaaaccaggagccaggccaaggcgggaagcccccgcaccaggagcaggaggccgagagagcgggccggaaacccggggccacaaaagacaaagccagacaccaacacaaccacgagcaaaccacagcaacacggagggacccacacccaccaagacgaagacagcagagagaaagggacccaagcccaaaacgcagaggagcacggacgcccaaaacaccaacagagccgggcccaaggccccagcaggggaaaagaaaccccgaggcgaaagaccgaggggaaaaaaaaaaaaaaacaaacaaacaaagcaagaagaaaagagaagggggcaagacagccgggaaccggcgcaaaacagccgagacaggcgcccgaaccagagacgcgcccgaccccccccccgcagagcgggaaaaggggacaacaccacca

SEQ ID NO: 581 - RNA, 311 nt, Mus musculus
cagccacacaaaggcaggcacagaggcgcagggccggaacaccacacaacaggggccaaggaacgcaccggccgaagaagcacaagaaaacgagagcccaggcaggaacaccaaagacgggagaaaggacaagacgaacagccaggacggaagggcagcaacgaaaagaggcgccaaaccagaagcaagaaaagagccaaaaccagcccagaaaaaaacagcacacaggaacccaagccgaacggagaacgacacagacaacaacaacagcccaaagacacgaaggagccaacggaaacacaaaaaggagg

SEQ ID NO: 582 - RNA, 825 nt, Mus musculus
gagggcggcccagcaagcaggaccaggcgagagaagcagggaggaagcgggaggacgcgggaacgcgggagaagaagaggcagccgcaggagacggcggcgcgaggcaagcggaccagaggggccaacaacacggccacccccagcagcaaagaagcaacagaagaaaccgcccgccccgaaggcaccagaacgcagggaagcagaaccagaacaaggggggcacccaaagggacgaaggcgcaggagcaggggagagacaacggaagagagggaaaccagggaaccacgaagagaaccccccccccccccccccagaaacaaccgcccaaggcccaggaggaaaaaagaacaacaagcagaaaaaaggacaccaggcggcgagaggaggaccccacacacccaggaaagccggaagaaagaggccagaagacagacaaggaccccgggcagcgaagcgccggcaggaggaaagcaacccacgccacacacaagcacccgaaggaaggaaccccaggaggcaggcggggaaggaacgggccaggcgcagaagaggaaccggcggagaggaagagacaaccgcgacaacgagaccaccgcacaagagaggagcagaggagggcgggacagcacgggcagaccgcaacgagcagcgacccaccaccgggcccccgccccccgggagcaaggaaaaaccgcaaccacacgcgcggggggggacgagacagggccggagcccggcaccggacccacgagaccaggcggccaaaacagaaaccgccgcccgcccccaaggcgggacaaaggggagccaccacaccggcac

SEQ ID NO: 583 - RNA, 46688 nt, Mus musculus
gaacggaagaacccacccgcgaaaaggccccgagcaaaccagccacgcccccacccccccccaccccccccccacccagcagggaccaccacaccccaagggaggacagacggggcgcccacagaggaggaagggggggggcggcgcgacgcagcggacgcagagccggccacaggcggcggccagcccgcgcgcggaccccgggccgcggccggggccccccggccccaccccaacccccccggcccccccagacggccacccccagcggccggcccacaagacccagacacaacccgggcggcgcgaccacgacagaagcggggagagaaaccccggcgccggcgcccgccgggacaagccggccgccaagccgcccccacagacacgcgggcgggaccccgcagggcacgccccacaggggagcagaacggccagaacaaggggccaccagagaccggggccacggccagccgggccgcggccagagcggggccggagcaccccaaccaaggcaagcggggccacgggaaagggggggggcacaagaccagcaccgggcgggcagggacgggcggagagcgagcgaagcagagcacaggaaggggggaaaaagggacgcaccaagacccagagcccggagaggccgcccaccggggaccacccaggacaacaggcccaggaaggagccacaacagcgcccgcccaaaccggcgcacaagaacacacgggccacaagcacacgacgggccagagacagcaggcggaagaaggaagcgacaggaaggagaaaggggggggggcaggccacccgagccagggcccccaccaggacccagccccgccccagggcagggacccaggggcacccccaaccgggcagcagaagcaggaagcgagagcaaggaggcggccgggcggcagacaacacaggggagagggagcgagggccgggagacagagagagaggaagccagcgagccgaggacaggacccaggcaggagacccggccgcggaggcacccgagacacagcagggacgagggggcaggcacccaagcccagccgccgcgggagggagacaccgaccagggagggcccgccccacgaccgggcccacagagacagggcgccgcccgccacccaaagccaggggccaaggacgggcaaggaggaggggaccggggcagacagccccagcccgggagcagagcaagaggaacacgagaaggggcccacgcgggagggcacagcgcagccggaggaacaggagaggcagggcccggcgcgcgcccaacccagggagagagaaacacggagcaaaggggaccgggggcgcccacgagcagagcgccggaggaggcccggagagggacggcggagccacaggggagggagccagccggcgaggcccacaaggggacagcacaaggcaacagcgcccgaaaagggggaacaaggaagaggaaaggaaggaagggggaggggccgccgggaacagggaaggaaaggcaacacaggcgccgccacggggcagggagaaaggggaggccggggcaggaacacccagcacccacggggggcaggggaaagaggggcggcaggagagcgggcggaacagggggcggcccgaaagggacagccggagggggagggagggagggacggggggcggcccggagggacggccggaggcgggcggaggggcggggaggaggggcggccgcaaggcgcgggagggccggaggcggagggggggccgggggggaggggcggagggggcgggcagagggggagaagccacgagggcagcaggcggggacaaaacaagagaccgggaggcacaggcaccccgggcccagaccccccacccggggaccgggagcgccacggccggagccaccaacaggcaaggcgccgggggcagcccagcacacgcgcacccaacacggagagaccacagccggaaaggggcggggaccaaccgggcccggggcagggaagcacgcgaggagccacacccaagccccgagaacacgaaaaacaaacccacaagaagccagggcccccagccagacaaggacccagaggggcaggacgcgccacacagcaagcagcagaagccggagaagcagggggcacagggcaccgaacaaggggacggcggcaagggagggagaggccccagcgaggaagaacacaccgggacggcgaacacagagcagaaccaaaccggcggggccggggcgcgggaggcccaagcggaaggcccaggagagagcggccgggggaaccagacccgacacccccccagccgggaaacgaagggggcagccccacccgcccccacccagcccggggcgcaggcagcaaaaccccccagcgcccccgaagaggcggaggcagacagaaaacccaacagcaggaaacgaggcaaagaccacgcagcggagccgcggccccggaccagcagcgagcccgccgcccgcccggggcgagccagggcaccccacccaggccaggccgaaacaggagccgaccccgcccacacagaggggccccagggaacgcaccggaagaccgcggaacccagacaagccacccaggaacaggaaaagcgcgacgagcaccgggcacgaagcacacccgggaagaagcacacacacacgcacggcaaaacaccacccagagcaaccaacacggagcccaacccagggccgcacagcagagcgaccgcgggacgcccccggagggccacacgaccccagagccgcccacccagagagagagccgaccacacccccacacacagggccaccgcaaccggcccgacacacacggaccacaggagcccgagccggcagcacacagaggagccaggaaagggcccgcgaccgaggcagcgggagccagaagccggccccgcccccgggaagaagcaggacggggcccggagcagcagcgccgaggcccagccaggcgaagccccagacggaggggacagggaggagaggccaccggccacccggggcagggccggccacagccaccggggcagagccaccaccagccacggccccgaagcgcagcacccgggggaaagaaggagaggggagaaagaaggagaaaagcaagcagggggaggggaccgcccacaccggaaacaagcaccacaccccgcaagcaccccgccccggcccggccgggcgccggcacaggacccacagagggaacggccgaagggacccaagcaccaagcggcccaggccagggaccgccagggccgacgacacccacccgccccagaagccagaacgccgggacgggagccccagccggcagcgcccggaacacggaaggggaccaaagcccccgcccgccccgggaggcacgagggggacagggaaggaggccgaggcagagggaggagccagagcaagggccccaacaggccacaccccccccggggaccccggcccaccagccgaggaccagggcccgcgcagccggcaaggagaggaggacaaagcgccgggcccagcggcagcggaggaagcagcccgagcccagaggaccaacacaaggccaacacaaagacaaagccccacccccgcccagaaagaaccacgagacggcgcaaacgcggagcagccccaccgaagcgcccgggagcccacccacgggcaaccggcgcccggggcgggacagcacacagaaagccgacgacgggaggagggaagggaagagacccggaagagagagcgaggcgcagagacgggaagggacaagcacaaggccccggggaagggagcgcagccacaggggggggaggaagacgaggagaggacaacccaccagacagcggaggggagaagcagacgaacaccagagagccccaccaacacaccgggccaggcgcggggccggaggcccacacagaacgaacagggcgcagcgagagacgagccagggagggcccagcgccgcccggccggagaagcgaccaggcccaaacacaccgcaggccccccggaccaagagggaacggccagcccagcgggggcgaccccaacaggcggccggccgcagcaccacagaagacacgcacagagcacagccggaacagaagagccccgcccccgccccgccccgccccgcccccgcccggccaggcggagacgggccccacagagcagagccggcccccgacccccagcgcgcagaggacgccgagagcccacagaaccgggacagaaaacagccaagcacccacgaaagggagggacggaggcagggaaaccagaccaccagagcagaggaaacacgggaaacccagcggagagggcgcggaacagcgcggcaggaccagcaagaagcacggaaccaaccacgccaggggcccaggcgcgcgcacacaagacaagcgccaggggcgcgcaaaaagccacggaagaaaagggaagagacacacacaagaagaggacgagaaaccaacacaaacgcagcacaagaaagggcaggagagaccagcaggaaagagagcgccaagccggcgacgagcgagccccggacccagggggaaagcaacccaccacaaagaccgaccccagacccagggcccaggacacacgccccccacccaaaaaaagccaagagaagaaaagacgcacaaccgagcaaaacgccccggcagaggggggggggggagcggccagcgaagagcacagcgccgcagaggaccaggcacccccaacacacaggggccacaaccacgaacccagggcacgacacccggcccgcaagcaccaggcacaggggcacagacaacaaaggcaaaaacagcaaacagcaaaaaaaaaaaaaaacaacccaaacaaaaagagccaagacccagccccggccccgccccgacagcagcgaaaaccgcgcacccaaagcgagggggcacaaacgggggcaacgggcgagccaaacgccgaaaagaaaagagaaagaaagacaccagaaaaaaccaaagggaaaagggggaaggaaccggagcagaagcacgggccacccggagggccgaggagagagacacccaggagacccggaccaggcggggaggcgggcccgggacaaacacaacacacaagaacccgccacgagacagggccgaagcccggcgccggaaccacgagccaggcggcccgaaccagaaaccgccgcccgcccccaaggcgagaaaaggcaggccaccacgcccggccccgccaccgcgaccgcaggagcccccaccccagaacccagcccgaccccccgcccagaccccggaacacgcacgccccggcaccagcccccagcgcggcggcggacacggggaccagcgcagagagccgcacacagggccaaagaaagcccacaaggcagagaacaggaggcggagaccggggggcgaggcagcacaacgggcacagccagggcgggcgccaggccagggcccggccggcccagcggaaagaccccgagccccggcgccacccaacccagcgcaacacccgaaaacgcggaaaaaggagccgaccaacaaccaaaaaaaggcagggccacacacccagacggaggcggcgaaccaaagacaaggagacccgaacacgacccgcccagcccgacccagggaggaggcccgagcccaggcgggcacggggagggccagggcggcagaaagcaaaacccaaccagccggaaaaaacggcgagacagggccgaaccgagcccgggcgacggggaaccaaccccgacagcccaccgcagcaggcaggaccgcagcacggaacacgccaggacacggggacaacgcgcggccgcagccaccggccggcccccccggcccccagggaccaacccaggagcagcggagaagacacagaaaacaggagcacaggaagaggaaggcaagcaagacggagcgcccccacgaaccaggcgagccacacccaggggaggagcaggagacacccagccagggccgggccaccacccggcccacggccggcgcaggcggcacagccagcgccagccaagggacccggggcagaacgaaagcacgagcggcacaaaggcagaaaacaagggacagagggagccagaaaagacaagagcagggcaaaggacacccgacgcccagcagcccacccaagccccgcgccacccgccccaagggggagcccacaaggacgcggcgcccacccccgccccccgaggccccaggccacagcccccacagcgcccaaggccagcgaacacagccacacccgcgaaccacaccccccaaccgcccacgcggcaggcaaacaggagagcccgagaagaaagagcaccgagaagaggggaaacaaaaagccaaagccggcggggggcgcacgccacccagcaccgggaggcagaggcaggggacgagcgaggccagccggcacaggggagccaggacagccagggcacacagagaaccccgccagacagcacacgcacacacgcacgagaaagagcacacaagaacagagaagcagaagggggccagggcaaacccaggaagggacaagacaagcgaccccgagccaccgacccaccccgcaaggagcacagcagaaccagcccgcgcacaaaaagaaacgacaaaagccagaggaagcgccgcacggagaacccaacaccacacccagccagacacagaagacccgggagaaaacgagaaaagcaccccagccaaaggccacacaccaccgaccagggaagcaccaggagcacacggaaaccccacccaaaaacaggcggggccgagacagggccggagcccggcgccggaaccacgagaccaggcggccgaaccagaaacgccgccgcccccaaggcgggaaaagaggcgccaccaggccaccgggcgaaacaacaccggcagaaaggaaccgggccaccacaccccgcgcagaagacccagcaggacccaccaggaagacacaagaaccaagcgaagcaaaacagcaagcaaagagccgcgcgacaaccaagggaagcacccaaggcgggggcaggaaccaagacgcgcccgcaaacagcaagggcccccgagccgggccgccacacgacccgagccaacaccccacacagccagccaccccggccgcgggggacagggcccacaggcagcagcccagaggcgccccagggggccaaaccaagacacccagaagccgcagaaacgaccaaccaccccaagacggagcacagaccaccggaggcgaagacacaccccgccaaacacagcagaggcacaaggcccgggcccagcacccggcggcccgccccgcgccagccagggggggccccccccccacccccaaggcgcggggggggggggggggggggggggggggagacagagagagagagagagagagagcaagcacaggaaagggaccagggggggaagcagaagaaacgggggcgccacccacgcgagcaagagggggcgaggccaccacggaccccaggcagcccgggccccaacaacccccaacaacagagcccaaggggcgggggacaaaccaagccccacgcacagaagcacacacgcccaggccccccccaaccaggccaacggccccccgaccaccccacgaggacacagcggcagcacgccagccaggccgggggggacaagcggggacaaacagccggagcgccggaacccccgagaccaggcagccccaaaccacagaccaccgcccccggagcgcgggacaaggcagccaccacgcagcaaaggaacaaaaagagagaaagagcccaggaaaaaccaaccccaagacgggaaaaaaccaaaggagcagccagcagacaaagcaaaaagaagccagacacagagacccacacccccgccccgccccccccccccccccccccccccccccaggccgaaccccagcagccgaagcggccggaaccccaccccgccccccccaggcacggcagggggcaagccacacgagcaggaccggccccgaggaccaccacagagagaccggacacggcggggccaaggcgaggggggggacgcgcaggggagcggggagcgccgggggggggggggggaaaaaaggcacaggaacagggccacaaagacgccgcacccgcccagccccggccaggaagcggaggcaggaggccacccagaaacaaccaaaaacaaccaaaccaaacaacaaggagaaaaaaaaaagggaggccaaggcgacgaaggagccgagaaagcggggcagggcgccggagacagcgcccaccggggcgccccccccgaccggcggaacgagcccaggagggccagaggagagaaccggccccgaaagaaccccccaaggagcccaccacggaaaaggggcgaccccccaaacaaccgacgcaggggcaaaacagaggcccagaggcagacggccggccccagaggacgggaccagacagcagccccacaccgcccccgaggcccgccacagggaaccccacacagggagcaaccaagggccggaggaccacagggaggcggcggggccgcacggccagggacagcacaaaggccgggaagggcacaggacgaccagaggaccccagaaccaccccacacccggcccacccgccggcaccgaccagcccgaccccggccacaacaagccccgagagcggaaaagagaacacaacagaaccgacccccgcccagaacccaaagccccaccgagacccacaggaaagcaaagcccccccccggggaaggcaaaagccccaccccaccagcccccccccccccaggacggcgcgggcccccacaacaggccaccccagggcccgcacccgcgcggcccagaggaccaccccgcaccccgccccaggcccgcaaaggggcccaggaaccccggccccaaaggcgccagccccggaagcccccagcaaaacacggcggggccgggcccagccccggaccagaacagacagcccaggccgcggagggccgcagccggggggagggggccggcaggccggcacagaggcccagccgagcccgcggggaggcaacccgcgccggcccaggcccggggacagggggaaggcacggcgccccccacccaggcacgaccaccaccagcccaccccggcgcccgcccgaaggaagcggaggccacgggccacagggaccaacaccggcccacccgccgcggccaaccagcccccccaaccgagaagcccagcccccccaggaagccacccaagagggccccaggccagaggccccgccgcaggcccagcgagagccacccgccagaaggggacgagggaaccaaggggcgaaagaacacaccaggccaggcaggcccgggcgggcaaaccgccagcggccagcaggagggcgaaacagaggaacacgggagccccaaggcgaaaaaggaggagccagcgagcggagcaggcacgccgcccagccgcccacacccggggacagcccggccccacaccccagcccaggaaaagccccacaagggaggcccgccaagggaggacacgggagcagggcccgggggagccaaccagagggccccagcccagccagggggagagggcggcaacgaccacggagagaaggccgaggccccaggccggccaggccaacacaaagcacagcacacgccggcggggaccagaagcccccgcggggccagccagcaccacagggaaagaaacgacaccagagcgacacagggaccggggcccgcccgcccccccagccccggccagcacaaccacacccacccacccagcccccccccccccccccccccccccccccccccccccccccccgccaccccgcacgcacccacccaccacaaccagacccacagcacgcccgagccaccacgaaccccacagccaccgccacccagagccaacgcagaaacacaagcagagcagggaaggaagccacgagggagcccaggcagagaggcggggcggcggagggcgccgacaaacaaacaggaggggccagcccacgcaggcgcaccagcaggcaggggcaagaagagaaccagcgagcggacccgagcgagcgagccagcaaacagcaccccgggccgccaggccgccccgacccccaggagaaccggacggaaggaagcgaaaggccccgaaggcggcaggaacacagcgaaaacaagaacacagccacccggccacccccgccagaaaccacgcccaacaaagccaagcgcccacccccagcccccaacccccccacccacgccaccaccaccacccacccacccaccccacccacgaccaccagcacgcccagccacacccacaccaccaccaccaccaccaccacaccaccaccacgcgccacgccgccaccaccaccgcgcgcgcgccaccacgcagccaccaccaccaccaccaccaccaccacgcgccacgccgccacaccacgcgccaccaccaccaccaccaccaccaccaccaccgccaccaccaccacccacgcaccaccacccaccaccaccaccacaccaccacccacacacacaccaccacacccacacacacacacacacacacaccaccaccacaccccacccacacagaccaccgcgaccacacaccacccaaccacgccccccccaacccaccaccaacccccccacagcagcacaccccaccgcaccaccccccacccacagcccgaagcgcggggaaccccgggagcgggcggagccaggaaaggcacaaaggccaaggccaagaaggcaaggagggaaacagccgaggcagggaacacaagaggacagaaaaaaccccccaggcacagcggcaccaggggagagcggacgagggggcagcaggacaaggaaaagggaagagcaaaaggaggcaccaaaccaccagacacacagacagacagacagacagacacacagacagacacacagacacagacacacagacacagacacacagacacacagacacaacacacacagacacagacacacacacacacacacacacagacacacacagacacaacacacagacacacagacacacagacacacacacacacacacacacacacacacacacggcaggcacacgcagcagggccgaccgagcacccagggcggaaaccaccccgggcacgcaggaagcaagacccaaaagaagcaacagggaccaggcaccacaagaacaacccgcggcaagagagccagacagaaaaaccacacggccacagggccagcgcgccccagcacccgcaagcgggggcccagccacgcccacccagaaggaaaaagaagccagaaccaacagccaccgccaagacccggagggagagggagacaaagaaagagacacaaagcgccaacacgccccaggcggagagcacaaaggccaccaaggggccaagcaggaaaaaaaaaccggccagaaaaaaagaccaaacaagcgacgaggacgacgcccagacacacaaagcccccgcggaagggaccacagggcggagaacaccaacgccccagaagggcggccaaaaaacaagaaggggcagcgcggggccagggggagcgcgagcgacgggcagcacacaccaaaggacagaagaacagagacggcggagagagcacagaaaggcaagcaggggaccgggacggaccgaccaacacgccacgagccagccgcccccgggaagacacacaaaccccccccccccccccccccccccccccccccccccccccccccccccccccccccccccccccccccccccccccccccccccccccccccccccccccccccccccagaagaggaaaagcccggaccggaacgcgagaccacgcgccgaaacagagacacccccgcgcccccaggcgggaaagggcagcgcaccacacgggcaaacaaagaaaagaagaaagggggcacggggggcaggcacccagagcacaaccgggaggccccagggacgcggggcgaacgggccagaggcaggaagccaccgcaaacccagacgcggcccgcagaagcacaaaggaggcacgggccaggcgagccccagacaccacggccaccccccaagcaggcgaaggcagcaagccaaaaagaggaaccgagcacgacgaaaagaaacgcagggcgaggagaggcgcccgggacgcgaggagccaagaaggagcgaggggaagcccccgagggggagcacccacccaagggacaggcgagagaaagggggagaggagccgacgagcagggaccccacccccgcccccgacccgcccaccagagggagcaagcagcgggccgccccagccccagcacagcgcaccacacccgacacaggacagcgcccgaaaacggagccagagaaacccccccagaagcgcaagggggggggggggagggggggggggggggggcccagcggggccccaacaggacaccaagggcaagggcccaacaacaccaaaacgaaacggacaaaaaaaaaaaaaaaaaagacgcagccaggcagggggagcagccaacccagaccggaggcagagcaagcagacggaggaggccagccggcacggagaagccaggacaggagggcaaccaacaacaacaacaacaacaacaacacaacagacgcaaccgaaaacgggcaggggaaaacaagccagcaccaggaggcagagacagggagaccggagcaaaggcagccggcacaagagagcccagcgcacagggcaacgcccacccccagcggcggaggacgagaggcgggcgggcgccggagccaagaacagggaaaggagagacagggcaagacagggggacagaagcggggcgggggaaaaaagcgggaaggcagacagacacccgccccccgaccaccccacccagaaaagccggggcccagggggcaccaggcgcgaagaaaagacaaggagaggcagacgcacgaaaacaaaccagccgggacccacacggggaaggagcaaaccagcccgcaagcgcccggccaaggcgggcggaacacagcccacaaaaaaaccacaaaaaaagaagaaaagagcaaggagacgaaaggaaaaaaaaaagacagagacgcaaaagaaagagagcagaacaagggaaccaaaagcaaacccaagaaaaggaaggcacagacagagagaaaagaacgcaacaagaggcgggacaggagaacacaaagcagaagcaagagcaaaacccacccaggccacaaaaaaagacagaaagcaaaggaccggaagaagcacaggaaaaccaaaagagcccacagcggcgccccgccccagagagacaccacacaaggcacgggcaagcagcccagggggccgggccccacaagccgccacccgcgcgacaagccgcggagcccagcgcaagcaccgcagcaggccaggagcagaggcccacccagccagaagcagggaaggagccaagcaggcacaaccagcagagggagagaccgaagcaacccgacggccgagccgacccggcacccccaaaaagccgacgagagcagaagagcacggccgacagcccaggcaaagaagaacgaggaaccacaagcacaccaggaccagcacaagcaagggaacaccaggcccagagcccccgggcccaggaggcaagccagcccggggaagccagccgcccaaaccaccaggaagcgagaggcaggacaggaggcggccccacggcgagcaagggggcagcggcaggcagccccacacgacccaaccacccaccacagggcaccggagcgcaggagcggcccaaaaaggcgcggagcacgacagcgcccaggccacacgacacgcgccgcagggcaagagggcccaaacagccaagggcacccggacaagggggaagcacgcacagggcggccgcaggccccgaaaagcaccacccgacaggcccgccggaaagaaccacgccacccccccccaggcaagaacaccgcggaccccacagccagggcgcccaagaaacaaaaccaacaggaggacaggacaggggccccaggcgccgagcccagagggcggccgacaggaaagcgagaggaggggagcaaggcagggggaaacggcgaagcagacaagggcaaaaaaccagggcggggccggccaccagacacggcggacaggaggccaccgcggaaagaggcaggggggcaaagcacaaaaaaccagccgaggccaggcagacgggaggcgaggcaggagggcaggcggggcagagagagacccgccccgaaaacaagaaggaaagaaaggaaagggcagggggccgcgacagaggggggggggaagcacgaagcagcgccagaagagcagccgagggcaagagagagccccagagcccaaccaacggccacccacagcaggaacgccaagcaagcgcaaaagagaaaggaaaggacacagggccccaggagacagccagcggaaagagccccggacaagcgaggaacggccacccagggcccacaaaaggggacacagagaaggaccaaaagcgccaggaacaccgagaacaagagagagccgcccacggcgaggaccagaggaaaaagagcgggaagaacaccaggagaaacgccaaagaagaaagggaaaacaaaaaggaaaaaaaacacaggcacaccaaccagcgcagagaggcaggcaagcacacaagagaaagccagcgggcaaggagcaggcacccagggcacacagcaaagcccccaaaccacccccccgcccccacccaaagaaacaaagggggggaacggcacagaggcaggaccagagcccagaagagaccccggcaccccggagcggagacagcagccgggaacgaaccaagccaaaaagggagaagcgccaacgcgagccagcccagccagaaaaaaaaaaaaagagaaaaaaaaagaaaagacagaaaggaggggggagaaagcagagaaaagagaggagccgaggcccgcaaccacgaaaaccgcgagcacggggcccacagggaaggggcgggagcgaggaggcaggcccggccccgggacgagaccgggcagacaggcagacagacagacgaccccaggagacccagaggaaggaagaccagggagaacgggacagggcgccacaggggccagagaaagcccaagggacggagcgaggcccaaaggagaggagcccccaaaagagccccccaggcaccagccagcaggcagaggccccaaagccccaaccgcgacggcagcccaagagaaccccgggcgccgagcccgggaacagggacccggaaggcccccagaacaggggggaccaaccagaagggaagcaaacgaaaagcccaggggaaccgggaaggcagcagaagggcgcaacccggaaacaggggaagcagggcccagcggcaggggacacagagccccacgaaggagcaggagcagagaacaggggaacggggggggcggcagcagccacacagccgcaaacccaccagcccagaacccggcagcaccccccccaggaaagccccagacagcgagcagccagcagcccaccaccgcgaccacaggaacggaaggccccgcccacggacagcaaggcgagcccccggagggacacgaagcaagacaggaggacaccaggcaggaacagaagacggagagcaggcggccgaacaagcaggacggcccaaggccggccccaggacagccaggcaaagggaccaaggacacgcccacacacacccccgcgagccccgagggacacgggccagcgccaggaggacggagggaagaaggcgaggccggaagccggcaagcgccgaaaggaagagaaagcgggccagccacaagcaacgggaagacggcacagccaccaaggaggagggacgggagcccgcgccgcagggggaggggcaggcaagagacaggcaagcaaggagaagacagaaagggacacgcaggcccgagggagagagagacaggggaaacggagggggcaagggcggcaagggccaacaccggggccaaccaccacgccgcgaggcacgggaaccagagaagccaaggcccagccgccgccccaggccacccaggcacggggcccaggcgggaccggcccaagccccacccgaaaccggcccagaaaacaggaggacccgggaaccgaggcacggggaagcccagcagggaccccaacacaaggggagagaggcggcggggaacagccggcccagaacccggcgcccccccccccccccaggcgcccgcccgccgcccgacccacagcgcacccgccaggccaaaacccccggcgaaacccaacacaaaagaccacacaaagacagagggcggaggcgaaggagcacgagcaaaggcacggcgccaggggaggcgcagaaagcccccacgcccaggaaggggaagcaaaaacccccccacggcgccgcccaggcccggaagccgagcgcccacacgaaaaaagaccgaagcacccggagaggaccagcaggccgacgccgaccaaagacaagaaccaaaggccggagacaggcccagcagggaacgcggcgacccgggcaaacacaccccgggcgccaagggggcggaaggaaagcgagcgcagcagggaaccgcggggagacaggccagcagagcgacaccggaacagaaacaggcggccagaaccacagagaccgccgcccgccccgaagcgggaagaggcacggacccccacgcccagcaggagggacaccaacaaacgaaaggggccgggcagaaagaggaggccagggaggaagagaaaggacaccagccacccacaggcacccaaggcaccgggacaacaccaaagcagacagggaaaaaaaggggggagcaccaaggaaggccggagagagccaagaaagcaccccagagaccaaggccagagagacacaggcagggcaaagcaaggggaaagagcccgacagacagacaaccaagcaacccgcccggaccccccccccccccccccccccccccccccccccccccccccccccccccccccccccccccccccccccccccccccccccccccgcgccccgaaaggacgccggaaccacagagaggacacccaggcaagaggggggggggggggggggcggaggagggaagggagggggaggaagaggaggaagggggagagggggagggggaaagggagaggggggaggcgcgcagcagcagggggagcagaggacagcaggagcaggcccccacacccagaggcgcaggcgaaggcaggcaccccgcaggcccaggccaggcccaaaggaaacacagaggaaaggaacacccgacaggaacaaaacaggaacaaagcaggacccccacggagaaagcccgaaggcgcccgaccggagggggcagggggcagaggaggacagacagaacaaggacagacagacgcagagagcagagcacagagagcggagcagacgggagagccccagacaagccgagaaggccgcagagaagaaggggggcggggggaggcggagacccgaacacagggcggccacaagcagccccgcagaaacagggcggacccaaacccacccacacgaagcacgaggggaggcgagaggccaggggaggcacggaggcgagcacccaaaccagaccacagacccgacaacagccggggaggggaaaaccaggagcccaggccgggggaggggggagagggagaacccaggaccccagaccagacaccaacgaacagacaccaggccaagaaacccgcccccaaaagaaagggcgagagccagaggaggacggccaggggccccaaacacacacggcgaaagaaccagaccgaaaaagcaagaagaagaaaggagggcccagcccaagaaggcgagcgagaagcgcagaggagaacaagggaaaggggaagaccgagccggacccagcacccagaaagagcgaccagcgagcagccgaagccacgcacgggggggagaaagcagacccagagcgcggcagcggccggcgaaacaccggcaggagagacccgcccaaaacacagaaaggagacagaaaagacacgccgcggcgcgggaagaacacaacacacagaacacacaacacaccacacacaaccgcacacagcacccaggcaggcaacacaacacaggacacacaacaacacaccacacacaacacaaccaccacacacgcgcacacacacacaacacaaccagcacacacacacacacacacaccaccacacacacacacacacacacacacacacacacacacaacacacacaaacacacaggcaaaacagggcccaggagagcaacgaagcaacggccccaacaaagagacacagcagagccaggcagaggcccacagacgggcagccacacacaaaccacagaaaaaggaaagccagcgggcgggcgcgcagcgaacccaacaccgaagaccgcgaaggaagagccaggaggaggccagccggcacagggaccaaagaaacagaagcgacaagggcagggccgcacagcccgcagagaggcaggaagacggagcaggccacggggaccaggagacccggcaaacaaccaccaaacaggaaggaacgagcacaagggagagagaggggggaagggacaccacccagccagagacggagagcagaacagggccgcaacacaaggcacaaaagacgaggaccccaaaccagggaaggacagagaccgaggccggagggcagagggggcaaaagaggaaaaagagccaggggcgggcacaggcaccggacacagggaacccgccgagacagcaaaggcagcccgccgggccgcggggacagaccggagcccgcgacagagcaccacgggggaggaaagcgccccgaggccacagcaaacaccagccccagaaagcgagccaaacaacccaaaccagaggaacacgggagccaaagaacacagaaaccacacaaaagaaaggagaacagaaggggccagggcagggcaggggggggggaaggggggagggaagagcaggggggcaccgggaacgaaggggcccagagacgaggggccgggggggagacgggggccaagcaggcaggccaggggaagggcacaagcggaaaccggaagggggacaaaggacacggagacccccgccaggaccggagaacgcggcccgggacacagaggcccagaaacccagggggcgagggggggggaggggcacagaccgccgcccccaggcccagccccaggggggggcaacgaaacagcacagaagcaccacccagaaacccagggaagggcgagcagccaggacaggaggccggcccaggagcccgaagagcccaagaacaagccgggggccccgagaccccagggccaggcacgaggggccaccccagccgccgccaccgggccggggcgccgcaggagaccccgggggccgcccaggaagccacccaggccgccccggggccaggagacaaagaagaggagaacccgcagcaccacgaccgccagaacaagagccacgcccgcgaccaaggcgacgggaaggccgcaggaagccagcagccgcggggccagccgggcccggaaagcagcccgaggggggggcaaacgccaacccagcacgggagcagggaagggagccggagcaaggccagcggcaacaaagcaagaggacagccagggcacaagagaaaccgccaggaaaaacaaagcggccgagggggaggagacagcagggacggagcaggacccagaaccacaccagcaagaagcggcgccaacgagcacgggaggagagacgaaacagggccacaccccccaccccccccagaaggcggcgacagacagcggagcggagccggcaggagaaccccacagcacacacagcacacacagcacacacgacacacaacccccagcacacacagcacacaacacacaaccccccagcacagacagcacacacagcacacacaaccccccagcacccacagcacacaaaaacacacacacaccccgccacacagacagcaccaccaacgcaacacacacacaaaagacagaagacacagcagagaaaacaaagaaagaaaaaacgccggggacggggggggggggggaggcagccggcccagcacgggaggcagaagcagagacccggagcagaacaaccagcaagagcaagccaggacagccagggacacagagaaccgccgaaaaacaaacaaacaaacaaaacaaacccagcccccgcggaagacagccaggcacacacccccgccccagccaccggagcgcccccagcgagccaccaacaagaccccaaagcagggcagagacgaagaaacgaagcgagcagcaaccaagccaggccagggcccagggccgggccaggcccagcggaccacagccagccagagccaccacagaggccaaggaagggggcacagggagagaggggcggggcccccccccggcccgggaggcggagaagggggaacagggcagaggcccccgggaggaacgaaaagcagccgcagggcagaagcacggccccggccaggcgccaagccagccccccaaccgcagcaaggagagcccacggccggcaggggaaggaaaaccaaaaccacaggcccgccgaggacaggggaagaagcggagcccagggcaccgaccacagcccaggcggggaggaggggcccgccagacggaaagacagcggggccagagcgaaaccccgaagaccccacaagaaaagaaagcgacaaccgacagcgcgagcagggagcggagccacggccagggcccgcccgccgccccccacagccccagggacccccaagcggcgccacccacggaaaaccacacgcacaggagagaggggccgcccaccaggggagggcgggagaggggcccaccccaggacggggcagaggaaggggaggagaggggccgcagaggagacccagagaaccgacccaaagcccaacgcccagccgacccgaccagcaaccaaggcaaggcaggcaggggagccagagcagccagcgcgggagggcccacccccaagcccagcagaggcaaaagggagaagccaggaagaaccccaagccccaccccgccagccagcgccccaggcgcccgggcccccgcagccaaccgcagggcagccccccaaacccacaccagcaaccgcccacccgggcaccccgcccggggccaggcgcccccggacaagccacgggccccggaacgagcaggcccgccacccgccaacagccccgaagccgccgccggagccgggccacggcacgccccggacgcacaggaaggagacaccacaccaccacggggcggaagggcagagccagagcaaggcgggcgccagggcgcagaaagagggagccacgaaaggaaggagagacaggggcaccagcacaggcaggaagcgccgggcaccccgcccccgcgccaagagggcaggagaagcacgaagggaagcaggcaagggccaaggcgccagccaggggcgagcagggcaccaggagccggccccaacacaagggagacagcagggagccgggacagacggggacgggagagacacggcaagggacccaggcccgagggcccaggccgcccgcaccccgcaccccgcccaccccacagcccgcgccacgccacagaaagggaggacacaaagagacacggcccaaaccacagaccaggcacaaaagccccaagaaacagaacccccccccgcccgcccccccagaaccgcgagagaggggcaagacgccccaggaagaggccgcagacagcggggagaggcgggcagggagggacaagaccacgccagaccaggacagcgagccggcaggccgccccgcaaaccaaggagacagaacccaaaaacagacggggcgagagacccgcaccccaacccccagggccacaacacacaagcccccacaggcccgacaacggcaaggcaacagacacaggcagcgagcagggcccaggccgacccagcacccacaacaacaaggccaagccacagcccccagcacagaggcccagcccggagaagggccccgggcccggaaagcccgggaagggggagcggggagcgcagagaccagggcccgaggccgcacacagcaccagccaggccagagaacagggacccagcacgggccccagccccagcagaccggcgcccagccgggcccagacagggaagacccgggcacccagccccagggagcccggcccccggggcccccagggcccgacgaggccaggccgagcagagcgcgggggggcggcaggcagggcagcacccgacggccccggcagagcaccaggggcgccccaaggcggcagcgggcaacaagaggagccagggggaggcaggagaaacgcccaagcccacgccacgaaacaaggcccgaggccgaccacgagagaggcagggccccgacacaaccaaaaagggagcgaggcggacagagccaacccagcacaagaggcagaggcaggaggaccggagccaggagaccaggacacaggagacccagccaaaaaagcaaaggggaggggggccaggggccgcagagaaaaccaggaacaaggcccagaagggcacaaagggacaacagggcaggagcacaggccgcagaacaacaccaagggccaccacggcaccggcgccccgcccaccccacaaacacccgacagggcaaaggggaggagcagagacaaagaaaaagggaccagaaaagggggacaggaccagggagacggcgcaaaggggacaagcagcgagcacgagcacggagaacgaaggccagccagccagaggacaggagggcacacaggacacaggcgggggaggagcccaagggaaggggacgggcgcagggcacgggggccacccggggaggagaggaacggcccacgaggaccacaggaccggcgaggagagagccaggccaagagcgacgaaggagcacggaggacccagcccggggaggagcccgagccccgagggggcccgcaaaggaccccgcgccgccgacacccacagccggcaggagcacagccccaacaggcaaccacgcgcacacccagacccggggagagaggccgaacccgcgccacaacaacaaacacaccagcagccacgggccggcggaagagcagccagggggccgggcaccgcgcacacaacggaggcccagccagaacagcaaagggaccgaaagaaccgaggaagccccgcccaaaacacaaccaggcagacagagaggccggcgcagcccgagcaaggaccaccgggaagaaaaggcacacccaacccgcacgcgccgacgccggagcagggccagacagagggggaagcaacagccgacacacagcccaaagccgcacagccacacagacccgaggagggcagcaggacaaggacaggacaaggagggggagggggggccggagaacaggagaggagacaggggccgaaagaggggagcccgggcaggcaagagggccgccaacccacccccgcgggggccaaccgccgggagccggaggagggcccccgccccaccaggcggacaaggcccgggaccgggagagagaggcggcccgagagggcggcgggggcccagcccgagcacggcaaggaggggccgggccgaggggaggggggcggccgggcccgggcgccagggcccacgcaggccgcacaccgggaaggggcgagcaggccgggcccgggcccggcggggcggcagggggcggcacacgaggaccaggcgggggcggcacaggccaccgcggcgcgggagcacccagagaccaagcgcggggagagaagacaggggccccccaccagccacagccaaggagagcagccacaggaggcggccagcgacacgacaggcgaggcacggcgggacggagaggagccaagccacagccaagcgcccacagcgccagggaccgcgcacggacaaacacacacacccccccccacccaccccagggaaccaaggagaccaaagacagaccaccaaagccaacgggccagcaggggacagccacaaagcggaccggagccgacgcacagccgcaggcagccaacagcgagagggcccccaaggccagcgaccccgggcagcgggcggcgccccaggcagggcggcagccgcagccagaccggcagggggggccggggacgccagcagggacccgaagcacgagaacccgcaaggagcccgggaggaagcaacccagaggaaacgacacacccggcccaggacaggaggacagcgcccacgagagacgcaacgaggccagggaggggcaaccgaagcggaggaggagcgaccaacaccaaccagcgcgccccccaggcccaaagcgggaggccgcacaagacaggacgagcacggagcacagagccggacaacagccgcacgaaggcgggacccaagacaagccaggccccggcgccacgccaaagggagagagggcaaccccaaaggccggcaccgccgaccgacaggcccaagccggcacccaaacgccggcggccccacccacggaccagaggcaggagagacgagacggagcgggccagacagacaggccgccgccggggagcaaggcggggcgcgcagggaggcgacaggcaagcaggggcggggccggaggggccgcaggggggaagcgaacgaggccaaggcccaccccccccggacggggcccgggccaagaggaccaagagagacggaggccccgcccagagggaccacgaccagacccacaccagcgaccagaggcccacgcgcaagaaccgagcacgggaccggccaaccgccgcacagcagacagagacagcccccagaagcccaacaaagacccggggccccccagggggccccgcccggcccggaggcccccacggacccgcccaagagcacaagggccaagcccacgcccgcccccggcgcacccggacgccacaagccggggcagagggccaggaaagggacaggggcgggagggcaagacaggcggcccgaaccagaaacgcgcccgcccccgaggcgggaaaagacgggccaccacgccgaccagagcaagacgccaaggcacgggcagccagcacaccgaccgagagggggagcggaagaggagagaacagcaagcccgaaggaggcaggacagggcccaggggaaggacccagacacaggcggcgaacaggccaaagggcagaagaccacacaagggacaagcccagaggacaagggggggcacacggcaaagaaccgggaccgagagggggagcagggaaacgagggggggggggcagaagggggaaaggggaggcagggggacagccaggcaacaagccccgaggggcgggggggaaggaggagaccggccagggcaggaggcagacaggagaagggacccagcagacacagggagacagcgagcgggcggagaacggaggcaagaaaagagagcgcaccgcaccgccaggccacgccagccacagccaaccgcccaggacacccacgccacaggcccgaccaccaggcccaagccccccgcgccccagccccccaagcccccagcacccaggcccagcccccaggccccagcccaccccgcccgcccccaggagcccacagccccaccccgcggaaaagcgcgggccccgcccaccgacagggggcgggccaggccaccaccgcccggacccagccccaggcggcagccaaggggagccaccagaaacacacgaccccccccccagccagcagggacggagaccccacccccaccgccgccgagccccagacaccgagccccccccccccagaagcagcgggcccagacggcggggagaaggcacgacgcccgagagccaccccccccagcacagaaccagaaggagaccaaaacagaccggcagagaggccccaggccacagcgaaaggcggaagagcgagcacagggcgcgagcccggaaagaggacaaggcgcccgagacgggacggccaagcagggagccacgaccacgacggagacagagccgagacaccacccagcagaaaagccaaaccagccccaaaagcaaccggaccagcgaccgaagcgccgcgaacacccagaaaaaaccagacgcccacacccacgggaaagacccgggggagggcggacacaaggcagaaacagcagcagcgggcaagcagggccccaagccccaccagggagacaggagccccaagacagccggggccgcgagaccggggcccccacagccccaaagcgggagaccaggcaccgcgagccgcgggccgggaacgaaccaggcaagagacagcccaagacccaccaggagcgcccagcccccaaaggaaaaaccacccggggggcgggggagcccagaacgacaggcacaggagacgcacgacaccgcccgcccacccgcccagcaccaggcggcccaggggaacacgagagccgggcggggagcccgccccaggggcaccgccaggacagaagaagcccccccaggaacaagacagagaggcggcaggggagggggaggggggggggggcagcacacggccggaccgcgccccagcagacgccgccaggccacaggacggaagcaagcgcagcgggaacagcagggcaggaggcgcaccacaagcaccggagaccggcccgcacgcgacggagcgacacccggccccccggaggacagcacaccagccagaggaggcaccccgccgcaccagaagccggagcccgagcccaagacagaggcagcccgcggaacccggcagagacccccggccagagaacacacaggacaggagaggcacgagggacacaggaacgggccaggagagcggccacggagggaggaagggaacccgaggaacacagggaggacaggaggggagaccagagagggaagagggagaagcagaggggagagcggagaggcacggaagccgaagcaccgcagccggagcaggagcagagcagcaaggacagagcccaagcggcgcagacccgacaccaagcacgaccggcagccaacccgaacaacaaaacgcagagagggggccaacccgaacccggggggagcgcaccgagaagagccccaaagcccgggaaaagacgcccaaacacccgacgcacacgaccccacaggcaaagggaggagcacccccacaaggcggggacccgggccacaggcccagacacacgaggcgggaaggcgagaggcaagcccccggcagccacagccagcccagagcagacgcgccgggcccagcccgcgcaagccgagcggccgccccaggggcccccagggagcgcggggagggcgggagccagcaaccagaagccaacgagcccagaggaaaaggcaaagaagaaaaccagaaacagaagccaggaccaaaaaacgaggcggccgaaccccagcccccggccccgagggcgggaacggcagcaccacggccgggagcagggggaacccggacccagcagcaggaggaacgacagagccacaccaggcccagaacggcgcgcgcaacacgcagagacaggaccagggaggccggcggccggagcggagagaccaggcacagagccacccgagcgggaaaaggcaagccaaagcggccagaacgggagaacaacaagaggagagcgcaagcgcggcacaggcagccgggccgcagaggcaaaagaggggggcacagaccccgggacaaagggaccgacagggaccaccggaacggaaaccaaaccgggcccacaagggcagcaaaagcaaacaggaaccaccacagcacccacaggaacgagaagcagagccacaaaaacgcgacggacgagccaagccagaaggccgcccggagcaccagaggacaaaaccagcgccaacaggggacaggcgagaggggacaagcgcaacccaggcgggacaaaacaagcaaagaaaaagacaccgcgggcaggggcacagggcgaggcaggaggagggagccgggcagcccgacaagaggaaccgcagaaaacaaagcaaggaaagaaagaccgccacggggaccgccccgacgggacagacagagagcgaaggaacccaggggcccgggccccacacagggaggggcaacggccgaacgaaccagcccggcacggaaccaagggggccacagcccggcaggccccaccccaggccggagagcgggggggaaagccagagagcggccagagaccgcgcggccagagcaagcgggcgcgaccaggggacgcccggaaggaccacccccgcacccagcaggccgggaaccgcgaggcaggagggcggggcacaccccacaccccacgcgcaaaaaaaaaacaagcacaagggaagggccagagaaccagcccgaagaacaggaaggaaacagagcaggggccacagccagccacaccagcccacaagaaagcggaaccggaccggcggcaggaggcccccgccccacccaccagggacaaggggaggaagagaagacaggaccaaggcaggcagaggggcaggcggggaacagagcgcaaacccgcccacccaccacccgcccgaacgaaggaaaaagagaaccagggaagaaggagaagggaccagaccccagggccaggcaggcacggcggggccaggccaaggagcaggcaaggccaggggcgcagggcggggagagacagagagagagcgggcagaaggagaaccaaacacccccccccccgcgccaaggagggggacagggaggaagggcgacggggaagggacccagggaaagcccaggagagaggggcgagagggaggcgaaggaacaacagcaggagcgaaggccaggagccggaaccgccgagccacaggccagcggcagaagccggggaaggaggagagaaggggagaaggcacaaagaaggccaggcgggcaggcccaagagacagccaaggacccggaggaggagggagagccacccccaccacccgcccagccacgcagaagaggggacggcgcggaggcaaagcagagaaacaagcagggacagagacgagcacgcacacaacgcagcccagcaggggaccaaggagagcaccgcacagaagcccacacccagagcgagccacagcccgcccacacgcgccccacacgcccacacagccccacacgcccacacacgcccacaacagccagcagaagacacacaccacccggacccagggacagagcagcccacggaccacacagggggagcaagcaggacaacccacacacacccacaggagacggaagagagagacagacccagcagcaaccccacaacaccacacagacacaacgcacacacacacacacacacacaccacacaccccgacaccaccaccacagccacaaaaccacacacaacacacacagacacacacacacacaaacaacacacgcacccccaccacacccccgacaccacaacacaaacaccaccccccccccccccacacacacacacacacaacacaccccaccacacccccgacaccacagacacaaacacacacacacacacacacacacacacacacacacacacacacacaccagaccaggacacgcccacagaaaccacgcgaagcccgacgagggagaccagccacggagcgagcagcgcccgcgccggcggggcccccaggaccggggaccacaaaccgccggcagggcgccaggcagcgggccaccgcgggggcagacacagcaggagcgcacacaaaacgaggcgacggggccaagcaaagcccacgggcacccccggaacaagggcggccacacacggcacgcacacccacacgccccgccgagcaggggggggaaaggggcagaccaggggaaggaaggacgaaaccaggggacccagagcagcacagggagggacagaggggggccagaccgaaggagaggagaagaagcccagaaaagccacgaggagggggagcagggccccgacaacgagagggaccaaaccccaaccagacaacaagcacgaggaaccaggagcacgaaagacacagagacgggcaggcacagcggaccagggggagaggccccacacccggaagaggaggcagggaaggccggggagagcgaaccgagacagcagcgccaggccccgaccaggacaacccccagcccaggagccacagggaagccacaccccgcagcaggcccacgcgggggcgcaggcgcaagcaggcgagcacccacagagacccagccgcaaaccccagcagaaggaaggcccgaggcgggcagaccgggacaggcagcggagcaacagccccagcccagccccaaagaaaaggacaaagagccaccggggggggggggggccggggccggcaggagcagcaagaggccagggagagggagcaggccagcgggccccccaaaggggggagggacaaagcggggggggggggggggggggacaaagggggcagggcggcagcaggcgggggagggaggaaggcacgggaggaagcagcccagacgaggagcagggcccaccgaacccagagcggaggacgagagggcggccggggcccggccgcacggaaagcaggaccggcaggagagagaccacacccaggccgggggagcgcacccacaggcacccccagacccaacgagcgagaagggccaccgagaccaggagcccacaggccacccgccggcccggggagggcccgccagggagagccggaggcgggcacggccacgcagcggaccgggagcagaggaaaggaagcgcccacacggaagaccggaaggaccacagcaggaacaaggagagacacacacaagggggagagccacaggcaggagaggaaggggggaaccgacagcacccagagaccccgggcagccagcagagacaagggcacgggagagcggaagggacagagacgaagagggcaggcgacacggaccagggcgcccaagggaggcgcagggagacccaagggggaaggcagccaggcggaagaaccacaagcaaagccgaggggagccagcgaggcagcgggcgcaaccaaggccaggcccagcccaccacaggccccagaggcagccgcccccggacccgcccccgcagaccaccccaggccagcacgccccgagccacccagcggcggaggcgcgcgcccgaccgcgaagacaaacagccggcccacaaaagcaacagaggcgcaggccagcccgggcacgccgagagccagccgcggccccggacggccaccggcccaccgagagcggggcaccgggaggacgagggacgaccccccacggaggccagggggcggggccgggacaggagcgccccagcacggagaagaggagccagcaaccccagagacggggagggagaaggcaggcaccggaaccggaagacaggccgaggacccgcaagggagggccagcccagccagaacccccacagcaaagacagagacaggagcccaggcacagacagagggccgcacacagccaccccggagcgcgggggggcggacgagaaggcaaagaggccccacgagagccgacccccgggccccacagcccccgagcccagcccccaagggagggggcaccgcgccgccgcacagggcacgacgaacagagcggaacgaacccaggccgcgggaaggacaccgacgcaggaaggacggggccagagcggggccggcgacccgggaccgggagcaagcaagaggcacaccgccgggagaagacggcgcagagaggcgaaggacgggaacagcaagaagaggaaaggacggggaccaaggaccgggagagccccagagcccgccccccaccgagccaggcacccccaccagccccacccccgcaccccacagaacaccacccacccacccggacccaagccaagggaagggaggccacagagccaaagcagaagccgcccgggaaacccgaggagccagccccagacgacagacacccaacggcaacaacgcccgccgggggccgccgcccccacgaccccacaagagcgcgccacacaccgccgacacccccggaaccagcacacgggccaggggcccgcacccgaaccacggccgcgccacccgggccaaacccagaaagacgggggccaagccgcccagcccccgccccgggggccagccggccagcccgccccagaggcgcccccgcaccagccggcagcggcgccggacccagccacccccccccaggcagcccggagaagccacaggcccacacacacgccgggccccacaccggcaccaggaggcgaggccccaggacccccccgcccagccggggccacaccgcggccgcaaacagaacccccagccgccggggcacaacccagacccgcccagcagggggcggccagggacccaccggcgacaacgccagggaccaaggaaaaagaagggaccggccgaccagcgcagcgcaagaaccaccagggcgagacggcaaccagagacgcccgggcgggcccaggcccaacccagaggggaaagcaacagccggacaaccaaacagaggggacgcaagcacacacagagaccagcccaggccaagcccggcccccccgccccgggccgggggccagggcccacgccccacgagcacagcaaaggccgaggaaacccgggaggccggcacagcaaaaaaccaaacccaaaacacgagggccgaagccagagacagaacgggccgagcggaggggacagaagacgcagcgggggggaacacagggcccaaaaagagagcggggccaccgaaaccaagagcaccaaggaggagaagggggagagaacaacacaccaccccagcccgcccagagccgaggggagaagccgcgaggaggcaaagccagaaggagcgcgaaggcggaggcagggcgggcccaccggggagaggcccagccacaggggagcgccaacagcccaaagggcgaggggacaaggagcagaaaccaccccaaaccagagaagcaaaacagggcccaacccagagggggcccggaggagcaggcggggacaggggagggggacaggggccgcggcacaggggagagaccagaccccacaacaccgaggaaagagaccccaccacccaggggccaacgagcaaagggaaaagaggaaaacaagaagaccggggcagcacgggaggcgaagcaggaggagcggagccaggccagcgagaacagcaagccaagcccaccaagccgaaaaccgaacccaacccagaccgcagcgagggcggagagaggccagaggaagagcccgggccggcagaggaccgggcgagcccagcacgcacggggccacaccacgaacccagcgagggcaccaacaagcacgcaccgggcaaaaccacacaggcaaagaacaagcacaaaaggaagaagcaaacgagcaaagcaaaaccaacaaagcccagcaaaaaaacccgaccaaaagcaacggggggagacgagcgggcacacccaggcacagagacccgagggaggcacagcaagaaccccgcagcgccagacggcagcagccacaacccaggacacgggcccagggacaggcccccgggcggcggccccacacagaaccacaagacaacccccaccccacgccacccccaagacaggcagaccgagcagacaacccccagccagcccccgaggaccgaggcggcagcgccagaggaaaacggacaccacccaaaggagaaggaaaaaaacccacagagaggccaggcagccacagcaggacacgcacacgcacacacacccccgcacgcacacacacacacacacacacacacacacacgcacacacaagcaaagcacacaagaaaaccagcccccaagccccacgcaggacacgcgcggaggcccacgggaccaggcacagccgcacagggcgagacaccaacgcaccacacgggccgccacacgagggggggccaaggccacaacgacaaccggccgacggggacccagccaccacaagaaacaacacaagaacggggaccacgaagcacaggcaggccgaaccagggaccccgcccggcccccaggcgggcagagacagcgcccccccagcggcaggagcgccccccggaaagcagaacagggcccacacaccagcaccgcagaccggggccacagagcaaggaccaagaccgcccagaagcggggccccaacggagggaggccccacaggcccaacacccaggacacagaaccgacggcacgggggaggcacgccccaggaaccaggcaccccgcacagagcaggaggccaccccacagccccaagcgccaacggaagccaacgaagggggaaagacacagcagccaggcaccgggcgcagagcaaaaggccaggacgagcaagagcccgggacagagggacaaggcaagaaccgaaaaggaagggccccgagagccacgccccgacccccccccccgccgaagaggccgaagcccggagcagcacggcgcagggaaaagccggaacagcgcacagcaccccgccgcccggcagcacagcccgcccaccgggcaaaccccgccagcaccgcccagcagacgcccggcgggagcagagcacacccccacggcccaggccccgagacgacaaagaaacgggaaacggcagccaaggcagccccagaagagaggggccaggaacaaaacagagccacaacgcacacaaagcccacggcccacccgggcccaccacccaagacagcagggaaaaaaaaagcggagagaccccgcaaaaacggaaggaacaggcaagaggagacgcggcccagcccccaccaaaacccggcacgcagccacaggcgggaaaagcacaaaccgggacacgaaaaccacaccaaggccagggagagggcgcccaggggccgaagccccacgaaaggcccccaaagaaccaagcacccaaaccgcaggcccagccgggcagagacaaaaccaaagaccagccgcccccccccgccccccacccccacccgcggagcgcccccccgcaaggcggcgcacagcccaggcgccaagacaaaccacaaagacaaggcggcacccgccgccgccccccagagccgcaccccccgagacccaaacacgggcaacccaacagcacaaagggaaggaaaagccagacggcagccgcagcaaccgcgggggcgagggaaagacgcccggacaacaggcgacaaccacggagcaaaacgagcccgcaggaaagaaggcagggcaggaagggcggggcacaaccgggcaaccaaggggcaaagggagacgggcaaacccagccagacagcccccagaggaggaccacgcgccaaggccagagagcccagcgcacaggacaagccaggaccagggaagcccacggccgggacccacaccagcaagccgagagcacacccaccccacgcaacacggccgaaccccacccccccccagaccggaagaacggcgacaggcccaggccggccgcccccgcagagcccccgccgccgcccgccagagaagcacccaaccccacgcgcacaaaggcccgcaccccgagccagaacggcggggagcgcacagccagcccacccccgggaccaccagaccaaagggggagggggaggggagaggaagggggaaggggagagacacgcacacaagggagcaaccgaaggaagaaggagcaggcggaggggccaggggcagagcaccgccgacacacccagccggagacccgggcaccccaaagccagagaggacacccagcaccagggggggcaaaaggaggcacccgacacacagccagaaagaccaacgggcagaaagaaaacaggggaggggggaggggccgcccacaccgagcggaacaccccaagagacgaccaacgggacccgcacagccccaggaccggaccccaaggcaagcccagggccaagggccccaggccacggaggggcgccacacaccggcgcagcccccaccgaacacccaccggccccagagcccagccccgcccgggcggcagccggccccgggaaccagcccccccacgccgccaacccacccacagccacacaggccaaaggcacgcggcccgcaccccaccagcaggggaaggagagcccgaacagaacggggaagaagcagcgagggcaggccccagaccagcaacacggaccgccggacaccacccggaagaccgaggcccaggagagcggagccgggggcagggggccacacggcggcaacacagcaccaccgaggacacccccgacagggaccaccagagacaggacagagccgccaacaggaccccacccagcgccggccccagaccgcacacacccgagggagggcccccggcgaaccccccccacacacacacccccacccccagcaggccccgcccggccacaggaaacccacgcccaaaagccacagccgaccccagggccccaccgaggcgccagcgacggcagggaacacaggacaggccagacccccccccgccccaccagaaaaccgaacgaacggggcgggcccccccagggcaaagcccacggggcaagagagacaggggcaaagaggaccaccccagggccacacccacacagcacgaacaagacccacacagcgagaaaaccaagccagagaccaaggcccccaagcccaacaagagaggggcaagggacgaggccagaccagaagagaaaaacagacgccaggaaaaggaaggacgaaggccaggaggcacgggcagagccacggcccaacggggacggcccagggcagacgcgccacagacacgggccacggagagggaggccccgcccgggaccagcaacagaggccccgcgggcccaggacccggaggagggacgacgccgacggagccaaaacgagcccaccccaaggcaggaggaggccgccgaagccggagcagaacgacacaaaaagagaacagcaaaaaaccagaaaaggaaccaagaaccggggaagaacagggccccacaaagaggcaaggagagggagagacaaagccacacacagccacggagaacggagaacggggccggcacaggggcccggagaggccaccaaaaggaaaggccaggcacagagggggaacacgagaggccccaggcgggagaacaggaagaccggcaggagaaaagccgaacgcagggaccagggaggaaagacggcacagccccggaggaggaagcgacgggacgcccagaaaacgcagggggaagcaaaagccagcgcagaaccagggacggggacaagccccagacagacaccacgcgccccacgcccccccagcacaggacccgagaaaccaccaccccagacccccagccagaggagcgggggcagcggaagaggggaagcccccagggggaccaaagaagccaccgcccccagggaggccccgcagccgaagcacccgcggggaggagcaaaaccaagcagggaaaggcccccaggcgagcgaaggacaacccaaggggcacgggacagcccgagcagccaccagcgggaccgccccacacaaacacaggccccagaggacgagcacgcgcacaagcccgggggccggccaccgggccaaaacgccccgccagggaaacacagccccggccccagcccccaggacagaaacaccaagaacggcaagcagcaaaggccaaaacaagaccagaagaaaagcaaaggaagggcgcgccagggcaagagaccaccgaagcagaccccggaggcagaagagggcaggggccccccccaagcggacacaggaggcaggaacacccaagagggagcgggaacaaaccagggggaagagccagcagcaagcggcaggcccagccacacaggcacaggcggaaaacagggaacgcgggcgggggcaagcgccaccccagacaggaggcagaggaggcagaccggagcaagaccagcagggcacaaggaaaccaggcaggggggggggggggggggggaggcggggggggggggacggggggaaagaacagcagaacagcccaccgcccaggcagcacccccggacacacaccaacacccaggaagcccccccgacccaagcccacaggccaaagggcaccagagggcaccccagccagcggaagagcaggaggagaaagggagaagggaggcccacccacaggagagaggccgaaccaggaagggaggcggggccggcagaggcccagaggcagcccgcccgcccccgcacagacagcgagccccccccccccggggaggggccggccacgcccggcgcccccagaaggggaggccggccccacccaggccaaagccccccccccccagggaagagaaggaagcaccgcacaggggcgggagcaccccgcggcgggggcacagcgccagaacacgccccgccccagcccgggggaggggggagacaccgaaaaggccaagaaccccacggaggaaggacggcccgccaccaggacaaggggccaggcccggccccagcacacacgacacaacacgccggcagccaagcagggcacgggagaccaagagggacacaggaggcgccgcccagaacgacagcgggaccaggggaaacagccgaaggagaccaccgcccggccggcggcgggagaaccggggaagggacaggcaagcggacaggccggaaagcaccggaaagcccagacggcagcacagagaaggacggcgggcagggaaggcgcacagagggcggcacggcaaaggcccgaggcgcagagacgcgagcgaccaggagcagggcagcaaggcagcagaccccggcggacagcccccgcagagggagaaaggaaacacccaggcaccagccgcggcagccccaggcccacccgacgacccagcggccggcgaggcgcggaccgagcacaggcaggggggagaggaaggagggacccagaggggcaggcagaggccaggggacacgcgcaggaagaccagggaaccgggcgcccccggagagcacacccggcccagccccaacgggaaggagagaacaggggagagaagccgaagggagcggaaaagccaggaaccagaaggccaccacggcaggccgaagccgcgggcccaagcagggccgcccggagcagcggggaccgagcccagcccagggcggcccacacgcccagagggacaggcagccaaaagagggggccgaccaaagccaaagacacaaaggaccaggggcccaagaggggccacggggagccagggagcacgagcccagggccagacaagggaacccaccagggccacaggccccaacaagggacaaagggacgagagggcaaaggccacaggccggcaggacaggggacaccacagacgaccgggcgagcagcgggagcaaggaaccagggaagaggggggggggggggaggcgagcccacaaggaaaaccgccagccgagaaccacagaacaaaccacaagcgccacaacacagcaggggcgggggggggacagagagagcccaggaagccggaacccagagaccccgacgagacacaggcacaagcacacaccgcacgcgaaaaagcaaaaaggagaaggagaaccaggaagaggacaggccgcagaggaccgagcggcccagcacccacagaggccacaaccaccagaacccagccggggacccaccaaggacccaaggacacaggcggacacagacaggcacgcaggaaaacgcccaggcacaggaaagaaaagaaacaaaaaacaaaacaagcagagacagggccggagcccggcgccggaaccccaagaccaggcggcccgaaccacagagaccaccgccgcccccaagaaaagcaggccaccaccaccggagaagaaaacaaaaaaaggcaaaagaggacacacaagaccccccacgcagcgccacagaaacaagcccaggcgcggagccaaagcccaaggaacaccagacaaccccggccaggggaaccggccgccccaccagcgcccagggcaccaccaggcccaggcccgccaggggcgaacagcgcacgccggccccgagcccagcacacaaggaaacaggaggcagggaggggccacagagaccaagaacccccagcaaacaccaggagacaagccaggacagagagagagagccaggcgggagagggccaggggaccgacccaacgcaccgcacagggaccaggcgcgaggaagggacagccggcaaccagaaccacaggccggcccggccagcgcagaaagcaggcaaaaagcaaaggccccaggccggccccccaggccagcgggggacgggcacagccccaggcagggacagagccccccggagggccaagcaggccaaacggcgagcggcaagacgccgcccacgggggaggaaggggagggcccaggacagcgccagcagacagcccggggcggcccagcaaggagacggcaacgcaccgcggagagcgggccgaggcagaggcaggcaaagagcaccagaacaggggggcgcggggagggcccggcgccggaccagggcaccacaggccccgcagaagacaggcagacaccaggaggggggggaagggcaggggggggggggggggggggggggggacaccaggcaaaggcacagacgagggagggcacaggggcagaggcgcggggcggcggagaaacggggggaaggggaaggagaggcggagccgggggaaacgggggagggggacaacagggcccgcccgggggcacaggcagcgcccgcacacaaagcggacaggcagccagggaacaccaacagcaccacaccagaaaggcccgggaaggggaggggccaacaccaggagcacagggacagagcgacacggggcccaacagcagggggcgggcaagggggggccggcgggcgggggggacccgacgcacagaagcccacaagggccaaccggggcagggaggcgaccggggcgagacagggccggagcccggcgccggaaccacgagaccaggcggcccgaaccagaaacgccgcccgcccccgaggcgggaaaaggcaggccaccacgccagccggaggcgaccaaagaaaacagaagacacgagcgccagacacccagaagagggagcagaccgagggaggggagccaccaggggcgggagaacccgacccggaagagcagcggggccacccacgagccaccaccagcccgaggcgaccaacagcaggaaacagcaaacacagcccacacacacacagcacacacacacacacacacacccaccacacaagcacagcacaacgcacacaccacgcacgacacagcaccacagcaccaccacaccacacaccacacacacacacagcacacagcacaccacacaccacgcaccacacacaacacaccacagcacccaccagccaccccacgccacacaacacacaggagcacaaacacaacacaggcaccagcacacagcaacagcaacacacaccacacacgacagcaccacaacgaccacacacgaacccgcccacgccgcaccacacacaaagagccagccaacgacgggccagggcgcagcccagaggagaggagagaagccccgacaggagccacacgagccgggcccgggggaccccagcaggagcaggaagcggggaaggcgccaaaaggcaaaggagagggaacgagaacaacaggggccccgccaggaggaggccagccgacaaagagacgaagcagaggcaacgggcagggagccaaggaccagggagaggccagccaagacaggcaagcgcaaggcccggggagcccagggagcaagaagaaacaaggccagccagaagagaagcaaaagggggcggagagcggacacagaacgagggcgaggggcaggagggggggcaggggggaccagggggcccagcaccggagcagagcggcgcgcaccgcagcgggcccagcgcccgcccgccaagagcgaccggcagcccaacgaagccccagcagagccaggcggcggggggccgggccgggcccccggccccgccgagaggggaggaggagggaccaggaaaggacaaacgccaagcccacaggcgcgggcggccccagaggacaagcagccccccgccagagcggaaggagcgcgcgcacaacgccccaagccgccccagagcaggacggcaccacgaaaaccccggccacgcggagcagcgccagcgccggccgaccagccacccgggaaagcccccccagccaggacccaaggagagggccgcccagcccacgcaaaaaaaaagaccaaggaggggggaccaagggccccacggaagccgaggccagagccagggccccaggggagacgggccccccgccagaggcccggaagccgcgcggggacccaggggccacacagacaaacgggcaaagggaaccccagacccccgcggggacaaagagcgacgaagaaagggaacccgggaaggaagccacgcccggcacgccaccaccaccaccaccaccaccaccacaccaccacaccaccacaccacagaccgcccaggcccagggacagcgagacagccaggcccagccacccagagaaacggggcagagagagaaggaaagcggaaaacggcccgggcagggaagcgagcaagaaccagcacccacacaagagaggaaccaggccagcagcaagccaggaggcgccaggggcagaaagaggagagagcggcccccgacccggagagcgaaccgggaaggcgcccaccccgccaggcaccgggcggagcagccgggcccgggaaagcgaggaacagaagaagcacgacacacaaagacccaagaagggggaggcaggggggccaggccccgccaccgccgggagaaggggagggggggaacccaccggccagacagagagcggcccggccccagggcacaggcgcgccaggggcgggcccgcccacagccagaaggacgcccccggccaaacaggccgggcagcggaggcggaagcacggcagcggcggaggcgacaacggcggaggcgagccggcccgcaaaaccccagagacacaaacagaacggcacagaagaaaagaaaaagcaaaggcaaaaaaaaaaaaaaagaaaggaggcaaaagaaaaggcggcagggggaaggggcggagcaaggagaagggagggagagggagagggggccaggaacaacaaacaagggcgcaccgaaggcgccacaagcaacaaacagcaaggcgagacccagggcaggccccccccaggaagccaacgggacacgagcaagagaagacgacgagagagcacggcaaaccagagagaaagagagggccggggggggggggggggggggggggggcaagcacgcacgcccagggagacgagcagggggaagagaagacccccacggccagggagagccccagggggaacggggaagaaaggaggaccgcggaggagggggccgcggaggagggggccgggaggaggggaccgggaggagggggccgcggaggagggggcgcggaggagggggccgcggaggagggggcgcggaggaggggcacgcacgagccccgcccacgggaccagaggagcccagcgcgcccggcccccacaagaacaaaccccggaaacagcaggcgccacagcagccaaaaagaaagaagggaccagggggacaggccgacagggggagggagggaagacgggacgaacggaaacgggaacacgaagcaaagccagggcacaccaggggggcgaaagcaaaggccgagaacaggagacgggagaccacacaaaggacgccccgcccaagaacgccaaggcaaaccagacaggacaacaccacagcagcagcgggccaccacaagcaggggcacgcggaagagacaccgaacgggcaaccggagacagggccagagcaggggccacccacaaaccaccacagcaaagaaaaaacaagacagcgggcgcaggggcacagcgcggcccgggagaggggagcgcccgagacaccggggaagacccggccgcaacagcggggcggcagaagaacagaggggcacgacccccaggccccaacaccgaggacaacagcgcagccccacgggcccacacccgcgcagcgcggaaggccagcaaagcccgggccaggacccaaacagcagagacaccaagcagggggacaacaggagaggacccaccaggcacccccgcaggccgccagaccaggaagcccagcacgagggcggcccaccaagggggaagaaaagcggcgaaaacaagccccacaaggaggagacagaggccccaaacaggggcgagaagaggccagcgcaagcagcccgggccaacccccccgaacccccagaaaaaaacaagcaagaacggagcaggaacccccacagagaacaaaagcagagccaaccgaccccaggcaggccccagaccgcagaaagcagcgcccccaagacaccccccgggccccaagcccaagccggcgaccagccgaaagccagccaccacaggaccgacgcggaaacgcaagccggagagaaaacacgaccaaaggcgcaggaagaaaagcacccccagaaccccagggcaacggagggacacagacacgacgcccaggaggcacgccccggaccagggacaggcagggggcggcgggggggggggggggggggggaggaaccacagccaccagcgccagcggggccacgcggggccgcacagggaggcccagggcccggagccaccccagccgggccacacagggaggaggaagggaggggcagccagggcccggcaaacccccaccaggaggcccccagcccaccggacgggccaccccagcgggcacccagccaccacccccaagccaagagggagaggggagagggcggggccgggcgccacagggcagggggaagaggaggggggggagcaggggcgggaggcaaccaacgagccagccaccacaccccgcccaccccccccgggaccgccgaccgcgccgccgagacaggacaggagccaagcccaaacagaagaggacccccaccgggagaacgggccgacgaggcagggcagccgggacagagccgccacgcagccagcccccaccgggcgcaccggcggaggagcgccaagcccccccgagccccagccccgcagagaagcaaccagggcaaccagacaggccgaggggcccaccccacccaccccaccgaggccagacgcgccgggagggggcgggcgccccggcccacccccgaggacggcgcagggcaacgacacacgaccggcacggagcacggcgagggcagccccccagggagggggaccccagagcgggacagagcaggccgcaggcacccgcggccccacacacaaacacggggcccggagcgccccacccccacaaacccaccccggcaggcacccagccacccgagaccacagcacagcccgcagcccacagaccgggccccacccagcggggcgaggcagcgccaacagggaccgggaccacggacaccccacagaaccccagccccaccgaccccaaaccccagacccagcccccccgcgcccaggagagcagcacacaggggcccagcccagacacagggacaccaaggcccggcccggcccaccaccacccacagggcggacagggaaagaccggccaagcccccgagcggacccaaggaggagaaaccaccagagagccccagggagaccccaaacaagacccaccacaccgccacaccacagaaacagggagcgcacgagccgaccacgccccaggccccagcgaaagaccagacccagcccggagccaggggaacccgagccgacagacagccggggaaccacaccacaaacaagacaagggcacacaccgggccaggagcacccagggccgagagacccagccgggaaccgggccaaaggcaaacacaggaaaaacggaagcgggaagaaggccagagaagcgaggggccagcggcccagcaaaggccaccggcagaagacagagggccggagaagggaagggcggggagggagggacagccagagacccgagcaagccggggagccaagcgaacccaaggacacaagagccaggcacaggggccccgaaaccccagcccacagaaagagagagacagagcaggaggaccccgggaccccaggccagcacaggagaacacacgggaacaagcaagaccgccaaacaggcagaagggaggacagacaccgggcgccgacacacaagcaaccaacaacacacacaga

SEQ ID NO: 584 - RNA, 4870 nt, Mus musculus
gagccgggaagaccccgagcacaggcacaacaccaaggcaaagaacccgaagcaaggcagcaacaccaaggcgacagcacagacccacgaggaggaaccaacaacacaaaagacagcggcaaaagcccagagcgcgcggcaggccacacccgcgcaggcgacagagcccggacagcccgcacccgcgcccagcacagcgccccaccccgaaagggaaggaggagcgccggcaagcggcagaaggaagacgcagacaggggagcaagccggccagaggcacacaagggacacgagcccacagaagaccccagccgcagggaagcaccgccagaggaaacgaaagaccgacccgaagaaccaccagcgaggaagagaaaagggaggaaggaagccgagcaggccgaacgggcacaaccgaaggagcgcaggcccccagaagggcacaggaaccaagacaacggcgcccgaggacccaacaggagacggaaacagccacccacagaaacccggccggacgccagcgccacccggaaaacaccagaccaaaggagcggggaggaagggacggcgcaaccgggcacggagaagccaagaaggaacgaagcagagaccaggaggaaagcgacggccaggcaccagacagaagcaccaaaagcccccccccaggagaggcggacaaaaacaagcaggacacggagacaaaccacgcccacagccagaggccaagcccccgaggccccgacgcagcacccgcggcccgccccgcagcaccgaacccagcagagagcggcccacacacacgcacacgccaacgcagagccggcgccccagagacccccgcccccaaagccacgaaaagggaggaagcaaagaaaaccaagcaaaagagacacaaaaaaaaagaaacaggagggagggcagcaaggcaaaacaagacaacggagaacacagggccaggccaaaaacgccaaacaagaaaggcgggcaggggcacgggcaccaaccccaggcagccaaggcagcagcaaggccaggccagcaggaacaaagcaagaccgccaaaaaagaaagaagacaaaggcacaagaagaacaacacccaaagcagcccagcaaagccgaaccgacaggaggaagagggggaggcagcaccggccggccccggcccaccgaggaggggaccaggcaccaggacaaccccccagcacccacacgggcgccaggggggagggagccagacccagaggcgggcagagagacaaagccaaggacagccaaaggacccaaggaagaaacaggccgaacaggccagccaggaagagaaccaaagcacccaccacagaagaggagggagacagccagcggccgcccgccaagcccacgcacgaccacaccagacacgcggaacacgggagacaccacgagcacagagaagaaagaacaagaggaaaaaaaaccccaaagggaaagagaaacaagagagcaaacgagaagacagaagggacgacccaccaggcgggcacaggccggggcacaggccgggagccagccccaagaggcgaagagagaggacaaaagcagggccgccggacacagagaagcaaagccagccgggcaacaggaaaccgccaaaaaaagacaaaaggaggagaacaacagggagaccgggcccagaagcacaaggccaagcaagccaagcaaagggggaaaaaaacaaaaaaaaccggaagaacgaaacagacagaaacagggcacacaaagaacacgccgccccaccagagaagagcgccccacagccaccaacacgaagaaaccgagcaggacaccacgcagagaggggagggcagaggacaacggggaacaggccccgccccggggccggggaggaaccaggcgcagacggcaggaagccccaccacgagccacccccggcccagacgaccaaaaaaggaagcagcgagggcagggcagcgccgagcacggggggacccacacgggaaaacaagaacaaagaacaaacaagcaccacaaaggaagagaaagccaagaaaacgggcgggaaagaaacagcggaacagcagcaagagcacagacacaaaacagaagggcaaaaaaacccgaaccccgcaccgggaagagcacggaacgcccgcccggcgcgcggacggagacacacaagcacacaacggagacgagggcagccaacccacacgcaaagcacccaccacagcacgccccccagggcccaggacagaggaaacaacccagaggcggcccgaaacagccagcccagcgcaggcccaaagcagcccgcccggagggcacgccagagacaggcgcaaagaacagcaggccccacgaggaaccaagcacccagagagaacaggcggagaaccagacgggaagaagcgaacccccccccccccccccgaacccaaaccaaaacggacgggcacaagcgagaaagggaaacgccaaaaggcaaacggaggaccggacggaggccccacgaagccccggccgccccacgggaagggagaaccgagcccagacaacggccacgcacacagccagcccacagacaggagcccgagccaccgaaggaaagcgacaaggaccccacgacccacaggccacagcaggaccgccagaccacagaacaggggaaaggcccccagcggggaaacacagcacccagggacagagggaaagcgaggcgacgcgggcccccaacacagccccggggggcagaccacacgcgcacacgaaaagggacagagaaaggcggagagggagcggaagggaaccaagcgaaaagagcgcccccggacagggggacaccagggccagacaagaggcaaggaccgccccgaacaccccaccaggacgaagccgagggaaaaacacgagccaaggaaagcacaacagcaggaacgaagaacagagggcaacccgaacgaaaaagagcaacccggacaaaaaagggcaaacccggacaaaaagggcaaccgggacaaaaaagggcaaccgggacaaaaaaggcgcaaccggcaaccacaccagccaacacggaagaaagaggaagcagaacccgcccccacgaccggcaccgcacgggggaaagaggaagcgggaacagaaaggagggggacaagcgacgcacgacgcacggggcaagcgggcgggagagagccaggggaggcagcaagaggagcaaccggcgccccggggcaaagccaaccaaagcccacgcgaagcgaagcgaagcagaggaccagggcagcagaggcagcacacccccccgacccagggagcagaaagccccggaggagcggcccagaggcagagcaaaaaaggcaaagcccagacaaaagcaaggggcagcgcgaacagacaagcaggggcacagggcaagagaacgggaaaaccggccacagcgggaagacagccaggcggaaaggcaggccggcagacaaagcggccaccagcaccccgaacagggcaggggcacacagcgaccccagcacacagaggaggaggggaccccaaaacagcaaggcacccaagcacagcaaacgaaggcagcgagcacacgagacacgcaaaaagaaaaaagaacacacccaacaaagaaaaaaaaagagagagggagacaccgcgacccacccccgcccgaagacagccagggaaggcgcagagccccaagaacgacggaagcacagcaaggggagcggaccaccaccccagcacggaagaacaggaacaacagcggcaaagaaggacgagcagcggggcaggaggaggcacccggccaaccgcccgaaagacccacgccggaacgcaagcagacggccaggacccagcccagggcccagaacaagcacagcacaccggcagaggccggggagaacccacgcccgggacgaaacccaacccacaaacaaacagggaaaaccagggccgcacgagcgagccagcccagcaagcaagacaaaaaaggaacaggaaggaggacagggaggggagggcagcacacagccacagcccacggagggcagagcaccaggaccaggccccccaccagcggcgcgacgaaccaacacaggcaggcagcaaccaacagcgggcaccgggcgccaaacaccacccacaaacccgggcgaccacccaggacagcgcccccccgccccagaacccgcccagcccggagagcgggacgcgacacgcgcaccacgccaacccagggggagcccccacagaccacggccaagcccgacagggccaggaccaccccccacccccccacacacacacccccccccaggcccccagagcacagagcccagccaaggaaggcccacgcggaagcgggggaggggcaggacagaaggacaccaccccccaagcagcgagcagccacacccccagacccgccagcccaaccccagcccgccacccacgaaaccccagggcaccacagccccgcacaaaacaaaggaccagaccaagcacgaaccaagacgaaacgggaaggaaaagaaccgccagaccagaccgccgcagaccgaacacaagagccacccaaagcaaccccaggaagggcagcacacaccaccaacagcccagaccccagagcgccgacgcagcaacgccccaagggcggggccggcaccagggaggcacggcgccacccccaccggcacaacgcacgcaccccaggcacggccccaggggcgccaagcccaggggggccccccgagcaccccccccccccccgggccaacgcgagcggagggccccgagaccccggccccacacccccccaacccaccacccccccgacgaaaaagccgggagcgagaggagcaaag

SEQ ID NO: 585 - RNA, 2758 nt, Mus musculus
aaaaccaagcggaagggccagaacccagcaccaagaaacaagggacaagggaggaccccaggggagcgccggccaaaccggggcagcagaagagacccgcccgaaggcaagcagacaggcacagcagcggcagaaaaaaccagaccaaggagacagagaaggaagaaggacaggggggggaggcaggcagcgggaagggcaggaagcgagcgaccacacaacccaaacagaggaagagagcaaacgaaagggggagggggaaaaccccaaagaccccaagcgagccccccagaagcccacaccaaaccccccaaaagcaccccaaccagagaccaagcagcacagaaccaggagacacccgcagaccaagaagggcacgagagcaagcacggagacccacaagaacacaccacagcagggggcaggaagaagcggcgagcaacaacaggggggcggacacccacacacgcacggagagcgaaccagggaaacaaccagaaaaacccaaggcaacaaagacacacacacagagagagagagagagacacacaagccaacacagacagacagacagacagacagacagacagagcaagcccgcaacacggagggaaaaccgacaagcagagaggagaagagcaggaggcacgcgagacaaaacaccagaccaagagaagcaagggcacgcacagcacagaaagcaggacagagcaggacaggaacccaacagggaggacggaggcaggaacgaacagaggcaggaggaagggcgacggcacccaagggcgcagccgccaagaaccaggaccaacgccagggacggaaccaccacaacagacaggcccccacaccccacgaacaggcccaacgaccaaggaggcgcaagaggcccgcacagaccagcggcaagggacacaacggcagccggcacggagcagggagaaccacagcacgcaggggacggaagcaccacgcgggcgggcgccagaaagagcaaaagcgcaaagcacagaaacggaagaacaagcaccccagcccgcccgggacacccacaaaccacccccaccacacgacgccagcagcgcaccaagcccccgagggacacacaacaaggcaccaacagcgaaacaccaggagcacgcccgggcgcagcaaggacgccagcagggcggaccccggaggagacacaaaaggcaggacagaaccaaccccgagaacggacaagccaaccgagggagagcacgaggggacaacaacgagcggaaagaaaaagcggcaagagaaaacgggaacaaaaccacacaaaccaagagacgaaaggccaaaaaaagcgcaaaacggagcaagaagaaaaaaagcaaaggagcccgaggggccgggggaccaaccacacccccgagcgggcaggacaggacacggaaaaaacccccggaccacccacacaccgaggaggaaggggagaggggaaggggagcagcagggagggcaggaggccccgaggcaccacccagaagacacaggcaacgaagaaacccagccaacaaagaagcgcggaagaccaacaaaaaacgcaaaacacagcaccgaacagagcagaggaaaaaaaaacaacaaaaaaaagagaaacaaaaggcacaaacgcaggcgcacacaagcgccccgaaacaacacagacagaagcacaaagcaaaagaccgagacaggggggacgagaacaggcaccccaaggcggagagagaccccgcgcgacagcccgcaaggaacacaggcagaacagcagggacgcagcccagcgccgaaacgagcaccaagaacccccaagaaaaacgcacaagaacacagacacacacacacacacacacacacacacacacaaaccccacacccagagacacacgagcagaaagcagaaaaaaaaaacaaagcaaaacgcagagccaggaccgagacaaggccgcgggcaacagagaaagcccccgcacagcacaggcaccgccgggcacaagaaggagcggaacaacaaagccaaagacggcaaacgcaaccccgagcccaccaccaccgaggagggagaagaaaggaacgggggagaggaccgagaaaggcggagcaaccgcgggcgggaacccgcagcagcacggcagcagagccaaccaccaaaaaccccaggaacaccagcagccaggggagaggggaagcaaacagaacagcaggggcagaccagcagaacagccaggcccagccggcaccagcggcaggaaggacccgaagggcgccaagagacacccagcggcccagcaaagcaaagagggcgaagacggagacccacaggcagcaaagcagccaaagcaagccaagccagccccgcacgccgggggcccgaacccccgaacagccggccccacgggcgccagcacgcgcacgaccagcgacacaccgccaacagcgagcggaaaaggcaggaaacgcaaacagcagcagagggccaggcgcccggagccaacaaaggcggccgcccacgcaagaaggcggaccgaccagcgggcgcgaaggacccacacggcccacggcgcagcagaacaccccccggggcagcaaacgcccacaggccccagaaaccacaaccgacagccagacagcaacggcgcccgggaaaacgagaaaccaccaagccgaaaaacagaaaaacgcagccaacaacaacaacaacaaaaaacaccaccagaccgagaccacgccgaggaacccggaggggagc

SEQ ID NO: 586 - RNA, 4916 nt, Mus musculus
accgggagcaagcaaggagcgaggggagaagacggcaaagcccaacggaaagagcccacaccagagccggggggcccgggagagcccgggcacccacccaccccagcgcccgcgggggagaggagaagcagcaacaaagaaggggcccagaggagagacagaaaagggaaggcaggccgcccccggcccgcgcccgaagccgcaacaccgacaccggaggagaacaacccggagaagggccgaaccccccccccccccccccccccccccccaagagagacggggggggggggggggaggaagcggaggggggggggggggggggggggggggaggcggagggaagggggggagaggcgcagcgacaaggggagaagaggagaggggaggagggagaagggggggggggaggggggggcagggggaggcaggcacgaaagacgaggggggaagggaaacgggaaaggagggggagggaaggggagagggggaggggggggccgggacaagggagggcaggagccggggagggggggacggggacaaaggaggcccaaaaaaggcagacccccaaagcgaagacaggcacggagcaaccgcagggcgagaacgaacggacccgcaagaggccagcccagcgccaagccaggcaacccgaccgccagcccccacaaagcagcagaggacggaggccccgcaacaagcacccgaccccaagacccaggaggccacaccagaggcagagcccaccccacaaaaggaaagaggaagacaaaccagcaagggcaacgagacaaaaggagcggcagcaaggagagaaagacagcagagaaggagcaacaagacaagcggagggcagccgaaaggccagagcgccccagggcagagagccagcaaacagcacacagaagcgggaagcaggcacacggaccagcacgagcgaaggcagccagccggcacaggggaggccagccgagcaggagccgcacaaccccaaaaagacacacacacacacacacacacaccaggccccgcgccaaagccacagagcagaaccgaaaccccacaagcccaggcaggacccagaggccgagcgccagccacaggccacacgcagcgcggggacagcacagcccacccggcaggcaccccgaaacaagaggaaagcaccgcacccagcccaccgaagcagcccgaaccacgcccccaaacgggcccccggcagaaggcccagagggaacagaaagcgagccgcagcacccagcacccagggcagcccaagcacagaaaccgggacacacccagcgaacagcacggaggaccaccaaagagagccagacggacaggacaagggaggcagagacccgacacagcagcccagaagggacaagcccaggccagcccgggaccaggcaaacgagcccccgcccaggccccccaggcccaacagcccggccagaggcgcccgaggcgccagcacaagacacgggggcacccagccagagcacccggagccaaacagccacagccacggacaccacccagagagccgcccagacccaacacaagacacaaaaggcacagacggaccaccccaagggaaggggaggcgggggccgagaagccgcccggggcaaagagcaccccaaggaacgccaaaaaaaaaaaaaaaaaaaaaaaacacacagcaccgaagcgacccagaaggagacccacccaccaccacacccccaggaaaaacagcaaaggacagagaacccgccaggggcccaccccgcgcaggccgggaagggagcaggggcagaaaggcgcaccagcgggaccaggaagagcccagcgcaggcaaggaccgccacacacagcccagaggagcagaagacaacacccccaaccaccaccaggaggaaccacgacaaccggcccagcaaaggccaccaaggccagcgggacgaaccagcaccccaggaggccggcgagacgaaagccaccacacggcaccgaggagaggaagccaaagacaagcgaggaacagagcagaggaagcggcggagagcaaggggagccccggccgccacgcgaccagaagcccaacgcccaaccacagcacacgcagcacaagccccaccaacagcaggcgagcaggaccaaccgaccacgccggcagcaaggcaagaaaaaaaagaagaaggcggaaggcagagcgcaaccacaaggcgagagggaggcgccaaggcccagggacaagaaggcgaaaggagcccaagcccaggggagaaccaccgagcacaaggaagccagaacagggaccgacccgccacagcagccgcacgccgggaaaccggagaccaccaaccaggcgcccagacgcacaccaaccaaggagacgaagcccagggagagacccacacccacaccagaagagacccaaacccagcgcccccagagcgacccggcaaaggagcccgacgggcacagccccagaaaccacccggaccgccggaccacaggaagagcccaggagcaaaggggagcggcagggagggcgcaggaccagcaaccccaccacaaaaggcacgaaggggcagcggccaaggggcagacacagggacacaagcaaagaaccacagaaagccacacaggcccccggcccaacccagaaaggagccgacccgaccagagaggaaacaaaggcgaccaccacccccacccccgcccagccagccaagaccagcacggcccagcgacagacagggaccacacgcaaaccgcaagggggagcacaggccaccgccaaggaccaccagacccgaacacgccccaccccgacccacacaggcaggcggaaggcgcgccgcgccgccgaccggcggaccaccccgcagcgcacagccacacccaaacacagaacacagacagagcaacggccacagaaagcaggaaaccacgcacgccaggccggacagagcagcccgccggcccccgccccgacacggacacaaagccacagggaggcccagggacagcaccacgggacaaccccacaccacagcccaacgggcaggacccagcgagcccccgccgagcggcaaaggaagcggacccagccagagggagggaaagaggcaggcacaaaacccggcgagaaagacgaccggagacagcagagccacaaacagacaggggccccgcagccgcagagaacaaagggcccgcacaaagccccgcagacagaccccccgaaaacagcagcaagcccaaagaaggacaccaagaagcccaacacaacaacaacagggacgagaaaggcaggaacaaacggggaccaagcaaccccagagcccacaaagaagaaggaagcacagccccggcggggagacacacgggagagcggcgcgacacgcccccaacggagccaaggcaggagagacccgccaaaaggaaggggagagggacgaagacaccacccagggagccagccccgagagcacacaaacagaaaaaagaagacagcagaacagaagccgacaggcagcaccaagagacccggcccgcccaggcagacgaacgagccaggaggaacacacaggcacaccaaggagccccacgggacagcggaggacaggacagagaccagggcaagggagagacaggcaggcagacccccccaaaaccaaaaccaaaagaacaaacccagacgcagacaaggaaaacaaaagccgcgcagaccaggcggaagccaaacagaccaaggcaaaaaaaaaacacaagcagccccacaccggaaacacaagacccggagaaaagaagacgccgaaaacaaaacaaaacaaccgcagagcggagaaagagcagggcaagagacggcgccaagaagacccaaacggccaagaccacagagaggccacaagcacacaaccccggccacggagccccaccccacagggcccagcagcacagggcacaacacaagagacaaaaaaccaacacaaagcaaaaaaaaaaaaaccgaaccacagacacgggagaaccaaggccagagaccccgaaggcacacaaggaaagcagagccaagagagccacagcccggcggaacaagggaacaaacgcagcagggggaaaacaggagccaaacagagcccacaccccgaagcaccaggagagccagaagcgcacaacccacgcaggagaggacaccaagaccgaacaggaagaccgaaccagcagaaggcacaacccaacagaagagcaagggccaccaacaaaggagccacacagaaaaaaaaaaaaagaccaagaaagaaaaggcgcacacaagacagagagcaaaggaagagggaagggccagcggccagcaccgacaccgacgaaaaacagagaagacaccagcagacacagggaccaaaaaacacaacaacgaaaaacaccagcagccaggcaaggggccgaaccaaaccgaggccccccacacccagacgcagaacagggaagaaccacaccggcccgcgcgagaccagccccaacgagaacaaccaaggacaagaagcacaagaaagaagcacccaaaacagagagcgaacaaggaaaccacacacgcgagggcgcaaccacccgccacccgacggacgagcaaaacgggaaaggccaaggcgcccggcccgggggcggaggcacgcccgaccacgggaccagacagcacgcaacaccacccccccaaaagccgacgccaagccggggccaaacaagaaccaaaaccaaacggaacacagcaggaagacgcagcccccccggagagagacagaaccgagcagaaggacacacgcccaccggggacccccagaggccccccccacagacccgagaacgagagggaagacagggcagccccggagcgcacccagcccagcaggggagaggca

SEQ ID NO: 587 - RNA, 1790 nt, Mus musculus
agagacgaggcagcccacggggcagcacgcccagcaggcgggcgggagaagagagcagcaaagagcagaagcaggaccgggcacggccaccgagcaggccgacccccaggaagaggggccgaagcaagagaggaaacccccccaacgcgccgggacacagcagcaggaacagacagaaaacacacacacagagacccacgacaacgaagaagggaggggagcggagagcaagaagagggagggagacagcgccgaaaagccaaggaggagagacaaaaaaaaaaagacaccgggacagacaggaggaaaacccagaaccagaagaaggggaaggaggggaaacagcagaaagcaaagagggggcggagaagggggccccgcaaagaggccgggccgaggcgggcacaccagcaaccaaaggcgaagggaaaacagcggcaagagacaaacaaaagaaggagccaaaagcgacaaggggaaaccaaccacagacggagcccaaagcaaggcgaacaaggaagaaggcaacaggaagacagagacgagcacagcggacagaccaagcaccgaccgggcgggaaacgacagaccacgaaagagccagccgacaggacaacccagccaaagaaaaaacaaaacagacacagcaacaggacgagaaagagaacgaagccagaacgacgcaggaaacgcaggagacgcagagcacgcaaaacacgcaacgcggcaggcgaggcccagaagggacgccaccaccccaacacaaaccaaagaaaagccaaaacccaccacacaccaggaagaccagaccagcacaaccgacgccgcgcgagacgaacagaaaaagcaaacaccccagcacgcacacaaaccgaggacgagaggacacaagagacaagcagaggggccacagcagacagaggcaaagcccagcccacggcagccagcaaaagcaaaggccgcaccacgggcgggcagaacggaggaggaggggggggacggaagaggagccgaaacgggagcgcggaaggcaaccggacacaccagagccaccaagaccgggcggcgagaaaggcaaaacgaggcgagagaaacaaggcacagcgcccaaacacaaaagcaaaacagacgaaagaaaaaagccaagacaaaaaaaaaccccccggaaagcaaacccggggggggggggggggggcaggggaagggagaccaccaaagaacgaggacaacaccaaaagaacaccgggagaccacagccgggcacacaagcgggagagggaaacaaagcaaacaccaccgcagaaggcccaaaggcacacagaacacgcagcgcagaggcaagaaaagacacagccaaggcacacgacagaggcagcagagcacgaggggaggacagcaggcgagaagagcaccggaggcagaaaagcacagggaggaagaaccacacggccacaagaccgacagggcccggcgaacagcgaaggaaaaacggcacaaaagcaggaaaaaaaaaaaaaaccacccaaaaagacaggagagcaccaaggagacgccaagggcaaaagaacgagaaaggaagagagagggaggagaaagggagagaaaccacaaacagcaggagcggcagagaggaaaagaagcaagagagcagggacagacagacggggccaaggagaacgccgaagaggggaccgcacagaacacgagaagaggcaaaggacgaaaaaccaacagagccacgacgaagaaaaccgaacgaaccaaaaaaaaagaccgagaaaacaaacgaa

SEQ ID NO: 588 - RNA, 12852 nt, Mus musculus
agacgcgaaaacaccacaaagaggagcgaggcgggaaaacacgaagcgccccaaacgacaaagccagaagcaaagaaagacacaaaaaagggggccagacgccgggaggggggggagagggagggaaaaagacagaggagccagagcagcccaacccgaacaagaacacggagggaagcggagagccagaagaccccaagggaagaccaaaagaccaggaacaaggcggaagagggaagagcagcggggaagggagccagcccgggaggggggagggagcaagccaacccgaagaggagggacgagggagcgggagaaccggcgccggcccgaagaaaacaggacgggagccagccccaggcagaccggggaggccaacggcaagaggaaccaggccagccagggccagcagagaaacccgccgaaacaccgccccccacaaaagaagcagcaaaaaagaaaaaaagaagacaagagcaccccagaaggggaagaggagaaagcaagggcacaaagagcccacagcgacacagacggggacgcagaagggcaggcaggaacaacagccacagcaggaggcaagacagcccggcaaagcagagcaacgaggccgccagggcccccccccgcagcacaggacgcagggaaagaaggcagaaagacaagggaaggaaagcaaaaccaagaccccagggagaccggaaaggaaaggaggaaggaggaaggggggaaaggagacaagggggagaagaagggaccaagagacaaaacaaagacaaaggaaaaacaacacaaaagggcgaggagccaaggggggggccccgcaaccgcgcacaagcagacgcaggcacgggggggggccgggccggcgagggcagaggcgaagaaagcggcgaaaacaacaggcgggagaaggaggagaggccgaaggaagaggccacagaaaagagcaaagcccaggggcccgcggggcccggccccaccaccgagcaccaggagcgcagcagacaaagccacaaaggcagagggacggggagcagccgcggcaagggcggagcggcaggcgggggaccagcacagcaacaaaaacaaagcccaagaaacaaagccccgaggcaccaaggaccgcccccaggggaagccccgccacagagacagcgaggccagcagcgccccgcgcagggggaggcagacacaggaccgcgcaccagccccgggggcggccaaggcaacagcagaaagcagagcagaaaaagaaaaagcaagagaaaagccgagagaccaacgagggcacaacagagggaggggggaagggcccagcccagaggggggcaccccgggcggggccgggaaagaaacggcaagcaaaccgaggagcaagcagaagcagcaccccgggacccgcacagccgccccaggccggggaagcaacacagaggaaagaaaacaacaccacaaaagggccaacccaacagcaaagccaacgaaggccaccaggacaagacccccccccaggaaaacaggagacgccacccggaaaaagagagcccgcgcaggacacgggggagagacaacccagccagaaccaaggcggacagcggcaccaaaaaagagccggagggacaggcgggagaagcagccaaagagacggaaaagcgacgcaaaggcccaggaggcacagggccacaggaggagccccagagagaaagccaagcaccgcaccaggccaccaagaccaccagaggccgacaaagcagacccgcagccagccaggggggggcccacagagggggggccagggccacggagcgacccagaacaaaagcacagggagagcaggcccgggggggccaggcaggcggggcccacggcaagccaggggagggaaaacgggggccccgcaaacagggcaaaagcaggaagaacaagccgcccacgaggcgaacacagaggccacgcagggccggacgacgggcagggcacgacccacagggaaaaaaggagagagcaagagcagcagccagccagccagacggcagggggaacgacccccacccccgcggagcccggaggccagacacaggccccagaaggaccgaacacccgcccagcccaccaagcgcgcgacagacagacccgcccggggacgcaccccccagacccagcacaagacgcacagagcccagccccaagaacacgcaggcggcacagaggccccggccggaaggcagcagcgagcgagggaggccccaagccggcccggcaccacgaaaaaacaaggcggccagggcacagcaggcacgaaaacagaacccacacaaaagagcacagaacaaaagccaaaacaccaggaaaacacaccccaggcccaggcacccggccaaagcaccaccccaggggccgcacgaggccacccccccaaacccagcaaggcccagagcaaggcaacacagggagcaagggagccacacgggggacacacaaccgaacacccagaggaagacgccgcaggacgaagacacccagacaaagcaagcaaggaaaggggggggggcaccacgcccaagagacaccggaagggcccccaaacccagcccgggccagaacaagcaccacgaagggaggcacggacaggaaagccaacagacccgggagcaagcaccaaagacaaaaagaagacacagagcgaccagacacccagaagaagagcagaccaacgaggggagccaccaggagcgggagaaccaggaccggaagagcagcaggccaaccacgagcccagccccaaggggagaaagcgcagcgggccagcgagaggagcgaggcaccaggagggcagggacacagggaagagagcacagcccaacaccggccgggcggcccaagaccaaaagagaaacgagggaacccggcgacagcccccacgaggcccacgcccacggacagacgccacaacccaacacacaacgcagaaccaggcggcacgaggggaacaagacgggcccaagagcacggcccgcaggaccagaaggcccgacacgggcacgcgacaagaccagaagagcagcaggcccaggagaggcccaggccacccccaaaggccaccagaaggggggcagcaccacagcaaacacaaccgaacccagaccaacccaggcagaccacagcccgagggccagcccaacagaaacccacggaaaggaggcaaagaggacaggacagcacagcaccccagccgacacaaggaaccaggagagggcacaggggggggggggggggccacagcccccggcccagggggggggcgcacagcccccggcccagggggggggggggccacagcccccggcccaggggggggggggcgcacagcccccggcccaggggggggggggggccaagccccggcccaggggggggggggggcgcacagcccccggcccagggggggggggggggccacagcccccggcccagggggggggggggggggccacagccccggcccaggggggggggggagcagcgggggacacgcaggcaaggccccagcaagcagcacagacacgggaggagcacaaggcgccagggaacaaggcgcccccaaagcagcagagacaggagcaggcaagcagacaaaggacccgcccgcccccaaggaacaaagaagccagcccccagcacgagacccgggcaccaggcggccacaaggaaccggacccaccagaggaacacggggcacagggaccacggaccggcagcaaaccgagagcacgcagcggaggccaccccagaacaccaggcccccccccgccacagggagggaacagaccggggacagcagggcccagggcagcaggcgcgccccccccccccagcccaagccgggaaaacagcaagggcccggagccagacgaccaggcgcagcgcacgcccacggagcccgcagccgacacgggggggaacgaagaacaaggaggaacaggcgaagacagccagcgccccaaggggaagccaggaacaccccgggacccaggaaagacccagcaccgaggggcgacgaccacgaggccgcaggaaaacgcgagcgggcggagacagacccagagccccacagccaacgcacacccagcaccaagcacgacccaaccgccaccccgaccaaacaaccacggagacccaggaagcaacgacagagccgcccggcgcggacagccaaacagcaagagggcagggggggcgcaccgcaaacgacaaggaaggagacggacagcacacaagggggccggggcagccaccggagcgagcgcacaagacgggaacccgccgcccagaccaggacccaccagcaaaaacaaaagggcgaggaacgggaccggggccccccacccgggaggcggcaagaggcccagagagcggcggggagaaagcaagagcagaagcgcccccaaacacccggagcgcagggcggaggaccaacccagccacggcggaagaagaccaaaacacgccaaaaccgccgccaagagagaaaaaggaagagaaccaaagggagcaaacaccacccagccgaaaaagacacaccccggcacaacaaaaaggaaggccaacaaaggcccggccaggaagagagggaccacaagcgacagcggaggaacgccgggcacagcgccccgacgcccacacccccgagagccccaagcaacgcccggagccacgcgcaggggacaccgaaagccccaaccacgaaaagaacaagacggcaagaaccgaaacggcaggaggaaggagcccaccagagcccaaaccaaccacgaccgcaggcaaagggaagaggaacccaggcggggcggccagagcacagccgccacccaggaggaagcgccccacccacccacccccagcccccccgcacgaccgcagcggagacagagcacagaaaaaaagggccaaacgcgggcagaggggccagacagggccagcccaccgaagacagggccaacggccggccggcggcgacaaaagcaaaacacagggccccggccaaaagcagggaaaaccaccaacccagcaacccacccgggcccccgcggggggaagacacaaggcagagaggagggggcagagcgccagaccagcccgaggccccagcagcacacagagaccaccgcagcccgagcccgagacccagcgcagcccggaccacccggccacgaaaagcggccccgccaaaggcaccgagcaacccgcccagccagagccccacggccacaaaaaacaggaaagcccagaaggcaccaggacaggggggggggggggggggggggggggggccgaaggagaggacccagggaaaggaaaggacagaaaaaacccaaagcaaaaaacaagacagccgaaagccacgcgaccccaaacaacgaaacagagcaaagaaaaaacaaacccgagcgcccagaaaacaagacaagcacgggcacgcggacagagcagcgggccccccccgacacacccccaaggcccaagacccccagcaacccggcacggggccccagaagcaaacaacacacgaggccaacccccccacacgcaacacagcaaaaaacacacagaggccaacacgccgcccagggccaggaggaggaaccagggcacgaaagggaaagccgccggggcagcacaacaaaaaaaacaagaaccaagagcagacggaaaaccccgcccccccccccccacagacagaacgagagaccagcaagagagaacaaaaaacacccaaacagggaaaggcagaaacagcccgacacacaaagcaggcaacaagcacacaggggagagcgggagcggcccgaagggagccggggggggggggggggggggggggggggaggggggggggggggggcggggggggcggcggcggggggggagggggggggggggggagggggggggggggggggggggggcggggggggcggggggggggggagggggggggggggggggggggagggcaacgacacaagcccccaccgaaaacaagacgaagaacaacagcacaaaaaaagaaaacagaagaaacagacggaaacacaaaacaaccaccagaagagccgaggaacagaagaccagaaaacacaaccgaggcagacccaggagaacgcagaaaaaacagacggacggagagccgagcgcagaggacccagcaggacggcacgacaggcaaaaacgaaaaaaaaaaaggacgagacagggacacaaaggaaagcgccgaggggagacaaggccaaaggagggaaaaacagcgcaaacgcagacacaaaagagagcagcagaggcagacggcagcccggcgaaagggacagacaaaaggagaaaaaaacagacgagaaggaccggggacaagcgaacacacacaaagcgccggcccggccaaggggccgcaccagaacaagggaaacccaaaaagaaagcaggcggcagaagaaggaacagaagcaaagagcacgggaaaaaaaaaccaacacacacaaaacaaagggagagaaaaaaaagaaaaaagggagaagaaaacaagggaaggaagggagaaggggaaaaaagaacaaaggaagagaagcaagcagagcaggggccccagggaggcgggggagaccgaggcaggcagcccaacgcacagcacacacggcagacagcccaagagccggcaacggggaagacccacgagagcccagcagggagaggaagcccggcggagaaggagaaccaccaggaaccagcagccacagggaacaaagaccagaaccagaccacggcaccaacagaggcgaaggaaggacagcacaggcaggcacggggacaaaggacagccccaaggcggacagacggggacaccagaaccaacaggggcagcgagcccgcgccggaaacagcaccagccgccgacacagcaccccacccccccaaacacacgggagaagcaccgccaccaggagcaaacaagaacccagccgaagcaagaacaggggcccaaccccaacggacccaaaaagacccagggggaccccaacaaaaaagcacgcgcgagacaaagcacaggaacacaagaagaaacgcgaggcagggaccccggaaagaccacaggaccgaacgcccaagacaacaacggcccacagggggagggaccagagaccaaggcccaaaagaagaagcaacagagggaacaccacccaaaacccccaaagagcccccccggccaccgagggaaagggcaaagagaaggggaaagacacaacaggccacaaacaacacagaaacaaagacagccaaaagacaagaaacaagacagacacacaacacacacaaaaaaaaaaagacccagccacaggcgcaacggggcacaagagaggggaacgaggggcaggagacacaaagaagaagacaacacaggcacgccaagccaagccggcccagaaaggcaacacaggagcagcacgcggggaggcagcggagacacaaccacagcccaggaggaggagaaaaaccagagacagggcagcggggggccgcaaaaacacaggaggaaaccaagcccgcagggggaaaagaccaccgaagaaaagccgagaggcgcagagagacagccaccgcaaggcggccccaacaagaaagaaggggggccgaggccccggcaggcaggcaagggcagaacaacaggcacgggaaagcgaagcacccggaaggcaagggaccaggcaaaagggggacagcggagcaccacgcccagaaagcaaaagcccccccaccacgaggcccgagggcgggcacaggacagccggaccgcccggcgggaccagccaaaagagcgaccacggaaagaagcaaccaggaccccaccacaggcccgccagccgaggaggagacacggcagaggcacgagcgagcacacaggaccccgccaccagggacgaagcaaacccgacaaaacccacacacacggaccgacccaaggagacagaaagacgggaacaaacacaggaggccccaggagggagaagaaccagagcagcagaccccaacccgggggaagaagcaccgccaggaccccagaggaggccgcagagagaaaccagaggcccaaaaaaaggaaacagcccgagcggagcagggcagcagaaacagagccaaaggggggggggggggggaacccaacgaaggggaagcggacgcgggagaaaggcccgaagcagaggccacggaggccccagcccgccggggccgccgcccggaagaacaaaccaaagaagaaggaggcgccgcaggacgccaagaacgacacggagaggagggaaacccacacaggccaaagacgcggagagccgggaagggacgagcgacccgggcccggacgcaagcggaggcaaacgggagcgcaaacaggagggcgcagcaggagccacccccacagccaggacccccaccgaggaacacaaaccccacccccccaggcccgacaccccacacccaccggagcagagcaaaaccccagcgccacacccacaggccggggcacaagcccgccgacaagcccgggaaacagcccgacagcgcaccagaacgagccgggccaaggagaggccgaacgccggccccggcagacagcgcaacaagacccggcaccgagagacacgcgggccaagagagccgagaaggaaggaagagcaggagccgcccagggaaaagagacagggcaaacagagaaaccaacaaaccaggaacaaagaacagagagaggcgggaggccagggagaaaacaggcgcagagaggacgggaaagggggcagcagagaagggccaaggagacagacacccagcccagaaagaacaagagggcgggcaggaacaggagaccaggggggacaaccacgcagcacgagcagcgcaccaccaccaccaccccaagcagagcccaggcgcaggacaacacaggacagaagccccacacagggagaacagccaaccccaacgagcacaggaaccccccaaggaacgagcgccaaggaacaaggcaagccccgaggaagccaggcgcagggaggggagaaagagacagccggagacagagacacaagccgggaaaagaaacaaggcgagcccgaagggggcggagcagacccaaggaacgggaggcagccaagaaacgaggcaccagggaggggaaaaagggacaaggaagggcagagggggaaagaaagacgaagcagggcggccagcagagcagagaagggacgacaggaagcggcggcaaggaaagaaaccagcagcgcggggacacaggagcgcaggggacacaggagcgcaggggacacaggagcgcaggggacacaggagcgggggaaacaggagcgggggacacacgacgcgggaggacacgaggaagacccagaacagaacgggaacggagggcggaggcagaacccagggaccacgcgaggcagcagacacagaggagccacgagacaggggagggggggagaggggaggagagaaaccagcagaagcgaaggggcccgcaagggggacagagggaaggaggggagacgggagagaacaggcaggaggacaagccagaaggggaaaggggaggaggagaccaggcgggcgagccaacagagccacgagaagcagccaaccagccaagcacccgcgcccgcgccacacagcccggccaagccacacaagccgcgcggcaaaggggagacagaaaggacccagaaggaggagagaggcccggagaggcaggaggccaggagcacaagggcgagcacaaaccagggggcacgggggggagcgaggaagggccgccaagccacaggccccaggccccgggcagggaagaggcccgacggcacgaagacacacagggaacgaaaccaacgaaaggcaaaccaagagagacaaaacgagccaccaaagggaaaccacccagaaaacccccccccacacgcccccaccccccaacaggcagcaggaaagggggcagggcagggcgggcggaaggagggccaggagcccccaaccacgagaggaaaacagccagacacaggaaaaaacacacacacaagaggcagacgccaggacagcaggggagcacccggaaaaaggaacggaggaaccaacgccacggggacacccgacacaccccaggggcacccggacccgcccgccccacagggaagaaaacgagaggggcccagacccagcaaaccagaaacgagacaccaggcaaaggagggacaagggggaaaccgaagccacaagaacgagcaaaaagcaacagagaaccgggaagcaaaaacccccaaaagaagagcacaaggcaagaaaaaaaaggagggccacaagagccgggggaaaaccagaaaaagcacgaagaaggagcaacaggagcagaaaaaggacaaaaagcaaagacccgagacacagcccagaaagcagaaaaaaaacagaacgagaaaacaagaacaagcacacaccaaaagagcaagccccacaccaaggcccagcccaggccacaaggggcaccaacgggacaagaaaaggacgaggcccgaccccccccccccccccacccaccccgcgcgcccgcccaacgcccccagaagggaacgcaacaaacggggccgaccgcggacgagcgcaagccagccgcgagagcgggcacggccgcgcaccgccggcaaggcgaccaggcgggcgcacgggagcacagacacagcaaccgcaccaagccacccccaggccggcgggaacacagaccaaccaaggaacaaccaggagaacacagacacacaaggacgccgcagggacaagccacccccacgccccgcgagcaccgaggagagcaggagcagaggccagccaggggccccgaggggacgagcccaaggcgcgggccaggacagcagccagggccggaaggcaggagcggaccagccccgggagaccagaagagaaggcagaggggggggagcccgaggagcaaaggaacagcagacagcccaaaaccagagccagaagggcggccgcgccggcaaggccaaggccggaccccgccgacggcaaacgaagaggggcggcaccggaggcagcggaaagacagcggaccgggaagaccacagaacagacagcaagcaggcacgccccagccgccagacacagggccccgaggcacgcaaccccccggggggggccggagcaaaccggaagcagggacccaggagcagggaccgacccagaaaacaaggggaccaagccgccaccgagcaacaccaggggcacacacgaggaacagccgaaccgggcaaagcgggccaacagggcaagacaccaccgaggacccgaggggccagcacacccaccacggcccccccccacggagcaaggcaggccaagccagccacccacaggaacacgagaaaaaaaaccagaagacgacaagacccgaccccggaaagccaggagagcaaagggcagcgcagcaaagaaaaggcaaagcagccaagaggaacgaaccgcgagaaccggcccccaaaagaaaaaacgcgaaagccaggggcgcccagcaccgccgagggacaggaaggcgacccggggccagaaaaaaacccgcgcacgacgcacgaagaagaccacgacagaggagggcggggcacagagccgcgggccgcgcacgcgcacagacgggagccacacacccgccacaaggcgcaggacgggaacagggcgaaacgccagggaaggggcccccaagggcagcgggggaaaaaagcccgagccacccggcacgagcaaacaggcacggaagaaggcgcacgccagggcaggccagccgaggaaaggagacccgaggcagaacacaggagggcccaacaagggagagcagaccacaacagcccagccagccaagcaggccccagcgcgggaccaaagacgaagcgcccagagggaaccagcagacagcaggaccgaaaccagccgcgccacacagggaacgcacgagccgagcaggaaacaaagcgacaacaggcagagggagaacgagaccccgagggggaccagcgcagcgaaccagcaccacacagacaccgggcacccgcccacccaccaccgcagggcccgcaccaggccccggcacgacgaccaggacccaccaggcgagccaacccggaggaggagacccgaggccccacagccccccgccaaggccagcaggaggaccagaccgagcagccggccgccggaaaggggggccagggcggacggcacggagagcacgccacaggcgggagaacgggggaggcagagaaggcacaacggcaccggaaagcagaaaggaacacccagcggcagaacgcggcaaccaaacacgacagagcccaaagacgaggaacagcgcaccccccgcagcagagaagagagcaaaccaaacgaacaggggaccgacgaaaaaaacccaaacagccaaggggcagcgacggggagacagagccaggacgaggaggccggaccccggagggaagcgcgacagggcgagaacgaacgagccccggaggagcagccaggcccaaccgagcacccaccccgacagagagagcggggaagaccgacaccggggacaccagccccaagcagcaccagcccagagaggaaaaaaaaaaaacagaaaacacgcgcggaacacggggcaacgcagaaaggaaagaaacgaaggaaagaagacagcggcaaccgaacagcgagccgccagacccaccgccagaccaaggggcacgacccaaagagcgcgcg

SEQ ID NO: 589 - RNA, 5287 nt, Mus musculus
cgggcacacggcgggcacacggggagacggcaagagggggaaccggcacccaggaggcagcccaccgcgcccggccaagacacccggaaacccagggaagaaacagggccaggggcccaacacgaccagaggcacacgaggaagcccgagcgccaaggaacgccagccaacgggacgggcagagggaccaagccagggaccagggcccaagacgaccacgggcaaagcgagaccgacaaagcaagggaacccaacagggggccccaaacacacccccaagccaagagcgcccgaacccagaaaaagccaaagccgacggagggcgaccacgaccacaggaccccacccacccaggcccagcacccaaaaaccccgaccccgcccagcagaaaccagggcagaggagagacgcccggaaaacgacaccggacaggcagcggggggccagggaaccgcaaaaacccagagcccaagaccaaacccgacaagcagacggcgcacggcacccgcccgaccccggcggcaacccacaccgcagccgcgccagccccccagcacaccaccaagccacagacgaaacggggaaaaaagaaagccgagaaagacacgaccagcgaacaagacccaaagagagggaaccccagaaccgcggagagggaaaggggccaacaggggagccacggcggccaacagcgcacagacgccacaggagagacgaaggcagacaaggcagaacgagggcaggaccagcaaccagaacgccagagacacagcggccaaaaagaccacagaacccagggaggacagaggcaggggacggacgccccaagggcccacgaacacacccccccccgcccccgcaggagcaaggaccggggaagggccaacgccagggcacaggcggaccccagggaaggaacgcacgcggaccaccagcagcccacccaccaacacaaccgccccccagagcccgaggccgcaccgcagaagacaccaccgaaaacccgcggcccacgcccgcccggccgggagcagcagaagccagagaccacccccgagaaggagccgcgcagccccaggggccagagcgccaccccaagggcacccaaagcgccagcgacccccgaagcccgacacccagcaaggcaccacacagccggacccaagggccgacaggcccccacccacacaaggcgacccaggggggggcagcacagccagggaaaagaaggggaggagcagagcacgaaggacagggccaagcagcaggccggagaacgccaggcggaacaccccggcacaagcaagccgacacagggggggagagggaggaaaggcaaacgccacaccagacggggccccagagcagcgcccaaaggaacaaaaggggcacaaacacagcacacaccgcccccccggcgaggagaaaccaggcacaggccagaggaaaggccggccgccgagcggccacagcccaaagagaaagagcccgcccccgggcccaaaccgcgccgcccccgaaagcaacgcgcagacaaggggccagacaacacaccccccccccggcccaaagagaaaaccgcgaaaaaaagcagccaagaaagaggggggggagaccccagaggggggaggaaggacaaacacaagagagcacaacgaaaccgacgcaagaaaaaaggagaagaaaacagaccccccccccccccccccacccccggggggggggggggggggggagggaggaagggagacgggagcacagccagggaaggcccaggacaacgagacccagacccacacacaagaccaggacaaaaggcaccaggcggggcaagcacccccacgaaccaccaccagccacccaaaaagccgaacaaagaagaccagagggcgcccgggcgccccgccccagcccacacacaaaggaacaaccagaaccaccacgcccccagaaaggggcccaccggccaagccagccagcccgcccggaacagcccagaacagagagaaagcaaaggcacaagccagccgggaacagcgagaggggacaaacaagcccaccagagggggacagagcggggaccacagggcaccaaacgcacaagcccggaccagacacaaaaacaccaggaaggggacagcaggcagcagaaagaacacgcgcgccgacacccaggcggccacgccacgcccgcggcagccgcagcacgcacaggcagccacacacagacacccggggacaagccccagaaacagccccagcgaggggcccaccaggaaacggagaccggggcagaaccagaaacagagccaaggagaaaccaggggcaggggccccgcagcgggccggaccggcaacaccagggcgcggaggagacacaaaggcaggcagggaggggccagggggacaagacagcgaaccccgacacaagcgagcagggcgaaaacaaccacaaaaaacaaaaaccaccagcacaagcccaggaacacaggacaggggcaggcaggagagggacaggggagacagcagccgggcccagggagacgggagcccaccccagaaaaaaaccagcgaggcgaacccggaggccgaggcagaagaacccaaacagaccagccggcaacgacaaacaccgaagaaaaaccaagccggggaagggaaacgcggccggagagcgagcaaagaggccgggacacacaggaaaaggaaagcaaagcagacacagaaaggacagcaagagaaagaaacaaggacccacagaagggggcgggcgcccgcccacgccaccgacagcagcagagggcgccacacggcgcgagccgaggggagacaagagagaaacggccaaagaacccccgaggcccgcggcgcgccgaggaccaggcggggggagccgggccggagaacagcaggcaacggagccggaggcaggggacggacgagaaaacaaagaggaacaccccaaagaacaccaacagaccaccccccgaccaaaaccccacaccaggggggggggcagaggggaggggaccccaaaagcagggagaaaaaagccacagcgaggcacacacaggagaaaaaggccaacaagagagggcaacaagggaggcgcaacaagggaggacgcagcaaaccggaacccggcaaaagcagacaggagggagagcgagcccagaccgcagggacagaggagagagacaggagagccccagaaaccagacagagcccaggacccaggagaagaccaacagagagacacaacgaggcagaaaaggacaggcggacacacaaagcacacacacacacagacacacacacacagaaaggcacagaaacaacaaaaacacagagacaaacacgaaaggcagccacacacacaaaacgaaaaaaagaggcaaagagagccagggagcacggccagcacgagaccgaaacccggaacacagaaaaaaggaagaagaaagaaggaaggaaagaagaaggaaagaaggaaaaggaaggaagaaaggaggaaggaaggaaagaaggaaggagaaggaaaacgggaaaacaacaaggagcaaggggagggaaaacaaacccacaagaggaaaaagacaaacacaaccagggcgggccgacagggcaagccaggccagcgggccaagggcccgcggggccgaaagccaaccagagcaagaggaagcaaccagccacggggccggcaccggcggcccgcagcagcacaaaggcacgaggacaaagcacaagaaccgaggaaagaggagaacacagcagccgggcagacaagacagcggacagccacgggaacaggccagcacagcagcgggcacaacccgggagcagcgcggaacaccaccaggcagcagcaggggaacaggccaagagagcaggggagcgggggagcagccgagaggagccacaggcgcaggaaccccccaccccgacagggggcgaaccggcaaagcagcagcagccgcggcccgcggccccgggcccaagcaggcagcgagagcaaaagggcacagccaacgagggaaagaggacagaacgcaccgaagcgccgcgccccggagcccacagacccacagaggcccaggaagacagcagcaccaccaccggaaccacaacccgacaagccagggcaaaaaccgggggggggggggggggggggggggagacaagggccacagaggcagccacaaaccaaagacagaggcacagaggcaccaccacacaaaacacgccacaaagaaccccacgcaacaaacacccacagaccacaaacaccccacaagccacagagacaacagagcagcccaagacagccaaacaacacacagcacaaaaaccagcacaacacgcaccacaacacagagaaaggcaaaacacacgcagcacagaccaccacacacacccagcaccccaccacacacaggccacaccacacaggagcacaccagacacacagcacgcacagacccccgcgcagccgacacagacgagcacaggaggagccgagaaaaccagacgagcggccagagacagcgagggggacagggccccccagcaccagccacccacccaacagccccagcaccaggaggagggggccggagggcagaggggaaccccccgaccagaagcaggggcgggcaggcagcaagccagcaggaaggcaggaaacagcccaggaagaggaagcgagagcgaggccagagaggccaggagagaggcagaggccaggagcagagggagccagccccaggggaggaggcagggggggacccgaaggcgccacaggacccccggaagaggcaaaaaggagggggggggcaccagaaaccggcccacaagcagacaggcccaacagccaaacaggggcaggaagccccgaggaggggagggaaggaggaagagggcgggagagggaggggcagccagcgcggcaggggagggagggccagagccgggacaccccaaaagagagaacaaggagaaaggaaggagaccacaggacgagggggcggggggcacacagagacccaccccaccccagcccaaaccaccacccacagccacagcaagaaacagggaagccaggagcggccgacaacaccgcacaagagggccccgacaccgccggggggggggggggagagggcacccaaggccaacccccccaacgacaacggcagacgacggggagggagagagacaccaggcgagccccgagaacgcccgcccggcaggcccccccgggccgaagaccccaacaaaacccgg

SEQ ID NO: 590 - skipped

SEQ ID NO: 591 - RNA, 6702 nt, Mus musculus
acccggccgcgcgggggggggggggggggccaaagcaaaacgacaggcaacggggcaggcccgcaggaggagagggggagcaggaacccaggccgccgggcaccgacccaaagcaggagggaaaggcagcaacaggacgggccaggcgaaaaccaagggaagaaagcccccagcccaaaccaagcaaggacgccaggaagaggggcgcacaaaccccccccaacaggagaaaaccgcgaggacgagagccaccccgggcggggaacagagacacaagagcaagaccggccccaaagcagacgaacccgaagcaagcaagaagcaaccaagggcggaggaaaccccacccacgcaggcaacgagggaagcagggcaggggagacggaaccacccaagacaaggaacccagggacagaaggaagagacaccaaccccgagcacgagccaccacacaaacccacccggacgcccaggaaccacgcacaaagaaaccccggaaacgaccagacggcgaagaggaacagggccagagcccaggagacggcggcggacggggggggggggggcgaaaaagaaaaacagaaccaggaaagaccccacaggcaacagaacagggccaacacgggggagccgcaaaaacaacagaagacagagagagcacaaacccaaacgcacgggaccggccggccgggagcaggagggagagagcaaaagcgccagcccccaagggggggccccgcagaggggaaaaagagccaaagcaccaccaccgacgaaaacaaaacaaacaggccagcaagacagccggcccacaggaaagggccgccaaaccaagacgcgaacccacagggaaaaagagagaacaaccacaagcggcccgagcacacacacacacaacacacaagcacacacacacacaacacacaagcacacaacacaacaaaaacaaaaaaaaagaaaagcaacaaagcccgaggagccgaacgggagacccccaaaaagaaaagagcgccagaaaaaaccaccacacacacgaaccccaccccgccagaggcggggcaggaggagcaaagccaggcccgcggaccggaagccagaaaccaggagcgccggggggcaaggcccgcgcgccccacagccccccaaacaaagcagggaggaaagaacaaaacccacaaaaacgaaagccgccaaaggaaagagcgggagaggcaaccgaaaccgggcgggaaggcaccagccaaacagccggcgaccaacacagaagaccccccggacccaggcgcgcaacaaaagagaaaaaccaacagccacgacagcaggggaggaagagaaagcccccacaggcacgggagcacgggaccccgaaggggccgcgaggcgggcaccggaggacggcacgagggagaggggccagcgaagacgccaacgggccggccacagcaggaacaagacccagcccgcgacacaggagagaccggcgacaggggggggggggggggggggggggacaaccccccccaggcccccaccaaggcccccccagaaccaaagccaaaaagcccagaaggcggaggccgaccccgaaccaccacagccgaaaacgaagggaacgaggggcacagacaagcggccgggcaacaagacgcaagcgggaggacaggagccaggcccaccccaccgcccagagccaaccacagaacaaaccgagagcaggagcgcgagaaaggaaagggggggggggggggggggggggcaggaaggcagccacagacaaagccaaggcagaagagcaaacaccgccaacagggccgggaagggaagggggagggggaaccaccacaaaaacagcccaacgaacaaacacgagaaaacagagacagaaaagacacccgccacaggaccgagccagcggggccggacacagccggggaaggcaaaaacagcagggacaaggaggagcaggcaggggcagggaggagcaggcaggggcagggaggagcaggcaggggcagggaggagcaggcagggcgccacacaagcgccggaagcagaaaggacggaacccagaccccccagggcacgccccaacccacgcccaccggcccccccaagagcacccacacccgaagaccccaggggcaaaccaaggccgagagaccaagaccaaaacagcagcaaccgaggaaaacgaaaaagcgaggcaggaacagaccaaacccaggacagaaacgagacccccaagagaggaaaacaaacgaacaccacagaaagaaaacaaaagcaaaagcaaccgaaagaaagcaaagaagcacacaacaaagaacgagggggggggggggaagagacagggccaccgagccgagggccagggcaccgagacccaggcagggcccagcgcggaagcccgacagcaaagccacggggccaagaggaaggaaacacgccccagcaaccagcccaaggaaccacccaaacgaaagcgggggagccgcgcgccccaagaagaggccgcagagccggcggcgaaccaggagccccgccagcagccaaggcgggaaggggaccaccacacgggccaccgaaggacgaaggaagggaaagcccacgaggcagacagagacggcgagggggcgagcgggggggccgacggaggaagacgcacggaggaagagcgggagccgagccaccccgcccgggcccggcccgccgcgccagcccaccgccacgccccagaaggaagccacccacggacagggcacaacaaagaaaagaacgaaaaaaacacagacagagggcggagaggccaacccagcaccaggaggcagaagcagggaccggagcaaggccagccggcacaccaagaaccgaggggggcaccaacaaagagggggaccaacgcacaccacaccagagcccgacccgagccggccccccgagggacaaacccaggcgaccgaaccccgcggccacacgggccgaacaagccgccaagcccccaagggcgggagacaggccggcaccaaaacggccaagagcagccacgggcacagaacggagggcgcaggaccaaacacacagaccaccacagaacacccacagcaaacaacaccagccgggccgccgaacagaaaacagcagccagagccccagccccagaggggaaggcagagggcaggcgaccagcagggagaaggagggcacgcgcagggacggagcacagaagcccccaaggcgccagggggacacggaagccaagcacccgcccccagacagcacaccaggaggaggccccagggagggagccacaacaaagagaaccaaaaacagcggaaacaaaagcaaggaggagaagaagacacgcggaggacgaagcccacagggggaagagcgaggacgaagcccaagcgcagaggagggaagaggcgaagaacagccgggccaggagaagggggaccccgccaggcagccgggggagccaggcacaaggccccccggggcccagcacagcagaaagaagagaaaaagcaaccaacccccaccagccagagcgcaagacacgcagaacagccgaaacagcaccccacaggggccggggcagccggcaacagaagagcacgcccccaagagaggaagagggcgaacacccaaggagccccggcaccgccacagacagccgagcccccgcccacacccacaaggcgccaaaggcagccgcacggccagggggcagagcccgggcaccgggaagacacaagaacagcaccagagagacacccaccaccaggcaaggggggggccacaggaaagaggaccaaggaacaaggagaacacaggccagcaccagcacagagagcagcaggcgcagggggaagggcggcccagcacgcagagggaaggaccacccgccaggcacgccaaagcagagcagaagcgacgcccagagcaagcgagccgggccaaaagaaggagggcagaggaccaggccagaaggagaaggggggaaagcggcccagggaaggggagccaaagagggggggcgacaggaagggcaggaggcgggccaaggccagcaagccgccaggggaaaggagagccccccggcgcgccaaaagaggcgccccagaccagcgccaaacgagccggccgccagagaaaagacgaacgaaacgaagccagacccaaaaaggcccaaagagcgcgggcagagccccacagcaaaaaacccaagacagagaagccaaaaggggcgagaaccagaaaagcaggggggcaggacagggcacagagagaggccagcagaagaccacgcgagaggcagcgcagcaccacaaggggccacaaccacgaaccagccaaggaagcccgccccaaggcacaggagccgaggcacagacagcaggcaggcaaaacccaacacaaaaaaaaaaaaaagaaacaaggaagagcgaccaccccggaggaaaggccaaggaaagcaaacagaggaccccgcccccacaccaaggccgggacaaggaagaagggcccagaggccagcaacaaaaaagacagggacaaggccaagaggacccagcaccggggaggccggcaggcaggcccaccgagccaccaccaagaggcaggggaacccagcaaggagaccagcaggacagagaaagccaggccagcaagaccacaagcccaaaaaaaaaaagcaccacgcacgcgggggcaccaacaccgaacacccccgcaccacccgggaacacacaggaggcgccagccccaccccagccaacggaagcaagcagccccgggggggccggggagggaggagggggccagagaagagcagcagggaagagagacgggaccagagaggcagaacaacccccgggggggggcggggggggggggagcggcccaaccagcagagagcagaacagaccaggggcggggggcgagacagggccggagcccggcagccggaaccgcggaccagcgacccaaaccagagacgccgcccgcccggaggcggaacaagggcagcacggcacacagagcacagcggaaaaacaaaagaaggcaaacacccaggaccacaacggcccacacgcccgccaagccacaccccacccaaagcaaacaccgaaaaaagcccagggccagaaaccaggccgagagccgcagagccacagagagacggggcaggcgaaacaagacagcgggccaacccccaaccagacgcgcgaaagagcagggcaacaaaaccgcggacaggcagcagcacaaggaacccgcaggcccagggaaccccagaaccgcaggggacgagcgagccaacacaggcggggcaacacccggggggaagaggcagcggagcgagacaccgaaaaccacggccgacccagcaggggccggccgcggagcccccaaacacaaagcaaggaggagggggcagagagacccagagaaccaggaagagggggccaggccaaaccccagcacccacaggcaacagccaaacgagacgacaggagacacaacagacaaggacagagccagaaagcgagaggcaaagcggggccggcacacagcagaccgcggcggcgggagacccagcgcccaagggaaacaggcgggcacacgccccacacacccaggcccaagcacagagaggaggggacgcgaagaccaaaaaagccgcacaaaagagcagaaaaccacccacccccgggcggccacgacagaggccaccgacaacacccacccccgcacagcagcaaaaccagaggcgaaagacagccccacccccgggccccaaaaacaacggggcgcccagcgccacacacaagcagacacaggcgggcgggccagacacaggcgcaggccacaaacggggaggggagcgcgagcccaaacgccccaagaccgacccgaaccaagaaccacacgggccaagggggagcaaaacccaggcgcagccaagggcccagcaggagagagggagagagggaggaaaggaaaggagcgggggaggcggagaaaaaggaggaagggggaaaagggagggggagggaaggaaggggacaggggaggaaagggagagggaggggaaaggagaggaaaggaggaagggggggaaggaagaagggagagaaaagggaaaggaagaggaaggggcgaaagggaggaaagggggagggagaaggggcagaggcgaggggcgcagaggggagagagaggaagcgagcaccaaggagcgaccaggaagcgggaagccagagcccaggaggggggaaggggagggaggcgggggaggcggggcggccacggaaccagacccccagagccggccggccgcagcgccacgaccacgcccggaagcccggggacccggggagcagggcccccagacccgcagccccggggcccggggacccggagaacccaacccgaggcagagccagacccgcacggccgaggcacagccgggccgcaggccccaggcgagccccgaaccccgcgacgcaagcccccgcggcccaggggaaaccgcgaccccgacggaccgccggggggaaccgcccgccgagacggcaaaaaaaaaaaaaaaaaaaaaaaaaagaggcagagggagaggacaacccgcggaaaagaagcaacaccccgaacgcgacgccaacccagagggaggcagcggaaaagaacaacaaagca

SEQ ID NO: 592 - RNA, 578 nt, Mus musculus
acgacgcaaggagaaaccaaaggcgggaaagaggacaagaaccgggaacacagcacacccaaccacggaacagcaccagcccggacacgcaacgggaaaagcacagacgggccaaacaagccagcagccagcggacaggcacacaccacgccaaggagcaaggggacaaggaaaccaacgcccaaccagaacccagacgccaccaacaccaagacccagggggaccacccaccaaccaagcaacaagagagggaaacccccgagcaaccccagcagcacaccccagccaccaaacacccgcccgcagcaagccaccgcccccagaccacgcccaccccgccgccaagcagacccaggccagcgcaagggccgggcaccggcaccacagccccgcagccccaggaggccggagagccccccgccagccgcaaagaggagaaaaagagccccaaggcaccaacagagaagccacgccccccgagccccgcgggccaaggagcaccccccaagacgcaccccagcccacccccagccgcccaggcgccagagaccacacgcgggaccccaccaccccgcag

SEQ ID NO: 593 - RNA, 32436 nt, Mus musculus
aaaaaacagaacaaaaaaagaacaaagccaacaagaacacacaaaagaacagaccaaaaaaaaacaaaaaaaaagacacaccggagcgaggcccagacagggaccaaaccacagcaaaaacgcgcaggaaagacaacgaagcaaacaacaaaaagcgcgcgcggggaaaagccaagggaccagcacacacagaagaagaaaacaggaaaaacaaaaaagaaggcagaaggcccaggcaagaaagaagaacgagaacaccaaaagagaaacgaaagcaagggggaaagccaccaaggccacaacaccacacaccagaggcccaggacacacaaagccagcggaagcgcgcgcaggagaacgagacaacaggaaccacagagggcaaaacaaaaacgcagcgggaagggcacgaacagcacaaggaccggcaacgacacgcaggggagaagaggggacaggggggagggaaggaaagaacagagccagaacaagccacagcacgcacaggagaccacaccagcccacgaccgaaacgccagaaacagcaaaacaagcaaaaaggcgcaccagaagaacaggcacagaacagacagaagcgccaggcacaggggacaagaaggagaacaggagaaggcaacaacaaccaaacgcacgaaaaacaaacaaaccacacgacgaggcccagcagggaccaaaaaaaaaagaaaaaacggccacaagaaaaagaaacgccacaggacccaagagggcagcaaacacccccggcagacagacaggaacaccaagagaaaaaaggagggaagaagagacaccaggagaaccgcaaaaggcggagcaggcggcacacgggggagcgccacgccgccacggaggaggcgacgagaggagccaggccagagcgagggcccgcaaaagaccggaggaaggcagaggcaaccgaaaaggaaaaacggaacacccaaaaagggaaccccaagaggggaagacgacaaagaaccaagagggagggacacacagggaaaggaaaagacaaccaggcagagacaaaccgagccaagccaccacaaaacaaacaacaacagagcgaagaaagggacggagggaccccccccaaaagcagagaagaagaaaaaacagcaaaaggaggggggccgaccagaaacaacacaaaacaggaagacgcccaacggaaaggaaaagagccaaaggaacacacaaaagacaaaccccgaaacgcaggacaaccaagaaaccagcgcgaaaaaaggcacccaaagcaaaacaaaaacacaccaacacaccccaaacaagacaaccagaaccaacgccaaagcgcggagacagaagagcagacagggaaaacagaaaacccccaaccacaagaccgagaggccaagcaagacacaacgcccagccagacaacccgagaacagccacccgggacccagacaacagccggcaacagacgaaaaacacgcaccgcaagccccacgaacacggcaggggggaacaacagggacaacgcccaggcccacccccccgacagcaacagccaccaaccagccagagaacgagcaccaaccagcaaaacaaagagagcagcaaagaacaggccgcacaagaaggaaccagagaaagccaggcccgggacagagaagcccagacaaacagcacaaagcggaaacagcaccacaaaaaagaccgaagaggaaagaggaccagaaaagacaggagggaacacgacaagaacaaaaaaaaaagacacaaaaaagaaagagacaaggggcaaaaaccacccgcccggggcagaaacaaggaagaccgaaaagaacacacggacgacaagacagagcccaccaacagccaaagcaaaagaaaacaccaccacaggcaagaaggaagcgcagagaccaggccaagcaacagccacccagcccaaaccagacacacgcacaacaacagaaagccaaagccaggcaaagaacaagaaagacgagaggcccacagccagacccaaaacaagcaagcaaagccaggaaaaacagaaaaccacaccacggaaggaaaaaaagggcaaaaaaaaaggcaacagaaagggcagacaaacaagcaggaacagaagacacgaccaagggacaaacaaaagaaaacaaaccagacagcaaaaaaggaaaacccagcagcaaaggaagaagaagagacgaagccaaaggacagaggaacgcaggggccaaaaaaagacacaaagagaaggcgaagagaggaaaaaggaggccaacaacaagacacaggcaaggggaccccaagggcgcgcgaggagggaaaccgaaaggggacggaggagggagaagggcccaggcgagcacacaggagaaagcgggggcggaggcccccccccacgcaccacgaacccgcaccgacaggggccaccaacaggcaaggagcacaacacaaagggaggaagacgcgcaagaaacaaagaaaacaagaacacgaacacaaggaccaacagaaaaggcagaaaaagagagaaagaaaaaaagaaaaccaccaaagcacggaaggagcgaacagcaaggaaaagcacaagagggcaaacccaggacgaccgcaacacaaagaaaagggacagacagaagaacaacagcaacaacgagaccaggacagaagaaaaaaagcaggaccagaagccgcagaaacacagcggcacagaccgaaaccaggcaggaaccagaggccacaggcaagaggccccgagaaaagaacagagagaaaagcagggccacacaggcacaaaaacggagcccaaggacagaggacagcaaagaagccgcagacgggaaacgcagacagccccccaagcaggagcccagcagaagcagcacagagggcgagccccaaacacaacaaaggggcggaggagggaaaaacaccaaagaacaccagaccaggaggaaagaagcagcggagaaaagggaaaacacacaaaacaaaagagcccccaaagacaggagggacgagcgacaggaaaacgaagccgagaccacccaagccaaacgggaggggaacgcacaaaaaagcacaaaaccgcccggcccccaccccaacgcacggacaggagccagagggagggccagcagaagagggagggaaggagacagcagggggacaccccaagacgacacgagagaaaacaagcaaggccgaagcaaacggagaaaggaagaaccgagaggcgcagacagcccccagaaggcggcgacggggcgcccacggaggaaccaacaaaagggagccccgacaccaccgaaagcaaccgaaaccaacgcaaagggagcgcacaaccccacgaagaaagccgaaccgcaagcaagaacacagaaaaagcaggacgaagacggccacaacaaaacgccaagagaaaaaaaaacaagcgagaaagccagacaagacaacaagagacacgcaggaacgaaaaaacgaagaacaaacaaagagaaaaaaaaacagcaaaacaaacagggaagaagaaacaaggaaccaagacaaaaaagaagaaccgcaggcaagaaaggaaaaaaggaaaaagaaaaaggaagcccaggcaaaagagcagacacacaagaaacaacaccaagaagcccaaagaaaagaaaaacaggcaggagaaaacgccgaaaaaagggagcacaaagaacaaaaccacgaaagaaacaacgagaaggaaggggggggacacaaacacaaaaaaagacagggagcgaaaaccgcagccaaccaagaacaccgaccaacaagaaaccgagcacagaagcagccaagcagaccagacccaagcaaaacacaaacaagcaagaagaagaacaacaagaaaaagaagaagagagccgacaaaccacaaaacccaacaccgaaagaagagaaaagacccgccgcagcaagcaacccagcgcccagacacgacggacacacacgaccggcacgaaaacaagaggaaaaaaaaaccacaagacaacaagaggaagacgccagaaaagccagcagcaaaaaaaaaacacaaagaagagggcaagcccaaaccccgaacagccagcagcaacacaaccaagcaccagggagaagaacaggcacaagcacccccggaaaacagaaacaaggcaaagcaaacagagggaagaacggcgcagaaacaccggcgccaaaaacagagccacgcaaaggaaagaaaacaaaaaccgcgcgcaaaaaaggagaccggcagcaaaagggaacaaaaaaaagagaaaagagaaaggcaacgggaagaacggaaaacaaacgaaaggcagaaaacacgacagaagagcagcaacacacacggcaacggcgggaaaagcaagagccccaagacaagcagcacgccaaaccccgcccagcaaaaagaagccaggcaaaccaaggggagaccaagcgaaaaacgaacaaaaacaaaaacaaaacagagcaagaaaaaacgacgaagcaaaagacaacagacagaaaccgaagaaaaaaacgccaaaggaccaacaaaaaaaaacagaaaacacaaaaaaaaaacgaacaaaaaaaagcgaaaacacaaagccaaagaaaaggaacaaaaagcaacaaaaagacgaaaaaagggccgcacggcaggggagaggccaaacaggagaaacaccaccaccacacacgaggggcaagagccagagcggaaacaccagaaaaccgagcccagccacagaaagcgaagaccagcagaaaacaaaacgcccaaaaacaccaaaagacaacacagacgaccaccagcccaacacaaccccgagaccggaaaaaagaaaaaacaaaacaaaaacccacacaacagagacccccacgccgcccacacccagaagaggagagccaaaaggcaggagaaggagccaaccaacagagcaaaccaccaaagacaagccagaaaacagaaaggagaggagcaacgagacaaagagcccaaaacaaccagaaagaaaggcaacggaagagaaggaaaacaaaaaacaaacccccccccccccccagaaacaaccaaaacagcacccggccagacgcacgcaacccagacggcacacaccggaacgccgccacgagggaacggggggaccacaccgcaccaaccacaacacccagacaacacgccgaggcaccccagcacaccacacagaaacccggcaaagccacagacgggaagagaacaggaagccagacaacaaacaacaaaacacacccacagccgcccggccagaaacccgcaagcgaaagccacacaccaccaacaacagccaaaccagagccaagaaggccacagcacgcacagcaaacagacgacgccaccccccccccacagagaaaaagcagcaccgaaagaagaccaaaggaagaagcgaaaacagaagacaaaggaagaaaaagcccaaagagcccacacgaaacgaccagggcggcgcaaaaggacagaggcgagacgcccagacgaaaaaaaggacaacagagaagaaagcggacaccacaaaagagacagagaggaccccggccacaccagccacaaggcaacgcacacagagaggaagagcacgaccagcaacaaacggacaaaccaaaaccgacaccaaccagaccagacagaaagacgacccggaaaaaacccaacacccaaaccgggcgacgagccaaagccagcccaacccacccaccaccaaacgacaccaacaagggggcacacgcacacgaagccagcagaaaagcacaccgaggcacaccccagaaaggcagcagacaccccgaaccaacagcggcgggcacacaaaggcgggagaggcaccaagcaagaggaaagaacaagcgggcccacccgcccgaccgacaccgaggacggccaccagacggcccagaaacaaacacacgagaaaaaccaacaaagcgacaagcaagacaggaaaagcaaaccgaagccagacccaccaccaaccaaaagacacgaggggcaaaacaacaagagaaaaacagaaccaaagccaaaagaaggaaagaaccacaaaaagccaccagccaaggaaaacagcacgcaccccaaaaaccaccaaaagaagaaaaacaaacacagaggcagaacccagaccaaagggaaaagccaaaaaagaaagaaagaaaagagaaaaaaggccaaccagaacacgaaaagcaagaaaaacgcgaacaaacaaaaaacaccaaaaggacacagaggaggagaaaggccaacagcaaagagcacaggccaaaggacagcaccacaaaagaccacaacagaacccagccagggaccagcccggagacccaaagacacagacaggaggcagacagcacacagggaaagcaccaacaaaaaagaggcggacaaccagagagcacaggaacaagaaaaaaaaaaagaaacaagaacaagaaaacacgacagaaaccaccgagaacaacagagaagaaaaggcaaaaagaaagaccgagggcgggagaggccaggggaagagcaccgacgccccgaaggccggagcaaacccagcaaccacaggggccacaaccacgaagagacgaccccccggaggcgaagacagcacaggccacaaaaaaaaaaaaacaaaaaaaaaaaaaaaaacaaaaaaaaaaaaacaaaaaaaaaaaaacaaaaaacaaaacaaaaaacaaaaaaacaaaaaaaaaaaaaaagaaagaccgaagaagacgcaagaaaaaggccgaagagccaagaagagcaagacccaacaagaaagggcaaaccaaaagaaaaccaaacaacagcgggcggggaaacaaaaacaaaaacaaaacagcacccacaaaccagaaagagaaaaaaacacccacacaacagcagcaacagagcaaaacagaaaaaaaaaaggaaaggaagaagcaaagaggagcgagagacgacgcagagaccaaaaccaccagagagaacaaaaacacgaaaagcagggcacaaaacaacaacgagccaaggcaaaagaacgccaagaggaacaagcaaacagcccacacaaaaaaaagaaacaaaaacgaccaagaaaacacaccaaaaaggaaagaccaagaaacaaaaaaacaccaagaagaacaaaagagaaaaagacacaggaggcagacagacacagggaaagcaccacacaaaaagaggcggacagcacgaagggaaaacagagaaaagaccaaacgaaggaaaacagaaagcaaccccgagcaccaagacacacacaggaagaaaaccagaaaacagaaagcagcacaacccaggggaccaaagggcaaaaacaacacaggacaagcagaaaagacccaaaagccaaggaaccgagcaaagaaagcaagcggagaacaccacccaacaaaaacagaaacccaaagaaccagaacagacacacaagaaaaaagacaccaggaaaaaacaacaagaaaggagacgacaaagaccaaaaagaaagcagaaaagaaggcacccaacaaacgcggaaaaggagccagaagaaaaaaaacagacaaacacaccaacacaaaaaggcaaagaagcgaaaacccaaaaaaggacgaaaaggagccaaacaagaaggaagccaagaagaaaaagggcacagaacaaaacggcacagcaaagcaaagagaacagggcaagaacgcagaaacagacaagggcaagaggagaaggaacaaaaaacaaaaccaaaagccaagcaacgaagaaaggagaagaaaaaacagagccccaagaagaaaacaaagacacgccagcacagggaaaacaaacaaaaacacgagacccacacaccaggaaaggcacaaaagaaaagaacacaacggggaggaggaggaagacagcccagacgccgggaaagaagagccacacaggaaacacaggagagccaaaaaacaaaacaacagacaaagacaacaggcacccaggaaacaaagaaccaaacaaaacacaggaaccacagcagcaacagacacaaaggaaacagcacagccagggcgaaagaacgaaacaaaaaggacaagaaaaaagggagaacacaacagcacggcagcaagaagaagaacacgaagaaaaacagaagcaaaagcaaaaagacagacaagcacacaagccccccaagggcagaaaaacagaaggaacaaaaaaagaagcaggagggaggaagaaaacaaaaagggggagggaaacaagagagggaaagaggaacagcaaaggaggagaacagaagaggaccaaacccaaggaacaaggaacagagccgaaaaccgagaaagagaaaaaaaaacaaacaaacagcaagcaacaaacagaaaggcaaaaccacaggccagaggggcaaggcagggaagagacagggaacaacggcaccgcagccaagacccaccaagcagccacagcgcacagagaaaaccaaggcaacaaaaacagaacaggcagaagaaagagcgaacccgaaagaaccaaccaagcacaacaggagggagaacacccgcaaccccgccacggcaccacaaaggccaaaagccaacggaaaggaaaacaagccaaaggaagccaaaaacaaaaagaggaaacagcccaaagccaccgcccagaagccaacaaacagcaaagcacacgaccaccccagcacgagcaagcagcaacaggggccagcacaaaagaaacaccccccacagcaccaaaacaagcaaacagccccagggacgcgacacgagccaagaagaccacccaaacaaccagccccagcagcaccgccacaaagagcaaaaaagcaagagaaccaccacgcaaaagggaccaaaaccgcgagccaacagacacaccaagacagacagaacaccaagaccccagcaaggaaacacacaagaaaggagccaaggccaccgcaccaaaaccaaaaaaaacaacagcaaaacccgggcccaccccgaagagcgaacaccagaggccggaaccagggcgccaaccaaacagaacgaggcccaacccaaacgggaacaaagaaagaaagcaggggccaaaacaacagaagcggcacacgaagaagaagagaggaaacgaaagcaacacacaccgaggagcagggggcagagaacgaagaagaaacaccaaggagagaaaggaacacacacaacggcccagcaaaccaggaggaagcaaagcacccacgaagacaccaaccacaacggggggaagagaaggcgccacaggccaacaggaagcggcaccagggagagcacagaaagaagaggagggggccgcggaggaagggaggggaaggccgaggcaaagcccgccaggccaagcaccccggccgggaccaggggaacccagcacccccagcaccagccccgaacggccgcccgcaaacccggaggaagcaagacccaaaaagccccaaagagcgggcagggaccacagcaaagaacagaccaagaaaagcagacaaggccccacaagaaacacaaaacaacaaaaagcgaaaagcacgagcaacacaacaacacaaaaaaccagagaaacgcaggaacccaacccagagccagcaaaccccagaggcaagcgacaggccagcacaaacgcaagagcgcacgaccaacagcccacaaacgagacaaaagaaagaaaaaaaaaaaggccaacacccaccaagagagaaacaaagaaaaagaaaaacaaacaaacacgccacgaaacggcaagcaaagaggcagaaaaagagagaccacaaggacacgagaaccccagaaccccacgaaaaccacaaccagcacaagacgccacaaacggcaggcaagagcagcagaaaccaaggggcgacgcagaacccacaaggaggacaccgcaggagggcgcagggaacacaggcaggccacagaccacaacagcaccaggcagcagagcaagaaccaccacaagaaagagaagaaagacaagaaagaaagcaaacgcaaaagagaacaaaacccagccacgagccaaccagagacggcacccccaaacacaaaaacaaagaaaccccagcccgggacgcaaaaacacaaaccagccacacagaacgaaaaacaacagcccaaaaaacaaggcgacaagccgaaagggcaagaagaagaaaaggaaggaagggggaaaaaaggaaagccagcaacgacggcaggagaaaagcccaaaagggaagaacagggggcaaggacgacggaaaaaaagccaggaggagcaaggggggggccgggaaagccagacaggaaacgaagaaagaagccccgaccgggagaccagccacggacggaaccaaaaaagagccggagaggccgacgccagacgcaagcagagcagccccaagggcaaaacgagcgccacaccagcccgagaggcggaccaaaacgagcaaaaaaagccccgcgcaagaaggaagcaagagaagcagaaacacaacggcaaacaaagacaaaagccaagagaccgaaacccggacaaacggcaaggaacagacagacagcccaaccgagccgggcgccacccagaaagaacgccacccagcaagagccaaaccgacacacaggccggaggacaaggaaccacaggagccaggcacccaagggccggaccgccggaagcgggagagcagggccgaagaagaaagaaagggcaagggcggaggacacagcgccgccgagggagagggagcgacacgggagaaaggcgagagggccaacaaagaggaaagaagaaaccaccgaaggaaaaaaagacccgccggcggaaacacgaagaaaaacacgcccaaaagccaaaacccagaaagggacaaggcgcccccacgcagaagaaaaaacacaaccaacggaagagcaagccggccgaaggacgaacacacaacaccaaagacagggaaacacaaacaaccgacaaaacccacaggcaagccaggagagacacagaagagaaaaagacaggccagaagggaaaaaagcaaaaacaagggaacagagaaaagagaccggaaaacccccagaaaaaaaccccagccacagaaggaaaaaccaaagccaaccaaccaaaggccaaagaggagagaaaaacaagaaagaaagccaggaagagaaaaaacaacacaaaaagggaaaaaaacaacacaaaaaaaagcaaaacaacagcccaaagagaaaaagaaggaacaggaacgagaccggacacaggaagccaaaacacagagcaccgcacacacggcgaaaccaccagcaaacacccagaagaaaacccagcacgaccgcacgagaaaacaccggcgcaggacggggaagcccaacccagcacgaagaaacgaacaagagaagcaaagccaagaccagccgggcgccacacagccccaccaggagagccccagaaacacaaccagccaaaagaaaccccaacccaaagggcagaacaagagacgaaaccaccaaacacaaccccacagaaaacaggaaagaggaaggcaaaaacaggccaaagcccaaaaaaaacaaacacaaaaccaccacagaaaaccaaagagcaaaacagaaaagcaagaccgccaaaaccaaaaagcgcgcgaaagcgaaaacagaccgccagcgccaagcaacccgcagccacacagcaaaccaagggaaggaacacagcacagccacagcaaagaagaaagacagggggccagggcgcaacaaccacgagagaccggcacacggcgccaggggggggccccacccccgaggcaggcccagagagccggcaggccggaaccaccagaacaggccgaagagacagaaaagggaagaaaccaagagagaacaagcgcaacaaacacgaacgcacacaaaagaaacaaaaagcaaaaagaaaaaaacacccaccgagaaacccaaaacccaaagcagcagaaaaaagaacaaaaaaccaccaagaaagcacgggagagaggccagggaagagcacgacgcccgaaggccgagcaaacccagcaaccacgggggccacaacaccaaagagacaaccccccggggcgaagacagcacaggacacaaaaaaaaaaaaacaaaaaaagaaagcacgaaaaagacaaaaacccaagaaaaggggaaagagaacccaaagagacaagagaaaagccgcaaaccagcaaaaacacaaaacaaaaacccacaacagaaaaagaaaaacaaagacaaaaggggacacggaaaaacaaaaaacaaacaaacaggggagacgcggcaccacagggaggcgaaaagaaggacagaccaaggcccgcgggcgaacaaaggaaaagacaacacgaaggagacaaagagaaagagacggaaagggagaggaaacacaaaggccacccacccaacaacagcacccacaacaaaaaaaagagccaaccccaaccacaaagacgagccacgaaggggaacaaccaaaacccacaaggaaagcggcgcgaccccgagaaaaacgccacgcaaaacgaaaaaaagaagagaaaagaggagaaacaaagcaagggacaaaaacaccaaaaaagcaaacccaaaaacacccaaaggcaacaacaagcagagaacaagaagagaaaccaaacaaacagcacacagacagagaaaagaaaaaaaaaagcaacaccaaaaggcccccacccccccccaaagccccccacgccccccggcccgagacaggcccccaacacccagcccacccagccgcccccacccccccccaaacccaccacaaccccccaaccaaaaaaggaaaaccagaagaaaaaacaggcacaagacacgaaaacagacgagaaaaaacaacaaaaggaccaaaaaagcaggagaccaaacagaaaaagacccaagaacaggccaggccgaccacacagagaacaacaggcccccaaagagccaaaaaagaacacagccacaaaccaaaaagacagacaccgaaccaaaaccaaaggaagacagacgacagaacacagacacacaaaaaagacagacgagggagacagacgagaccagaagagaaacacagggacgcagggaggagaaaaagccgacaaagacaacccaagacacaagcacgaagagccagacacaaacagcaaggaaggcgaggagaacccagccgcaggaaagggaaaaagcaaggcaccacagggcgagacaaggcgacacacagaagacgaagaaaagagacgaggcaagaaagaaacaaaggcaaaacgaagaaacaacccagggggcagccaccagacacagcccagaaaaagccacacaacccaacaaaagccaaagcccagagcgggcaggaccaccccaaacagcacccaccaaaagcccaagaagacaccaagggacgggcgccaccccgaggccagcagacaccacccaaggacccccccgccccccccgggccccccagacccaagccggaaagcaaccagcacccccgcccagcaaggcgggcacacaaccaaagggggggggggggcgagacagggccggagccggcgccggaaccaccgagaccaggcgcccgaacgagaaacgccgcccgcccccaaggcgggaaaagcacacgcgccaccagcccagcacaaccaaagaaaaagaagcaaggcacaacagccgccggaggcaacaggccggggcacaaacagacaaaaaagaaacacaaaaacaagcagaaacggaccgaagacaaagcgaagacacacaccaaaaccccggaacaaaaacagagcaaagaacaggacacaaccaacacaaacagcacaaaaaagaaaagaaagccaaaccagaagaacgcgaaaaagaaaaaggaaaacaacacacgaaagccaggaaaaaagcggacgaaacaacaagaaagaaaacaagaaaaaacaaaaacacacagaaagaacaaagaagacagaagaggaagccccggccgagcagcagaaagaacagaaaaagcacacaaaaagcaaagaacagaccaaggaacccgcaaaccaagacacgaaaaaacaaagacagaagaccaaaaagagggaaaaaacaaaaacccagaagccagcaacaagacaaaaagaacaacgcgaggaaaccaggggcaaaacagaaacacagcagaaaaaaaaggccggcaaaaacagagacagaacaagaaaaaacaggcccagagaaaaagccacgaccgcaagaagggcagcgaaagagaggaacaaaggaaaaaaaaacaaaaacaaaaacaacaagcaacacacagcacacagaaagcaaaaacacacacagagaccacaccccagaggcaacaaagagaaaacaacaaagcagcaaggaagcagagaaaagagcaccacacacgccgcgagcagaacggcgccaagaacacaaaagacaaaaacaggaaagaggacaagcaccaaaaccaacagccaggaaaagcaacaaaacacaacagacgaaaggaaaggaaaaacgcaaacaaaaacagaacaacagaagaaagcagggccagaagaaggagagcagaggacagggagagggcgaagggagggaaagaagagagaaaaacaaaaaaaccaacgagaaaagcgaaagagaaagaagaggaaaaaaccagacagaaaagcaaaggcagcccccagaaaggaaacgacccaaagaggcaaagggagaaagccgcacaagaagaccaggaagccgggccgcagaggacagagcggacggaacagagacaaagggcgcgcaccagaggcgggaaccaaacggagagacacaggagcagcaaagccaacacgagccaacagcgccggacaggaaaaagaaaacgaacgggaaaggaaagagagcgaaggcagaaggcagggggaggaaagcaagacgaacaaccaaagcccaggacaaaaccgacaacccagcagcaacaacgaaagagccaaaaaaaaagacaagcaaaaagggaggggcggggggacacaccacccagcaaacgagggggccgagagcgggggcaagaacaaaaccacaacagccaaagcacaagagaaccccgcaaagccaaaaaaaaaaacaaaaccaagagagggggagaaagcaggaaaggggagcccagacacaacgcccaccggcaagccagccccacgaaacgaggaggcacacgccgcaaaaacacgaaaacaaaagaacaaaaaaaaaaacaacaccaaaaaaccagaccccacacagacgaaaacacgaagcggaagccacacggacacagaaagcagcaaccacaccaaaaaaggcagaaaaacagaaaaaaaacaacccagaacaagcagaccacacacagccacacaccgaaagaccccgccccaggaacacccgaaggcacacacacacacacacacacacacacacacacacacagcagaagaaggaaaggcaggagaacaacaacccgagagaagacggaaacgccagcagcaggcaggccgacggcagaagcgagacgccagcgaagcacagggaaaggacaacgaagcagcgagcaaaccgagcaggacggacagcacagagcacaaggaccgagccagcggagaaagaaccgacgagagccaggcaaaaaacacaaggaagaggaaaaaggaacaaaacccaacccacagaagaacaacagccacaaccacccaaaacacgcccgcaccaggaaggaacccccaacaaacaggaagaaccccagaacccagcacagaaaagacacaagccacaccaaagaccggaaaaaaaaaaaaaaaagggagggcaaaaacacagaaggaagggcaagaaaccaacaaaaaaaaaccaaaccaccagaagagaggaaaacagacaaagaccaaaccaaagaagacagcaacgcgagaaggaaagagaaaccagacaaaaacccaggaacaggccgaaaaacaaacaaaacaaaaacacaaaaaaaacaagcaaggacaaaagaaacagcagcacaaaaaaagcacacaaggaaaaaggaagaagcaacagcaagcaagaaaacacaagaaaacaacaaggcaaacaaagacaaaaaacaaaagagagagagacaaccaaacgccacaaaaagaaaacaaacacagaaaaaaaagcccagacgccaccaaacgaggaccccggccagccacaacagcagaaacaggaagacaccaagagaaccaaaacaaaacagcagacccaacgacaaaacaaaaacagaaaaccaaagccaaacccccccaagacaacaaaccccaaacagacaaaacaaaagaaaacgccaaagggagaacagcagaagacaaagcaagcagcagcagaccagcaacccaagaagcagaccacgacacagcccgccagagacacgaacgcaccgcccaaaacacaaacacgcacacaggaaaggaaccgggagcacaggagcacccacgccaccacagcaccaacccaacccagcaagaaaccaccacggagcaaacaaacccccgacaaggcagccaaaccaaacggggcaccagccccacgggcggggcaaaccagcacacaggaggggggaggcacaaccaagcacaaacagaaccaaagaccaaaccaggaacgcagagaacaaagcagaaccaggaaaacacaaccccagccagcaccaaacgcaccgcgaaggcgaagcaagaccgccaagacaagagagggaacagggccacgaaaaccccccacaccgagaacacacgacaaccaggagggagaccccacgcccaagaaaaacccaacccgcccaaccaacacaaccacgagcgaaccagaggaccccaaagaccgaccggacaccccacaccagacgggacacggcaccccaggagcaaggcccgaggcagaagaaaccagcacgaccaaccccagagcgccaccaaaacaccccagaaacagaacaaacagacacacaggccagcagggcccaacagcccccccaacaccagaaaaccaccccaagccagaaaaaccgaaccaaaccagccacaccacacagacagaccaacaccgaggcccacacgaccgacaaaggcggccgccgcccgcgcccacagagaggaccggggacagcagacacaacgaccaccaaaacccacagaacccaaaacgccacaggaccaaccaccaccaacccccaagagcaaaacccgaagcacgagcacgccagagcccaaaggcccccaaggaccaggacccgccggcccaacaccagcagaagagggcgcaaccacaagaagaagaagcccacgcccaccccacccccgcaacagaaagaccaagaaagaaacgaccagggaaaagccaggccagaaacgggcaggaaagagaccaacggaacgcaaggagaagacaagaggaaaaaaaaacaacccaaagacgaaaaaaagccaacgcaaagccgaaaacgaaaacacaagaggacagagaccagaccgacgaaaaccacccccccacaagaaggggaacaaaaagccaaaaaaccgaaaaaccaaaaagaccaacaagcccaacacacacccccaccccaacccccccaccagccggggaggggaggcagcacaacaacccagcgcaaaggggcgaagagcaggggaaaacgaaaaaacagggaagacccggcaggccaccacgaggaacgacagcccccaaaaacgaaagcgaacaagggaggaaagccaaaagaaaaaaaacgcaagcggagggagcacagccagcagaccaaggcggacgagccccaaaacaccaccacagagacagagcccaacaaacaaaccaaaccgaaaggagcagcaaaccagccaggccgaggacaagagccaaagacggaaacagcaggccaccgggaacagaacccagcagagcacggcaagaagaccacgaaccaccccagccccaaaacacgaagaagcaaagaagaagacaacgaaagggaaaccaccagcaaaaagcgaccaaaaaacagaagagaaagaggcaggaaaggagcggaacgaaacaaagacgccgcaaccaaaaagcaaacagggcaaaaccagggaaagcaagaaaaaccaccaaagaaaaaagcaagaacagcacaaacaaaaggaaaaagaggggagaaaaacggcaaaagaccaaaaaaaaagcagcacaacacaacagcaggcacacacacacacccaccacagcccccaacaaagacggcccaccccagccgcaaccgcacagcacagcaagccccgcgcaggaagccacacacaaagggagcggcgcaacaccacaagagaacagaacacaccagccaaagcaaagcgaagcaagcaaaggacagagaagcagcacagagaagcaacgaaaaaaaagcacaaaacaaaggaaaagccagcgaaacagacaaccaaggcaccgaaacagaacaagcagggggcggacaggaggaaccaggggccagcagccaggaaaaggcacgcgaagagagggacaacagcacaaaccgcgcaaaaacagaaggggcgcggagaagcaccacagccagccagcagaaaagagcccaagcggcacgcgagagccaccgcccaggccaagggaggcaacggcaaagaacagcaaagcaagcaaagacaaaagaccaaaaaaaaaagacggaaacaaggcaagacaccaacccagccacagaaaacccaaaaaacagacaaaagcaaaggagagacaaaccaaaaacggacaggaggccaaaacgccacccaagaacgcaaaaaagagacaaggagagaaacaggacaaacgaacaaaacgggggggaaacccagagaggcagcaccaacaaaccagcagggaccagaaaagcagaaacgggaacgccaagaaaagcccgcagacaggcggaagacacagagccgacgccagaacgcaagaagacagggcggcaaaagaaacgcaccgcccggcagcggcaaaagcacacgacggcaagaaaagacacaaaacacaaagaaaagcaagcaagaaaaaagcacagggcacccaggcaacaaggccagaaaacaaaaagaaaaaaaacccgaaacaccgagggaacagacaacagacaaaacaaaacacagaaaaaaaccaaagcaacaggcaaaaagaaccacggggggccaaaacaccccagaaaagagaaaaagaaacagaagaaggacagacacacacgcacacacacacacacacacacacacacacacaaacacacacacacaaaaaacaagccagacacagaaagcagcgaaaagagaaaacggcacgacccaaaaaaaaaggacgagacaaaagccacccaaaccaacacaaagagaagccaacagaaagagccagaagaacaaccaacccaagcagccgacacccaaacacacaagaggcgaaagaacagaaccaacacaaggagcagcaggaccaaggaagaaaagaggagaacaaaaacagcaaagaagaaaaacccagagaagcagcacaacaagggcaaccgcaaacaggacaggagacggccagagaagcaaacaggaaagcacggggcagaagaagagaaaagagacagacaggacgacaaaggagaccacaacccagacgagccgaagaaagaaaagaacaaaagaacagaaaaacaacaaagaaaaaagaaggaaaccccgaaaaaagccaaagccaaaaaaagagagagagagagaccaaacgacgcaagaaacaggaacaaggacaaggcaccagagaaggcgacccaaggggccacaagaccacacaagcaaaacaacaggaagcagaccacgacacggacagacaggcagcaagacaccgccacaaggggaaagaaacccaacaaagaaaacaccaaacagacaacagaggaacaaggacccaagaacggaaagcacccaagaagaacaaaaaaagggaagaaaaaaaaaaaaagaaagaaaaaaggaacagaagaacagaacgcaaacgaaaacaaaaacaaaccaaaaacaagacaaacaaagcaaaaaagaaggaagacaaaacagacagaagggaaaaaaaaaagccaccaaaagacccacgagcggacacgaaacgagaaaaaccaaacacaacacagaaacgaaagagcgaaaaggaaaagaggaagagaagagcaaaaaacacaacaaacacagcaaacacaccaggagacggccgcgagcagagaaaaaagggagcaaccaaaacagaaaacgaacaggcagcaagaaacgaaagaaggaacgcgccagggggggccaagccaacccagcaccaggagcagaggaaggcagaccggagcaaggccagccgacgacgacacagagcaagcaggacagccaaggccacagagaaaacgcgaaaacaaaacaaaacaaaacaaagccaaaagaggaagcaaccaaaggggaaaacaaagacacacaacaccacaggaccaccaagagcacagaaagcagaaaacacaagaaaccagacagagcaagagcacaaaaaaaggacgcaacacgaaaagcaaagaacaagaaccccggaacccacgaacgccaaccaaggaaaacagcagccagagagagcaagcaagacagaagagaaccaaggcggagcccgaggccaggccgaaagcacgccagaggcaggggaacaagccccaccagaccccaggccgggcagggcagacccaccgaacccagaccgggaggaaggaggaaaaacagaaaaagcggcagcagaccaaccacacaagccaaacaaaaaggaagaggaagacaccagagcgacgcaggccccacacacaggcacaaacccaacacacacgggggccacaccagcaagagacaacacacaaccaacacaacacaaacagaaaagaaaaggacaaaaaacccgggcacaaaaagcaaaaaaacaaaaaagaaaacacacagagacaaaagagaaccaaagcagacaaagaccgcaaggccaccaaacaagacccccccaaaaacaaaacgcccccaagcaaggaagccaaacaaagacaaaaaaggaaagacacaagcaaaaaacccaaaaaacaagacaaaagagaccaccaaaacgcagcaacgggccaaaacagcaaaaaggaggacaaccccaagccgacgcacaagcccccgcaggcaaacaggggacggaggaaagcaaggaagagaagccaacaaggacggaaccccgaagcaaacgaagggagcccaccacaccaccggaggaagaaaccaccgcaaccaccgacgagacaaacaacagcagcaaaaaagacccaaaacacccaaaagaagcagagagagcaaagcagccacagaaaaaacgaacacaccccagaaccacagccaagccaggcgggccacggcagccagaaaggccccaaagggcaaagcccaacaacgaaccaccagccccaacgaacagacaagacagaaaaagaaaaaacgacaacaaaaagaacacacgcaaagaacaaaaagccgaacaagccaggaaacacggaaacgaaacaacaggccagaaagcaacacaagcaggaaaagcgcacgacacgaaagaacagcagaaaagaggcagaaaaagccagacccagaacaccaaaccgaaaaaggacagacaaacaaaaagaacaaagcaaccagcagcacaacaaccaaagaacaacgaaagacccaagccacccaacaagaggcacagccgaacggaaaccagccaaccccagagcgagaaagcagagagcgaaggagagcaaaccaccacacaaaccagcacacccaacacacgaacagccccaacccacagaggagcaccccacgaacaccccccccacacccccaaacccaccggcccaaaacggccccaaaggacggggggggggggggggggggaccacagacgagcgcgaaagacacagcaaggggcggacaggagaagccaaagcacaaaaaaagggaaccagcccaacgacacacaaaacaccccaagcaagaccagagaccacgcagaaaagggcgaaagaaagagccagaggacagggagggaaagagacccaagaagaagaagcacccaaaagccaccaacagagccaaccagagaaaacaaggagaaaccaagggacagcaagaggacaggagaaggcccaaggcccaacccaaaaagaaaaaggcaacaagggagcgaggcagaagaagaaacccccaaggaagagcacaccagcggcaacaccaaaggcaaggcaaaaaacaaaacagaacaaacagaaaagaaaagcagcgagaagggacaaaaaaaaaacacacacacacagaacaccaaaggaaaaaaagaggccaaaagaaagggagcagaggggaaggaagagggaggggaagaaagaagggggaaagaggaacaaagcaagaaaaaaaaaaaacaaaagaaacaaaagaaagaaagaagcagcaggaagacaggaaaggcacgaaaaacccacaccaaaaaaaagagagaaaaaacgcaaagacccagaaaggcagacagacagcacaacaagaccgaaaacgaacaaaagcacccaggacggacagagggaagaaaccaaaaccagcccagcagcacacaccaggaaaggagacagagaggaaggggagaaacgagaaggccagaaggcagaaagaagccagcggggaggaaggcaggcgcagagacaacagccacgacacggccaggaagccagagcagagagcaaagagacgaggaaagcaaggaacacaacaccaagagagaaaacgaccacaagcacggaagaaaaaaccaacaaagaaggcaaaacagacgccaaagcgaaaaaaaacaccaaaacacccccgccccacccacccccccgcccccccagaaaagaccacgagagccacgggcaagaacaccgcggcccagaagcgaaaaggcaggaagacagccagcacaccaaaggggaaggacgcccaggggcacccgcaaaaaggagacaaggaggcaagaaaccgccccggcaggcccgagcgggaagaagagaaagcagcacgacggacccacgaggaaacaagaaaagacacagcagaacaccaaagaccacaccacagagagcggagaggaaagaaaagcacaaaaaagcaaaaggcaaagagacaaacgggaagccaaggaagaagggccccggagccccggcccacaaacagcaaaaaaaaagcaccagggaagagggacaaaagcaaagaacaaaaacaacccagaaacagaaaaaagagacaaaaagacgcacgaaaacccaccgggaaggaaccaaaaagcgcgggacacagacacagaccggaggcaagacaaaaccaaaaacagaaagaagccacagcaagaacaaagacaggcaagaaaaagagaaaccacgagaccggcacaagaacggaaggagcaagcccaccaaagcgcgcaaagcaacgggaccaccagcaaagagaaacaaaaaaaacaacaaaacagagaacaaagacacagacaaagacaaagaaagagcgaaaagacaggcacgcaggacagggggccgcgcagaagggccacgcagcaggacacggacagagggagaccacaaagggaggacagaagccccagacgaagccgagccacaagaccaaaagaaccgaagcacaaagccagaagcagagaccaaaagggaagcggggggggggggcgccccgacaaaccgaccgacaaagacaaagaaagcaaaaaaaaccggagcgagcaacacacaggacaacggacaacaagaaagaggcagaacaacagcagccagaagccccgccagaaagaggcaacagagggaaaaagcaccagccagaggaacacaaaaaggccccggcacacaggggagcaccaccaagaacaaccaaagcgaacagggaccgagccagacaagaaagcaaacaaaacaggaagaaggacagggaacaagcaccaagaacaagcaaacacaagcaaagagaaaaaggcacaaaacagaaaaaaagaaccgaaagaaaaaaaccaagaaaaaaaaaaaaacccaaaaagaagaagaaaagagcaacaaaaagcagaacaaaggcagcagaacaacacacaaaggagaaaaaagagaaaaaaaaaaaaaggaagacaacacaaaaacggaaaacaagagcaaaaagaagggcaaccggggcgaagaaaaaaaagaaacggggcccacaagacaaaccgcccacaaaaagagggagaccacacacgagaccccagcgagggcgaagggccggagacaacaaagaccaacacccccgagaaccgacccagcccgggcaggggccaggaagcaaaagaaaaaacacagccacagggagcggagggcacagcccacgaccagcacacacaccgcagagacaagacgagacacaacccgagcggaccccacgggggaggacacaaagaaaccgcggaaccacccaaaacaaagagacaaaaacaagacagaaacaacaaacaagcaaggcaccccagcccggggaagggccaaggggcacgcagcaacaggaagccgggaaaagaggggggagagaaaaaaaaacaaccagaaaaaaaaaccgagcaagaacacaacagaaaaaaaagacaaaaaaacagcaacaagaaacaaagccaaaaaaagaagaaaagcaggacagcaaaacaaagaagaacagaagaaaaaggcaaaaaagaaccgacccaaggaagaggagaagggaagagaacagagaaagccaaaagagacaaaaccaaaaaagaaagaaagcaaacacgaaaaaaaccaaggaaaaaaacacgagaaagaaacgcacagacaggcaacgacaaccacaccccgaagaaaccacaggggggaccaaggcccagggaagcggaaggcacagaacggagagaaagaaaagggacaaccggccaagaggagaagcagaaggacagaggagggaccgcaagcaaagggcagcagcgcaagaacagggcaaggaaagccccccagacccccacagcagaccggaaacagaccaagggcagaaaccaaacaaaacaccggggcaagagcagacaaagacagggcaggaagggccgacaagagagggcaagaagaccaggaagagagcccaaaacacagaaccagcacgaagcaccaaaaccagagaagaagcccccagcccgggacaggaacaaacgcaccaaagaggaagcagaaagggacacaacccaaaccaagccaaaccagacacaaagccacacagaaagaaaacaaaccaagacaaaccaacaaacaggacgagaccaagccaaaacaaaaaccaagccacaaaaccaggaagcaaaaaacaacagaaaaaaaaagaaaccaaaaagaagaagcaaacaaaaaaccccaaagaaagaaagaaagaaagaaagaaagaaagaaagaaagaaagaaggaaggaaggaaggaaggaaggaaagaaggaagaaaaagagacaaacacccgaagcaaaccgaaagaggacggggaaggcaagccccgcaagaccgcgagacgccacgcaaaacgaacagaccaagaggccgcgccaggggcgggagaccacaaaaaaccccacgacacaaccccccaacacgaaaaaagcaaaaaaacgaagaagagaacccgacaacaaagcaagaagaaacacggcaacagggaggaaaccaggccagagcgcaagcaagccaccgagcaaccaagcgacgagacaggggaagcaacagacacaagccgcccggggcccaaaggcccaaccacaacccgccaccccccaaggcaggaacaggaaagccacaagcggcacagcaacacagcaaggaccgaagcaaccccaaacaccaccacacagacagacaaccgccgaaaagcagcagacagccacagaagaaacaccaccacagcaccagagacccaaaggccacagagagagccaaaccacgagggcaggcccaaggcaaggaccagggcacgccaagccacgaaccagaagcgcagagcccgcgcaccacaacaagaacaccaggcccacacgcagcgaacgcaacaccgggacaaagcgaggacacaacaacaaggcacaagaaccaggaaccaagggaaacccaaacacaaaaaaaaaaggggcaacaaaaaaaggggcccaaaaaagagacaaaaacagaaaaggaaaagaggacagacgggcaaaacaagacacaaacgacaaaagccaagcagcaacaaaaagacaaaacaaaaaaacaaaaacaacaaagcccaaaacaaaccagggcaagaaaacgaccgcgaaaaaaacacaagaaagagagcagaaaaacagaagcaaccaaacaccccagggaaaagcccagccgacacgacgccaggcccagacacggaaaaaaagaaagagcagagccaggagagaacaacgggaaaacagagaggggccaaacagcacaccaaggccaaaaaagcaggcacagcacagcagcaaaccacaggaaaaccgaaaaaagacacaaaaccacaacaagaaaaaagagaacaaaaaacagaagaaaaaaaaaaaaacacacacaaaaaaaaaacaaaaacacgaagaagcgcaacccggaggcaaaggcgggcccccagagagcgagaagaccacaaaaggcaccagaggacccgcccaccgcaagaaagacaaacaagaaaaaaaaacaaaagaccaggaaacgaaaaggagaacaggaacaacaagcaggcaccacaaggcccacacaacaaaaaaacaaaacaaaacaaaacacacacacgggaggccagggaacgaggaagagggcaggaaagaagagcgcagagaggggaggacaggcaggcgcgcgcacaagaccaagggcaaagcaccgccgcgcgcacaacacaagccacaagacaacaccgaacaaaggcgccaaggcccacccccaggaggaacaaacgagagcacaggaaccagacaacggaccagagaaaccaacaaggacacaacgccacaacgagcgcacaaaaggccaaggcagggaccaaacacaacaaaaacaccaaaacacaaacacaaaacagcaagaagccaagaaacccagacaaaaaaaaaaagcccaagacacacaccaaaacaagaaaagacccccagccaacaaaaaccaacaagcaccgaccaaaaacaaacaaacaaacaacccaccccagagcaacacaaaggaagaaccaaaacaaccacaaaacagcgagcagagaaacaacaaaagaaacacaagagaaacaaagaagagaaaagccagaaggcacagagcaaacagaccgcgccccacagcaaccacaccaggcaacacgcaaaccagcagcggagcaaacagcaccccagacaagcaagaaacaagacgacgaaggaaagacacaggccacgaacaccaaaaccgaaagcccccaaccaccaacaccgacggaaacaacggcagcgcgaaccggaaagaagccccagcacaaaagacaggcccagacacacgacgacaagcagcaaaagaaaaacggcgagcccacaaaaaccagaggaggagaagccagcagaaagccacgggaaaagaccgggggaccagcacccacacagccgaagcacaagacaacaccggcagggacacagaaacacgcaggcaaaacagcaacacaaaagcaaaaaaaacaaaagaaaaaccaaaaaacaagacgggaggacaggaggacacgcaagaaccaaacaccaggaaaaaaaaaagggcccacccagggaagccccacaaggagcgaacaacgggccccgacgcaagaccaacgagcaacgagacgacacaacacaacggcaaacaccacaagaagcccagaacacccaggccaaaagagcaccgcagagggcagcaggacaccacccaccccagcaaaaaaaagcccaggcaaagcgaaaaaaagaacaacggcagagggggcgggggggggcggggggcacacacacacgcacacacacacacacacacacaacaggaaagccacgcgacaaggaagcagaacagaacgcgggaggcccccagcagcacagagcccagagacggcaggcgaggcggagcagcacccgaagccgcagagcaccaacgaggcaccccacaacaaggccccagaaaagagaggagcaaacacggcaagggaagcaaagaagacgaaaaacgagagcgaagaaacaagacgggagaaagaaaaaaagccagccagaaaggacccgaagaagacaggaggcaggaaacaccaagcccaaaagccaccacagacagaaaaaaacaccacacaccggagccagaaaagaggccccagcacagagaaagacagcccgggaggaagacagagagccaaccgccccacagacggaacaaccagagccgcagcacaagcgcacacagaacagaaccccaccccccaaaacgcgagaagaaaaaaggccaggcaggcacaacaccaaccggccagccgccaagagaaggggcagaagccggccacaagcccagcaaaggaacaccagcgcagcagggacacgcggcgcccaccaacagcccgaacagccgcggggagaagcgcacgagagcagccccacaacagccaggacagccaggggacacaagggaagacccgccaccgaccacaccagacacgacgagagcaggagaaaccaccaagagaacaccgaagcagcacccacgccagcaacaggagaggaagaggaccggcaagggggaaaggcacgggcaaggaccccagaaagaaagaaaagcggaccgcccccaaaagacacaaaagcaccggagggaaagaaagagagagagagagagagagagagaagcaacagggagaacagaaaggaaacccaggaaagaaaagcagagcccccagccagcgaaaccgcaagcacgagaacagcggcaaccccacccacaacaagaaaaaaaagcaacgcaccgggggggggagacccggaggggagagaaacaaacggccccggaagaacacgaggcgaaaccacagaacacccaaccccgccccaagaaaacaaaaacaagagaggcgcagcagacagaggaacccaccagccaccccccagcccacacgggaagggggcagaagcagacacaaggaggagagacaaagccaaggcacccaacccaccccagacccccaacgaacacccacggcaaagcgcagcccgggcaacccaggccccacggaaacaccccaaaaagacagccagcaggcccccggagagcggcaggagaaggaggacaaaagggcacagaggaccaggagccgcacagaggaagccagccaggccccacagcaaagagcccgaccaagaaccacggaaggggaaaagaaggcaacgaaccaacaacccaagagcaggcaccccaggcagaaggggaggcagaaggcaacaagcagaacaaaaaacaagccccaggcccagaaaagaaagaacacagcaccaggccccgagcagacaagagagaaaagaaagaaagcacaaacgagccccgcgagccaacagagcaagaaagagaccacaaggaacacaggaaagcagacccggcgcccccccaaaacagaagccccccgcgcccccccagacgagaggcacaggccacaacaaagacgacccacgggaagcaaggcaggagggcgggggcaacgggcaacagagagaaacccaaagaagagacaaaagggaagcccgaaggagaggagaaagaggcgcacggaaacaagaggacggcagaaggcagcaaaccaacagagcaagccccacacaaaaggacaaaacaaaacgaaagacacagggaagcacagcagacaggccacggcgaaaccacaaacagcgggaaccagacgagccagaaaaagcacgagagaaaaacagccaaaggcaagaaagcagagcgcaacggagagcaaccaacagacgaaaacagagccccagggaagcaagggcacaagcccgcacaaccgcaggcgacgaacagggcggggaccaaagcaaaggcccccaaagccacaagaacgagggagacaagagggggccgggagaaggggcagggggggcgaggcgaaaagccacacaggccaggcccgcccacgcggaacagaggagcccagccagcccaggacaaggcgccacaccagccccaccaggggccacagacaacccccgaaacgaaagaagcccccaggaagcaaaagggcacggcagggacgcacaaagaaagaacacaagacaaggcaagcaggcaccaaacaagacaacaggacaagcaagcggccgaaggagacaaaagaaggaaaaaaagacacaaagaacaaaaagcagaaggagaagcaacagaaaaagagaagaacacaaagaaaagcagggaaaaaaacaaaagaaacaaaggagaaggaaaaaacaagaaaaaaaaccaggcaaagagccaggagacgcgcgccacggacggaaggaggcagcacaccagggaggaaacacaaaaaaccacgccccggcccccccccaccaaaggcaaggcccaagggagggggggggggagcagggcgggggagggagaggggaccggaagcggaaagaaagaagaaaaacaaaaaaaaagaaaagaaagcaagcaaacaaacaaaaaaacaaaggagcaccacccacccccccaccaaccagagagaggaccccccaccccaagccgaacagcaaaacaccccaaaaccacagagaagcccgccaacacaaggccacccccaaccacaccacccagcaaccgaaagagaccgcaaaaaaaccccgccaccagcaccaggagccgaaaaaacaaaaacccaaacgccaggcacccagaaacaaccccagccgaaagccagaacggagcagacaggagccaggggccaggagaaaaacgaacaccaccggggcaccacccaccaggcccccagggaaaaaccaacgacggagaccaggcgcgggagcccacgccccaaacagggacgcagacacacaaagagcagagaacggagagacgagaagcacacagaaaagaaaacaaaacaaaaggcacagacacacgggcaccaaacaacacgagaccggaaaggacgcaaccaaaaaagagcacggagcaaaaaagagaagaccacaagagaaaagaaaaaagggagaggaggagagggaaaccacagaggcagagcccacagaggcagaggcaagaccagagggaaccaaccggcagcagcaggaagaaagagccccgcaagacgacaacggaaccaccccagcccaacaaaaaaaagaaacagcaaaaaaccaaagcaaccacagaaaacacaaaggaagcaaacaaaaaaacgacaacccgaggcaaagccgggggccagacgggccgcagaggcacacaccccggcgccacgcaaacacagaaacagaacagagcagggcagaggcccgagccggcccacccgcacggcagagggaaacacacggcgaggagcgggggcgacaggaggccggggggggcaggcaaggaagcgaggggaccagaggagaaagacccagggaagaacagcaggacagagagacccaaacacaagggaaaaaacaaaagaccggaccaaaccaacaaacagacccaagccacaaacgaaaacgaccagaacgaagaacaaaaaaacaagagaacggaacaaaggaaaaaggagaaaaaaaaaaagaaaaaacagcggaaagaaaaaaaagaaaagaaaacaaacccagcaaagagacaccaacaaggaaaaaaccccaaaacacaaacacaaaaagggagcaaccaaagcaaaacaaacaaaaacccaagccagcagcaaagcaaacagaagaccaagggacaaaaaaaaaaacccaacagcaaaaccaaacagacacccgccgccaccgaggcgggagcaagcacacaagcaaacgagcccacccagggaagagacccgagcccggcgccgggagacgcgaggggggcacagaagggaggcaggacaggaagaagaggagcgcacgcaggaaacaagagcacaccccaggacggggaagaagcacccgccgccccaagagcagagccagcaggcccgaaaaaccgcacccacaggcccgggaccaggcaagggaaaccacccgagacggggcggggacaagcgaaagaaggggcagcacacgagaggggagcggggcagagggggcaca

SEQ ID NO: 594 - RNA, 7917 nt, Mus musculus
agaaaaggagaaaagggggaggggcagagagggagaccgggcagggcagcaccccgcccacccaccacacggcaggcaccacaagccaaccccgcgggcaagagcagggaccagcacgggaaacccacgcgccaggcacaccaggaggagccaggagcagaggaaagacgggcagggagagaggggaccagacacggcagcagacagacgggaaagggaggaaaaaaccccaggacgaaggagggggacccaggaccaccaggcagagccagagacggaccacaagggggccgaaaggggggggcagggcaacggggggcagggggaagaaacaccccaacagggcgagcacaaaacggacggagggcagcgccaccccccacaaggccagaggccaggagcaacagcaccaggaccggggccaagagccgagaccaacaccccccaggcgccgggccacaaggaagaaggaccaaaagcgggcagaaacgccacaaagcccccggaaccgggacccgcccgaggcgagccaccagggggacaaggcccggcgggagaagggcaggcaaccccacccagaaaggaacaaagagccgaagcaagccccgcccccaggcgcaaccgcgccacccgaagcacgagcagagcaagcaaccccacgcacccaaaacggccccaaacaggagccaagaagccgggagggcgagaccgggcaagcgcaacacccacagcagccagacagccaagggagcccccggaggccgcacagagaagggaagaagggaaccgacgagaagcggggcgaacacggcaaccaccaccccaacacggagggaaacacggcccaacagagaacaagacgagaggacgggccccggcacagacaaaacacagcgcagaggcccacacccccagagccacaaggcggggggggggggggggggccagcaggaacccagaagcaccgacccccccagccaagcccaccagaccaagaggggagacagagaagggagaggaaccccgccccaaaacgggcaacggacggacagcaaacaaacaccgcacaagcacaagggccgacggagacaaaaacagaccccaagggcaaaacagaacggggagaggaaaggcagaacgggaaccagaaaagaaaagcgaaaacaaacaacaaccacgacccccaaaaggccaagacgcacgcgacaaaacgacgcgcagccaaaaagcgccacggccacccaaggaaagggaaggagggcaaacagggccagaagcggccaaaagaaaagaagccacaaacagaaggcgggcaggaggagggaggcaagaaacacaccaccagaaacggaaaccaaaggggccgggaccagcacagcacaccccacgaacagcaccgaagaggagacggagacagccaggacggggaacacgaagccagagaagccaggagggagagggcaagggccggacaaaacgaagcgcgagacggaccagggacgacccccccaacccccagccaggcaccgggggggagggccaccaaccccagcaggacaaacgagaggagccaagcccaacaaaaaacagaaacagggcaaggaccagagacacacccggccaacgaaacaacgcggcaaagggggggggggggaaccggcagaaggacgaaggcggaagcacccccgggaggcaagcaaacagggcggcaacagacgaggaaccgaaggagacggaagagcggggacagggcccacgagaggcgaaacgagcccaggcaaggaaacgcgcagaagcccggcccaccacggcggcacaggaaaagcacgcccgaagaaggaggcaagagggccacgcaccagccaagaaggaaacagcaggaacaggagaaggagcggcggcgggaagcgcgcccaggcgcccgcgcccacagagcagccgcggcagaccaggccagaccggcgcaccaaaggcgggccgggaccagaacccacagcagcccacaggaaccgcacccacacgccaaggcaaagaaccgcccggggggacaagggccggccgcgccgaaccacagcgccagggggggggccggcgcgcgcgcgcgcggagcggcccaggaccggacacgcgcagacacaggaccacaaaagggcgagaccgagacaggccacagggacaggccccgcccccagccgcggagggagaagcgaacaaaccgccccgccccgccaacgagcgggaaacaccggaccagacaggacccaggcaaaacacggaggcccaaccaacacagagagccgaacaacccagccaaaacagaggagacaggaccagagagcaaggaagcaaggaaagcaagaaaagaacacagaaagaaaggcaaaaggagagcggaagagagggccaaacagcaaagaaagacaaggcccaacacacacacagagagagagagagacagagacacagagagagacagagagagagaagagaaccaaagcccaagccgagccccccaagccgccacccaccgccgaggcgaggagccaggacaacaaaaaaaagggccgggagacacaggaaaggaacaggacggagggagcgaaacagcaacaccagggccagcccagacaagcagcaagaaagaccaacggcacaggaaggagcaaggaaaacagcgggccaaaggaggaaaaaccccagaggagcgccaaaaggaggaagacgacacaacaccggcccaaccccgccgaacagggaccacaagcaggagagccagggggacaagggaacaagaaccccaagaccccaggagaaaacaaaacaccccaaggacaccacagggggggcggccggagcaccgagaacacacgccgggcaggcagggacaccagcgcgggcaggcagggacaccaggagacgagagacggaaaagaaaagcccacggaagagaacacaccagccagaggccaggccaaagcaaggacaacagcagacaaagcaagaagagcccacagggggggggaagcccacaacgacacacacacacacacacacacacacacacagcagccaccaacccgggagacagagagccgcggccccaggaccaggcgaagaaaaggacaggagggccggggagcgacaggacgaaacaaaagggaaacgggcagaacaggcaggcgcccaaggcgccccccgaccggggagacgcgaccagagccaccaagcccgcgcagaggcaaaggggaccacagccgagggacggaggaccgaagggagccaaaggacccaggcccccccgggggcgagaccccaacgagcccgcagcagagaccagcaccggacccaccccccgcccaggaagacccgccaacggcaaccaaacccagaaccaggaagcaagccaagccaggaagaggggaggagagaccccaccccaacccccacccccaggacaggccagacgaaaggaaccacaaagcaggcaaggcggacagacaagcgcaccaaaagaaggacccagaaagacaagcccgaagggagacgaggccagagggagaaagcggggaggacccagacagggaggcaggcgaggagaccaggacaacacgccgcgacaccgcccagaagacgacgccagagaagaaaggggcacagagacacggaccaaaacaaacaccgaaggccggggacagacagagaaaaagaaaaaaaaaaaaaaccccaaacgacggaaaggggacaggcggagaccaaggcaagggagggacaaaggccagcgaaagggggacagagcgaaagagacgcgagggccccgacaaagagcgagagcaagagaccccaaacaccgggaagaaggcaaaggcgaacaaaccccagagcaagaccaaaagggagaacagaacagaaaaaaaaaaaaaaaaaaaaaaacaacacacaaaagaaaaaacaaacaaacacaacacacacaaagaacacacacacacacacacacacacacacagagggagccccaacccaccaccgccgacacgggccacgacccccgggacaacagggaaagccgaaaagccacaaaacaccagggaacaagaaaacggcaagcccaacaagaagaaaaagaaagaaccagggaaggaaaggacgcaacgggacaggcgaaccagcaagccaaacagaacagaaacccgaaggacagggcccgcaaacaaaaccacccagcacccaggccgaaggcaagcccccgcccccccccccgcccccacccccaccccacacaaacacaccaccccagcaagggagcgggggcggaacggggcaagagaaggggcagaggccgcaggcgacaaaacggcaagcaggacccaggccaaggagagcccagggagccgcccagagccgagcccccggagccccaagggaggccggccaaaccccagacagggccggcagcccggcgccggaccacccgagaccagacggcccgaaccagcgacgccggcgggggaaaaggcagcaccaccacgcccgacgcccaccccaccagcaccacaaacaggaaaggaggagaaaagcagggcgcccccagagccaagggggaaaggaccgacaacccacaggagggcggaagaaaaggacaagcaaacgcaggaagcccaggcgcagcccaggaggccccggggaagcggcaccgcccgcccggcagaccccaacacggggccgaacacgcaaagagcagaggggacaggggaagagagggacggaaacaggccaacaaggagcccggagcgacagcccaggacagacaggcagaacagacgaacaccgagccgagccaaaaggggccgccacaaaccccgacaccggcgcgagggcggcggcagcaggaagacccagaaagcccggacccgggagaaacagagcccaggggccggggcccaacagacgagacgacgcccgggcccggcgccacacacacagaaaagcaggacccccagacccccaggcagaaacacagggcgcagccagaagacaaaccgaaacaggagggggcccaacgaagaaaggcagagggaaacgcccgagcaacacaggggcccaggagccgcgccgccaacagggggacacaagaccaggggcaccaggggggccaaggccgcccaaaaagacaaaaaaaaaaagcaacaggccgacaaacaaaaccgacacaagaccgcgaaaaaaagcaggcccaggaaaagaaacacagggaccaaaagccgggaggaccacaggacggagaaagcggcaaccagcaacaagcaaagcgaccccaagaggcccgggaagcccaaggggaaaggagaaaccaagggacaaacacgcacaaacaaagggcagaaaggagaaaggagagagcaacgcagacaaaccacagcaggccccgaagcagagcgcgaaagacggcaccaaagcaaagcaaaaggggcagagacaggccagagagaaaacccaagggcgggccggcaggaccgcccagcaaccacagacggcaaaagccaaggaagcacggcggccccccacaagaggggacaggagcccaggagagcggaaagaaggcgcaaagccccggcaacgccgcgaacgagcgggaggcaaagcgaaagcaaaacaagaagaccacgacagaagagaaaccaggacccacggcaggcagcagcaagcagacaggagcaagggaggaagaaaaaaaaaaaagaagcagaggagaaaagcaacaggaagagaaggaggggagggaacaagaaggcaaagagaagaaacaagagcaccgcccagccgggagaacagacgccaaagccggccaagcacccccggggcggccacggaagcgcaggcgcgcccgggccaggaagcccaagcagccgaggggcacaaggccacaacccacacagccaagaaacacaacaccagaggagacaagacaggagagagagagagagagagagagggagagggagagagagaggggggagagagggagagagagggagagagagagggagagcaacacaaagcaggcaggacaaaccacgccacgacacgcgcgcgaaaaacaccccacaaggaacacgacaaaggaaaaccgagcgaggagcggaccagcgcagccggaccaccagagcaggaaacgggccaggagggaagcaccagcccacaacaaagacagcggggaaaaaacacagccgcacaaagaaaagaagaggcagagacagcacaagggcagcggcgaaccaaaaaaggaacccgcagccaacaggggggagccggagcaggaggagcaaggcccgacacagcagaccgccaccgaacagaagcccagcagaaccaccgacacacaccgaaaaggagagaaacaccacccaaaaacacagaagaagagccaaaagcaccagcaagcaaagcaaaaacgagagcaaaaaaaaaaaggacgaagggaaggagaccaaggcagcacgcaacgaggaaagaaacgagcggcgagccaaaaacagcaacggggcccagaaagacagacgaagcacacgaacccacaaaccagagaccaaacaacaaagggggccagggagggggcagcagaacgccaccaggacgacagcaacgggacagacagagccaaccagcaggccgaccgccacagccccgggcacacagggccccccaacaacaaaagaaaaaacaacagaagacggagcgccggcggccggccaggacgcccacacgcccacggcgcacaagggaacgccccagcccccgggaggaagaagccagaccacagagaccaggacggacacaaggccgagaggaaggagccacgaaggcgccgacaggggacaagacggccggccgcgagagggagaggggaaaaacaggagccaagcgagaagggaagacagaagcgcaaaccagagcccagcaggcagaaagaggcgccagaacagagagcgaaagaggccagaaaggggcgaggcaagaggcggagcacagcccaccccccacaacaggaagacccaggggggggcccgccccaggccgaaggcaggcagagagcgcagccgcacagaagagagaggaacccaggccagcccaagaaggacgccacaggccgccagaacggcaggggccacaaccccgcgccgccccgagggccaagcacaggggggaagacccggccccagagaaagacagaagccagggccagagacaagcggaacgggccagcagagcgcagcacaaggccagacccagccaccccaccaaggaccacaggaggacgcagacggaaaaggccccagccccccggccccacagccggggccgaaaccgaagaggaggaaaacaaacaaaaacaaagagaagcgaaagcagaacccccgagcgagcagaggaaggaccgcacgccggcgccggcacaggggcggggccagaggggaccgcgcgcacgcaggggcagcaacggaaaacaccacacacgccccgcagggagaggaaaacaacccagacacgccaaagccaccaaaagacccagaggccgccccccacgagcaacacaccacagaggcccccaccacagccaaaaaaacgggcacgcccgccccccagcacgggacaccaacccagacacaagcaagcggggcggccaaaggaaagaaaacacccggcacggagagagaggagagaaggaaagacagacacaggagccaaaacagagaccacaaagagccgacaggagagacgcaccacccagcggggcgaaagagggcccgccgcgcacggggcacccccccccacccagccggagcaaacgagacgaccgcacagaagagagcaaggcagacaccagggccgggcagacccgcaacaccccgagggcaccac

SEQ ID NO: 595 - RNA, 1004 nt, Mus musculus
gcagaggaggcgaccgacacggccccccgcagggcacagggcgggggggaccggaccggaagaagccggccccagagcgcggccacaaagcagccccggcgcacagccgggcggaccgagccaagggcccaacagccacacggcagcagcgccagcggcgacagaggagcccacacacgcacggggagacacaggcagccaccccgggaacggaagcagaaggaaggagcgcacccaggcgcagccagagagcagcccagaaggccaggaggggggacaggagagcccgcccgccacacgagggacgccaccaaagagagggacagacagggaccggaaagccagccccaacaccaaagcaagcgcagaggaaaaccacaccaaggcaaacccgccaacagagacccagggggagagacaggaggcgcaggggaccggggagaagccaggaaccagggcgacagcaagggggagggagagcccaggcgccccaggcggggacgcaaggcccaggggcagggccccggcagccagcacccgggccagacaccacccgcggaaaccacaaaggccggaaccaagagcaagacccacaggaggcagcaggccccccagagacaggggccccaaacgcccgaaagccacaccgagcgccagacaagcccacgagggagcgaagggcccaggagaggggagcacagcacaggaccccccccaccaacggcagcagccgacgagggagaagacacggcaccagcggcaggaagccgaggggccacagacagcacaagagcacacaaagagagagaaggggcaagagaacccagaacaaggaaaaacccaagcacaaggacccccccccacgaaccgcagggggcaggacggcgcaggggcaagccccgcagcagcggcagccagcgcggcagagaccccgcaacccacacaacaggcaagccagacccagcaagccccgccccccagcgaagaggaagcagcggacccag

SEQ ID NO: 596 - RNA, 433 nt, Mus musculus
agaaacccaacaaggcagagcccaaacagcccagaaaaaggccccggaaagacacagaaggggcggagagaggccagcggaagagcacgacgcccgaaggccgagcaaaccagaaaccacaggggccacaaccaccgaacagacgacaccccgagacgaggacagcacaggacacaaaccaaaaaaaaccggggcggagcaagcagggccagaggagcagaggccgagcaacccagcaaccacagaggccacaaccacgacagcacaggacaacaaaaaaaaaaaaaaagacaaaaaaagaaagagaagaacaaacaggaggagaaaaggaagcaaccagcccaagaccgggccagcggccgaacaccacgagcagaggagagaccccaaggcaaccccaaccagagccgaacaacgcacagaggaaaaaaac

SEQ ID NO: 597 - RNA, 1008 nt, Mus musculus
caaccacgccgccgacccagcagcacccgcagcgcagaaacagggcacaggggcagggggcaggagcggggcgcaagaggggccggggacagggccggagcggggcgggggaggggacgcgggagggagaaagcaaacgccacccgcgcgcccaggagcggggacagccagcccaggcccagcgcccccaacacggacagcaaagggacccccacaaccaggccccacagacccccgcgcaaacacacagcaccgccccggccgaaacgcggcccgcaacggaggggcacacacaaacgggacacgccccagaaagaggggacagggaagccggagagagcccaggcccaggaaaagcaggccagcaaggggcgggggagagagcggcccgacccggagaggcccgaccgggggggagggccgggggagaaagcaaacggcgccggggggagcagcggagaacccggcacgcgcgacgcacaccggggcaggagagagaccaaagacaaagcagaaaacagggcagcagaaacaaggcggcccagggcccaccccccccccccccgccccggccacggaggacagggccgagggggcgcgaagccacgcgggcgcccgggcacaggcacgggcaggcagccgcccacaccacaacaaccgccaaaacagcccggcgcgcggcggggcggcggagacaggcaaggagggggggggcacgggcccgcccgagccaagggaaggacggagccagcgcgccccaccccgcccgcacgggcgccagccacaggaaaccaggcccccgccggcaaaacaggggggaaggaccaaaaggaggagaaggacaaaaaaaagagcacagaaacgggggagagccacgcccggccgggggaagggcgcacaaagacaggccaggacccccgcccccccgaaaaagaaccaaccaggccgggggaacagagggaggggcgggacacgaggagagacccgacagaaggagagcagcagacc

SEQ ID NO: 598 - RNA, 3377 nt, Mus musculus
gagagagcccgggcacaccaagcgggcggggcacaggggcagagcggccagagggggggaaggaccagggagccccaaggaaaagggaggacaggaaccgggaaagggaccagacaacagaaagcaaggacaaaagggacacccacaagaccaaagaagagggagcaccgacagcagcgaagaaaaccagcagccagggccagggcccggacagaggggagcggaagacagggacagcaacaagggcacaagaaagaggcaggcaggaagaacagggcaggagccgccgggcagcgccaaagcccaggcagaggggacagcgcaaagagaggcggagacagacccggcggaaaccggggaaggggaggccaagccacggaaggccccggagaacgaggccacaggcaccgcccagcagccagcaaggaagacgaggcaacccagccacgggcgccgacaagcaggagggacaaaacaggaacgggcacacgggagaccagagccccaggcagaccgggcggggggaggcaggcaggggaaccacgaacaaacacagcagcgggggagaccgcgccaagaaaccaaccagaaccagccaagccagaagacccccgagggaccccggagccagaagacccccgagggaccccggagccggggcgcgcacaaagaaagcaccccaacggccaacgcgaacaaagcaaaaagcacacagaaaagacagcgcaggaggggaggcaagaacaggccacaggggaggagagggcaacgcaggaaggcgcgggcccgcgccacaaggccggcaagagcccgccacaggcgcgaaaggccgcaaccaagcagccaaggcccaacagacaccgggccgggggggggggggggggacccccggcgggagagccccaagagcccccaacaagcacaggacagcggccaggaaggcccggcaggcgccacccggaggggggggggggcggcccagcagccccccgaaacgggagaagcgcaaaacgccaccgagacgggaccaccagcaagagagagcacagacggaaggaggaggagccggccccacggagaaaggcacacaaggaagaaaagaacacacacagagcagcgcccgcggccgccgagagaaaaagagacagccaccagggccccccccggagaagcgcccaagaggcaccggcgcccaaacgcccgaaggggcccacaccagaggcacccccacccccgggcccaggacagaggccccacacaaccaccacagcaacacacccgcccgagaccaaggcaggagacagccgcaggaccgagagcccaccccccgagcaggacgggcgacaccggaggggccgccgcgcgcggaacgaacgcgaggacacggaccaggacggccaccccccacaacagggaaccgacaccaaggcaagaccccaccccaaggccgggggggggaaccccccacaacacgagagaaaccaaccagacaaggacccgcgaaagcaaagggccagcccaggcagcaagcacggcccaacagccccaaccagaggagcagcaacacgaaaagcacagaccagagacaccaggagaggaaaggaggccgcacacccgagccagccacaccaggaagccgggaagaacggaggcaggaacggcaggggacagggaggaggcgccacgacgccccagggcgcagaacacagaccaggacaacaaccagggaggccgcccacaaaagcggcacccacacaaaggaaacaggaaaagccccacaggcgcgaggaaagaccggaacgcaccacgaggcccccccaggacccaacggcaaggacacaaacagccaacgccgccaacagcaccccgggacaaaaacgacaaaacaaggaacagagaggggacggccaggcagaggccagcggggcgggcaccggacgggaggcagaggaggcacaggaaaacggaacacaagccccagccaggcagaaaggaggccaaaggggggggaggaaaggagccagggacagaacagcccccaggacacccccaacgacaaacccccaagagcaaaaaacaaccccaagagccaaaagccccgccggacgaggcgggcccagcaccacaccggacacggccaaacgcagcacagagaaagggagcaccgccaccgaggcgcaggaagcagccgcgaaagcaaagccagcacggcaggagccggaggcaggacaccaacccccaagggggaccaggccagcggagcgggagacaggaccaggacagagggacacgccgggcggccccccgaagagcaggcgggagcagcggcacgacgccgaccacggcgaggagcggccagccccacggcagaacgcaagggcgcggccgcggaacagaccggcggagcccggcacagagagcagggaaaaaaaagccagggagggacccagacagcacacgcaacaccagggggacaacagacgccaggcccccacaagaagacccagagacccgagccggcacagacggacggccagagccaccagccacaacacagcgaacagccagacaaaacccacccgccacaaaaagccgcccaaagccagcaaagaggaaaaggaaaccacaaacagaaaaacgaagaacgacacaggcacaagacagacaaaaacaacaaaacagccaagcagggacgagggagcaggccccacacaagggaaagggccggaggcaaaaacccaagcccggccgcagcacggagacggcacaagacccacacgggagaaccaccccccaagccgggcaggagacagaaagcccgccagcacgcgcagccacagagacgccccccccacacggcgacaacaaggcgccagcacagcccagaggagcagaacaggagaagaaacaacggaaaggggacgcagagaggcccagggggggaggcagcaacagcgacacaacgaagagacgggaaccgaagcacagcacaaggcggggcccaacggcccagcggacgaaggccaggcaaccccagagagccccggccagccacagagaaagcaaagaaacggaggcgagccagagagagcgacagggaggaggcagcagcagcagcagcagcaggagagcgcacaccagcaagaagggaaggcagggagcaagaagggcccgaggaccgacgggccacagccgaaggcagccaccgaggggagaccccacagaccccagaaaaaaaaaaccccacacagaccgccagaagcagccagcgacacaccagcaagaccaaccaagcccaaaggacacggagcaccaaggacagaagggcaaggacacaggagcagccagcacaccagaagccagaaccgccaaaacac

SEQ ID NO: 599 - RNA, 4465 nt, Mus musculus
accaacagagggaccgagagaaagaagaagagcaaagagagaaaagcgagggagaagggaaaaggcagcagggaacagaaaaggaggaaagcccagagcccgggccccagaccagagcagacaacaagaaggaagaagaccaccacaaagccgggagaagaccgacagacacagagaaggccacggaacaggcacagcacggaagggaaaaggacagggcgaagaaccgccaggggagaaagaccgcgggcccccaagcgacagagccaccaccaggcagagagcccgagacgagcacgcagacgccgaggcgaacccgcggagcgaacccaggcacaaggaaagcagagcccagggcgcaacggccgaaaccgcacccggaaaaacccagcgaaaccgggaccccggcccccaccaccaaagcagggcccaccaaaagcaccagaaggacacccagacccagcgccaccgccagccagcaccaccgaaagacacacgccgacggccagcagcgggaaaaaccaaaaaaaaaaaaaaggcaggggggcagcaaccgggaggggcggacccagagagagacagagagcgcagggggcgggaaccagccggaccccgcaagagcaaccaggcgcaaccacggcgccccacccccaccccagcccagcacccaaaggacacaacgaccccagcaggccccaacccggaccccaggggcggaaaagcgagcgcacccaaggcccgcacgcgcgcgcacccccagcacacagcgccccacccgcacacaaagccccaggagaacccgggcaccagaccagcaccccaagccccacccaagccccccaccgcccaggacgaaccaccaaggcagagagccaaacagaaggcacaaaaaagccaacgcgcaaccagagccccacagccaaggcagaccaaagggacaagcaaagaaaaagccaagcacaaagaagccgagaaaacaagcaccgcacagaacaagcaaacgaggcgagcgaggacacaggaaaggggcacagggcagggagggcaagagcacgcaacaaagaaaaggagagagaccaagagagaggacacggggcggagagaaagccacggcaaggcgcgcccggcaagcacaaggaccgagcaagcccccagaccaggaaaaagagacgaagacagccagaaaccagcacaaccaacggaagccaggccagagaccgcaaaagaaaggagacaaccaaggaacgcaacaaggccggccacccacacacacacccaccccagagacacagacacacaaacacagagcacacagaaaggaagcaggcaagggacagccgaacaacacaagagagagcagaaagaaaagaggaggacccaagcgacaggagagaggccaccgagaggagacgggccaaacagacaaagcaaaaagagcaaggagagcaaagaaggagacagaagcgcaacagcaaagcaaccgaaaagacagcccaaagaagaaacagccgagaaccagaaacaagccaagaagacaaggagcagcacacagcacacaacagaaacagcacagaacaacgcacacaaacacacacacaaccagcacggacacacacgacacacacgcagaccacaaacacacagagggagggaagaaagggcggaaacgcgggaaaggaaacaaggcacagcaagaagcgggacaggaaagggagacacggcaccagcaggagaaacacagagacacccccccccagaagaaccccgccaccacacacggggacggggacacggcaggaaggggggggcgagcaggcggacagagggcagggcagcaacacaaaagccggcagcggcacagagcaagccgggaaaacgcaaaaagccccagccagagaggcggggcgggacgcggaacagggcgagcaggggcccaacggcacaaacgaagcggagacagaacacggcaaagaggcgacacagaggaaccgagaagaacgaggaaaagacaacaagaggagaccagcaaggggaagagggcagaagcagaaaaaaaggagcgccaaacgaggacagacaaacagaaggccacagcacaaaagaccccccacaaaaacgcacccccagccgccgcaagaggccacacgccaggcaacacaccccccaagcagaaaggaaaagaagaggagaaggccaacacaccaagagggcaacaagagacaagaaaagaaggagggcagcacaggaccgggaggcagaggggccgggcacaggagagcaccaccgaaagcagaacagcagcaacagacaccccacacccagaccacaaagcacggcacggcaggcgcacagggaaaagccaccagccaccagagcagcgcgcccccaagagcccagaaaaccacaccacaaacaagaaacaagacaggacagcagagagaacacaagaccccaacagaagccaaacacaaaggagacaaaccccacacggaaaggcaaaaagagagaggccgcagacccacacgcggaaacccaagaacagagagaagacacaacccgaaacgccaagaagagcaacggacgcaaggaagccagagagaaaaaacacaaacccagcccacagcccccaacagaaccccccccccccgccccccccccccaacacgcacgaggcaaaaaagccggacacaggaaggaaggacaggccagccaccccacccgcccacgccaccacaaacaacgagccgaacccgaagaaacacacccccccggagggaacagccaccacaaagaccgaaaacaccagcagacaaaaagggggacaaggaaggagggcaagcaaggagcaggagccaggacgagggggcgaagacgaaaaaagggagagcgcaccaaggaggagagagaaaacaaaacgagaacaaaagaagggcgccagagaaggagggagcacaccaaagaaaccagaagacccgccaggaggagcagccgagggaacagaggggcaaggcccgcgggacaagcaacacagaacaggcagaccaggcaggaaggacacaaacaaaagggggggacggagaacaaagaacccaagcccgaaagcagacaccagcacgccacggaagggcggcacaaggcggcgagggcaaacccacagcaagagaaaaaaccgaaaagccaaaaccaggcaccaaggaccaaaaaagcgccacaggcggcggaccacgagcccggcccgggcagccagcccagaggagcgagcagaaagcagccgaggagaaggcaggaaacgagaggacagagggggagggaccccagagggcagacagccaacaccaggacagacacaacagaagaaaaaaggaaaaaaaccaacaggaagggaacaaccaaaaaacaggaagaaacaaaaaaaaaaaaacacacacagaggcaggggcacaggagaccgggggggggggggggggggagcacagggagaaggcaagaagagagccaaggagaccagcagcacacacgggaaccacaaggcaaaggggaacagccagcagccagaaccccacaaagaaggccaaaggccgcgagcacaaaaaaaggggccggcaaaacagaagggagacacacacacacacacacacacacacacacacacacacacagagagagagagagagagagaggggggggggcacagaggagcaccacacaaggagcagccaaccgcgggcacaaagcccggaacgcccagccgaacccaaccagaacagaagaccccacaggaaaacaagcaagaaaacagcaccagagaaacagagcagaggggggacccagcaggggaggggaagcgagcccaggccacccagacagacacgaacacgggccaggcgcaccaggcaccccaccaccccccccaccaagaggcggaagagggggggaaaggaaaaccacaacccaccacagcccgggcagggcaggcacgcaagcgcacaagcaacgagccaagggcaaaccagcagaggaaaaccaaacgaccgaacagcccggcaggaggaaccacaccgagagaacaaaagggcgaaaagggcacaggcaaaaagcacccaaaccagaagccagaagaaagaaaagaaaaagccaccaaaaagcagaaacggaggaggcgagacaaacacagcagacaaaacacaggaagcggaacacccccaccgcacaagccggaagaggagggacgcgggggcaagaccagagaaacagcaacacggaaaaaaaacaaaaaaacacaacccaacccaagaaacaaacccaaaaaagacgaccaacaggagcaagacaccaagcccaggggggggaaccacgaagccaaaacacagggaggagagcagcgccaagcacacagagaaacgggaaccccggccgggaccgggagcacaccggggccagagaaaggcagcccagccgccaccca

SEQ ID NO: 600 - RNA, 2142 nt, Mus musculus
aggaacagagcgacacagagccgcccaggggaaagaaccacgaaaaacgagacaaaaccagcaaaaagaggaaacaaaaaaaaaaaaaaacacaaaacaaggagaagcggacgccgggacaaccccaaagcgcacaacaaaaaaaagcagaaacaaaaagcaacggaggccgagaccaaggcaccaaaaagaacaaccaagaggaggaccacgaacaacaaaaaacaaaaaaaacaaaaagcaagaacccacagcaaaagaaggacaagaaaggaaaaaaacaagaagcgcgcaacagaggcaccacggaggccgggcgggaggccagagagggacagacccgaagcggggacagaggcggagcaccaggagcgaaggaacgaaccgggcccgaaagagggcaaggcaaccaaagcacaccagcccagccccaaacaaaggagaagacagggcgagagcggccagcaggaaagggacgccaccaagcgacaaagcgagcaacccggcagccacacaaaaaacaaaaaaaaaaacaaaaaaaaaaaaaaaggaaaaaaaaacaaacaaacccaaaaaaaagaaaaacccaggcaaaacaaaaacaaaaaaaaaaaacaccccccccccccgccaaaccagaccccccccgcgccaaaaggcccaagagccaagaagaagaagaagaagaagaagaagaagaagaagacagacagacaacacagcaaaaaaaacagcagaaagcaggggacggcaccgacaaagcagaaacgaggcagacaagaaccaaaacggagaggcaggcaccaggcaacgccgcagcgacacaggaccgcgggacgacaagaggcaggagaggcacagagcccaggcacgggggaggaggccacaagagccacagcggaccaaagggcaaggagaaggagcgaaaggagcgaggcagaagcaagaggccgcggccaggcagaaaccgggagagggaagccaagaaggaagagggccgacacagacagagaggaaagcgaaacagaaggcaggcagcagagacggcaaagcccgccagagaggagaggaagcagaacaaggccaggcacagcagacggcagagaagggccgagaagcgaaggaggaggaagaggccaaacaaacggagggggggacaccagcagaggaaaaacgaggggaagaaggaaaagcccgccagcaagaaaagaccaagcccaccaaaagggaaagacgccagagaacacgccgggaacaaaagcagaaaacgcaaaacacagagcagggaggcagaagccgcgagaagagagagaaacgaacaaaaacccaagccacagaggagccagcccagcccccaacaaaaccgccacagagccgcccagaggaaagaagacggcgcgacccccggaccggccccagggccaacccagcgggccgcccccagcccgagcgggaaagcggaaggggcccaggggagcgaacacgaaccgagcacaagacagcagagcaagaggcgcgaccagccaagggccaaacacaaggagcaagagcaaagacaagcacaaaacaaagcgacgcaggcaaaaccaccagacgagaacgccagcgaaaagcccacgagacggaccaaagcccagcaaagaccgaagggaggagaagccacacagccacgggagcaagcgcgcgcacgaggccagacacaagcagggaacgagccaccaaagcacaccgaaccgggcgcgagcagaaaaagaaagaaagggaacaggggggaaaggaagcggaaccaaaaaaaacgccgcccgacacgggcaaacacacgaaagcaggcccccccgaagggccaacccaagagacaccccccgcggggccgcggccaacaggagggccccagagacccggcccagcagagcccccaaaagaggggcaggaaggacacggaaggggacagaaacccagcccagccgcccacgcgcacgagggacggcccccgccgaggcgcccccggccccgaagagaggcacgggcgaacccagacagggaacaaaaaagacacagacgcggggccagagcgcggggagaaccggagcaagcacacaagcgcccccgcccgccgaggcccggggcggagaggaggcagca

SEQ ID NO: 601 - RNA, 301 nt, Mus musculus
aacagcgcaccaccaacggcaccggcagcaaggccagggcaagaggaagccagggacaagagcaccccacggacacccaacaaagaggaacggggagggaggcgcgggcagcaggggaccaccgaacgaacaccaagcaaaaaaagaaaagaagagacacgaggacagaggggagcccagggggggaagaaaggaccccgccgccgaggcccacgcccagagcccgccacggcaacccagccgccagcccgccgaccagccaaagaagaaaaaaagacacgagcgccagaagaggggcaga

SEQ ID NO: 602 - RNA, 58498 nt, Homo sapiens
drchraacacacacaaaagcacacacaaaacgaaagcaaaaaagaagaaacgccacggacgcgacagccccgagaaaggggagcccacgaacacacagcgccagggaaacgggagccccaaaggcagccaaaacaaaaacgaaagaccagaaggaaaccaagaacaaaagagaaagacacccaggaagccaaggaaaacccagacccagagaggggagggaacaaaaaggggagcaagcaggaggcccggcagagcgcacggcaggggggggccaaagccaacaccacggacgggccaggaaggaaaagcacacaccagaaagggacgagagagggaggggccaaaacaaggaggcccccccaggggggcacaggaagagaagaaaaacagcacgggagagaagaggggacggcgaggcccagcaaggcgaagcgaagaacaaggggaacacgacacccagcacccacaaaaaaaaaagaagaagaagaaggcaaaacacaccacaagacaagccaagcggcaagaagaaaaaaaaaaaaaaaaaaaaaaaaaacacacaaagaaacaacacaaagaagaacaaaggaaaaaaaaacaaagaagacacaaaccgagaacgcggcaagacagcagcggccaaaacccaaaacacgcaaggccaggaggcccaggagccgggggcggaagcacccgaccccagacccccagaaacaccaagacaacaaggaggcaaccaaaagagccccacaaagccaccgccacacaagaacaacacaaaaaggaacgagcaagaaagcaaaaaaaaaaagaacgagaagcaacaagaggccgaaaccccaggcaaaccaaggaaacacaaaggaaaaaccaaggccagagaagagaacaaccagccgggagagaaggaccaaagagaaaggaacagacagcaaaacaccaaaaaaaaggagaaaaagcaaaagcccagaaggagcaaggaaaagaaaaggggggcaccacagagaacgaaaaagggacaagagcaaaaggagaacccagacccgaagaagagccaaaagcccgcaaagaaaacacaggaccacaaccgaaacccaagagaaaaggccacagagcccccggagaaaacggccggggagccgcacacagccccggaagacagaagcccgaggaaacagcgggagggagcccaagcccagcaagaaacagcaccaaggaaacagggcaggagagcgcaagagacacagagggaaaagagagaccggcggggggaggaagagaagcagcacgccgaggccagagaggccacaccaagaggggggaggacaagcgcacagaaaacaagaagaaaagaaaaaacaaaacaagacaaaaaagaacgaaaaaaagacaagaagagaacgagcgccaggcacacagacccaacagagggaagccaccaggggcgggaacgaaccaggacccggaagagcagcaggccaacgaaaagccacccaaccccaaaagaaaaaaacaaaaagcaaacggaagcgccccccacaccagacccaggacaacaacacggcgggccgacaggagacaagacaacaagaaggcgcagggacccacagaaaaagaagagcagagcgcaaccacgagcacccaagaccagaggggccagggccggggcagaaaacaaacggaacggccaaagagaacagaggcccacacaaggacgccgcccaccaccaaccgaggaaacaacaaaacacgcaaagacccaggccagcgaccgcaagaggagcagaacaagaacaaacggcccgccaaagaaaaggaaggcagaaccacccagcaacaaaaaagaaagaaaaggaaggagacaaggcacccacccacacaccacgaagaagcagaaccagaagccaaggcccgacgccaccaccagggcccacaaggcccaaacaaaccgggaccggggcaacccaggggaccagaccaggaaagaaaaggaaagcagaaacacaagagagaagcgccaaagggccacacacgaccaacacccacacgaccaggccggccagggacaagcgacaacaaaaaacaaacagaaccaacaagcccaccggacacgacacaaaaacagcaaggcagaagagaaaaaaaacacaaggaaaacgaccacagccaacaaaggcaaaaggagacggaccagagcaccagccgggaacacaggagaaccccaaaccagccaacggcaagcagcacaggaaacaacacaaacaaaacaaaacagggcaaaaaagacaggggacacagggagaggggggcaacgaggggaaagcaccacgagcccaagagcaccgggacacagccgagaggggaagcagggcgcaagaaagcaaggggaagaacagaggcaagcacaacagaggaggggacaaagaagaaggcgccaaaacagcccaagaacaggaaccgaaccacaaaacccaaccccacaggacagacacagcccgaagacagagaaccccaggaccccacccgcagccggcgaaagagagccggagcagcccggcaccggaaccaccggagaaggccggcccgaaccagaaaccccgcccgcccccaagcacgggaaaaggcagcgccaccacccaggaccacagcacaacagcgccaggaagcaacacagaagccaagaacaaccgacccgagagagagagagagagaagcaccccagcgggcacaaggagaagagggcccggaccggaaacggcagaagaggggcaacaccaagggcacggaaagaacgagggccggagagcagccaggccaacccaacccaggacccaaaaaagcgcgagaaggcaaaaaaggaaaacacaagaaaaagacgaagaggaaaacaaaaaaaaagaggaacacaaaaaaagaagggaggaaccaaaacaaacaccagaagagacagggagagaagaccacaaaggaagcaacgcaacaaaaccagacgagagagaagccagaaggccagccaggggacaaagagacacaaaagaaaaagcaaaccacaccaaaaccaaggaaaaagaaaacccaacaaaagagaaaccggcccaaaaagccacccagcaggccacgagagccggacaagcacagcaccaacaccaagacagaacaccccagaaaaaaaaaagaagcaggcccaaaaaaacacaacagcgcaacaaacagacaagcacacaaagcgcacaccaaacgggcaaacaaagaaagaaaggaccgaacgagaagacaaagaacgaaaagaaacgaggagcgcacagcaagaaacaagccaaacacaccaaaagcaaggaacacccccccagcccccccccccacaccgcccgggaggaagcaaacgcccgggggcccccacccacacaggggacacgcaggccccaaacaccggccaccggcacggcgccggcggcacccgccgcagcggaccagcaggaagacggggagcaggacggacaagaagcgccagcaggacaagagcaagaaacacacagaaacacgcacacggccgaacgccagcccaccccacaagacgcccaaaaaccgcgacacaaagccccagccaggcgaccgggccacagagccccacccgaacacgagaacaagcaggagccacgacgcagagaggcaagcgagacccaaaagcaagcgggaacagcaggagaacccgacacggacccaccaggccaccgccccaagcccagaggaaaccagcccgacacccgggccgggaagacaagagccaggcaaagccagcccccccagcaagggccagggaaagaaacgcgggccgggaaacaacccgggggcagagagccagacaagccacacgcccacaaccaccccgcccaggcggaaaaaaaaaaaaaaagacaagaaaaagccgcccccccgcagaccaggcaaagacaggaggccaacaacgcaacaaagcaaagacccaaaccacacccaccacaggagccccgcagaaaaccccgaagccgggccaggcgagccaggaagcccagagggaagagaaaagagaaagcaagcccggaacacaaaccaaggcaccacacgagaaagcaggcccgggacaaccacccgggacgggaacagacgccgggacccgcccacccagcaccccgaaggacaaaacaccacccagagccggaccggcaggcacacgccgggaacacaagcaccacaggacaaagccaggacaaagcccagcgcggccagcaccccagcgcaccgagccaggagggcagcccccagggagaacaaaagaagcccaaccccagaagccaaggccagggcccgagggaaggaaacggaggaccaagcggaaacagcccaggggacagcaggcagagaggagccaggaccccccccccacccacccacgaaagaaacaccagacaaaaagccagcaacaagagccaaaaccagagccagcgaaggcagccagcgaaccaccaagaccacgcacacaaaacacaaccccgccccaaagggaagagaacgaagccaaacagaggacacacaggacgaacacgaccccaacaagcccaagaaggggaagaagaaggaggaacagaggaaaaaagcacaaccaggccaaaggcgacgaaagccgagcggaggaacaggacacacaagcccgagacgaccgggccacccaaacaacacgccgggcaccaaaaagacacgggaaaaaaagaaaggaaggaaaaacggacaaaaacaaacagagcaacaacaaacaaacccaggacacaggccaaacgggcaccacgcacccgacaagaggcaaaaaaaggggcacaggaagccaagagcaagccggaaaacagggaccgggccaaagaaaaggaagcagcgaacagacaaaagagacgaacgaacaaaagggaaaagggggggccgggccaagacccacagaggacaaaaggggggcgaaccccgggcaaacaccaagcagccgagccaagacggggcccacaccaaaccggagccggaagagcagaaaagccaagaaccccggagccccccagcgccaaacaaccaccagccacaagggcgcagcagccccggacccacagagagagacaggcaagaaaaaaaggggcgaagagaaggggcaagcaaaccacagccaacgacaagacgccagagcccgcgaagaaaaaaaaaaaaccacagaggccaaggaggcggccagggcgaggcccggggcaccggaccacacgaggcggggacagggaggacacgaaaaccacaaagccagcccaaaccccaaccacacaaggagaacaaagaaaacagaaaacaacccaaagcaagcaccaaacagcggaagggcaaaggaaagaaaaaagcagagagcagagagagaacacaaaggacaaaggcagccaagagaacgacgccggggacaagaaggagaggagaaaagagggacacaggaacaggagggggaggacagagaggagggggcaacacaaaaggaaggagagaagcccagaagccacaaccaccgacacagcacgccagacggggggggggggacaaaaccacgagaacccgcgcaaaagagacaaacaggcccacagccggggagcaaacccaggccaggaacggaggcaaggggagccccagcaaaccaacacccgcagaaaaaagccccgaagcccagacaccccgggaaaagaaccaagaaaagacagacaacaagagcaaaaaagagcaaaaaggggagagaacagcgagaaaaggaaaggccacaaccagggagaagaggaccagaagaccagaaggaaaacaagaaaacaaaaaaacaaaaacaaaaaacaaaacaaaccacccgaaccgacgaggacaggcaaagcaccgaaccaacccggaccaacccgaaacacacaggaagcggggaggggggggaaacaacaaaagacgggagcacaacgccacagaggaaaaagcagaagcacagcaccacagcccccccagaccagcaaggcagaagaggcagccaaacagacagcagacagcggaggccgcagggcccgaccccaagccccgaaagaaacgggacgcaggccacagaaccggagagggaggcacccgcgcccaggacaccagcagagaagcaggccagcgagggggggaacgcccacgccgcccggacccagcacagcgcgcacggacggacccgcacgaaggcgcaaaaccgaagggcggggagccagcgcccacagaggagagaaaacagaaaagggcaagccgccacagaaccccccacccccgccaaaaggcgaggagaagcaggaggaggagggggggcccagcggcacagaaaacacccagaggcagggccccagagcagggaagggccggcgcagcccgccccgcccacagacgaaaaaaagcaaacagaggaggccacaacggcagcagccccgcggcagaagcgcaagcgaccagaaagccggcaaacaagccaagaaggaggcggaccgcgacaaaaacaaggaaaaaagaaaaaaaagcaaacaagccaaaaagagaggaaaggaagccgaggcccccacccccacccccccgggaagaaggggcaggccaggcaagccgcaggccccacgggccagcagcacccggccccaggcgcccgagccaggaaccgggccgagcagcaaacccaggggccggcagggagaaaaagaacacacgcaccacaggcccaacagaagcaaaccaggcgcaggcaggccgacccagacacagcggcacagggaccaggcagaagaagacaacaaaaggagcaggcacagcacaaagaggggagacagaagcccaccagagccaccaccccggggcacgcagccccagaagaaagaaccaaaggccggcccacaacccggcgggggagccggagcaagccacagagccccgaggccaacggaaacaagaaagcacagggcaagagaaacggccaagcacgcccaccggggcgagaggggggagaggagcagcaacaggagcgacacgcacaggaggggaaaagcagcacacccgcgggggcccgccagcaacaagcccccaaaaacgggcagaagggcccggcagcaccgcccggccaggagcgcggcaagaggcagcgccagaagacacgggacggccccagcccaagccaacgggcccacaccgccaaaggaaaaacacgggcccagggaaacccaaacaccagggcagcaccaagcaggaccagggaagaggcgaaggccgcacgagccgccgcaggaggccacaaagccagccaacacgcccccaagccaaccgaaaaaaaaccaaaccaacaccagagacaaaggcccaggaccggaacaggccagacgcagcagaacccacgcccccccacaggccggaaccccggacgacgcccaaagggcaaacaggggagaaggcagacagaggagaaaacgagaagcagggcacgccgggaaaagcaacgaccaggggcgacaaaagacaaggaaaaccgcccgcgcgggcaggaaaaggaccagaacggaaccgaggggaaaaacagaagccccaggaaaggcccaggccagccgcccagagcacgaggagggagcgagcaagccggccgaaacaccagcaaaaccagaaaaccaacaaaaaacagcaaacgaagaccaaacacggaaagggaaaaaccacaaaagacagaaaaaggaaaaacccaaacgaagaaaagagccaccaccagggcccagaggccaacaaggaaggagacaaaaaaaaccaaacaccaaaggggaaaagaggacagccacggcgcagacacaaagggcgggggagaagcaccacaagcaggggagccacgccaccagaggacacggcagaaccacagcaccacgccccacccaggaccagcaaggcggaagaggcggccaacagacagcaggagcagcggaggccgcagggcccgacgcccagacccaacagaaacgagacgcaggcccagaagcggagagaggacaccagcagagaaccaggccagcgagcggggggaacccgcccccgcccgccggacccagcacagcggcacggacggacccagcaccaaggcgcaaaaccgaagggcggggagccagcgcccacagaggagagaaaacagaaaagggcaagccgccacagaacccccaccccgccaaaaggcgaggagaagcaggagaaggaggagggggggccggggcacaggaaacaccacaaacgcagaggccccagagcagggaagggccaacgcagcccgcccccccaggcgaaagaaagcgaacacaggaggccacaacggcagcagccccgcggcagaagcagcaggcgacccagaaagccaaacaacaagccaagaaggaggcggaccgagacaaaaaaaaaaggaaaaaaaaaagccacgagcgccgacacccgaagagggcacagaccaacaaagggagccaccaggggcgggagaaccaggacccggaaaagcagcaggccaaccacgagccaccccagcacaaaaaaaaaggaaaaaaaaaaaaacaacaagccaaacagaaaggaaaggaagcgagacccccacccccaccccccccgggaagaaggggcaggccaggcaagcccgcaggccccacgggccagcagcaccggccccagacgcccgagccaggaaccaggcgagcagcaaacccaggggccagcagggagaaaaagaacacacgcacccaggcacaacagaagcaaaccaggagcaggcaggccgacccagacacacacaccccgggacagccgggagaccacacaagagccccagacaaagacacgggccgggcaggccacagggccgaaagagcagcgaaccgcaacacgaagcaaacagccacgaagacacacaggccccaagacaaccaaaaggacccacgacaacagggcagacaacggaacaacaacgaagaacacaacaggccgaacagcccaagcaaaacacacgagcaacaaaccagcaaacacccggaaaccaagacaaggacccgagaggagcagggcaaaaggggcaggacgcggacagggaaccaggcaaaagaaggcaacaaaaagagacgacacagcacaaagaggggagacagaagccagcaagagccgcaccccggggccgcaaaccccagaagaagaaccaaaggccggccaacaacccggcagcgcccacagccgcgggacagccccagccaaagccaacgggccaacaccgccgccaaaggaaaagcacgggcccagggaaacccaaagaccaccggcagcaccaagcaggaccaggggaagaagcgaaggccgcacgagccgccgcaggaggcaaaaggacaccacacgggccaaaggccagccaacaacaccccaagccaagccgaaaaaaaagccagaaccaagacaagagacaaaggcccaggacgaggagcaggacgacgcagaagaaccacgcccccccacaggccggaaccccggacgacgcccaagggaaacagggaggaggaggccgagagagaaaacgggaaaaaggacacccggaaaaacaaaggaaggggcaccaggaccagagccccgaaaaggccagggccagccgccgagacaacaacccagggccagcagccgcaaaaccagcaaacaagagaaaaaccacacaaaaaagcaaccaaagaagacaacacggaaagggaaaaacacaaaaaagacagaaaaaggagaaaccacaaacgaagaaaaagggccaaccacagggcccagaaggccacaggagagagacaaaaaaaaaaaccaaaaaaccaaagcgcaaaaagaggacagccacggcgcagaagggaagggcaggggagaagcaccacaagccggggacccacgcccccagaggacgcggcaaaaccacagcccgcggccccaagaccagcaagaaggaagaggagggcgaacagaaagcagacagcggaggccgcagggcccgaccccaagccccgaaagaaacggaacgcaggccacagaccggagagggaggcgccgcgcccaggacaccagcagagaagcaggccagcgagggggggaacgccccgcccgcccgcaccgcagcccagcgagcacggacggacccagcaccagggcgagaaaccgaagggcagggagccagcgccacagaaggagagaaaacacaaaaaaggccaaacgccacagaacccccgaccccgccaaaaggcgaggagaagcggagaggaggagggggggcgggggcacaggaaacaccccagagacagggccccagagcagggaagggcgaggcagcaacgccccacccacagcaaaaaaaaaaaaagcaaaaggcaggccacaacgggacagccccgccgcagaagcagcaagcgacccagaaagcccaacacaacaagccaacaaggagacggaccgagacaaaaaaaaggaaaaaaggaaaaaaaacaagcaagacaaacagaaaggaaaggaagcgaggccccccaccccacccccccgggaagaaggggcaggccaggcaagccgcaggcgcccacgggccagcagcaccggccccaggcgcccgagccaggaaccgggccgagcagaaaacccaggggccagccagggagaaaaagaacacacgcaccacaggcacaacagaagcaaaccaggcgcaggcagccgacccagacacacacaccccgggacagccgggagaccacacaagagccccagacaaagacacgggccgggcaggccacagggccgaaaggcagcgaaccgcaacacgaagcagaacagccacggagaaacacaggccccaaaggcagaccaaaggacgcacgacaaggggccaagcacacggaacagagacacaagaagccacaacagcgaccggcccgggccacacaaacagagccaaacaaaaccagcgaccccggcaacaagacagcacacgagaggagcggacacaagggccagggcaacggagaaaaggagccggcagcaagaagacaagcaaaaggagcaggaacagcacaaaaaggggagacagaagccagcaagagccgcaccccggggccgcagccccagaaggaagaaccaaaggccggcccacaacccggcagcgccccacagccgcgggacagccccagccaaagacaacggggcccacaccgccaaggaaaggcacgggcccaggggaacccaaagacccaacggcagccccacgcaggaccagggaagaagcgaacggccgcacgagccgccgcaggaggggaagacaccacaaggccacaaaggccagccgaccaaagcccccaccccaagccgaaaaaaaaccaaaccagcaaacacagaagggagccacagcagcagaaggacacagggccccaaggaggagcagagaaagacccaaggagcaaagggacgcaacccaaggggaacaacaagaacaaccagaccccggagccggaccagcgcaagacaaaagaggcagcggccacacggaaagagaggcccaggacacgcaaacaagccccagacaggggaacgacaggccaaaaagggggagggggggggggagggggacggaagcaggaaagaaagagcaaaaccacaaaaaaggaaaaaaaaagaaaaaaagaaaaaaaagaaacaaaccaaacagagacaaaggccaggacgggagcgggccagacgcagaagaacccacgcccccccacaggccggaaccccggacgacgcccaagggaaacaagggagaggcaaaaagaggagaaaacgagaaccaggaccacagggaaaaacaacgagcaggggggcgacaaaagacaaggaaaaccgcccgcgcgggcaggaacaggaccagaacggaagcccaggggaaaaaacagagccccggaaaggcccaggccagccgcccagacaacagaaccagggccagcacaccgccaaacaggaaaaaccgaaaaccacacaaaaaacaaccaaaggaagaccaaagacgaaaagggaaaaaacaacagagaagacagaaaggcaaaaacccacaaacgaaggaaaagaacccaccaccagggcccagaggccacagggaacacagacaaaaaaaaaaaaaaaccaaagggaaaaagaggacagccacggcggcagacacaaagggcggggggaagcaccacaagccgggcagccacgccaccagaggacaccacaaaaccaagcaccacgccgcccccagacccagaaaggcagaagggagccagaacagacagcaggagcagcggggaccaggagcccgacccacggccccaacagaaacgggacgcaggcccagaaccggagaggaggcaccggcccaggacaccaggacagaacagccagcgagcgggggaacccgcccacgcccgcccggacccagcacagcggacggaggacccagcaccagggggagaaaccgaagggccgggacagcgggacaaggagaaaaagacagaaacgggcacacgccaccgaaccaccagaccccgccaaaaggcgaggagaagcaggaggcggagggcgggccgccgccacaggaaacaccgcagaggcaggcgccccagagcagggaagggccgacacagcccgccccgcccacagcgaaaaaaacccaaaaggacagagccaacaacaggcagcccacccacccaaaagaagaagacacagggagagacccccacacaaggagcgaccagccagagcaccacgaccaccagaaccaccaccaaaccagaagaaaaaccgcgaagaaggaaagccggaaagacaagcaggaaggaaagagaaggaggaggagcgaggcacccacccccagcagcacgaagaacaggagggcgccaagacaagcagccccacccagcagcagccaccccaggcgggaggaagaaaccggccagcaggaggaaagaaaaggccaagcagggcggagaagacaaaccaggaacccggcaacagggccgccgaccccacagaccccggcaccaccccacccacacaacggccggggggagccagccaacgacaccgccgaagagacaggaggccaggagaagccaagcagggggacaaagcaggaaacacaaaccccaacacaagacaggagaggaccaaacaaaaggaacacaaaaacggaaacgaacaagaaaacccacccagaaggaagaggaagaagacgagaggcgagagggaggggaaaagaaggaaggaaggaaggacagacaacgaacgggagcccaacgacgggggcgaaaacaaagaaaaacagcaccaacagcgagacaacgaaacggacaggacaaaaaaagggccaaaagaccgcagcaacaagaacaaagcgagaaaaaaccaaggcacaggcccaacacgacgaaaaaaacagcaaacaacgaaaccaaaacacgccaaaaacgaaaaggaagaggggggggggcaggaagcagggagcagaagacaaccgcaagaaccgcacgcacaaagaagggagaaacagaacaagcgggaagcaaggaccaccccaccggacaggccaaaaaaacacaaaaaggcaggagacaaacaaaaaaaccagaaacagaaacaagaccaagcagagaaagagagaaggcaacaggcaacagacacaggaagcaggggaaaagagacgaaaaccccacaagagcgcggccaggagggggcgggccaaccaagaacgggaggcagagacaggcagacgagccagaggcacagaggaccaggacaccagggcacacagagaaacccgcaggaaaggaaaagaggagaggagagggagagggggagggagagggagagggagaggagaggagagaagagagaaggagcacggacccagacgacacccacccagcaaccacaaagccaaaacccaacgcacaggcaccaagggccggaacgacaaaaggggcggaggcacaagacaacagaaaaacagcccgagccaggaaagcacccgagcacaaaaacagcacaagaagcaacagcacaaggaacacgcccaccaagaagaaggacaccacggggccaccaccaggaagaaacgaaacccggaaggagacacagggggagcaccaggaggcgggacagaaagaagcacgaaagagaaaaagcaagccaaaagagacccaggcacggaagacgaaaaaaaaccaccgaacgcaagaccgcacacaaacgggaaaaaaaaccaagagaaaacaagccagaccaagggacaaaagaaaaggaaccaacgacccaaggcaggcacacaaagaggcagcaagcgcagacggagagaaagacaaagaaaagaaaaacaaggaaaggaaacagaaagaaacacaggaacagacagaacaagaaaccacaagaaagaaaagcagacagcaagacagaacaaagcccacaagcagaaaaaggcaacggagcagacacacagcaggaaggagggaacggacgggaaaaaaaggggacagagagcagcgaaaagcgagagagaggggaggcggacaggagcaaggaaaccagacagaaagagaaaggagcagagacagggagaggggaaaaggaagaagcaggggggagagagacaggccagagggagaaaaaccaagaaaaacgggacaaaaaggccacggaaccagagacacgaaaaaaaaaaaaaaggccgcagagaacacaggaaaagaaaaaaaaaacaaaaacagacccgacacaggaaagcgaaaaaaccacgaaaacaaccaaacgcaacaaaaaagcacaaaacgcagaagcaaaggcaaacaagaaggaagaaacagaggacaaagacgggaaagaagggccaaacgagaacggaaacgggcgaagggaaacagaaacacgaaaaacgaaccaggaagccagccgcaaaaagacacccaacagaaaacacgcaaaaagacaagaaaaacacaacaaaaaagcccaaaaccacaacaccacaaaccaccccaaaaaacaaaaagaacgcacagaaccaaagcgaaaggaaacgacagaaacacccagaaagcgcacacacaagaagggacaaaccaaggaccggggcaaaaaaccaacacacccccgcaagaggccaccagaaccccccaaaccaagcaaacgagcaagaaacacaagaaaaaaagcaaaaacagaaagaggccagcccacacaaggaaaagagcgaaacgggaaacaccacaacacaagaggacccaggaccgcaaccaggccagaggcgaaaggggaacagacacacacaaaaccacacaccagacaaggcaaaaaacccgagagccaaacagagcaacaaaaagaagggaaacaaaacaaaaacgacaaaaaccaagaccacaaaaccggagcaacaaccggggcagcagaaagcacaggagaggaaaaccagaacagaaggaaaagaccccaccaccagggcccagaggccacagaaacaaggcaaaaaaaaaaaaaaacagcgaaaccgccaaaccgaaaaagaggacagccacggcggagacggaagggcgggggagaagcaccacaaggcggggagccacgcccccaaggacgggccaaaaccaaaagggccacgcacccccaaaccagaaggcggaaagcggccgaacagacagcaggagcagcaggggccaggggcccgacccccacgccccaacagaaacgggacgcaggcccagaaccggagagggaggcacccgcgcccaggacacagcagagaaccaggccagcgagcgggggaacccgcccacgcccgcccggaccagcacagcggccggaggacccgcacaaaggcgcaaaaccgaaggccggagccagcgcccacagaaggagagaaaacagaaaagggcaagccgccacagaaccccccacccccgccaaaaggcgaggagagcaggaggagagggggggcggcggcacaggaaacagccagaggcagggccccagagcagggaaagaccgacgcagcccgccccgcccacagcgaaagaaaggcaaacagaggcagaccacaacggcagcagccccgcggcagaagcgcaagcgacccagaaagcccacacacaacaagccaacaaggaggcggaccgagaaaaaaaacaaaggaaaagaggaaaaaaaacagcaaggcaaaaagagaggaaagaaagccgaggcccccacccccacccccccgggaagaaggggcaggccaggcaagccgcaggccccacgggccagcagcaccggccccaggcgcccgagccacgaaccgggccgagcagcaaacccaggggccggcagggagaaaaagaacacacgcacccaggcccaagagaagcaaaccaggcgcaggcagccgacccagacacacacaccccgggacagcgggagaccacacaagaggcccagacaaaaggccgggacccagaaggccacagggccggaaagagcagcagaagcgcaacacgaagcaaaacggccaggagaaacacaggccccaaaggcagaccaaaggacgcacgacaaagggcaagcacacggagcagagacacaagaagccaccaaaggccaaaccgccaaaaacaaacacagcgcacacaaaccagcaaacgcccggcaaacaaaacaagaaccgagaggagccgggcaaaaggggcagggcagcggaagcgagagccacagcagaagacaagcaaaaggagcaggcacagcacaaagaggagaacagaagccaacaagagccgcaccccggggccgcagcaccagaaggaagacgcaaaggccggcccacaacccggcagcgcccacagccgcgcgcccagccccagcgcaagacaacggggcccacgccccgccagaggaaaggcacgggcccaggggaaccgaaagaccgccggcagccccacgccaggaccagggaagaggcaaagaacagcgcgagccggcaggaggaggaggaacacaaggccacaaaggccaccgagaccccccccaccccaagccgaaaaaaaaccaaaccaaacagagacaaaggcacaggacgggggcgggccaaacgccagaaggaacccacgcccccacaggccgaaccccggacaacgccccaaagggaaacaggggagaaggcagaaagaggagaaaacgggagggcaccgggcaaccgacaagaaagaacacaaccagcaggaaggccaccaggacccacacaggcagaaagagaaacgacagacggaggagacggggcacaggacaggaacgaagaaaaacggagcaacgccgggagaaaggggagaacacaaacagggacacccccggagacaaaaaggacaggaagaagggagcagccgccccgccacgcgggagaagagaacccagaccggacccacgcagcacacgaaacaggggaagggcgcagacgaagcacaaaaaacacaaagagacaccaaaacggaccagagaacccgacaaacaacgggaagcacggacacccgagaaaaacaacggcaagggagaaacaagacaaagaaaccacccgcccgggcaggagcaggacacggaacaccagaggaaaagacagaaaccacggaaaggcccaggccaccgcccgagcacaggaccagggccagcaagccggccaaacgcaccaacacagaaaacgacacaaaaaaacaacaaaaagaaaaccaaagacggaaaagaaaaaacaacagaaaagaagaaaagggaaaaacacacaaacagaacgaaaagagcccaccaccgggcccagaggccacaggaacaggacaaaaaaaaaaaacaggaaacaccaaagcgggaaaagaggacagacagcagggcaaggggcacaccaaacccagcacccggaggcagaggcaggggacgagcgcgccaaccgacacaaaggagcaggacagccagggcaacagcaaaacccgccgaaaaaaaagaaaaaaaaaaaaaaagaggacaaccacggcgcagacaggaagggcgggggagaggcaccacaagccgggagccacgccaccagaggacacggcaaaaccacagcgccaccccccgccagaccagcaaggcggaagaaggaccaaagacagcaggagcagcggaggccgcagggcccgaccccaggccccaacagaaacgcaacgcaggcccagaagcggagagaggacaccagcagagaagaaccaggccagcgagcggggggaaccgcccccgcccgccggacccagcaccagagaagaaggaagaggcggccgaacagacagcaggagcagcggaggccgcagggcccgaccccaggcccaacagaaaccagacgcaagcaaaccggagagggaggcgccgcgcccaggacaccagcagaaccaggccagcgagcgggcggaacccgccccgccccgcccggaccagcaccgcgagcacggacggacccgcacgaaggcgcaaaaccgaagggccggagccagcgccacagaaggagagaaagcagaaaagagcaagccgccacagaaccccccacccccgccaaaaggcgaggagagcaggaggaggaggagggggccggcggcacagaaaacacccagaggcagggccccagagcagggaagggcgacgcagcccgccccgcccacagcgaaagaaaaacaagcagacgaggccacaacggcagcagccccgcggcagaagcgcaagcgacccagaaacccggcaaacaagccaagaaggaggcggaccgagacaaaaaacaaaggaaaagaggaaaaaaaacagcaagcaaaaggaaaaggaaaggaagcgaggcccccacccccacccccccgggaagaaggggcaggccaggcaagccgcaggccccacggaccagcagcaccggccccaggcgcccgagccaggaaccgggccgagcagcaaacccaggggccggcagggagaaaaagaacacacgcaccacaggcccaagagaagcaaaccaggcgcaggcagccgacccagacacacacaccccgggacagccgggagaccacacaagaggcccagacaaaaggccgggacccagaaggccacagggccgaaagagcagcagaagcgcaacacgaagcaaaacggccaggagaaacacaggccccaaaggcagaccaaaggacgcacgacaagggggcaagcacacggagcagagacacaagaagccaccaaaggccaaaccgccaagaacaaacacagcgcacacaaaccagcaaacgcccggcaaacaaaacaagaaccgagaggagccgggcaaaaggggcagggcagcggcacagagagccacagcagaagacaagcaaaaggagcagacacaaaacaaagaggagagacagaagcccacaagagccgcaccccggggccgcagccccagaaggaagacccaaaggccggcccacaacccggcagcgccccacagccgcgcgcccagccccagcgcaagacaacggggcccacgccccgccagaggaaagggaggggcccaggggaacccaaagaccgccggcagcccacgccaggaccagggaagaggcaagaaggcacgaggcggcaggagcaggaggacaccacaacggccacaaacgccaccgagaccccccccaccccaagccgaaaaaaaaccaaaccaaacagagacaaaggcccaggagggagcgggccagacacagaagaacccacgcccccccacaggccgaaccccggacaacgcccaaagggaaacaggggagaaggcagaaagaggagaaaacgggagggcaccgggcaaccgacaaggaagaacacaaccagcaggaaggccaccagaacccacggagccgcggagaagcgacggacggaggagacaaaacaagggcaggaacagaagaaaacccaagcaaggccaccgggaaaagggggagaacccgaggagacaaaaaggacaggaagaagggagcgcccgccccgccacgcggaagacgagaacccagacccggacccacagccacacgaaccaggggaagggcgcagacgaagcacaaaaaccacaaagagacaccaaaacggaccagagaacccgacaaacaacgggaagcacggacacccgagaaaaacaacggcaagggagaaacaagacaaagaaaccacccgcccgggcaggagcaggacacggaacaccagaggaaaagacagaagccacggaaaggcccaggccaccgcccgagcacaggaccagggccagcaagccggccaaacgcaccaacacagaaaacgacacaaaaaaacaacaaaaagaaaaccaaagacggaaaagaaaaaaacaacagaaaagaagaaaagggaaaaacccaaaacagaacgaaaagagcccaccaccgggcccagaggccacaggaacaggacaaaaaaaaaaaacaggaaacacaaagggaaaagaggacagacagccaggccggggagcagcaacccagcacggggaggcagaggcaggcggacgaggaagccagcggcacaaaggagccaggacagccagggcaacagcaaaacccgccgaaaaaaaaaaaaaaaaaaaaaaaaaaaaaaaaaggacagccacggcgcagacacaaaggggggggagaggcaccagagccggggagccccgccaccagggacacggcaaaacacagcgccaccccccgccagaaagcaaggcagaagaggcggccgaacagacagcaggagaagcgggggccagcgggccgacccccaggccccaacagaaacgggacgcaggcccagaaccggagagggaggcgccgcacccaggacaccagcagagaagcaggccagcgagcgaggggaacccgccccgcccgcccgcacccagcacagcggcacggacggacccagcaccagggcgagaaaccaaagggccggagccagcgccacaggagagaaaacagaaaagggcaagccgccacagaacccccaccgcaaaaggcgaggaaacgcaagacgaggcgaagcgggggagggggggggggggggggcgaggaaacaccagcgggcagggccccagagaaaaagggcgacacagcccggcccgccggcaaacggaaaaaggcagccgaggcgcgggaggaaaacgacggacaccagcccaaaacaggacaccacacgcggaaaggccgacagaagcaagcagcaaaagacagagagacaggggggacgaaaaggcgaagcacccacccccgcggcaccccgaagacccgggaaccacaagaacagcaagacaagacaagccgcacccccccaggcagcaggccagcccaggagccacggaccggggcgggacgcgggggcagccagcaccagcaggaggaaacaaaaaaaacagcaagccagaccggaagagcaaaggggccaggaagccaggagcagccagaccgcccagccaacccaaaaggaggagaaaggcagaggacagcaggccgggcgaacacgggacggacgcgaagaaagcgcaagagcccgagcacaggcgagcacacaacagccagcaggccccggcacggggacacccacaccaggagcacgggaccccagagagaagaacaccaaggcaggaccagaaaacgcccaagaccgagaacaggagaacccacagacccaaccacccaagacaacagaccaagccaaagaaagaagcacgaaacgagcagaaaaaagcgcacaagacagccaaaggggaggaaaaaagggccaaggcaaggaaccgaagcaaggaggagcaagcaggaagaagagccggaaacaagaagaaaaacaccaaaccaaaaaaaaaaaaaaaaaaccaagaaaagcaggaaaacaaaaaacaaacaaaagcggaaacaaggaaacccagacgaagaaaaggggaagaagcaggagaagagcggggcaagagccacaaaggccaaaagggggggccccagaacacagaacaggaaaggagcccaacagggcaggaagccagcccagacccccggagagcaggaaggccaacgagagccacccggagccaggccccgcgccaaacaacacaaacggaccggcagcggggagggacccacccagagagcaggcagaaggacgagggcgacagcgggcaacaagcaagccaagacccagcccccagcccgcagcccccaccacgcaaagccagggagacgggcccggcaaccacacccggggaccagacggcgggccaaacaccacaggcccccaccgagaaacacacccagagaaaaagggccacggaacacaaggggacgacgaaaggaccgaagggcaaggacaccgaaccaaagcagcaaaagaagaacagaaacaaaggccccgcacccaggcagggccacgcaccgggccagcccagcacagccaacaccacgacagaccaacaaacaaaggaacgccaaaaaaagggagaagacggggaaaaagggcagaggaaggcaccaaagcagaccagccagagcccacagaagaccacaccaaaacccggagacaaggaaaacaccccaaaccaagaacacaagacaaaaagagcaaaaaacccaccaacagcaacgcacacgccagcagggaggccgccagagaagggcaaaagacccaggagcccaagacaaagccagcccgccccacccacccagggcgcagcgcccaggaaaaagcagagggcaaacaaaaggcccagcaggacaagcccagggaaccacagcacaccccaagaaccccaaggccaaagacacaaaggcaggagaaaagaaagacaaaaaaagggaaacgggagagaggggccacaggaaaagcagcaagcacaccaaggcagcacacacaccgaccaggagcaaccaaagacgaggaaaacagcaagacaccagacagaagcagaacccgaaacgaagagcaagaggcccacggcccagaggaagcaggaaggccagccagcacagccccacacccacagaccaaccaacccagcaggccccaccccaaggacccacaacagcccagacacagccgcagcagcgacccccaaccaaacaacgcagcaacacaaacgaagaagagaacaaaaaaaaacgagcgggcggggggcacgccaacccagcacgggaggcagaagcaggcggacgagcaaggccagccggcgcaaaggagccaggaaagccagggcaacagagaaacccgccggaaaaccaaaaaaaaaaaaaaaaaaaaaaagaagcaggacacggcgcaaaccacagggagaacacgccaaggagaggccaggaagcggagggcgcggaaacgccccaggggcaggaggaacacacaacaagcaccacgaagccccccaccccgggaaaaaaaaaaaacaaaaaacacccacaagaaaaggcgccgccagccaaggaagggagaagacaaacacggccgcaggcccaaaaaccaaacagccaccaaccaccacagcaaccagagaaacacccacaaaaccgacaccggcagacgcgaaaggaccagaccgacacaagcaccccacaaccgggaacagggcagccgcaaagaccaagaggcagagacagcacagcagacccaccaaacggcccgcagcagcagaagccacggacaagacaccgcgacccagccgcaaagggaagaaaacaccgcagaagaccccaagaaaaaccacacagagcgacaggccccccccaccagcccaaaccacccgcacccgccccccaaccaaggcccaccccaaaaaacaaacaagaagccggcaagggggcacacgccaacccagcacgggaggcagaggcaggcagacgaggaggccagccggcacagaggagccaggacagccagggcagaaaaaacaaaaaacaaaaaccaaaaaacaaaaaaacaaacaggagcaaaggggcccaccaaaccaaaaggagaagagaaggcagaccgagcaggcagccaggacacagagacccacaaaaaaaaggggggggggaaaaacaaacaaagcagaaaccagccgagacagggccgaagcccggcgccggaaccaccgagaccaggcggccggaaccagagaccgccgcccacccccaaggcgggaaaagggcgccaccacgcccgggcagaaaaaaagaagcaaaagcacggcaggaacaacgcaggaaccccaagacggaccggcaaaacccgcgggaggaccagcccagcacacagcacagaggagaacaaacagacagagagaagacagaaggagcccagggacgaacagacacaggagacgaggcaagcacagaaaccagcagaaaccagagaaaagccggagaacagcagcgggagaggagggggccagaaaagcagggaagcaaccagcagagccagaaagagaagggaaggggagcagcagcagcaagcgcagaggcaggaaacaccagaccagaaagacaagagaggccaaagcccaggacaggccagggcagacgaaggccgagacacaaaacacggaaaaaagacccagaagcacaagaacacacagacacgccaaacacaaaaccaagaacaaaaaccagaaacaaacaaaacaacaaaagaccaaaaaaaaaaacccgaaagaaaggacccaaaggggaaaccaagaaacccaagagaaagaaccgcaagggggcaaaaagacaccagagaaggggagcggccagccacacagggcggggccacagcaagcggaggcaggcccagcaaagcaggaaggagccgagagcccgagggcagccgggcagaagacagcgccggggacccggccccggcccacaacaagggcaccacgccgccccgggcccgaggagagggccacccagcaaggccacaagacccacccccacacggcagggggccggaccccaacacgcaagacaaagcgacaaaacaccaaacccgcccaggacaagggggcggcgggcacaacggacaaagaaaaaacagcagaagggaaacgaagcaaaggagacaaagaaaaaaaaggggccaggcggccaaccccagacaacgaaaaaaaaggagaacccagcacagacagagacagacaggaaaaagagcgaaaaagacaaagacaggccgaggggggccagccgaacccagcaccggaaacagagaaaaagcaggggaccgagcagaccggccgacaaaggagcaagaacagcaaggcacagaaaaacccggaaaaaaaaaaaaaaaaaaaagaaaagaaaggaaaaagaaaaagaaacaaagaaaaaaaacaaaaaacaaaaagggcacagaaaagggcaaaaacaaaccaccacccagcaaaaaacagaaagccacagaagccacacacaggaaggagaaaccaaggcacacaaggaaagaaagcccacccagaggaggacaaaacaggagcaggacccaaacccaaaaagcccccagaacaggcacccaaaccaaggcacagcaaaacaaaaagaaagaagggaccaaaaaaaaaacaggcaccggacaaagagaaacaaaggaaaagggaaacacccacaaacagaaggaaaagcaccagacccccaaagggcaggggccaccgaaaaacaagacacaaaaaaaaaccaaagacccagaacgagcaaaaccacacaccccccggaaccgccaaggcagcaggcaggaagggcaggaggcaacggcaaagccgggagccacgccaccagaggagcggcaaaacacagcgccacagcccccccagaccagcaaggcggaagaggcagccgaacagacagcaggagcagcggaggccaggggccgaccccagaccccaacagaaacgaccccacggaaccagaaaggccacgccaaggacagcggcaaagaaaacgcaaacgagcagcagaaacccgccccccgcccgccggaccacaggacaccaagggcacgcccagcaaaggacaacacagaccgcaaagcccaaccccaaacgccaaaaaagagggggggaaggacgagcggcaaggaacccggacacccaccccaaagcagaagcaaagaaggccggcaccagggaaaagaagaaggggaaagagccaaacaggaaacaaaccccagaccaagccagggcagggcaagagcacgacgcccaggccgaacaaccaggggccacaaccacgaaggggacgggggcgaggcgaagacagcacagggagacaacaaaaaaaagagaaacaaaccccagaccaagccccccagagccaccaagagaaagagaccgcacaggagagcaaagccgcacgaggcagggccacagaagaaacaaaaaccagccacagcagccgccccgccccgaaaaaaaaaaaaagcaacacaaggagccagaaggggggcagccgccccccccaaggaggaggaagccccgcaggccccccgccaacagagccagaccaacacaacccccgacggaacccaaaggacaaaagaccaaaaccagaacaaagcaagaaggaaagagaaagccaaggagaccgaggcagacaccccagcacccggaaaagcagcaccaggcaagacgaaacgcacgcccccaccacccagcgcgcaaccccaagggccaggacaagagccgccaggacagcagaaagaagaaggaaaagcaaggaacccaggcgcaagagcaaacaggcaccagaacccggccagccacaccgggcaccagcaccaaccgacagacaaaacaggcggggcaggggcgggacaccacaaaaggagaagaaagacaacgaagccaaaccaagggggacaaaagagcacgccaaaaccaaggaaggaacaaacaacccaccggaagagccacaggaagcacaacggaggccgcaacagccagaggaaacaggccagcgggcaggagcacagaagcaggcaggcacgcgcggagcagagcgagagcacggcccagcaacaagcgcagacaagaagcccaaacggagccacaaaaacgcaggacaaaagaaaggaagaaaagagaaaaacaaaaaagggacaaaagagcaaccaaagcacacacaagagcaccaggaacaaagaacccagaaaacagcaaaaaaaccaacagaaacaaaccaccgcaaaacaccaagagcccagggccaagaaagcaaggcaggcccgccccaggcccacagaccaacccccaccaagaagaagcaggaagcgcaagggcgcacacgaagcaacccagggggacagaggcacaacaaaagcgccaacccccccccccgaaaacaaaaacgaaacaaaacaaaacaaaaaaacacaccaccgcaagaaaaaggcagccgacggcccagcgagaggacaagcacacgcggccggcaggggcccggaaaccaaaacggaaacggcaaggcaaacgcccgcaaagaaggggggccacacaccaaggacacaccacaaaacgcccaacgcagggaccccgggaagaagaggaaggggccaaaggaaacagaggaggacccacaacacaaacccgaagccccacagcacccgagccaccgcaagaccacccggaaggacaggccgccacacaccaagaaaaagcagggacagcgcaggcaccacaaaccggcccccgcagaggagagccacaaggcacacaccaggccagaaaaacggaagaaaacacaacgagaagaccaagaaaacaacaacacaaaggcgcccagacccaggaccaaggacaaacaaaccagaagcaaaaaaaaagacacacagagagagagagagagaaagagagagagaggccaacaagacaaaccaaaaggaagaacagcaaaacagcgacagaagaaagcccagagcaaacaaagagaccaaaaaaaaaaaaaaaacaacaaaaaaagcacgcggcgagagggcaaccgaaaggagaggccaccaagggacagacgacaaacaacgaagaaaacaaaagccccgccagggggcaacgaagcaagcacggaggggggaggccacgcacgcaaacacaggacacagcaccgccaaaggcccaagcaggggcccggccaggggaaagacagcgggcggaagaacgcaggccaagcaccccgggcccaacacgccccgcacagccccggaacagaggggagggacaaggaagagaccagaggacccaaggccaaagcccccacccgacacagccaggggcacggacgcccacagagaagaggaaggccggagcacaaccgaagcagggcgacgcaggggccccgacacaacgaaaaggaaggaaaagagacccacacgcaaaaaaaaacacccaaagaccagccaaacacccaacgcgaccagaggcaaacagacaggagagacaaaaaaaaaacaaagaaacacaaagcagggaaaacaagaaacaaccaggaacaaacgaagggaggggagaaggagggcacaagaaagaaaagcaacgccccggagccaaacgcaggggagcagacaaaccacgggaaaaaagacaccaacgagccccccagacagcaaggcagaagaggcgccaaaccgacagcaggagcagcgggggccagggggccgacccccaggccccaacagaaacgggacgcagacacccagaaccggagagggaggcgccgccgcccaggacaccagcagagaaccaggccagcgacgggcggaaccgccccgcccgcccagcacccagcaccgcggcacggacagacccgcaccagggcgagaaaccgaagggccggagacagcgccacaggagagaaaacagaaaacgagcaagccgccacagaaccccccacccccgccaaaaggcgagaaaaagcaggaaaaggagggggggccggcggcacaggaaacaccgcagaggcaggcgccccagagcagggaagggcccgacgcagcccgcccccccaggcgaaaaaaagcgaacagaggcaggcccaacggcagcagccccgcggcagaagcagcaggcgacccagaaagcccaacacaacaagccacaaggaggcggacagaagacaaaaaaaaagagaaaaaaaaaaaaaccaaggaagccaaacagaaaggaaaggaagcgaggcccccacccccacccccccgggaagaaggggcaggccaggcaagccgcaggccccacgggccagcagcacccggccccaggcgcccgagccaggaaccaggcgagcagcaaacccaggggccagcagggagaaaaagaacacacgccaccaggcccaacagaagcaaaccaggcccaggcagcccggaccagacacacacaccccgggacagccgggagaccacacaagaggccaggacaaaaggccgggccgggcaggccacagggccgaaaaagcagcagaagcagcaacacgaagcaaacagccacggagaaacacagcccaagacggaccaaaggacgccacgagccaaggggccaagcacacaggagcagggacacaagaagcacaacagcgaccagcccgggccacacaacacggcaacacacagcaaccccggcaacaagacagcacccagagaggagcggacgcaaagagccagggcaacgggagaaaaggagccggcagcaaaaagacaagcgaaaggaccaggaacagcacaaaaaggggagacagaagcaagcaagggccgcacgcggggccgcagccccagaaggaagacccaaaggccggcccacaacccggcagcgcccacagccgcgggacagccccagcgcaagacaacggggcccacaccccgccagaggaaaggcacgggcccaggggaacccaaagaccaccggcaggccccacacaggacagggaagaagcgaaggccgcacgagccgcaacagaggcagaaggacaccacaaggccacaaaggccaccgaaccccccacccaagccgaaaaaaaaccaaaccaaacagagacaaaggcccaggaccggagcaggccagacgcagaagaacccacgcccccccacaggccgaacccccgaggacgcccaaagggaaacaggggagaagcaacagaggagaaaacgggaagcaggacacacgggaaaaacaacgccaaggggcgagaaaagacaaggaaaccacgcccagagggcaggagcaggcgagaaggaaccccagagcaaaagacagaagccccggagaggcccagaccagccgcccgacaacaagaacagcaagcagcaccaaacccagcaagcacagagaaccacacaaaggaacaaccaaaaggaacaaaaacgacagggaaaacaacagaaaagacagaaaaaggaaaaaccaaaaacagaagaaaaaagcccacaccagaagcagaggccaaagggaacacagaaaaaaaaacaacacccaaacaaccaaagcgggaaagaggacagccaggacagacaggaagggcgggggagaggcaccaggagcacggggagccacgccaccccaggccacggcaaaaccacagcgccacccccccccaaaccagcaaggcggaagaggcgaccgaacagacagcaggagcagcgggggccaggggcgcgacccagaccccaacagaaacgggacgcaggccccagaaccggagaggagggccccacaagacaccagcaaagaaagggccaggagcgggcaggaacccgcccacgcccgcccggacccagcacagcggcacggacaggacccaagcaccagggcgagaaaccgaagggcagggacagcgggacaaggagaaaaagacaaaaacaggcacacgccacagaaccccgacccccgccaaaaggcgaggagaagcaggaggaggaagaggcgggccgccgccacaggaaacaccacaaaggcagggccccagagcagggaagggccgaggcagcccggcccgcccacagcgaaaaaaagcaaacagaggcaggcccaacggcagcagccgccgccgcagaagcagcaagcgacccagaaagccagcaaacaagccaaccaagaaggcggaccgagacaaaaaaaacgacagaaaaaaagaaaaaaagacaaggaagcaaacagaaaggaaaggaagcggaggcccccacccccacccccccgggaagaaggggcaggccaggcaagccgcaggccccacgggccagcagcacccagccccaggcgcccgagccaggaaccaggccgagcagcaaacccaggggccagccagggagaaaaagaacacacgccaccaggcccaacagaagcaaaccaggcgcaggcagccgacccacacacaccagaccccgggacagccgggagaccacacaagagccccagacaaagacacgggccgggcaggccacaggccgaaagaggagcagaaccgcaacacgaagcaaaacggccacggagaaacacaggccccaaggggccaagacccaggagcaaggacacaagaaccacaacagcgaccggcccgggccacacagcacggagcaacaaaccagcgaccccggcaacaaggagcacaggagaggagcgacacaaggaccagggcaacgggagaaagggagccggcagcaagaagacaaagcgaaaggagcaggaacagcacaaagaggaaaagacagaagcccagcaacagccacaccccggggccgcagcccagaaggaagaaccaaaggccggcccacaacccggcagcgcccaaggcgcggcccacccagcgaagacaacggggcccacacccccgccagaggaaaggcacgggccaaagggaacccaaagaccgccggcagccccacgcaggaccagggaaaaggaaggccagacgagcgccgcagaaagcagaaggacaccacaggccacaaaggccaccggaaccccccaccccgagccaaaaaaaaaaacaaaccaaacagagagaaaggcccaggaggaggagcaggaggacgcaggagaaccacgcaacccccagcagaccgaacccgaggacgcccaaagggaaacaggggagaggcagaagaggagacaacgggaagcaagacacgccgggaaaagaaaaagccagggggcgagacaagacaaggaaaccaccagcagcgggcagaaacaggaccagaagccccggaaaggcccaggccagccgcccagacaacagagccagggccagcagccgccgaacccagcaaaaaacgaaaaccacacaaaaaacaaccaaacgaagaccaaacacggaaagggaaaaaccacaaaagacagaaaaaggaaaaacccaaacgaaggaaaagagcccaccaccagggcccagaggccaacaaggaaggagacaaaaaaaaaaccaaacaccaaaggggaaagaggaagccacagcagagacagaagggcagggagaagcaccaaagccggagagccacgccaccaaggacgcggcaaaaccacagcaacacgccccccagaccagcaagacagaagaggcgaccaaacagacagcaggagcagcgggggcccagcagggcccgaccaagccccaacagaaacgggacgagccccaaaaccaagagagagacaccgcgcccaggacacagcagagaaccaggccagcgagcgggcggaaccgccccgcccgcccgcacccagcaccgcggcacggacagacccaacaccgcagcgcgaaaccgaaaggccggaacagcgccacagaaggaggaaaacagaagaaggacaaacaccagagaacccccgacccgccaaaaggcgaggagcagaggaggaggaggagggccgcgcgacaaaagaaacagccgcagaggcagagcccacagcagagaagagccggcgcaggccccccgcccacgacgaaaaaaagcaaacagaagcaggcccaacggcagcagccccgcggcagaagcagcaggcgacccagaaagcccaaacaacaggccaaccaaggaggcggaccgagacaaaaaaaaaaacagaaaaaaaggaaaaagaacaagcaacacacgaggaaaggaagccgagacccccacccccacccccccgggaagaaggggcaggccaggcaagccgcaggccccacgggccagcagcaccggccccaggcgcccgagccaggaaccaggcgagcagcaaacccaggggccggcagggagaaaaagaacacacgcacccaggcacaacaaaacaaccaaggggcaggcagcccgacccacacacaccagaccccgggacagccgggagaccacacaagagccccaacaaaaggccgggccgggcaggccacagggccgaaagagcagcagacaccgcagacaaagcagaacagccaacgagaaacaaggccccaagacgaccaaaagacgcacgaccaaggggcaaagcacacggagcacgacaaagaaaccacaaaggccaaacagcccaggcaacaaacacgccaaccagccaccccggccacaagacaacacccgagaggagccgggcacaaagggcgaacagcgggacaaagggagccggcagaaagaaggcaggcaaaaccgccacacagcacaaggagcaggagaccgaacccacaaagagccgcacccggggccgcagccccagaaggaagacccaaagaccggcccacaacccgacaggaagccacggcccacccccagccgaagccaacgggcccacaccgccagagaaaaggcacgggcccagagaaacccaaagacaaccggcagccccacgcaggaccagggaagagaaaggccagcagaggcgccgcaggaggcagaaggacaccacaaggcacaaaggacaccggacaccccccccaccccaacaaaaaaaaaaccaaaccaaaccagagacaaaggcccaggaccggagcaggacgacgcagaagaacccacgccccccacaggccgaaccccggacgacgcccaaagggagacaggggagaaggcagacagaggagaaaacgggcagcaggacacgccggggaaaaacaacgcccaggggcgagacaagacaaggaaaccaccggccgcgagcaggaacaggaccagaagccccggaaagggccaggccagccgcccgagcacaggaccacggccagcaagccgccaaaccccacaacacaaaaacacaaaagaacagacaaaaaacaccaaaaacggaagggaaaaccaagcaagagcgagaaaagggaaaaacccacaaacaaaggaaaagagcccaccacccgggagaagaggcagaggccacaggaacacagaccaaaaaaaaaaacaacaaagaccaaaggggaaaagggacaaccacggcgcagaaagaaagggcggggaagaggaaccacaagccggggagccacgccaccagaggacacggcaaaaccacaggccaccccccccagaccagcaaggcagaagaggcggccgaacagacagcaagagcagcggggaccagcgggcgccgccccccagaccccaacagaaacgggacgcaggccccagaccggagagagaggcgcccgcgcccaggacaccagcagagaaccaggccagcgagcaagggaaacccgccccgccccgcccgacccagcacagcgcgcacgaaaggacccagcaccaggcagcgaaaccgaaaggcggagcagcgccacagaaggaggaaaacagaagaaggacaaacaccagagaacccccgaccccgccaaaaggcgaggagcagaggaggaggaggagggccgcacggcacaagaaccacccgcaggggcagagcccacagcagagaagagccgacgcagcccccccgcccacgacaaaaaaaagcaaacagaggcaggcccaacggcagcagccccgcggcagaagcagcaggcgacccagaaagccggcaaacaagccaaaccaagaaggcggaccgagacaaaaaacagaaaaaaaggaaaaagaacaagcaacacaaaagaggaaaggaagccgaggcccccacccccaccccacccgggaagaaggggcaggccaggcaagccgcaggcgcccaccgggccagcagcacccgaccccaggcgcccgagccaggaaccaggcgagcagcaaacccaggggccggcagggagaaaagaacacacgccacccaggcccaacagaagcaaaccagggcaggcagcccgacccagacacacaaccccgggacagccgggagaccacacaagagccccagacaaagacacgggccgggcaggccacaggccgaaagagcagcgaaccgcaacacgaagcagaacagccacgaagaaacaaggccccaagacgaccaaaagacgacgaccaaggggcaaagcacacggagcacgacaaagaaccacaaaggccaaacagcccaggcaacaaacacgccaaccagccaccccggccacaagacaacacccgagaggagccgggcacaaagggcgaacagcggacaaagggagccggcagaaagaaggcaggcaaaaccgccacacagcacaaggagcaggagaccgaaccccaaagagccgcacccggggccgcagccccagaaggaagaaccaaaggccggccaacaacccggcagcgcccacagccgcggccgcccagccgaagccaacgggcccacaccgccagaggaaaggcaccgggcccagaggaacccaaacacaaccggcagccccacgcaggaccagggaagagaaaggccagcacgagccgccgcaggaggcagaaggacaccacaaggcacaaaggccaccgcacaccccccccaccccaacaaaaaaaaaaaccaaaccaaacagagacaaaggcccaggacgaagagcaggacgacgcagcagaacacacgcccccccacagaccggaaccccggaggacgcccaaagggagacaggggagaaggcagacagaggagaaaacgggcagcaggacacgccggggaaaaacaacgccaggggcgagacaagacaaggaaaccaccggccgcgagcaggaacaggaccagaagccccggaaagggccaggccagccgcccagagcacaggaccacggccagcaagccgccaaaccccacaaccacaaaaacacaaaaagcaacagacaaaaaacaccaaaaacggaagggaaaaaccaagcaaaaggagaaaagggacaaacccacaaacaaaggaaaagagcccaccaccagggaaagagccagaggccacaggaacacagaccaaaaaaaaaaacaacaaagaccaaaggggaaaagggacaaccacggcgcagacaggaagggcgggggagaggcaccacaagccggggagccacgccaccagaggacacggcaaaaccacaggccaccccccccagaccagcaaggcagaagaggggcagaacagacagcaggagcagcgggggccagcgggcgccgccccccagaccccaacaaacacgggacgcaggccccagaaccggagagggaggcgccgcgcccaggacaccagcagagaaccaggccagcgagcaagggaaaccgccccgccccgcccgaccgaagcacagcggcacgaaagacccagcaccgcggcggaaaccgaaaggcggagagcgccacagaaggaggaaaaagaagaaggaaaacaccaagaacccccgacccccgccaaaaggcgaggagcagaggaggaggaggagggccgcacggcacaagaaacacccgcaggggcagagcccacagcagagaagagaccgacgcagccccccgcccacgacgaaaaaaagcaaacggaggcaggcccaacggcgccagccccgcggcagaagcagcaggcgacccagaaagcccaaacaacaggcaaccaaggaggcggaccgaaacaaaaaaaaaaacagaaaaaaggaaaaagaacaagcaacacaaaagaggaaagaaagccgaggcccccacccccaccccccccgggaagaaggggcaggccaggcaagccgcaggcgcccaccgggccagcagcaccggacccaggcgccccagccaggaaccaggcgagcagcaaaccaggggccggcagggagaaaagaacacacgcacccaggacaagagaagcaaaccaggccaggcagacgaccagacacacacaccccgggacagccgggagaccacacaagagccccagacaaagacacgggccgggcaggccacagggccgaaagagcagcgaaccgcaacacgaagcagaacagccacgaagaaacaaggccccaagacgaccaaaagacgcacgaccaaggggcaaagcacacggagcacgacaaagaaaccacaaaggccaaacagcccaggcaacaaacacgccaaccagccaccccggccacaagacaacacccgagaggagccgggcacaagggcgaacagcggacaaagggagccggcagaaagaaggcaggcaaaaccgccacacagcacaaggagcaggagaccgaaccacaaagagccgcacccggggcgcacaaccccagaaggaagaaccaaaggccggcccacaacccggcagcgcccacagccgcgggacagccccagcgcaagacaacggggcccacaccccgccagaggaaaggcacgggcccaggggaacccaaagaccaccggcaggccccacacaggacagggaagaagcgaaggccgcacgagccgcaacagaggcagaaggacaccacaaggccacaaaggccaccgaaccccccacccaagccgaaaaaaaaccaaaccaaacagagacaaaggcccaggaccggagcaggccagacgcagaagaacccacgcccccccacaggccgaacccccgaggacgcccaaagggaaacaggggagaagcaacagaggagaaaacgggaagcaggacacacgggaaaaacaacgccaaggggcgagaaaagacaaggaaaccacgcccagcgggcaggagcaggcgagaaggaaccccagagcaaaagacagaagccccggagaggcccagaccagccgccagaccaagccagcagcgccaaacccagacaccacagaaaaccacaaaaaccaacagccaaaaaaaaacaaaacgcaaagggaaaaacacagcaaagacagaaaaaggaaaaaccacaaaacagaaggaaaaaagcccaccaccagggccaagagcccacagggaacacaggaagaaaaaaaaccaaacaccaaagcgggaaaccaggacaccacggcagacaggaagggcgggggagaggcaccacaagccggggcgccacaccaccacgaggacgggcaaaaccacaggccacgcccccccagaccagaaggcagaagaggcgaccgaacagacagcagaagcagcgggggccaggggcccgacccacggccccaacaaaacgggacgcaggcccagaaccggagaggaggcaccggccaagacaccagcacagaacagccagcgagcgggggaacccgcccacgcccgcccggacccagcacagcggacggacggacccagcaccagggcgagaaaccgaagggcagggacagcgggacaaggagaaaaagacagaaaacgggcacacaccaccagaaccccgacccccgccaaaaggcgaggagaagcaggaggcggaggggggccgccgccacaggaaacaccgcagagacagggccccagagcagggaagggcccgaggcagcccgccccgcccacagcgaaaaaaacccaaaaggacagagccaacaacaggcagcccacccacccaaaagaggaagacacagggagagacccccacacaaggagcgaccagccagagcaccacgaccaccagaaccaccaccaaaccagaagaaaaaccgcgaagaaggaaagccggaaagacaagcaggaaggaaagagaaggaggaggagcgaggcacccacccccagcagcacgaagaacaggagggcgccaagacaagcagccccacccagcagcagccaccccaggcggggggaggaaaacacgccagcaggaggaaagaaaaggccaagcagggcggagaagacaaaccaggaaccaggaaaccgggccgccgaccccacagacccggcaccaaccccacccacacaacggccggggggcgccagccaacgacaccgccgaagagacaggaggccaaaaaagcccaagcagggggacaaagcaggaaacacaaacccaacacaagacaggagaggaccgaaacgaaaggaacacacaaaggaaaaacacagaaaccaaccagaaggaacagaagggggggggaagagagacaacggaagggggccggggggaacgagaaacaaacaacaaacccggaacagagagaacccagaaaacccggaaggaggaacagagccaaaccaaccacaaaaccaggcaagccccagccggacgggacaccacccagccacaaaacagacacagccacgcaagacgcagaacaaggggccaagaacgaaaagagccaacccagacggcaacggcccacacgccaggagaggggcccaggcgacacgccggaggccaggacagaggaaggacagccgagacccaggaagaaccaacagaggcaaaaagaccaaaaaagcaaggaaggaccaagaacgcaaccacagaccacgccacccaagagcacagaggggaccagcaacgaggagcagagcagagacccacagccaaaaacaagagagccaggaaacccaaaagggaggagaggagcagaggggaaccgaaaacacagggacaaaacacaaaagggccacaggcccacagagacgaaacaacaaacaggacccgagggcgagcaggaccgggggcagcggggcagggacccaaggggaacgggaggcaggccgaaccccggcggaaccccaacccggggaggagccgcgcgcccccccgcaccccccccccccccccccccccccccccccgccccagacgggaagagcagaggacggcagagacaggacaggggaacggaaggacaggagggaaaaggacagaagaaacaaaagaagaaaaaagcaaaaaaaaaaaacaaaaaccaaaaaaacgggcacaaagaggagaaccaaaagaagaaccagagggaagaaaacaaaagcaacaccagccagggaaagcaaacaaaacacgagacaacaccaacaggaaggcgagacaacaaaacaaaggaagccaggggaggagcaggaaggggacacccccagcgggcggcaagcacagccacacaaaccagggaggccccagaaagaggcaaacccaagacaccagccagcggaaaacaaagacgcaccacacaaagaaccaaccagcagcgccaggaacagccagaaacggaaacgagcgcacagaagaagaagaaaagggacaacacaaggaaaagcaaccacgcaaagaaaaacagaaacagagaaaagggagaaagagaaacaaaacaccgaggaaccagaccccaaaaggggaaaggcacacagggcgcgagcccggcgccggaaccaccgagaccaggcggcccgaaccagaaaccgccgcccgcccgaggcaggccaccacgcccggcaaaagggaaacaaggccaccacaggaagagcggaaacacagagaagcaaagacagcaaaacaagaggagaaaaggaccagggggacgggaaaccccaaggggaacaaagaacgaagaggaacacagaggggggaaggaaggaggacaagaaggagagggaggggaaagggacaggagggaggaaaggggaggaacaaaagggagaaacacccaacagaccccgcacaaagaagcccagacggggggaaaccaaaggagagggccaaccaggcaagaaggcagggccccaaaacgacagcaaggccaaacgcgaagacgcaggagcacagagaaggacagcaccaccaaaggacaggaccaggaaggagaaagaagcaaaccacaacgcagaaacaccagggcacaaagcggagagaaccaaccaaacgagggaccgagagaccaaagagacaaccgaaagaccggcagacacacggagaccccacaagggcgaaaaccacaaaaaaaagaacaaacgaaaccgggaaaaaaaaggaaaagaagaaaaggaaaaccgcaaacagaaggcaggagacaagaccagggaagaaaggccgagaggcccagggaacagaagacaaaaaaaaaaaccaaagccaccaaagcgcaaaaaggaggacagccacagaccagacacaaagggcgggggggaaaagcaccacaaagcgaggagccacgccccagaggagcggcaaaaccacaacccacgcccccccagagcaacaaggaagaagaggcggcgaacagccagcaggagcagcggggcccaggggcgccgaaccaggcccaagagaaacaggacgaggcccacagaaccggggagggaggcgccgcgcccaggacaccagcagacaccaggccagcgagcgggcggaacccgccccgcccgcccggacccagcaccgcgcacacgaaaggacccagcaccaggggacagaagccaaaagccggagccagcgccacagaaggagaaaaaaagagaacaggaaagcccccaccgaaccccgacccccgccaaaaggcgaggagaaacaggaggaggaggaggggggccggggcacaggaaacaccgcagaggcagagcccagagcagagaagagccgacgcagcccacccccgcccacgacgaaaaaaagcaaacagaggcaggcccaacggcagcagccccgcggcagaagcgcaagcgacccagaaaccccagcaacaagccaaaccaaggaggcggaccgaagacaagaaaaaaaacagaacaaaaaaagaaaaagacaaggaagccaaacagaaaggaaaggaggcgaggcccccacccccacccccccgggaagaaggagcaggccaggcaagccgcaggccccacgggccagcagcaccggccccaggcgcccgagccaggaacgagcagcaaacccaggggccagccagggagaaaaagaacacacgcacccaggcccaacagaaacaaaccaggagcaggcagccgacccagacacacacaccccgggacagccgggagaccacacaagagccccagaccaaaggcggggcccagaaggccacagggccgaaagagcagcagaagcgcaacacgaagcagaacagccacggagaaacacaggccccaaggcagaccaaaggacgccacgagccaagggacaagcacacaggagcagggacacaagaccacaacagccgaccggcccgggccacacagcaccgagcaacaaaccagcgaccccagcaacaaggagcaccagagaggagcggacgcaaagagccagggcaacgggagaaagggagccggcagcaagaagacaagcaaaaggagcaggaacaggaacaacgaggaaaagacagaagcccagcaacagccacaccccggggccgcagccccagaaggaagacccaaaggccggcccacaacccggcagcgcccacagccgcgggcccaccccagcccaagaaacgggcccacacccccgccagaggaaaggcacgggccaaagggaacccaaagaccaccggcagccccacgcaggacagggaagaagcgaaggccgcacgagcgccgaagaaggcagaaggacaccacaggccacaaaggccaccggaaccccccaccccgagccaaaaaaaaaacaaaccaaacagagagaaaggcccaggaggaggagcaggaggacgcaggagaaccacgcaaccccagcagaccgaaccgaggacgcccaaagggaaacaggggagaggcagaagaggagacaacgggaagcaggacacgccgggaaaagaaaaagccagggggcgagacaagacaaggaaaccaccagcagcgggcagaaacaggaccagaagccccggaaaggcccaggccagccgcccagacaacagagccagggccagcagccgccgaacccagcaaaaaacgaaaaccacacaaaaaacaaccaaacgaagaccaacgacggaaagggaaaaacacaaaaaccagaaaaaggaagaacccaaacaaaggaaaagagcccaccacccgggagaagaggcagaggccacaggaacacagaccaaaaaaaaaaacaacaaagaccaaaggggaaaagggacaaccacggcgcagaaagaaagggcgggggagaggcaccacaagccggagagccacgccaccagaggacacggcaaaacccaggccaccccccccagaccagcaaggcagaagaggcggccgaacagacagcaggagcagcgggggccagcgggcccgccccccagaccccaacagaaacgggacgcagggccccagaccggagagggaggcgccgcgcccaggacaccagcagagaaccaggccagcgagcaagggaaaccgccccgccccgcccgaccgaagcacagcgcgcacgaaaggaccagcacgcggcgcgaaaccgaaaggcggacagcgccacagaaggaggaaaacagaagaaggacaaacaccaagaacccccgacccccgccaaaaggcgaggagaacaggaggaggaggaggccgcgcggcacaagaaacacccgcaggggcagagcccacagcagagaagagccgacgcagccccgccccgcccacgacgaaaaaaagcaaacagaggcaggcccaacggcgccagcccccgcggcagaagcagcaggcgacccagaaagcccaacaaacaagccaaccaaggaggcggaccgagacaaaaaaaaaaacagaaaaaaaggaaaaagaacaagcaacacaaaagaggaaagaaagccgaggcccccacccccacccccccgggaagaaggggcaggccaggcaagccgcaggccccacaggaccagcagcacccggccccaggcgcccgagccaggaaccaggcgagcagcaaacccaggggccggcagggagaaaaagaacacacgcacccaggcacaacagaagcaaaccaggcgcaggcagccgacccagacacacacaccccgggacagccgggagaccacacaagagccccagacaaaaggccgggccgggcaggccacagggccgaaagaggagcgaaccgcaacacgaagcagaacagccacgaagaaacaaggccccaagacgaccaaaagacgcacgacaaggggcaaagcacacggagcacgacaaagaaaccacaaaggccaaacagcccaggcaacaaacacgccaaccagccaccccggccacaagacaacacccgagaggagccgagcacaaagggcgaacagcgggacaaagggagccggcagaaagaaggcaggcaaaaccgccacacagcacaaggagcaggagaccgaacccacaaagagccgcacccggggccgcagccccagaaggaagaaccaaaggccggccaacaacccggcagcgcccacagccgcgcgccgcccagccgaagccaacgggcccacaccgccagaggaaaggcaccgggcccaggggaacccaaacacaaccggcagccccacgcaggaccagggaagagaaaggccagcacgagccgccgcaggaggcagaaggacaccacaaggcacaaaggccaccggacacccccccaccccaacaaaaaaaaaaaccaaaccaaacagagacaaaggcccaggacgaggagcaggacgacgcaccagaacccacgcccccccacagaccgaacccccgaggacgcccaaagggagacaggggagaaggcagacagaggagaaaacgggcagcaggacacgccgcgggaaaaacaacgcccaggggcgagacaagacaaggaaaccaccggccgcgagcaggaacaggaccagaagccccggaaaggcccaggccagccgcccgagcacaggaccacggccagcaagccgccaaaccccacaacacaaaaacacaaaagaacagacaaaaaacaccaaaaacggaagggaaaaaccaagcaagagcgagaaaagggaaaaacccacaaacgaaggaaaagcccaccgccagggaaagacgccagaggccacaggaacacagaccaaaaaaaaaaaaacaaaaccaaaggggaaaagggacagcaccggcgcagacaggaagggcgggggagaggcaccacaagccggggagccacgccaccagaggacacggcaaaaccacagagccacccccccagaccagcaaggcagaagaggcggccgaacagacagcaggagcagcgggggccagcgggcgccgccccccagaccccaacagaaacgggacgcaggccccagaaccggagaggaaggcgccgcgcccaggacaccagcagagaaccaggccagcgagcgggcggaaaccgcccacgcccgcccgcacccagcacagcgagcacggacggacccgcaccagggcgcaaaaccgaagggccggagacagcgccacaggagagaaaaagaaaacgggcaagccgccacagaaccccccacccccgccaaaaggcgaggagaagcaggaggaggaggagggggccggcagcacaggaaacacccagaggcagggccccagagcagggaagggcgacgcagcccgccccgcccacagacgaaaaaaaagcaaacgaggcagaccacaacggcagcagcccccgcggcagaagcgcaagcgacccagaaaccccagaaacaagacaacaaaggaggcggaccgccccacggaccagcagcacccagccccaggccccgagcgagaaccgggccgagcagccggcagagcaagcaacagggccaagaagcccacacacacacacaaacacacacacacacacacacacacacacacacacaaaacccacgcaaccaacccaacacgaaagccaacaggaaacccgcagagcagagccacggacgaacaccgccacacagaaacgcgacggcagcccacaaaggaaagcaaaccagcaaaagccacaggggaaaaaacaaaaaccacaggccgccgggcccacacgaaaacccaagaaggaagacacgcaaacccaggccagcagacagagaccagccagacaaaagcacccaccgacaagcaaagaaagagcgaaaacagcaaacacagggaaagcaaaagacaacaccgaaccacccaagcggaaaaaaacgacgaccaaacaaagaccacccaccaaagaaaaaaaagcagcagaaggaaagaggcacaacaaccaacaagaacacgcgaaacaaagggcacacacagccagcagcgccggaggcggaaaggcacaacagaagagacacaacaagaacagcaccagccaggacgggcacaccaacccagcacgggaggcagaggcaggaggacgaacgagaccagccggcacagaggagcaggacagccagggcccacagagaaacccccaacaacaaggaccacaccaaagaaggaaacaagcccagcaccacccccaaaaacacacagaaggaggaacaaaccagacaggaagacgaaccagggagaaaagacagaacccagaggaccggaagacacgaaggccagagagcagaaaggacgaggggggaagccgcgcaaccccccgagcccaggccaagcgaaaccacaaagcacccccgccaggagagaagcaggcaaggcagggcgaggcagaagaacaaaccaaccagacagagccagaaggccaggagcgggagacgggagggccacaaagaagaccgccgagggggaaaaaaggaaagcaggggccaacaagggaaagagaaccacacccagaggccggacaccagagcagccggacaacagagaaaccgggcaagcgaagcaacacgggaggccgccaaaaggaaaagccccagaggccgggagaggaccacccccacccagggaaggccccaaggccgaggccccaagcaacgcagcaaaagagaaaacaaggaaaaagcagaaaaaacaaaggaagaaaaggggaaaacacaaaaaaaaacacaaaaaacgaaaaacaaagcacaaacacacagacaaagaagcaaagagccgccaaaaccaggacgggcaacacaaagaacaaaggggaacaacggcacgacacgaaagcccccgccgccacacaacagcaaaaaaggcaacggcaagaggacagaaccaccgggaaagaaacacacaggaacaaaaaccaggacaaaccagggaaaccacaaaagcgaacggagcaggggagcccaagcgcgcaaaagaaaacaaaagcaaaaggcgcgaacagcccacgacacaaaacggagggcagccccagcacccgcagagaacagggcaaacacagaagggcgggagagaggagcaaagaggcggccgggacggagcccacgccaccacgcggccagaggaagaaagcaacacacgccagcagccccccagacagcagcagcaaagagaggcccgaggggggaaagcccggcccgccagcagacccaggcaaagcaaacagggcccgggagacgaagccaaaacccgggcagaccggagcggagaggccgggacagggaccgcagcccagggcacacagaccaggaaggagaagaaacccccaagacgcaggacggagaaaaccaggggggaacccgagccgccgggaccaagaaagcccgcagaaacaggcggagccagccagagaggggacaggacagaaagggcagcacaagcagagagagacggaagaagcggccagccagccaaaggggagggaggccaccggacaggcgcgagccagagcaccaaagaaagcgaccccagggggccacagcagagcaaacgggaggagggcgaccgcccccacccggccgggccgacagccggccacagagagaaagaaacacagggccagagccagcaaaaaaaaaaaaagcaagccaagcgaggcaagcccgagacccccagaagcaggaagcgcagaacagggaagacgccagacccaccccagagaagaccacagcagaccgaccagcagaaccaccaaaaagccagccagcccaagggccagaacacagcaagcaccacgaaacaacgccgccaaaagaagcacccgcaagaggcagaacgccaggagcaacaaagcccacccccccgccccaagcaaaaaaaaaaaaaaaaaaacgaaaacgaaaacgaaaagcaaccaaaagcaagagcacaggaaacaggcagcgcaagcccgcggacaagccacacagaaacgacgcgaagccaaacggggacaggaacaccaccaccagcacgacccgacagacaacacgccgcaacggcaacccaaaaggcgcgaagcaaaccagaagccggccaagggaaaaaagaaacagaaaaacaagacagaggaggcacaagcaacccacgacaacaggaaaaaagaagaaaacaaggaagaccgaaaaaaaaaccgggcaggggggggcacacgccaaccagcaccaggaggcagaggcagaaggacgagcgagcccagccggcacaaagcgagccaggacagccagggcaacagagaaacccgccaaaaaaaaaaaaaaaaaaaaaaacccaacaagggagaaaaaggcaggccagccgaagacagcaaaggcaacagggacacagccaaggagaagaagggggaaaagaggagggaaagccccaaggggcagacaacaggccaagccaccgacagccacgccaaagagagccaaaaaaaaaaacaaaaggcagacgcacggggaacagagaaaaagaaaaacggggggggggagagaaggagaaacccacaaaagcacaagaaaagcagccaaggagacgcaccaggaggcaagaagccccaacgggcagagaaagaaaggaaggaccagcggaccagaagacggccagcaccggagccagcagaccagagcagaaaccaaacaacaacacacaaacagcagcgccagacggcagaccaccaacacaagcaacaacgaaggaaaaacggcaacggccgcaacgcaaggaaaaaaacaagacacagagggggcggggccaaaacagcccacgccacacgaaaacaagaaaaagagagagaaaagacgcaccccaacgaacaaaggggaacaaggagcacaaaggagagggggacacagaaaaggaagcccacgaagaaggaaaaaaaaagccgacagggaccggagacaagggagcacgcacaaaaaagaagaaccaaagccggaagccgaccgggaaggacgccaaaacaaaacaacagggagggggggcgggaagaccagagcaaagaaaaaagaagacacaagcgccagacacccagaagagggcgcagacgacagaggggagccaccaggggcgggagaaccggacccggaagagcagcggggccacccacgagccaccaccagccccagagcaagcgaaggccagaaaagggaaccagcagcggggaaggcagcagcgaccaggccaaggcccgcagccaaagcccgcccccagcccggaaagggcgggcagcccgcccaacacggagaaagccgcagcacaaaccagccagaacgccagacaacagaagggaaacgggggccagagagggccgggagccacggaaggagggaaaaaccagaaggcccgagaacgcaaaacgcgcgcgggagaacacacccacgaggcagaggcccacagacagacagcaggcgcgcgcccccccgcccacgcaccgcaaaaaagaaagaaaaaggaccagcaagcacaacaacaggacaaaaaaacaaaaccgcgcaaaccaaaaccagaggcagaaaacaggcccacaagcaaagaaaaaaaaaaaaaaaaaaaaaaaaagagaaaagaaaaaaaaaaaaaacaaaagagggacccgacgcaggaggcagaggaaggcaggcggagccaggccagccggcacagaggagcccagccaggcagagccggagagcccaacagccagcgagcaggagaccagccaaccaagacaggaagaaacaagcaaaacaaacaacaaaggcccgcccccgagccgccccgcacgagcccacacacccccgaggccccaagcacaaggagcccaagacaaaaaaggacaagccaagaaaaaaaaacgaaaaaggaggaggaaagggagggagggagggagggagggagggagggaggaaaagggaagaaaagaaaacagaagaggaaaggaaagaaaagggacaggaaggagggggagaggaagggaggagaggggaggggaggaagggaagaaggaacgagccaggaaaccccaggaaagccggcacccacacccaagaaccaccaacgaaaaagacaaggcgaagggcagccaggccaagaccaagagccaaaagagcccacaaggcaaacaggaggaccaaggggggaagccagcagaaccaaggcaggcagaacaaaaaagcaccagaaggaagaacagaagcgacccggcaaaccaagagacgaacgaagcccccccccggcgagacagggccgaagccggcaccggaaccacgagaccaggcggcccgaaccagaaaccaccgcccgcccccaaggcgggaaaaagcaaaggcggcgccaccagcccggcaagcgagacaaggccacgaaccagcccggcgccggaccaagagaccaggcggccaaccacagaaaccgcgccccaaggagggaaaagcagagccaccacgccacagagcaacaggccacagacgaacaaggaacaggagaaaccaaggcgaacaccggcacaacccccaaagccaccacgccacgggcggacacggacacaacaccaaaaaacagcagaccacagccaccaacaaaggaacagaaaccacacagaaccccggaaaccacaaccggaccccccaaacagggaaaagaagacgaaaaaaaaacaggaagaccaacaggaacaaagagaggccgggcaggcagaaagaccacaccaccgaaggagaccggcgcaggacacgccagcaaaaagcccaacgccaaacgacacgcagaggggcaaccgagagagaaaagaaaaaacacacaggccaccacacagacaagcaaagaccgaaagcaaccagcagagaccaacccccacagccagacacgaaaaccagagaccaggccccaacagaaagcaccaaaaacgagaaagaaaaagacagacaaggcgcacagaaagccaggcgagccaggggggagcagcggcaccacgccgggaggcgaagcaagacgaaagcacaagcgaggccagccaaggccacaaggaccaggcaaagcaagcaaggaccaaaaaggaggaaaaaaaagaaaccaaacaacagaagacaccccacccgagcagcgacaaaaacaacacaagccaagaaggaacacaaaagagcaggaaacacgaacgcacagaggacaagcaaagcacaagccgccaccaagggagacaacgagacagcccaagcccgaccaacgacaccagaaacacaaaaacccaaaggaaaacaaaacaaaagagaccccagcacaacagcaggggggagggggggagcaggcagggcggcaaggcagagacaaaagccaaaaaaaggaggcacaacaaaaagaaggcagaacacccaccccacagaagcgaggccacaagcagaggccacggaaagaccccccagacaaggccacagagcccaggggccgaaccagagaccacaccgcccgacccgagagcggaaaaacaaagcaaccacaccagcccagaaagaaagaagcccaaccgggggaagaacacaaaagcagacagcagggacaaaaaaacagaacaccacaccacaaacaagcaggcaagggaaaaggggccagccccacacaccaacggaaaaacaaaaaaaacacaagggcaacagacacacgaggacgacacaaacgagaccaacagagaaccagacaacaacccaaacaagggaccaacacccaaaccaacccgaaagacacaagaggcgcagaggcacacaggcccgacaaagaaggcgcaccacgagagaccccagcccggcaagaaaagcgaggacaaccaaaaggacgggacaaaaacgaagccaaaaacaaccgcacgggagagaaagggccagccagacgccaaaccgcagagcaagcggcccgaacccgaagcgaaagggagcgcaaaccaaaaaaaaaaaccaacacaccaacacaacagggagccaagccacaccaacaaacaggaaaaacacacaggaaacagacggaggggaggagggggaaaaacaagcacaaaaacaaacaaaaaaggcgcagccccacaggaccgccggaggagaagaaggcacagacccggaacgaaaacaggaggcggagcacaagcaggcaggaacgaacccaggcccgcaagaacagccagaagacaaacgcgagccacaccccagcccccccagaaccgagcgaacaaaacaaagacagcaagcaaggcaaacaacaaacaagcagcaagcaaacaaacaaaaacagcaacgaaacaaaaccagagcgaagcagcacggacaagcacgcgacagacaacaaagcacagaaacaggcgaggaagggagaccgacgaaaaaaaggaaaaccgccccagaccacaccgaccaggcccaacaaacccgaacacgagaaaaagaagcaccacggcaaaaaaaagaggaggcaagagggaggcgggggcacgggaaaggggaaggaagagggaaagacagagaagaaggacaaggaacagaaaagaggacaaaaacaaaacagcaagaaaagcccaacagcaggggacggccagcggcgacaaaaggaggccacagcgaggacaaagggcacaccagagccaaacgcggccccccccacaaaagaaaagaaaacaaggaaacgccgcagaaacagccaaaaaaaggacaaagcaagaaaagaagagaaaaagacgggcacagagaaaggaccgggcgcaaaaaaacaaaaggcacaacaaacaaacaaagaaaaacaaagccaaggcgaggcgagagagagccagggaagagcacgccccaggagaccgaacaccaacaaacaccccacggggcggcaacaaccgccccagccagaggaccgagccccccggcccggggcaccacaggggggcacacagacacgagccgaccaaagcccaacacagaaaaaggagaaaaaagcaaaacagaaacaacgaaggcaaaaacaacggcaggcacaaagccggaccagcacagccaccagcggaagaacaaaaacaggaaaaaaaagagagaaagcaaccgccaggagccccagcggcccgcggcgagggcagaagcagcaggggacaaaagggcacgacgaaagggcaggaaaaacacccgacagaacagggccagaagccaaggccagggaaaacaccgcaacaccaggggaggggaggagcaaaggaaagcaaacccggccggcacgcagaagcccacagcggcagaaggcgaaccagagaggacggaaaggaagagaaaagaaccacacaggaaacgcgcaccgacacacaccaacacccacaccggcaggccgagcacccccaaaacccacaggaaggcagcacaacaccacaaaccacaacaacaaaaacaaacagacaacacggaggagcaggaggagcaggagaggcagagcccccaagccaccaaccacagcacagcacagcacagcacagcacagcacagcacagcacaccacaccaccacccggccaaagacaaaagcggaaaaacccaaggaaaagacccacaaaggaagacaaaaggcggaaaagcaaagcaggccaccaaccagaagccaaagcaagccaggccgacaagacacaccgggccaccgggaccgaagaccgaacacaaacgcaagccgaccggagaacagaaagccacgacaagaacacacacgaagaaggcacacacgaaacaacacccagcaaacaacagaacgccaaaaccccaagaagaacaaaaggaccaaaaaacaacacaaaagcagaacagaaagcacaggacgcaagaaacgcaaaggaaagcaagccaagaaaaaaaaaagaaggaaaggcaacagcgcaagaagcagccgagagaagccgggaccgcccaagagccaccaccgccagcaaaacggggcaccccaggaaggccacccaaccgccagaggcccgaccaccaaccaaaaagccacgaaagaaacaaaaacgcaccaaaacaaaggcagcaccccccaaagaggacggaaaggccaagcaaaaggaagacgacagcaagaggaaagcccccccccaccccacggaccacaaaaggaacaccccccggccaccccgagagcggacgggaccaacacgaggcagcggacaaagagagcagagaaaggaacgcgaaccagacaggaagcggcgaacaagaacagcagccggcagaggacagcgaaacgcacacaaacgaggagcaagacgccagcgccacaaagcagggggcaaggcagacagggggcgagcaaccagcacaggaaaagcaggggccaagcccacgaagcgcccgaccccacgagaaccagaacgacacaaaaggaagacacgagccgagcgcaacgcagaaccgggacccaggaaggacacgcaggccaccacccggcagagaaccaagaggacacaaaacgaccaagagagggcaggcaccacgggcccacaacaacgaagaacaagcacaccacacagaacccccagcagcacaaggggaaacagcccagggcacagcaaccagccggagcaccaccaccgcaccacagcagccgaagaaggcagggacgcacaacaccaagaccggaaacaagcgcaaagcccacaccaggcaccagagcacccaaggagcgccggcccacgccaaaacccgaaccgcccaagacagggagaagacagcaggagagggaagcaaccgggaaaggagcaagaggagcaagcaacgacaaacagcagacagcgccacaacaaacagcagacagcgccacggcagacagcagacagcgccccccggaggccagcaccaacaccaccaacaagggggaaagcagacaggacagaaaaacaaacacagcgacaccaagagccagggccggggcaaaacccaagaggaaccagaaggccaagggaacccagaaagcgcaagaagcaggcaggaaaacaccgcaacaacagaacaagggaggccaagagcaaagcacaacagacgacccagaaaggcaaagccacccagaaaacgaggaagagcagcccagagcagggccagccagagcggaccccgggggaggggggcaaaaacccacaggggcaccaagaccaccagaaagcagaagacaacagccaaacagagaggaacagagaagagcaagaagagacaggggggccagcacagcagagaacaaaaagggcacagcaaggaagggagagcacacagcagagcaggccccacagaccgggggaaaacccacgccacgagcgaccaggccggaaaaggacccccaggccccccacggcaaggagcacaacgaggcgagacccaaaacccgggagaaaaggaggacccgggaacgaccgagaccaagcaccgaagggccaaaggcaccccggagcaaaccagagcccgcaggcggagaggccacagaagcaaagacagggaagagagggaccggcgaagaagggcagggcagcccgcaccggcaagaagcagagccagaaaacaaagcccagcaccccccacaaagccccgaggcgggccgacacgaccgagcacaggaccgcaaaacggccacaggcagcgcccagcacaaaaccacccgcaacccagccccggacccacgccaagccccgaaggaaggggcgcagggccagacccacaaccaaagagccaacccaacgagacacacccaccacagggacggaaaacaccccccggggaagaacgggaaacggaaacagcccccacccaccgggaaagaaaaaaaaaaacggagaagagagcagaaagaaagggccaccccggcgggggggacacaacaggcagagcacccagaagcagaaggccaagaaccacgaccagcaaggcgcaacaaaccgccccacagccaagacccaccacccaacgggccggagagcagccccgaagaaaacaaagaccggaaagccccagggaaagcaaaaggcccacagggacaggccaggacagaccagggaaccccaccaccgaggaggcccggcagaggaggcaacgggcgggaccaaaggaggacccaggaaaggccacacccaacccgaaaagccccggaggacaaaaaccagcaaagggacgaaagccaaggcagacagagcacaaccacaccacacagaacaaacgaggcccagaaagaagcacaggccccaaaaacaggcgcaaaggaagaaagccgcccacgacagaaacaaaagcaagcaaaagcggacaagcacgaaacgcaaaaccaacgagacacacaaagcgacaggccagaaagcaacaaacaaaaaaagcagaacacacacacacacacacaccaaaaccaaaccgaccgacgggagaaaaaaccgaaaacaaaggacggaagaaaaaagaaaccaaagagcaagacccgcaaaagaacacagcccccaaaaaaaccaacagcaaaaaagacaaaaacaaaggaaaacaagccccaccaaagccacaaaaacgaaacaggccacacaaaaagcaagaaacaggaaccagccaggggggggggcacgccgaccagaggcaagggaaccgagcgaggccagccgacacagagcagccaggacagcagagggaacacagagaaacccgcaagggggggggccaggaacagcgacacgcagaagcacaaaccaccgaaaaagcaaaaacgaagacgggcaggagagagagagaggccagggaagagcaggacgccccagaggcccgagcaacccaacaaccacagggaccacaaccacgaaggaaccgggcccccggggcgaagacagccacagaacacgaaaacaagcaaaaaacaaaaaaaaccgacaacaacagaaaagaaggccaagcaccgaaagcagcacagaaacaaacagaacggaacgaggcacggaggaaaaaaaagggagcaccaaaacacccgacaggaagcaacaagcaacaaaaaggaagaaaaaaaagcaaagagcgcgacgccaaggaccaaggcagaaaaaaggaaagaaccaaaacagcacacagaggaacaaagaaaaggggccagcagggcagcacacccgacgcaggagggaaaaaaaaaaacaacaagcagaaacacagccggcgagagcacggaaagacagcaagccggcaacacgaccaggacaaagcaaaccagcaagcacaaggaaaggacgaaagcacgcaccaagcgcgccgaaaaaacccgagcacgcagggacggcagcgcagaaaggccggcacagaccagcccccggcaacacgcagacaaggcggcacaaagcgcaccagaagccccacccaagaaagcaaagcccaccggcaaagaccaagagaaaacaaagaaaaacaaacaacgagaagcaagacaaaccaaaccaaaaccgcccgccacacaccgaaccacgcaggaaaaaggaaaggggcaaacccgacgggcagaaacaagcccaagagcaacacaaaaaagaaagagaaacgcaaaaacgccgccaaccagaaacaaccagccccggaccaccaccacaagagccgggcgggacgccggccaccagccccagccgggacgggcgggggcaccagaagccccgaccggccgacgcccggagccccccgcccccacccccaagccaaaacaacgaggacgcaccgagacacaagcacagaagcgcccaggccgacgcacaaaaaggacccagagcccggacccagagccggagaccccgcgcgggcccccaggccccgagggggaagagaaggaagacggcccgaagccagggggcgcaggggcccccagcccgcccacgcccgagaccccggcgccccaggagcacccgcggccccccaaggccaggcccccacggggcccggagggaggcccgggaacagaagcccggacaccgccacccggacccagcaacagga

SEQ ID NO: 603 - RNA, 754 nt, Mus musculus
gggccgggggaggaggcggggcaggaggcagcgaggagcgccgcccgcgggcacaccggaaggagcgcacacggcggagccagggaccggacccgcccgcccacaggaggaggaaacagagggcagcaggacccaggaagaccccagacccaagcagcagcagcagcagccaccaagcagcgaagccaggccccgcgaccccgagaagccccacaggaaaacaagcccagagagggacagacaacaggagccacacagcaacaagagacccaccagaccccacccccaccccccaggcgacggcagcggaaggggagaagggagggagcccggggaaggcccaggggaaggcgaaagcaggcggcgggccagcgggggggaggggggcacagccgcgcagcgggaccgagaaagagaacaaacgccgggccccacacacaggagcagaccacaacgcagccaagggcgggagaacagaagaagagcgcacgcggcacaccggccacgaagaacaggaggggggcacacaccggaaccagggcagaaggaaaccacgccagggacagggagcaggagagcccaaggcgggggggccccagggcacccggggagccacccccgcaccggacaagagagaggcggagagcaggaaccacaggaggggaggcgcccagagcagagccaggaggagaaaaggcccggacagggcggaacgggagggggagggagaccagaccacagcccggcacaacgc

SEQ ID NO: 604 - RNA, 791 nt, Mus musculus
gggcgagcgaccccagaccagggcagaccgcgagccaaggagcaacacgggacagaaagggaaaggggaacgaccggagaacagagaacaggaccgacagcaacaagagcggcacgcaaaggggaggaaggaaaaagaaaacccgagccaaaagcccagccggacaacagaaaacagcggccccagccagaaccccagagacgccgcccagcaagacaaggaacagcaccaaccggcggacccaaccaaccccagccgggagcaaagaagaagccccacggcccagcaaagaaagagccgggccccaagcccaggcggccccaaagaaagagccaaggaggacggccgggcacccgcgcacagcagacaaagaggaagaaagacggccaagagacaaaaacgaaaagcccaaccgaagccccaacgcccaaggacagaaaacccggaagcggagcagcgaagaacaaagcccgcggccaccgaaacaagcgggccccaacgcaagcagcgcgcacacggggacggacaaagcaggaagaagcaagaaaagcgccgaggagaagacagaaaaagagcgccgggggccaaagcccgacaaaaacggggcaaccggagcagggaggaccggccagaaaaaaacccgagacaaaaaagggaaggccacgacggggaaaacaccccaggggagaccacggggacccaccacgcggggggaggggaaggaagaagcggcagcaagaccaccaacgacccaggaaaggcccaaggaggcacagaagggcaggcgcaag

SEQ ID NO: 605 - RNA, 26381 nt, Mus musculus
  misc_feature (1525)..(1627): n is a, c, g, or u
  misc_feature (6957)..(7056): n is a, c, g, or u
  misc_feature (8778)..(8877): n is a, c, g, or u
  misc_feature (23168)..(23560): n is a, c, g, or u
cacaccaagaacaacaaaaacaaaagaccaaacgaaacgccaaagcaggggacgagcccacagcggacagggcggaggcgggaggagcaggggcaagggcggagagagggcgagaaacaagaaccgccgccacagggagggggggcccagcacccacagggcagccacggccaccgcaacagcccagagaccgaagccccgaccaggacaggacccccaggcagacacgcaggcaagaagagggaccccaccaaagccaggaagcaaggcacggaacgaaggcccccaaaccgcccccgcccccagcagccacccagaaaaaagcgcaagcagggcaggcacggggcccagcaccggagcagaggcaggaaaacgccccaagcaagcccaggaaccagggccacaggagccccagcccaacagagggaggcaaagggggaagagggagagaggggagaagggagagggggggaagggagagaggggagagaggggaaagaggggagaaagggaagagaggagaggggggaagagagggggcagaggggagagaggaaaagagagaagacaggggagagagggaaagggggagacagggacagagggaaaaagagagaagacgggagacaggagggaaggaacgaaacaccacccaacggggagaaagcagacaagagccccacacaccagcaacccggcaggcaagacgccaagcggcaagcaggcagaggagccaggcgggggcagagcccacccccacaacgcagaaacaacggaccagccacgaaaagaaggaccccgcccaaggaggagacaacacaaccaccggagaaggacaaaggcgggaaccccgaggagcgagagagggacaaaaagggacagagaaagaaaaagcagggacaaaacagccaaaacccaaaaaaaaccagcgaaaagaacccacggacaagaaaaggaagcccgaccacaaggaggacaaaacagacccacaacaaggagcgcccacccaaagggaaaaggagcgcgaaaaagaccaaagaagacaaaagcacaaacaacacgccgcagcgcaggcaccggggcaaccacggaaaagaaacaaaaggaacgaaccagaaaaaaagcaggcgaagaggcaaagacaaaggcccgcggacaagaaaggagacgcccacccaccacaccccacaaaaaagcgggcacgagggccacccccgcgccgcaggaggcgcaggcacaggcgaacgcagagcagaaagcaacgaggagacacaagcgcccggcaccccggaaaccacaagagagcagacagcccagcaacacaccaaagcgccaagggcaaacacgcagagcacgcgaggaccaaaagccaaaggccaagacacgaaggcaaaaaacaaaacaaagaaaagagacccggggggcccaacacacacgcaggaacaacaaaacaaaaaaaagcaccagacgcacccacagaaacacgagcagccagcgcaaagagacacaaaagacccaccagcgnnnnnnnnnnnnnnnnnnnnnnnnnnnnnnnnnnnnnnnnnnnnnnnnnnnnnnnnnnnnnnnnnnnnnnnnnnnnnnnnnnnnnnnnnnnnnnnnnnnnnnncaggaaaaagaaaaacaaaaaaagacaaagcccacaaccacagccacagacagagcagaaaagagcagcgggacagagagaggcgccccgggaacccaccaaaggagggccccggccagaggacacgacacaacaacagcggacaaaacacacacacaaaaaacaaaaaaaaacaaaaaaaaagagaaagaaaaaaaaaagagcgacaaaaagggaaagaacgaagcgcaaggacccgaagaaaaagcaacacaaagaaaaggagacgcaaacaagagcagaccggcccggggaggcagcacccacagacccgccacgacaggacccagggcaaagaggaagagggggaccacaagggagcacaaggaaagcgcccagaccacaccaaggaggacaaggggcgggaacacagccaggggaacggcccaggaggacgacgcgaacgaaggagacacgcgaaacgaagagacaggcggggacaacccaaacggggagccggacgacaagaccgccccacaaaacaagagcgaaggcgcagcccgcaccacagggggcagccaaccaccacaggccgcagagaagccacccaggagcaacagccaaggggagagaagcccgcccaagagccacgaaccccccggaaaggaccccggggcaaggccgagcccacacccgaccccccagggcccccggcacacacacacacacacacacacacacacacacacacagagagagagagacacacacagcccgccccgaggagccacccgcaagggaaaaagagaaagacggaaagcaggggccccgaacccagcaaggagacagacgaaaaagcacacacagagcacgagaggcagaggcagagacgagcaaagccagccggcacagaggagccaggacagccaaggcacacagagaaacccgccaaaaaaacagggaaaacaaacaaaaaacaaaacaaaagcccaagcaaaacggacgaccaccaagcgagccgcgaaaggcacacagaccccaagggccaaaaaaggaaaaagaaacaaagcaaaaaaaagcagaagcaaaagaaacagacccacaaggaaaacacgacaaaaaccagggaagccgaaacagccgacaggcaccccagcaccaaaagccggcaaccacaagcagacagcagagcgaacgacaggaagaaaagcagagacaaccgccgcgacaagaaagaagggagacaggaaaagacaaagaagaaaccagaaggcgagaaacacagccaacagaaagaaaaaaaaccagcagagaagggcaagacagaccccaagaaaggagcgagccaagcagggaccacgccggacccaagcaccgaaggcagaggcaggggaccgggcgaggagacacacaaagcaagcaggacagccagcgcacacagagaaacccgccaaaaacgaggaggaagaggaaggaggggggaggggagagggaagaggaagaagagaagaggagcagccggcgacccaagcagaaggggggagaaggaaacacaaaacaaaaagagccgcacacccggacccccaaacaacacgaaaacgaaaaaagagacaaaagagacaaaaaccagaacacaagaaaaagaaaaggcgacaggagacaggcaacaccacccgacagaacagaaacaccggggagagccccgaacagggggcaccggacacaacgaggagaagacggccaaaggggaggagcagcgggaggggagccggacgcgcagagaacagagccgaggaggacaaagcagcaacgaccagcgccaagccgcgcgcggacccgccaaggacgaaccagacggagcacaacaccccacaggcaacagagaacacagaaagaaacaacaagacacaaaaaccaccacgggcggcaccaagcacaagagcccagaggcagacgaggggcggccccggaacgagcagacagggagccaaacggggggcggaaacaaaaccaagcccgggagaacaacaggccaacacgagccacccagcccaacccgcccccaccacacacacacacacacacacacacacacacagccgagcgcggcgcaaaaaagcagcacgagaccaaacggaagagcacgaggggcaggacagagaggggcacacggcaccgccacaaaccaggacagaggaagccacaaggagacaccaagccaggaaacggcaacagaggcgcaagccccaggggcgcgggagaagaaccgggacccgcagagccagcacaggagcgaacccgagcccgccagcccggggacccgagcaggagcagcagcaagggcgcaagggagaacaaaagacaaggaacgaccacagaccaaaaaaaacgccaacaagggcagccggggaaggaaccacaggcaaggaaaggcacgaaccacagggcaccgggaaaggggggggggggggggggggaaggggagagaagggcgccacacaaaagcggccagacccccaaaccaaagagaccgaaccgacccccgacgacccccaggaaacagaccgggccaccgacacacccaggcccagggccaaggaggacaaaacaccccaaccagaaaaaacgaaagaaaaacaagacaccccaccacacgcccagccggggacaaggaggacgagagagggcaacaaagcagagcaaggcccaaaccccaaagaaaaaaaccgaaaccaccaaaaccaaaccaaggaagggcccgagcaacccaacccacagagggacagcagggaggaaaggcccacacaaagcaacaaaccaaaacccacaaaacaccaagcgaagcacaaacggaaagggcaacaacacaaagaacggacaaccagccaaagaagcaaaaaaaacgcaggaaaagaggccagccggcaaccgaagcacccaggcccacaggcaaaaaaaaaaaaaagggaacaaccccagggagcccgagcccgacacacgacaacacagacaaaaaaagaacaaaagccaggaacaagaagccccgaagaaggggggggagaacggggagggaggaggcgacgcggaagggcagggccaaggccccacccagggaaagccaccccccccccaagcacacccgccccagcaaccagccccaggaagagcacgcccacacgaaaaagagacacacaagccagggggggcacacgccaacccagcacgggaggcagagggggcgaacgagcgaggccagccggcacagaggagccaggacagccagggcgggggggggggggggagggggggagcaaaaacaaaccaacaaaaaaagagacacacgcagaaaaccacacaaaaaccacaaaaaacgccaaggaaccgccgggggcaagggagaacagacaaacgaaaaaaaaaacaacccacagcgacaggccagaaacccggaacagcaaagaaaaaagggaaaacaccacaccaccaagcagcaacccacagaggacacaggccacaagaacaaaggcacaaaagcgacacaacaacggaaccagccagccgccaccacgcagccacaagcaaacacgaaaacccaagacgcaccaacagggaaaaagcacaaaaaaaagaaaaacacaggcgggaggccagaaaaggcggacaggggcacagacaagaggacagaggccaccgccgcaaagggaagaaaaaagccaccaaccgcacacaagcaccacagcagacgcgcacccacacacaagcgaacacacacccacacaaacaacagagacagacacagacagaaagagagaaacagaaagcacaaacaaaaggcaaaacaaaggaggaagaagcagcacgcacgaacaacagaagaaacagacgagaccaaagagcagaaaaacaaaaaagcccagcggggggaccaaaacaagggcgaagcccacccaaaaagcaaaaaaaaaggaccacagagcaaaggggaaaaaacagcgccaccaccaccaccaccaccaccaccacgcacgggagggggaaaacaaccagccccgaggcaaagcagcaaacaaaaacagggaacccccccccgccccccccccccccgacgccaaaagaccccaaggaggaggaaaggaaagggaaaaggaaaaggaaaaggaaaagggaaaggaaaaacccacagaccccccacccaggccgaagacaagcgcacaccagcgcacacaaacacacacacagaaagagagagagagagagagagagagagagagagagagagagagagaggcagaggcaaaaaacacacgaaaaacaaaaaaagaccaagcaaagcagcaccaagaaccaccgagcacggaagcaagccagaaaacgcaagaacagacaacaagcacccgaaagcaaacgacagcaagaagcccagagccaagccccacaagaaaaggaaacccgcaacagaagcggcagccaagagcccaggagccacccagcgaccacaaaccagagacacggcaggagaaaagaaaccccagccgggaacgaagacaaaaaggcccgccagcacggaaaaaaaggcccaaaccccagcagaccggggggcagaagagaaaaacagaggcgccgcacccaagggacgagagaagccaagcagccccggaaagaggcaacaacaaaagggcgggagagaccagagaggaccacacggcaacaagcagaaacggcagcaaaagcacagcaggcacggggcagagaacaggagcagaccccagcacaaacaggcggaggcaagcgggagaccgaagaccgcccaaacgaagaagaagaagaagaagaaaaaaagaagaggaacaaaaaaaagcccaaaagaacacgacaaaacaacgacaaacaaaaaaaagcaaacaagaacacagaaccgaccaaaaagagaagaaagcgaggcaaggaaaaaaaggaacaaaagagaccacgcgccacgaaacgaacacgccaggacagcagaagccccagcacgcccagggacccagcaacagaaggggggaggacccagccagagcaaccaggacacaaggacaaacagggcggagccagcaccgaaggagaggcacagaggagaagagcgccgaccagcacaaggcgcacacagccagagacacaagagacccacaaaaaagaaagacaagaacaacaaaagaacaagcaaaccacaaaagacgagaagaaacaaagaagcacaaagccacggcaggaaaccacagcaaggaagaagcaaacaaaaccacggaagaaggagccaacaccaggagacagcaacagcaagggacagggccaccggagccccagacaggcgnnnnnnnnnnnnnnnnnnnnnnnnnnnnnnnnnnnnnnnnnnnnnnnnnnnnnnnnnnnnnnnnnnnnnnnnnnnnnnnnnnnnnnnnnnnnnnnnnnnncccaaaaaggaacaaacaccaaaagagcaacacaggaggaacacaaagcaaacagccacccacaaaagaaacacgcagcaacagcaagacgaaaacaagccaagggcgggagccggcgcgggaaaggcccgcacaaggcacacacaaccaggccggggaccccggaccgcggccagcagccagccaaaaggcgagccccgaacaggaaaggacccaaacaaggccagcgagacagccagggggaaagaaccggccgagacgaccccacgacccagaagcaacagaagggaggaacgcacaaagcgcccgaccccaagcgcaagcacaagcacaccacacaaaaaacaaaacaaacacggacggggaagaaaaacaaggcaaccccggccccacaggacaaacacaaaaaaaaacaaaaaaaaaaaaggaaagagcaacaaaggcgacaaagcaggggaccgggaggcgcgcggggcagaggaccggaggcagaacagcaccggcaaaaccaaaacacacaaagggggccacgacgccagacacacacagaaagcagcagcagcaagaaacaaaaaacagggaaagcccgcccccgggcagccgaagccggcggaggaagggagcagaagaacaaaagacaccagccagcagaaaagcagacaggagcgcaaagaagaggcagagagcagaacagaggaccgagggcccagcaccaacaagcagcccacgaccacgaacccagccccagggacccgagccccccggcccaagaacaaacagaaagggcacgacaaacacagagacaaaaagccaaacaaaaaacacaaaaaaaaagaaagagaagggagggagaaaaggaacacagcagacgcagacggaaaaaaagagaaaagaagaagcaagggggccaccacaagcccacaccccaagcaccagaccacaaaagccggaaacaagacgggaggggaagaaacagccaaaaacccgaaagaagaccaacgcaccagccaaaaaccaggagagcgggaagaaaaggggagaacaacaagccagacggaaccacaggcagccacggagaccaagcacacaagccacaacaaaaccaaaagcgcaccagccgaaaaaacaccccaagcgcaagagcgacccccaagaagcaagaggaagagaaaaaaacaccaagcggacaggcaagcgaagaagaagaggcccccagcaaccccacaagcaaagaacgaacagccaaccaacagcaagccgcgcccgagccgcaggaaccgagagaccaaagcagcccccgcaaaaggcgccagcaaacaacaacgaaaaaaaaaaaaaacaaagccaaccacccaaacgccagccggaaacaaggccggagccgaagaacagaccaacaacaggaaaagacacaaacacggacgacaacacacaaaaaacagggaaacggaggcagaacccaacaacagacggaaacaccgaccaccaccaacagaaacagacgggggaaaggagacacgaacccagcccgaggcaagggaaccacggcaaccacccggcacacaacaagacgcaaaaagaaaagagaggaaacgaagagagcgcccaaaaggacaaaaaagaaaaaagagacgggcgagagcaagagcaagcagggagaagcggagcagacaaagaccaaacacaccagcacccggaggagaccaccaggcaaacagagannnnnnnnnnnnnnnnnnnnnnnnnnnnnnnnnnnnnnnnnnnnnnnnnnnnnnnnnnnnnnnnnnnnnnnnnnnnnnnnnnnnnnnnnnnnnnnnnnnnccacacacacacacacacacacacggagggggagcgccagccaccaacagcccaccaaacggccacaagaaaagcaaccagcagcaccaccaccaccacggggggggcgggggggggggggaaaacagcacacacacacgcagggggcaggaaacacacccaaacagggcgcagaagacaagggagcaccgcccaggagaccaagccaaacccggccaacaaacaagcacaccacaagcaagcaccaacccacacaacagagggccaacaacaggacaaaagaaggccgcggggacacaccaggaaagaaaagacaggaaacccaaccacgccagaaggaaacacgccagaccaaaaaacagagagcaggcaccgagcaagccgggacccgaggggaggaggaggcaagaggagccgagcaaccagacacagaacacccccaaagacaccaaagcacaaagggaccccagaccaaagaccacacgacagagaaacgcagcacaacccaaaacagcggacaaacaagaaacccaaccagaagagcaagccccccccgccacccccccaccccggcccccaccaggcccagccaccccgaaagcagcgcgaggggaagggcgaggacaagcacacaccgccacccagacacaaaccccgagcacgaagccgggggggggggagggaggagcagcaagacaagagcagcagaaacagaacccagccaccagacagaaagccacgcaacaaacacccagggcaacagccaagcaaacacgagacagccacaaccccagcccaaaggaaacagaaggcaccacaggacccagcaagggggacccaaacagccccaacaaacaaaagaacagaaacaagcagaaaccaaagccaaaacgcgagaccaaaaccgcaggaaagcaaaggccggaaagcacgggggggacagggccgaagccggcgccggaaccaccgaaaccaggcgggccaaaccagaaaccgccgcccgcccccgaggcgggaaaaggcgggccaccacgcccggcaagcacgaagaagggaagccaccaaccgagggaaggggacacccaaacaccgcccaggcacgggaaggacaaacaagacaaaccccaccccaccccaaaaagcagacccaaaaagagcaagcgagaacaaggccaagagggggggaccaaccaaacaccagccgagcacggcacacaccaccagcgccaggaggcagacgcagggcgaccgggcaacaaggaacagcaacacaaggggaagcagcacagcaaaaaaaaccaacgccagggaaaaacccgagaaaagcccacaagacccccccgccccaccacccaaccaccaccgcccccgagacaggacgaccacgcaccgccaagacaggggaggcagagagcacgggccagagggcagccacaacccaggaacagggcaggcagaaccaccaacgagcacacccccaggccccacaccaccaccaccaccacaccaccaccaccacccagcccgagacaggccacgcagccacggcggcccagcgcagccaccacaccagcccagacccacaaaagagcgaacgcaggccaaggagaaaaggcaagccagaacccaggcagaggaagcccacccacgaccacaccgcaaaagccgacggaacacgcacgaacaagcggcagagaagcaaaagcacacccaaacagaaaacggggcaaaaacacagccagaacacccagaaaacagacacagagacagagaagagaaaccaaaaagccaaaaagcaaacacaacacacaccgacaaggggcacacacgcgcagacacacaacccacaaaagaaaccgacgcaaaaagaacaaaccaaggaaggagaaacaggagggcaaacccacccaaggaaacccccaaaagaacacacaccgcaacaaaccagaaccgaacacaaacaagagcaggccacgacgcaagaagccgagcacacacacccggcgcagcaaacaacacagaaacaaaaccagagacgcgaaacaagaagcaagagacagcacacggcaaaacacagcaacgaagaccgggcacccgaaccacccccgcccaggcaggagggacaaagccgaagcggggggacggcagacacagcacggcacccaggacagagggccagcaagcacacagagcagagcggcccaagcagcacagaacgcaaccagagcggagaacacggaggcccagagagacccagcacgcccccccagagcacccacggcccccaggcccagaggacagagagggcggggaagaagacacagcgcagaggaccgggaggcccagaagcagcccagcccgggggacgacacccgaccccacagacaacaaaaaaacaaaagaaaacaaaaaaacgggccaaaagaagacagagaaaacagacaaaaagaaagagaggcagagccacagggagggacggagggcagaaaggaaagacacaacccaacagcaaaaaacaagcagaaggccccgacccagccacacaggacaacaaaggcaacaacagacccaggcaaaagcacgaggcccgccacaaaagggacaggcagacaacacgagccccacaagaggcagaaaagacagaacagcacgggacaagcgccccaaacacaccaaacggaacgcaacacacaaacccaaaggggaccgcaaacaaaggaagacaaaaaacagacaaggaaaagcaacagcagccggcaaaccggcggaaaggacgcagaacaaggaaaaaaaagagacagaccggcaaacaacaggggaggagcaaccacagagacacacacgggcagcaagaaccccaacagcagaaaggggagcacagcaacggggcggggggggggggggcaaaaaaaaaagcccaagaacacagaagcagcggaggagaccagggccgacgaaacccccaaaaaagccacaagaagaaaacgagccaaaaagagacaagaaaaaccagaaaaacagaaaaggaaagaaccagcgaaccagggacagggcacaaagccaacccagcacaggaggcaaaggcaggggaccgaggaagcagccggcacagagccaggacagccaaggcacacaaagaaaccgccagaaaaaaaagcaaaacaaaacaaaacaacaacaacccagccacaaggcgaagacggcgcggagaccccaaaggagagaaggccagacagagaagccaaccaacccagcacgggaagcagaaacaggggacggggagcaaggccagccgccacaaaggaccagaccaaacagagaccgccaaaaaaaaaaaaaaaaacaaacaagaggaaacagagagaagggcgggggaaggaagagggcacacaggcaagaaaaaccccaggagagcagccccaggggagccaggggcgaggagacacacgggcgcccagcgagagcaggcagagccgagaaccaggagaccagcaacacggacacagacaaaggacggaggagggagccggaaaaagcacggccccacaagccccgccgcagaaaaaagggccccggggcccggcaagcagggcccggagcccggcgccggaaccaccgagaccagccggcccgaaccagaaaccaccgcccgcccccaaggcgggaccaaaggcgggccaccacgcccggcagcggccccgaaaaagacagaaaacagcacaggacacgaaagcaggaagccaaccacacggccaacacagaaaaggaacaaacaaacggccacgcaggagagcaagacaaacaacgagggggcccccgaagaaacggaaagaaaagaaacagacaagaaggcaacccgaacaacagcagccaggcgggacacacaccaccccagcaccaagaggcagaggcaggcagacgacacaagggccacacagccagcacaagcaagcgcaggccaaccagggcacaagaaaaaaacgacacaacaaaacaaggagaaaggcccacacagaaaccacaacacaggaagaaaaagagaggagcagggccacacccagaaccagcacgcgggaacacaaggacccccaaggcaacacaagggaacaaacacaaccgaacaaaccaaacccaaaaacaaagaccgcagggcgaacgacacaacacaaccgggaccggcaagcaaacaggaagggggagaagcaccaagaacgacgcggggaccgcaagaaagcagagagacaggagggagggaaaggaagggagacgcgacaggcagagaggacagcgggacaaagccgcggagcagcagcggcaccacgcacgccaccaaaaccagagaccaagaacccgcgcagacagccacgccaacgcgcccgaaacccgcgccacagagaagccgaagcaggcacacacagacgcaagaagaccacgggagccccacggaaaacgaaaacggagaggcagcccaacacagcggcagagggccgcccacaaccaccaagcaggggcgcacggccacaggcccagggccggcaggcggaggcaggacagcggggcggcccaaaagcagcaaggcaacaagcacgggagagccaaccacacaaaaaaaaggggaaagagcggagaccacagaaccccccgaccacaaggaaggaacccaagaccaagaggggaaccgaacaccaaacacagccccaccacccacccgcaacgcaagcaaagcacgggaggcagagacagccagcgagcgaggccagccaaacagagcaggccaggacagcgaaggcagacagagacacccaccaaaacaaaaaacaaaaacaaaacaaacaaacaaaaccaaccccgcaaacgcagcacaaaaccccacaaaccccccagaagagccacgagcccaggccagccaaacccgggacccgcccagcaggacacacaggcaaggccagagacaggcaccccaaggaaaacccaccgaggaagacaagccgggacagacaaaaagccacagaaagaacgcaaacccacccagcagcgccacccacagaagcaaaagaccgaaacacaaacgcacagcacgcgcccgcacgagccacaacacgcccgcacaaaccccgaagggacggacacccaccaaagacccccccagccacggcgacgcagccagccacacgccagaggaacccaaaaaaggcaaggagaaaaacccaccaagaaaaaggcaaaagagcaacccaaccccccaaggccccgcacgccaaacagaaccagagaaaaagaaaaagacacgccaaagaccagggcaaagaagacaggggaccacaccaaacgacagggagacgggcacggcagacacaacagagcgcggaggcagaggacagcgcaccaagggccgagaaccaagccacaggcgggcagcaggcacagaccccagagccaagcgacacaacccgaaccgaagcagcccgcacacagcagccaacaagccccgggacacgccgccaccagcagaaaaggacacaggcggcaagcacggagagccaaacccaggcaaaagcaaacacacccacaaccgccccccagcccgcgaaacaaaacccaagacaaaccgcacgacaaagacccacacagagaaaccgaaaccgaaaggaaagcggccgcccccagacagcgcagggggacaaaaagacacaaccacccaagaccggaaacagagcaacaggcaagcggaccaaacccccaacagccaagagcgaccgaacgaccccagccccacccccagagagacaaggggggccgcagccgcccaagagccgaccgaaagacaagacccaagcaacagaagaaacaaacggaaggccccagcacgacagcaaagggccggccggagccgaaccagagcccaaagaggcacaagcaaaacaagcgagcaagaaaagacacaaagacagacacacgccggccagcaaacagggcaaaaaaggcaagggaaggagcgaaagcaagcagcgaagaccgggggagcggacgcagcacaaacagacacaagcagccggccagagaaaacaaccaccaggacaacagcaaaggcgaggggagcagcccaccgaaaccgccacaccgaacccaggccagagaaaaaaacagggcaggcaggcacagagacaacccaccaaaacacagaagaaaaaagaaacaacgccagaacagcagcacagccgcaccggcaggagacaagaccaagagaggcagacggggacaacggaagaccgggccacaaacaaaaccacaaggcgcccggaggagagcagcaaacagggacaaagccagaaccccaaaaccaccaaaagaaaagccacgcaagacacagaaaacacaggccccgaccgacccacaacaaaaggacccaccaacccccaaacaaagacaaaaacaagagacggggaagagagacagccagcaaaagagcacaggccaggaggacccaagccgcccagacccacccacccggcagcacaaaccacaaacccagccagaggaccaacgccccagcagccccaggggccggcacgcgcgcacgcacacacacaaaaaaaaaaggcaaaaaaagaaaccaaaagaaaaagaggaacccaaaaaaaaacaaagccaacagaagacaaacacacaaaaaaaaaaagcaggaaaaaacaccaaggagaaacaagacaaccgaggaaaagaaaaccagcaagagcaagagaaacaaaacaagaaacaagcaaagggcacacaggcacacacacacacacacacacacacacacacaccccccaaccccacagcccaggcgaaagagaacaggaaggacaaaacgaaagcgggcggcagagccagagagagcagcaagcagggcaagcccgggcaaccagcaaaaaaaaaaaaaaccaacgaaaacccaaccccccaaaaacaaacgccgccaaaagcaggcaagaacacacgaaccaggaaacacgaacaaaaagcaaaaaaaaaaaaaaaaagcgggcgggggggcacgccagccaacacgggaggcagaggcaggcggacgagcgaggccagccggcacagaggagccaggacagccagggcacacagagaaacccgccgaaaaacccgaaggcaacagcccgacaaaagaaaggcagaaccacagcaggcccggcacaaacagcgacccaacacagaagccacaaaaaaagaagaaacaccccacaaaggcaaaaaaaaaccacccagaagaaaggcaaaaagacaagaggaaaaaaaaaaccaagggcaagaaaaacgccaccaaaacagcgagcacaaaagacaaacccgccagaaaaacgcagacaccagaaaagccagccacaaaggcaaacaacagaacccagaaggagacagaacagaggaaggaacaacacagccaagaagcaggaacgccggcaccagaagaaacagaaaaagaaaacacaaaacggagagaaaacccccagcccaagagaccgcgccaccccaggcaagcaggaacaaagaaaaacgagggcaccgagaaagccacgcaagaaaggggccaggcacacggggaaaagaccgcaggagagaaagagagggagccagaaaaagcaaagaaaacaagaccaccacaacacgcgccaccacgacagcaaaagaaaacaagccaaagccaaaaaggcccaaaagggcggagagaggccagcggaaaaagcacagacgccccagaggccagagcaaacccagcaaccacagaggccacaaccaccgaaaagaaaaaaacaaaacaaaacaaaacaaaaaaccgcgcgagcaagggagcccgaagcgagaagagggagaagggaagggaacaaaaagccgaaagaacaggcacgaccccccccaaaaaagagggcgaggggcaagggaaaggacaccaagcagccacgccacaccgaggccgacagcccagcaggagagaggaggaaaacacaaacaagaaaacaaaaaaacacaaacaacaaaaaagaaagcaaaaaaacaaacaaacgcagacgcaagaggagaccacaacaaggcaaacccacagaggccaaaagaggcagggaacacacagacagacagacagacagacagacacacacacacacacacaccccaccaccccgaaggagacaggggggagccccagggaacgggacagaaccagggcccgcaagagggcaaggccagaccacgagcaccccccaccccaacaacgacgaaagccgcgagggaggggggcgaaaagagggcccacacaggccacgcgcggaagcagccagcggggaaggaagcagccggccggaaggaagaacacaaggggggccagccccccgcccacccccaccccccgccggacaaagcgcccagcaccccagagcgccacaggccacagccaagacaccaacacaaacaggaaagggcaaacagagaaaaggggccagcccagcggagcaagcccagcacaacagaccacgcaaaccaaaggacagcccagggaggggcagagccaggaagagccacgggccagcaccccggcgcacaagacaaaacacccagcgacacgcccgggaaagcaaccaggaagcagagcccaaaacaaacggaacccaagcaacagaagaagcggcgggggggggggggaccgaggcagggcaccccccggacgcccagggcgacgacgaggaggcacgcggggcaggaaacccccgagacaccgaccagaaacgggacaaaggagacagccaagacccccggagaaaacacacggcaggagaagaaaagccagcacccgcacagagcccagcagccgggaaccaggacccccaggcagcccccgagagcggacaaagcagccccaccacacccacacccgcacagaaaccaagacgcaacaagggccaaaggacccgacgcaccgggcacaagcaaaacgccaaacagacaagacccacagacgagcggcggagacaagacgcaaagcaacggcccaaaccacaaccccgcagcccccaacccagggcgggaaaccgcaagacaagacaaaagcacgcaaagaaaacggcccaaccagcacagaggaacccaggcgcgcccagagaagccacaggggagaaaaccaacgcaggacaccaagccccgcacgaccccagcccggaacagagcccgaagccacggcaccggagagggccaccacacagccccaaggagcggaaagggccagcaagggaccagagcaacacacggcaacaccggagcaggcaaccgcccgccgacacagcccccccagcaggagacaaggccccagccaaaacacagcaaaagacaaaaggccacaaacgagaccaagccagagagaaagaaaaggagggagggaggaaagggaggggggcagaagcgaaggagacagggaggggagggaggggcagagccagcaaccagagcaaggccaagcccccaaccgaggaacagccaaacacgggcaaaagaccgaagcaccccggccaagggcagcgaccaaagcagacgagcccacgcgcgggacaagaccacaagcccacacggccgagacagcagaccgccagccaccccaaggcgggacacagggacacgcccacgccggcgacccccaagagcccccccagcgacgccacaccgcacacaaccgagggaaaaacaaacagaccaaaaagggcccgcccgcccaccaccacccagcacccccccccacagcccaagcacccggggggccccacgagcaaaacaaaacgcgcccaaaaacaggagggcaaggagaagacaaagcaggagggcacaagaggggaagggcaaacccacggggaggccagaggcgaagggagaacgcaaccaacgccccccaacggggcagggccccgacccagagccagggacacaccagccaggcagcgcccgagggccagagcccagaaccaccaacaggccacacacggcagacaaacgcaccaccgagcggcccgcagcccgcaggagaccgaacgaaaggacagacccgaaacacggcaccaacaacacgggcggaaaggccaggaaggcagcagacccggaacggagacagacagagagccaccacagggcccaggacaaacaggcagaaagagcagccaagccaaccacgaggacccagccccagcaaaggggaagggggggggggggccacagggaacagacccagagagcccagcgaccagaaccacaacagaccagacaacccaaaccacagagacaacgccagcccgccccaaggcaggaaacagggcaccacgcgcccaacaggaggaaacaccccacagcacgggaccgcccaacacgagcggcccggggaacacacacgagccagcccggaggggccaacggcaagacgcaccacaagccgacaggccacccagagccaaaagacccaaacacaggaggagccaaggaaacaaaggaacaagaagaggacaagcccaaccaccaaaacaggcaccacaagaagacacgccagcgggcacacggaggggaagcagcacaagcaaagcccccagacagacagcaagcgagaccagcccaggcgaagagccaccaaaaagaaacaaaagaaaacaaaagggcggggaaggacacacaacccagcacgggaggcaggcgaccgagagcaaagccagccggcagaaggagccaggaagccagggcacacagagaccacaaaggaaaaaaaaaacaaaagcacacacaggaagaggacaagacaagggggccccccaaggggccagagaaggcaggcccccacgagccaccaccgcccgggcaaccaacacaggcccaagagcagcaagagaacagcagagaaaggcccagccggaacgggacaagaaacgacacaaaaacaggacccaaacacaggaaggacaggaaaagcccccaaaaggcaacacaggaagaaacaagaggcagcgccagcaacaagacaagagaagcaagaaaagaaacaagcgggcaggggagacgccaacccagcagggaggcagagacaggcggaccgaggaggccagccggcacagagaaggccaggaagccagggccacagagaaacccgccaaaggaaaacaaacaaacaaacaagaaaaacaagacaagaaacacaagcgagcacaagccgaacaaaacaccaggggcgaggcaagacaacccaagccaccaagcagccgggcacaaccgagaccaccaaaccccaaacagccaaaaacgaccaacagaaagaaaaagaggacaaaagaacagcaacggggaacaagcaaaccagggaacacagacagcccccagagcgccaaagaaccaaacccccaaaacaagaacaaggggccagcggcgaacgagaacgaacccagggccggaaaagcagacacaagcaaaacagggacaggagagcagagagagaacggccaccaacaggaacaacggacccaaagaaaaagcccccaaaaaccacgcggaggaagagaaaggcgaagccgggcagccagaagagcggcagaaccaagagagaccacacaacgacaacgaccagacaccaaaggacagaagaacgaagaggagggcaggaccacacgacccagcgagagcagcccccccaaaacccaaacgcaggcagaccccaaagagacacagggacaccagccccgagccccccacgccaccaaaaagacccgccaccaacagccaaggggcagggacaacggcagagccggcgcgggggacagaggccaggcgacccaaagcaccggaacagaacaccacaagcagccacacaaaaacaacccaaaaaaacgcccaaccaagaaacaaaccaccgcaagaccccgggaggggaaagggcgaagccgaaaaaaggacacaaggagaggaaaaacacaaagggaagaacacaagaaccaaacgccacaaaaaggggcacgacacccagccggcggcgccgggagccggcaaacccaaaaacccaagccccgacccccacagagggaaagagaccagaaaaccaagaaacagaccaaagaaccagcgagcagaacacagaagaacgagaaacaaagagccagagacgcaagaaaccaggcacaggaaacaaccaaagcccaaaggaaaaaagggagaggcagaaaccccagacagcggaagaagcgagaccccaacccgcccccaccagcaaaacagccaaccagaggcaccaccacaggacacacaaaagaagacaaggaaaaaaaaaaaagagagcagccaagcagaacaaccggaaccagcaacgagagcgaaggcagccgggcacagaacaagacacagaaccagcaagacaacaaaaaaacaaaaaaaaaggaaaaggaagccgaggaaaccacgccaaagccggggaccccaacaccggggaggggggagaacggcaggggggagggggaacaaaaacgaaagccacaaaacacaccccccaggggagggggcacggaggggagagccgagcgggcgggggaaaggggcgagagagaagacgcagcagacaacaagagggcagagaaggaggagccgagaccacaccgcccaagcccgaggaaccagacacagcgaaaaaccccagcacagagacgaaagccggagcacaggcaggcagaacacccaacacaaaccaggggaaggcgggcccacacagggcggggcccccccccaccaagcaacccagagccagccgcaccagccccaaaagccccaagcacaagccccccaccccagcccccacacacggccccccaacggccgggcccccagaccacacaccaccacacaaccccgaaagacacaggcccggcacagggccgaaggcagagcccacacacggacaaaccaccacgcgagcacaccccagccccacaggcacgaagccccaacacgacccaaaccccgcacaaaggccacccacacacaaaggacaacaacacagacacagcagcaacacaaccgaagacccaaagcaaaagaaaaggacagacgagagcaaacagaagaaaggaggcacagaaaagcacggggcaagccaaaaaccaaaggcacaacaagcgagaacaaaggccacgcaacacaggccagcagcacgacccagagcccagaaccagacaccacaaagcgcaacaaagaacgagaaggccgaggaagacagaacaccggaggaagggaaacacgcaaaacccaacgggaaacaacaacagaagccccccaaaaacaaagccgacaaacaagaagaccaccggcgggacccaggaccacccgcccggcccccaaaaccagccaccagggagacagcggacggcgcagccacaagccggcccaggcaaaaacaacgccaaaaagccagacgaagacggaaacaaaaccaacgccccccaccagcagccgcgccgcgccaccgccacgagcaacgcaacgccagacaaagcaccccgaaacaaaaggagcagcacaaccagaaacacaggagcagcacgcacacgcgaggaaaaacaaggaggaacggcgcaaaacacaaaacaccacagacacgaaaaaaaaagcaaaccacaacaacaaaggggaaacaaaacaaacacacacacacacaaaaacagcacccgcccaaacagaaaaaaccgacagcagggaccgcgccccccaacaagccacgcccaggggacaaaagcaaggagacgcagcaaaaacaaaaagaagagaaaggaaaacaccgggcgcaaccagaaaaaacaaagacaaacacccccgccacaacccgacccccccagcaaacagaaaaagggggggggggggagaaggggcaacacacaaccaaccgccccccagcggggccaccccaaaccaccaagcgcgaagcaggcaggcaccgggaaccaaggaaaggccgccccacaaagcacaaaccccgaagccaacccagggcacgacaaacaccccacccggacgaccaccaaacagacacgaagagaagccaaacacacacaaagagaaaacacagggagccggcggcgcgaagccgccgccaagagcccgggccagcgcgccaccgaggcaggcgcggggccccacccggccccagggcaggaagcccggcaccgcggcgcggcgcaacccgcgggccccgcccgaccgcaggaaaggggaacggcgcccacccggccagcccgcccccnnnnnnnnnnnnnnnnnnnnnnnnnnnnnnnnnnnnnnnnnnnnnnnnnnnnnnnnnnnnnnnnnnnnnnnnnnnnnnnnnnnnnnnnnnnnnnnnnnnnnnnnnnnnnnnnnnnnnnnnnnnnnnnnnnnnnnnnnnnnnnnnnnnnnnnnnnnnnnnnnnnnnnnnnnnnnnnnnnnnnnnnnnnnnnnnnnnnnnnnnnnnnnnnnnnnnnnnnnnnnnnnnnnnnnnnnnnnnnnnnnnnnnnnnnnnnnnnnnnnnnnnnnnnnnnnnnnnnnnnnnnnnnnnnnnnnnnnnnnnnnnnnnnnnnnnnnnnnnnnnnnnnnnnnnnnnnnnnnnnnnnnnnnnnnnnnnnnnnnnnnnnnnnnnnnnnnnnnnnnnnnnnnnnnnnnnacggcgggacaggagcaaaacagggacggcagaaagaaacagccggaggcgggagaaaaaagaacggcaacaccaacccaacccgcggaagcagagggacgagaaaaaaaaaaaaagaaaggcagcgagaagaaaagagaccgagcggaccgaacaagaagcaggacaggagagaggggaggagagcgcacggggccacaggcagggacagacggggcgaacacgccagcagggaaaaaagggaaaggagagggcggagaaagcagggggacagaggaggagcggccgcagcacagccacgaacagacaggcccgcccagagccagaggaggaggcagccgggacaaaggcaccggagacaaagaagaacaacagcgccagcacgaggccaagggcacaccccagagcggcagcagagaaggcccaaagacccgaggaaaacgaaacagagaggaagggagaaaagaccagggaaagaaaaccaagcgagccgggggaacccacgccagccagacggaagccaaagagcaaggccagccgaccacaaggagccaggccagggcggaagaggagaccagcgaaaagaaggaagaagaaagagagaaaagaaaaccagaagcagaagccagagaggcaaaaggacacacggggggaacgccgggggagacaagcgcagaaaaaagaaaccacggggacggagggagggaaccaagaggccacgaagaggaggcgggcccagagggacacggcaaaccgccgcgcaaggcaagcgagggaacaagccggcccagcccaaaaagcccaaaaagggcccgagccagggaggcgcacccgcaagccaccgaccgacgggacccacaggcagggagaaaagcaacccccaacacgccgcccccacagcccacgccgagcagacacccacccaaacacaaaacacaaagaaacgcaggcaaacagggggcaagcaggggacaaagcccccagcgaacaccggcccgaagaagccagagaaacagaggggagaacagaaggcccgaggccacagcgaaaagaccacacagaacccccgggagcaaggaaaagaaccagagaggcggaacaaccaaacaaaaggccccgaaccagaagggaaccagccagagagaaggaggagggccgggagggcagaaggggaggggcaaagaagaagcgcaaggcaggaggaaagccaaagaagcaccaacgaccacgaaaaaaaaaacacagaaaggcggagagggcaggggaagagcacggcgcccaaaggcagagcaacccagcaaccacaggagccacaaccacgaagggacaagcccccggggcgaagacaggacaggaccaaacacaaaaaaaaaaaaaaaaacaaaaaaaaaacacgaaaaaagaagaggggacagccaacccagcacaggaagcagagggggagggagccggaaaaggccggccgcccacacgagcaggacagcaggcgcaaggagacccgcacaaaaaaaaaaagaggaggggcagagacagaggaagaacaggcgcgacggccgagacccgccgaacaggaaaagcgaacagggagaggggcgccagagaaccgacagccggaacaggcagaagcacagaggcgcgaggcagcacccgggggccggggacagccggccaccccggaccggaggacagggcccacccggcggggaggcggccaagccacagcagcagcggcgccacggcccgggacccaaggaacaggaaagcgcaaggagagcgaccaccgggaacgccaaagcaacacaggcgagaaaggccggggcccccggccaggaggaggccaaaacaagaacgcgcacccccgaagagagcgccagcagagaggccgagcacgaaaccagaggagagaacgccccaggcgcgaagacggaacagaacaccagaagaacaaccaaacagagcaacaaacacaacccagagaaccagaggcgaaaggaaaacggaggaacacaacaggaaccaagaccaccaccagaccagaacccagcacacccaccgcccagccagggaaccccaacacaccgagaaccagaccagaaaaagcaaccagagaggagaggacacaagaaggacaaaaacacaaagaaaacaggagaacacgcaaagagacaagccaaagaaaaacaggaaaacacaacaaacaggagaagccacagaaaaagaggaaaaaacaacaaacagggaggaaagaacaaaaccaacagaccaaaaagggaagagacacaaaaagaaaaccaaagcgaggcaacacagagaagaaacccaggaaagaaacggaaccaagagagcacagcaacagaaacaagagaggaagagagaaccagggcagaagaccaagagaacacggcacaacaacaaagaaaaggaaaagcaaaaagaccaaccaaaaaccaggaaaccaggacacaaaagaagaccaaacgacggaaaaggagggagagaagaagacaaccaaaggccagcaaacaccaacaaaaagaagaaaaccccaaacaaagaagagagcaagaacaacaagaagccacagaacccaaaagacggaccagaaaagaaaccccccgacacaaaaacagaacacaaagcacaaaaaagaagaaacaaaagcagaagggaaaaaggcaagaacaaaaaggcaagccacagaaacaccagacaccagagacagaaagccagaagaaccggacagagaacagacacaagagaacacaaacgcagcccaggcacaacccagccaaacccaaacaagagggagaaaccaaagacc

SEQ ID NO: 606 - RNA, 1956 nt, Mus musculus
gacgccgggcggggcacgcgacaccccccgccgcgcccgggggccccgcccgccgcaggcgccggcacgagaagaccggaaaagaggccgggggcgggcggccgcggggggaggggcgcggggcggaggcgggggcgggggggccgaggggaaaagcggacaaagggaaaccccgcccgggcgaagggggagggcgggggggggaggacgaacaaaaaagaaagaacgggaccaagggaacccgcagcgcagccaaggggcggccgcgcgggaaacacccggccccgccccgacggagagccacaaacccgaggaacgagcacaagggggggggggggcgggcccggggagccccgaccacaaaggagccggagaacaggaaagggaaaaaagggcagaccccgccggaaaacccaacgggcaagggggccaccaaaggccaaagaaacggaaaaacaggcaaggaaaagagaaagccgggggagacgaaaaagccaaagccgaaaaacaggcagaaacaaggcacccgcaaggaaaaaggaaagagaaaaaggccaacacaaacgcccagcaagaaagaagggcccaaaaaaaaaacaaaaacaccgacagaaaaacaagagcagcgaaaacggaaaagaaagacagagagcagcaaaaggaacacaacgggaagaaccggaagggcagacacccacaagcaacaccaacaggcccgcaagcaaacccaacgaaaagaaaacaaacaaagacaccaagaaagaaaaggcagaaaagagacagacagaacaggaaacggaaagaacacggaaggaaaaggcaagcagcaaaaaagaccgcccagcaggaaagagaagcagcccaaggaaaaagaccagaccgggcacaaaaaaaacacaaaaacgaaaagagacggaaccaagccgggagaaaggagaaggccggaaacacgaaagacaaaacaaaaaagcaaacgacagcgcaccaaagagacccccccccggaaaagacgagaaaaaacaacgaaaaacacaaaaacagggaaaaacgcacgcaaacaaacaacagcggaaaaaccaagagggcaaaagaaagccgggcgccggaaaagaggaacaaacggaacgcaggaccaacacccaaaaaaaggaaacacaaaaaggagggacaaaaccacccaacgccaaacagggagagagaacacccgggcaaaaaaaaacaaaaacaaaaaaacgggaaaaaagccgagcgaaaaaacgaaccagaacacaaaaaaccggaacccagacgaagaaaaggagccaaagaacccacaagaagaaccaaaacaaccagcaggagccccaagaaaaaccacggaggaaggacccacccacgacacacgaagcacaccgagacccggaaaagaaaaaggaggcggaacggaaagagccaggccgaccgcgcgagccacaggggggcaaagcaaagggggcccagggccccggccggggccgacaccccacgccgggggcgcgcaccccgagaaccgccccgaaccgcaaaccagaggcgagaccgagaccgggcgcccacccggaacgcaccacgaaaacaggagccgggagccgagaagaggggcgggccccagcccgcgcagagaagaggaacccgcgaaacgcacacaagagaaagccagggccgcggagccgaccacacggcgcaccaagcaggagacgcggaaaccgcgaggcgggcgcacgccgaggagcccgccccacagagaaaaacgaaggcgccgccgcgggcggggcggccgccgaggcgcggaaaagcgaccagggcggggcccgacgcgacgggcgcccgcaaggacagaccccacccagcgccgggagaggcgccgccccgccggagccgccgccgaggggaggcagcgagccacacgacaggccgcccggagcagcggcccaccca

SEQ ID NO: 607 - RNA, 16722 nt, Mus musculus
  misc_feature (8879)..(9246): n is a, c, g, or u
  misc_feature (11830)..(11929): n is a, c, g, or u
aaaggaaagccagaaccaaaacagccccgcagaaggcgaaaacaaggaacaagccccccagcccccaaacagcaacccaacgcacggaagaagccggcaggaaagcaacggagaaaagacagaaaaggaagacacagagacccgggaaagcaacaaggaaccaaacacaagaggcccgaaggaccagaaagagccaaggcaagacggaaaagacaaggaagcggggaaacaacaaaagggccacgcaaggaaggcgagaaccccaaaggcgcggaccgagcgagaaggacaagaaaagagaggagacaaggaaggcagaagaccaagcaaaaagacaagaacgggcgaaacaccccccccgacacacaacagacagcggaaaaaagacaaagccaaggaaagcaaaaaaggaaccgaaagaaacaggggaagcgaggcaccagccagccccgacagccagcccccaccgccccccccgacacccgcaccacagaccacagcccaggcaggcgacgacacccaggggcaccaggcagggaacccgggggagggcaccggcaccgggaaaccagagaaggcagggagggaggacacccaacagggaccagggaaggggcaacaaaagcagaagagggccaccaccaggaaaacaccagcaaccacccgccaaagaagcacagacagcagaggccaagaaagaaaaagaagagggggggcagacacccggggaaggggccggagaacaaaccgcgcgaaaaggcgcggcaagcaggacccaagggcggccagcggcccagggaagggcaggagcaaaaccaccgaaacacgggagaccgccccgcccagcagcaaccacgcgagcacaaggcacacaccgcgacaacaaacaggaacaaccacacaaaggccaagaaacgaaacgcccacgggcaaaccaacacacacacaaaagaaagccagagacacacgacacccagaaacggaccacgaagaaagaagccagcaagagcagccagcggcaggggaggaaaaacagcaacccccccccccacgagaagggaaaacaggaaaaaagaagcggaaacccaaaaacgaggcgggaaaaagaaaccccaggaaggggaaagaagaagacagaggggaacaacagaacagccagaacaggggaacacaaaaaaggaggaaaacaaaacaaaaaaaaagagggaacgagaagcaaagcaccccaaagcccaggcagagacaccgggagcacagaaaacaccccaaagacacccacaagacacagcccgccggagaggcagaaacaccacccccgcaagaaacacacgcccaaaacgaaacgccggacgagacgcaaaacccacagccagcacggaggccagacagcagcgccaaggggcgcagcaggaccaagaagaaaaacacagggcaagagcaaaacccggccagaggaaaggacgcgaaaaggcagggcaaaagcaaacagcaccccccgacacagcaagccacggccaagcaccagcccaaaacaaagaaaagcaagaaagaacacacccaagacccaaaaagaaaaggagaagagccagaaggaagaaagaagcccaaaccaggccgcccccacgagacagcgacacggacccagcaaaggcggagaaccccaagagggcagcaggccacaggcaccagagccagaaccgggccaccacagcgacgccggagcgaagcccacggggaagaacccaggaggaccaggcaccccaaagagcaaggcccaagaagacggaacacgagagaacaccagagcacagaagaaccgacaggagcccccagcccaggccagggccgacggacaaccccggagaagagcagcagaccacggcacgaagagaaacaaagaaagagcgcagagagaggcgagaaagaccccgccacagacacgccaacagggacccacccccaggaccagggccaaccggggcacaaccccgggagcagaggaacccacagaggcacaacagaaaccgccacagaaacaagaccacaagagagcaaaacacagagaaggagacagaaaccgggggggggggggggcagcacaacagaggaacgaaaagggcacagcagcagggagggagaaccaacgccagaaggaagcaaaccagggcaagaggcaaacagcacccagggcaaagcaagcagaggcaagaccaaaggcggcaaacccgcggaggcagagacaaggccccacgaaccagaaggggggaggccggaggacgaaagcacaccggcaaagcccgcaaggccaggacaagggggcaccggggagggcgcccagcaccagcaaccaggacacacagaccccccgcaacccaggccagccgagcccgaggcacaggccgcccaacaggaagagcccccccccccgaccagccaaaccgaccaggccccaaccaggagaaaggcagcacaaaaaggacaggccgcaagcaagccagagcagagcccaaaccgggggggggggggaggaggaagaagggcagacgaaacacaccacaagggggggggcccacccacccgaccagaggaaacagaagacagccgccaggaagcacaaacaaagcacgcaaagcaccgccacaaacccaacggccggacacagaggcaagagacaggaggagacgggccccccagggaggagggcagggaccgaccggcagcccacacccacacccccaccccagagcccgaggggcacaacccaggcagaaaacaccccgccaccgagaccgcccgccgcgaacagggaagccaaaaaaaccaggcaggggacacccgggcacaaggcaggacaagcaggccggcgcagagcgggcagcggcaacaaaaccacggacgaaccacggaccagcccaaccggagacgagcaagcccgagagaaagccccccgagggcagggagacagccggcaagacagcaaagcacacggggcgcccgccggcacaggaccccgccaaggagaaccacccacccagcgcaggccaagcaacgccccccaagacggacccccccgacaaaaggagagcaccggagcccgagaggcgaccacaggccagcagagaaacagagggggaaagagcgagcaggccaggggggcgcaaagcaaccccggggaggggggggaacacgagaaggccagcaccaccccccggccccgggcaccacgcccgcgcgccaaaggcacaacccacggcccgaagacacacagagccgccccgcccaccacccgcacaggaacaggacgcaggaacaacagcagaaaccgccaagcgaggaaaacacccacagaagcaacaagcaccgacaccgaggacaggagcaaacccccgagcagcgggaaggcagaagggaagggggcgcagggagcagagagcacgagcaaagcgcacagaagggagggaagaggccccagaagcgagccgcaggggggggccgggaggaagacgcacgcggggggggggcaagggccacgcaagcccacccagcagagagcccccggcgacagacaagacaaaacccacccagccgggcggggggcagccaacccagcaccagaaggcagaggcaggcggacaagccaggccagccggcacaaaggagccaggacagccaaggcaacagagaaacccgccgaaaaacaaaacaaacaaacaaacaaacaaaaaaaaaaaacccagccccagcacaagggccggggccgccacccgccagaaaaaagacgaaccggacgaacagccccaacacaggccaaagaggccggcagggcccacagcaaaaagcaacaagacaacaacagagggcaccgagggcagggggggggggggcgggggggaaaaagcggcagagccaaaaaagagaagcaggccagaagaacggaagagcaggcgcggccacggagcaacaggaagaggaacagcgcgcggaaaacaacaggacaccaaagaacaaggagccccccacaaacccaccgaaaccagagaaggaccccgacaccacaccgaaagaccacagaagggcgacagcccaacaaaaggggagaacgagacaggcgcggcacaccaagaccaagggaaccagcgcagcaggagaggagaggccagcacacccaccaggagacaggggccaaggaggaaaagcacgccaaccacaaaagcgagagaaacaaagaaagagggcggcaccaaccaagccaccaaaagccagaagcaagacaacccacagaagaaggaccagcacaacagaggagaagcggccggagaaggaagaccccaagcaaaaggccaacaagaccccgggagaaacaagcacgggggaccaccgagcggaacccccagccacaaaaccgaagggaagagagaacggaggaacacgggcgcagcccaaaaaggcgaaccccccgccccagaaaagaaggccccgccaggccagcacaacaacaccaagagcccaggaccgccccccccagcacaagagcccaagaccgcccaccccccagcaccaggacgcaggcaagagcacgagccgacgcagggggcgagaaccaaaccagaccccagcgcacggcaagcaccgcggcagagccaccccccaacacgcccccgaccccagcaaccgcaaacccgaaaaggaaccgccgcagccgcccaagaggagccacgaaaggagaagagcccaaaagcaggcccggagaccaccgagcgggacccaccaagacagagcggagccccccaaacagcacgagaagcacacaagggggccagcggccccaccacaaccaggggccgcaaaacgaaccaaacaaggggggggggggggggccacccagcggggaaaaaaaaaaaaccacacacaccaaaaacggccgggaccagaggccacagagaaagcacaaagagggcgcccagaaagcagagagccaccagggcccggaagcccaggacacagccccccccgcgcgagacggcccccccgcccccccccaccccccgcaggggccggaggacagaagaggagggacgagcccacaccacagaggaggaagccacaccaaaaggccagaccacccaagccagccaaacccacgccgggagaaaacaagccagcccgaagacccaagggaagcagaggcccggccgcccggaacgcccagcggcccaagggccaaagagaaaggagaaccaccacagaagggaacgggcgagaggagcaggacacaaccaagacacccaggacgagggaacccaaccacccagccacccagcagaggccaagcaaggagaccagcggcgagagaaggacagccagcccagggggcagcaccaccaggcaagaggcaggcgaagaaaggaacgagcaagccagaagcagccccccacggcgccccgagccgccgagcgccccaacccaaaaagacacgccggaagggaacgaaacacacccccgaaggcgcaggaacacagcaacagaaaagcaaacacaaaaggccaaacaagaaaacgacggaggagaacccagacacgaaacggccaaacccgaaaaaacaacacaacaaaacaaaacgcccgcgggagaacacagggaggaccacccaaggacccgaagacgcacggacgcgagcacagaccaggacgaggcccagcaaggcccaagccccccagggaaaaggggagagacgccggcaggccggagaagcagcccaaaaaaaaaagcaaaaaccaagccaagcacagggggacgaccccccagccagccaccaggaagcggcgcagcaaccggaacggaccgagggggaccgcacacgcaaaaaccaccgcggcccggaaccgcccgcacccgagaggaaccggcagaaccccgcgagcagcacaccagagacaaccaccagaccacgagaggcaggagcaccgggagaacacacacccgcaggcacacagcaaaaagggcgagggggccacaccacaaagacgcaaccagagaccaagccggagcaagaccggaagagagcccccacggcgggagcaacgacacaagcggaggcacagagaaaggagcccccgaggaaagccccagagaccagcgggggcaacaaaggacaaggggggagagcccggggggggccacccgggcggagccgggcaaagaaagcaagcgagcaagccaggggaagcaagccagaagaacacccccaggcccgcacagcccgcccgaccgcgagccgccgacccgggagaacagcaagggaaggaagcgaaaaacccccccccaacgccggggagggcaggaaagaaacccgacaagacagccgcaagggaaaggcagaaggacagagagcaagaacgagacccggaggaacaacggccaaaaaacaggaacaggagacaaaggaaggcaggaggagcacgaaagaacgacaggaacacccaaaccacacccaagagcgcagcccccccacgaagaaccccacagcccaccccacaccccaccgccagcaccccccccccacagccaccacagccgagcaagaaaagaaacacacaccgaagggaggcaccagccaggaacaccagccgaaccaggccacggggaacaagaaacaccaagagaacaccacagaaccagcccaggacccggaagaaaggcaggcacagaacgggcggagaagcgcagccaaggcccccaggggccccaccccccaaaaagaagaaggccccaggggcggggacacaacgaaccaccccaaaaggcaggaaaaaggagcaacaacgcaaccgacccgagcccaaaagcccgaccgaaaaagaccaacgggacagccaggcagagaaacagccaaacgggaggcgcccggagacaacccacagaggccgcacaggggcccccccaaccagccagccagcgaaaacccagggcgcagagagggcgagagcaaacccggaccgaccagcggaggggcagcgcgaacaccaggcaaagccaagcacggaaagcaaaaagacaaaaagagaaaaagacaacagaggaagggcaggggcagagaggcgcaaagggagcgggcccaggcacgccaggccgacaacggacacgagagaccaggaccgagccaacgaagcgagacaaggacagaacaggacacgccacccaaacagacgggcaagcaagagaacaccgaggacaagaacagcagagcaggggaaagcgaaagcgccaccaaaaacagagacgggaagaggcgcgacacccccagaaggccgagcaaagaggagagcaaacagaagacaggccgggggaaccagaccagaagaagagagaagacaggaccagacaaacaggcccgcgccccacagaccacagcaaaaaaaaaaaaacaggaccacacagcagcacccccgcccggccccacgagaggccaagaccagccacacagcagaaacaccaccaaagcagcccgcacaaggacagaccaccaagcccccccaaagcgccgccagagaccccgaaacccaccgaaacacaaagggagaagaaaaggccgccaaccccagccacccagaacccacaccacaggaggcaagcgaggaggccggccaggcacgacagaccgggagcggggccaggacaaacccgggccggagccaggaggagcaaaccacagcccaggacgagcccagggccccagacagcaagaaagggcaaggaacagcagacaggaaccgagggaaacgcaagacgagggaaaagagggcagggggaagagcaaaagcccggaaaaaaaccaccaaaagggaacgaaaaagaggcagaagagccaaggggaaggccagaggggagaaagagcaaaaacggaacgagaaaaaagagggaaccaagggaggggcagaaacccagaggggaaaaggagggcgccggagaacacgcgcccagcaaggagaacacacccccagacgccccagggcgacgcacaaggacgcagcccagagccgagacacgaaccccccggaccccaggccgccccgccgcagggcccgcaagcaacagccgccccacccccccccaccaggccagacacaagcccacacgggggcgggcgccccccaggagcgcagcccccccgcaagcaccagcggcagccgggcccaagcccagagggagcccaggcaaggcgcccgacagagcgcagcaacgacggagagaaacggggcaaacaaaggacacaagggcagggccccagaagcacggcgaccaccaaaaaaccaagacccaggggcccgccggaagaccgaggcaacaaagcaccggaaacaaaggaagaagccaaagaaggcacagaggagaagaaggaacacaagaaacacaaaaacacccaccgcccacccccccgcgaacaggcgaaccagaggaacacaaaaaaaaagcagaaaggacaggcgccacaagcacccaagcaccagcaaggaaggaggacccggacagacccaggcagcgcgaggcaggaggcccagaagagacggcaaggaaaccaccccccacccgagggaggggaaagcaccaaacaggacccaaaggcccaaagaggcagcaaagccaagagggggaggaagggaggccgaacacgcgccgcagcaagagagccaacgcgaacagaaagagaacagcagacacagaaacaggaagcaggaacagccaaaaacccccccccgaagacacaaacaaagaccagaaaaaacaaacaaacaaaacaaaacaaaaaagaagaaaaaagaaaggccagcggcaccccagacaaaacaaaaggggaggggaagagaccaccagcgacgggnnnnnnnnnnnnnnnnnnnnnnnnnnnnnnnnnnnnnnnnnnnnnnnnnnnnnnnnnnnnnnnnnnnnnnnnnnnnnnnnnnnnnnnnnnnnnnnnnnnnnnnnnnnnnnnnnnnnnnnnnnnnnnnnnnnnnnnnnnnnnnnnnnnnnnnnnnnnnnnnnnnnnnnnnnnnnnnnnnnnnnnnnnnnnnnnnnnnnnnnnnnnnnnnnnnnnnnnnnnnnnnnnnnnnnnnnnnnnnnnnnnnnnnnnnnnnnnnnnnnnnnnnnnnnnnnnnnnnnnnnnnnnnnnnnnnnnnnnnnnnnnnnnnnnnnnnnnnnnnnnnnnnnnnnnnnnnnnnnnnnnnnnnnnnnnnnnnnnnnnnnnnnnnnaggaaaccaggacaccagggagagagggaagcgggagaaggcagaacccacaccagcccagcccccgcccaggaaagggcaaccccgccccagagcaaccccagccacggcccaccccccaagcgcaacccaaacagcccagcgggggacccccaccccgaccaaaaaagaccgcaccaaacgaagcacgagaacgaagaaacagggagggcggagagaagcaaacggcccaaagcggacccagaggacaagcgggcaaaccacgaaaaacacggaaaaaaagggaaccaaacggagggacaaggagaggggagaaccggggcagggagaaggagggggggggaccaggaggagaaggaggagggagaggggagaagaggaagccccaagagaagagaggaccggagcagggccaggagaaacagcaagacggggaaccccgggaaggagccaggccagcagcaaaagagagaaaggggacccccagaaacaacgccaagaaaaaaccaagcggagccaaggagcagggggaaagcaaacggggacacacacgaaagcagcaacgacaggaccccggaaaggggagacaccccccccccaagggacaacccaagagagagccacgccaagggccagcggacagcggaagggggagcacacagcaaacacacacacacacacacacacacacacacacacacacacacacaccaggacggacccagcccaaagccccccccaccaaagcaggccgcccacccccacccccaccgacacccaggcagcgcgggaacagcgcccacccggggcaaaaaacacaaaacacagccgagccgcaaccagaaacaagaaccccaagggggaacccgacccaaacacaagaaacacaaagaacccgaaaacccccagaacgacaaccacaacacagaaagacgacaaaggcaaccacggaaaaacgcagagagaggccagggaaagcacgaccccccagagaacccaggcaacccaggcgcagggacagagcgaaccggccaaggacaagccccggcccgggcacgaagcaggggcacacacagaaaaaaacacggacaaaaacaaaaagaaccagaaaaacgaagcacccagcaccaaagaacacaaaggaagagggaccacacgaaaccagggggaaaaaagaccaggaggcggaaagaggccagcaggaagagcacagcgcccagaggccagagcaaccagcaagcacaggggccaaacacgaagggaccgagcccccggggcgagacagcaacaggaccacaaaggaaaaaaaaacaaaaaagaaaaaagaacacaaccgaggcaggaaacaaacggacgagaaaacaaaggacaaaaaaaggagaaacaaacaaaacacccccggaagggaaaaaacaagggaagaggggggaagcaaagaaagcgaaagaaacaagggaggccagaaagaaacaggagcaccaaaaacaaacaaacaaaaaaacaaaacaagacagaagaggccgaggggaaagggcgccacaggagcccgagaacagagcggggacccaggaggggcccagacaggcagagggaaaaaccagagcggcaggaggaagacaggcgcccagagcaagcggcggcggaaacaaaagaggagccgccaggccaaggagcaacagccccacagaacaaggaaaacgcaagaaccagcccaagcaggcccgggccgaggaacacacacgcccgcacacaccgcagcacaccacacacgcaaacagcacacacggagcagccaacacgggacacacccaaaaaaagaaaaaaaaaagagacagccagagccacaggcaggaaaacaacccccgcccaggaacacaagccaacagggacccccggcacgcccaggaaaaccgaggcagacacccaaggcacaggacacgggaaaggaaaaaaaaaaaaaaaagcgcggggggcgagggaggccaagacggacgcacgggccaacaccagcagcgaccgccaccagccccaccccagacacagggcaaggccaggcacaccgacgccaagacgccaggcaccaaaccaaggacagcaacaagccagaaccggagggcacaacgcaaaccaaggggagagcgcccaagcggccagacacaggagaccacacccaaccaagccaaacaacgagagacagagagacagagacagacagagagagacaaagaaagacagagagagacagagagagagacagagagagacggaaagaaaaaagcacgcccgcggagagaaacacacgggcccacacgcccagacacccagaccacccaaagcgggagagcccaagcaggaaaggcgggccagaagagaacaccaaagccccagaagacgcgagcccagggggccccacccacaagggcggggcccccccaccaacacaaaaagaaagcccgaagggccacaacagaccgaccccccccccccccccccccccccccccccccccccggcccccccccccccccccgccccccgcccccccccccccccccgcccccccccccacccgcccaccccccannnnnnnnnnnnnnnnnnnnnnnnnnnnnnnnnnnnnnnnnnnnnnnnnnnnnnnnnnnnnnnnnnnnnnnnnnnnnnnnnnnnnnnnnnnnnnnnnnnncccccccccccccccacccccaggaaccagacaaaaaagaccacaagaaaaaaagagacaaaaacaggccccaccacgccaggcacagggaaggcgcccaggcccaccgcagggagaggcacgcacaggcaggcgagagcagggacaaccccagggaagaacggaggggcccacaaagaagcgccccagcgcggggggggaaaagacacccagccaggcgcaggggagaacagccaaagcagagggcaagacaaaacaggccccggagacgagcggccagccggcaaaacagaaaaccccgccaaaagagggggcaggaggggggaagggggagacgacaacagggcgaggacagaccaacccaaggacagaagcgcaggaaaaagaggagaagacaggaaacagacagaagcccgggaaaaaaccccgaacaggacaagagcagcagaccgggaccagcagcagcaaacagggcaaaacaagccacgggcaagaaaccgcaggagccaggggccccaacaagacaagcacaacaaaccaacagcaggcgcagagaggccagcaaaagaggccaacgacccagaaggcggagcaaacccagcaaccacagaggccacaaccacgaaggggcgagcccccggggcgaaggcagcacaggacacaaaacaaagaaagacaaaaaaaaaaaaaccaacagcagcacccccaagaaaggccagccgcccccgagaaggcacgggggccacgggaaaaacagccaaggcagaaggccggacacgacccacgggagaaaagaaaacgaggccacgacgcgggcgccagaccagccgggaaacggaggccccccagaggaaagccagcgcgagccacacacagccacgcaccgaacgaacaaagggcggcacacacgccaccgggggcacacaccccacgggccgagcaggcagagaacagccgggggacaggaccaccgagccagaggacaaaaacccagggacaacaagcccggggccaggccccgagccacgccagcccgaaccaaaaacaaagaaagacggagcccgggggacgcggcgagaaacaccacaccaaaaacaccgggggacaaaaagaggcagcccacacaggacagaaggaagccggacaggaaccggagacaggagcgagcaggggccagggggggggggggcaagacacaccccaagccccagccggcaagaaacccacaagagcgggccccccccaaagcacaaaagacaagcccacaggcgcaacaacacaggaggcaccaacgaggccccccagaccacaaggacaaaaacagccagcacaacgaccccgcagcgacacaccaacacaacagaagccacaccccccccccacccaaaacacaagaaacaacacaaaaaaagcacacaaaagaaaaggccacagcccacaaaaaccccccccccccccccccccccccccccccccggcgagacagggccgaagcccggcgccggaaccacgagaccaggggcccgaaccagaaaccaccgcccgcccccaaggcgggaaaaggggcgccaccaccaccggcaaccaaaggccaaaaaaaagaaacccccaacggagccccaaaaacaagaacagcaaacaccacagagaaaagaaccagggacacacagccgcaaagcaaaaccaagcccaaacaaaaaaccaacgccaagcgggacaccaccaccgggcccccaaggggaggccacccagcggccccggcagcccacacagcaccccaagcccacaggcgcacccaaggcgcgcgcgggacacccaggacggcacccagaagcggagcacaagcaaccggggcaccaccaaagccccgggccccggagacccacagccgccgcacaggccaagcccagccccagcccagcaaccaaagccagaccaccggggaccgaaacaccaagcagggccaacagaggacaaccggccacccagaacacagccgggcggcccgaggaaacacccagaagacacacccagagcggccccaacacaacaaccgccccaggggccagcccccggcagcaaagcaaaggcacagggccggccaaacacaaccaaccagccccagaggccagacaccaagacccacacaaaggcccagaagagcgccccgaaagacaagccaggccccaccgcacgcccaacaacccaagccacagagcagccacgagccaacaccaaggccacccaaagcccgaagccccacagcccccaaaacagcaggcaaggcccaggaaccccagaccggaccagcaggcacagggccagcggagaaacaccacagccaaaaacaaccggggaggaaaggggggcgggcacacaacacaggaaggaccagggcaggaaccaaaaagggaaggaaccggaggcaggaacgagccaaggccaggaggggccccacaggcgccccagacgccaaccgccgaggcccggaccaccaagccagggagacccccacccacaagggcaggcccacccacaacacagaaagcaaaccccacagacgcaccgcggacaggagcaccaggaggccccccccaagagcggcaagaacacaaaacagccagcacaaagggggcagccccaaaggaagggggcggcacggacagcgaccgcccagagacggaagccggaccagcagcagaagaaccaccggcaccccggaaagaagcccccagacgaggaaaaagagcaacaggcaggaggcagaggagaaggaaggcggacccagcccagccagggcccaggagagaaaagaaaagaagaaccagaggaaaggaggagagagacgacgaggaaggacacgaggcggaggacaagaggagcagagagcagggagccaagagagccaccagcagagcaagccagggaaagaccaaacgaaggaaagacccaaggcgggaaagagaggggagggagaacgagaaagcccagcaagcgcaaagccaagaaacagaagccgggcagcaggagcacaagggaacagaaaggcccagcaaacagcagaacacggaacacgaacgaagcagcgacacgaaaccgcagggacacagacagacagacaggccagcaggcacaaaccagccaggagaaccgccccggcggcacaaagaaagagaagcagcaagcacacaaaggacaagagagcaacccaaggcaaaaacccacagagcggcgcggggagaggagaacagaacaagaccccacaaagagaaaaaaaagaaaggacgaggcgcgaaggacaggcacacagaaggaaccggcccacaggggccaggagaagacaaacccggaacggaggcagagggaccaccaggacgcgggaaagaaaccaggagcaagagcagaaagacccaccaccagccacgcccaccaccccaaaaaaaagagaagccaagaacggacagcacgggaagggacacagaagaacagaagcaaaaggacaaccaaaccccagcccagaaggaccaggccgagaaaagaaagaagcaccagccgggaacagaccacaagccccagaaacaggccgaagaaccagcccaggaacagacaaaaaccagaaacaaggcaaaaaccccccccaaagaacagccggagaaaccacaaaaaggggaaaacaccagaagggccacggcgggcgcccaccgccagagaagcgcaggcacaggaagcagacccgaccaccagacaagcccacagacgcgaccccggcccccccccagcaccagcacccacccaggaaagaaccaaccaccaagaagaagaagaacgagccaacagagaacaagcacgcggccccaccaacacaagagaaccaacccagagagcccggccacaccgcagggcgcggaaaaagcaccccacaccggcgcgcagaaaaacacgcgaaaacgaggggggggagggggcccccaggagggacccgagagcaaggccccaagacacagaaagaggcgaccagaacacacagacccgccaaaaagcaaaagaaaaagacaggggcaaagagcagggagaccggcccacaacgaaaagagaaaaaccacaaacccaaaagcaaaaggggccggacggcgaaagacaagaggaacaggcaacgaaggcccacgccaccacccggaaaacggacagggagaccccaggagaaagacaaacccccaccgaaaaggggcaggagggcccggggacccaacacaaggcaagagagagcgagaacgggacccggcaccccagccacaaaaacgaaagaaggaacgaaaacaaccaaccgccaggaggacacaggagcgcccgcgaaaagcgcaccacggcccagagggggcgcagagcacccacgcgcaccacaagagagcaaaaccacaggcagaacaaagaggcccccgacaagacggagaaaggggacggccgggaggccgaaaggaagaagccaaagaagaggaaagacccacgcaagagccgagcgcaccaaaggacaccaaccccccccccacccgcccacccacgcaaccacacgagggcggcacaaaaaagcccaaaagaggggggaaggaaccgagccccaggcaccggcgggccgccccgccccaggaaacgcgagaccaacggccgggccggacccgagccacgccacagagcccagaaaaagagcacaccccacgcacaccagcccgcccggggaggcgcaggcccacgcagaacaccaggaagcaacaggaacggaaccaggggggggggcc

SEQ ID NO: 608 - RNA, 2889 nt, Mus musculus
gcgcccccccaccgggaagggccggggccaggcggcccaaacccaacccccagccgaacaacaggcgaccccccacccccacccccaccccagcaaaaaggggccgagaagaagagacgcagcacacggccacagaaaaaggagcaaaaaagccaaacgagacaaaaaccgcagcgacagaagaagacggcaaaaagaacacacccacaggaagacacgcgcacacgagccacccacacagagcagcccgcacaaggaacacaggccgccgggacaggaagagcacggcccaacaggcaacagaaagagacacaaaggagcaaccagaaagagagcacagcagggcagcagaacgaggagacccagaaagcgacagggagacgagggcacacagcagcacagaaacacacaacagggggacggaccacacaggggacagcagacagagcacaaaaagaaaagagaaagaaacaacgccaacacccaaacccaaaccaaggacaggaccgaggccaaaagccgggggggaagccgaggggaagcggaccccagggccccagcagacccgacaggagcacaggcgcaagaccagggcaggcagagacaaaaaccacagggaaaggcggaaaagcaacacgcaaccccgaaggaacaacacccagaggccaagggccggaggcggcagcgaaccaaaggaagggagagaagccgagagacagagcgcagcaaaccccccaggacagagaagcagcgaccacaagcccaaggggacacaacccaccggccggacagacggggaggccccaccccccccaacaaacccaggacccggagcacggaagcagcacgcgagagggaagagacagccaggccagagagggacaggcgaagaccaaaccgggggcaaggggaggaggagcgaccggagagcacccagcgaagacagcgggagagccagcaaagcacgacccgcagggacaccaaacagacccaaaaagagagaaaggcaacaaccccaagggcagacaaaaaaaaagagaaaaaagaggaaggagaggaaacaagcaaaaaagcgaaagcaagacggcacacgacgcccaaaaacgaaacgaagccacggccaagaggggagccgcccagccaggcggcagagacaccaccccggcggaggcagcccagagcaccagggcgcgccagggacaggacccgggcagggaaggaggcgggaaaagcccgaggaaccaaagccgaaagcggcccagccgacagccaggggccagcaaaaggaggacaggccaaggagggcaagggagaagcaccggcccagcggaggaacacagacaaggaggccagagacaaaccccccggcgcccggaggaccagaaccccaaagaccgcagccaaaacacggcaacaacccgcagcccacaaacagaaccgaaaccccggccccgggcagaaccgcggggacacgcagaggcaagagaaggaaaaagcgcaagacagggacggggcacaaaccaccacagaaaggaaacacccccaggagggggcagaggcggccggcagcgaggcccgaaaagagagccagcagcccagagaggacacacacgccagcccccaaaagaacagccggagaaacaaaccccagagaggcaccgcccgcgcgcccgacaaacaggcaaccggagaccaaaagaaacaagacagaagaggggggggggggggggggggggcaagacgaaacacccagaagcagcacccaggaacccccagcagcaagcgacaccgggagaaaacgcaacacggaaaaaaagacagaagagaccaaacaagaaacgacgcgcggaccccgccggccaaagaaacacacaaagggaaaacgaacagcccagagccaacaccagcacacggaggccaagccagagaaaacccaaaaagcaggaaagaagaacagagaccacccaaccccccacccagcccaccggaacaggagcaacagacacacagacggaccccgggccgaaagcgggcaaaacgcacgggggagaaaagaagggaagcccggcgacgacgaggggggggggagagacggacaggggaagggacagcaagaggaaagcgacagaacaggacgggagagcgccagcccgaaacagggaaagggcagcacaggcaagagaccgacaacccggcagagacaagagaaacaccaaaaagacaccgccagcagaagcaaacggaagaaacacacggaccagggcacccacggagagggggccagcagccaggggggaggggggaggggaggagagggaacagggcacaaagggaaagggaaaccgaaagagccacaggccccaaacaaaggaagcacagccagggaaggcaaacaggcaccggcagagccgacagaacacgaaggcaccgaggaagaacagggaaaagccgaagaaggagacacaaaggagaaacaacagggggcagagaggcccacggaagccggaaacaaccagagagaagccccaggagcaaccagcggaacgacaaggaacacggaccccccgggcacaccccccccccagaccaagaacgaaagaggaacgggcaaacgagccgaggagagagcagagagggcccacaccaaaggaaccagagaagcacagaccaaaggcagcacgagaaaaaggaagagaggaaggggaccaggaacagccaggggcacccaaggcgcaacgcagggccggggcggacacccgggagaaacaaggccgaacgagaagcacaaaaccaggggggggcaaggcaacaggacaaggccaaccagagagccccaagccaaccccacccccagagacgcaccggagaaaaaaagaaccacccaagagg

SEQ ID NO: 609 - RNA, 5587 nt, Mus musculus
ggggcgaggcagggcgcgggcacaccaagagggagaaccagcaaggcgagcgaccggggcaagagagggcgcgccccagcccaaagccggggggcgcggaagcacggaggagagagcaagaagcagagagacaaggcacgaggaagcgccgggacgggaaggaacaacaggccccacccacccggggcacaaggaagggacccagggggccgggcggacccccagaaaagccccccaaaggcagcgcacgcccaggccaacccagagaggcaagaaggaagcgcgacaaacacggagggcgccggggggccgggggcgaggcggcccccggaggcccccaaccaccacgagcaaagaggagggaaggcaagcaaggcacagggcccgcccaccaccaccagcccagccaccacagagcagggagcaaggagcaccagggcacccaccagcggccccccgaagcacgccccccccggcgacccggacgcagggagccagggcggggacagcaagcagacaggggggcccacagcaggcgggaggagaaaccagaagccgcgcagcccggaaaaaaagagggcgggacccgacaaggaggacacacaccccaggggacccaccacgaaaaagggacgccgcagaggcgggaggagacaccagagccgggccccaccaaacagcccgacaagacgaagacaggccagaggccgagcaaaacgaaccgacccaccccccccgccgggaacggaaacagagccgagaagacaaacaaccaaaagagacacagggacacagcacagcacagccgaggcccagggcacgggacaccacggaaacaaggcagggaaaggacgcaaagaaaggaggaaaaaaaaagaaacagagccacacgcagagcaacaggaccaaccagaaaggaaggaaaggaaagaaaaagcaggccgggcagggggacacaccaacccagaacgggaggcagaggcaggcagaccgaggaggccagccgacacaaaggagccaggacagccagggcacacagagaaacccgccaagcccccccccccaaaagcaagacaagagacaaaccgggaaaagaagaaaggaaaagggaacaaaacaggggacaaagagaggaaaaagcagaaagaaagagggcacaacacaagagagccggccggaaaaggaaagaaagacagaagcaaaaacaacagaaaacaagccaaaacaccgggaccaggagggcacgggcaaggcagaagcagaaagcagcagaacgccaagaaggggaaccgagccggccacgccggcagcgcccagcaaacagagccacgggaaaagcaagagccgaccggagccgagccggagaaaaagcaaaaggaaagaaaaagaaaggcaaaaaaaggccagaggccgggaaaggggaagcgaaacggaagaacaagaacgacgggaggggaggaggcaacaaacaagcccacgcaggagacaaaaaagacagggcaagaaaaagggagagaggggcacgagggagagagagagagaggagagcagagggggagagggggaggaaagagagagaagggagaggaggagagagagagggaggagagagagggggaggggagggaaaaagaagaacacacagaggaggcagagagagagagagagagagagagagagagagagagagagagaaaacacaacaaggcaaaacgccgcaggaccgaaaaggcagcgaagggcccaaaccccgcccaggaaacagaccgggaggcggacccgaaaccaggaggaggcaagggacaggacgggaccaggcgaggaagcgagggacacagcacacgccccggcgacccacaacaaggaggaggcccgaaccccgagccgccgccgggcgggaggaagcagaccaaccggcggaccaagacgagcccagcagggcacaagagaaggcagcaagccacaagacagccaaaagaccaaccaaccaacaaccaagaaacaaaaaacaaacggaacagaaggagggaggaggcaaaagaagacaggggggcaaccagcagagcacaaaccagccaggggacggcaccgcaccagcacaacacggacaaaaacaacaacacacaaacagacaagcacaaaaacaaaaaacaaacacacggggaaaagaaagcgaggcagggagagggcaacaacaaccccagcacccagaggcagaggcaggcggaccgcaggaggcaccccgcacacagcaagccagggcacacagagaaaccgaagacaaaccaaaacaaaaaaaaaagaaagaaaagaaaagccaggggcagcggagaagaggcaccagcaacccaggcggccacaaacccaccaaaagcagcccccagccccgagagcgagacaagaaaaccaccagaggaaagaaagcaccaaaagcaaaaagagagggaagaacaccgacgaagacaaaggaccaaaaccagaaaagaaaaaaaaaagaaaagaggggggggggccagggaagagcacgacgccccagaggccgagcaacccaggaaccacaggagccacaaccacgaagggaccgagccccaagggcgaagaagcacaggaccaaacaaaaaaaaaaaaaacaaaaaaaagaaaagagggagaacagcgacacagaaaaggaaggccggccagaagccacaaggcaacaggaagagaaagcgagggcagagggacagccagcagcaggagacaggcacccccagaggcccgggcgggcccagacccaagcgcaggggacgagacccgaaggacccacagggaacacccccagcccccacaaacaaacaaaaagaaaaaaacaaagaaaaacaacggaaagacagagcgggggggcgcagcgccacacgagacagaaggacagcagggcaacaccacagagcgaccaaaaaccaccgagcccaggcgcagccaaaccagggaccaccgggcagggggcacacaccaaacccagcacgggaggcagaggcaggcggacgagcgaggcagggcacaaagaaccaggacagccagggcacacagagaaacccgccgaaaaacaaaaaacaaaaaacaaaacaaaaccagggacccacccagcccgaacgggaaaggcgagacagcgggcagggcgcaggaaggacagccgagccacaaggagacccgcaagaggagagaaaaagggggggggggagcgaggccgccaaaaacaggaaagccagcgcacgaagcagaggaggcaagacaagggcaagcacggcccccgccaccacacacagaggaccagggagggccaaaagagacgggaaaccccaacggcaaaggggcaagagggaacacaagaacggcaaagccaaaaacgaacaccacagcagggccgacccagaaagcccgcacaggcacagggccccccccccccccccccccccccccccccccccccccccccccaagcacacaccacacacgagccgaaaaaccagcaccaaaaggcaggaagacgaacgggaggggccaacgggcacaaagaccacccgcccgaaaaaggaaaaaaaaaaagggggcaggggcgcacaccaacccagcaccgggaggcagaggcggcggacgagcgaggccagccggcacaaaggagccaggacagccagggcaacagagagacccgccgaaaaaccaaaaaaaaaacaaaaaggaaaaaacccaaaagaaaaaaaaaaggcaaaaacgaaagaaaaaaaaaagaagcagggagaccgggggagcagggaggcacgaggagaaggaagacagaaaaggaagggggggcaaaagacaaacagagccgggaagaccgccagcaggaaaggccggcgggcaagcccggaacagcacaacaacaaccgcaacagcaagaaaaaaccagaggaaagacggggcagacgagggaaggagaaggcacagcagagaaccgaggaaacagaaaaaaaacaaagggaagcaaaccacagaagacgagagggagaagggaaggggaggaagccagcggaagcacacgccccaaaaggccccaccagggcccccggcccaggaggagaccaaagcggcagggggccagaggaagccgaagcccgagccgggagcacccccaacgagcgagcgcaggaaggggaagacccagccagcccccccagaggaggaaggcgaccccccagcagcggcagcgagcaccagaagaacggcagcggagagagaccgccaggacggcaccaggaccccagacccggcacacagccggccagcaaacccgggcaggaagaaacccagccccgagacaccagcggggcaaagaaagagggcaagggccacacaaccgagcggaagcccccccaggccccccgacacacaagccagaccacagcaaaaaaagccggcgccccgcaggcaggcggagggcaccggaagaaagacggaggccagggccggggacagcccccgaaaaaggaagggaggggaagagaagaggaggaacgaaaacaacaccccgagccggaccaaaggaaaaaaaaggacgggcaggggcagcagaggcccagagccaggcgaggagaggaacggaccgggaccaggagcaaggggggagggcgcagccggggaggacaagcggggagcacagagggaagagccagcgaggcggggccggaggcagggccagggagaggcacaccgggaccggaggccccgaaccaacgagcagggacaaaacagcgaggagaggacacgaagacaaggcccggagcccacacaaccacaaaccagcagcccaaccaggcccagggcgagggacaagcggagccccacagccaagaaaaggggcgaaaccccacgaagcagagccacacaacgagaaaaaacacaaaacgcaccaccccaagaagagacagacaaacaagaacaggggcagaggagccgccaacccagcacgggagacagcggcaggcagaccggaaggaggcagccgacacagagggagcaggcaacagagcaaaagaagaccccccccacacccaaagaagacaggcaaagagacaaaaaaagaacaaaggcaaagaaagaacaagacggggcaggggggcagccagcccaacacgagaggcagagacagggagagaggccagcaggcacagagccgccaggaaaccagacaccagagaaagccgaaaacaaacaaacaaacaaacaaacaccaaagaaacaaacagagggcaaaagagacaagacaaaaacagcgggcaggggaccaccgaccagcaccaggaggagaagcaggaagacagagaagccagccggcacacagagaagaggagaggagaggaggagaggagaggagagagggagagaagagggagagggagaggaaggggaggagaagagaggggagggagaggagagagaaaggggagaggagggaaggggaggggaggggaggggaggggaggaaaggggaggggagaggaggagaggaggaggagagcaagagccaggaggacagggaaagcgacaccaagggaggaaggggaggcca

SEQ ID NO: 610 - RNA, 357 nt, Mus musculus
ggagccaggacgaaaccccagagaccaggaaggcaccaaaggacaaggggggagggccagccccgggggggccacaggagggagcgggcaaagacagcaggcgagcaagcccggggaagcaagccagaagaacacccccaggcccgcacggcccgcccgaccgcgagccagccgacccgggagaacagcagaggaaggaagccgaaaaacccccccccaacgccggcagagggcaggaacagaaacccgacaagacaccacaaaagacaagccgaaaggaaaaccacaaaagacaaagacaggccgggggcaacaccgcggggacagaagacacaaagcacagaagccagccgagac

SEQ ID NO: 611 - RNA, 724 nt, Mus musculus
cgcacccgaaaccgaacaagccggaacccggaagcgggagaaccgaacgaggcgacggaagccagcaggaccgaggcgaacggcagagcgaaaaaaaaaaggcccgaccgaaaccccccaaacaacgagaaaaccaagagacaacgaagaagcaaaaaaaaagaacagagacgcggaccaagccaggccccccaaacagacacaaaaaacagggaaaaaggcaaagaacaccagcagccccagcccgggcggcgaggcaaagcacccgaagccgggcaaagaacacgcaccaagccagaggagaacagcaaagacaggggacagacaaggaagcagcccagaaggcgccagccggcggccccacacgccacacagagcagaaagcggaccacaggacagcaaagggcacgccagaccagcaccaggccaggaaaacaacaggaaggaaaagaaacaagaacaaaacggaggaagagacaacaaaacgaggaggcaggggagaggaaaaaaaaacccacgaagagaaagacccccgaacaaaggaaaacaaaaaaaagggaagaaggggaggaaagacacagaaaaaagaacaaagaggaacaagaaaaacgccgacacagccgaacagcgggagaagagagagggaggcagggaagacaaccggaaggaaagggggggagagcacggccacagagccgacgcgacagggcagacaagaggcccc

SEQ ID NO: 612 - RNA, 1123 nt, Mus musculus
aagacagccacacccgccccgggcaaacaaaacccagacaaacgagcagaagagaggaggaggagcgcgaggaccggggcaggcaggagggggggggggcagagagggaggaagcgccggggagaaaaggagggacgagcagagagagacgacggagagcagaggcaagggccaagagggagacagaggaagggacagaggggaggccaggaccccaagggaacccgggaaagaagcagcagacccagcgggaccgcggagagacccaggacgggcccaggcggaaggccccggcccgggcaaacaaaggggcacccagacccaggcagccccggccgggccccccccgggggacagcagggccgcgaccgagcagaagcaagcggaaaagggccaggccgagggaaagcagggccccaggggagcacagcacaggggcggagcccccacgcacggcacagagcgaccacagggcaccacgcagccccagagccgaccacaggacgaaccccagcggggccggggagacccggagcgggccccggcccccggccagagcaaagcagcccaggcacgggcagaggacacagaggggggcgaccgcggggacaaccagagccaggcccagggggggcccgcccagcggcagcggggcggacacggacacgcaaggcgcgcgagggacaggagccccggcaggcagaagagggaggcccggcaaccacagcgaccgaggagaaccgaccagggaaggacagaggacaccggcagccccgaagaggccgaccaggcggccgaccggccccggccaagggacccagagacccacgggcacccggaaagccgcggggacccgcagaagagagccggagggcagggaggagagaggacagaccaaccggggcccaacaggcgcaccagccagccgagccgccagggcaagaagccgaggccagcggagccacccgccccccagggacccccgagccgcccaccaccaccgccaggcgccaaccaccgcgccggccgggcagagacggcggcgggagaacacgccaagacgacagggcccaagggagagggacaaaccgggggagggcaggaaccaggggccccggggggc

SEQ ID NO: 613 - RNA, 702 nt, Mus musculus
aaccagaggaggaaagcacacacagggcccagggagccagcagggagcgcagagaacggccccaggcagcgcacaacaaagaagggagggaaaagaaacacccaaacaagagaagaagcaggccaccagccaccggcagacagaacggcagagaccaccagccccagcgggaccaaacaacccagcacaaaacaagcaccccaacgagccaccccacccgagcgaccaaaagcggaccagcacccaccaaaaacacacgcaaaaaaaaaaaaagcacacaccccacaacacagaggccagcaccacaaagacaggaagaaaacaaaaggagggggaaaaaagcaaacaccacagaaacaacaggcaaaaaaaaagcaaagaaaagaacagagaagacagcagccacaaacagaaaaaaaaaagaggaaaagagggagaaagacaaagaaacaaagacaaaaccaaaaaaaagcagaaagacaaaaaagccaccacaaagaaacaagccgaaaaaccccgggagccaaaacaacacaccccccaaagcccaacaacaaacaacaaacgaggccagacaccacaggcacgggaaacaacaagcaggaaacagagcacaaaagaggggaccgagcccccgcaaccccacacggaaagccccccagcagggggagccccagcgagccacccccgcggacccaacac

SEQ ID NO: 614 - RNA, 11696 nt, Mus musculus
gacgggggaacccagaaaaaagaaaagaaaagcgcaaagcccaagagacaccccggccagaaaaccccagcgggaaaagccaaaaaggcagagcggggacgaggcccaagcgcaaaccagcgggagcaggagcaaaaagaaggaaaaaagagacggccacacagaccagcggacgacaaccgcagcgcgcggcaccagagcacgcaccggcacagcccggggaaaggcccccacaagaaagaaacagccagacaaacgaggcgccccgaggggcacagcccagcaccaagacgcaggacgcccccaaggcgaagcacaccccagacgggagccgaccacggacagggcacaccaggcaaagcaccaaaaacacgcaacaaaagcaaaagcgggcggaccacccgccaccagaaggagcgcggacaacggcaacccacagccacgaagcccccgcgccggggcacaagcacagcgaagagggcacggccacccacgaccgcacgcaccaggagaggggcaccagggcagcacccgggggagaaggggagccccgacgcacccagccgaggaaagcaaaaacccccacccagccaaagccaaaacaaacaaaagacaaaaaaaagaaaaaaaaaaccagcacgcccaaaagaaaaaaaaaagccagaaaccaggacagcaccagcagaaccgggaaaaagacgcaaaaacaaaagaaaaaaccaaaggagggcaagaggccaggggagagcaacacaccaaagccgacgagcgagccaagcccagaccccacgggggaagaagagaaccacacagcggcaggaaacccagagcaccaacacaaggagcaggacacgggggaaggaagcaacgcaggggggacacaagcacaccggggcagacacggggcaaaaccccacaggccgacaacccagaagccagaaccgacccagcggagcaaggcacccaagaggaagagggggggcaaggcaagagagcaccgggcacacaaggaaacaagcacaaaacagcggagccgccggcaccagagacggaggaaggccgagaaagagaaaaaagaaagaacacaacaccccgagagccaggaggagggggagagcggcggcacacacgccggcggaggggacaacgggcgcgcgccagacgcggacggaaaaagacccgaaggaagagaaggggaaggcgacccccgggcacaaccacacgacaggaggagggcaggaaccaagggaacgaaggaggacccgcacggccggcaccacgccccaagcaggaaaccgcccagccaaggaagacagaaggaaccgccggaaccacgcgcggcgcccccaggcacagcggcgccaaaagccaaacccaggcccaccgcgccccagcgggagaccccccgcacaaagcagcaaggcaaccccacacaggcccacagggcagcggacaggaaccccagcccgccaggccaccggcaggaaccagacacaagaccacccagcacacgcgaagcgccgggaggcagcagggccaccaagcacagggcacaagaagcaaaggccaacaaagacaaagaacccagagccaacacccagcaagagcggggaaagccaaagcaacaagcccccccgccggcagaacaaaaaaaaacccaggccgggacggagaaacagccacagccaagcgcacggccccgagaggacaagagcccagcacccacaggacggcacaacgcgaacccagccagaggacccacaccccacgcagacaacagcaggcaaaacaccaagacgggagaaaaaaaaaaaacaaaaaaaaaaaaaccccagcccagcacaaaaaaaaaaaggggaaaacaaccaccacaaagcgaccagaagaagaacaaaaacaaaaaccaccagaacgggggagcagacagcagagccaccgggacgcagacgacgcccccacgagggaagagggggaagccccgggaccccagcccggcggcaggcagggagagccagggcccccacggccggggggagggaacgccgggcagcgcagcacaaagacggcgggaacaacaaggcgacaagagagccagacccaagagaaaagggcacaacccaacgacacaggaaaaccaggggagcggagcggggcccagccaccacagccggcaccgcgagagccaaaaaccaagcagaacacggccacagacaacagacccccacgggcggagaaaggggacaagaagccccgacccccagagacagaacaaggcacaggggacagccacaagcgagggacaccggcaggcagccaacgacccaggccaggacaaagggccaaacccacacagaaggacgaagcccagaggcccccccgggaagccacacagaaccaggacggcgaaaagagggcacgcggcaggggaaggagcacagaaggcagagcagcagggcccagaagaaggcaggccccgaagcgagcacaggcgcagacgcccaacaggggagggaaccaaacccagcccgaaagaaggccagccaacccgcgccaccccagccccagcacggcaccggaaagagccccgagcggagagaccaaagacagggggaaagaggagaaggaggcagccaccggcacagaggagggagggcccggaggagacaggcaccgcagagaagacaagaggaaaaaacagaagacacagcagaagagagcaccagcccagcagcagaggccagggaaccccgaggagcccggaccccccccaggcaccacaggccggaggaggagcagcaccaggggcaccccagcaccgaaggagaccgcgaccgagcaacagacacagaccccccagaggaagccaacacaaaggcaggcccaggcgggacaaaacccacaggccgggaaggaaacccccggacaagacagagcaggacaccaagccagagagcggaggcaggccagacaagcccaccgcgccccaagaaccggcgggggcagagggccaccaccggcagcagcgcgcagcagcagggagcggaaggcaggcgcccaacagccaccaaccaacgccagacaggaagccagcacgagacaaaccaggaacccacacaaaagagggcgcacccggggggggggggggggggggaggcacgggccacacgcaccacaacagcgcagaaagggcgggcacccaagaacacacccggcccacgcggaaaagccccgcacgccaaggaaaaccgaaggagggagaggcggacagccggaaaggcaagaaacccacagccaaggaagggagaaccaagcaagaccacagaaccgaagcccacgaccggagcaaaagccagggcccgaggaggggccagcaagccaaagcaacaacagaaagggggcgccacagcacccagcgagcccgcgccaacagagggacggacgcagccccggcacaggccccaggagcgaggcacacacaccaagaaacggcagaagaacggacacacccaaacaggacagcccacacacagcacagaacgacagaccagaagcagaccacccaaaacaaaccgacagcacaacaggacagacaacacaacaaacgaggaggcacgcaacacacacacaaaacaaacaagcgacagcaacaccaaacaacaacaaggagaacgacaaacaaaggcaaacacagcagggcacaacccgacaacacacagaacgaaacaacacaacgaacaacaacaaaccccccccccaagagccacacaagggccaacccgaagcggaccaaacagcaggggccaccaaccaaaaaacaacacacaaggaagcacgaaaaaaaaaggaaaaaaaacaaaaaaaaaaagagaagaagcggaaagccaggcgcagaacacgagaccaaacgaccgaacagagaaaccaccgcccgcccgaagcgggaaaagacccagcacggccacaggacggcaggaggggcaaggcggcccgcgagagggccaacgaacagagacaaaggaagccagaaaaaaagccccgccgggcccccggagcccccgcccacccgcgagcacaccaggggaccagccaccgagccgcccccggcagccagccgccaagcccgccccacgcaaggaacaacccacaccaggaacacaaacaccccacagaccggaaaacccacacagcggaaccccccagggcaggacgccaccgagggagaaaccgcgggggacaggcaggcccccaaagacacgggaagcggccaagggaggcacaaggagggggccgggagagggggccgggaggaagggcacggggagggcaaggaagaccccacaagaagaaggcccaggagacacagcccccggccgggacaggaaagaacccagccccccaggccagcgccgcagcgccagcgccagaaaaggacaaaccacaacaaggaagccagcccaaaaaggcaaaggggcgggcagggcccaagcaacagaccaacaagacacccccaacgcaaagcagcggcacaggaggagagcaaaccgcgagcaaggcccgaagccccccgaaggaagcagcccggccgcgacccagggaaccaccagccgaggcacagcaacaacggcgagggggccggggcggcgggcggcgaagccacagacgacgggagggacacaaaaggccgcaaccaaggcccaaaccgaggacacgcccgcgccggagccaaagccagccagccgacccagccgaacgcccggcccccggacccccccgggaagcaaagagacagacagaacggggcccaggaccagcaggaccgacacgggaagaagggaagcagagagagaaaacgaggccaaccccccaccgagacccaccgcccggccagagccaaagagacaaaacaagaaaagaaaccaagaaacaaacccccaagggccagcaaacccgaaggcaagaacgacccgcccaagaagccgcaacaggaaacacgggagagggagcggaacccaccccgcaccgcaccggggcacaaaagcaagcaggagcagccaaagagaagcgcaccccgccccgccccgcagggacaccgccacagagaagcacgccggaaacgcaagcgaagaggaccgccacagcccacaccgcccgagagcaggaaccgggcagcgcggagcaaagcggccgggccaagccgccaaaacacacaaagaaagaacgcacagacgaaggagccgaaacgcaggaaaaaacaaaaaccagagaaaaggcccacgagccaaggagcgccgagaccgaggaaaggcagcaaaaccgacgccccccaccccaccccccccaccagggcagaccgaagcccccaccaagcgagagaaagcaggacccagcccacggaggcaccaccgaaacgccagacccaaaaaaaaacaggacacccagagacaaagcaccccgagaaacacaaaagccgcaacacaaaggagcaaaacgagggaccaacaagaggaaagaaacacgcaaaagaaacaaaggaagcgaagaagaaacgggcgaggggggggaccgaaccgcagaaacagaaaaacagagaccgagagacaaagaagaagcacagagaaggaggcggcaaggaaaaacacaaagcacggccaaggcgcaaaaacaagcagagcaggaaaaaaaaaaaaccgacaggggcaaaagagcaaaaaaccacccaaacacaaaagaagccgaaaaacagcacgaagacacccaaacaagaaagcccacagaaaacgaagcaaaaagagaaggaagaagaacaaagaaggaaagaaaaaacacacacacaagccagggggcaggaggacaaccggagaggcagccgccaccggggccggggaggaacagcagcaagcaccagcccacgagccacccacggcccaaaacaccaaggaaagaccaacgcacacacaacagcacacacacaagccaaccacgagaggaagcagcacagaagccagagccacaaaaaaacaaacaaacagaaacaagacaacaacaagaaaaaaaggagaaaccaagaacaacaccaccaaaagcgaaagaccaaaagagccgcaggaacaagaacagcgccaccaccacgccggccggggaccgcgcacaccacagaaggcccaggaaggcaccaagagaaagaaggcagaccacaaccccagccacaaccccacccacagagcacgggccagccacgggccggggacccccggcccaccaaacaaaccacagaccagacagggccaaaagcacccaccccgcagccagcggggacccgggccacccacccggagagcggcgggaggggggcacccacccgcagcaagagccgccccccaggaagggcggacgaccgcccgacccgaggcccaggccccaagcgaccacagcccaccgcaccccacaccaccaccacaaacagcgggcaaccgggacaagccggcccaggacccgcgagcagggaccccaccccgaggcagagagggccaggggacagcccagggaaggagcaggggaccggaggagccagcgcccagcccgggacacggaccgcaggccgccccacaacccccaagggagagcccccaccagcaaggacccccaaccacaacagacaccggaccgcccccaccccagccgccccaaagacacaagagcaacgccaccaaaaaaaggacccagacaccccacccaccagccaaggaaccgcagccccccccaggaagcgaagccgaacaggcccccccagcccccccccccccaaccaccaaccaacccaggaaacgccggccaaagccgaggccagaaaaccccgaccaaccacaagcccaccgcacggacacagacccaaccgcaaaccacacggacccccggcgaccacgaaagaccacccccaaaacccaaaaggggcagaaaggacggaaagaccagagaaagcgaggacccggaacacgcccgggccccgcccacgcgaagccaccccgaagggccggcccgcccacccagccggacccccgcccgcccaccccacaaaggccccaagaggccaccagggacccgcgccccaccagccccccccggaggcgcgacgccaggacacggaacaggggcacccaccgggacaaaaccgccacaaccagaaaacgcgccgaccccccccagcccccacccagaaccgacaagcaggcaccccgacgaacccacgcccacaaccgccacacgcgcccccacaaaaccaaacaccccaagggaggccggccccccgggagcagaggccccgacaaagaggccaccagaacgccaccgccccacccagacagccacacacccgcccagaaggccccaggaccaaaggagcaaaagccagcccccagaacaccccggcggggacccgccccgacaacccgcaacccccaccccccagcacgcaccaccggcccgcagcccagaagcgggggcccccgacggaaagcgagagccccccgaggagacccacaagaccaacccgccccagaacagggacagaggggcccgggcaacaaaaacaaaacagaccagcggcgaaaaacacgccacggacacaggacacagcgccagaaacaacaaacaacaaccagggcgccacggcgcaaagggaaccaaagaaaagcacaaaacccaggcccaaagagcaggaccgcaggcccagaacccacaggaaagacccaacacgggcagggaccccacacagccagcgcggaaggcaaccaaacagccacaaacaacaaagagcagaaaaaaggacacagaaccgacacaggggaaggacaccaaccaagacacgaaggggaacaccggacagcgcagcccagcacaaagcaaggcggcaaaaagcccaagaaaagaaagcaagcaaggaaaggagaaccgacccaggagacaaaaccagcaaccggagaaacaaaaaaacggccggggaaagagacaaaccgcgccaaaagagccgccaaacagaggagaaaaaccacggccggccaagacgcagcgacagacccagggcccacccaccaggcacagggaggaagagaaaaggaaggaccagacagaaaacaaagacacgaacgaacaaaaccaagaagaaagcagccgcacacaaaacgcaacacacaggccaccaagggccgccagcagacgccccacggaagggcccgcaagcaggcccaacccacagccagagagaggagacggaggcaaaggccaggacacgccccagcccaggcaggcgccccccccgcagccacagccccaccaaggcccccccagcccccaccccagacgaaaaggggaccaacacacacggccacacccgaccccaacccaacagaacaggaaaaaacaaaaaacaagcaaagaacaggaaagccaagccaggggggaaacagcacccgaccagaaacccagcgccccgaacaggggccgggcacgccgcaaggagccgggccaccccggggcaccccgaggcacgaacgcgggcagccccgccccggcggccccaccgacagacacccccccgggacaggcccgagaacacccccccccaacccacccaaggaaaggaccaccgaagcagagaagacaaaaaaagaaacagcagcgaaaaaagaacacaaccaggaaaacacgcaaaccgaggcagggggcacacacgcccagccaagcccgcacccgcccagccacagcccacgggcaccccaggcggcccacccacccccacccccccaaccaccgggacccaacccccaacccccagccaggaacgaaaacgccaccccacacgcccaaaggaagcccagaccaaaacagggaacaaggagagacggcaggggcaacgacacaagcggagacacagagaaaggagccagggaggaaagccccagagacagcgaaggcaccaaaggacaagggggagggcccggggcggccaccgggcggagccgggcaaagagagcaagcgagcaagccaggggaagcaagccagaaccacacccccaggcccgcacagcccgcccgaccgcgagccagccgacccgggagaacagcaagggaaggaagcgaaaaacccccccccaacgccggcagagggcaggagagaaaccgacaagacagcgcaagacggaaaggaggacagcaggggcaccagacggggccagcaagcagaaacagagcagcacaagccaacccccacagagaagccagaaccagcgaccggggcaccaaaagggcgccaagacagaaggaagacgaccacgaacgacagagaaacaccacacccgagcccgagacccacccccaaaccaacacaaagggcaagaagaagcagagaggcgccacaggaaaagcgagcagcggacaacaaaacaaacccccacgcaccgacaaaggcagggcaggggaggggaacccccaaacgggcaggaaacaaaccaccgacagcggaacgcagaaccagaacaggcaggggaccggggagaaaagaacacggcaaagacacgcgcaggcaccacacaaaagagccggcccaccggcaccgcgccgaggaacgcccccccacagccacgcaggagggcaagaacaggcagaagggagggcgggaaccccaaccaagaacgaaggaaaacccggaagccccagcggggcgaagcaacacaggcaggaagacacagaggagccaacagagacagaacaggaacaggcaaacccaaaaacacgggcaagaccccccccccaagagaagagcggacacgagcgaagcccaccagagacaccaggcgaggccccaaagacccaggcgggggcaagagagcaggcccggggcgacagcaggcagaaggggaccggggacaggccggcagaaagagacgagagcgacaaaagagcgagggagccagcccgaccggagcaccccgcccccaggccccacaccacagaccgcacccccaaagaacacaagaaaacacgacagaaccccaaacaccagaagcaaccgaaccaagggggagacccgggcacgaccaagaacagccaagagagcaccagaggaccggcaagccccagaggcccagcacagccgccacagcggccgagcccaccacacacacgggggacccacgcccgagagaagcagacgaggaaaaaagaacccgaggaagcaccaaaaaacaaaaaaaaggccccacaaggccagacccccggccagagccgaccagcgaccagggagggacacccgagcaggccaacccaaccagaaacagggacccacaaaaaaaaagaaaagaaaacaaggacacaaaagagaaaaaaaaaaaaaaaaagcagccaaacaggggacacgccggcaggacacgaagcacacgggcaaaacaaaaggccccgacccccccccccccccagcgggaagccccccccagagccaccccacccgcagggcggggcgacgcgagccgcgcccgagaccggcagcaggaggagcccgaagccgcggcgcaaggaggcaagcaacccacagccagcagccagacccgccgccgcgagcccccacccacccagaggggacacccccagaccagacgagagagaggcgaaccaaccagagcacagcccacggaggacacaccaccgggccaccccggcccacaccgaccccaccccacccgccgacggaagccagaggacccgaaacacacgcacagcgggccccccacccacccacccgcgccggaccgaacaaccaaacagcaagaacacccaggccaagaacagacaaaccgcaaaggccgaagcccggcccaccacgcaagggcacggcaagcccaggccccgcaagcaagcccgcccagcagggccacgggcacaaacggcacccgaaggacaaaccgccccaccacccccgaggcaaaacaccccagacccacgccaggcaaaccccaagcaggcgggacccagacgccaagaggcccagcagagaagacaaagcaaaggacccacacagaaccgcgcccaggcaacgcagccccacagaaacaagagcacacccgggagagaaagggaggcgacgcaaacgagcaccccgagagggccagcgcgagcccgaccaggcaaccccagcgccccagaagagagaaacagaacaacaagacccgcgaggaggggagagacagaggggcacaggagagacaccagagggggaccagagagacggggaaaagaaaacaaggggaaaaaaacgcagccaagagaagaacagacaccgacagcgcacagagcgcaggacgcccgacacagaggcacccccccaagcacagagacagaaggccacagccagcacccaagcaaaacccagagcagccccagccggaccccagaaggccagcacgcgcaccagagacaaccacgaagaaaaggcacaacacggggacaccgaagcccaccaaaagagacaccggaaagccaggcagcgaagccgcagacaagggccaagcccccccacaggacgccagacagccggacaggcacggccaggaggcagaggaggacccccaagcaaaaagaccaaagaaaaaaacacgagagcagggcaaaacccaagcagagagaagcaagaaaagaaagaagagaga

SEQ ID NO: 615 - RNA, 2965 nt, Mus musculus
ccccaagccccaagagacccagagccaccagggcccccgggccgggaccgggcccagcaacggaggcaagccaaaagccccacagcagaacggacaaaggaagagaggggggagccaggcacgcacaacggccccacccaggccgacccagccagggccacacaccgcgccaaaaggagggacagaagagagccaggcgccagacccaagggcgagagacaggagaccagacaccgagagaaggagccaagcccgacaggagaagaagcaaaggagaagccagaggggccacaggggagcaccccggggcaaggaggaggcaccggaacagaacgcaggaaggggggggagcacggggaaggaggggagcacggggagcggggggagcagggaagaccgcggcaccacgaggggaacaaggcaaagccaggagggggaagcagagaaaagagagagagagagagagagagagagagagagagagagaacacaggcccagagaggcgagcccccgccaagggcacaggaaagaagacacaaaaccgccacagggggaaaggacaaagccccaagggccgacagggcaggccccaggcgggaagaagcccccagagggcacagaccccggagggcacgagcagggcacagcgcccaagaacaggccgccccgcggcaagggcagaaggggccgagcggaagaccaggaagccgccaggccgcagcggcggcggggccaagccaacggagcgacgccggccagcccaacgaacccagcacccagacgaacccagggcgaccagagaagggaaaccaagaaaacaaggcagaaggacgcccggaacagagacacaaggcgagggagggaggagcaggccccaaagaagcaaaacaagaccaggcagccgaagacccagggcaggaaccacccccagcccccccacgccacaccggggcaaggaggagacccacccagcgcagacggaccagcggagggcacggcgggcaggccaaacagcggaaaagagccggaggcaaccgaacaccacgcggcagagcagaaaacaagcagggagaacacgagccgggacccgggcaacccaggacccaaggggaaggagagaaccagaccgaaaacagcccacgcaggcagggcacaaaaggaaacacacagaaaaagaagcaaagggagaaaaaaagcaagaaaaaggaaaccaagaacagaaggacaaaggggggggaacacaccgagagagcgcacacagcagcaagcaagagagggcagggccgcagagccagaaagagaagaccaggaacagcggaaaacaggggagcaccaaggggggcggaaacgaacgggcccaaaagcagagccgccagcgcaacccacccagccccacagcggagcagacaaaaaccgagggggaaaaaaaaaagaggagcacaggggaagccagacaccagacaagagcccacccagggccggagacaggcgaacaaaggcggagacacaccgggggagcacaaaaggggcggaggcacacacggaacagcccacgagagcagcccacccggggaggcacccgagggggcacaaaccaaaccgaaggcgaccacccaaagcggcaggggaccaagccagacggagaaaacaaccccagacaggcagaagaacacaaagaaaggagacaagaagcgcagagcggagccggaccagggaggagaagaggaaagccagccccagagggccagccgcaacagagacacccaccgccccgcgccccccccagccccgcagagggacaccccccgaggcgggagacggcggcgcaagccaagaggaggggggaggagagaggcagcagaagaggcgcccccagaggacaggggaccagagccacaccaggcagcccaaccaccgcagcccgaaaaccggggaacaagcggccggcccaggggcaccgcacacacgggagcacacagacacaaaaaaccccgcaagaaagagggggggggggggggggggggaggggggggaaaccacccgggacccggccggggcgaagccccaaagggagcccaggcacaagcagccagagaaggcacaggacggggcaaaacgaagaaaggccagaggcgcagccgaggccaccaaaaccccgggcccaccaaagacagcccccaggagcgcgcccaccccccccagagcgggggcaggccaccgagccacaagggcgggggaaaaggagaagggaccagggcagcacgaagccacgaccccaccaaccccccgccacaccgcgcaaggaagggaacgggaacagggggacaacccccaaaacgaccagaacgcgcagaaagaggagaggagaccaagcgagcagcagcacaaggccaggggagccagcgcgcgagcagagaaagacccagaggaaggccggaaaaccccgcccccggggaggggaaagccagaagagaggccgggggaggacagagaaaccaggaaaggcagagccaggagcagcgaggaaagcccaggaacagcaaaaagaagagacaccaaagcggaagcgaaacaggaaaggcgcagccagaacggggcgcagaaggagcgccaggaggaagcacgccggaggcaagaagaggccccacaggcagaggcacgcaaggccgaacgaaggcaaagacagggggaccagaccaagccggaccggacgaagggcaccagcccgacccagggaaccggaagggagagaccgagccccaacaagagccagcccgccccccacggacaaaccccccgaaaaaaggagaaagccggccaagcagaggcagcggcccaggagaagaggggaccgaggggccgccaccaaaacaaggcccccccgggacagggagccagacgaacgcacaaggcaaaaagcggggcacccagagcgagcaggggaacacaggaaagagaacgcgc

SEQ ID NO: 616 - RNA, 2084 nt, Mus musculus
caggaggacacaaaaacacaggaagggggaaaggaacgagaacagggagccgccaaaagaggaaggacacgggggaggcaggggacgccgaagccccagagaggagcagagcaggagggcgagacacggcaccccacccccccacgggccaaggggggggcgaggggggagcggggggaacggagggggggagcccagcaagaagaagccggggcagcaggagcaggccgggagaaaaacaagaagagggggagaaagaccccccaaagggaaagaaaggggcccaggaaccagcagagcaggggcgaggagccagggcaccaagggagccggggcccagcggaagagagacaggggcccagaaacaggcgcaagcagcgcccccaggcaacgggggggcgaaccccgggagccgaacaaacagaaaacacgccccaaagccggaggccaggggaggagaggaagaagccggaaagaacaaagggaaggaccgccccggagaaggcaagcggcggcgaccgaccacgaacgagaagaccgaaccgaccccccagcccccccacaggcgggcacccccacagccaggcaagagcaaggaccaaacagaccggggcacgaccccccgggagagcagagcaccgaggccccccacgaaacccacagacccacggggcgcgcacccacggggcagacggaaggaaacaccaacaacggaaacagccacagccgggcggacgaagccaccaccccacacccgccaccagaggcgaccaacagccaggccagccgcacaggagcaaaggcaccaccgaccccaagacccccagcgcgcccgcccccacacgcgcgccgggagaaagaaaaaacggcaaacggggggggagccacccaacccagccgggaggcagaggcaagcagaccagaaccaagaccaaccggcacagagagccaggacaaccaaggcaacagagaaacggccaaaaaaaaaaaaaaaaaaaaaaaaaaaaaaaaaaaaaaaaaaaaacaaaagcggcggagaagacaaaaaagaaaacaaagccaggggggagccgcggcgggaccaccgagacagcggcccaaaccacagagaccaccgccacccccaaggggcaaaagacaggcaccagcccagccagcccaagccccccaaccaccacaagcgggagaagcgggggcggccagcggccggaaccggacccccgaacagggacagggcgaccacaccaggcccgggcgaccaggagccaacacgggaagggagggggacgggggggggagggcagggaaggagaaagaacccgaagacagacagacagacagacagacagacagacagacagaaaggcaggcccaaaaaaagaaaaagaggcaaacggccccccgacagagacaaaggcaaaggccgggagcagagaccggagggccaaaccgggccggagccccgacgcaaccgacccaggggaggacaaccccaaagacccagaaaccccagccacaaggagagaccagcaccccagcccccaacgaagcagagggcggggcccaccgccgggggggggccgggggccgggggcgggagggcgggggcagggggggggcaggggggcgggcggggccggggggcggggggccgggggcggggcaggggggcgggaggggcgggggggcgggggggggggcggcgggggggggcgggggggacacggggcccgcgcggcgagacccgaccaaagcaagaccgccagaccaaaagagagaggggacaccccaacccaggaagcccgaacgcgcagcaggacaggggccaaggcacagacacagggccacgcacgccagacgcacggaacgggagaaaacaggacagaacagagaaagaccaaaaagcacgccaaaacaacggcagagaaaaggacacaggagacccagaccgacaggaagcggaccacggccacagagggaggggagacaggaagccacagaaacaacggaggcaaagcacagccaggcgggggaccagaaggaaggcgggaagggagagagcacaacccaggagacacacagca

SEQ ID NO: 617 - RNA, 7666 nt, Mus musculus
gaacggcaggggcgagaggacaacagagcagcgagagagcgaacagagcccaccggcgacagcacagccccgaaccagggccagccacggggcccgcgccacaccccaggcccaaggcagagaggagccccaaagcacacgaacagggagggggacagagacgcagaccagggacaaggccaagcaggcaaaggacagcagacagggcaggagccagcgggggcagcagggcggggaggagagcgagcgcgccgagaggagccgacccaaaaccaggggccccccgcgggcaccaaccacagggaacgccaaacagaaacccgggaagccccacagccgccccagcgagagcccaccggaccaccacgccaggacggggcagacaagcggcccccacgcacccgggacagagaacacagccaaaaagccaaagcccaagaggcgggcacagccacaagaggaggagccagacaccaggaaccagaaaacgacacgaccaagggacgccccacggacccacagggaagggggcaacaggagcgggagcaaaggacaaggcacaaggccagcagggcaagacaaagagagaggcagaagcaggcagaaggaaaagaaccaggggagaggaggggggggggggggggggaaaccaggccggaaaaggcagagaagaaaaaaaggagggaagagaggaccagccaggacgacaaaccccagaacacaaaaagcaggcggggcccaggccagagaggcagagacaggggaagacacgggaaaccaagacaggccgaagaccgagacgaggcagccaggcggcgggggggggggggggggggggggggcaggcaagggcacgaaggggccacacaagacggaaccccagaaccggaccaagacggccagacccgccgccgagcccgccgcgcccgccccccaaggggaaggggggggggggggggggggggcaagcggcggcgcccaagagccccaaggaaggggcaagcaacagaggcaagcgaacaaccaaagcaaagccagcagagcacagacggggggcaggcgcgcgcgcggcgagacaggcccacagccgaacgcccagaggggcggccagagccccaaggagccccagcccccgcaggcaaggcagccaccggacggcaaacagcaggaagaccagaccaggcccagaaagcgcaggcaagcgcacgacgaccccccgggccagcacagaacaacacccaggggggcagaggagaacgcaagggaaacacaaggggcacgcccccaaccggcaagcacgagcccaaccaagaggcacacagcagggggaggcgggaaacacgaagcacccccaccagaacgcagggcacccacagaccggacaagaccgcagcggacagagagaaagcacaagacaagcaccagggggcagccacgcagaaagaagcagaggggccggagacgccagaccccccaaagccccaaaccaccccgaccccacagaccggccacagcccagacagcccggccgagccgcaacacacaaagcccgaaaccccgcccccgcaaggcccacagagccgccccagacgaccaccaagcccaggagaccccgggagcacacggggaggacccagccccccaacagaacggagcacagcccccacacagccccacccgcacagggccacagaaaacccagagcaagaaaaaacaaacaaacaaaccacacacacacacacacacacacacacacacacacacaaggccagcagaagaggcgagccaaaagaaaacaaaaacaaaaaaaagaggaaacggggcacaagcacaccagagcaggcccacagaggccagaagagggcagcagacccccggggcggagaacaggcagggaaccccaacacaggacggaccgaaccagaccccgcaagagcagagcagcacacccgcgacccacacccagcccggcggccagaagggccggcacgaaagcccacagcaaaccacaaaacggccagggaggggcaaggaggcgggaacaggggcggggcccagcggaaagaggccaggagcaggccgaagggacagccggcgccgacgcccgccacgagggggcagccgcccagcgaccccgagcccgccccccaaacagggaaagacccgaaaccaggagcccaaacaaacccgccgaagcggaagaaccgccaacaaaagaaaggaagagggagacaggaaccaagcggccccaagcaagaccaacgacacagaagagaaaccacagaggcaacccaaggcaccccacccgccacaagcgcggagccagcagccacccaccgacccccacaaaagcaagagaagccaaaccagccccgccaacgaggcgccagggccaaggcgcagaggcgcagcccccccccaccaacgcgcgcagggggcgaggagggggggcggggacagaggacggggacacgcagggggaaccccaacgcccacagcagaccaaaaaagcaacagagaaggaaacaacaccaaaagaggagaacagacccagaagcccagggcgcgcaagaaagccgagggaccaggaggagacaacgggagaacaagaaagaacagaggggccggacaaccgggggaaaccaaacacacacaaacacaacccaccggcgggaccacacccagggaggcagagcggcaccagggcagcacccggcacccaggagagacgaacgaggccccaagacccagggggagacccccacgaaagccaccacgccccgcgccccccagcgccccagacccgagccgccccagcagccacgaggcccgacaacacaacgagggacgccccaccgccacccagcacggccagcgggaggggcgggccagagaggaaggcagagggcaccgcagccagaacgcaagggcggcagcagcaacaaggcaagcggccagcagccgaaagccggccggaagggggacccagccacggggaagagaagcaggcccaccgaccgagacggggcggggcacagaagcagaggagaaaagaagagaaaaggaagcccgaggaacagaagccaagagacgcaaaccacagcaaggcccggaagccaagaccaccccacggggcagccaggaaagggaagaagcagaaagagcagcacacgcgggagcaaaaggccgaaacgggaggagaagcgcgggccagaagggagggccagagaaggcaccggacgggaggggagccaccgccacgagaaaggagggaggagacgggccagaagggacgaccaccaagcacgccaaagaccaccccaaggccaacccgaaccccagaacccccaacacagcacacaacccggggaccaacagcccaaaacacgagcccgggaacagcacacagccaacaagaagaaacacagaagaccggaccaggcccaggccgaaggaacacaggcaaacagacgagaacagggcacgggcccgaagagcacccgcggcggagcgaacggacacaagcgaagcacgagaggcgggaacccccaggacagcaaacaagccccagacaggggaacgccagggccaaaaaaagggaaggggggagggaaggggggggagggagggggacgggaagcaggaaagaagaggaaaaacgaaaaaaaaaaaagaaagaaagaaaagcccaaggcgaggcaaggcgaggacagcaaagggaggagggggagggcgaacccaggggggggccggaaaaaaaaaaaacaaaaaaacaaaaaaacaggcgagcaagccagaggagcaagcccgaagaagcaccccagggcgcacagaccgcgccagacagcggagccgccgccccaggaggaagaggacccaaagaagccgaaagcccccccccccgaggcggggccgcaacacacccaagcaaccaaccaaacaccccaaaggaccccggcagacaaaccagcgcagagaggccagggggacacacaccagcagccacggggccagacaccaaccaaaaaagaggaccagagacggagcccacggccacaagaaccagaaaaaaaagcacggaggaaagaggccagagcgaaacaacaggcccaagcccgcaagagcaggggcacaaagcgggccaggagaacccccccaaggagcgggaagaacccggacaaaacaagaacaaacacccacaggccaaccaccaaaaaaaagagacaaggcccaggcccaagcggcccacaggaccgcacaggcgagaagggcgcaggcaagcccccccgcagcgagcgcgaaggagggaagcaaaagccagacccgcgcaggacaggacgggcaagccaagacacacagaccagccccacacaaaggaacaccccccaaaggcagagaggcaaagaaagaaaagaaaagcaagaaagaccggcaaggaaagcagccaagcagggcccacgaggcaggacaaagaaacccaaagcaaaagaaggaggggacaaacagccaagggagccagaggaagaaaagaaccccaggcacaccaagaggagacagaaagacaaagcccggccgccaggcacgagcccggacggaggggaggaggggaaccaccgcgcagggggcaacgcaccagggcccccacagcccgggagcgagacgccaccccggagaaccgggccccaaacacgaaagcccgagcaagaagcaggggccacgggaggaccaccaccacgagaaggagccgccgcagaaaggggcacccgaagccaccgccaggaaaccacccagccagccccgccccagaccggagagaacgcacaacaggggccacaccacaccgcagaaacagaaaaccgcaggggaaaaaaagacccagcaacccgggagacaggcgggcagccaggacacgccggggagccgaggccaagggccccgggaaggaaagagcccaggccggggggagggaagggcggccgccaccgcgggaccacgcgagaccagggcagagcagaccaccagggacacaccaggcggaacggcaaggacggcaaaacccacacaaagcaacagagagggggacagaaaacgcgaccaccgaaagcggggcggcagggcgcaccaaaggcccggaagaaaaagaggcagggcggggagaggccggggcaagccaccagcaagcacaggaccagagggagccccagaaccaggaacaaaaaaccagggggaggggaaaacaagcgggaagcaagacaggaacccaggcacacacacacacacacacacacacacacacacacacacacacacacacacacacgaggagagagagaaaaaaaagccagaggcagagggagccacaaagcagagagagcaacaggcgacacccaggaagaagcaagccaccaaaccagagacgggacacggcagcccccagggcacacaggacaggccccgccacccgcccaccccagaccccaggccgcaccacccacagaccaggagaaaaaaaaacgggacaaacaccggcggcagagacgaagcccggaaacagagagggcacaagagcccggaggccaggaaaggccagaacccacagaagccaagcgacggccagggaaggagcacgggcacgggaacaaagacgcagcgcgacggaggaaaggagaagcaaaagcacaaaccaaacgcaaacaaaacccgggcggccgaaacagcacagacacaccacaggccaccgagcggcacgccggagcagggaaaccgaaccacaaccagacacacgaagcaaagcaccccagacacaggccaacggccgacaggggccaaccagacccccgccccagaccggacaaggcgcccccccccccccccccccccccccccccccccccccccagaacacccaagcaagccccccaaccggccagcccggccacccagcagcagggccagcaagggacaacggcggcagaggccgcgcgcgaccccagaagccagccaggggagaaaacaccagcgcgggaacggccgggggggacggccgcccagagaggaaccaacaaccggagaccaaggcggcgacagacaacaaggaccacaaaggggaaaacgaaggaagagacccagcaagggacaacagcaccagacagaagaaacgcgagacgaaagcggccgaacgccagcagaaaagaggccaggggagccaaggaggggggaggccagacaggagcgagaaaaagacaggagaaaacagagaacgggaggcaggggcaggcgaacgcgaggcagccggacagacaagaacagagaaaaccgccaaaaacaaacaaacaaaaagagaggggcagagagaggccaggggaaagcaacccaacccgccagcccgacccgaaccaccaggggaacaaaggagagggggcagcgaccccacaagcgcccgacccacagggcggaggcacacacacacacacaacacacaccgacacacacaaaaaaaaaaaacaaaaaaaagagacgaggacgaaaaaaaagacaagcagggagcaaaacagaaagacagagacaggcgacggcggccccaccgagcgcgcagaacgcgggggcacaggcgggcagacacagaggcgaacgacggggccaccaagacggagggaacacaccccgcacccgcccaccccaaagggcaaaagcacccaccccaggcagcacaggacaaaggagagggcccccaaaggcgcacagagcaaaacgcaagcccaggccaggaccagaccacgcaccaaagcccgaggaccggcagacaaacccacgccacacaaccaagaacaaaccacaaccaggggcagcagaagaccacaaagcgggggacaagacagcggcccacggaggagcagagcaacggagccccccaggaccagagggaccagcgccaaggcacaccgaacccaccaggagggcccaggacacacgaaggcggagagacaggcggcccgccagaggcacgggagaaggcacaagaaggaaacgggggccagaggacaaggggacagcggccagggagcgcgggcaaccccgaagcgaaacaaggcggaggaagaggaggagggggcaagcagcagagggaccacaccaccgagcgacgggaggaagaccaacagcccaagcccagcacagaccacccagagggcaggcaaacggaaccagaaaaacccccaagcgcgcagagcaccacaaggaaacagaaaaaaaaagcacggcggccggccaagacgggaaccccagcagaaaggagaacccaggaagacaggcacccgaagagggggaaggaccaccggagggacccggggcgagcaaccagggcaaccacgcccgccaagccaccacaagaaggagaagggaggcgaggagagcaggaccgacgaccgcccgggcagcagccggccagagggagaggagccacaaccaacagcccagggggggcaacaagagcaggaggagggcaggacaggccggcggcgggggaggccaggcgacagaaaggcaacggcagccagaccccaagcggccaggcgccgagcaaaggcgggagaaccaaaaagcagaaggccccgagcccccgggggccaccaggaccaccacccggaacggacagcggccgacccac

SEQ ID NO: 618 - RNA, 533 nt, Mus musculus
caacgaggcccccccagagacagcggccaaggacacaaaccacacacagggcccccacgagaggaaaacagcaagcagaagcaacaggacaagaaaaacacagagaacgcacacgaacgcaccccagcaaaaaacagacaggccagaaagcaaagggcaagccacaggggcaagacagcccaacaaaagaggagaaaacagacgcccagaaaaagagacggaccacccaacaaacgaaacaaaaacaaaaaaacaaaaagaaaccacaaaaagaaaagaaacacagaagccgagacgaagggaaaaaagggagaaggacacaagggagcaggcagaaagagaagggagccgaacaaaaaaacacagggcggaagcacagacagaccaaagcaaaagaccggagagaaaaaaaccaagaagaaaacgggcgaagagaaacagcagaaaaaaagggggggcagaaaaagcaagaaaacaaaaaagggagaaaagaaaaaagaagaagaagaaagcgaaaggcaacggaaaaggga

SEQ ID NO: 619 - RNA, 45012 nt, Mus musculus
  misc_feature (23057)..(23287): n is a, c, g, or u
  misc_feature (37533)..(37632): n is a, c, g, or u
  misc_feature (39224)..(39788): n is a, c, g, or u
  misc_feature (41498)..(41597): n is a, c, g, or u
gcaaggaaaggcgaggccccccaggacagcgaggcagcaaacacaaccccaaagccacgaccacccaccagaaagcccccaccaaccgaagcccccaaaaaggccacaccaggaaacaagggaagacagagcggaggacagaagcgagggcacgacaaacaacaacagagagaagcacaccgccaacgaacccgaggaggcgaccccacacccgagaacaaagcacaacccgcgggcagagcaggacaaaccagaccacagaacgcgggggcaccaacccccccccaaagaaaccacaaaacaaaacacaggggagaaaaaagcggccaaagcacgaaggccaacagacagaaggcagaggcaaaaaaaaaaacagaacaacccgaacccgggccggaaacaacagggcacaaagaccagacagcaccccacgggacagccacgcagccagggccggagggaagccagcccagggaagggcaggaaggagggggcccgggagagggcacggggaggggacaaaagcacagcgccggaagcagcccacaacagaggcagagaagaagaacccagcgccgcaccagccgccggagcgccacgcccccacgagaaaggacgaaccgaaccgaagccaagccaaaaagcccaaagacgccggcaaggcgcacagcagaaaacccaacaagacagccgccccgcagaaagagcaagagaggccccagggccgcgacccaccccgaccgggcccaggccaagacagcaggaaaagagacacgaggacgacacaacagaaaaacagaacaaaaacaccacaaagccacccacagagaccacagcaggggcaagaagaaaaaaaacacgagaacaacacaagaagagacagagggaaagcccacgaggaaacaagaaagaaggaccagaaaaaagaggggccaagggaaggccaagcaaaaaaaaaaacacgaaaccaacccgcccagaccacaaaaaaagacacggccgacacgggaacaacgcaccccaccccaaggccgggcacgaaggcccagccgaaagcagcgcagggcgaagcaaaagacgaaaaacgaagccccgagaggggcccagagacgcaggacacaaggggacaaagaagggaaccccgaacccacccaaaagcagccaaccaggaagcagacacagacccagggaaggcaagcacccgcccgacacacagaagccagaggcgagggcagggcaccagaaaggggcagggagcagaagccccagagcaggcaacaagaaaaagaggagagagaaggacccgcggggccagagaagcgacacagagaagagaagcacaaacagaggaagcaagaagcgccccagggacgaacgcggaacaacacaaaaccaaaaccaacaaccccacagaagaaagcagagaaaacaaaggaccaaaaggcaaaacaccagcaaaaaaacagcagggaaggagagagcaagcgcacaaaggagacaaccacacaaaggaccgaaagaccagggggaaagaaggcgaggaaagggagggcgcaagacgacacgggcgcggagaagacccagcagccagagcgaacgccagagaaccgagaccccccgaccaagagggaacaaaggacagaaagaacaaaaaggaacaaaaggagaaagacgggccgccaaagcagcaagacccggggccacagaggccgggggaggcagaacaagggaagaaagagccacccagcagaagaggcagaggggacaggaaggaagggccaggaaaggaacccagagacagccccaggacgccccacagacgccccccacagcccgagaaaagaccccagagccaagccaaaagcccccacggcagcagccaaacacaggcgccaggacagacagcaacccaacaaggaagagaacaaaaccaccagagaccacaaagaccccagagcaaaaacaaagcaccaaaagcacaggacaagacacacgggaggcacccaggcaacgacggaccaaaaccggaagacaaaccaggaaaccccagagagcaacgggaagaaggcccacccgaagggagaacagccaggcagaaaagaagaggaaagccaggaaagccaccgaccacagcgacacccccccagagggagggcgcggcccccccggaaccccagccaccgcgaggaggccagccaaggacaaaccaaaaacacgagacgcaaagcaagacaaaaaaaccacaaagaaacaggcaagcgacgcagccgaacaaggcggcccgcaaccaggcccgggacaaggcaaaaaagacccaaccgacagagccagaaagaggcgggagaggaagagcaggaagcagaacgaaaggaagaaagacaaacgagaagaggaaacagacaaaacggaaaacaaaaaaaacacaaaaacgaagcacgaaaaaagaaaaaacaaagcaaacaacaaagcggagagacccaacagcaggacggagaacaagccagacgaccagcaaccaaacaaccaaagcagagcggcccagggccagacacgggcccgcaagcacacacagaaacaaacaaacacacaaagcaaagaaaagcagccacaaaaaagaacagaacagcagaaacaacacacgaaaccaaagaaccaggcccgcgccagcgaccagggagagaaccaggaacgaaagaaaggcgccacagcaagcacaggaaccgccacacacacagacagacaccaaaggacacagggaaggccgggagggcacggagggggcgcggggcaaaggcagaagagaagcagaccccagagcgccccaccaaaggagcgggaagaacgggccggaaagcagcaagcaccaaccacaaagccaccacagccccagaagcccgagaaagaagcaaagggaaagcaagcaacacccacagccgaaaccgccagggacaggcagggagagggggcagcaagaggaaaggaaaccaacggaggacaaaggaaaaaaaaagggagacgaaacaagagaaaacaggcggcgaaaagccacaaaggacccaagggggaagagccagaaaggagccaagacaggaaaggaaacagaggcaacaaaaacaaacacacaccaagacggggagcgaaagaaacacagaaaaacacagacagacccagcgaaccaaaaagaggaaaacaaaaaccaggaaacccaacacccggacccagcacagaaagccaacgccagcccagagagccccggcagaacaaccgaaccaacaagcccaacccaaacgacagaaaaacaacaaacaaaacccagccgcgccgccgccgccgccgccccccccccccccccccccgggggggggggggggagaacaacgcaacccgcacaacacagcacagaaaagaaacccaaaaaaaagcacaggggccggggcagcggagggagcaggaagagagggaggaaggagaggggaccaacccaggaggagcagcaaagggagcaacaagcaggcccaggagcacaccggcgcccgggcgcacccagccgagaggccggccaaacaagcggggagcgcaagcagccgcccaggcagcgaacgcccgagccaagagaaaagagggaacagagggaaaaaacacccccggaggcgcaacagaagcacccaacaacagaagagagaccagagcagaaaaaccgcacaacacgcagagcacaccaaaaaaaaggcgggcacaggaggacccaagccaagaagaagcagaagagagacaagcagcaagccagagccagggacagaaagcaagcaacaaggaaagccacgagacaaacggggacgagcaaggggagagagaaaagagacaaagagagggaacagacaaaagagagacccaaagacagcaagccacgagacaaacggaacacaccgaacacgaccaacgaggagagcagggggcagagagaccagcacagaccaggagacacagcagcagcaaccgaagggaagacagacaaaacacgaacacaaaaaagaacgaagggagaaggagaagaaagaagaaaaaacagaaaaaaaaacagccaggggaaggaacgaggagggagccagggaccaggcaaagaaagacagagaaccaaggcaaaaaggaaagacccggcaccaaacacaccgagcccgcacggccagggagagaccgccaacgaagacaacccaagcaaacacccgccagacagagagaggacgaccggaggggggggccacaaacggagacaccaacaagaagacacaggaggcagccaagacaggcccggggccagcggagacacagagcagaaagaaaggcgcgggacacaggaacagcgcaaaagcaccagggaagccccccaagaaagcaagaaagcacagaagcaacaaccgagaggacccaccaccagcacccgacccacccagggaggaggggaaaggggcaaggggagcaaggaggaagccaaggcagggaacacaaaagacccaaaaagcaagggggagaagggcaggcgcgggcaggagagcagcaggaggaccaaaccacgcccaggagcacggaggagaacggcgcaggacacaagcaaaaacacaagcaaagagaccacacaacgaacagaaaggacagcagcacgaggagaagccagggaaaagcaagggaaacagagaaaacaaggcccaaaaaccaggggcgaaagaaagcccaaagggaaggcaagccaggcgcagcaaggcaccaacaggacaaaacaacacagacccagaggagagacaaagcgagagggggggcagggaggcaagaagagggagacccccaaccgcagcgaggccagccaagcggcggcccgcaagaaggacccccccccccccccccccccccaaaggacaccagacccaaaaggccaacgaccaacaggccaagcacgacaaaagacaccgaaaagaaaaccaagaccagaaaaaaacagaaagaacaccacacagacagagagaagcagaaccgcggcagagagagccgagagacagcacggagagaacagcaaaaggaacggagacaaacgaacagggaacaaaaccaaccaagaggaaacgaggaaagaaagagggaacgaaaagaaaaagggagaaacaaggggggaaagcaccccagacaacaagcaaggaccccacaaaaccgccaccgaaacaaaccacagccccacaacggccgccccgcagccccagaccggcccagcaccccgcaccgagaggcccacccaggcgcagcacaggcgacaaccggagagagggggacaccaccacgaagaaaaggaagggccaggagcacgcaccaaccagcccaaagaccgccccagggcaaagaccccagaagacgaggagagaccagggcaaaagcagggccagcaaaaaccaccgcaccaaacccacagccggccccaccgcagacaaacagaaaaagccggggcagaagcgggcaagggcggggaacgagaggagaggaggagacaggaagaggggaagggacaggaaagggagaagagaaagaaagagaagagaaggcagccccgaggaagcacgcaacccaggacagcagacaaggagcagagaagcagccaaaacccagagagcaaggaacccgggaaagacggccacagagcagggggaaggacagagagacagcccagagccaccacccaccccagccagcccacgcaaaagaaaaaagccaaccacaggagaaagagccaagccagaaaaaaaagagcgcaacaggagagaccaacagaagaacaaagcaaaaaaacaaaagagacagcaagcgcccagagcaaaaaaccagcaagaaagaaacagagaggccaagcggaaaaaaaaacgcaacaaaaccaaaacccaagcgagacagaacaagagcaaacgcaaaggcccagcggccaccccaaggcaacaaaagcgccaggaagcaagacaccagacaaacaacacgacgcgaggagagaacacgggggaaaggccaggcggaccggaggcagaacccgaacaggagcgcaccaaccacggccagagaccggaagccggccaaggggacccaaagggcgccggcggaaaccgagagccgaccacgaggaaacaagggagagagcgccgggaagcaaccacccagcacaggagccaggcgagaaagaaccagggaccccaccgagaagagcgaaacggaaaaggaccagaaaggaaagccgccgccaaacacgcgcgcacacacacacacacacacacacacaccgggcaaacagcggccaagcaccaccacgagcaaaacccagaggagccccaaagcccccaaaaacaaaagggagaaagacaagggagagagaaagagagggaaaacaggcacaaaacgacgagaaaggaaaccaacggggagcaacagacaccaaaaagaagaaagagaagaaaaagcgcacccggaagagggaacccagaaaggaaagggagcgacacaaagacgccaacaaagccacccagaagagcagccagggggcagagaaggaagacaacaaaaaggggagacaggggcagcaggaccaagaacaagaagccaagccacaggagacagaaaaaccacaaggacacgccagagccgacaacacaagaacagagaagcagggccaagaacgcacaacaggggggaggaaggccgaaaagaagcaagcggaaaagaaaaaccgaaaggagagggaaggggcgagacaagcgggaccaacaccaacaaaacaaagacaaagcaaccgagagcagagcaacaaagaaaggaagcagggcagaaaccagggaagccccaacacaaggcaaagaacaaacggagggaccagaaagaaagagacagcgggccaaagccacgaaagacagagagcacaccacgaaagaccgggccaccaccggaaaacaagaagagacacaggagccggaaagagcagccacaacccagccgcaacaagcaagacaacgcacagaaggggcccccggagcaagaaaagcaaaagcgggaaaacaggcagccagaggaaccagccagaaagggaggggagaaggcccagagaggcaaacaccaggaccaaggccggaacccggcgccggaaccaccgagacaggcggccggaaccagagaggccgcccgcccccaagagcggcaaaaggaggccaccagccggcagaggccaagacccagagggcagagcccgccaggcccaaaggaaccgcccaccccaagcgcgaacaacggggccagaacccaccccggggaagggaaggacggagggaagccaacccagggagggcacagaagaaggcgggagagggacacggggcaagaccccaccagcgccagagccagacgcagcagccagagaagagagacccagccgaccaccgccggagcgccagcccaccgaagaaaggacgaacccgaacgagccagccccaaaaaggccaaagaggccggcagggcgcacagcagaaaacccaacagacgaccaggcaagcccagaggcacaagacgaaaacccacaaacgccagaagagccacaccaggcacaccgacacaagacggacaacccacgcccaccacccgccccagagaccagacgggccacaaacgcacaagccgcccacaaagggcccgagcaggacagagcccacccccaaccagcaaggcagagagagccacaggaggaaggggaagacgagacggcacaaggggaacacagaagggcgaagcgggaaagaaagggcgggaccccgaagccagagaacgcaggggaacacgggaacagaggcaggccagaggcaaggagccgaaccaaagagacacaccagagcaaaggggcgaaaaaagggcaaacagagagaaacagaacagcagcacaaaagacaaaagaagaaacaaccacgaggagggcgccagagcaagcaaaaagggcaaacaagcgaaaagagccaggccgaacacaaacgaaaacaagaccaaccaaggaccagggcgagccagagcaaacaggaaggccccggagcccaaccaccacgaggaagaaccaaaacaggaccaagagaacagccaaagaaaagagagcaacgcaagaaaaagccaaacgagaggggaaagcacacagagggaggaccaaaagcccaggcgggggcgaagcagcagaacccagaccgaggggaggcggggaacaggaagagacacccccgcgcagaggaggcccggccgccccaccagagaagacagagaggggagaccaaaaggaaagcacccacggccccagccacacagaaggacccagccacaaaggaaagcagcgcagccccaaggagccacaaaaaaagaaacccgcgacaaagcacaaagcagcacaaaaacaagacaacagacgcaaaaggaagcacaacagagcagcaggaaaaagaaggaaagagaaagcaaagaccacaaagagacccacagagcggacccagagaagaggagacaagggaaccaagacaaaacaaaaacgcacgagcgccagaaaaaaaaaaagggggagagcaggaaacacaggcacacgacaagacagagcagggaaagagaagaggggcgagagaaccagcaggaggcaaggggccccagaagaggaccacaaagacagaccaagccaggaggacacagggccgcccggggcgagaagggagggagggagagggcaggcacaccagacagagcagaggaggagagaaacgggggaagggccaggaagggcggagagagcgccgaagcccagacccccaaagagccccaacaagaaaacaccacacagcacagagacgaggcaggagaagccaaaaaggaaaaaaccaaggcagacccagaccaaaaccgaagaacagaaaacaaaacaaagagaaacaagcaagagcacgaaagaagaaaagaaaagaccccacaaggcagaagccaagcaagccaagcagcaggcacgggcgggaaaagagccacccgccccaaacgagagaccgacccacaagaaaagagaagcacaccccccgcgaagaaagcaacaaaaagcaaagacacgaggaaggacggaggaggaggaaagaagagcaggggagcggcaaagagcaggaaacaagaacaccggcaaacacagaggcccagaccaggcccgcagcagaaaccacccacagcccggagggaaaacaaaacaagagccaagacgccccgcaaggggcaccaaacccgggccccagccaaaagaaagcaagaaacccggccccccgacgacagcgccaccgagaacagaccagagcgcgacaggacccgaacgaccagggacagccccaagaccccccacagcgaaggacagaaggcaccagccaaacccgcacaagcccccagcagaggcaaggaacacagagaagaggaccagggcaggggcacccgaggggcaaggacagggcaaccccacacgacaaacaaaagagaaggaaaaccgagcgcgcagggggggggcggggcagagaaacaaaccacagagccgggggccagaacgcagagaaaggcggccgaacacaaagccgcccacccaagagacgggaacaggcacacacgccacggggggcacaaagaaggcacgcgcaagacagaagcaacagccagaccagaccaaccgaggccagaccccgaagggaaggccccggggaccaaaaccacggaaaaaaaacacaaaaacaagacaaaaagggcaaaaacagaaagaaaaaacaggagggggggcacaacaacagggaaacgaaaagggcacagcaaagaaggggaaagcaggccagaccacggcggcccacacacgcagcaaccacagcaggcaggaagggagaaacaagcaagacgcagaagcaacacaaagagggaggaagggcagaaaccaaaaagaggagaggaaaaacgcagcaaggacccagaaaacaaaagaacaagaagcaaacaagaacaaggaaacacaagacaagacaaaaggcacaacacacagaagcaacaaccagaaaggaaaaagaaaagaggaacagcacaaaccagagaacgcaccagggccggccgcaagaaggaaacccggccaagagccaaacggcgccccaggacccgggaggacgccaaaaagggcccaagaagaaccacggccccccagccaccaaacagcgcacccacagcaaaagcaagacaaaacacgacacccaacacgagacgaaaacgcaaaagccaaacagcaggccaacggaaagacagagccagcaagacccaccgagaaccccaggggcgaagcaaccccaccgcagacaccgagggcaacacaggagagcaaagcccaccaagcggccaaaaaaccgaaaaggagggcacaaaaaaccaaccacgggagagaggcagagggcgaacgaggcggccggacaaagcaaacagaacaagaagcaaaaaacaaaagaaacccagcgaaaaaagacagagagacacaacaaaacaggaagaacaacaggagcgaggcagaaaagacacacggagacaggcagacaacaaacagcaaggcagcagaggaaaaggacagccgaaagaacgcgggaacagagagaggagagaccccaaagaaaaacagagagagaaaagagcagacggagcagcacaaacaaaaggaaaaaagacacagggagagacgaacccccacggcagaggacagacacggcaggcggcacaagaacgggaggagcgagaagagccaggagagaggggcagcaccaggaagcggggagacagaagcaagcagaccaggcaggggacagacgaaccagagaaaaggcagacagaaagaggcaaggcaagacaagaaagagcagccggcacaaagacccgccaagaaagaagaaggaggaaaaaaaaacagaaccacaaggccagcaaacaaccaccgccgcacaccagaacacaaccaaggaggacaagaccaggaggaacaaggaaacgaaaaaaccccgaaaccagaaagcccaaacagacaccagccggaggccagaaagaaccgggaagcccgcggcggagacgcggacgccgggggggaagaagcagagaggaagaagacaaggagaagacagacaacggccaagccaccggccacggaaaagcgcccacggcaagacaagccagaaagaaaccaacaaacaaaaagccaacggaaagcaagaaggacgccccgcaaaaaaagccagcccacagcaccacggagaagaaaggagaagaggaagagagagcagagagagagggacggaaacgcgcaggacaaagacacccggcaaaaccccgacaaagagccacccagacgacgccgacagaaaagcgccccgcgcaggagccgccaggacgcccaaggagaaggaaggagcaccccaccacccaagggggaaaaggcaagaggccaacacgaaacaaaagcaccaggcggccaggcaacgcagcggcacgaggcaaggaagaggaaccccgacagccagggaggagcgccacagcccagcggaagaggacaaagccccgagggacagaaggagacccgcgaggcgccacccgaccccaagacaccacacgagacgggcacggacaaaaagcacaacgaccagagcacagccacagcagcaaacccgcagagaagagcaagcacaaccccacaccacaaagcaagaaagagaaacagacaagagagaacgacggcgagcagaggcacaagcagccggaaggcgcccaaggaggacccagacccacagcaaagccggagccagcgcccaacccaacacacacagcaacagcaacaaacgcaggaaagcagcacaaaaaaaaaaaaaagcacacgaagcacacccagcagcacaaaacagcaaacaaaccaacacaaacaaacaagcgacaggcaggaggaaaacaaaacagacaggcaacacacaagacaccgcaacaggggaaaaaagaaagaagccccggcccagcccaggccgggaaaccggaagccagacccagaaacaaggcagcaaggccaagaacaacccacagccagcaggaaagcccaggcggagcagggaggaggccaacgagaagacacaaacagccgccagccagaaccaagcagacaaggccggcggaacaaagggaacaaccaaagcagaagaaaaaaaagaaaaaaaaaaaagaaaaaaaaaaaaaaaaaaaaaaaaaaacacggaacgacaacacccgggcacacagcagaacaacaaagcaccccggcgcaaaagagaaggacaaagacacacgaaccagcacaaccgaggggggcagagagggagacaacacaccaggaagccagaaaccccagcagccagcgacgcagacccggaccccgcagcccgaccaccggggacaccaaccggccgagcccaccagaggagcacgaccaaaaaggagaaaaaaaaaaaaaaaacacagaaagcacaccaaaaagaaacggaaacaaagaacaacaacaagcaccacaagccaaccggcaagaaggggggggcgagggggcgggaaagacgaaccgggaggggaaaaaccagcaaggaggccaagccaccccgcagccacgagcacgaaggggagaaaacagagacaggaccaggcagggggcagagacagcagaacaaacagccgggaaaaacaaagacagacaaaaaacaccacaaaacagaaggaggagagcacaaacagaccggagaaagaaaagacacaagagagacaaacaaccgcgggagcacccgagcgaggcagcaacccacacgcgccaagagagagaagccaaggcaacccacccgacgagaccagcccccccagaccaagaaccaaacacaaccaagaacacaagagaaacacacaacagaaccaccgaagagcagccgccgcaccaggcagcgaggaggagaagagaggagaggcacagcacgggcagagaggcagccaccggacaagcaggaggaggggaggagagagaggcacagcagggcagagcgcagccgaccggacaagcagcaaggaggagaggagaggagaggcacagcacgggcagagcgcagccgaccggacaagcgggcagcgacaacgaggaggaagggcaggcgagccaccccaaccggaggaagcagggcgagcccgagaagaaaaggcaaacagagcgcggcccacccacacggaccaacagccaagggaagaaaaacggaaaaaaaaaacaacacacgcgaagcacgagaagaggaaaccaacgagaaacgcccccaaaggccgcaagcaagcccgggggcacaacgggagagggaagggcccagccacgagggcagggccacacgggcaaaggcgagagcacaagaaagcaaacgaaacaagacagaaacaaaccgcaggccgccaaccgcccccagaccacgagcaggacccccaggaggaaagacaggaagaagcaagaaaccccacccaaagcggggaacacaaagacagaaagaaaccagacacggcaaagagacaccccaagcggagaggggaggggcaggcccaagccgggagcgaaaggaacgccagaaagacaggaggaaaaagaaccaagacaaaaggccggaagccacgggcaaagaacgagggcacacccaaacaagagcgagaggacacaaaacccaaaggggaaggcacccaaggaacaacacagaccagcaaccaggagaaacaagagaagaagagaacccagcgagcgcacggggcagaccggcccggaaccgacccacaggaaaacggaaaacaaagaaccacccagacgaagccccgagcagcagcaggaacaaccacaggccgcacacaaaagaaccaagggggaggaaacagaaccaaagagagaaagaagagaagaggacacagccacacccagagggcgcccaacccaccccaaaccccaaaacaagccaaggagcaaacggacccaggacccgaggggccaaagagcaaaggacacaaagcaaagcccagcaggacagcggagcccccgggagggcgaccacacaccagggggggggggggggaccacccacagacaaaagacacacgcaacccaggcggaagcaacaaagaaaaaccagagcaggggaggacagggccgaacgggaagggaccggcagacaaagagacagacaggagcgcaaaaaacaccagaaagcccagcaacgcccggaaggggaagccaggcgcaaaaccgggagggaagaagcaagaacaaaggcaggcgacgggcgaccgagccaccaggggcggaagggccagaagcagcggacagaccccgaaccccaaaaaggcacgccagcaggcggagggacgccacacccaagcgacagagaaccaacagagaaacaggaccgaacacccaacgaacaagccgcccagacagcaaggagacaaaaaagagggggaaaagagagcagcccccgcggagaaaggagccaggaagggaggagcaagagacacaacaaccgaaggaaaagagagggcacgggacggaagggaccaccacaaagaaggaaaaaaaccaggggggcgggagggaaaccacagaacccaagcagcaacaacggccccacgaacaaaccgaccaccagcgaaccaagggggaccgaccaaggagccacacagagccgaaaccgaaagcacagcagcccggggcccagacaacggcacccacagcagcgaccgccaaccaccccagcccggccacccacaacacagaacacaaccccaaaggaacccaggaacaccagaagggaagcaacaacaagggcccaccggacaccaaagagcaccccagagcccacccacaaaacaacagggaaaacccaccaagacacagggaacgaacagagccaggggagcaagccaacaagcaaggcccaaacagaacgggcaccccaccccagacccagccaaaaaccagccccccacgccggaaaagcggccacgaacgacggcagcaccccaccgcccaaagcccaggacacgccaaggccaccaacaaggcgcacagaaaggacgcacgaccgcagccccaggagacaagcgagacaacgaaaagcgacagccacgcgcacccggcccccggacgccaccccaaaacaccacccaccggacagacagcgcccaaagcggccagggacagcagagaccccaccaccaagcaccagagcgaccccacagaccaaggcaggagaacaaaaccacaggagaagaaagaaacggggacccagggcagcggacggcaagaaacgaacgcgaggagacccccgacgccggagggggagagaacaagaagaaaacgccgagaaagccggccaaaaccccccccccccggccgaggcaggagacacgccagaccgaaagggcaacaggacaagcgccaaaaaacagacgaacccgcaccaggccacggaaagcagcacccacaacaaacaggacggcacccgagccggaaagagggaaagaagaaacgaagagaacaaaggagcagagacagaaagaccagaggccaacaagaccgcacagagaaagacggcgggccaagcggcggaaaaaagaggccccgaaaacagcaaacagaccggaggagcccccaaggagaccagaccaggcccaccagcgcagacgaaagaaaggggcaccaaacgcagggaggggagagaggagaaaaagagaaaaaacgcagcagggacaacaaaaaccacggcaggcagaaaagaaaagagcacggagacaacggaggcggaaagccaaaagagaaggagaagaggcgcccggcggcaagcaagacaggagagagagggagaggcaacccacagacaccaccagaaccccaaagggcaccagacccaacaccccaagacccacaaaaacaaacagggacacgagggaccaaaaccaacacacgcaaaagagacaagccaaccaaacaaaacacgaagagcaccaacaagaagaacaggaggaaaacagcaaagagagcacgacaggggcagagccccaaaacccggcaggacccaggcccccagaagcaaggaagcgaggagggagccgaggggaagagcagaggaaaagacgacaacaagagcccgcccgggggagagaggacccacgcccaggcggcgccggccagacccgcaaacgagaaaaacccccgaagcgcggcacgggcacaggcaaggaaaagaggagggagaagaaggaagcgagaaagcagaaaaaacaagggaaaaaggccaaacaaaaaaaaaagagaggaaaaggaaaaaaaaagcaggaagggccgacaaagacccgaaagagggaaccacccaagagggcagacggccacacaaaagaaaacaaagacaggccggagacaacaaccggggagcccgcgagccccacgcaagagccaaacaaaggaccggaagaaaagcacagaagaaccccgaagcccagccacccgaagacagacaggacaagaacaccacgcacgaaggagagacaccagcgcaccacgccacaggcgggacaggcaggaacccgaggcggcgcccagaggaggccaagcagcgggggcagacaaaaaaagacaacaaaacagaaacgaaaaagaagaccccaccaaaaacacagagcccaaagccaaagagagaaagcgacaaccagagagcgcaacggggccaacggggcaccgaaggacagaaaaaaaaaagaacaggggaaaccgcccgccagggggcgaggggcaaagccagacagaggaggcagaggaacagagcccaggcccacggccggcacacacaaaggaggcagcggcacgagcccagggcacaccggcgccccacagcacagcaagcaaaccggcccaagccgccaggggcgaggccaacaaaccagcccagcggcacgcacacacacacacacacacacacacacacacgcacacaccgacaagcccccccaccgggcgcagagacgccgggcaacccaaaaaaagggggggggggggggaaagagagacacagagacagagaaagcccaagcaccgcaccggaaagcgccacaggaggaacgaagccaggaaaaacacacgaacagggcacaaaggacacagccagacccaggaaggcaacacaggaacgaagaagcacacagcacaacagccacggcaggaaaaaaaaggcaacccgccacccgccgcggccagcccgccagacgcacggcggaggccacaacacagcccgggggccagcccggccaccgcgagcaccccccagcagcgagcaccgcccagcaacgccccaacacaccacagccacgcaacaccagcaacagagaaacagacccaaggcaacacaacaaaaacaaaagacgcaaacaaaagccaaacaaaacagagccaacgaaaagagaagcaacccaaaccaaccggacaacagcacccgggcgaaaacccggggcccccccccccccgcacccccccccccccccccccccccccccccccccccccccaaacccagcccgcccccccgcaaacgaggccgccacgcccaaggaggacagagaaaaccgcaaggccagggaagaccgccagcacaggaccagaggggcgccacccaacgcgggccaacaggagcgacagaggagaaaaaaacaggaagccccacgaaaaagagggaaggaagggggggcagggggaggcagaagagcggagcaaccgcaccaaacccagcaaacccgaaacaggcaaggaaacagacgagccagaagacggaggaaggggagggaggaccaaaaacacaggggaaaagaagaggagagaaaggaggaagaaggccccagagacgcgggaacggggggggagacagaacccacccgaagagcaacacccacccggcaccaaagacacagccccgcgaggacaggcacggaagaggagagcaggcggcagaccgggggggaggccaggaggcacgcgccagagccgccgccgcgaaggccgacaaaccaaggggggggaggcagaggagaaagcccaaagagccccgcagcgggagggcacgagcacagcggcgacaggcgggcggaggcccccgaagacagcgcaccaaaagacccagaagccacccaccccccagaacacacagagcggcaacgcggcccagaagggaaggaagggccaaagaaagggagaggagaacaaggaaaaggaaaggcacccaaaagccaaaggaccgaccgccccagaagcgccccgcccgagcaaacagccaccagaaacacaaaccagaggggcccagaaacgcggccacccaaggccagaggcggggcagcaaccagcgagaagcaagaggaaccaagcgacccggccgaggcaagagacccccccacagcacgaaacgacccagaaagaacaagccaccagccccccacacccaagcccaggccccagcccggaggcacagagagagaacagagaagcgggaacaaggggcgaacggaacagcaggccaaccagcaccagcccgccggcaggaggggggcaaggccaggcccagcccgaccgccgcagccagcggagagaccacacacccgaacaccggacccaggacagaggcaggcagcggcgcaagaaccacgccaagccagcacgggaccgaaggcccggaagccgggaacagacccagccagaacaggaagaggggccagcccaccgcaaagccaaacaaccaccccaccaccaaaaaggacacagagagaagaaccaccagcgcccggcacccagccaggacaggagaaaacaaaggacccccagcccaaaagccaaccaaaaaggacagggcccggaccccgacaaaaacacaggcacacggggggacagcgaagcaccacagcacaaagacccacgagagaaggggcccagagcaagccaaaccaagcccacacccccagaggccggccagaagacgccacaaaggcccacagcacagaaggcagaggcgggcgccgccacccacgccccagagccaagcccacaaccagaagaaaaagagggaacaccgacacgagcacaaggaagcaccggccccacacgaagacacaaagacagaacggaagagagggccaagcgagaaaaaaggcgacacaggcccagcaaggcaagccaaagagccagaccccaaagccagacaccaaaaaccaccaaaaaacaaacaaaaaacaaacaccaagcaggacccagggcagggcgaggaggaggaaaaaaaagcaaaggggagagaaggaaaagccaaacaaaacaaacccacaagacagcaacaggacagcaccaagacaaaacccaaagcagccccgaggggaagaagagggaacggggagggaagacgcccaagcaggcaacaccaccaggacaggaccagacggaaaaaaggaggaaaaaaaaaaccaaaagaagcgcaccaccccagccgaagggagcagggacagccacacaacccccaaccagcccgacaagagcaaggaccagcagcacacacgccacaccaagcccccaccacaaagaccccaggacaaaagaagcccaaggaccgcaggcacaagcgcgggacagaacagaccaccccagcaaacacacagaacaacgagaacccagacgacagacagaccaacagaaacagaagaagccaagcaggcaaggagacggaagcgacaggaaaaacgccaaagcggcagagaagcagaaacaacaagcagccagaggaccaccagccccggcagagaggcgaaggaaaggccaagccaccaccgaaccaagccaaggccgagccaggcagcagacaaccagcaggaagaggcaggcaaaaacaccaggaaagggaaagaaaagcggcagaaaggaaaagccagcagaaggggacaagaacaacagagccaggcaacaaaagaaagaagcacacaagggaacacagcgaagaaaagagagaagaaggagaagcaaagcaagaaagcggggaaggccgaagacgcgacgcggagaggcaagcgaagagggccagggggcgaacaaaagggaagagaggccaaagaaagcaaagaagccagaggcgggcagccccacaagccgggcaggcgcacccgcccgcagccccgggcagacagccacccagaggcgcagggcccccccgcccccagaagcaggcaaaagccccccgaggacccacccgacaaaagaaaacggaaggaaggaaagcaagaaaaaaaaagagagcaggcgaacagacaaaagcacaccagggagccggacagaccagaaccaaggagggagccagaacgacagacggaaaaaagacaccaaagagcaaacgagcaagacccaaccagaggcacgcacagcagagcaaagaacacacacaccaagaaaaaaaacagggaaaccagcacaggggcaaccaaagggagacccacaccaccgcaaagaaaaaagcagaaggggagccgagaaacaagacggcggagcagccaacacagaaaaccccaacaggcggagaaaggaagaccaagaaccccaggcggaagggagaggaggcaggcagacagcgcccagggaaaacaagagaagaggagaagacacacccgcgccccacaccagcaggcagccccagacgaagagagcgaaagcggcacaggagaccggccccggaggcccaaggccccgcggaacacgaggacaaaacaagggaaaggaaaaacggaacccacagccaggaagagggacaccagggaccacccccagcccagaaacccggaaaggcagaaggaccaacaaaaccaaacacagacacccacaaaaaaggcaaaccggcaaagaagcaaaaaaagaaaaaagccaacccgcagaggccagccgaaggcagcaaggcaaaaacagaggaaaaaaacagccaagggcacccaacaagacccacacccgggcaggaagagcaaaacccaaacaaaacccccaccacgcaccaggcgggcccacacaggagcacaccaagcccacgaaaagaaccacacccaagaagaaagaccaacccaaggggcaaaaaaacaaggccgggcagacgcagcaaggcggcacagaaaggacaacagaggggaacaaaaacaacaaaaggccgaagccacaggcccacaacacagacagccacggacccccgaagggcaacagccacaaagcaggaacagacagaaaacagacgccaaagaaaacaaaggagaaaccccacagacaagcaagaggagagaaacaaaaaaacccgaggagaaaaccacaacaaaaacaggggggccgaaacaaagagaagacaccgacaggacagccccagaaagcaaggaaggaggcagggcagcaaccaccggaagaaagagcccagaaacaccacacagagaaagaaagcaggagcacaccaagccggaacacagagcacagggaaggcagccgcagcgggcagccaggaaacaacgcaggaaaaacagagaagacaacaccccaggacgaccaccccgagcaccacacccaaaaacgcgacacaccaagaaggcgcccagagcgaacgaagcaaaagaaaggaagccgaaaaaagacccacagacccccagaaacccccggaagagacaaagggcagggcaccccaaggagcgaaagaagagcacacaggccccccaaaggcaagagaacggagcagagacacaggacgcacaggagccacaagcagccacagaaggacgagaccacccacaccaacacaagcccacacaccgcaagcccccaaacaccagaggggaaaacgcaaaaccaaaacaaaccaaaccacagcccaccgccccacaagcacaagacagcagaaagcccccggagagacacagaaaaacgcaggacaaaacagccaccacacaacagcaccaccaagcgaaagcaagggagaacaccacggaaacccccaaggcccggacccagaagaagccaaacagagagcgcaccccaaaccaccaaggcaccccgcaccagccacagaccccagacccgagcgccaagcccaggaacaaaacaagcagaaaaaaccccaaccacagaggaagacggggccaacgaggacggaaacacacgaaggaccacacagacaaccaaaccaaaccagggagagcacacaccaggggaaaaagccaagccaagccgcccgacggaggggcggaaccgaaagccccgaaaaaaagagacacaaagagaaagccaaaagaaaccaagcaaacgagacagagagaagagaagggggcagagggaacagggcccccaggaaagggaaaagaaagaacagagaaacgagggagggggggacaggaacaagagagacaggaggagacagacggggagagaaaggcaaacagggggcagggaaggagaaaaccaggcaagaaaaccgaaaccagaagggaccaaaggacagaaggaagaaggagcccaacggccgcgaggaggaaggaccagggagggacagggacaagagggaccaagagggccaggaaaccccaagcgagcaagacaagggggccgcaaacgaaaggggcccacgccaggacagcacacaagcagaacaggagacgcaagcagggccaccggagcccgcccacaccagccggcaggaaggaccgagacacccaaagaaaaagggacagaacacagcacaaaaccacgacaacgccgccgcaaaaagaagggcaagaggcacagaagacaggagaaccaaccaagccaaagacaaaggcccccagagaaggaacccaacgaggagaaagcagcgcacgaacacagcaaccaggccaaaacagccacgaagaggaaggagagagagggggaaggggcagcagaaagnnnnnnnnnnnnnnnnnnnnnnnnnnnnnnnnnnnnnnnnnnnnnnnnnnnnnnnnnnnnnnnnnnnnnnnnnnnnnnnnnnnnnnnnnnnnnnnnnnnnnnnnnnnnnnnnnnnnnnnnnnnnnnnnnnnnnnnnnnnnnnnnnnnnnnnnnnnnnnnnnnnnnnnnnnnnnnnnnnnnnnnnnnnnnnnnnnnnnnnnnnnnnnnnnnnnnnnnnnnnnnnnnnnnnnnagggagcaagcagagcccaaaccggacagccaagagagaacaaaggaggcccacaaaccccgcgagcgggggcaacagacacaagagagcaagagaggaagaaggccgggaggagcgccccaaagacccagcgaaggcacccaaaggacaacgggaggaaggggggggccacccggggcccagacaaaggcagcaggcgagcaagccaggagaagcaagccgaagcagccccccccagggccgcgagcgccacgggcagccgcgagccggccgacccccaagagggcgaaacggaaggaagccaaaaaaccccccccaacgccgccaggggcacaacaaaagaacccaccaaaacaccccccagagccaggacacccaggaggcagaagggaagagcagaggggaaaagagcaacagaaaacgcagcgccgaccaaaagcaaggccaaagaacacagagacgaagcagcaaacacagggccacagggacaccaggcccgcaagaaagcaagcagaagggacccagaaaacaagagagccgaccggccgccaggaccacgggggcgacccaacgaagaaaggccacaacagcaacggggaccagaacccacgaacaagagacacaaggggagagaccggaggggaaggaaaaggggaaaacgggaggagagagggaggaaaaacaagcgggagaaagagaaaagaaagacaaaaaaagaaagaaagaaagaaagaaagaaagaaagaaagaaagaaagaaagaaagaaagaaagaaaggaaggaaggaaggaaggaaggaaggaagaggaaggaaggaaggaaggaaggaaggaaggaaggaaggaaggaaggaaggaaggaaggaggaaagaaagcaaaagaaaggaaggaggaaagagagagagacagacagcagagagagagagacagagacagagacaggagaaaagaaagccacacccgcgcggcccggagcgcccgcagaggcaggcccacgcaccgggcaacaaacagaaccggcagcagggccgagagggggggaagagcacacaacacaccccacccccagcaagagaaaaggcaggcgaacgagccaccggcagacaggcccagcacaacaacaggaaggcaacagacccaaaccaacaggaccagcaaagagaacaacgagaaacagagcaccccaacgagacaacacagcgcaacgcaaagaacacaaaacggagaagaaagcaacacgagaccccacccccccaagaaggagcacgcccagcgcggccaagacaaacgggggaaaagggaagaaccgggagaagccgaggcaagcccacagccagacagagcgcggccgccagacacagcacaaagacgcacagggagaacacaaggcccgacccagagacccagaggggcagcaaagcgcgaaggcaaaagaagcggacggggaaggcacaggccagaagcgaagccagcgaacaaagaaagaaacgggggcacaaggacagagaccagcagaacccaaaaagggacaagacaggcccacaggcagcccaagagaagaaacggaaagagaacaaggcggggaccgcaaggcaggagccccaagggaagagagacagcccggaagccggcccccgacccaagcccaagagagaaggagagagccaggccacagaagaaagaaacagccagcagggaccacgggcccaacgggaccccacacaaagacggcagacagaaagaaaaacagcaggacccccaggcgagccagaccgaccaaagcacacacagggggaggcagagccaacccggccaccacagcagcacagaaaacccccgggaccagcccaagacacacaaaaccccagacaccaaccaaggagcccaagcaaagcaccagggaacagccaccggaagggccagcagggcccccacgggagggcagcggccacagccccggacaacggcccaagacaagcaggccgccccacagggcaaacgcacagaccccgacgggagacaaaaggacaaaaaccgccccgcgccaccacaaagcccagacccaagaaaccgacaacggagagaacaacaaaagcgccccgccccaacggcaaggacaccaaaacaaagccaaaccaaaggagcgaagcccacagggacaaaggacgcacaccacaaaaggcgaagacacgaaggcgcccccgaggccaacagcgagggaggggaaacacaaggcaggagacgagacaggggcaacaacaacgggcggcccaaaccaaaagaccaggaaccgaacgacccgcgaagccaagaaacgaaggacccggccccgagggacagggaaaggagcacccacgagcagcagaaaaaaaagaaacagacccagaaaagccacaaaagaggagaaagaacaacaaaggagggagcggacaaaaaaaggaccagcacaaggcacccaaaagcccccagacccccaccccccccccacccccacccacccacccaccggcccggcaccccgacgaggcaaaaaggcaagaccaaggggcccccccaagaggcgacaggccaccgcacaagcaacagagccagagcccggggacggagcaaggccaccaaggagcagacccccagcccgggacccagcccccagggggcccggacccaccaaagcgacggagcaccaccgggccaggcccggcaagcccaaaagagacagcaacagggcccagcaaaacgcgggagcaagggcagcgggaggcgaagggaggacccgggaggcagccagaggccaccgccagcccaaacgccgaacccccagggggcccaacaagaaggggcaaggccacacgaccaccgagcaaaagaacaacacaaagagccccccgccccccaaaaaaccccccccccccccccccggaacggaccgcaggccaagaaggggagagaagaggaagaaagccagccaagccggccggcagcaaggggcaggaggggcacagaagaaggcagccagagaaagagggcagccagcaaaacaaacaaacaaaaacaaaccagcaacaccagaacaaaaaaaaaaaaaagggaaggaaaagagaccgagagaccagaaagacagccagacccaagggccgcagggaagcccccaagggagagcgccgggaggaaaagaaaccaaaaggagcagccccacgagggacccgggaaccaccggagcagggaggacaggaccggcaagacaggagagcgggacacagaagcagaccagagacagacggacccccgccgcccgcgccgggcccgcaccggcaaacagggccgcccgggcccgccccggccgcccgaaccgccccccccccacagggccagagagcccagagagagagcaaggccagcaaggacaccacagagaccacgccacaagaacggggcaaagccgagccaccaaacacaaccccaggaacacgagcagaaggaagaagcccaaagggcccaacaaagcccagaacccaacgcagagcaaaagcaaggaaggcccaggcaaccagagaaagaaagaggggccaagccagaggagaggccaccagggccccaagagcaaccgccggaccaacaggaacacgccccaggggcgagaaaagaggccacaagcccagagggcacgagaacaaacccaagccaggcagaagcacacaaaagccacccaagcgggaggagaaacagccaaacccagcagaacagaacagcaggaaaagggacaaaaaggagaaaacgagaaaaaacaagcacaccaaaaaaaaacaagcgaccacaaacaaagcaagaccaaaaagagagaaaagccggcaccaagaacaaacagcagacaaaggaagaaaaccagacagacgagccggaaaaacaccacccaagggcccagaagaaagacaacaaaagagaaacggacaaagagaggaaagagccaacagccaaaagccccagcaggcccaaaccaaaaacccaccccacacaccagcaagaggccacgggaagagcagcaacagaggcaggcaagccacaggcaggcggcccacaaaaacggccacgagcaaagaagagaagaaccacaaacacacgagagaagaggggaaagacgcaagcacacggcaaccagcaaccagaaggggcgcccgccacaccagccgccggcacgagaggaaggaacgacaccagccgcagcagacaaaaacagacagaaccaacccagggccaggcgaagccaaagccgagagcgcgggaccaggcgagcaaggcacggagcaaacacaaaggaggacaaaaagacaggccacaaacaaagaggcaacagggccggcccgaccgcccagggcccacagcgagcagcaaaacacaaagaaaaaagagcccccccaggcccccagcagaaggaagcaccaacaagagccaaggcagacaccgccagaacaacgcccccaccgcgcgaccgcagacaaagcccaaaaccaagcggaagggaccgggcaacaggacaagggcaggccccgagcaggaggacaccaaaggagcgcaggaaagaggaggcaagaacgcaggcacacgaagggcggccccggaccccccaccgccccagcgcagaccaagagcgccaccggaagcagcccgagggggcccagagccaacagccagcacgcgcgaacccgggaccaagccacaagcagaaaaggcgaaaccacccaagaaggcacaaaacaggaaccggcaccgggcaacccaggaacgcagacaaagcagacaaaaaaaacgaccaggaccgaaagaagcaggggggggcaaagagcaaaagaggaaaaccacaaggaaacaaagaggaaaagacaggacagaaggacagaggcggaacaggaaaggcagaggacaggaccgcaccgggcgaccgccagaggggcgacccacaggccaaggaaggcacaacaggaccacaccgaacaaggaaacaccacggaaagccacgaagcagggccagagcacagaaccagggagccgaagaagggaaggagacacagcgagcaacccaacaaggccagcagcagcggaaggaagccaaggacagcaggcccgcccacaaggaagcaagcaacaaagaagagagagaaaaaccccccaagccagaggcccgcagaaggagcccagaaaagggggccaccacaccaacccagagaccgaaccagagaccccgaaccggaacaagccacaacgcaagacccagccaagaccaggcagaaacgaccccagacaccagaaggacacgggagcccgacggagagcagccagaaagcaaggaccaccaggaacagccacacagccacgaaacagcccagaccggcgcaaaccacaaacggaaagaaccgaaaaaagcaggaaaaaaacaaacgaggagacagagccaacgaagaccagacaagaccccaagggaccccacaagaaagaacagaaggcaaccagagaaccggagacaccaagcgagaccagaccagcaggacgcgagaagggcccgccagcgacaccccacgggcaaggaaaagagagacacccacaagagaaagacaaacaagaagaaacagagaagaagaagggaagaaagaaaaaaaacgagaccggacagaaagcaaaagcccaaagaggggagcgaaaccggggcgagaacaagcagaacaggccaggacagcccgggcaggccccgaagaaccgaggcacaggccaaaagaaaagagaagacagcgggcggcccagcaccccaccccgccccgaccaagaaagacgcagacagcgcgagaaaaggaccaaccaggaaacacgccaaccccccagcccaaaccccaaaaaaccccagcccaagcccggggcgaaccacgcccggaagaagccgacccggagcccgcaaaacacccgaacacaagaggcgcggaggggcacgccgaacgggaacagaggggggccccacaggccagccacagcaggggggcagacacaacccccaaacaaacaacaagaacagaagcagcaggcagggacccgaaaccgaagggaacggggagggaggagagcacgaaggacagcgggcaacagggacaccgccaagaccccaaagaaagaggcgggcccagccccgccaagggcagggcaggcggggaggcagaagagggagcgacggcaccacaggaggggggagggaagccccaggaggcacgcccgggaggaaagcacacgaaagggggaagcaggagcgcgggggccgggccacaagaggccagggcgggggccaggcccggacaccaggcaccccgggaggggaagagcgagaacagagggggggcccaagggagggcaggggggggagggagggaggggagccaggaggcagagagagaggcccagagagaaggcagggccgagggaaggcccccaggccccccggcagacgagaaaagagcagccaagcgaagaagccggggaaaggaagcaaaaaccagccccacccaggggggccgagaaaaaccgggggaggcgcgggaagggaacaggcaacgcccaccccccggcccaggaccacaggcaggagacccccggggcgaaaggggagccacaaaacggaagggcggggcgccccaggacgaggccacagacagggagagggcggcaggacaggggccgggccccaagcaggcaaagcccaccaccccaggccggggcccaaccagccaagggaggaccaggcaccccacagccacgcaaaaacacagaaccaaaaaccaggaaccgaggcgccggacagcgcccaacccgggcccaagacaacaaacccagacagaaccagaagagaccaagcaaaaaagacaaggacaccaaaacagcagcccgggggcgaggaggggaggggaggagagacaaaagagagaagcggccccccccgcagcccagcgagggacccaccagcgccagccacagacacacagcaccaaaagacacaggggaggcggaggaacacagaaacgagaagcaaaaagcagacaggccgccacggcagagcaagcaagggaccgaacccacagcagagaccgcaggaccggacggagaccgacagcccccccacccagagcgcacggccacagaggagccaagcaaaacggcccgcaggccgggagaagccaaaagccaggaagaagggccaagaaaacgggcaccaggaggccacaccccgaacaccacgggagacaagacggaaaaggcgagacaaggccagccggacaaaacaccaaagcaggagggcgggcagggggcccaagaagacccacacacaggggaccgcaaccccccccccccccccggagacgagagggccacgagacacgaccccgcccagcccgaggccaggacaaggagaaccagcagcggccagagcgaaaaacaggcgggaagaggagacaggccaggagcacacgaaaccaccgcagggagccggaacggagagaaaccgagggcaggcagaagccccacccaggggcccagaaaccccaggagacgggaaccgaaaagaagcacaaaaacgagcccccaacagcccccgcacagcacggccccagcgggaccagcgacagcgcgaaggagcccgcaaaggcccaggggcgacggagccccggcgccccaggcgcaggcacgggaggacggggaggcaaaagaagcacagagaaaggggagagaaaacaaaacaaaacaaccacccaagacaagcccgcgcaaacagcgaggaagcgagggcagggcggaaaaggaagaggacgcaccagggaagcagagcgggcgccacaggaacgaaaacgcagggaagcaagccacgaaaacacgggaggggggagaacaagacacaccgcccaaagccccccaagcagccagacagaaagacacgggcggcaagaccacaacccggaagaagccccaaacgggagaccaaagggacggggggaacccacaccggcccgacgccaagccgacacaccccccaggagggagggaagaagagccgcgcacgcgagagacaaagaacaccgcacccagaccgagccagggccgagagcgggcagaggggagcacaccaaacaaaacagcccgggggagccgagccacgcccaggcggagggcgaggaaaaaggacagcacccaccacccaacaaagaggccagcacacaaaaggaaagagccaaaaaagaacagaacagaaagggacacggaaaaaaaacacagggcaaaacaaaacaaaggcaacagaacggagaacaagggaaagaaggccaggcgggcgggggggggggggggggggggggggggaagaagaagaagacagacccgggagccagaacaaaagagcaagaaaaaaacagcccaaagccacaacagaggaacggaaaagagaggggaagcagcagggaaggaaggggggaggggcaggcaccagggggggggggggacaaggggccaggaaaacgcacgaacagagacccaagggggaagagaacgaggcagaaaggaaaacagaggggggcagagggagggcaaaggacccaggcggcggaaggagcgagacaggcaggagacagagggacagggggcaaccccgaggaagcgcgcccccccccagcagaagacacacccagggccagcacgcacgcgggcaagcaaacacaagcaacaaacgggagcaaggcaaggagcacacgcaaaccaaggaacccgaagcacagccacaagagacccagcggcccagaagaaaaaggcaaaaggcaaggaggagaccaaggagaccaaacagcaagcagggacacgggcgcacgcaaaaggggaggggggagaaagagagacgacgcaaaaaagacagacagagagcagcaaaagagggccaggacacaaaaaccccaggagccgagcacggcagaaaacggcaccaaggacgggagaggcaggcaacccacagcagacacagaacacaggagccagccggaggaaccggcggcgcgaccagcaagcagccagaagcgaccacaacccgaccaaaccccagcaacgcagaggaggcgggggacagcgaaaccaacacagaggcagaaagacccggcggaggccagccggggggcagcagcccgggagcaagccgcaaaaaggcagagacacacccccggcccaacagcgggacaaccacggcaggggggaagggcgagaaccaggacacggaacgacaagcggcagccggacgggccgccccccccagagaagccgaccaccccgcagcagcagcagcagcagcagcagcagcagcagcagcagcagcagcagcagcagcagcagcagggccaccagggccacagcaggaagagcggagaccaggccccgccccagcagcagcccgccgggagcggcggacgcccacagcaggaacagcggagaccccggccccgccccagcagcagcccgccgggagcgcgcggacgccagagcccagagggagaggcgcagagcagcagacggcccaccccccgcccaacgccacccgccggggggggggagcacgccccgggacggaagccagcgcaggaccagacaggggcgcgaaccgccccagccccaaacaccgccacagcacgcaccaaaaccaacccaggggcggccggaagaagagaaagagaaagcagcaaaaggaaaaaaaaagcaaacgagcagcagaggagaaacagcgcacccagaagaaaaggggaccaacagccgacaaaagcgcaacagagccggcccccaacagccaccagggggacaaccaaagaaacaccccgacagcaaagcacaggggaccacagccccggcacacacccaaacggggcacggacaaacacggccacacaccgagaccaaaggccaccgcccccgagccccacccccacaccgggccgcgaggaggggcccgccccaaccacccaggacccacaggacccagccacaagcgcccccaggcagggacagggaaggaagcaacgccaggaccgcgaagcacgaagaccccaacaagaaaagggacggaaagcgagaggaaaaacaaaaaaaaaaagagagccaaaaaagcggcagaaaaccgggaaaccccaggagggggaaaacgggagaacaaaacggcacaaccgagaggagacggagcggagcaaaggggaaaaagagaaaaacaaaagagaaacaacgaaggagaagcagggcagaaaggagcagcccagaaacagagaaagaaagaggaccccaaaaagcaccgaacggacccccacgggaaaacagcaaggcaggacaccagccaacaacaggagaagcagcagaaaggggaaacacacgcccgaggagacacgcaaaaggcaaacaaacagggacccaagggaaccaggcagcacagaaggcgacgcccgaggccagcagcccacaccccccccccccccccccccccccccgcccacccgcccaccccccccccccccccccccccccccccccccccggaaaaaacaccaaaggaaaagaaacgagaggagcgggggccaagccccagcaggcaaagcaaaacaccacgccaaaaaggaaaaaaaccaaggacaagacaaagagcgccgaccaagagcaagagggcgccggcacaaacagcaggcaggaagccagccggagaaaaaaaagaaaagaaaagaaaaagaaaaagacccacacgaagaccccaaacaggccacccaaaacccagacgggaccacgaaaccgccccccacccagaccccacccagcaacagaacccaggagccgggggcccgagggaggcccccgggaccaagaggggacgccaagccgacccagaaacggggggcggaaaggaacaaagcgagacccgagacccagcggacacagaaagcggaagcccgagaagaacccaaaccgaagggcccaccacagaagcagacgaaccagcgcccagcaacccaggcccccccgggcacccgcccgagaaagggagacggagaacagaaaagacacagagggcgaccagacacaaacacaccacaggaggccaaggcaacaagaccccagccccgagccaagaggcgggaagcaggccacaaagccacaggccacaaagaaaaaaaggaggggaaagaggaaggaaaagggagaagcaccggagacgaaagacaaaggaaaggaaaccgaaaaaggaaaaagagcgggcaagcgcaccgccagggggaggccgggaccccgcccagcgccagggacggacacgccagcagcagaacgcgaggagaaacgccacacacacggaggccaggcgacccgggccacgggaaaacgggcaggaggcagcagagggaagagaggacaaaaggcggagagcccaggaggagccagccggcccacaagcaagcgagggcggggggacaagaaaggaaaagcgccagagaagaaagacgccccaggacaaagacaacaaacgcgggcgccagccagaacggagcagaaagcaagaccccgcccaaggaccaggcagagagaacacacacacacacacacacacacacacacacacacacacacacgcacagcacacacacacacacacacacacacacacacacacacaccagggaaaacagaacacaccccaagacggccaaacagggccaccaagcggggaacacaaccaacaaaaagggccagagccagacaacaagggagcaacaaggcccagaagacacacaggcacagcaaacaagccggacagcacaggggccagaccccgacccgccaaaggcagccagaaggcggcggaaccagacacgggagcaagaaaaagaaagaccaaaaaacaaaacccgaacgggggacgaccccacggacaaaaaaacaggagaacagggcaacaacggagcgcaagcgaaaaccggaacacccacacccagacaaaaaacggaggagcacggagaaaaggaaaagaaaaaccagcagggaaaaaaacacacaaaccaagaaggaaacaaacaaagggaacagcaccgcacagcccagggaaagcccggccgccggaaagcgaagacgcaaacgggaacggggaaaaccagagccccgcgaaaacaaggcaagagaaaaccggcagcaaccaagaaggggaaggccaagaggcccagggggaaccgggccgaagcaccagaagcccaccccggcccaccagcgacacgacgaaggagggcgggccccgccgccaggccccacggaagacagcacagaacccgacaagggccacagggcagggcagccacacccgagcagagcgacaggacccagggccagggagcaaggggagggagccagcaaaccagccccagcaacaaaccccccgcgagacaggaaacaagccaaaagcaacaaacaaagagcagagaggacagagccaagaaaagggccaagcacaaacaacacaaaacaacaccagcaggagcaacagaagaccaacagagggagggccaggaaaacggacacaggaagaaggcaaagggcggaagggaggcacagacgcagaacaacaggagagacgggggagggaggcgaaagaccagggggaaaggcaagcgcacgaaacaaaggcacggcaagaaggggaggaagacagagcgaacaacaagccaggcaaagcacgcccgagcggagaacggagaccgacagaaaaggacagaaaagcaaaaaacgggacaaacaccgaccagggccacggaaggaacggggagaaagcagaagcaaaccccagccgacgggcgaccagaggacacgacaggcaaccaaccaacagaagggaaagagcaagagagaaacgcaaggagggagcaagagcaagcccaccccaagacagcaccagacaagccccgggcaccagggagcagcaaacagaaaagcacccgccaggaggaccccaggaaggaccagcacaaagcaaaggagggggaagcaggcggaagcccccagaaggccaggaggcacccagagcgagggagagccggacagccgaggcacacgggaagaaaggggaaacaccagcccgacacacaaagccacgagaaaccaaacggaggcccgcaacagccacgacaggacgaaaaagacacgaaaccaggagcaggcgaagcgcaacagaaagcacccaaaaagagagcagaagaaggcgaaggccaccaaggcgacccaaggagaggacggcaaggagagagggggaaacggaagagccagaccagaaagcaaagaagacaagcaggagaaacgccaaaggacgaacggccaagcccaagacagcaaggagaagaaggcacagagcacagggggggaccaaagaggccgccgaccaacagccaagagcgacccaagaaagaacgcacaaagcagggacaaggcgggggggggggggggggagagccgcccagcgacagagaaccaggagcacaagggagaacaaggacccagaggacgaaaggcagcaacaaaagaggaaaacagggggaacacacacacacacacacacacacacacacacacaaaaaaaaaaaaaaaaccacaaaaacacaacaggaacaaaacgacagagaagcagaagaaaacgccaaaaaaacaaagagaggagagcgaccagcagcgccggagggagcgccaggaggcaggaagagaggcagaacggacaagaaagagcgccagggagcgagacccaacccaaaccggaagaacagccaggcccaacgcgaagcaggcccagacaagccaggcccccccccccccccccccccccgcagggggggggggggggggccgagagcacaccaccgcacgcaggccagaaacacacgagggcaccaggcaccagagaaagaccaagagccggagcccagcaacaagcgacacgccccgaacacgagacacagggcacaccacagccaggagcacaggcagccagcaggaacacaacgacagagagaaaggggaggcccagcgcgcaccagggggcgaaggccgagaaccaggggagacaggaagaaggcaaaaaccaaagggggccaaggacagaaaaaaaggacagggccaaagcaggaacaaaccccaccacccaccacccagcggaacaaaagaacaagaccaagccnnnnnnnnnnnnnnnnnnnnnnnnnnnnnnnnnnnnnnnnnnnnnnnnnnnnnnnnnnnnnnnnnnnnnnnnnnnnnnnnnnnnnnnnnnnnnnnnnnnncccagcgaacaaaaaacaaaaccagcccggggagagcaacgcacacagacaacagcaccaaacacaacccggaaacaccccagagacacaaaaaaaacaccacaaggcaaacccagccaaacgaaaagaagagaacacgcacccaagacggagcagagagaacagacccgggaggccaggagagagcaaagaacagaggcagaaccagacagaaaaacaaaacagacgcgaagaggccggagccagaaaaggacaccagaaaccgacgccgcacaggcccccgccggccggaaacacaggaagggcaagcagggccaccaccaggcaaacgaaacccagcggagcaccaggacaaaagaaaaaaaagagggaaaacaacagagcgaaagcgccccccggagggagcggcgaaggaaagacgacccaacgccagaagaaggggacacagaccaggagcaacagagccaggagagccaccaagaggaggagccaggcgagaccacgccgcaccaccccccaccgccgccaagacaccggagacagacgcgcaccaccccgagccccaccccaaggccccgaagcacaccgagcagagcccggaagcaagccaagcaaacaccagcaacgcaggaccggagcagcaggaaaccaaggggagagaaaagaccacgaacaaccaccaaagaccccccaaaacagaaaaaaaacaaccgaaaacaccaaaggagaaaaaccgcgaagcaaaggcaacaagaaggaagagcgccccaggcaggaccacaggcacagggcaaaccagcacaccagagaggaagaacaggggcaccggccaggacaccgaagacaccagcggccggccgaggccccgacggcgcacagagcaggcacccccgacaccgaaggggacccagacaaaccgcacgagagcgacaaccagacccccccagcaccaaggcccagcggggagcacaaccagcacacgcggaccacggcaccaggcagggggagccagccccaggaccgaggcacccgcagccaacccagagcggggaacaaacaaccaccagccaaacccgagaacccccccacccagaacacacaaaacacccgacagagacaaccacagaaagcgcagagccggcagcaaaagaccaggaagcagggggaacaccccaacaaacccagacaaggcacgccacaggaagaaagcgaaaggcaccacagaaaacaaaaaacgggggaagcacggccaggagacaggcaccggaaacaaagaaagaagcaagaaccaaagaaaaagaccagacccaggcgggccagggaagaaagaacaaaagaagcgaaggcaacgaacacacagaagcgccgggccggaagacacaagaacagagcaaagcaaaaagcaaagcaacaaaaacgcaaaggaaaagaagggagccacggaagaccaaagagacgagacacaaaacacccgggcaggcgggcagacagcaaagcacaaagaaggaggccgaggcaccaagggaggccagaacacagaacaggcacggaggagagccacgacaagagcacacggagaaacccaaaaaaannnnnnnnnnnnnnnnnnnnnnnnnnnnnnnnnnnnnnnnnnnnnnnnnnnnnnnnnnnnnnnnnnnnnnnnnnnnnnnnnnnnnnnnnnnnnnnnnnnnnnnnnnnnnnnnnnnnnnnnnnnnnnnnnnnnnnnnnnnnnnnnnnnnnnnnnnnnnnnnnnnnnnnnnnnnnnnnnnnnnnnnnnnnnnnnnnnnnnnnnnnnnnnnnnnnnnnnnnnnnnnnnnnnnnnnnnnnnnnnnnnnnnnnnnnnnnnnnnnnnnnnnnnnnnnnnnnnnnnnnnnnnnnnnnnnnnnnnnnnnnnnnnnnnnnnnnnnnnnnnnnnnnnnnnnnnnnnnnnnnnnnnnnnnnnnnnnnnnnnnnnnnnnnnnnnnnnnnnnnnnnnnnnnnnnnnnnnnnnnnnnnnnnnnnnnnnnnnnnnnnnnnnnnnnnnnnnnnnnnnnnnnnnnnnnnnnnnnnnnnnnnnnnnnnnnnnnnnnnnnnnnnnnnnnnnnnnnnnnnnnnnnnnnnnnnnnnnnnnnnnnnnnnnnnnnnnnnnnnnnnnnnnnnnnnnnnnnnnnnnnnnncgggggagagacgcgggaaaacaacaagggggggagagacgcgggaaaacaacagggggggggagacgcagggggaacaacaacaaaacaaaggggggggagagacgcagggggaacaacaacacacaaaacaaaagggggggagagacgcagggggaacaacaaaacaaaaaaacaaaagggggagagacgcagggggaacaacaacaaaacaaaacaaacacaaacacaaacacaagcacaaacacaagcaaaacacaagcaaaacacaaacacaaacacaaacacaaacaaaaacaaaaggggagagacgcaggggaaacaacaacaaaacaaggggggggagagagacgcagggggaacaacaaaaaaaaaaaaaaaaacacacacacacacaagggggggggggaagaagcggcgcggggggggggggggggggggagcgaagcggaggcggaagcaaaagggaaaagcagagaagagggaagccagaacaacacagggcccaggcccacccaaaaaaaaggcccacgaaccggaacacaccaaggcacacaccaggcacaaggaccaggccgcgccaaacccaccacccacacaggaacagcaaccaccaccagggagaaacacaggagggggccaaaccaggcccagcggccaggccaccccaggcccagggggagaaagggaggaacgagaaacaggaagaagcaggaaggaaacacacccccagacgagaaagaaaaagaaggccaacaggacgaggagccaaccaaagggcaagccagagcccgacacaggcaaggaaggaccgcgcccggggaccgccccggcccggagagcacaagcggagcaaagagagagcggggccggaaacaaaacaagggaggaagacagagccaaaggcggagcagacacaagagcaacaccgaccagacagaggaaagaggaaagacccagagcaaaagagcaacgaggcacgaggcaggccacgggggaccacgagcgacagagcagacaccaagcaaaacagaagcccgggaacggccaccgccgaacacgcgccaaagaaacaaaagccggaaggaaccgcccggacaaacggggaacaaggagacagcggaaaggcgacagggagggaaagggaagagggaaaggaggcccccgggccagcgcaagaccaaggcacaacacgaacccagacacaggaccgggggaaaggcacacccacgagacccagagagaaagaagcgacccagcaccggccgaggcgggcaaagcagacccaaacagacccagaaccgaggagcaaacccaaccccaaagaagccagaccaaacagccccgagaagacacgagaagcaaagagcaacaccaccaacaaagaaaacagagagacgaaaagcgaggacaaggaacgcaaacaacccaccagcacagcagagagacagcggagcgccccagccggggaacagccagaccagaaagccacgcaacaaggaaaaaagccagaggggcaaaagcaaagagggaacaagagcggaagcgggggcacaaagccggagaaagcaacgagaaggggaggggagggcaggggcagccagagaaagcaacaaagaccacacaagcccggggaccaggagaaaagcaaaggccacccaggcgccacaagaacaaccagagggggggggggggggggggggggggggnnnnnnnnnnnnnnnnnnnnnnnnnnnnnnnnnnnnnnnnnnnnnnnnnnnnnnnnnnnnnnnnnnnnnnnnnnnnnnnnnnnnnnnnnnnnnnnnnnnngggggggggcaaacagaccagagagcccaagccaggcaaaacagaccgccagccaagacaggaaaagacacacagccgcagagaacaacaaagacacaagaaacaaaggcaacgaccaaacacacacaaaacccagcccggaaggaaccaccccaagcaccaaacacgggcaaagaccaaagaacaagacaaaaaccccaaggacaacaacccacaaaaaacaagggcagcacgcaggccaggcaacacaccaggacagcccagagaagcaaccccagagccaacccccacagacacaaagccaccggaaggccccagcacacagaggccaagaacggacacaaggaaagagccaaccaagacggaccaacaccccaaccccccaggccccagagacaaccaccccaaagcagcaggaagaacaaagaccaccgaccaccacacccacaaaaaccaaggaagaagagcagcaggccaccccaagaccggcaagaccggcccaaccacaaaaaggggcgcgccccccgcccgcccgcgccgcccgccccgccccccccccacacccccgccccacaaccaggccgcccaccccacacacacacacacacacacacaccaaccgccgccgccacccccaaccccaaaaaccaaaacaacgcggggcgaccccagggggaagggagcccagcaaggccgcagaggaacccccccccacaccgacgcacagacaccaaaaaccaccaccaaaaacacaacagaaccaggccagagaaaggcgggacaaacacaggcccaaaacaaggccagccacaacaggcaacgaaaaccaccagccggcacagcaacccacccaacagcagcagcacaacaacagcaagagcgggaagcccccccccccccccccccaaaccacaggggcccagagagacagggggaccccagaacaaagaagcagaagaaagccgaagaggaaggagggggaagccggaaaccaaggacgccaaggcagcgccaccaaacgaagcaccacccaaaaaccacggacaacagaaaaagacaggggagaaaccaaagcacagcagaccaacgcccgccccaagccacacagaaaaccagacgcacagcccagagaacgccccagccgaaagcacacaccaccacccccgccacgccccagcagagaccaacagacgaggaaaccagcaaaaccacagggcccaggcaccgagccgcagaaagacccaagaaagagaggagacaggcgagcaggcacaggagaacaaaaaaagaacaggcggagaaaaagaaagcaagagcaaaaagcaaggagaaccgaaccgcggaagaaacaggaaggacaacccccgagaggagaagccaggaagcaccaagaagacaagggacaacaacgaaaagagcgagacaggagagcacgaaggcaacagaaccaccaagccaggaacaagacaacaagcacccaaacacacccggaggaagaagaaccgaggagcacggggaaaacgcgggcaagcagcgaagagcgaccggggagcgaggcagcagagaagcaagggcagcgacacagacaggccaaaaagagacacagcaaaaaaacacaagggcaggaagggaagaaggccaacagcagggagaccagccacaaaacgccgaccccaaccccaaggaccccaaagcagaccagaagaacgacacaacgagcaacccagggaacaagcgcccaaaaccaaacagggcaaggggaaaggaggagacaccacaagggagcacaccaggcacaggacaccagggcggcaaagaacccggccaccaacaggggaaaaccaaggagcaagcaagaggaagccgccaaaacaacggagaccggaggccgaaaaagggcagaccccggagcccaacaaaggcggagcggaaagaaacaggccacggaagagcagcacaaccacaaagacacccagcgcgcacaggaaaaaaacaaacaaagaggagcacagagcacaacaagccgagaagagagacagaagaccggacaaaaagacccacggggaaaacccgagacaaaaaaagcaaaaagcacgcaagccgagaacaggggaggccagcgggaaaaagaagaagaaaacaggacaaaggcgagaagaaggaacagcccaagaacgaaaagaacagcagagacgaacaaccacagggcagcaaggccacacacgaggcgcaacagcagcgggaaaaaggccgggccgaaccacgacagcacagaagaagacccagccgcccagccacagcagccagggcccgcccccagagagccccggcagaacgaagagacggcagcacacccaagggaacagcaaaacgggaacccacaaaaccaccacccaaagacaaaagaaccaagaaagccccgcagggagccaagacgcacaggaggaaagaccacagagaacacacggcaccccaaaaagaccaacagaccacaaccaagggagaacaaagcacggaaaaaacaagagaagcaaaagcgcacaccaacacacccaaacaggagaaaacccgacccgaacaagggccgaccaaaccacaagaggccaacaccaccccggaaggggagaaccaaaccgagaaccacagcaaccacgggagaacaaacggggacacccagagaaaggagaaaaaaaaccgcccgaggcacccaccagaagccggagaaaggcacaccacagccgaaaaaacccaaacagcacaaagcgggcagcgccacccaagcagaacacccacgaaacccaagaaacacgcgggcagggcaccaacaacaagggcagcccaggccacgcccaaccagggaggcaccccccccccgcacacccccccgacccagccaggaaaccagaccccgcccagcaggccacgacacaaccaacagaaaacggggcggcacaacccagacccaagaaggacggaagagccccccccaccagggcaaggaacaccaggggcacagcgcggaccagaccggccagaaccacaccgccacacgaagccaaggccaaggcgcgagcccaacacaccggccagaacaagcaaggagggacccaagcccggaaaagcgacacccccagagaaccgcacgacccaggccaccaccggagcgaggccgaaagcagaagcagccacggagacccaaacccaccaaggacccgcccacacagccccacgagcaacaagcggccacagggcggccaccccaccaccaccccagccccccacaccccacaaaaagcaaaaggcaccaaagagagacccccccccccccaccccccccacaacaaagagaaaacaacaaaaaccggaagaagcacccacagaaagccaaaaacaccagaagacagcaaggaaaacc

SEQ ID NO: 620 - RNA, 1762 nt, Mus musculus
aaacaaaaaaaaagaaaaaagacaaaggacagggaaagggccgcaaaacaccaacacagcagaccggaaaaggccacagagccagggccacccaaggacagcgaggacaagagcggcaacagaaacagcccccggagcaaagacagagcccaaaaggcggggggccaaagggccaaaaagaagcaaaaggccaggagcacaacaaaccgggagggcggccggagcggagcagcacccaccggagacgagagaacagaaaagcaagagcgggaccaggaagcccacacacaggaacagcaagcagagcaccccagccacgggcagcgcggaaggacccaaacaaaggaacccagaagccggggcaaccaggccaaacaaaaaaagccggcaaacaaacggcccaaacccagcaaagagaaagcggagaaacacccgcacagaggcacgcaagaagagacacgggcccccaccacaacagcaagggacaagaccacgacgaaacgagcacaaacacgccgaaagcacaagagaagaggacaccacaccacaaaaaaaaaaaaaaagggggggggggagaaggacaccaaacaggacgaagacgggagaaccgaacaccgcccaacaaacaaacacagcaccgggaaacggggacagcgggaaaccggcgaaaagaagaaaccaggcgcaccccccacacaccccggacacacgaaggccacagcaagagggcagaagacaagcccaaccggccgccaaagagaagggaaaagccacagaagggagcacaagaagggccagggaggccaaacagaaagcagcaagaacgcggccccccagggcggaggggggcagaggaggagagaggaaacacagcaggggacaggcaccgggggaggagagagccaaggcaacacgacgcagcagcacacaggagcccgccccaaccagccaaaaaacaccaccggacagccagggacaccgagcccagccagccgaaaccaaaaccaagagccaggcgcagccgggaacaaggggagagcacaggccggccaccacaacggcacagaacaggaccagggcccaagggaagcaacaacccccccccccgccccggggggaccggggaggggcagcaagaaaaggccagaggcaaaaggagaaccccaagccaggccagagcgccccgacggccaaggcgcaacagcccacgccggcccaccccccagcacggaacacaggccacgggcccgagggccgggaaaaccaggcccacagccggcaagcgcacgacgaggaccgagccccggcgcaaacagaccccacccgaccccccaacagcgcccacagaggggaaaaggaagccagggcgcacacgaggagcccgggcagcgacgggggaggaggggcgggggaacacaaaggaccagcccgaaacgcaggaggaccagcaaagccgggagaaacagaaaaggagaggcagcaagaaaaaagaaaagaacagagagaaaaggagcgccagaagagccccaaccggcaaagacacaaaccagaaggccgacagaacaaagacgcgcaagcgccccgggagcacccgaaaacacagagaacacaggaggaaaagcaaaaaaaaaaggaaccaggaagagaaaagacagccacagaacaggacaagaggcggaccaggcagaaagggaagcccgagccaacccgcccacagcacaacccgccccgagaaggacgagaaagggcagcccaagccccg

SEQ ID NO: 621 - RNA, 376 nt, Mus musculus
agcacagagaggcaagaaaaaaaaaaaaaaaaaaaaaacacaaaaagggaaaacacaaaacaaaaaggggaaaaaaagaaagaggaaaaagacacacacacacacaaacacaaaacaaagaaaagaaagaaagaagacacgagcgccagacacagaagagggagcagaccgacggaggggagccaccaggggcgggaagaacccggacccggaagagcagcggggccacccacgagccaccaccagcccacaaagaggacaaagcaagaaccaggcaggaacgaccccgccggcccgaaaacgagaaacaggaaagccaaaaccaaagcacgaagagaaaagagaagaaggaaaacaaagaacaacgaggaagaag

SEQ ID NO: 622 - RNA, 667 nt, Mus musculus
acagagcagcacacaaaagagaagcccaggaaaacaaccaagaaaaaggacaccacggccaagggagagcgaaagaacagaagcagacgcaacaggaagaaggaccagagagacgccaagccagggaccaccccaaacagcaccaaacgcgacaccagcaacacagcaagaagaaaggacgcagagagcgccggagacagccggggcccagcaaacacagaagggagccacagcagcaaggaggacaagggccccaaggaggagcagagaaagagccaaggagcaaagggacgcaacccaaggggaacaacaagagcaaccagaccccggagccgaccagcgcaaaacaaaagaggccagcggccacacggaaagagaggcccaggacgcaaacaagccccagacaggggaaaccagggccaaaaagggggagggggggcaggggagggggggggggaagggggacggaagcaggaaagaaagagaaaaccaaaaaaaaggaaaaaaaaaaaaacaggaagaaggacgagagaaaaaagcgcaaggaccagagcaaacccaccaggagggaacagagcacaccggcgcgagagaaggaacccacacgcccgaaaccaaaagggaccaaccgagccaacaggaagaaacagcacagaccaaaggaaga

SEQ ID NO: 623 - RNA, 2330 nt, Mus musculus
ggaggagccaaggccagaccagaagcaacagaaagggaaaaaagaagccaaaagaagagcacagcaaagccccccacaagagccgacaacagccaaaggcccccaaaccgcaccaaagcccaacccgaaacaggcggccagagccaagcgccggaacgccgagaagccaacagagacaccgccgcccccaggaccggaaaaggcaggaccaccacaaccagggaaaacaaccacccccgagagaaagccaggaagaaacccaagaaggccccgagaaacccagaggcgaacccaccgacaagaaggggcagggagggaagcacaacacaaaagagagaagaggacgaagccaaagcacgccacacccagggaacgccgaaccacaaaaagacaagccacacagagaaaacgcgcaggagaaaaggagaagaccaaaaccacaggaaagccccacagcagaggggaagaggaagccaggcaaggagcccagggacccccagaaacacgcgcagacaaagaaacgacagaaagaagccggggaaccaccgcaacgggacagacaaaaagaaaagaagaggcagcagcacaggaaaaaaaaacagaccacacgcgaaaagaaacaaacaaaaacggaaaagcagaaaacgggaaaggggcaaggggaaacagcgcaaacacaggccgaaacacggcaaaacacagcgaaacgaccaaacacggaggaggcaagcaggaaccacgccagccccaggcaaaccgcccgaccaggaccgacaggaaggggacaccacaaacgaaaaaaggccagcgacacaaagggaggcacagaccacacgcccagaaaaggcaaacacaaaacaggaaaaccgaaggggaaacacacggaccaaaacaaaaaaaccaacgaacacaaaacacccccggagcacgccccacaggccaaccacagcgggcagaagcccggaagcggggcccgaaaaaccaaacccagaccggaaaacaagacaagagccgaaagaaagaaggaggaaccagccgaaacaaaaggcaagaccgcgagagaagagaaaggaaaaccaaaggcccaacgcaaggaaagagagggggcaacagagaagcaggggccgagaacaagggcacaaaaaggcaagaagagccacaggcccggacagcccccaagcccaaacggcccaaaaaacgaggggcaacaaacacagccacaaggcaaagcgaagaccccggcaacgcggcgcacggcgcacggcgcagggaaccaacaccacgcagccccaaaaacccagagccgcagcacgggaacaaccccgacgggcacgcacagaaagcagaacagccgagaccgccccgcggcgccgcgccccgcaccgggagaagacaccggaagaagaaggcgaagaagaccggcgccgcgcgggaagcgcaaggcgccggacccccgggccgagccacaccaaggcgggccgccccaaggagcgcagcggcggcccggcgcgccaagaaggcgcggcggccgcggggacgagggagaagaacaacagccgcacaagccgggcgaagagccgggagcaagggacccgggcagaccaagggcaccggcgccccggccccaaaccaacaagaaggcggcccgggaggcaagcccaaggcaagaaggcaggcgcggccaaggccaagaagccgcgggagcagccaagaagccaagaaggcgacgggcgccacacccaaaaagacggccaagaagacccgaagaaggcgaagaagccgcggcggcgccggcgccaagaaagccaagagcccaagaagggaaggcgcaagcccaagaaggcagcaaagagccagccaaggccaaggccccaaggcaaggcccaagccaaagccaagccgaaggccaccaaggcaaagaaggcgcccccgcaagaagagaggggcgccgcgaaaaccaaacggcccagagccacccacaacccacaaaagagcgagcccggccaggagccgcgaccggcaggccgaagcagacaacggcacgagggacaaggagcacaaaaccaggagcgaagagacacagccagcggaccggccggcaggccggggcccacacacggcaaccaagagggcgggaagcccaagcgccaggcggaaaggcaaggggggccaggaagcacccacaaagggcacaggcggagcccgaagccaaccggcacacaagggggagaaaaccaacaagccgaccagcagggggcaccaacagagaggaaaagaacaacgacgggacgcggcgccgccccgccccgcaccagagccggaaccgccaa

SEQ ID NO: 624 - RNA, 4796 nt, Mus musculus
cgaggacgcacggggaaggcagagcacaggagagagaaccaccccggcaagcgcagaagaccacagaacacagcgcagcgccacgaacggcgaaggggcgcggccccaacaccccccccaaaagagcaaaaggccacccaaaagagagggagaagaggcaaaccccagggaggaaaggagccagacaggaagccaggccacaggcacccagagcaacccgaccgccccggcggccgggggaagggaacaggacacgaacccagaaagagacagccccagaaaggccaaagccgcagagccccagcaggcagccggcaaccccgggcgcgaagcacaccaccacccggcaagagcagcccggagagaagagcgagggccagcgaccagccaagcaagaaaccaaacagggggagcccagcagccgcaagcgccgggcaaaaccaccgccccaggggccaagcacagaccaacaaagaagcaacacaaccacagcaaaggacccaaaaaaaacccacccaaaaagaaggaaaagcgaggagaccaagggaaccggcagcgacaggccaagcgcgggaggaccgaagccaacccgaaggacgcaaacagccaccaacgaacaaacgaaaaagacgacaaaagcgcccagaaaaacaacgaaggaaaaacacacaacccggaaacgcacacccgcgagagcaaaacacaggacggacaagacagaggaaaccagcagagaccccgacgacaagcgaggccgacagacgagcacgaggcgacaaaggaagggcagcgcggaccgccagacagagccaaggcgcgaacaaggcaaacccagccagaggaaaaaggcaggagaaacgagcaaacacaccgcagggagggaaagcgacaacccccaacgcgcccaagacgcccggacacaccaagacgagggacaagacccggcagcggacggggagccggaccaaaaggggccacggggaaaacacagaagcccccggacacaaaaaggaccgggccaaccaaacaaggacaccaaaccaccagggccacggccgacaagacgcagccgcagaggccagagcacaaaaaaaaagaggaaagaggccaaagacacagacaccgggccggggacagcccaacccccgaaagaaggcgaggggcgagcgcacgccaacaaacccgccgaggggaggaagccagcagggggcacgccacgacggcagaacgggaagagacgaaagcggccaacagcaaggagcgggcccccaagcacccagcccaagacaaggaacacaggaggccccagaacggagaagcaaacagagccagaacaggcaaggacacaggagaagaagccaaaggaagaaacaggaacaccagccagaccgagaggcgaaaccgcggggaacccacagaggaacggcaagaaccacagcagcgacagagaacaagcacgggcccgcagggagaaacgacgcgaagcagccgcacagaaaagagaaaagcagcccaccggggagaagggcagcagccaccacagggccacgccaaacacccagagccaggggccaggaggccgaagggccaacagagaaaaaacaggaaaccagaaacaaaacaagacgcgaaaaaaggcaaccacggaaggcaacacccagccaccaaaagaacgcaaaccacaaacaggaacgacacaaaaaggggcaaaaaggaaaaccaagaccacaaacacaccacgagggaacaaagggaaccacaccaagccacaaggcaccagccaggaccacagaaaccacaacccaaaggggcacgagggaaaaacaacagagagggcaaacgaagaggagggaaaggacagccgaaaaggaggaacaaaacgcccaacaagagggcgccaagggaaccggcagcggaaaggacaaaaaagaaggacgcccaaagggggagcgcagaccaagggcaagcggcaagcacaggaaccaacaaagcggggaacgggaggaccacaacaaggcccacgccacaaaacgcagggcaaggcgcaaagacacacaaacgaaagggcgaacccaaacggaaggcacgaaggccccacgaaggccggagcagcagagaagagccaggggaggagaagaggaccccaaaaacaaacaaaggccaaccagcggaaggaacaaaaaaggcgagccaaaaaccccaacagcgaaaacaaaggaggagggacccaccaccggggcacaacacggggacaccacagagcccaagaagccgacagaaaggaccgggcacgaaaccccacgacaaagaagagaaaaggaagccgagcaggaaggcaggcacaggaggagcaccagaaaggagcaaaaaaagaggggaagccccacggcaaaagagccgcacaaaaggacacaagaggacaggacacccgcgagccaaccccccaaacccacgccagaagcagcgaaaccccccgaggggcgcaggacaaaaaaggcccaaagcgcaaaacccccccagaggaaccgggaggggagcacaaaggagaacccgcgccccagaggacccacgcaaggcaaggagcaaggggacagagaaccaggcccgaagaagagagaccggggggccagcgggccaccaaggagaaaaacacgcccggacaaggagcccaaaccccggacaaggcagagcaggcacaaaagaacaaccaaaaggcagaacaccgaggagcccacaccaggccgcagaccccggaacagggaggagcagcagcgagcaccacccacaaagaaaaaacgccagggcgagcacaggaccgacaggggaaggacaaccaaacccagggggacacaagcccgcaagggaggaaccccggccgagaaaaggcccaggcccaggggcaaggaggaaggcccaccggcaccggcgaaaccagaggcaaaaggaagcggaggcggcacgcaggccacccggggcccgggcgccccgacgcccgggccgacaaaccggcccaacgagggcccgggaccgagggcccgagacccgggcacacaggagacacagggggggaagaacgcccaaccccacagagcgacacggcagccagaaacccgccacacagagcaaagaggagagcccccccgacggagccgcaaccaaaagcccaggcccgcaaaaaacagcccgacacgccaggagcggcgagaggaggaggcggccgcaagccgcagggagaggcccccaagcccgacagacccgagccagcgaagccgccggggcaggccgccggcacccgggcgccaagagagcgcacagggcgcggcgccgaacccaaaaaacgccgcgcccgcacggccacaaaacgagaaggaccgaggcccggacaacgaagaccagggcaccgccgggagagcgccccaggcccaaagccgggaggaaacgggcaaagcccccaaggagggacagcagaaaagccccgacccgaacaagcaaaagccaacccgccggagcaaagcagcgcggccgggccgcgcggcagccggccaaagcgccccaccaaagcccaacagggagagcggcacaaccggccagcggcaggagaggccagccggcaagccgcaacgcaccaaggaaaaagcaggccgaacggaccgaccggcaagccaagaagacaccggagcgggacacgcccaccccggccccaaagaccggaaagccggaccgcccgggaagaagagcgcgcagccccgcgcagccccgcgcacgccccgcgcacgccccgcgcacccgcgcagccccgcgcacccgcgcagccccgcgcagcgacgcacacgcagggcgggggcccgcaagggcggaccgaagccgacgcccgaggccaacagcaaacggcccgccagccgcggcccaacgaagcagcacaccggcggacccccaaagagcgcccccccagcgccagaggagaaccacgccagagcacaagagcggcccccgagcccaccagcgagagcacaggcccccagagaccccgcaagacccccccccccaacccccaggaccaccaaccaaccccgggcaagacccggaaaggccgaacaggaccaacccgcccaccccccccgcaccgaagagcccgaacaccagaaccgcccgccaaccacgaaacaggaaaagggacaaaagggccaacacagaaaaaacaaggccaaacaccacaccgaagacgcgaaccagaaagcaagacagacacccgaaagcgaccacggacccgccccagcgaaaagcgaacaacaggaacccaacagcgcacgggaaccaaccgcgacccgcagcggcggaagagggacccgcgccagcccgagccgcccggaacggcaccaagaagacgcgccacgaccggccaggaaagacgcaacagaccagaaccgcggcaaagcagcacaccaggagccagaggcaagaagcaagagagagagaaaacgaaaccccgcccaggagagaacgccaggacggcaccccgaggcgcagcccacggccgaggacgcacggggaaggcagagcacaggagagagaaccaccccggcaagcgcagaagaccacagaacacagcgcagcgccacgaacggcgaaggggcgcggccccaacagggcagggacgcgaaacagacaccagaccaaggcaagcaaaggacaacaaaggggcggccagaggcagaggcagccgacacaaggcaggagaggcagcaccagacagacagggcaggaaaagcgagagcacaccacgaagggcagcagaa

SEQ ID NO: 625 - RNA, 690 nt, Mus musculus
gagccgcaggaacacgagaggaagcacagacggaggccgagggggcccaggggagggggagccaggcaggaaaaggaccagacaaggaagaagagacccagaacggggaggagagggcaagggaagcggcgaggaaaaggccccccgccagaaacacgccaccacgcgaggaggcacagaggcgggcacagacaagcccagggaaaccagaaagcaaacccacaggccgcccaagggagcaggaaccaaccgcacaggaggcgggagaggaaggaaagcgggacgacacggcaccaggccaagggaacccccagacccacagggagcgcaacaagaacacaggggaacaccacacacgcggcaagaaccagcaagaagagcacagaacaagaggagggcagcaaacaggcacacaggagagaaaagaaaaaagaagacagagcgccagacacccagaagagggagcagacccacggaggggagccaccaggggcgggagaaccggacccggaagagcagcggggccacccacgagccaccaccagccccaggagagaacaccaggaaaagcaccaaaggcgcacggcagaagaacaaaaagcacccgagaaagacaggaaggaaccaacaccagcacaggcaagaagaacgcccgccccgccaacaccacgcaggagagggcccaccccc

SEQ ID NO: 626 - RNA, 3266 nt, Mus musculus
gcagcggcccgcccggcgcgccaccaccggggaggagagggcgcacgcgccccaggcgcgggcgcgcggggggggagcgggccaggcgcgcggagcgcggccgcaacaaggaggccacgggcacgcccccacagcgccccccacggccaccccccccacccccccagcccccgcaccggcgcgcgccccggcccacgcgcccccagaccgagcccggcccgggacgcacgcccaccccccgaggccagccaggcccaagagacagccggccgcggggcaccgccgggcgggccggcgcagagccgagcgggcgcaacaggaagcacgggcagccggaaagaaggcggacacccagggggcgagcaaaagagagacccaggccgcaacgccaacgcgaccgcaaaggcaacacagggcacccaccccgcccagccccccaagcccgggacaggggggggaccgaccaccacggcagaagacccaccaggaccgccccggcccccagcagcccaaaggggagggggaacgaagaacacgagcccgagaggagcacacagaaagagcacaccccgcggacagcccaaagcgcccgacccacccaaacaaaacgccggggggagagaaggccccgagagcgggggccagcagaggcgcaggagaggcaggagaggggagccgagggggggggggcagacgggccagcaaccccacagcgcggaccagaagaagcgcgcgcgacacagcgggacagaaccgaggccggcaggcgcggagcaaagcgaggcagggccccgggcagccggcccaacccgccgcgggagccgcgcgccgcccgacaccccccaccaaggccacaggagaaagagaagagaaagcagaccgaggcgggaagggcaaaggcacacgccaaacacaacccaaggcccacacagaaagggagagacaagaaaagcaaaccgcaggcgaagcgcggccagcaagaagagccgagccccagggacaccagaggacggcccagcaccacccgcgggcagccacaaagccgaacagcaccagaaagcccacggccgagggcagcacaagacagagagagaaagcaggagagcacgggaaggagcacagggcacaacgcacaagcaggcaacacacacaacaaaaaaagcaggaaagaaaaacagaaggcaccacagccaggccacagagaacagccacaacacacacggggacaccggcacaaacaaggcagaggcacagcaagagggaacacgccgaagccggcaaggaggcgacgcgaggagagaccacggcagcccgcacggaggacaaggcagccggacacagagacccgcacaaaacaaaagcaaaaaaggacacagaaccaacaacacagagagccaaaggcacacacacacacacacacacacacacacacacacacacacacacacaagaacacagcaacaggacacaggacacagaaaccgcagaagagacaccaaagacaggcaggaccaccaacagacacaccaaaacaaacagcaaccccacgcccacccagcaaaggcgcaggcgggacaaaagacaaaagcccacgacaagcagccacaggccaggcacacaaggacacacaaccccaagaggcccacaggcccaaggcagaagggcacaggaagacacacccaggagccccaaaggaccacaggcccgacagcccaccgaaccacacagaccaaggcacaaacagggcagcccggggggggaggacagaagaggccccccacccacaagcgccaaggacacacgccgaagggaaagccagcccaggaacagggcgaaggaagcacagcgccagcgcaccgaacccagcccagggaacaggcagacccagacaggccacagccccagggaccccacggagagcaaggaccccaacccgaagccggacgacaaaggagggaaggccgccccagaaaccggagacaaggaggaagcacaccccaaggacagccagacacaaacaaagagacacaagagcaaggacagggggcgggacacggccggagggcccgaaaaaggcgaaccggagcggcgaagccagaaaaacagaagcaggaaggagaacaaggaaagggccgccccccgcccaaccccacaccagcagcccccccacagggcccaaggggccggcggggccccacagcccacagccccagcaggagcagaaggaggagagaggaaagcccgccgcgacacgcagcaggcgaccgggggaagcgaggaggcgaaggcgggagaagccggcagcgcccccgcccccacacacagcacacagagggcacacgcagccagccccaacacagcaagcaccagcagacacagccaggagcagccacacgagacacacacaggcaccaaaagcacgaggcacagcacgcggacagaaacccaccacggacacgcacaaaaaaaagccacggagcagggcaggggcacagccaacccagcacgggaggcagaggcaggcagacgagcaaggccaccggcacgaaggagccaggacagccagggcacacagagaaacccgccgaaacaaaacaaaacaaaaagccaccgcacacccagaacacgaaaccacaccagcaagcacacgccagcaccacgagaagacgcaccaggccacagaaggaaacgacaccaccagagacgagaaaccaaaaagagcccaagcgagcaagaaggggagggagcagaaaaaaaaaaaggggcacacaccaacccagcacgggaggcagaggcaggcagacgagcgaggccagccggcacacaggagccaggacagccagggcacacagagaaacccgcgaaaaaaaaaaaaaagaagcgaggcccgagagcaggagcgaccaccaggaaaggagacaaccagccgcgggaccccagaaccacaaggaagagagagcacgacccaacgggacccgaccccccgccgagcgagagcacacggcaaaagaagaaaccacggcagagacgggccccagggcccggcgccaaaccacagagaccccgcccgcccacaggcaagacaaaggcgggcgaccgccacaaaaaaaaaaaaaaaaaaaaaaaaaaaaaaaccgcggggaaccaggaagagcgcagaccacccaagggcacaggaaccacaggacaaacgcccaaaaagagcccggaagcagcccccgagcagaccccacaaaccgggaagacacccacaagcaggaaggggg

SEQ ID NO: 627 - RNA, 8900 nt, Mus musculus
gagcggaaccgcgggaagacagaaacggcgaggaagcggaaacgcgcgacccagccgcccacgaaggggcagggcagccgaggccggacgccggacgcccagcagaaacagagaaggccagcccaacgccaaggaagccgcaggaacagccagcccaaggccccagaccacagagcgaggaacaggccaggaagagcaagaagcgacagccgcaacggcaagagccaaaggagcaggagaaacaaggaggaagagcccggaaagggaaaaacccaggagggcggaggcacaaaagaagggaacccaggaacccgccgagcccaaccaaacacaccaccgacgcagggaacgcggcacaggaacaaggacacacccagggaggagcggggaaccgaaggaagagaccgggagggacacagaacgagcggccgccccgcacagggagacagacacagcagccgggacccacagcagcgagaagcgccgaaagccaccagggaaaggcgcaaaccccgggccaagccgcaaggcacaaaggggaggacgagccagcacacagcacgcaggcagaggcaggaggaccaggagcaaggcacagcacaggggggaggccagcgagccacgaagagcacaacgaacaaacaaacaaaggcaaaagcaaggggccccaacccaccgagaccgcccgagacagaagagaagaaccggcccagagcccccagcaagcagcacagaaaaggacagaaaccccccgagagcggcgaagaaccgagagggaagacggaaagcccaccccccagacgccggggagagggggagcggccaccgggagagcacagaagaaacgacacacggaggacaagagaacagccaagaagcacccccgccgggggccccccgcgggggccagagggccccggaagcccaggaccagcaggccggcccgccccaaccagggggcagggggccgcacgcccccagcagccccgggacagcacccgcccccccagggaagagggcgcgcgggcaacagagggaaaaaacacacgcaaaggaaacagccgaagaccaaaagaaaagcaccacacgacaaaagcaacaacaacaacaaaaaccaagaacaccccccgccccccaaaaacaacaggaaggcagacaggccagcaaaaaacaaaccacaaaaaggaaggggggggggggggaaacaaaagaacaggcaaaagaaaagcaagccaaccccacgacaacagcaccacagacaaaaaagccaaaggcaggggcggaggcgcacaggcagggccagggagacaagaaaggccagccgaagcggagagaggcagcggagcccgaggggaaggaacgaaccagccggcaagagaaaagaaaccccagccccgagccagccacccagcccagagccggccagccagcgaccagaaagcgcgaacaaaaggccgcggaaagagaggggaaaaacacggacacacagccgaaccccagaaaacacccaggagggagggaaagggcccagaggcaagaggagccacgacaacccgagaacgaaggaaagcacaacgcacccacgaaaagcaccaacacagagccgcagggggccacagacaggaaggggaccccccagaaacagcacggggcacaaccccccgcccgggccagagagcacagggagggacggaaagaccccacgaaaaagcagagccaaaacccacagaggaggaacgaagggagcgaccgagcagggggaggcaggccaaagaagggggcagagagaggcagaccaggcccggcagggggcgcaccaccgaacccaacccagggaaccaagccggcagggggacaaaaaaaaaaacaaaaaagaccaaaagaagaacacgaaaaaggcgaccaagaagaagcaacaaaacaacagcaaaagacggcaaggaaagaaagagcaagaaaacggaaagcggaagagaaacggaaaacaacaaaacaacaagagaagacaaagagggacagccaaagacgagcaccgagagaacagagaagcccccagggagaaggagaaaaccccagggaggagggggggcgggacccagaaaaggaaggaggagacaccaccaaaggcgccaccagggccaccccaagggcgcccgcaacaggagcaccacgccgaaacagggacaccaacagggcccaaccaagcgggaacagaggaaggacagcagagaggccaggacccaagaaagggagaagaggagcacgggcgcaggcgccagacccaaaccaggagccacgagaaaaaaacacaagccagaaggcaagggacaggacacagggcaaccaagagagggagggaaaaggcagaaggacggaggcgagccagcaagagagacagagagccacagccacacgcacggggaaaacagagaccgcccggggcggaagacagaggagaccaacagaaagacggcaccgaggcacaggcaacggacacaccgggcacaccaaccagaaccaccaacggcggccaaaaaagaacccccacgccaaagccgcgcccccaccaacagcaacgcgagaccagagccaggcaggagccagagggagaaacagggaggggagagggggcccagacaaaagggaagggaacagagggggcgcgggggcagggagacaggagaacagagagcagagaacgcgcaaggcgccggaggcccagaagcacccccaagagggagccacacaaacagcccaacagcaagccacaagcaaagacaggcccccgacggcaggccagccaagggggcacgggggaaccagcgaagcgcggccacagcacccccgcccccaaccccggcagccacacaaggaagagccgggaggagcgccggccagaagaagagggaaagacacccgcccagcaggccccagagacagcaccaacgaaaaaaaaaaaaaaaaaagagccaacagcccaggggccacagcgaagaacaccacggcacgaccgagccagaggagacggagagcgaaaagaaccacccgaagagcacaaggggaacacaaaaaagagacagcacagcagggccggaccccagaaaaagaaaaaggaaagaggcacacacaaacccgacagcagacacacggaaaaccacaggggaggaaaggggggccaccaaacgggccccacgaaacagagccaacggaagaaacaaagcaccaaaaaagccccagagcacacacaggaaaaggcccagaaacaaacgaagacccagaaagaccaacccaccgaacaaggaccaggccaacccccacgaacagcgggccaccgggccggcacgggacaacaccccggcaacgccccccccacgggcagaaaaaccaggaaaacagccagaccaggaagggcgcgccaagcccccaaagggaaacaccaacgcagcaaggagccaccgcaggcaaaaggagcaacaggcaaagggagggacagccaagcaacgccaccaggcgaggcacgaagcaacagacggggaggcaagccgaaaagagcagaagggggagagacagggagggaagcagagagaagccagcaacccagacaacagaaacaaccgaggggacacgaaaacaacaaggcaaaccaacaaagacccggaacaccagacaggcaaaacaagaagggaggcaaggagccacggacccggcgggagccaggacgacccgaaccccaagggcagcaaagaagcgaagaagaaaagacagagaaaggagcgagcaaccacagggacccggaacccggggggcccaggcgaccaaagccgagccaaggcgacccgacccgacgccgccccaccaaaggcacgcagccagaaacagaccaagagaaacccggggccaaacacagacaagccccaccaacgagcacacccagcccacccggcgaaccaaaaagaaaaaaagaccacccaaagaagaaaggaaccacagcacaaacgggcagagagccagacaagccgaagaggccaccaaccccacacgcaacaaggcagcgaacagcgccaaaggcgacaccagaagacacgggcaaggaagggcaagcagaacaaaaagggaacagcagagcagaaggccacaagaaaagacgccacaaccggagagacccagaaggcggacacaaaccacgaccgcccaaaaaggaagcaaacaacagagagagaagggggggcagcacagaggggcacccacagggcagggggggaccgaggccagagccggaggcccaggcaccaccacagaggggggggcgagacagcccagggcccggaaccagaagagacccggcggccaggaccccacccgcccacagagcaggaacagagcaagccacaggcgggggggggagcggaaacaaacaccaggccaggcacaagggagccggcccacgagcgccccagcaggagaaggggaggaaaagcggggggccccaggacaccccaggagcccaccacccaacgaaggggggcacgcccgcacggacaaacggcaaaagagcaagaaaaggagacgagaaagaggcagacgaacaggaagcccaccaacgcaaaaaaagcaaaaaaaacagaggcggaagcaggcgcaggacccaaggcagaagaggggcagaccacgagagcggagcacaggcaaggacgcgagggagcgggaacgaaccaagccccagaaccaaccaccaaccacccacccccacaaccccaaagaaaaagcccccaacagccgacccaggaccacaggccaaaagggaccgagggcgagaccaagccccgaccagccggcggaagaaagccccaaaacggccgaagaccaaggggaaggaaaccccagcccgaacagcagcggcccgcgagagggaaggaccccaggggagggcccacagacccagcaaacccaggcccgccacagagcaaacacaaacaaccccccgcagaacaaagcagccccccgaggagggggcacgggcgacacgaacaaagaacaggagccggaaagcccacgcgagaccgccgcgagaaccaaggccccagggggcccgccccccgacgacagccgaccgcccgccgaaaccccacaaaaacccaaagacacaaggcgcaaaaaagagagacacaagcaaggaccaggggaggacagggagaaagagccaacgacaaaagaggcgccagccaccaggggacgcccagccgcaagggaggccgaccagagaagcagccagaacggaacagccaccgacaacccaccgggccccccccccccaccccccaagcccccggcccccccccccgccgcccccggccgccgccgcgcgccaccgcccccccccacacccccccccagaggcaaaaaccgcaacccaaagacggaccaaagaacaccaggcaccacagcacgggcgaacgagaaaaaaaggaacagaacacaggcaaaaggcaaagcccaggcgacgaaagcgcaggaacaggccgcgccagggaggaccgaggacacagaacccacaaaaacagcgggcacaaaacccacacacagaagaaagcgacaacagcaaagggcccaggcagaccccaaaacccccagaaaaagagccacaacacggggaaccagggcaaggcggggagaacccagcaggcagccagaacggaccagccagccaccaggccaggcagaacaaaaaagaaaaagaacgggaggaagacaagaaggggcggccggaccccaaaaacacacacacacacacacacacacacacacacacacacacacacacgcagacagggcagcacacacagaacacacaacaccaacaaaaagcaagcagcccaaaagacaaaacagaacgagaaaaccagaggggccaagccagaaaaacagccaaagacagcgaaaccaggaaggaccaacggagggaagaacaccaacacagcaggagagaagccgcggcccaaagcgcagccaccacaacggcagacggaacgccaaccccaggaagaaaggggacaacacagaagagcacagacacaagggccagccccagggcggaaccaacacgaccgagggaagccagcagaagcccaagcaagcccaagggaggagccacacgagaccagcaagacaagcggaggaggagcagcaacaggcacacagacgcaggaagaggcaggagacgcagcacccagccccgaagccaaagcagagcagaaaggggacaagaggccccgcaacgagaagaagccaaaaaagacagcacacacaccagaagcggaaaacacgaggaagaacggaggcaacaaacaagcaaaaaagagcaaaagacaacaagcccacgcacgagagaacaaccgcccggcgccacagaaggagaggagaggggccccaggcgagaaaggcaacagcgacaagcccccacccaacccgcccagcccagacacaagaccccagagccacgcaggggcacaccgacaggcggggaccccacaaaggcgcaagacccaaccaccagggaaagaagacacacagagcgaggacgggagacaggggccgacaccgaaacaagagcaagagggaacgagccgacagggccaaaacacacccaaacaaggagagggccagcaaggggagaggggcaaagggccgaggaggagggaagacggacccgcagaaacccagcaaggaacgaggagcggcggcaaaacccgaccagaccgcgccaaccaggaaacagaaaggaacaaagcagcccaggcgaacgcccccccccccagcaccacggcgacacacagaagccagcaacaaccagagcaacaccaaagaggccaacagcagagacggccaaggaccagccgaccccccaaagaacggaagacagcccgcccaaagcacacgagcgaacagcaggcccccacccacccggaccccacgggcgaccaggcaggcggaggagaccagccgggggcccaccccgaggagagaccagggaccaagggaagaaaaccaaaagaagaggagaagggagggggaaggagggcagggggagaacgaaggcgaaggggggaagcagaggggcaaaagagaaaaggaggaaagaagccccaaagaagaaaaaaaaaaagaagcaaaaaagaaaaaaaaagacaaaaaaggcccaaaagcccagcaagaacccgccggaccccccggccccacgcccccacgccccgcccccggccgaacccccccgcccagagcccgcggaaaggcagaaagcaaaaagccaacagaaaaggggacaaaaagcaaaaccagggcccggcaaacagacacagagaagagcaccagccccagcacgggaggacgaacagcccagcacgggaagcgaggcacacccgcacagagggggaacaggccccagaggggagaagcagcagagagcgagcgggcgccgggcagaacagccagcacacgaggagcacaggaaggaagggacggacgggaaggcacagaacgcagcgaaagaggaaaagacgcccaggacgcgaaaggcagacggaagaacgacaggccccaagagaaaacacccaagcaagaaaaaaagaaaagaacgacaaaggcagggggacaagggagaagggggcacggccaaaggggaagggaggacacaaagcaagagacacgaggccggaccaccaaggagccgcaggcacaggcccacagggcagggaacggccccagaaggacccccaggagcgccacagaggagaagccacccaaccagaagaggcacagagccgcaggcgggggaggcgagcgcgaagccagcccagcgcaagcgcgccagcggcccgcccaacgggccccgggagcaaaaagccagacaagggcaaagaacggacaagcagagcaccggaccgaagccgggaaacaggcaaggcgaacccgccagaccgcggaccgccgcacggcccccaacagcccccccccgacccccggacaagcggccgggggacaagcggaaagagaaaaacgcgggaacccaaaagaagcacacccaagcagacagcagagacaaaaggggaacagaaaaaaagaaaagaaaagagaaacaaagacggagaaaggcggcgggcaagaaaccgggcacacagagcagaaagccagacgcagacacaggcagccgcgagcaacaacaaaaaagaagaacacagagcaagcaccgacacaacaaaacaccggaaggcagaagagagggaaccgacaggggccaggggaaaaaaaagaagaggcagcccacgaggcggcgccacccaggcggccgggcaaaagagaaagaaaggagcgagaacaacacaacacacccaccgccgccaggcgacggcaccaaccgccgacgccccaggagacccaaccggaagagcccaagacggaccccccgacaaaggcgcagggaaccgaccgaagcagcaaagcagggcaggccaggacaacccgggcgcccaggcagaaaaccacaaccaagcagaccagaccgaggagagacaaaacgacccgaagagccgccagcagaaagaggcaccaccacggcccaccgagggcagcgcgggacggaagagcagaagagacgcccagcacaccacgcccgacaggagggagggccgcggacaggagcgaaacgagaaacaccgccaaaccaggcagaggacccagaggcgagaaaaaaaaagacaaacaaaacccgggggggacagggccccgagccagcgccccggggagcagaccagacgccgaaccagacaaccagaaccacaacagcaagcccggagccggacccaccagaccaagaacacagcgagacagccacaagccccaaccca

(The sequence listing continues in the following parts.)
